United States Patent Application Publication US 2014/0004565 A1 - sequence listing, part 76

SEQ ID NO: 1857299 - RNA, 19 nt, Artificial Sequence
  Description of Artificial Sequence: Synthetic oligonucleotide
uugagaaagcccuuccguu

SEQ ID NO: 1857300 - RNA, 19 nt, Artificial Sequence
  Description of Artificial Sequence: Synthetic oligonucleotide
uccaaagcaccuucaggcu

SEQ ID NO: 1857301 - RNA, 19 nt, Artificial Sequence
  Description of Artificial Sequence: Synthetic oligonucleotide
cacucacucgucucgagug

SEQ ID NO: 1857302 - RNA, 19 nt, Artificial Sequence
  Description of Artificial Sequence: Synthetic oligonucleotide
agcccagccuucuuucugg

SEQ ID NO: 1857303 - RNA, 19 nt, Artificial Sequence
  Description of Artificial Sequence: Synthetic oligonucleotide
gaaagcaugcuuacucaac

SEQ ID NO: 1857304 - RNA, 19 nt, Artificial Sequence
  Description of Artificial Sequence: Synthetic oligonucleotide
uuacucaacugugugcaac

SEQ ID NO: 1857305 - RNA, 19 nt, Artificial Sequence
  Description of Artificial Sequence: Synthetic oligonucleotide
acaucacagccauacuuca

SEQ ID NO: 1857306 - RNA, 19 nt, Artificial Sequence
  Description of Artificial Sequence: Synthetic oligonucleotide
agaaagcaugcuuacucaa

SEQ ID NO: 1857307 - RNA, 19 nt, Artificial Sequence
  Description of Artificial Sequence: Synthetic oligonucleotide
uggcccuacaauuacccaa

SEQ ID NO: 1857308 - RNA, 19 nt, Artificial Sequence
  Description of Artificial Sequence: Synthetic oligonucleotide
guuccaacauauucuaaaa

SEQ ID NO: 1857309 - RNA, 19 nt, Artificial Sequence
  Description of Artificial Sequence: Synthetic oligonucleotide
cugaaaccaucaucugagg

SEQ ID NO: 1857310 - RNA, 19 nt, Artificial Sequence
  Description of Artificial Sequence: Synthetic oligonucleotide
cagagagccuccaagagaa

SEQ ID NO: 1857311 - RNA, 19 nt, Artificial Sequence
  Description of Artificial Sequence: Synthetic oligonucleotide
aaucccucugguugucaca

SEQ ID NO: 1857312 - RNA, 19 nt, Artificial Sequence
  Description of Artificial Sequence: Synthetic oligonucleotide
uaauaaccuggcccuacaa

SEQ ID NO: 1857313 - RNA, 19 nt, Artificial Sequence
  Description of Artificial Sequence: Synthetic oligonucleotide
uacacaaauggcccuccaa

SEQ ID NO: 1857314 - RNA, 19 nt, Artificial Sequence
  Description of Artificial Sequence: Synthetic oligonucleotide
ggauggaaacaguuccugg

SEQ ID NO: 1857315 - RNA, 19 nt, Artificial Sequence
  Description of Artificial Sequence: Synthetic oligonucleotide
uaaccuggcccuacaauua

SEQ ID NO: 1857316 - RNA, 19 nt, Artificial Sequence
  Description of Artificial Sequence: Synthetic oligonucleotide
uuaccucagauauuuuguu

SEQ ID NO: 1857317 - RNA, 19 nt, Artificial Sequence
  Description of Artificial Sequence: Synthetic oligonucleotide
ucuccacaacacucacucg

SEQ ID NO: 1857318 - RNA, 19 nt, Artificial Sequence
  Description of Artificial Sequence: Synthetic oligonucleotide
uuguugcuaagcgaccuug

SEQ ID NO: 1857319 - RNA, 19 nt, Artificial Sequence
  Description of Artificial Sequence: Synthetic oligonucleotide
aggccagaacuuuugauua

SEQ ID NO: 1857320 - RNA, 19 nt, Artificial Sequence
  Description of Artificial Sequence: Synthetic oligonucleotide
gcaagguguaaugugaagc

SEQ ID NO: 1857321 - RNA, 19 nt, Artificial Sequence
  Description of Artificial Sequence: Synthetic oligonucleotide
gguccaaagcaccuucagg

SEQ ID NO: 1857322 - RNA, 19 nt, Artificial Sequence
  Description of Artificial Sequence: Synthetic oligonucleotide
gacaucgguccaaagcacc

SEQ ID NO: 1857323 - RNA, 19 nt, Artificial Sequence
  Description of Artificial Sequence: Synthetic oligonucleotide
gggacaucgguccaaagca

SEQ ID NO: 1857324 - RNA, 19 nt, Artificial Sequence
  Description of Artificial Sequence: Synthetic oligonucleotide
guugucacagauggucccg

SEQ ID NO: 1857325 - RNA, 19 nt, Artificial Sequence
  Description of Artificial Sequence: Synthetic oligonucleotide
uuccguuguugcuaagcga

SEQ ID NO: 1857326 - RNA, 19 nt, Artificial Sequence
  Description of Artificial Sequence: Synthetic oligonucleotide
ccugugaauuaauuuacac

SEQ ID NO: 1857327 - RNA, 19 nt, Artificial Sequence
  Description of Artificial Sequence: Synthetic oligonucleotide
aguauccaaagugauuuau

SEQ ID NO: 1857328 - RNA, 19 nt, Artificial Sequence
  Description of Artificial Sequence: Synthetic oligonucleotide
agauauuuuguuagaguaa

SEQ ID NO: 1857329 - RNA, 19 nt, Artificial Sequence
  Description of Artificial Sequence: Synthetic oligonucleotide
uaccucagauauuuuguua

SEQ ID NO: 1857330 - RNA, 19 nt, Artificial Sequence
  Description of Artificial Sequence: Synthetic oligonucleotide
gcacacgggaaacagcagg

SEQ ID NO: 1857331 - RNA, 19 nt, Artificial Sequence
  Description of Artificial Sequence: Synthetic oligonucleotide
agaggaguccacuggcaca

SEQ ID NO: 1857332 - RNA, 19 nt, Artificial Sequence
  Description of Artificial Sequence: Synthetic oligonucleotide
uaaugugaagcuggagaac

SEQ ID NO: 1857333 - RNA, 19 nt, Artificial Sequence
  Description of Artificial Sequence: Synthetic oligonucleotide
aaauggcccuccaauuucu

SEQ ID NO: 1857334 - RNA, 19 nt, Artificial Sequence
  Description of Artificial Sequence: Synthetic oligonucleotide
gaacauagcaucugcuggu

SEQ ID NO: 1857335 - RNA, 19 nt, Artificial Sequence
  Description of Artificial Sequence: Synthetic oligonucleotide
cauaauaaccuggcccuac

SEQ ID NO: 1857336 - RNA, 19 nt, Artificial Sequence
  Description of Artificial Sequence: Synthetic oligonucleotide
auagcaucugcuggucccg

SEQ ID NO: 1857337 - RNA, 19 nt, Artificial Sequence
  Description of Artificial Sequence: Synthetic oligonucleotide
uguccuuccugugaauuaa

SEQ ID NO: 1857338 - RNA, 19 nt, Artificial Sequence
  Description of Artificial Sequence: Synthetic oligonucleotide
uuacacaaauggcccucca

SEQ ID NO: 1857339 - RNA, 19 nt, Artificial Sequence
  Description of Artificial Sequence: Synthetic oligonucleotide
agcaggccucuuuggaagg

SEQ ID NO: 1857340 - RNA, 19 nt, Artificial Sequence
  Description of Artificial Sequence: Synthetic oligonucleotide
cugugcuauugagaaagcc

SEQ ID NO: 1857341 - RNA, 19 nt, Artificial Sequence
  Description of Artificial Sequence: Synthetic oligonucleotide
ucuuuggaaggcacagcau

SEQ ID NO: 1857342 - RNA, 19 nt, Artificial Sequence
  Description of Artificial Sequence: Synthetic oligonucleotide
uggaugaaggugguuuaca

SEQ ID NO: 1857343 - RNA, 19 nt, Artificial Sequence
  Description of Artificial Sequence: Synthetic oligonucleotide
gcaacacacguguuuauac

SEQ ID NO: 1857344 - RNA, 19 nt, Artificial Sequence
  Description of Artificial Sequence: Synthetic oligonucleotide
cugugugcaacuuuaaaau

SEQ ID NO: 1857345 - RNA, 19 nt, Artificial Sequence
  Description of Artificial Sequence: Synthetic oligonucleotide
ggaaacaguuccuggcacc

SEQ ID NO: 1857346 - RNA, 19 nt, Artificial Sequence
  Description of Artificial Sequence: Synthetic oligonucleotide
acguguuuauacauaauuu

SEQ ID NO: 1857347 - RNA, 19 nt, Artificial Sequence
  Description of Artificial Sequence: Synthetic oligonucleotide
gguucugauuucucugugc

SEQ ID NO: 1857348 - RNA, 19 nt, Artificial Sequence
  Description of Artificial Sequence: Synthetic oligonucleotide
uggcaagguguaaugugaa

SEQ ID NO: 1857349 - RNA, 19 nt, Artificial Sequence
  Description of Artificial Sequence: Synthetic oligonucleotide
agugcaacacacguguuua

SEQ ID NO: 1857350 - RNA, 19 nt, Artificial Sequence
  Description of Artificial Sequence: Synthetic oligonucleotide
caacacacguguuuauaca

SEQ ID NO: 1857351 - RNA, 19 nt, Artificial Sequence
  Description of Artificial Sequence: Synthetic oligonucleotide
cacaacacucacucgucuc

SEQ ID NO: 1857352 - RNA, 19 nt, Artificial Sequence
  Description of Artificial Sequence: Synthetic oligonucleotide
uggcauagcucucccucca

SEQ ID NO: 1857353 - RNA, 19 nt, Artificial Sequence
  Description of Artificial Sequence: Synthetic oligonucleotide
ccuacaauuacccaagugu

SEQ ID NO: 1857354 - RNA, 19 nt, Artificial Sequence
  Description of Artificial Sequence: Synthetic oligonucleotide
agaguuacugaagcacugu

SEQ ID NO: 1857355 - RNA, 19 nt, Artificial Sequence
  Description of Artificial Sequence: Synthetic oligonucleotide
guugcuaagcgaccuugca

SEQ ID NO: 1857356 - RNA, 19 nt, Artificial Sequence
  Description of Artificial Sequence: Synthetic oligonucleotide
caaagugauuuaucuuuga

SEQ ID NO: 1857357 - RNA, 19 nt, Artificial Sequence
  Description of Artificial Sequence: Synthetic oligonucleotide
ugcagaugccuggaaaauc

SEQ ID NO: 1857358 - RNA, 19 nt, Artificial Sequence
  Description of Artificial Sequence: Synthetic oligonucleotide
gagagccuccaagagaaga

SEQ ID NO: 1857359 - RNA, 19 nt, Artificial Sequence
  Description of Artificial Sequence: Synthetic oligonucleotide
ucccguugcuaccuuugga

SEQ ID NO: 1857360 - RNA, 19 nt, Artificial Sequence
  Description of Artificial Sequence: Synthetic oligonucleotide
aggugaacugcagaugccu

SEQ ID NO: 1857361 - RNA, 19 nt, Artificial Sequence
  Description of Artificial Sequence: Synthetic oligonucleotide
acacucacucgucucgagu

SEQ ID NO: 1857362 - RNA, 19 nt, Artificial Sequence
  Description of Artificial Sequence: Synthetic oligonucleotide
uacuacagauuguuuuauu

SEQ ID NO: 1857363 - RNA, 19 nt, Artificial Sequence
  Description of Artificial Sequence: Synthetic oligonucleotide
gcuaacaagaggccagaac

SEQ ID NO: 1857364 - RNA, 19 nt, Artificial Sequence
  Description of Artificial Sequence: Synthetic oligonucleotide
caaucccucugguugucac

SEQ ID NO: 1857365 - RNA, 19 nt, Artificial Sequence
  Description of Artificial Sequence: Synthetic oligonucleotide
uggucuccacaacacucac

SEQ ID NO: 1857366 - RNA, 19 nt, Artificial Sequence
  Description of Artificial Sequence: Synthetic oligonucleotide
uucacacagccugguuugg

SEQ ID NO: 1857367 - RNA, 19 nt, Artificial Sequence
  Description of Artificial Sequence: Synthetic oligonucleotide
uccuuccugugaauuaauu

SEQ ID NO: 1857368 - RNA, 19 nt, Artificial Sequence
  Description of Artificial Sequence: Synthetic oligonucleotide
uggcaaucccucugguugu

SEQ ID NO: 1857369 - RNA, 19 nt, Artificial Sequence
  Description of Artificial Sequence: Synthetic oligonucleotide
gaacccucaucccucaggu

SEQ ID NO: 1857370 - RNA, 19 nt, Artificial Sequence
  Description of Artificial Sequence: Synthetic oligonucleotide
aacccucaucccucaggug

SEQ ID NO: 1857371 - RNA, 19 nt, Artificial Sequence
  Description of Artificial Sequence: Synthetic oligonucleotide
cccguugcuaccuuuggag

SEQ ID NO: 1857372 - RNA, 19 nt, Artificial Sequence
  Description of Artificial Sequence: Synthetic oligonucleotide
accggcaggaaugugcaca

SEQ ID NO: 1857373 - RNA, 19 nt, Artificial Sequence
  Description of Artificial Sequence: Synthetic oligonucleotide
gcuuacucaacugugugca

SEQ ID NO: 1857374 - RNA, 19 nt, Artificial Sequence
  Description of Artificial Sequence: Synthetic oligonucleotide
gucauggcauagcucuccc

SEQ ID NO: 1857375 - RNA, 19 nt, Artificial Sequence
  Description of Artificial Sequence: Synthetic oligonucleotide
agccuccaagagaagacuc

SEQ ID NO: 1857376 - RNA, 19 nt, Artificial Sequence
  Description of Artificial Sequence: Synthetic oligonucleotide
acucacucgucucgaguga

SEQ ID NO: 1857377 - RNA, 19 nt, Artificial Sequence
  Description of Artificial Sequence: Synthetic oligonucleotide
cuuuauacuacagauuguu

SEQ ID NO: 1857378 - RNA, 19 nt, Artificial Sequence
  Description of Artificial Sequence: Synthetic oligonucleotide
ggcaccugaaaccaucauc

SEQ ID NO: 1857379 - RNA, 19 nt, Artificial Sequence
  Description of Artificial Sequence: Synthetic oligonucleotide
cagacacacagcuggucuc

SEQ ID NO: 1857380 - RNA, 19 nt, Artificial Sequence
  Description of Artificial Sequence: Synthetic oligonucleotide
uaguauccaaagugauuua

SEQ ID NO: 1857381 - RNA, 19 nt, Artificial Sequence
  Description of Artificial Sequence: Synthetic oligonucleotide
ccuggcccuacaauuaccc

SEQ ID NO: 1857382 - RNA, 19 nt, Artificial Sequence
  Description of Artificial Sequence: Synthetic oligonucleotide
ugauuacagagagccucca

SEQ ID NO: 1857383 - RNA, 19 nt, Artificial Sequence
  Description of Artificial Sequence: Synthetic oligonucleotide
gucccguugcuaccuuugg

SEQ ID NO: 1857384 - RNA, 19 nt, Artificial Sequence
  Description of Artificial Sequence: Synthetic oligonucleotide
ggcaagguguaaugugaag

SEQ ID NO: 1857385 - RNA, 19 nt, Artificial Sequence
  Description of Artificial Sequence: Synthetic oligonucleotide
ccauuuguuccuucaggag

SEQ ID NO: 1857386 - RNA, 19 nt, Artificial Sequence
  Description of Artificial Sequence: Synthetic oligonucleotide
aagcgaccuugcaaacuuc

SEQ ID NO: 1857387 - RNA, 19 nt, Artificial Sequence
  Description of Artificial Sequence: Synthetic oligonucleotide
ucacucgucucgagugaac

SEQ ID NO: 1857388 - RNA, 19 nt, Artificial Sequence
  Description of Artificial Sequence: Synthetic oligonucleotide
gaggugaacugcagaugcc

SEQ ID NO: 1857389 - RNA, 19 nt, Artificial Sequence
  Description of Artificial Sequence: Synthetic oligonucleotide
accuagggugaagacagga

SEQ ID NO: 1857390 - RNA, 19 nt, Artificial Sequence
  Description of Artificial Sequence: Synthetic oligonucleotide
cacguguuuauacauaauu

SEQ ID NO: 1857391 - RNA, 19 nt, Artificial Sequence
  Description of Artificial Sequence: Synthetic oligonucleotide
caugcuuacucaacugugu

SEQ ID NO: 1857392 - RNA, 19 nt, Artificial Sequence
  Description of Artificial Sequence: Synthetic oligonucleotide
cuccacaacacucacucgu

SEQ ID NO: 1857393 - RNA, 19 nt, Artificial Sequence
  Description of Artificial Sequence: Synthetic oligonucleotide
guguaaugugaagcuggag

SEQ ID NO: 1857394 - RNA, 19 nt, Artificial Sequence
  Description of Artificial Sequence: Synthetic oligonucleotide
gaaggugguuuacauuuau

SEQ ID NO: 1857395 - RNA, 19 nt, Artificial Sequence
  Description of Artificial Sequence: Synthetic oligonucleotide
aguguccuuccugugaauu

SEQ ID NO: 1857396 - RNA, 19 nt, Artificial Sequence
  Description of Artificial Sequence: Synthetic oligonucleotide
ggaucaugacugaaacuug

SEQ ID NO: 1857397 - RNA, 19 nt, Artificial Sequence
  Description of Artificial Sequence: Synthetic oligonucleotide
aaguguccuuccugugaau

SEQ ID NO: 1857398 - RNA, 19 nt, Artificial Sequence
  Description of Artificial Sequence: Synthetic oligonucleotide
ggcaguaccuggugggccc

SEQ ID NO: 1857399 - RNA, 19 nt, Artificial Sequence
  Description of Artificial Sequence: Synthetic oligonucleotide
uggcaguaccuggugggcc

SEQ ID NO: 1857400 - RNA, 19 nt, Artificial Sequence
  Description of Artificial Sequence: Synthetic oligonucleotide
ggcccuacaauuacccaag

SEQ ID NO: 1857401 - RNA, 19 nt, Artificial Sequence
  Description of Artificial Sequence: Synthetic oligonucleotide
acucgucucgagugaacau

SEQ ID NO: 1857402 - RNA, 19 nt, Artificial Sequence
  Description of Artificial Sequence: Synthetic oligonucleotide
acaucgguccaaagcaccu

SEQ ID NO: 1857403 - RNA, 19 nt, Artificial Sequence
  Description of Artificial Sequence: Synthetic oligonucleotide
ucauaauaaccuggcccua

SEQ ID NO: 1857404 - RNA, 19 nt, Artificial Sequence
  Description of Artificial Sequence: Synthetic oligonucleotide
gcaggaaugugcacacggg

SEQ ID NO: 1857405 - RNA, 19 nt, Artificial Sequence
  Description of Artificial Sequence: Synthetic oligonucleotide
aaauuaccucagauauuuu

SEQ ID NO: 1857406 - RNA, 19 nt, Artificial Sequence
  Description of Artificial Sequence: Synthetic oligonucleotide
ccguugcuaccuuuggagg

SEQ ID NO: 1857407 - RNA, 19 nt, Artificial Sequence
  Description of Artificial Sequence: Synthetic oligonucleotide
cguugcuaccuuuggaggc

SEQ ID NO: 1857408 - RNA, 19 nt, Artificial Sequence
  Description of Artificial Sequence: Synthetic oligonucleotide
gcaugcuuacucaacugug

SEQ ID NO: 1857409 - RNA, 19 nt, Artificial Sequence
  Description of Artificial Sequence: Synthetic oligonucleotide
agcgaccuugcaaacuuca

SEQ ID NO: 1857410 - RNA, 19 nt, Artificial Sequence
  Description of Artificial Sequence: Synthetic oligonucleotide
gcaccugaaaccaucaucu

SEQ ID NO: 1857411 - RNA, 19 nt, Artificial Sequence
  Description of Artificial Sequence: Synthetic oligonucleotide
guucccaggugaugaguuc

SEQ ID NO: 1857412 - RNA, 19 nt, Artificial Sequence
  Description of Artificial Sequence: Synthetic oligonucleotide
aucaugacugaaacuugaa

SEQ ID NO: 1857413 - RNA, 19 nt, Artificial Sequence
  Description of Artificial Sequence: Synthetic oligonucleotide
ugagugcaacacacguguu

SEQ ID NO: 1857414 - RNA, 19 nt, Artificial Sequence
  Description of Artificial Sequence: Synthetic oligonucleotide
gcuauugagaaagcccuuc

SEQ ID NO: 1857415 - RNA, 19 nt, Artificial Sequence
  Description of Artificial Sequence: Synthetic oligonucleotide
caucaucugaggccugaca

SEQ ID NO: 1857416 - RNA, 19 nt, Artificial Sequence
  Description of Artificial Sequence: Synthetic oligonucleotide
cuggcaguaccuggugggc

SEQ ID NO: 1857417 - RNA, 19 nt, Artificial Sequence
  Description of Artificial Sequence: Synthetic oligonucleotide
gaugccuggaaaaucuguu

SEQ ID NO: 1857418 - RNA, 19 nt, Artificial Sequence
  Description of Artificial Sequence: Synthetic oligonucleotide
agguggaucaugacugaaa

SEQ ID NO: 1857419 - RNA, 19 nt, Artificial Sequence
  Description of Artificial Sequence: Synthetic oligonucleotide
auaagaguuccaacauauu

SEQ ID NO: 1857420 - RNA, 19 nt, Artificial Sequence
  Description of Artificial Sequence: Synthetic oligonucleotide
agcuggagaacuggcagua

SEQ ID NO: 1857421 - RNA, 19 nt, Artificial Sequence
  Description of Artificial Sequence: Synthetic oligonucleotide
gagugcaacacacguguuu

SEQ ID NO: 1857422 - RNA, 19 nt, Artificial Sequence
  Description of Artificial Sequence: Synthetic oligonucleotide
cagcccagccuucuuucug

SEQ ID NO: 1857423 - RNA, 19 nt, Artificial Sequence
  Description of Artificial Sequence: Synthetic oligonucleotide
ggagaacuggcaguaccug

SEQ ID NO: 1857424 - RNA, 19 nt, Artificial Sequence
  Description of Artificial Sequence: Synthetic oligonucleotide
ggugaacugcagaugccug

SEQ ID NO: 1857425 - RNA, 19 nt, Artificial Sequence
  Description of Artificial Sequence: Synthetic oligonucleotide
gaagcacugugaggcuggc

SEQ ID NO: 1857426 - RNA, 19 nt, Artificial Sequence
  Description of Artificial Sequence: Synthetic oligonucleotide
acggcuggcaagguguaau

SEQ ID NO: 1857427 - RNA, 19 nt, Artificial Sequence
  Description of Artificial Sequence: Synthetic oligonucleotide
cacagccauacuucacaca

SEQ ID NO: 1857428 - RNA, 19 nt, Artificial Sequence
  Description of Artificial Sequence: Synthetic oligonucleotide
cacucgucucgagugaaca

SEQ ID NO: 1857429 - RNA, 19 nt, Artificial Sequence
  Description of Artificial Sequence: Synthetic oligonucleotide
ccuuccguuguugcuaagc

SEQ ID NO: 1857430 - RNA, 19 nt, Artificial Sequence
  Description of Artificial Sequence: Synthetic oligonucleotide
aaagcaccuucaggcucca

SEQ ID NO: 1857431 - RNA, 19 nt, Artificial Sequence
  Description of Artificial Sequence: Synthetic oligonucleotide
gcuaagcgaccuugcaaac

SEQ ID NO: 1857432 - RNA, 19 nt, Artificial Sequence
  Description of Artificial Sequence: Synthetic oligonucleotide
ccauccagacaugaauaag

SEQ ID NO: 1857433 - RNA, 19 nt, Artificial Sequence
  Description of Artificial Sequence: Synthetic oligonucleotide
guggaucaugacugaaacu

SEQ ID NO: 1857434 - RNA, 19 nt, Artificial Sequence
  Description of Artificial Sequence: Synthetic oligonucleotide
gaccccagacacacagcug

SEQ ID NO: 1857435 - RNA, 19 nt, Artificial Sequence
  Description of Artificial Sequence: Synthetic oligonucleotide
ggccagaacuuuugauuac

SEQ ID NO: 1857436 - RNA, 19 nt, Artificial Sequence
  Description of Artificial Sequence: Synthetic oligonucleotide
gguguaaugugaagcugga

SEQ ID NO: 1857437 - RNA, 19 nt, Artificial Sequence
  Description of Artificial Sequence: Synthetic oligonucleotide
cccuacaauuacccaagug

SEQ ID NO: 1857438 - RNA, 19 nt, Artificial Sequence
  Description of Artificial Sequence: Synthetic oligonucleotide
ugucacagauggucccguu

SEQ ID NO: 1857439 - RNA, 19 nt, Artificial Sequence
  Description of Artificial Sequence: Synthetic oligonucleotide
acacacguguuuauacaua

SEQ ID NO: 1857440 - RNA, 19 nt, Artificial Sequence
  Description of Artificial Sequence: Synthetic oligonucleotide
guugcuaccuuuggaggcu

SEQ ID NO: 1857441 - RNA, 19 nt, Artificial Sequence
  Description of Artificial Sequence: Synthetic oligonucleotide
gaacugcagaugccuggaa

SEQ ID NO: 1857442 - RNA, 19 nt, Artificial Sequence
  Description of Artificial Sequence: Synthetic oligonucleotide
cagggacaucgguccaaag

SEQ ID NO: 1857443 - RNA, 19 nt, Artificial Sequence
  Description of Artificial Sequence: Synthetic oligonucleotide
ccaagagaagacucaaaua

SEQ ID NO: 1857444 - RNA, 19 nt, Artificial Sequence
  Description of Artificial Sequence: Synthetic oligonucleotide
agcccuuccguuguugcua

SEQ ID NO: 1857445 - RNA, 19 nt, Artificial Sequence
  Description of Artificial Sequence: Synthetic oligonucleotide
cucgucucgagugaacaua

SEQ ID NO: 1857446 - RNA, 19 nt, Artificial Sequence
  Description of Artificial Sequence: Synthetic oligonucleotide
cuggcccuacaauuaccca

SEQ ID NO: 1857447 - RNA, 19 nt, Artificial Sequence
  Description of Artificial Sequence: Synthetic oligonucleotide
caggauggaaacaguuccu

SEQ ID NO: 1857448 - RNA, 19 nt, Artificial Sequence
  Description of Artificial Sequence: Synthetic oligonucleotide
caacugugugcaacuuuaa

SEQ ID NO: 1857449 - RNA, 19 nt, Artificial Sequence
  Description of Artificial Sequence: Synthetic oligonucleotide
gccagaacuuuugauuaca

SEQ ID NO: 1857450 - RNA, 19 nt, Artificial Sequence
  Description of Artificial Sequence: Synthetic oligonucleotide
ucccggcacggcuggcaag

SEQ ID NO: 1857451 - RNA, 19 nt, Artificial Sequence
  Description of Artificial Sequence: Synthetic oligonucleotide
cacaaauggcccuccaauu

SEQ ID NO: 1857452 - RNA, 19 nt, Artificial Sequence
  Description of Artificial Sequence: Synthetic oligonucleotide
aaccaucaucugaggccug

SEQ ID NO: 1857453 - RNA, 19 nt, Artificial Sequence
  Description of Artificial Sequence: Synthetic oligonucleotide
gugcaacuuuaaaauuuaa

SEQ ID NO: 1857454 - RNA, 19 nt, Artificial Sequence
  Description of Artificial Sequence: Synthetic oligonucleotide
cacgggaaacagcaggccu

SEQ ID NO: 1857455 - RNA, 19 nt, Artificial Sequence
  Description of Artificial Sequence: Synthetic oligonucleotide
ggucccguugcuaccuuug

SEQ ID NO: 1857456 - RNA, 19 nt, Artificial Sequence
  Description of Artificial Sequence: Synthetic oligonucleotide
acacguguuuauacauaau

SEQ ID NO: 1857457 - RNA, 19 nt, Artificial Sequence
  Description of Artificial Sequence: Synthetic oligonucleotide
cagcauaggccaggcuggc

SEQ ID NO: 1857458 - RNA, 19 nt, Artificial Sequence
  Description of Artificial Sequence: Synthetic oligonucleotide
ggacaucgguccaaagcac

SEQ ID NO: 1857459 - RNA, 19 nt, Artificial Sequence
  Description of Artificial Sequence: Synthetic oligonucleotide
ccguuguugcuaagcgacc

SEQ ID NO: 1857460 - RNA, 19 nt, Artificial Sequence
  Description of Artificial Sequence: Synthetic oligonucleotide
cuaagcgaccuugcaaacu

SEQ ID NO: 1857461 - RNA, 19 nt, Artificial Sequence
  Description of Artificial Sequence: Synthetic oligonucleotide
ccucagauauuuuguuaga

SEQ ID NO: 1857462 - RNA, 19 nt, Artificial Sequence
  Description of Artificial Sequence: Synthetic oligonucleotide
caacacucacucgucucga

SEQ ID NO: 1857463 - RNA, 19 nt, Artificial Sequence
  Description of Artificial Sequence: Synthetic oligonucleotide
ccggcaggaaugugcacac

SEQ ID NO: 1857464 - RNA, 19 nt, Artificial Sequence
  Description of Artificial Sequence: Synthetic oligonucleotide
uggugggcccacaguccuc

SEQ ID NO: 1857465 - RNA, 19 nt, Artificial Sequence
  Description of Artificial Sequence: Synthetic oligonucleotide
uggucccguugcuaccuuu

SEQ ID NO: 1857466 - RNA, 19 nt, Artificial Sequence
  Description of Artificial Sequence: Synthetic oligonucleotide
agcauaggccaggcuggca

SEQ ID NO: 1857467 - RNA, 19 nt, Artificial Sequence
  Description of Artificial Sequence: Synthetic oligonucleotide
aguaccuggugggcccaca

SEQ ID NO: 1857468 - RNA, 19 nt, Artificial Sequence
  Description of Artificial Sequence: Synthetic oligonucleotide
aggaguccacuggcacagg

SEQ ID NO: 1857469 - RNA, 19 nt, Artificial Sequence
  Description of Artificial Sequence: Synthetic oligonucleotide
ggcauagcucucccuccac

SEQ ID NO: 1857470 - RNA, 19 nt, Artificial Sequence
  Description of Artificial Sequence: Synthetic oligonucleotide
cucacucgucucgagugaa

SEQ ID NO: 1857471 - RNA, 19 nt, Artificial Sequence
  Description of Artificial Sequence: Synthetic oligonucleotide
uugcuaccuuuggaggcuu

SEQ ID NO: 1857472 - RNA, 19 nt, Artificial Sequence
  Description of Artificial Sequence: Synthetic oligonucleotide
cccggcacggcuggcaagg

SEQ ID NO: 1857473 - RNA, 19 nt, Artificial Sequence
  Description of Artificial Sequence: Synthetic oligonucleotide
cccaaguguccuuccugug

SEQ ID NO: 1857474 - RNA, 19 nt, Artificial Sequence
  Description of Artificial Sequence: Synthetic oligonucleotide
ggugggcccacaguccuca

SEQ ID NO: 1857475 - RNA, 19 nt, Artificial Sequence
  Description of Artificial Sequence: Synthetic oligonucleotide
caccggcaggaaugugcac

SEQ ID NO: 1857476 - RNA, 19 nt, Artificial Sequence
  Description of Artificial Sequence: Synthetic oligonucleotide
ccaccggcaggaaugugca

SEQ ID NO: 1857477 - RNA, 19 nt, Artificial Sequence
  Description of Artificial Sequence: Synthetic oligonucleotide
cagguggaucaugacugaa

SEQ ID NO: 1857478 - RNA, 19 nt, Artificial Sequence
  Description of Artificial Sequence: Synthetic oligonucleotide
cauaggccaggcuggcaau

SEQ ID NO: 1857479 - RNA, 19 nt, Artificial Sequence
  Description of Artificial Sequence: Synthetic oligonucleotide
gugcaacacacguguuuau

SEQ ID NO: 1857480 - RNA, 19 nt, Artificial Sequence
  Description of Artificial Sequence: Synthetic oligonucleotide
ggcccuccaauuucugacu

SEQ ID NO: 1857481 - RNA, 19 nt, Artificial Sequence
  Description of Artificial Sequence: Synthetic oligonucleotide
cgucucgagugaacauagc

SEQ ID NO: 1857482 - RNA, 19 nt, Artificial Sequence
  Description of Artificial Sequence: Synthetic oligonucleotide
cugcagaugccuggaaaau

SEQ ID NO: 1857483 - RNA, 19 nt, Artificial Sequence
  Description of Artificial Sequence: Synthetic oligonucleotide
cugauuucucugugcuauu

SEQ ID NO: 1857484 - RNA, 19 nt, Artificial Sequence
  Description of Artificial Sequence: Synthetic oligonucleotide
ccuagggugaagacaggau

SEQ ID NO: 1857485 - RNA, 19 nt, Artificial Sequence
  Description of Artificial Sequence: Synthetic oligonucleotide
caguaccuggugggcccac

SEQ ID NO: 1857486 - RNA, 19 nt, Artificial Sequence
  Description of Artificial Sequence: Synthetic oligonucleotide
caguucccaggugaugagu

SEQ ID NO: 1857487 - RNA, 19 nt, Artificial Sequence
  Description of Artificial Sequence: Synthetic oligonucleotide
gcccuuccguuguugcuaa

SEQ ID NO: 1857488 - RNA, 19 nt, Artificial Sequence
  Description of Artificial Sequence: Synthetic oligonucleotide
gcaaucccucugguuguca

SEQ ID NO: 1857489 - RNA, 19 nt, Artificial Sequence
  Description of Artificial Sequence: Synthetic oligonucleotide
ccacaacacucacucgucu

SEQ ID NO: 1857490 - RNA, 19 nt, Artificial Sequence
  Description of Artificial Sequence: Synthetic oligonucleotide
caucgguccaaagcaccuu

SEQ ID NO: 1857491 - RNA, 19 nt, Artificial Sequence
  Description of Artificial Sequence: Synthetic oligonucleotide
cacggcuggcaagguguaa

SEQ ID NO: 1857492 - RNA, 19 nt, Artificial Sequence
  Description of Artificial Sequence: Synthetic oligonucleotide
gcccuccaauuucugacuu

SEQ ID NO: 1857493 - RNA, 19 nt, Artificial Sequence
  Description of Artificial Sequence: Synthetic oligonucleotide
cccuuccguuguugcuaag

SEQ ID NO: 1857494 - RNA, 19 nt, Artificial Sequence
  Description of Artificial Sequence: Synthetic oligonucleotide
cguuguugcuaagcgaccu

SEQ ID NO: 1857495 - RNA, 19 nt, Artificial Sequence
  Description of Artificial Sequence: Synthetic oligonucleotide
gcccuacaauuacccaagu

SEQ ID NO: 1857496 - RNA, 19 nt, Artificial Sequence
  Description of Artificial Sequence: Synthetic oligonucleotide
ggccaggcuggcaaucccu

SEQ ID NO: 1857497 - RNA, 19 nt, Artificial Sequence
  Description of Artificial Sequence: Synthetic oligonucleotide
gcuaccuuuggaggcuuuu

SEQ ID NO: 1857498 - RNA, 19 nt, Artificial Sequence
  Description of Artificial Sequence: Synthetic oligonucleotide
cggcacggcuggcaaggug

SEQ ID NO: 1857499 - RNA, 19 nt, Artificial Sequence
  Description of Artificial Sequence: Synthetic oligonucleotide
gcgaccuugcaaacuucau

SEQ ID NO: 1857500 - RNA, 19 nt, Artificial Sequence
  Description of Artificial Sequence: Synthetic oligonucleotide
cacccagcccagccuucuu

SEQ ID NO: 1857501 - RNA, 19 nt, Artificial Sequence
  Description of Artificial Sequence: Synthetic oligonucleotide
ccucaucccucagguggau

SEQ ID NO: 1857502 - RNA, 19 nt, Artificial Sequence
  Description of Artificial Sequence: Synthetic oligonucleotide
ccggcacggcuggcaaggu

SEQ ID NO: 1857503 - RNA, 19 nt, Artificial Sequence
  Description of Artificial Sequence: Synthetic oligonucleotide
aaauaugaaggacaugucc

SEQ ID NO: 1857504 - RNA, 19 nt, Artificial Sequence
  Description of Artificial Sequence: Synthetic oligonucleotide
aaaacaccuauucugaaac

SEQ ID NO: 1857505 - RNA, 19 nt, Artificial Sequence
  Description of Artificial Sequence: Synthetic oligonucleotide
ucugaaaccaacaaaaguc

SEQ ID NO: 1857506 - RNA, 19 nt, Artificial Sequence
  Description of Artificial Sequence: Synthetic oligonucleotide
aaaaguacauaaaaguuuc

SEQ ID NO: 1857507 - RNA, 19 nt, Artificial Sequence
  Description of Artificial Sequence: Synthetic oligonucleotide
aaagcuaacauugugauau

SEQ ID NO: 1857508 - RNA, 19 nt, Artificial Sequence
  Description of Artificial Sequence: Synthetic oligonucleotide
aaauguaccgcugggaagc

SEQ ID NO: 1857509 - RNA, 19 nt, Artificial Sequence
  Description of Artificial Sequence: Synthetic oligonucleotide
uguaguuucacauuguuaa

SEQ ID NO: 1857510 - RNA, 19 nt, Artificial Sequence
  Description of Artificial Sequence: Synthetic oligonucleotide
aauauaggcacauuggcaa

SEQ ID NO: 1857511 - RNA, 19 nt, Artificial Sequence
  Description of Artificial Sequence: Synthetic oligonucleotide
aagucuauugaauucaagu

SEQ ID NO: 1857512 - RNA, 19 nt, Artificial Sequence
  Description of Artificial Sequence: Synthetic oligonucleotide
uuuauaaacggugaacagg

SEQ ID NO: 1857513 - RNA, 19 nt, Artificial Sequence
  Description of Artificial Sequence: Synthetic oligonucleotide
uucaaguuaugcauguugg

SEQ ID NO: 1857514 - RNA, 19 nt, Artificial Sequence
  Description of Artificial Sequence: Synthetic oligonucleotide
ucuuuugauucuaacagcc

SEQ ID NO: 1857515 - RNA, 19 nt, Artificial Sequence
  Description of Artificial Sequence: Synthetic oligonucleotide
uuauaaacggugaacaggu

SEQ ID NO: 1857516 - RNA, 19 nt, Artificial Sequence
  Description of Artificial Sequence: Synthetic oligonucleotide
aaguuaugcauguugggag

SEQ ID NO: 1857517 - RNA, 19 nt, Artificial Sequence
  Description of Artificial Sequence: Synthetic oligonucleotide
ugcauuauccaauccaagg

SEQ ID NO: 1857518 - RNA, 19 nt, Artificial Sequence
  Description of Artificial Sequence: Synthetic oligonucleotide
aaaguagucuugaaaaccg

SEQ ID NO: 1857519 - RNA, 19 nt, Artificial Sequence
  Description of Artificial Sequence: Synthetic oligonucleotide
uuuauacaguccuagaaac

SEQ ID NO: 1857520 - RNA, 19 nt, Artificial Sequence
  Description of Artificial Sequence: Synthetic oligonucleotide
aaguacauaaaaguuucac

SEQ ID NO: 1857521 - RNA, 19 nt, Artificial Sequence
  Description of Artificial Sequence: Synthetic oligonucleotide
aggucuggcauucagcucc

SEQ ID NO: 1857522 - RNA, 19 nt, Artificial Sequence
  Description of Artificial Sequence: Synthetic oligonucleotide
auaugguuuauauuuguag

SEQ ID NO: 1857523 - RNA, 19 nt, Artificial Sequence
  Description of Artificial Sequence: Synthetic oligonucleotide
cuguacacaagauaggcgg

SEQ ID NO: 1857524 - RNA, 19 nt, Artificial Sequence
  Description of Artificial Sequence: Synthetic oligonucleotide
uguaguuuguuuuauugca

SEQ ID NO: 1857525 - RNA, 19 nt, Artificial Sequence
  Description of Artificial Sequence: Synthetic oligonucleotide
aaaaccguaaggcaucaug

SEQ ID NO: 1857526 - RNA, 19 nt, Artificial Sequence
  Description of Artificial Sequence: Synthetic oligonucleotide
aaaccguaaggcaucaugc

SEQ ID NO: 1857527 - RNA, 19 nt, Artificial Sequence
  Description of Artificial Sequence: Synthetic oligonucleotide
aaaagugcuucaaauguac

SEQ ID NO: 1857528 - RNA, 19 nt, Artificial Sequence
  Description of Artificial Sequence: Synthetic oligonucleotide
uccaagaauuaauauaggc

SEQ ID NO: 1857529 - RNA, 19 nt, Artificial Sequence
  Description of Artificial Sequence: Synthetic oligonucleotide
uacaaugccauugauagca

SEQ ID NO: 1857530 - RNA, 19 nt, Artificial Sequence
  Description of Artificial Sequence: Synthetic oligonucleotide
gauaagcggauuuuaacug

SEQ ID NO: 1857531 - RNA, 19 nt, Artificial Sequence
  Description of Artificial Sequence: Synthetic oligonucleotide
ugauaagcggauuuuaacu

SEQ ID NO: 1857532 - RNA, 19 nt, Artificial Sequence
  Description of Artificial Sequence: Synthetic oligonucleotide
aaacaccuauucugaaacc

SEQ ID NO: 1857533 - RNA, 19 nt, Artificial Sequence
  Description of Artificial Sequence: Synthetic oligonucleotide
uaugguuuauauuuguagu

SEQ ID NO: 1857534 - RNA, 19 nt, Artificial Sequence
  Description of Artificial Sequence: Synthetic oligonucleotide
ucuauugaauucaaguuau

SEQ ID NO: 1857535 - RNA, 19 nt, Artificial Sequence
  Description of Artificial Sequence: Synthetic oligonucleotide
gauauucaaacuugaauca

SEQ ID NO: 1857536 - RNA, 19 nt, Artificial Sequence
  Description of Artificial Sequence: Synthetic oligonucleotide
ugggagauggaccucagag

SEQ ID NO: 1857537 - RNA, 19 nt, Artificial Sequence
  Description of Artificial Sequence: Synthetic oligonucleotide
uaauauaggcacauuggca

SEQ ID NO: 1857538 - RNA, 19 nt, Artificial Sequence
  Description of Artificial Sequence: Synthetic oligonucleotide
aaagcgguauggcugccgc

SEQ ID NO: 1857539 - RNA, 19 nt, Artificial Sequence
  Description of Artificial Sequence: Synthetic oligonucleotide
ugacguuugcauaagaaaa

SEQ ID NO: 1857540 - RNA, 19 nt, Artificial Sequence
  Description of Artificial Sequence: Synthetic oligonucleotide
uauugaauucaaguuaugc

SEQ ID NO: 1857541 - RNA, 19 nt, Artificial Sequence
  Description of Artificial Sequence: Synthetic oligonucleotide
uucagcauguguagcaacg

SEQ ID NO: 1857542 - RNA, 19 nt, Artificial Sequence
  Description of Artificial Sequence: Synthetic oligonucleotide
uucuaacagccuuucaugg

SEQ ID NO: 1857543 - RNA, 19 nt, Artificial Sequence
  Description of Artificial Sequence: Synthetic oligonucleotide
uuugcaauucccacucagg

SEQ ID NO: 1857544 - RNA, 19 nt, Artificial Sequence
  Description of Artificial Sequence: Synthetic oligonucleotide
gaagcugaucuuuauaaac

SEQ ID NO: 1857545 - RNA, 19 nt, Artificial Sequence
  Description of Artificial Sequence: Synthetic oligonucleotide
agugcuucaaauguaccgc

SEQ ID NO: 1857546 - RNA, 19 nt, Artificial Sequence
  Description of Artificial Sequence: Synthetic oligonucleotide
aguacauaaaaguuucaca

SEQ ID NO: 1857547 - RNA, 19 nt, Artificial Sequence
  Description of Artificial Sequence: Synthetic oligonucleotide
uauacaguccuagaaacug

SEQ ID NO: 1857548 - RNA, 19 nt, Artificial Sequence
  Description of Artificial Sequence: Synthetic oligonucleotide
ugaucuuuauaaacgguga

SEQ ID NO: 1857549 - RNA, 19 nt, Artificial Sequence
  Description of Artificial Sequence: Synthetic oligonucleotide
uaaacggugaacagguuga

SEQ ID NO: 1857550 - RNA, 19 nt, Artificial Sequence
  Description of Artificial Sequence: Synthetic oligonucleotide
ucugcgacuccagagaacg

SEQ ID NO: 1857551 - RNA, 19 nt, Artificial Sequence
  Description of Artificial Sequence: Synthetic oligonucleotide
ugagcuuuuaaauaugguu

SEQ ID NO: 1857552 - RNA, 19 nt, Artificial Sequence
  Description of Artificial Sequence: Synthetic oligonucleotide
auaaacggugaacagguug

SEQ ID NO: 1857553 - RNA, 19 nt, Artificial Sequence
  Description of Artificial Sequence: Synthetic oligonucleotide
uugucugcccauauaagcc

SEQ ID NO: 1857554 - RNA, 19 nt, Artificial Sequence
  Description of Artificial Sequence: Synthetic oligonucleotide
gaugagcuuuuaaauaugg

SEQ ID NO: 1857555 - RNA, 19 nt, Artificial Sequence
  Description of Artificial Sequence: Synthetic oligonucleotide
aaacaucucucguaaccuc

SEQ ID NO: 1857556 - RNA, 19 nt, Artificial Sequence
  Description of Artificial Sequence: Synthetic oligonucleotide
auccagucaaauaugaagg

SEQ ID NO: 1857557 - RNA, 19 nt, Artificial Sequence
  Description of Artificial Sequence: Synthetic oligonucleotide
gaugugcccacccagauca

SEQ ID NO: 1857558 - RNA, 19 nt, Artificial Sequence
  Description of Artificial Sequence: Synthetic oligonucleotide
agcugaucuuuauaaacgg

SEQ ID NO: 1857559 - RNA, 19 nt, Artificial Sequence
  Description of Artificial Sequence: Synthetic oligonucleotide
uaugcauguugggagaugg

SEQ ID NO: 1857560 - RNA, 19 nt, Artificial Sequence
  Description of Artificial Sequence: Synthetic oligonucleotide
cugaucuuuauaaacggug

SEQ ID NO: 1857561 - RNA, 19 nt, Artificial Sequence
  Description of Artificial Sequence: Synthetic oligonucleotide
ugucauuagugaaucaagu

SEQ ID NO: 1857562 - RNA, 19 nt, Artificial Sequence
  Description of Artificial Sequence: Synthetic oligonucleotide
ucaaguuaugcauguuggg

SEQ ID NO: 1857563 - RNA, 19 nt, Artificial Sequence
  Description of Artificial Sequence: Synthetic oligonucleotide
ucuugaaaaccguaaggca

SEQ ID NO: 1857564 - RNA, 19 nt, Artificial Sequence
  Description of Artificial Sequence: Synthetic oligonucleotide
ucaaauguaccgcugggaa

SEQ ID NO: 1857565 - RNA, 19 nt, Artificial Sequence
  Description of Artificial Sequence: Synthetic oligonucleotide
uagucuugaaaaccguaag

SEQ ID NO: 1857566 - RNA, 19 nt, Artificial Sequence
  Description of Artificial Sequence: Synthetic oligonucleotide
uacucuucgggcuuggaug

SEQ ID NO: 1857567 - RNA, 19 nt, Artificial Sequence
  Description of Artificial Sequence: Synthetic oligonucleotide
aacagguugauguggggcu

SEQ ID NO: 1857568 - RNA, 19 nt, Artificial Sequence
  Description of Artificial Sequence: Synthetic oligonucleotide
ugcuaaucgauguacugug

SEQ ID NO: 1857569 - RNA, 19 nt, Artificial Sequence
  Description of Artificial Sequence: Synthetic oligonucleotide
guugucugcccauauaagc

SEQ ID NO: 1857570 - RNA, 19 nt, Artificial Sequence
  Description of Artificial Sequence: Synthetic oligonucleotide
gaaaccacuguaaauccag

SEQ ID NO: 1857571 - RNA, 19 nt, Artificial Sequence
  Description of Artificial Sequence: Synthetic oligonucleotide
aaagugcuucaaauguacc

SEQ ID NO: 1857572 - RNA, 19 nt, Artificial Sequence
  Description of Artificial Sequence: Synthetic oligonucleotide
uuccaagaauuaauauagg

SEQ ID NO: 1857573 - RNA, 19 nt, Artificial Sequence
  Description of Artificial Sequence: Synthetic oligonucleotide
agaaagcuaacauugugau

SEQ ID NO: 1857574 - RNA, 19 nt, Artificial Sequence
  Description of Artificial Sequence: Synthetic oligonucleotide
auugauagcaggaagguaa

SEQ ID NO: 1857575 - RNA, 19 nt, Artificial Sequence
  Description of Artificial Sequence: Synthetic oligonucleotide
uggaauuagaaagcuaaca

SEQ ID NO: 1857576 - RNA, 19 nt, Artificial Sequence
  Description of Artificial Sequence: Synthetic oligonucleotide
uuuauugcaugacguuugc

SEQ ID NO: 1857577 - RNA, 19 nt, Artificial Sequence
  Description of Artificial Sequence: Synthetic oligonucleotide
acaagauaggcggacaauc

SEQ ID NO: 1857578 - RNA, 19 nt, Artificial Sequence
  Description of Artificial Sequence: Synthetic oligonucleotide
uaguuuguuuuauugcaug

SEQ ID NO: 1857579 - RNA, 19 nt, Artificial Sequence
  Description of Artificial Sequence: Synthetic oligonucleotide
cuaaucgauguacugugcc

SEQ ID NO: 1857580 - RNA, 19 nt, Artificial Sequence
  Description of Artificial Sequence: Synthetic oligonucleotide
agucuauugaauucaaguu

SEQ ID NO: 1857581 - RNA, 19 nt, Artificial Sequence
  Description of Artificial Sequence: Synthetic oligonucleotide
uugcaauucccacucaggu

SEQ ID NO: 1857582 - RNA, 19 nt, Artificial Sequence
  Description of Artificial Sequence: Synthetic oligonucleotide
auugugauauucaaacuug

SEQ ID NO: 1857583 - RNA, 19 nt, Artificial Sequence
  Description of Artificial Sequence: Synthetic oligonucleotide
uuauacaguccuagaaacu

SEQ ID NO: 1857584 - RNA, 19 nt, Artificial Sequence
  Description of Artificial Sequence: Synthetic oligonucleotide
ugugccauccagcggaagc

SEQ ID NO: 1857585 - RNA, 19 nt, Artificial Sequence
  Description of Artificial Sequence: Synthetic oligonucleotide
aaacuaucuguauggaauu

SEQ ID NO: 1857586 - RNA, 19 nt, Artificial Sequence
  Description of Artificial Sequence: Synthetic oligonucleotide
ucaucugucauuagugaau

SEQ ID NO: 1857587 - RNA, 19 nt, Artificial Sequence
  Description of Artificial Sequence: Synthetic oligonucleotide
uguguagcaacguuguuuu

SEQ ID NO: 1857588 - RNA, 19 nt, Artificial Sequence
  Description of Artificial Sequence: Synthetic oligonucleotide
auccaauccaaggaauacc

SEQ ID NO: 1857589 - RNA, 19 nt, Artificial Sequence
  Description of Artificial Sequence: Synthetic oligonucleotide
uugugauauucaaacuuga

SEQ ID NO: 1857590 - RNA, 19 nt, Artificial Sequence
  Description of Artificial Sequence: Synthetic oligonucleotide
ucuuauuuccaagaauuaa

SEQ ID NO: 1857591 - RNA, 19 nt, Artificial Sequence
  Description of Artificial Sequence: Synthetic oligonucleotide
uguugucugcccauauaag

SEQ ID NO: 1857592 - RNA, 19 nt, Artificial Sequence
  Description of Artificial Sequence: Synthetic oligonucleotide
ucugcaaagcgguauggcu

SEQ ID NO: 1857593 - RNA, 19 nt, Artificial Sequence
  Description of Artificial Sequence: Synthetic oligonucleotide
uaggcggacaaucuaaaau

SEQ ID NO: 1857594 - RNA, 19 nt, Artificial Sequence
  Description of Artificial Sequence: Synthetic oligonucleotide
gguagauauauuaauaauc

SEQ ID NO: 1857595 - RNA, 19 nt, Artificial Sequence
  Description of Artificial Sequence: Synthetic oligonucleotide
cugucauuagugaaucaag

SEQ ID NO: 1857596 - RNA, 19 nt, Artificial Sequence
  Description of Artificial Sequence: Synthetic oligonucleotide
ugugauauucaaacuugaa

SEQ ID NO: 1857597 - RNA, 19 nt, Artificial Sequence
  Description of Artificial Sequence: Synthetic oligonucleotide
uguaccgcugggaagcuga

SEQ ID NO: 1857598 - RNA, 19 nt, Artificial Sequence
  Description of Artificial Sequence: Synthetic oligonucleotide
agaucuuacagggucugcg

SEQ ID NO: 1857599 - RNA, 19 nt, Artificial Sequence
  Description of Artificial Sequence: Synthetic oligonucleotide
cugauaagcggauuuuaac

SEQ ID NO: 1857600 - RNA, 19 nt, Artificial Sequence
  Description of Artificial Sequence: Synthetic oligonucleotide
uucccacucagguagauau

SEQ ID NO: 1857601 - RNA, 19 nt, Artificial Sequence
  Description of Artificial Sequence: Synthetic oligonucleotide
auauucaaacuugaaucag

SEQ ID NO: 1857602 - RNA, 19 nt, Artificial Sequence
  Description of Artificial Sequence: Synthetic oligonucleotide
auaagcggauuuuaacugu

SEQ ID NO: 1857603 - RNA, 19 nt, Artificial Sequence
  Description of Artificial Sequence: Synthetic oligonucleotide
aucuuacagggucugcgac

SEQ ID NO: 1857604 - RNA, 19 nt, Artificial Sequence
  Description of Artificial Sequence: Synthetic oligonucleotide
uaaucgauguacugugcca

SEQ ID NO: 1857605 - RNA, 19 nt, Artificial Sequence
  Description of Artificial Sequence: Synthetic oligonucleotide
accgcugggaagcugaucu

SEQ ID NO: 1857606 - RNA, 19 nt, Artificial Sequence
  Description of Artificial Sequence: Synthetic oligonucleotide
aagaauuaauauaggcaca

SEQ ID NO: 1857607 - RNA, 19 nt, Artificial Sequence
  Description of Artificial Sequence: Synthetic oligonucleotide
augacguuugcauaagaaa

SEQ ID NO: 1857608 - RNA, 19 nt, Artificial Sequence
  Description of Artificial Sequence: Synthetic oligonucleotide
agccaaacguuguaguuug

SEQ ID NO: 1857609 - RNA, 19 nt, Artificial Sequence
  Description of Artificial Sequence: Synthetic oligonucleotide
guuugcaauucccacucag

SEQ ID NO: 1857610 - RNA, 19 nt, Artificial Sequence
  Description of Artificial Sequence: Synthetic oligonucleotide
cuaacagccuuucaugguc

SEQ ID NO: 1857611 - RNA, 19 nt, Artificial Sequence
  Description of Artificial Sequence: Synthetic oligonucleotide
ugcaaagcgguauggcugc

SEQ ID NO: 1857612 - RNA, 19 nt, Artificial Sequence
  Description of Artificial Sequence: Synthetic oligonucleotide
auagugaguucuucugaag

SEQ ID NO: 1857613 - RNA, 19 nt, Artificial Sequence
  Description of Artificial Sequence: Synthetic oligonucleotide
aaagucuauugaauucaag

SEQ ID NO: 1857614 - RNA, 19 nt, Artificial Sequence
  Description of Artificial Sequence: Synthetic oligonucleotide
cuucaaauguaccgcuggg

SEQ ID NO: 1857615 - RNA, 19 nt, Artificial Sequence
  Description of Artificial Sequence: Synthetic oligonucleotide
agaauuaauauaggcacau

SEQ ID NO: 1857616 - RNA, 19 nt, Artificial Sequence
  Description of Artificial Sequence: Synthetic oligonucleotide
aaucaguuugcaauuccca

SEQ ID NO: 1857617 - RNA, 19 nt, Artificial Sequence
  Description of Artificial Sequence: Synthetic oligonucleotide
agagaacgcgacucccugc

SEQ ID NO: 1857618 - RNA, 19 nt, Artificial Sequence
  Description of Artificial Sequence: Synthetic oligonucleotide
acuaucuguauggaauuag

SEQ ID NO: 1857619 - RNA, 19 nt, Artificial Sequence
  Description of Artificial Sequence: Synthetic oligonucleotide
gauucuaacagccuuucau

SEQ ID NO: 1857620 - RNA, 19 nt, Artificial Sequence
  Description of Artificial Sequence: Synthetic oligonucleotide
aguuaugcauguugggaga

SEQ ID NO: 1857621 - RNA, 19 nt, Artificial Sequence
  Description of Artificial Sequence: Synthetic oligonucleotide
cauuagugaaucaaguucu

SEQ ID NO: 1857622 - RNA, 19 nt, Artificial Sequence
  Description of Artificial Sequence: Synthetic oligonucleotide
gucuauugaauucaaguua

SEQ ID NO: 1857623 - RNA, 19 nt, Artificial Sequence
  Description of Artificial Sequence: Synthetic oligonucleotide
cacaagaaauacaaugcca

SEQ ID NO: 1857624 - RNA, 19 nt, Artificial Sequence
  Description of Artificial Sequence: Synthetic oligonucleotide
ugucugcccauauaagcca

SEQ ID NO: 1857625 - RNA, 19 nt, Artificial Sequence
  Description of Artificial Sequence: Synthetic oligonucleotide
ugauguggggcuguaaacu

SEQ ID NO: 1857626 - RNA, 19 nt, Artificial Sequence
  Description of Artificial Sequence: Synthetic oligonucleotide
ugaacagguugaugugggg

SEQ ID NO: 1857627 - RNA, 19 nt, Artificial Sequence
  Description of Artificial Sequence: Synthetic oligonucleotide
caaauguaccgcugggaag

SEQ ID NO: 1857628 - RNA, 19 nt, Artificial Sequence
  Description of Artificial Sequence: Synthetic oligonucleotide
aauaccaguuuaccaguuu

SEQ ID NO: 1857629 - RNA, 19 nt, Artificial Sequence
  Description of Artificial Sequence: Synthetic oligonucleotide
cugcaaagcgguauggcug

SEQ ID NO: 1857630 - RNA, 19 nt, Artificial Sequence
  Description of Artificial Sequence: Synthetic oligonucleotide
uauccaauccaaggaauac

SEQ ID NO: 1857631 - RNA, 19 nt, Artificial Sequence
  Description of Artificial Sequence: Synthetic oligonucleotide
gaacagguugauguggggc

SEQ ID NO: 1857632 - RNA, 19 nt, Artificial Sequence
  Description of Artificial Sequence: Synthetic oligonucleotide
aacgcgacucccugcuccg

SEQ ID NO: 1857633 - RNA, 19 nt, Artificial Sequence
  Description of Artificial Sequence: Synthetic oligonucleotide
gaaacugcagcacacugcu

SEQ ID NO: 1857634 - RNA, 19 nt, Artificial Sequence
  Description of Artificial Sequence: Synthetic oligonucleotide
auauuuguaguuucacauu

SEQ ID NO: 1857635 - RNA, 19 nt, Artificial Sequence
  Description of Artificial Sequence: Synthetic oligonucleotide
aagauaggcggacaaucua

SEQ ID NO: 1857636 - RNA, 19 nt, Artificial Sequence
  Description of Artificial Sequence: Synthetic oligonucleotide
aacuugaaucaguuugcaa

SEQ ID NO: 1857637 - RNA, 19 nt, Artificial Sequence
  Description of Artificial Sequence: Synthetic oligonucleotide
uugcaugacguuugcauaa

SEQ ID NO: 1857638 - RNA, 19 nt, Artificial Sequence
  Description of Artificial Sequence: Synthetic oligonucleotide
auagcaggaagguaauuuu

SEQ ID NO: 1857639 - RNA, 19 nt, Artificial Sequence
  Description of Artificial Sequence: Synthetic oligonucleotide
ugaaaccaacaaaagucua

SEQ ID NO: 1857640 - RNA, 19 nt, Artificial Sequence
  Description of Artificial Sequence: Synthetic oligonucleotide
gucugucaaucuuauuucc

SEQ ID NO: 1857641 - RNA, 19 nt, Artificial Sequence
  Description of Artificial Sequence: Synthetic oligonucleotide
aaucgauguacugugccau

SEQ ID NO: 1857642 - RNA, 19 nt, Artificial Sequence
  Description of Artificial Sequence: Synthetic oligonucleotide
cacaugaugagcuuuuaaa

SEQ ID NO: 1857643 - RNA, 19 nt, Artificial Sequence
  Description of Artificial Sequence: Synthetic oligonucleotide
aucuuucagcauguguagc

SEQ ID NO: 1857644 - RNA, 19 nt, Artificial Sequence
  Description of Artificial Sequence: Synthetic oligonucleotide
ucuuacagggucugcgacu

SEQ ID NO: 1857645 - RNA, 19 nt, Artificial Sequence
  Description of Artificial Sequence: Synthetic oligonucleotide
aauaugguuuauauuugua

SEQ ID NO: 1857646 - RNA, 19 nt, Artificial Sequence
  Description of Artificial Sequence: Synthetic oligonucleotide
ccaagaauuaauauaggca

SEQ ID NO: 1857647 - RNA, 19 nt, Artificial Sequence
  Description of Artificial Sequence: Synthetic oligonucleotide
ucucucguaaccucucuuc

SEQ ID NO: 1857648 - RNA, 19 nt, Artificial Sequence
  Description of Artificial Sequence: Synthetic oligonucleotide
ugcccauauaagccaaaca

SEQ ID NO: 1857649 - RNA, 19 nt, Artificial Sequence
  Description of Artificial Sequence: Synthetic oligonucleotide
gaacgcgacucccugcucc

SEQ ID NO: 1857650 - RNA, 19 nt, Artificial Sequence
  Description of Artificial Sequence: Synthetic oligonucleotide
uugauguggggcuguaaac

SEQ ID NO: 1857651 - RNA, 19 nt, Artificial Sequence
  Description of Artificial Sequence: Synthetic oligonucleotide
gcuucaaauguaccgcugg

SEQ ID NO: 1857652 - RNA, 19 nt, Artificial Sequence
  Description of Artificial Sequence: Synthetic oligonucleotide
aacaucucucguaaccucu

SEQ ID NO: 1857653 - RNA, 19 nt, Artificial Sequence
  Description of Artificial Sequence: Synthetic oligonucleotide
uucaaauguaccgcuggga

SEQ ID NO: 1857654 - RNA, 19 nt, Artificial Sequence
  Description of Artificial Sequence: Synthetic oligonucleotide
gaucuuuauaaacggugaa

SEQ ID NO: 1857655 - RNA, 19 nt, Artificial Sequence
  Description of Artificial Sequence: Synthetic oligonucleotide
augcaaucacugauaagcg

SEQ ID NO: 1857656 - RNA, 19 nt, Artificial Sequence
  Description of Artificial Sequence: Synthetic oligonucleotide
auggaauuagaaagcuaac

SEQ ID NO: 1857657 - RNA, 19 nt, Artificial Sequence
  Description of Artificial Sequence: Synthetic oligonucleotide
auaccaguuuaccaguuuu

SEQ ID NO: 1857658 - RNA, 19 nt, Artificial Sequence
  Description of Artificial Sequence: Synthetic oligonucleotide
agugacacacugcccuuuc

SEQ ID NO: 1857659 - RNA, 19 nt, Artificial Sequence
  Description of Artificial Sequence: Synthetic oligonucleotide
ugcuucaaauguaccgcug

SEQ ID NO: 1857660 - RNA, 19 nt, Artificial Sequence
  Description of Artificial Sequence: Synthetic oligonucleotide
agcggauuuuaacuguaca

SEQ ID NO: 1857661 - RNA, 19 nt, Artificial Sequence
  Description of Artificial Sequence: Synthetic oligonucleotide
ucaugcaaucacugauaag

SEQ ID NO: 1857662 - RNA, 19 nt, Artificial Sequence
  Description of Artificial Sequence: Synthetic oligonucleotide
ccaaacaucucucguaacc

SEQ ID NO: 1857663 - RNA, 19 nt, Artificial Sequence
  Description of Artificial Sequence: Synthetic oligonucleotide
aagcggauuuuaacuguac

SEQ ID NO: 1857664 - RNA, 19 nt, Artificial Sequence
  Description of Artificial Sequence: Synthetic oligonucleotide
caaugccauugauagcagg

SEQ ID NO: 1857665 - RNA, 19 nt, Artificial Sequence
  Description of Artificial Sequence: Synthetic oligonucleotide
ugaaggacauguccagauc

SEQ ID NO: 1857666 - RNA, 19 nt, Artificial Sequence
  Description of Artificial Sequence: Synthetic oligonucleotide
uggcaaugguuucaucugu

SEQ ID NO: 1857667 - RNA, 19 nt, Artificial Sequence
  Description of Artificial Sequence: Synthetic oligonucleotide
agcauguguagcaacguug

SEQ ID NO: 1857668 - RNA, 19 nt, Artificial Sequence
  Description of Artificial Sequence: Synthetic oligonucleotide
cuaucuguauggaauuaga

SEQ ID NO: 1857669 - RNA, 19 nt, Artificial Sequence
  Description of Artificial Sequence: Synthetic oligonucleotide
ucugcacaauccacaagaa

SEQ ID NO: 1857670 - RNA, 19 nt, Artificial Sequence
  Description of Artificial Sequence: Synthetic oligonucleotide
uguugggagauggaccuca

SEQ ID NO: 1857671 - RNA, 19 nt, Artificial Sequence
  Description of Artificial Sequence: Synthetic oligonucleotide
cacaauccacaagaaauac

SEQ ID NO: 1857672 - RNA, 19 nt, Artificial Sequence
  Description of Artificial Sequence: Synthetic oligonucleotide
uccuucagugacacacugc

SEQ ID NO: 1857673 - RNA, 19 nt, Artificial Sequence
  Description of Artificial Sequence: Synthetic oligonucleotide
gaucuuacagggucugcga

SEQ ID NO: 1857674 - RNA, 19 nt, Artificial Sequence
  Description of Artificial Sequence: Synthetic oligonucleotide
caccuauucugaaaccaac

SEQ ID NO: 1857675 - RNA, 19 nt, Artificial Sequence
  Description of Artificial Sequence: Synthetic oligonucleotide
uugauagcaggaagguaau

SEQ ID NO: 1857676 - RNA, 19 nt, Artificial Sequence
  Description of Artificial Sequence: Synthetic oligonucleotide
agccaaacaucucucguaa

SEQ ID NO: 1857677 - RNA, 19 nt, Artificial Sequence
  Description of Artificial Sequence: Synthetic oligonucleotide
guugauguggggcuguaaa

SEQ ID NO: 1857678 - RNA, 19 nt, Artificial Sequence
  Description of Artificial Sequence: Synthetic oligonucleotide
cuauugaauucaaguuaug

SEQ ID NO: 1857679 - RNA, 19 nt, Artificial Sequence
  Description of Artificial Sequence: Synthetic oligonucleotide
auggcuucgggucugucaa

SEQ ID NO: 1857680 - RNA, 19 nt, Artificial Sequence
  Description of Artificial Sequence: Synthetic oligonucleotide
aucgauguacugugccauc

SEQ ID NO: 1857681 - RNA, 19 nt, Artificial Sequence
  Description of Artificial Sequence: Synthetic oligonucleotide
agucaaauaugaaggacau

SEQ ID NO: 1857682 - RNA, 19 nt, Artificial Sequence
  Description of Artificial Sequence: Synthetic oligonucleotide
caaguuaugcauguuggga

SEQ ID NO: 1857683 - RNA, 19 nt, Artificial Sequence
  Description of Artificial Sequence: Synthetic oligonucleotide
uuagugaaucaaguucuuc

SEQ ID NO: 1857684 - RNA, 19 nt, Artificial Sequence
  Description of Artificial Sequence: Synthetic oligonucleotide
gcauuauccaauccaagga

SEQ ID NO: 1857685 - RNA, 19 nt, Artificial Sequence
  Description of Artificial Sequence: Synthetic oligonucleotide
ugcaauucccacucaggua

SEQ ID NO: 1857686 - RNA, 19 nt, Artificial Sequence
  Description of Artificial Sequence: Synthetic oligonucleotide
gcggauuuuaacuguacac

SEQ ID NO: 1857687 - RNA, 19 nt, Artificial Sequence
  Description of Artificial Sequence: Synthetic oligonucleotide
ugaaaaccguaaggcauca

SEQ ID NO: 1857688 - RNA, 19 nt, Artificial Sequence
  Description of Artificial Sequence: Synthetic oligonucleotide
caauagugaguucuucuga

SEQ ID NO: 1857689 - RNA, 19 nt, Artificial Sequence
  Description of Artificial Sequence: Synthetic oligonucleotide
accguaaggcaucaugcaa

SEQ ID NO: 1857690 - RNA, 19 nt, Artificial Sequence
  Description of Artificial Sequence: Synthetic oligonucleotide
ggucugucaaucuuauuuc

SEQ ID NO: 1857691 - RNA, 19 nt, Artificial Sequence
  Description of Artificial Sequence: Synthetic oligonucleotide
caucugucauuagugaauc

SEQ ID NO: 1857692 - RNA, 19 nt, Artificial Sequence
  Description of Artificial Sequence: Synthetic oligonucleotide
cuuacagggucugcgacuc

SEQ ID NO: 1857693 - RNA, 19 nt, Artificial Sequence
  Description of Artificial Sequence: Synthetic oligonucleotide
cuucagugacacacugccc

SEQ ID NO: 1857694 - RNA, 19 nt, Artificial Sequence
  Description of Artificial Sequence: Synthetic oligonucleotide
auacucuucgggcuuggau

SEQ ID NO: 1857695 - RNA, 19 nt, Artificial Sequence
  Description of Artificial Sequence: Synthetic oligonucleotide
auguguagcaacguuguuu

SEQ ID NO: 1857696 - RNA, 19 nt, Artificial Sequence
  Description of Artificial Sequence: Synthetic oligonucleotide
aaguagucuugaaaaccgu

SEQ ID NO: 1857697 - RNA, 19 nt, Artificial Sequence
  Description of Artificial Sequence: Synthetic oligonucleotide
aacggugaacagguugaug

SEQ ID NO: 1857698 - RNA, 19 nt, Artificial Sequence
  Description of Artificial Sequence: Synthetic oligonucleotide
ugggaagcugaucuuuaua

SEQ ID NO: 1857699 - RNA, 19 nt, Artificial Sequence
  Description of Artificial Sequence: Synthetic oligonucleotide
acacaagauaggcggacaa

SEQ ID NO: 1857700 - RNA, 19 nt, Artificial Sequence
  Description of Artificial Sequence: Synthetic oligonucleotide
uacacaagauaggcggaca

SEQ ID NO: 1857701 - RNA, 19 nt, Artificial Sequence
  Description of Artificial Sequence: Synthetic oligonucleotide
agccuuucauggucugcac

SEQ ID NO: 1857702 - RNA, 19 nt, Artificial Sequence
  Description of Artificial Sequence: Synthetic oligonucleotide
ugcaugacguuugcauaag

SEQ ID NO: 1857703 - RNA, 19 nt, Artificial Sequence
  Description of Artificial Sequence: Synthetic oligonucleotide
uguccagaucuuacagggu

SEQ ID NO: 1857704 - RNA, 19 nt, Artificial Sequence
  Description of Artificial Sequence: Synthetic oligonucleotide
cauguugggagauggaccu

SEQ ID NO: 1857705 - RNA, 19 nt, Artificial Sequence
  Description of Artificial Sequence: Synthetic oligonucleotide
guagucuugaaaaccguaa

SEQ ID NO: 1857706 - RNA, 19 nt, Artificial Sequence
  Description of Artificial Sequence: Synthetic oligonucleotide
augaacacuuccagagguc

SEQ ID NO: 1857707 - RNA, 19 nt, Artificial Sequence
  Description of Artificial Sequence: Synthetic oligonucleotide
gauagcaggaagguaauuu

SEQ ID NO: 1857708 - RNA, 19 nt, Artificial Sequence
  Description of Artificial Sequence: Synthetic oligonucleotide
uccagagaacgcgacuccc

SEQ ID NO: 1857709 - RNA, 19 nt, Artificial Sequence
  Description of Artificial Sequence: Synthetic oligonucleotide
ucuucgggcuuggaugugc

SEQ ID NO: 1857710 - RNA, 19 nt, Artificial Sequence
  Description of Artificial Sequence: Synthetic oligonucleotide
ucagcauguguagcaacgu

SEQ ID NO: 1857711 - RNA, 19 nt, Artificial Sequence
  Description of Artificial Sequence: Synthetic oligonucleotide
accuauucugaaaccaaca

SEQ ID NO: 1857712 - RNA, 19 nt, Artificial Sequence
  Description of Artificial Sequence: Synthetic oligonucleotide
ucgggcuuggaugugccca

SEQ ID NO: 1857713 - RNA, 19 nt, Artificial Sequence
  Description of Artificial Sequence: Synthetic oligonucleotide
caauccaaggaauaccagu

SEQ ID NO: 1857714 - RNA, 19 nt, Artificial Sequence
  Description of Artificial Sequence: Synthetic oligonucleotide
aaaccacuguaaauccagu

SEQ ID NO: 1857715 - RNA, 19 nt, Artificial Sequence
  Description of Artificial Sequence: Synthetic oligonucleotide
aacuaucuguauggaauua

SEQ ID NO: 1857716 - RNA, 19 nt, Artificial Sequence
  Description of Artificial Sequence: Synthetic oligonucleotide
uuaugcauguugggagaug

SEQ ID NO: 1857717 - RNA, 19 nt, Artificial Sequence
  Description of Artificial Sequence: Synthetic oligonucleotide
uuauugcaugacguuugca

SEQ ID NO: 1857718 - RNA, 19 nt, Artificial Sequence
  Description of Artificial Sequence: Synthetic oligonucleotide
agauaggcggacaaucuaa

SEQ ID NO: 1857719 - RNA, 19 nt, Artificial Sequence
  Description of Artificial Sequence: Synthetic oligonucleotide
uacagggucugcgacucca

SEQ ID NO: 1857720 - RNA, 19 nt, Artificial Sequence
  Description of Artificial Sequence: Synthetic oligonucleotide
auaggcggacaaucuaaaa

SEQ ID NO: 1857721 - RNA, 19 nt, Artificial Sequence
  Description of Artificial Sequence: Synthetic oligonucleotide
uauaaacggugaacagguu

SEQ ID NO: 1857722 - RNA, 19 nt, Artificial Sequence
  Description of Artificial Sequence: Synthetic oligonucleotide
cagagaacgcgacucccug

SEQ ID NO: 1857723 - RNA, 19 nt, Artificial Sequence
  Description of Artificial Sequence: Synthetic oligonucleotide
uuccauacucuucgggcuu

SEQ ID NO: 1857724 - RNA, 19 nt, Artificial Sequence
  Description of Artificial Sequence: Synthetic oligonucleotide
ccaaggaauaccaguuuac

SEQ ID NO: 1857725 - RNA, 19 nt, Artificial Sequence
  Description of Artificial Sequence: Synthetic oligonucleotide
cuccagagaacgcgacucc

SEQ ID NO: 1857726 - RNA, 19 nt, Artificial Sequence
  Description of Artificial Sequence: Synthetic oligonucleotide
aguuucacaugaugagcuu

SEQ ID NO: 1857727 - RNA, 19 nt, Artificial Sequence
  Description of Artificial Sequence: Synthetic oligonucleotide
cuucgggcuuggaugugcc

SEQ ID NO: 1857728 - RNA, 19 nt, Artificial Sequence
  Description of Artificial Sequence: Synthetic oligonucleotide
ucccugcauuauccaaucc

SEQ ID NO: 1857729 - RNA, 19 nt, Artificial Sequence
  Description of Artificial Sequence: Synthetic oligonucleotide
cucugcaaagcgguauggc

SEQ ID NO: 1857730 - RNA, 19 nt, Artificial Sequence
  Description of Artificial Sequence: Synthetic oligonucleotide
agcgguauggcugccgcug

SEQ ID NO: 1857731 - RNA, 19 nt, Artificial Sequence
  Description of Artificial Sequence: Synthetic oligonucleotide
ggggcuguaaacuguaaaa

SEQ ID NO: 1857732 - RNA, 19 nt, Artificial Sequence
  Description of Artificial Sequence: Synthetic oligonucleotide
cucagguagauauauuaau

SEQ ID NO: 1857733 - RNA, 19 nt, Artificial Sequence
  Description of Artificial Sequence: Synthetic oligonucleotide
uccgagccggcucugcaaa

SEQ ID NO: 1857734 - RNA, 19 nt, Artificial Sequence
  Description of Artificial Sequence: Synthetic oligonucleotide
auccaaggaauaccaguuu

SEQ ID NO: 1857735 - RNA, 19 nt, Artificial Sequence
  Description of Artificial Sequence: Synthetic oligonucleotide
cuugaaucaguuugcaauu

SEQ ID NO: 1857736 - RNA, 19 nt, Artificial Sequence
  Description of Artificial Sequence: Synthetic oligonucleotide
aauguaccgcugggaagcu

SEQ ID NO: 1857737 - RNA, 19 nt, Artificial Sequence
  Description of Artificial Sequence: Synthetic oligonucleotide
aguagucuugaaaaccgua

SEQ ID NO: 1857738 - RNA, 19 nt, Artificial Sequence
  Description of Artificial Sequence: Synthetic oligonucleotide
gagauggaccucagaggcc

SEQ ID NO: 1857739 - RNA, 19 nt, Artificial Sequence
  Description of Artificial Sequence: Synthetic oligonucleotide
gucauuagugaaucaaguu

SEQ ID NO: 1857740 - RNA, 19 nt, Artificial Sequence
  Description of Artificial Sequence: Synthetic oligonucleotide
gucaaauaugaaggacaug

SEQ ID NO: 1857741 - RNA, 19 nt, Artificial Sequence
  Description of Artificial Sequence: Synthetic oligonucleotide
gauaggcggacaaucuaaa

SEQ ID NO: 1857742 - RNA, 19 nt, Artificial Sequence
  Description of Artificial Sequence: Synthetic oligonucleotide
agaacgcgacucccugcuc

SEQ ID NO: 1857743 - RNA, 19 nt, Artificial Sequence
  Description of Artificial Sequence: Synthetic oligonucleotide
uccauacucuucgggcuug

SEQ ID NO: 1857744 - RNA, 19 nt, Artificial Sequence
  Description of Artificial Sequence: Synthetic oligonucleotide
gggucugucaaucuuauuu

SEQ ID NO: 1857745 - RNA, 19 nt, Artificial Sequence
  Description of Artificial Sequence: Synthetic oligonucleotide
aauucccacucagguagau

SEQ ID NO: 1857746 - RNA, 19 nt, Artificial Sequence
  Description of Artificial Sequence: Synthetic oligonucleotide
cagcugcuaaucgauguac

SEQ ID NO: 1857747 - RNA, 19 nt, Artificial Sequence
  Description of Artificial Sequence: Synthetic oligonucleotide
caaagcgguauggcugccg

SEQ ID NO: 1857748 - RNA, 19 nt, Artificial Sequence
  Description of Artificial Sequence: Synthetic oligonucleotide
ucugcccauauaagccaaa

SEQ ID NO: 1857749 - RNA, 19 nt, Artificial Sequence
  Description of Artificial Sequence: Synthetic oligonucleotide
gugccauccagcggaagcc

SEQ ID NO: 1857750 - RNA, 19 nt, Artificial Sequence
  Description of Artificial Sequence: Synthetic oligonucleotide
caagauaggcggacaaucu

SEQ ID NO: 1857751 - RNA, 19 nt, Artificial Sequence
  Description of Artificial Sequence: Synthetic oligonucleotide
ggcggacaaucuaaaauug

SEQ ID NO: 1857752 - RNA, 19 nt, Artificial Sequence
  Description of Artificial Sequence: Synthetic oligonucleotide
aggacagcugcuaaucgau

SEQ ID NO: 1857753 - RNA, 19 nt, Artificial Sequence
  Description of Artificial Sequence: Synthetic oligonucleotide
uccuguugucugcccauau

SEQ ID NO: 1857754 - RNA, 19 nt, Artificial Sequence
  Description of Artificial Sequence: Synthetic oligonucleotide
guuuuauugcaugacguuu

SEQ ID NO: 1857755 - RNA, 19 nt, Artificial Sequence
  Description of Artificial Sequence: Synthetic oligonucleotide
aagcgguauggcugccgcu

SEQ ID NO: 1857756 - RNA, 19 nt, Artificial Sequence
  Description of Artificial Sequence: Synthetic oligonucleotide
aaacggugaacagguugau

SEQ ID NO: 1857757 - RNA, 19 nt, Artificial Sequence
  Description of Artificial Sequence: Synthetic oligonucleotide
ccacccagaucaaaaguug

SEQ ID NO: 1857758 - RNA, 19 nt, Artificial Sequence
  Description of Artificial Sequence: Synthetic oligonucleotide
cugcccauauaagccaaac

SEQ ID NO: 1857759 - RNA, 19 nt, Artificial Sequence
  Description of Artificial Sequence: Synthetic oligonucleotide
acaccuauucugaaaccaa

SEQ ID NO: 1857760 - RNA, 19 nt, Artificial Sequence
  Description of Artificial Sequence: Synthetic oligonucleotide
uuacagggucugcgacucc

SEQ ID NO: 1857761 - RNA, 19 nt, Artificial Sequence
  Description of Artificial Sequence: Synthetic oligonucleotide
aucucucguaaccucucuu

SEQ ID NO: 1857762 - RNA, 19 nt, Artificial Sequence
  Description of Artificial Sequence: Synthetic oligonucleotide
ggacaaucuaaaauugaaa

SEQ ID NO: 1857763 - RNA, 19 nt, Artificial Sequence
  Description of Artificial Sequence: Synthetic oligonucleotide
ggaagcugaucuuuauaaa

SEQ ID NO: 1857764 - RNA, 19 nt, Artificial Sequence
  Description of Artificial Sequence: Synthetic oligonucleotide
uucgggcuuggaugugccc

SEQ ID NO: 1857765 - RNA, 19 nt, Artificial Sequence
  Description of Artificial Sequence: Synthetic oligonucleotide
caaacaucucucguaaccu

SEQ ID NO: 1857766 - RNA, 19 nt, Artificial Sequence
  Description of Artificial Sequence: Synthetic oligonucleotide
caaacguuguaguuuguuu

SEQ ID NO: 1857767 - RNA, 19 nt, Artificial Sequence
  Description of Artificial Sequence: Synthetic oligonucleotide
agcugcuaaucgauguacu

SEQ ID NO: 1857768 - RNA, 19 nt, Artificial Sequence
  Description of Artificial Sequence: Synthetic oligonucleotide
guaaccucucuucacugau

SEQ ID NO: 1857769 - RNA, 19 nt, Artificial Sequence
  Description of Artificial Sequence: Synthetic oligonucleotide
auuagugaaucaaguucuu

SEQ ID NO: 1857770 - RNA, 19 nt, Artificial Sequence
  Description of Artificial Sequence: Synthetic oligonucleotide
cauaaaaguuucacaugau

SEQ ID NO: 1857771 - RNA, 19 nt, Artificial Sequence
  Description of Artificial Sequence: Synthetic oligonucleotide
ccaauccaaggaauaccag

SEQ ID NO: 1857772 - RNA, 19 nt, Artificial Sequence
  Description of Artificial Sequence: Synthetic oligonucleotide
ccuauucugaaaccaacaa

SEQ ID NO: 1857773 - RNA, 19 nt, Artificial Sequence
  Description of Artificial Sequence: Synthetic oligonucleotide
guauggaauuagaaagcua

SEQ ID NO: 1857774 - RNA, 19 nt, Artificial Sequence
  Description of Artificial Sequence: Synthetic oligonucleotide
cagaucuuacagggucugc

SEQ ID NO: 1857775 - RNA, 19 nt, Artificial Sequence
  Description of Artificial Sequence: Synthetic oligonucleotide
ggacauguccagaucuuac

SEQ ID NO: 1857776 - RNA, 19 nt, Artificial Sequence
  Description of Artificial Sequence: Synthetic oligonucleotide
gguauggcugccgcugucc

SEQ ID NO: 1857777 - RNA, 19 nt, Artificial Sequence
  Description of Artificial Sequence: Synthetic oligonucleotide
acucccugcuccgcgcccg

SEQ ID NO: 1857778 - RNA, 19 nt, Artificial Sequence
  Description of Artificial Sequence: Synthetic oligonucleotide
gcaucaugcaaucacugau

SEQ ID NO: 1857779 - RNA, 19 nt, Artificial Sequence
  Description of Artificial Sequence: Synthetic oligonucleotide
guugggagauggaccucag

SEQ ID NO: 1857780 - RNA, 19 nt, Artificial Sequence
  Description of Artificial Sequence: Synthetic oligonucleotide
cugcgacuccagagaacgc

SEQ ID NO: 1857781 - RNA, 19 nt, Artificial Sequence
  Description of Artificial Sequence: Synthetic oligonucleotide
gggucugcgacuccagaga

SEQ ID NO: 1857782 - RNA, 19 nt, Artificial Sequence
  Description of Artificial Sequence: Synthetic oligonucleotide
gcuaaucgauguacugugc

SEQ ID NO: 1857783 - RNA, 19 nt, Artificial Sequence
  Description of Artificial Sequence: Synthetic oligonucleotide
auccagcggaagccuucuc

SEQ ID NO: 1857784 - RNA, 19 nt, Artificial Sequence
  Description of Artificial Sequence: Synthetic oligonucleotide
gugcuucaaauguaccgcu

SEQ ID NO: 1857785 - RNA, 19 nt, Artificial Sequence
  Description of Artificial Sequence: Synthetic oligonucleotide
ccagaggucuggcauucag

SEQ ID NO: 1857786 - RNA, 19 nt, Artificial Sequence
  Description of Artificial Sequence: Synthetic oligonucleotide
cugcuaaucgauguacugu

SEQ ID NO: 1857787 - RNA, 19 nt, Artificial Sequence
  Description of Artificial Sequence: Synthetic oligonucleotide
agccggcucugcaaagcgg

SEQ ID NO: 1857788 - RNA, 19 nt, Artificial Sequence
  Description of Artificial Sequence: Synthetic oligonucleotide
gagccaaacguuguaguuu

SEQ ID NO: 1857789 - RNA, 19 nt, Artificial Sequence
  Description of Artificial Sequence: Synthetic oligonucleotide
cauugauagcaggaaggua

SEQ ID NO: 1857790 - RNA, 19 nt, Artificial Sequence
  Description of Artificial Sequence: Synthetic oligonucleotide
cggacaaucuaaaauugaa

SEQ ID NO: 1857791 - RNA, 19 nt, Artificial Sequence
  Description of Artificial Sequence: Synthetic oligonucleotide
caauucccacucagguaga

SEQ ID NO: 1857792 - RNA, 19 nt, Artificial Sequence
  Description of Artificial Sequence: Synthetic oligonucleotide
ggaugugcccacccagauc

SEQ ID NO: 1857793 - RNA, 19 nt, Artificial Sequence
  Description of Artificial Sequence: Synthetic oligonucleotide
auucccacucagguagaua

SEQ ID NO: 1857794 - RNA, 19 nt, Artificial Sequence
  Description of Artificial Sequence: Synthetic oligonucleotide
gcggacaaucuaaaauuga

SEQ ID NO: 1857795 - RNA, 19 nt, Artificial Sequence
  Description of Artificial Sequence: Synthetic oligonucleotide
gccuuucauggucugcaca

SEQ ID NO: 1857796 - RNA, 19 nt, Artificial Sequence
  Description of Artificial Sequence: Synthetic oligonucleotide
ggacagcugcuaaucgaug

SEQ ID NO: 1857797 - RNA, 19 nt, Artificial Sequence
  Description of Artificial Sequence: Synthetic oligonucleotide
gcaugacguuugcauaaga

SEQ ID NO: 1857798 - RNA, 19 nt, Artificial Sequence
  Description of Artificial Sequence: Synthetic oligonucleotide
ccagaucuuacagggucug

SEQ ID NO: 1857799 - RNA, 19 nt, Artificial Sequence
  Description of Artificial Sequence: Synthetic oligonucleotide
gcauguguagcaacguugu

SEQ ID NO: 1857800 - RNA, 19 nt, Artificial Sequence
  Description of Artificial Sequence: Synthetic oligonucleotide
gucugcgacuccagagaac

SEQ ID NO: 1857801 - RNA, 19 nt, Artificial Sequence
  Description of Artificial Sequence: Synthetic oligonucleotide
augcauguugggagaugga

SEQ ID NO: 1857802 - RNA, 19 nt, Artificial Sequence
  Description of Artificial Sequence: Synthetic oligonucleotide
auguaccgcugggaagcug

SEQ ID NO: 1857803 - RNA, 19 nt, Artificial Sequence
  Description of Artificial Sequence: Synthetic oligonucleotide
gucugcccauauaagccaa

SEQ ID NO: 1857804 - RNA, 19 nt, Artificial Sequence
  Description of Artificial Sequence: Synthetic oligonucleotide
ggcuucgggucugucaauc

SEQ ID NO: 1857805 - RNA, 19 nt, Artificial Sequence
  Description of Artificial Sequence: Synthetic oligonucleotide
uggcuucgggucugucaau

SEQ ID NO: 1857806 - RNA, 19 nt, Artificial Sequence
  Description of Artificial Sequence: Synthetic oligonucleotide
gcugaucuuuauaaacggu

SEQ ID NO: 1857807 - RNA, 19 nt, Artificial Sequence
  Description of Artificial Sequence: Synthetic oligonucleotide
cagggucugcgacuccaga

SEQ ID NO: 1857808 - RNA, 19 nt, Artificial Sequence
  Description of Artificial Sequence: Synthetic oligonucleotide
uaccgcugggaagcugauc

SEQ ID NO: 1857809 - RNA, 19 nt, Artificial Sequence
  Description of Artificial Sequence: Synthetic oligonucleotide
cuccacgcuccgagccggc

SEQ ID NO: 1857810 - RNA, 19 nt, Artificial Sequence
  Description of Artificial Sequence: Synthetic oligonucleotide
cacugauggcuucgggucu

SEQ ID NO: 1857811 - RNA, 19 nt, Artificial Sequence
  Description of Artificial Sequence: Synthetic oligonucleotide
cccuccacgcuccgagccg

SEQ ID NO: 1857812 - RNA, 19 nt, Artificial Sequence
  Description of Artificial Sequence: Synthetic oligonucleotide
cugggaagcugaucuuuau

SEQ ID NO: 1857813 - RNA, 19 nt, Artificial Sequence
  Description of Artificial Sequence: Synthetic oligonucleotide
gcgacucccugcuccgcgc

SEQ ID NO: 1857814 - RNA, 19 nt, Artificial Sequence
  Description of Artificial Sequence: Synthetic oligonucleotide
cuucgggucugucaaucuu

SEQ ID NO: 1857815 - RNA, 19 nt, Artificial Sequence
  Description of Artificial Sequence: Synthetic oligonucleotide
cucuucgggcuuggaugug

SEQ ID NO: 1857816 - RNA, 19 nt, Artificial Sequence
  Description of Artificial Sequence: Synthetic oligonucleotide
cucccugcuccgcgcccgc

SEQ ID NO: 1857817 - RNA, 19 nt, Artificial Sequence
  Description of Artificial Sequence: Synthetic oligonucleotide
ccgcccuccacgcuccgag

SEQ ID NO: 1857818 - RNA, 19 nt, Artificial Sequence
  Description of Artificial Sequence: Synthetic oligonucleotide
ccuccacgcuccgagccgg

SEQ ID NO: 1857819 - RNA, 19 nt, Artificial Sequence
  Description of Artificial Sequence: Synthetic oligonucleotide
ccguaaggcaucaugcaau

SEQ ID NO: 1857820 - RNA, 19 nt, Artificial Sequence
  Description of Artificial Sequence: Synthetic oligonucleotide
gcgacuccagagaacgcga

SEQ ID NO: 1857821 - RNA, 19 nt, Artificial Sequence
  Description of Artificial Sequence: Synthetic oligonucleotide
cacaagauaggcggacaau

SEQ ID NO: 1857822 - RNA, 19 nt, Artificial Sequence
  Description of Artificial Sequence: Synthetic oligonucleotide
ccauugauagcaggaaggu

SEQ ID NO: 1857823 - RNA, 19 nt, Artificial Sequence
  Description of Artificial Sequence: Synthetic oligonucleotide
cugcccuuuccuguugucu

SEQ ID NO: 1857824 - RNA, 19 nt, Artificial Sequence
  Description of Artificial Sequence: Synthetic oligonucleotide
gcccacccagaucaaaagu

SEQ ID NO: 1857825 - RNA, 19 nt, Artificial Sequence
  Description of Artificial Sequence: Synthetic oligonucleotide
gaaaaccguaaggcaucau

SEQ ID NO: 1857826 - RNA, 19 nt, Artificial Sequence
  Description of Artificial Sequence: Synthetic oligonucleotide
cagcauguguagcaacguu

SEQ ID NO: 1857827 - RNA, 19 nt, Artificial Sequence
  Description of Artificial Sequence: Synthetic oligonucleotide
cgcgacucccugcuccgcg

SEQ ID NO: 1857828 - RNA, 19 nt, Artificial Sequence
  Description of Artificial Sequence: Synthetic oligonucleotide
gcuucgggucugucaaucu

SEQ ID NO: 1857829 - RNA, 19 nt, Artificial Sequence
  Description of Artificial Sequence: Synthetic oligonucleotide
cauccagcggaagccuucu

SEQ ID NO: 1857830 - RNA, 19 nt, Artificial Sequence
  Description of Artificial Sequence: Synthetic oligonucleotide
cauguguagcaacguuguu

SEQ ID NO: 1857831 - RNA, 19 nt, Artificial Sequence
  Description of Artificial Sequence: Synthetic oligonucleotide
ccgagccggcucugcaaag

SEQ ID NO: 1857832 - RNA, 19 nt, Artificial Sequence
  Description of Artificial Sequence: Synthetic oligonucleotide
cgggcuuggaugugcccac

SEQ ID NO: 1857833 - RNA, 19 nt, Artificial Sequence
  Description of Artificial Sequence: Synthetic oligonucleotide
ccagagaacgcgacucccu

SEQ ID NO: 1857834 - RNA, 19 nt, Artificial Sequence
  Description of Artificial Sequence: Synthetic oligonucleotide
gccggcucugcaaagcggu

SEQ ID NO: 1857835 - RNA, 19 nt, Artificial Sequence
  Description of Artificial Sequence: Synthetic oligonucleotide
cgacucccugcuccgcgcc

SEQ ID NO: 1857836 - RNA, 19 nt, Artificial Sequence
  Description of Artificial Sequence: Synthetic oligonucleotide
augugcccacccagaucaa

SEQ ID NO: 1857837 - RNA, 19 nt, Artificial Sequence
  Description of Artificial Sequence: Synthetic oligonucleotide
cuccauagccuugccuuuu

SEQ ID NO: 1857838 - RNA, 19 nt, Artificial Sequence
  Description of Artificial Sequence: Synthetic oligonucleotide
cugcuccgcgcccgcccuc

SEQ ID NO: 1857839 - RNA, 19 nt, Artificial Sequence
  Description of Artificial Sequence: Synthetic oligonucleotide
ggaccucagaggccuggau

SEQ ID NO: 1857840 - RNA, 19 nt, Artificial Sequence
  Description of Artificial Sequence: Synthetic oligonucleotide
acgcuccgagccggcucug

SEQ ID NO: 1857841 - RNA, 19 nt, Artificial Sequence
  Description of Artificial Sequence: Synthetic oligonucleotide
gcgguauggcugccgcugu

SEQ ID NO: 1857842 - RNA, 19 nt, Artificial Sequence
  Description of Artificial Sequence: Synthetic oligonucleotide
guaccgcugggaagcugau

SEQ ID NO: 1857843 - RNA, 19 nt, Artificial Sequence
  Description of Artificial Sequence: Synthetic oligonucleotide
ggucuggcauucagcuccu

SEQ ID NO: 1857844 - RNA, 19 nt, Artificial Sequence
  Description of Artificial Sequence: Synthetic oligonucleotide
gcccgcccuccacgcuccg

SEQ ID NO: 1857845 - RNA, 19 nt, Artificial Sequence
  Description of Artificial Sequence: Synthetic oligonucleotide
gccaaacguuguaguuugu

SEQ ID NO: 1857846 - RNA, 19 nt, Artificial Sequence
  Description of Artificial Sequence: Synthetic oligonucleotide
ccggcucugcaaagcggua

SEQ ID NO: 1857847 - RNA, 19 nt, Artificial Sequence
  Description of Artificial Sequence: Synthetic oligonucleotide
ccgcugggaagcugaucuu

SEQ ID NO: 1857848 - RNA, 19 nt, Artificial Sequence
  Description of Artificial Sequence: Synthetic oligonucleotide
cccgcccuccacgcuccga

SEQ ID NO: 1857849 - RNA, 19 nt, Artificial Sequence
  Description of Artificial Sequence: Synthetic oligonucleotide
cgggucugucaaucuuauu

SEQ ID NO: 1857850 - RNA, 19 nt, Artificial Sequence
  Description of Artificial Sequence: Synthetic oligonucleotide
cgcgcccgcccuccacgcu

SEQ ID NO: 1857851 - RNA, 19 nt, Artificial Sequence
  Description of Artificial Sequence: Synthetic oligonucleotide
aauaaaaguaucgggaacc

SEQ ID NO: 1857852 - RNA, 19 nt, Artificial Sequence
  Description of Artificial Sequence: Synthetic oligonucleotide
uaugauaaggauuugcagg

SEQ ID NO: 1857853 - RNA, 19 nt, Artificial Sequence
  Description of Artificial Sequence: Synthetic oligonucleotide
acuagaauuuuauaauucc

SEQ ID NO: 1857854 - RNA, 19 nt, Artificial Sequence
  Description of Artificial Sequence: Synthetic oligonucleotide
ucugaaacuauuuuaaagc

SEQ ID NO: 1857855 - RNA, 19 nt, Artificial Sequence
  Description of Artificial Sequence: Synthetic oligonucleotide
aaaaugacugugaugagcc

SEQ ID NO: 1857856 - RNA, 19 nt, Artificial Sequence
  Description of Artificial Sequence: Synthetic oligonucleotide
aagcauaugccauauuggc

SEQ ID NO: 1857857 - RNA, 19 nt, Artificial Sequence
  Description of Artificial Sequence: Synthetic oligonucleotide
uguauuuguguuaugaucu

SEQ ID NO: 1857858 - RNA, 19 nt, Artificial Sequence
  Description of Artificial Sequence: Synthetic oligonucleotide
uugguaacaaaauauaugu

SEQ ID NO: 1857859 - RNA, 19 nt, Artificial Sequence
  Description of Artificial Sequence: Synthetic oligonucleotide
acugugaugagccauacuc

SEQ ID NO: 1857860 - RNA, 19 nt, Artificial Sequence
  Description of Artificial Sequence: Synthetic oligonucleotide
ugugugauccacauaauag

SEQ ID NO: 1857861 - RNA, 19 nt, Artificial Sequence
  Description of Artificial Sequence: Synthetic oligonucleotide
uuugguaacaaaauauaug

SEQ ID NO: 1857862 - RNA, 19 nt, Artificial Sequence
  Description of Artificial Sequence: Synthetic oligonucleotide
aaaguuaucugaauaaaag

SEQ ID NO: 1857863 - RNA, 19 nt, Artificial Sequence
  Description of Artificial Sequence: Synthetic oligonucleotide
aaaacuuggauugugauaa

SEQ ID NO: 1857864 - RNA, 19 nt, Artificial Sequence
  Description of Artificial Sequence: Synthetic oligonucleotide
accaugguuaguuaaauuc

SEQ ID NO: 1857865 - RNA, 19 nt, Artificial Sequence
  Description of Artificial Sequence: Synthetic oligonucleotide
uucaacagcaaaauuaacu

SEQ ID NO: 1857866 - RNA, 19 nt, Artificial Sequence
  Description of Artificial Sequence: Synthetic oligonucleotide
uuaguuaaauucccaagag

SEQ ID NO: 1857867 - RNA, 19 nt, Artificial Sequence
  Description of Artificial Sequence: Synthetic oligonucleotide
uaaaccugaagccagucag

SEQ ID NO: 1857868 - RNA, 19 nt, Artificial Sequence
  Description of Artificial Sequence: Synthetic oligonucleotide
uuugcagggaccaggaggg

SEQ ID NO: 1857869 - RNA, 19 nt, Artificial Sequence
  Description of Artificial Sequence: Synthetic oligonucleotide
uaaguugccuuuauuaacc

SEQ ID NO: 1857870 - RNA, 19 nt, Artificial Sequence
  Description of Artificial Sequence: Synthetic oligonucleotide
ucgggcauaaaccugaagc

SEQ ID NO: 1857871 - RNA, 19 nt, Artificial Sequence
  Description of Artificial Sequence: Synthetic oligonucleotide
uuaaauucccaagagaugu

SEQ ID NO: 1857872 - RNA, 19 nt, Artificial Sequence
  Description of Artificial Sequence: Synthetic oligonucleotide
cauauuggcgcuuuaaaag

SEQ ID NO: 1857873 - RNA, 19 nt, Artificial Sequence
  Description of Artificial Sequence: Synthetic oligonucleotide
uggauugugauaaaguuaa

SEQ ID NO: 1857874 - RNA, 19 nt, Artificial Sequence
  Description of Artificial Sequence: Synthetic oligonucleotide
uuuaaagcucuuauaaaac

SEQ ID NO: 1857875 - RNA, 19 nt, Artificial Sequence
  Description of Artificial Sequence: Synthetic oligonucleotide
uacacgaucuccaaguggc

SEQ ID NO: 1857876 - RNA, 19 nt, Artificial Sequence
  Description of Artificial Sequence: Synthetic oligonucleotide
guauucauaauaucuguag

SEQ ID NO: 1857877 - RNA, 19 nt, Artificial Sequence
  Description of Artificial Sequence: Synthetic oligonucleotide
augaagagcaacuucagca

SEQ ID NO: 1857878 - RNA, 19 nt, Artificial Sequence
  Description of Artificial Sequence: Synthetic oligonucleotide
aacuagaauuuuauaauuc

SEQ ID NO: 1857879 - RNA, 19 nt, Artificial Sequence
  Description of Artificial Sequence: Synthetic oligonucleotide
aaaguacuuguuugcaguc

SEQ ID NO: 1857880 - RNA, 19 nt, Artificial Sequence
  Description of Artificial Sequence: Synthetic oligonucleotide
gauucuguggcauucuuug

SEQ ID NO: 1857881 - RNA, 19 nt, Artificial Sequence
  Description of Artificial Sequence: Synthetic oligonucleotide
cuauguaguauuuucuccc

SEQ ID NO: 1857882 - RNA, 19 nt, Artificial Sequence
  Description of Artificial Sequence: Synthetic oligonucleotide
uauaaaacuuggauuguga

SEQ ID NO: 1857883 - RNA, 19 nt, Artificial Sequence
  Description of Artificial Sequence: Synthetic oligonucleotide
uuaaagcucuuauaaaacu

SEQ ID NO: 1857884 - RNA, 19 nt, Artificial Sequence
  Description of Artificial Sequence: Synthetic oligonucleotide
uuauuaaccaaaguacuug

SEQ ID NO: 1857885 - RNA, 19 nt, Artificial Sequence
  Description of Artificial Sequence: Synthetic oligonucleotide
guggucauauuucacaggg

SEQ ID NO: 1857886 - RNA, 19 nt, Artificial Sequence
  Description of Artificial Sequence: Synthetic oligonucleotide
ugcaguaugauaaggauuu

SEQ ID NO: 1857887 - RNA, 19 nt, Artificial Sequence
  Description of Artificial Sequence: Synthetic oligonucleotide
ucuauguaguauuuucucc

SEQ ID NO: 1857888 - RNA, 19 nt, Artificial Sequence
  Description of Artificial Sequence: Synthetic oligonucleotide
uuucuuaauauacagcauu

SEQ ID NO: 1857889 - RNA, 19 nt, Artificial Sequence
  Description of Artificial Sequence: Synthetic oligonucleotide
auugugauaaaguuaacuu

SEQ ID NO: 1857890 - RNA, 19 nt, Artificial Sequence
  Description of Artificial Sequence: Synthetic oligonucleotide
ugaauaaaaguaucgggaa

SEQ ID NO: 1857891 - RNA, 19 nt, Artificial Sequence
  Description of Artificial Sequence: Synthetic oligonucleotide
caauauucaaagcaguuuc

SEQ ID NO: 1857892 - RNA, 19 nt, Artificial Sequence
  Description of Artificial Sequence: Synthetic oligonucleotide
aagggguaaaucuucagaa

SEQ ID NO: 1857893 - RNA, 19 nt, Artificial Sequence
  Description of Artificial Sequence: Synthetic oligonucleotide
ucuguagucuucuuguaca

SEQ ID NO: 1857894 - RNA, 19 nt, Artificial Sequence
  Description of Artificial Sequence: Synthetic oligonucleotide
ugauccacauaauagguuc

SEQ ID NO: 1857895 - RNA, 19 nt, Artificial Sequence
  Description of Artificial Sequence: Synthetic oligonucleotide
gaggaggcugaucauaccg

SEQ ID NO: 1857896 - RNA, 19 nt, Artificial Sequence
  Description of Artificial Sequence: Synthetic oligonucleotide
guuaguuaaauucccaaga

SEQ ID NO: 1857897 - RNA, 19 nt, Artificial Sequence
  Description of Artificial Sequence: Synthetic oligonucleotide
ugaucuauguaguauuuuc

SEQ ID NO: 1857898 - RNA, 19 nt, Artificial Sequence
  Description of Artificial Sequence: Synthetic oligonucleotide
ugugauccacauaauaggu

SEQ ID NO: 1857899 - RNA, 19 nt, Artificial Sequence
  Description of Artificial Sequence: Synthetic oligonucleotide
cugaauaaaaguaucggga

SEQ ID NO: 1857900 - RNA, 19 nt, Artificial Sequence
  Description of Artificial Sequence: Synthetic oligonucleotide
uuaaccaaaguacuuguuu

SEQ ID NO: 1857901 - RNA, 19 nt, Artificial Sequence
  Description of Artificial Sequence: Synthetic oligonucleotide
aaagcucuuauaaaacuug

SEQ ID NO: 1857902 - RNA, 19 nt, Artificial Sequence
  Description of Artificial Sequence: Synthetic oligonucleotide
ucugcuaggcuccugacaa

SEQ ID NO: 1857903 - RNA, 19 nt, Artificial Sequence
  Description of Artificial Sequence: Synthetic oligonucleotide
aucugaauaaaaguaucgg

SEQ ID NO: 1857904 - RNA, 19 nt, Artificial Sequence
  Description of Artificial Sequence: Synthetic oligonucleotide
uuuguguuaugaucuaugu

SEQ ID NO: 1857905 - RNA, 19 nt, Artificial Sequence
  Description of Artificial Sequence: Synthetic oligonucleotide
aggcugaucauaccggggc

SEQ ID NO: 1857906 - RNA, 19 nt, Artificial Sequence
  Description of Artificial Sequence: Synthetic oligonucleotide
uuaacaaucugcuccaguu

SEQ ID NO: 1857907 - RNA, 19 nt, Artificial Sequence
  Description of Artificial Sequence: Synthetic oligonucleotide
ugaaacuauuuuaaagcuc

SEQ ID NO: 1857908 - RNA, 19 nt, Artificial Sequence
  Description of Artificial Sequence: Synthetic oligonucleotide
uuguauucauaauaucugu

SEQ ID NO: 1857909 - RNA, 19 nt, Artificial Sequence
  Description of Artificial Sequence: Synthetic oligonucleotide
uaguuaaauucccaagaga

SEQ ID NO: 1857910 - RNA, 19 nt, Artificial Sequence
  Description of Artificial Sequence: Synthetic oligonucleotide
auuuucaacagcaaaauua

SEQ ID NO: 1857911 - RNA, 19 nt, Artificial Sequence
  Description of Artificial Sequence: Synthetic oligonucleotide
gauuucugcaguaugauaa

SEQ ID NO: 1857912 - RNA, 19 nt, Artificial Sequence
  Description of Artificial Sequence: Synthetic oligonucleotide
caacucagugagaagagcc

SEQ ID NO: 1857913 - RNA, 19 nt, Artificial Sequence
  Description of Artificial Sequence: Synthetic oligonucleotide
uaauagguuccaaauucug

SEQ ID NO: 1857914 - RNA, 19 nt, Artificial Sequence
  Description of Artificial Sequence: Synthetic oligonucleotide
guaugauaaggauuugcag

SEQ ID NO: 1857915 - RNA, 19 nt, Artificial Sequence
  Description of Artificial Sequence: Synthetic oligonucleotide
uuguacacgaucuccaagu

SEQ ID NO: 1857916 - RNA, 19 nt, Artificial Sequence
  Description of Artificial Sequence: Synthetic oligonucleotide
agcaaaauuaacuucuguu

SEQ ID NO: 1857917 - RNA, 19 nt, Artificial Sequence
  Description of Artificial Sequence: Synthetic oligonucleotide
uaguaaguugccuuuauua

SEQ ID NO: 1857918 - RNA, 19 nt, Artificial Sequence
  Description of Artificial Sequence: Synthetic oligonucleotide
acucucgaggaacaucugc

SEQ ID NO: 1857919 - RNA, 19 nt, Artificial Sequence
  Description of Artificial Sequence: Synthetic oligonucleotide
auauuggcgcuuuaaaaga

SEQ ID NO: 1857920 - RNA, 19 nt, Artificial Sequence
  Description of Artificial Sequence: Synthetic oligonucleotide
ucguucaagaggaugacuc

SEQ ID NO: 1857921 - RNA, 19 nt, Artificial Sequence
  Description of Artificial Sequence: Synthetic oligonucleotide
ucauuuaucugaaacuauu

SEQ ID NO: 1857922 - RNA, 19 nt, Artificial Sequence
  Description of Artificial Sequence: Synthetic oligonucleotide
aauucccaagagauguagc

SEQ ID NO: 1857923 - RNA, 19 nt, Artificial Sequence
  Description of Artificial Sequence: Synthetic oligonucleotide
uuuuauuugugugauccac

SEQ ID NO: 1857924 - RNA, 19 nt, Artificial Sequence
  Description of Artificial Sequence: Synthetic oligonucleotide
uucugcaguaugauaagga

SEQ ID NO: 1857925 - RNA, 19 nt, Artificial Sequence
  Description of Artificial Sequence: Synthetic oligonucleotide
uucucauuacuucgugagg

SEQ ID NO: 1857926 - RNA, 19 nt, Artificial Sequence
  Description of Artificial Sequence: Synthetic oligonucleotide
ggaagcauaugccauauug

SEQ ID NO: 1857927 - RNA, 19 nt, Artificial Sequence
  Description of Artificial Sequence: Synthetic oligonucleotide
aguaaguugccuuuauuaa

SEQ ID NO: 1857928 - RNA, 19 nt, Artificial Sequence
  Description of Artificial Sequence: Synthetic oligonucleotide
uugugauaaaguuaacuua

SEQ ID NO: 1857929 - RNA, 19 nt, Artificial Sequence
  Description of Artificial Sequence: Synthetic oligonucleotide
ucucccaauaccugaagug

SEQ ID NO: 1857930 - RNA, 19 nt, Artificial Sequence
  Description of Artificial Sequence: Synthetic oligonucleotide
aaauucugaggacucuacu

SEQ ID NO: 1857931 - RNA, 19 nt, Artificial Sequence
  Description of Artificial Sequence: Synthetic oligonucleotide
ucguacaucuuaacaaucu

SEQ ID NO: 1857932 - RNA, 19 nt, Artificial Sequence
  Description of Artificial Sequence: Synthetic oligonucleotide
agauguagcagcaacucuc

SEQ ID NO: 1857933 - RNA, 19 nt, Artificial Sequence
  Description of Artificial Sequence: Synthetic oligonucleotide
ucccacuucaaaauguggu

SEQ ID NO: 1857934 - RNA, 19 nt, Artificial Sequence
  Description of Artificial Sequence: Synthetic oligonucleotide
uuaugaucuauguaguauu

SEQ ID NO: 1857935 - RNA, 19 nt, Artificial Sequence
  Description of Artificial Sequence: Synthetic oligonucleotide
uucagcauucccugguagg

SEQ ID NO: 1857936 - RNA, 19 nt, Artificial Sequence
  Description of Artificial Sequence: Synthetic oligonucleotide
uuccaaauaguaaguugcc

SEQ ID NO: 1857937 - RNA, 19 nt, Artificial Sequence
  Description of Artificial Sequence: Synthetic oligonucleotide
ucgaggaacaucugcuagg

SEQ ID NO: 1857938 - RNA, 19 nt, Artificial Sequence
  Description of Artificial Sequence: Synthetic oligonucleotide
uguauucauaauaucugua

SEQ ID NO: 1857939 - RNA, 19 nt, Artificial Sequence
  Description of Artificial Sequence: Synthetic oligonucleotide
auaaggauuugcagggacc

SEQ ID NO: 1857940 - RNA, 19 nt, Artificial Sequence
  Description of Artificial Sequence: Synthetic oligonucleotide
aucaugguuguauucauaa

SEQ ID NO: 1857941 - RNA, 19 nt, Artificial Sequence
  Description of Artificial Sequence: Synthetic oligonucleotide
aagcucuuauaaaacuugg

SEQ ID NO: 1857942 - RNA, 19 nt, Artificial Sequence
  Description of Artificial Sequence: Synthetic oligonucleotide
cucguucccauccaggagg

SEQ ID NO: 1857943 - RNA, 19 nt, Artificial Sequence
  Description of Artificial Sequence: Synthetic oligonucleotide
ugaugagccauacucucga

SEQ ID NO: 1857944 - RNA, 19 nt, Artificial Sequence
  Description of Artificial Sequence: Synthetic oligonucleotide
agagaucaugguuguauuc

SEQ ID NO: 1857945 - RNA, 19 nt, Artificial Sequence
  Description of Artificial Sequence: Synthetic oligonucleotide
aauagguuccaaauucuga

SEQ ID NO: 1857946 - RNA, 19 nt, Artificial Sequence
  Description of Artificial Sequence: Synthetic oligonucleotide
aguuguauuuguguuauga

SEQ ID NO: 1857947 - RNA, 19 nt, Artificial Sequence
  Description of Artificial Sequence: Synthetic oligonucleotide
agggguaaaucuucagaac

SEQ ID NO: 1857948 - RNA, 19 nt, Artificial Sequence
  Description of Artificial Sequence: Synthetic oligonucleotide
uuccaacucagugagaaga

SEQ ID NO: 1857949 - RNA, 19 nt, Artificial Sequence
  Description of Artificial Sequence: Synthetic oligonucleotide
ggucauauuucacaggggc

SEQ ID NO: 1857950 - RNA, 19 nt, Artificial Sequence
  Description of Artificial Sequence: Synthetic oligonucleotide
guaaguugccuuuauuaac

SEQ ID NO: 1857951 - RNA, 19 nt, Artificial Sequence
  Description of Artificial Sequence: Synthetic oligonucleotide
guaagaagaaggugcagac

SEQ ID NO: 1857952 - RNA, 19 nt, Artificial Sequence
  Description of Artificial Sequence: Synthetic oligonucleotide
acaucuuaacaaucugcuc

SEQ ID NO: 1857953 - RNA, 19 nt, Artificial Sequence
  Description of Artificial Sequence: Synthetic oligonucleotide
cuggauuccuuucaguuug

SEQ ID NO: 1857954 - RNA, 19 nt, Artificial Sequence
  Description of Artificial Sequence: Synthetic oligonucleotide
auaaaacuuggauugugau

SEQ ID NO: 1857955 - RNA, 19 nt, Artificial Sequence
  Description of Artificial Sequence: Synthetic oligonucleotide
uuucaguuugcuguggcug

SEQ ID NO: 1857956 - RNA, 19 nt, Artificial Sequence
  Description of Artificial Sequence: Synthetic oligonucleotide
aguuaucugaauaaaagua

SEQ ID NO: 1857957 - RNA, 19 nt, Artificial Sequence
  Description of Artificial Sequence: Synthetic oligonucleotide
uguuugcagucauuuaucu

SEQ ID NO: 1857958 - RNA, 19 nt, Artificial Sequence
  Description of Artificial Sequence: Synthetic oligonucleotide
uaaaacuuggauugugaua

SEQ ID NO: 1857959 - RNA, 19 nt, Artificial Sequence
  Description of Artificial Sequence: Synthetic oligonucleotide
aauauucaaagcaguuucu

SEQ ID NO: 1857960 - RNA, 19 nt, Artificial Sequence
  Description of Artificial Sequence: Synthetic oligonucleotide
ucugcaguaugauaaggau

SEQ ID NO: 1857961 - RNA, 19 nt, Artificial Sequence
  Description of Artificial Sequence: Synthetic oligonucleotide
uugcgauuuuccaacucag

SEQ ID NO: 1857962 - RNA, 19 nt, Artificial Sequence
  Description of Artificial Sequence: Synthetic oligonucleotide
ucauauuucacaggggcuc

SEQ ID NO: 1857963 - RNA, 19 nt, Artificial Sequence
  Description of Artificial Sequence: Synthetic oligonucleotide
gggguaaaucuucagaacc

SEQ ID NO: 1857964 - RNA, 19 nt, Artificial Sequence
  Description of Artificial Sequence: Synthetic oligonucleotide
gguuaguuaaauucccaag

SEQ ID NO: 1857965 - RNA, 19 nt, Artificial Sequence
  Description of Artificial Sequence: Synthetic oligonucleotide
ugugaugagccauacucuc

SEQ ID NO: 1857966 - RNA, 19 nt, Artificial Sequence
  Description of Artificial Sequence: Synthetic oligonucleotide
gauuccuuucaguuugcug

SEQ ID NO: 1857967 - RNA, 19 nt, Artificial Sequence
  Description of Artificial Sequence: Synthetic oligonucleotide
agugugccuccccugauuc

SEQ ID NO: 1857968 - RNA, 19 nt, Artificial Sequence
  Description of Artificial Sequence: Synthetic oligonucleotide
aucuuaacaaucugcucca

SEQ ID NO: 1857969 - RNA, 19 nt, Artificial Sequence
  Description of Artificial Sequence: Synthetic oligonucleotide
uaaggauuugcagggacca

SEQ ID NO: 1857970 - RNA, 19 nt, Artificial Sequence
  Description of Artificial Sequence: Synthetic oligonucleotide
ucuacucguucccauccag

SEQ ID NO: 1857971 - RNA, 19 nt, Artificial Sequence
  Description of Artificial Sequence: Synthetic oligonucleotide
uguacacgaucuccaagug

SEQ ID NO: 1857972 - RNA, 19 nt, Artificial Sequence
  Description of Artificial Sequence: Synthetic oligonucleotide
cuccugacaagguaagaag

SEQ ID NO: 1857973 - RNA, 19 nt, Artificial Sequence
  Description of Artificial Sequence: Synthetic oligonucleotide
uuggcgcuuuaaaagauaa

SEQ ID NO: 1857974 - RNA, 19 nt, Artificial Sequence
  Description of Artificial Sequence: Synthetic oligonucleotide
guacaucuuaacaaucugc

SEQ ID NO: 1857975 - RNA, 19 nt, Artificial Sequence
  Description of Artificial Sequence: Synthetic oligonucleotide
uuguuugcagucauuuauc

SEQ ID NO: 1857976 - RNA, 19 nt, Artificial Sequence
  Description of Artificial Sequence: Synthetic oligonucleotide
uggucauauuucacagggg

SEQ ID NO: 1857977 - RNA, 19 nt, Artificial Sequence
  Description of Artificial Sequence: Synthetic oligonucleotide
cauaccggggcacacuggg

SEQ ID NO: 1857978 - RNA, 19 nt, Artificial Sequence
  Description of Artificial Sequence: Synthetic oligonucleotide
ugguuaguuaaauucccaa

SEQ ID NO: 1857979 - RNA, 19 nt, Artificial Sequence
  Description of Artificial Sequence: Synthetic oligonucleotide
aguccuucucguucaagag

SEQ ID NO: 1857980 - RNA, 19 nt, Artificial Sequence
  Description of Artificial Sequence: Synthetic oligonucleotide
acagucuauugcuuuucuc

SEQ ID NO: 1857981 - RNA, 19 nt, Artificial Sequence
  Description of Artificial Sequence: Synthetic oligonucleotide
uguagucuucuuguacacg

SEQ ID NO: 1857982 - RNA, 19 nt, Artificial Sequence
  Description of Artificial Sequence: Synthetic oligonucleotide
guacacgaucuccaagugg

SEQ ID NO: 1857983 - RNA, 19 nt, Artificial Sequence
  Description of Artificial Sequence: Synthetic oligonucleotide
uucagaaccaugguuaguu

SEQ ID NO: 1857984 - RNA, 19 nt, Artificial Sequence
  Description of Artificial Sequence: Synthetic oligonucleotide
aaugacugugaugagccau

SEQ ID NO: 1857985 - RNA, 19 nt, Artificial Sequence
  Description of Artificial Sequence: Synthetic oligonucleotide
uaugaucuauguaguauuu

SEQ ID NO: 1857986 - RNA, 19 nt, Artificial Sequence
  Description of Artificial Sequence: Synthetic oligonucleotide
ucccaauaccugaagugug

SEQ ID NO: 1857987 - RNA, 19 nt, Artificial Sequence
  Description of Artificial Sequence: Synthetic oligonucleotide
ugaguuguauuuguguuau

SEQ ID NO: 1857988 - RNA, 19 nt, Artificial Sequence
  Description of Artificial Sequence: Synthetic oligonucleotide
auaauuccaaauaguaagu

SEQ ID NO: 1857989 - RNA, 19 nt, Artificial Sequence
  Description of Artificial Sequence: Synthetic oligonucleotide
ucaaagcaguuucuuaaua

SEQ ID NO: 1857990 - RNA, 19 nt, Artificial Sequence
  Description of Artificial Sequence: Synthetic oligonucleotide
gaugacuccaaugaguugu

SEQ ID NO: 1857991 - RNA, 19 nt, Artificial Sequence
  Description of Artificial Sequence: Synthetic oligonucleotide
agcauaugccauauuggcg

SEQ ID NO: 1857992 - RNA, 19 nt, Artificial Sequence
  Description of Artificial Sequence: Synthetic oligonucleotide
agagcaacuucagcauucc

SEQ ID NO: 1857993 - RNA, 19 nt, Artificial Sequence
  Description of Artificial Sequence: Synthetic oligonucleotide
ggugcagacagucuauugc

SEQ ID NO: 1857994 - RNA, 19 nt, Artificial Sequence
  Description of Artificial Sequence: Synthetic oligonucleotide
auuuguguuaugaucuaug

SEQ ID NO: 1857995 - RNA, 19 nt, Artificial Sequence
  Description of Artificial Sequence: Synthetic oligonucleotide
guuaaauucccaagagaug

SEQ ID NO: 1857996 - RNA, 19 nt, Artificial Sequence
  Description of Artificial Sequence: Synthetic oligonucleotide
ugcuaggcuccugacaagg

SEQ ID NO: 1857997 - RNA, 19 nt, Artificial Sequence
  Description of Artificial Sequence: Synthetic oligonucleotide
agccauacucucgaggaac

SEQ ID NO: 1857998 - RNA, 19 nt, Artificial Sequence
  Description of Artificial Sequence: Synthetic oligonucleotide
gauguagcagcaacucucc

SEQ ID NO: 1857999 - RNA, 19 nt, Artificial Sequence
  Description of Artificial Sequence: Synthetic oligonucleotide
auacucucgaggaacaucu

SEQ ID NO: 1858000 - RNA, 19 nt, Artificial Sequence
  Description of Artificial Sequence: Synthetic oligonucleotide
aagguaagaagaaggugca

SEQ ID NO: 1858001 - RNA, 19 nt, Artificial Sequence
  Description of Artificial Sequence: Synthetic oligonucleotide
uucccauccaggaggaagu

SEQ ID NO: 1858002 - RNA, 19 nt, Artificial Sequence
  Description of Artificial Sequence: Synthetic oligonucleotide
uacucguucccauccagga

SEQ ID NO: 1858003 - RNA, 19 nt, Artificial Sequence
  Description of Artificial Sequence: Synthetic oligonucleotide
ucauaauaucuguagucuu

SEQ ID NO: 1858004 - RNA, 19 nt, Artificial Sequence
  Description of Artificial Sequence: Synthetic oligonucleotide
agagcucccacuucaaaau

SEQ ID NO: 1858005 - RNA, 19 nt, Artificial Sequence
  Description of Artificial Sequence: Synthetic oligonucleotide
agaaggugcagacagucua

SEQ ID NO: 1858006 - RNA, 19 nt, Artificial Sequence
  Description of Artificial Sequence: Synthetic oligonucleotide
caugguuguauucauaaua

SEQ ID NO: 1858007 - RNA, 19 nt, Artificial Sequence
  Description of Artificial Sequence: Synthetic oligonucleotide
caaauucugaggacucuac

SEQ ID NO: 1858008 - RNA, 19 nt, Artificial Sequence
  Description of Artificial Sequence: Synthetic oligonucleotide
gaagaaggugcagacaguc

SEQ ID NO: 1858009 - RNA, 19 nt, Artificial Sequence
  Description of Artificial Sequence: Synthetic oligonucleotide
auuugguaacaaaauauau

SEQ ID NO: 1858010 - RNA, 19 nt, Artificial Sequence
  Description of Artificial Sequence: Synthetic oligonucleotide
gagcccuuuuauuugugug

SEQ ID NO: 1858011 - RNA, 19 nt, Artificial Sequence
  Description of Artificial Sequence: Synthetic oligonucleotide
aagagauguagcagcaacu

SEQ ID NO: 1858012 - RNA, 19 nt, Artificial Sequence
  Description of Artificial Sequence: Synthetic oligonucleotide
uauuggcgcuuuaaaagau

SEQ ID NO: 1858013 - RNA, 19 nt, Artificial Sequence
  Description of Artificial Sequence: Synthetic oligonucleotide
ugucuguaggccucguaca

SEQ ID NO: 1858014 - RNA, 19 nt, Artificial Sequence
  Description of Artificial Sequence: Synthetic oligonucleotide
uacagcauuuggaagcaua

SEQ ID NO: 1858015 - RNA, 19 nt, Artificial Sequence
  Description of Artificial Sequence: Synthetic oligonucleotide
agcccuuuuauuuguguga

SEQ ID NO: 1858016 - RNA, 19 nt, Artificial Sequence
  Description of Artificial Sequence: Synthetic oligonucleotide
uguuaugaucuauguagua

SEQ ID NO: 1858017 - RNA, 19 nt, Artificial Sequence
  Description of Artificial Sequence: Synthetic oligonucleotide
cuuguacacgaucuccaag

SEQ ID NO: 1858018 - RNA, 19 nt, Artificial Sequence
  Description of Artificial Sequence: Synthetic oligonucleotide
aggggcucgggcauaaacc

SEQ ID NO: 1858019 - RNA, 19 nt, Artificial Sequence
  Description of Artificial Sequence: Synthetic oligonucleotide
uaaaaguaucgggaaccag

SEQ ID NO: 1858020 - RNA, 19 nt, Artificial Sequence
  Description of Artificial Sequence: Synthetic oligonucleotide
uuguguuaugaucuaugua

SEQ ID NO: 1858021 - RNA, 19 nt, Artificial Sequence
  Description of Artificial Sequence: Synthetic oligonucleotide
cugcuugcgauuuuccaac

SEQ ID NO: 1858022 - RNA, 19 nt, Artificial Sequence
  Description of Artificial Sequence: Synthetic oligonucleotide
auaauagguuccaaauucu

SEQ ID NO: 1858023 - RNA, 19 nt, Artificial Sequence
  Description of Artificial Sequence: Synthetic oligonucleotide
aucauaccggggcacacug

SEQ ID NO: 1858024 - RNA, 19 nt, Artificial Sequence
  Description of Artificial Sequence: Synthetic oligonucleotide
cuugcgauuuuccaacuca

SEQ ID NO: 1858025 - RNA, 19 nt, Artificial Sequence
  Description of Artificial Sequence: Synthetic oligonucleotide
aaaugacugugaugagcca

SEQ ID NO: 1858026 - RNA, 19 nt, Artificial Sequence
  Description of Artificial Sequence: Synthetic oligonucleotide
uccuguaccccuuuucauc

SEQ ID NO: 1858027 - RNA, 19 nt, Artificial Sequence
  Description of Artificial Sequence: Synthetic oligonucleotide
aagccagucagggauuucu

SEQ ID NO: 1858028 - RNA, 19 nt, Artificial Sequence
  Description of Artificial Sequence: Synthetic oligonucleotide
gcugguaugugaugggagg

SEQ ID NO: 1858029 - RNA, 19 nt, Artificial Sequence
  Description of Artificial Sequence: Synthetic oligonucleotide
cauauuucacaggggcucg

SEQ ID NO: 1858030 - RNA, 19 nt, Artificial Sequence
  Description of Artificial Sequence: Synthetic oligonucleotide
cuacucguucccauccagg

SEQ ID NO: 1858031 - RNA, 19 nt, Artificial Sequence
  Description of Artificial Sequence: Synthetic oligonucleotide
acaauauucaaagcaguuu

SEQ ID NO: 1858032 - RNA, 19 nt, Artificial Sequence
  Description of Artificial Sequence: Synthetic oligonucleotide
acuuggauugugauaaagu

SEQ ID NO: 1858033 - RNA, 19 nt, Artificial Sequence
  Description of Artificial Sequence: Synthetic oligonucleotide
uccaaauaguaaguugccu

SEQ ID NO: 1858034 - RNA, 19 nt, Artificial Sequence
  Description of Artificial Sequence: Synthetic oligonucleotide
gcgauuuuccaacucagug

SEQ ID NO: 1858035 - RNA, 19 nt, Artificial Sequence
  Description of Artificial Sequence: Synthetic oligonucleotide
auguagcagcaacucuccc

SEQ ID NO: 1858036 - RNA, 19 nt, Artificial Sequence
  Description of Artificial Sequence: Synthetic oligonucleotide
uugguucaauaagagaaaa

SEQ ID NO: 1858037 - RNA, 19 nt, Artificial Sequence
  Description of Artificial Sequence: Synthetic oligonucleotide
uaagaagaaggugcagaca

SEQ ID NO: 1858038 - RNA, 19 nt, Artificial Sequence
  Description of Artificial Sequence: Synthetic oligonucleotide
augguuguauucauaauau

SEQ ID NO: 1858039 - RNA, 19 nt, Artificial Sequence
  Description of Artificial Sequence: Synthetic oligonucleotide
auaaaaguaucgggaacca

SEQ ID NO: 1858040 - RNA, 19 nt, Artificial Sequence
  Description of Artificial Sequence: Synthetic oligonucleotide
ggcgcuuuaaaagauaaca

SEQ ID NO: 1858041 - RNA, 19 nt, Artificial Sequence
  Description of Artificial Sequence: Synthetic oligonucleotide
agcauucccugguaggugu

SEQ ID NO: 1858042 - RNA, 19 nt, Artificial Sequence
  Description of Artificial Sequence: Synthetic oligonucleotide
aaugccuggguaugaugau

SEQ ID NO: 1858043 - RNA, 19 nt, Artificial Sequence
  Description of Artificial Sequence: Synthetic oligonucleotide
aacucagugagaagagccu

SEQ ID NO: 1858044 - RNA, 19 nt, Artificial Sequence
  Description of Artificial Sequence: Synthetic oligonucleotide
gauccacauaauagguucc

SEQ ID NO: 1858045 - RNA, 19 nt, Artificial Sequence
  Description of Artificial Sequence: Synthetic oligonucleotide
uguaccccuuuucaucaac

SEQ ID NO: 1858046 - RNA, 19 nt, Artificial Sequence
  Description of Artificial Sequence: Synthetic oligonucleotide
cucccacuucaaaaugugg

SEQ ID NO: 1858047 - RNA, 19 nt, Artificial Sequence
  Description of Artificial Sequence: Synthetic oligonucleotide
aaccaugguuaguuaaauu

SEQ ID NO: 1858048 - RNA, 19 nt, Artificial Sequence
  Description of Artificial Sequence: Synthetic oligonucleotide
gaggacucuacucguuccc

SEQ ID NO: 1858049 - RNA, 19 nt, Artificial Sequence
  Description of Artificial Sequence: Synthetic oligonucleotide
cugaaacuauuuuaaagcu

SEQ ID NO: 1858050 - RNA, 19 nt, Artificial Sequence
  Description of Artificial Sequence: Synthetic oligonucleotide
ucagcauucccugguaggu

SEQ ID NO: 1858051 - RNA, 19 nt, Artificial Sequence
  Description of Artificial Sequence: Synthetic oligonucleotide
acugcugucucugcuugcg

SEQ ID NO: 1858052 - RNA, 19 nt, Artificial Sequence
  Description of Artificial Sequence: Synthetic oligonucleotide
ugcgauuuuccaacucagu

SEQ ID NO: 1858053 - RNA, 19 nt, Artificial Sequence
  Description of Artificial Sequence: Synthetic oligonucleotide
aggaggaaguccuucucgu

SEQ ID NO: 1858054 - RNA, 19 nt, Artificial Sequence
  Description of Artificial Sequence: Synthetic oligonucleotide
augaguuguauuuguguua

SEQ ID NO: 1858055 - RNA, 19 nt, Artificial Sequence
  Description of Artificial Sequence: Synthetic oligonucleotide
uacuuguuugcagucauuu

SEQ ID NO: 1858056 - RNA, 19 nt, Artificial Sequence
  Description of Artificial Sequence: Synthetic oligonucleotide
ucauaccggggcacacugg

SEQ ID NO: 1858057 - RNA, 19 nt, Artificial Sequence
  Description of Artificial Sequence: Synthetic oligonucleotide
agcaacucucccaauaccu

SEQ ID NO: 1858058 - RNA, 19 nt, Artificial Sequence
  Description of Artificial Sequence: Synthetic oligonucleotide
cauaccacugcugucucug

SEQ ID NO: 1858059 - RNA, 19 nt, Artificial Sequence
  Description of Artificial Sequence: Synthetic oligonucleotide
cuggguaugaugaugcucu

SEQ ID NO: 1858060 - RNA, 19 nt, Artificial Sequence
  Description of Artificial Sequence: Synthetic oligonucleotide
cucguacaucuuaacaauc

SEQ ID NO: 1858061 - RNA, 19 nt, Artificial Sequence
  Description of Artificial Sequence: Synthetic oligonucleotide
ugagcccuuuuauuugugu

SEQ ID NO: 1858062 - RNA, 19 nt, Artificial Sequence
  Description of Artificial Sequence: Synthetic oligonucleotide
ugguuguauucauaauauc

SEQ ID NO: 1858063 - RNA, 19 nt, Artificial Sequence
  Description of Artificial Sequence: Synthetic oligonucleotide
acacugggagcacaggggu

SEQ ID NO: 1858064 - RNA, 19 nt, Artificial Sequence
  Description of Artificial Sequence: Synthetic oligonucleotide
uucugaggacucuacucgu

SEQ ID NO: 1858065 - RNA, 19 nt, Artificial Sequence
  Description of Artificial Sequence: Synthetic oligonucleotide
uaugugaugggaggaggcu

SEQ ID NO: 1858066 - RNA, 19 nt, Artificial Sequence
  Description of Artificial Sequence: Synthetic oligonucleotide
gaugagccauacucucgag

SEQ ID NO: 1858067 - RNA, 19 nt, Artificial Sequence
  Description of Artificial Sequence: Synthetic oligonucleotide
cuguagucuucuuguacac

SEQ ID NO: 1858068 - RNA, 19 nt, Artificial Sequence
  Description of Artificial Sequence: Synthetic oligonucleotide
ucaagaggaugacuccaau

SEQ ID NO: 1858069 - RNA, 19 nt, Artificial Sequence
  Description of Artificial Sequence: Synthetic oligonucleotide
uuugugugauccacauaau

SEQ ID NO: 1858070 - RNA, 19 nt, Artificial Sequence
  Description of Artificial Sequence: Synthetic oligonucleotide
caaaguacuuguuugcagu

SEQ ID NO: 1858071 - RNA, 19 nt, Artificial Sequence
  Description of Artificial Sequence: Synthetic oligonucleotide
aaguaucgggaaccagagu

SEQ ID NO: 1858072 - RNA, 19 nt, Artificial Sequence
  Description of Artificial Sequence: Synthetic oligonucleotide
agacagucuauugcuuuuc

SEQ ID NO: 1858073 - RNA, 19 nt, Artificial Sequence
  Description of Artificial Sequence: Synthetic oligonucleotide
auaguaaguugccuuuauu

SEQ ID NO: 1858074 - RNA, 19 nt, Artificial Sequence
  Description of Artificial Sequence: Synthetic oligonucleotide
ucgggaaccagagucucca

SEQ ID NO: 1858075 - RNA, 19 nt, Artificial Sequence
  Description of Artificial Sequence: Synthetic oligonucleotide
uaggccucguacaucuuaa

SEQ ID NO: 1858076 - RNA, 19 nt, Artificial Sequence
  Description of Artificial Sequence: Synthetic oligonucleotide
gaagagaucaugguuguau

SEQ ID NO: 1858077 - RNA, 19 nt, Artificial Sequence
  Description of Artificial Sequence: Synthetic oligonucleotide
gugaugagccauacucucg

SEQ ID NO: 1858078 - RNA, 19 nt, Artificial Sequence
  Description of Artificial Sequence: Synthetic oligonucleotide
ggaggcugaucauaccggg

SEQ ID NO: 1858079 - RNA, 19 nt, Artificial Sequence
  Description of Artificial Sequence: Synthetic oligonucleotide
ggcauaaaccugaagccag

SEQ ID NO: 1858080 - RNA, 19 nt, Artificial Sequence
  Description of Artificial Sequence: Synthetic oligonucleotide
ucaugguuguauucauaau

SEQ ID NO: 1858081 - RNA, 19 nt, Artificial Sequence
  Description of Artificial Sequence: Synthetic oligonucleotide
cuuccuguaccccuuuuca

SEQ ID NO: 1858082 - RNA, 19 nt, Artificial Sequence
  Description of Artificial Sequence: Synthetic oligonucleotide
agggacuggauuccuuuca

SEQ ID NO: 1858083 - RNA, 19 nt, Artificial Sequence
  Description of Artificial Sequence: Synthetic oligonucleotide
cucuuauaaaacuuggauu

SEQ ID NO: 1858084 - RNA, 19 nt, Artificial Sequence
  Description of Artificial Sequence: Synthetic oligonucleotide
cacauaauagguuccaaau

SEQ ID NO: 1858085 - RNA, 19 nt, Artificial Sequence
  Description of Artificial Sequence: Synthetic oligonucleotide
cuuggauugugauaaaguu

SEQ ID NO: 1858086 - RNA, 19 nt, Artificial Sequence
  Description of Artificial Sequence: Synthetic oligonucleotide
gaucuauguaguauuuucu

SEQ ID NO: 1858087 - RNA, 19 nt, Artificial Sequence
  Description of Artificial Sequence: Synthetic oligonucleotide
accggggcacacugggagc

SEQ ID NO: 1858088 - RNA, 19 nt, Artificial Sequence
  Description of Artificial Sequence: Synthetic oligonucleotide
uauuugugugauccacaua

SEQ ID NO: 1858089 - RNA, 19 nt, Artificial Sequence
  Description of Artificial Sequence: Synthetic oligonucleotide
acucagugagaagagccug

SEQ ID NO: 1858090 - RNA, 19 nt, Artificial Sequence
  Description of Artificial Sequence: Synthetic oligonucleotide
aggaggcugaucauaccgg

SEQ ID NO: 1858091 - RNA, 19 nt, Artificial Sequence
  Description of Artificial Sequence: Synthetic oligonucleotide
agggauuucugcaguauga

SEQ ID NO: 1858092 - RNA, 19 nt, Artificial Sequence
  Description of Artificial Sequence: Synthetic oligonucleotide
cagggauuucugcaguaug

SEQ ID NO: 1858093 - RNA, 19 nt, Artificial Sequence
  Description of Artificial Sequence: Synthetic oligonucleotide
cuucucguucaagaggaug

SEQ ID NO: 1858094 - RNA, 19 nt, Artificial Sequence
  Description of Artificial Sequence: Synthetic oligonucleotide
gaggcugaucauaccgggg

SEQ ID NO: 1858095 - RNA, 19 nt, Artificial Sequence
  Description of Artificial Sequence: Synthetic oligonucleotide
aucugcuaggcuccugaca

SEQ ID NO: 1858096 - RNA, 19 nt, Artificial Sequence
  Description of Artificial Sequence: Synthetic oligonucleotide
ugauaaggauuugcaggga

SEQ ID NO: 1858097 - RNA, 19 nt, Artificial Sequence
  Description of Artificial Sequence: Synthetic oligonucleotide
uccaggucagccagcugga

SEQ ID NO: 1858098 - RNA, 19 nt, Artificial Sequence
  Description of Artificial Sequence: Synthetic oligonucleotide
acagcaaaauuaacuucug

SEQ ID NO: 1858099 - RNA, 19 nt, Artificial Sequence
  Description of Artificial Sequence: Synthetic oligonucleotide
guuaugaucuauguaguau

SEQ ID NO: 1858100 - RNA, 19 nt, Artificial Sequence
  Description of Artificial Sequence: Synthetic oligonucleotide
ucucgaggaacaucugcua

SEQ ID NO: 1858101 - RNA, 19 nt, Artificial Sequence
  Description of Artificial Sequence: Synthetic oligonucleotide
aguugccuuuauuaaccaa

SEQ ID NO: 1858102 - RNA, 19 nt, Artificial Sequence
  Description of Artificial Sequence: Synthetic oligonucleotide
gacucuacucguucccauc

SEQ ID NO: 1858103 - RNA, 19 nt, Artificial Sequence
  Description of Artificial Sequence: Synthetic oligonucleotide
uuggaagcauaugccauau

SEQ ID NO: 1858104 - RNA, 19 nt, Artificial Sequence
  Description of Artificial Sequence: Synthetic oligonucleotide
ucagaaccaugguuaguua

SEQ ID NO: 1858105 - RNA, 19 nt, Artificial Sequence
  Description of Artificial Sequence: Synthetic oligonucleotide
uggcgcuuuaaaagauaac

SEQ ID NO: 1858106 - RNA, 19 nt, Artificial Sequence
  Description of Artificial Sequence: Synthetic oligonucleotide
ugcugucucugcuugcgau

SEQ ID NO: 1858107 - RNA, 19 nt, Artificial Sequence
  Description of Artificial Sequence: Synthetic oligonucleotide
guccaguccacagaccagc

SEQ ID NO: 1858108 - RNA, 19 nt, Artificial Sequence
  Description of Artificial Sequence: Synthetic oligonucleotide
aguuugcuguggcugguau

SEQ ID NO: 1858109 - RNA, 19 nt, Artificial Sequence
  Description of Artificial Sequence: Synthetic oligonucleotide
acagcauuuggaagcauau

SEQ ID NO: 1858110 - RNA, 19 nt, Artificial Sequence
  Description of Artificial Sequence: Synthetic oligonucleotide
aggccucguacaucuuaac

SEQ ID NO: 1858111 - RNA, 19 nt, Artificial Sequence
  Description of Artificial Sequence: Synthetic oligonucleotide
cuccaaugaguuguauuug

SEQ ID NO: 1858112 - RNA, 19 nt, Artificial Sequence
  Description of Artificial Sequence: Synthetic oligonucleotide
uuccuguaccccuuuucau

SEQ ID NO: 1858113 - RNA, 19 nt, Artificial Sequence
  Description of Artificial Sequence: Synthetic oligonucleotide
ggaagggguaaaucuucag

SEQ ID NO: 1858114 - RNA, 19 nt, Artificial Sequence
  Description of Artificial Sequence: Synthetic oligonucleotide
uagucuucuuguacacgau

SEQ ID NO: 1858115 - RNA, 19 nt, Artificial Sequence
  Description of Artificial Sequence: Synthetic oligonucleotide
augguuaguuaaauuccca

SEQ ID NO: 1858116 - RNA, 19 nt, Artificial Sequence
  Description of Artificial Sequence: Synthetic oligonucleotide
uacucucgaggaacaucug

SEQ ID NO: 1858117 - RNA, 19 nt, Artificial Sequence
  Description of Artificial Sequence: Synthetic oligonucleotide
guuccaaauucugaggacu

SEQ ID NO: 1858118 - RNA, 19 nt, Artificial Sequence
  Description of Artificial Sequence: Synthetic oligonucleotide
auccacauaauagguucca

SEQ ID NO: 1858119 - RNA, 19 nt, Artificial Sequence
  Description of Artificial Sequence: Synthetic oligonucleotide
cccaauaccugaagugugc

SEQ ID NO: 1858120 - RNA, 19 nt, Artificial Sequence
  Description of Artificial Sequence: Synthetic oligonucleotide
cugaagugugccuccccug

SEQ ID NO: 1858121 - RNA, 19 nt, Artificial Sequence
  Description of Artificial Sequence: Synthetic oligonucleotide
cagaaccaugguuaguuaa

SEQ ID NO: 1858122 - RNA, 19 nt, Artificial Sequence
  Description of Artificial Sequence: Synthetic oligonucleotide
gccucguacaucuuaacaa

SEQ ID NO: 1858123 - RNA, 19 nt, Artificial Sequence
  Description of Artificial Sequence: Synthetic oligonucleotide
gcucuuauaaaacuuggau

SEQ ID NO: 1858124 - RNA, 19 nt, Artificial Sequence
  Description of Artificial Sequence: Synthetic oligonucleotide
uaugccauauuggcgcuuu

SEQ ID NO: 1858125 - RNA, 19 nt, Artificial Sequence
  Description of Artificial Sequence: Synthetic oligonucleotide
ucagggauuucugcaguau

SEQ ID NO: 1858126 - RNA, 19 nt, Artificial Sequence
  Description of Artificial Sequence: Synthetic oligonucleotide
uaucgggaaccagagucuc

SEQ ID NO: 1858127 - RNA, 19 nt, Artificial Sequence
  Description of Artificial Sequence: Synthetic oligonucleotide
caaauaguaaguugccuuu

SEQ ID NO: 1858128 - RNA, 19 nt, Artificial Sequence
  Description of Artificial Sequence: Synthetic oligonucleotide
uucccugguagguguccag

SEQ ID NO: 1858129 - RNA, 19 nt, Artificial Sequence
  Description of Artificial Sequence: Synthetic oligonucleotide
cgggcauaaaccugaagcc

SEQ ID NO: 1858130 - RNA, 19 nt, Artificial Sequence
  Description of Artificial Sequence: Synthetic oligonucleotide
cacaggggugccuguacug

SEQ ID NO: 1858131 - RNA, 19 nt, Artificial Sequence
  Description of Artificial Sequence: Synthetic oligonucleotide
ugcuugcgauuuuccaacu

SEQ ID NO: 1858132 - RNA, 19 nt, Artificial Sequence
  Description of Artificial Sequence: Synthetic oligonucleotide
gaguuguauuuguguuaug

SEQ ID NO: 1858133 - RNA, 19 nt, Artificial Sequence
  Description of Artificial Sequence: Synthetic oligonucleotide
agguaagaagaaggugcag

SEQ ID NO: 1858134 - RNA, 19 nt, Artificial Sequence
  Description of Artificial Sequence: Synthetic oligonucleotide
ugccauauuggcgcuuuaa

SEQ ID NO: 1858135 - RNA, 19 nt, Artificial Sequence
  Description of Artificial Sequence: Synthetic oligonucleotide
ugaucauaccggggcacac

SEQ ID NO: 1858136 - RNA, 19 nt, Artificial Sequence
  Description of Artificial Sequence: Synthetic oligonucleotide
caaguggccuccuccucug

SEQ ID NO: 1858137 - RNA, 19 nt, Artificial Sequence
  Description of Artificial Sequence: Synthetic oligonucleotide
gugcagacagucuauugcu

SEQ ID NO: 1858138 - RNA, 19 nt, Artificial Sequence
  Description of Artificial Sequence: Synthetic oligonucleotide
cauuuaucugaaacuauuu

SEQ ID NO: 1858139 - RNA, 19 nt, Artificial Sequence
  Description of Artificial Sequence: Synthetic oligonucleotide
uggcugguaugugauggga

SEQ ID NO: 1858140 - RNA, 19 nt, Artificial Sequence
  Description of Artificial Sequence: Synthetic oligonucleotide
ugacugugaugagccauac

SEQ ID NO: 1858141 - RNA, 19 nt, Artificial Sequence
  Description of Artificial Sequence: Synthetic oligonucleotide
ucuguaggccucguacauc

SEQ ID NO: 1858142 - RNA, 19 nt, Artificial Sequence
  Description of Artificial Sequence: Synthetic oligonucleotide
cucucgaggaacaucugcu

SEQ ID NO: 1858143 - RNA, 19 nt, Artificial Sequence
  Description of Artificial Sequence: Synthetic oligonucleotide
auuaaccaaaguacuuguu

SEQ ID NO: 1858144 - RNA, 19 nt, Artificial Sequence
  Description of Artificial Sequence: Synthetic oligonucleotide
caggggcucgggcauaaac

SEQ ID NO: 1858145 - RNA, 19 nt, Artificial Sequence
  Description of Artificial Sequence: Synthetic oligonucleotide
cugagcccuuuuauuugug

SEQ ID NO: 1858146 - RNA, 19 nt, Artificial Sequence
  Description of Artificial Sequence: Synthetic oligonucleotide
gacagucuauugcuuuucu

SEQ ID NO: 1858147 - RNA, 19 nt, Artificial Sequence
  Description of Artificial Sequence: Synthetic oligonucleotide
ugggcauaccacugcuguc

SEQ ID NO: 1858148 - RNA, 19 nt, Artificial Sequence
  Description of Artificial Sequence: Synthetic oligonucleotide
gacuccaaugaguuguauu

SEQ ID NO: 1858149 - RNA, 19 nt, Artificial Sequence
  Description of Artificial Sequence: Synthetic oligonucleotide
ucccucucauuguccaguc

SEQ ID NO: 1858150 - RNA, 19 nt, Artificial Sequence
  Description of Artificial Sequence: Synthetic oligonucleotide
aaggugcagacagucuauu

SEQ ID NO: 1858151 - RNA, 19 nt, Artificial Sequence
  Description of Artificial Sequence: Synthetic oligonucleotide
guaggccucguacaucuua

SEQ ID NO: 1858152 - RNA, 19 nt, Artificial Sequence
  Description of Artificial Sequence: Synthetic oligonucleotide
uucccaugcugcugggcau

SEQ ID NO: 1858153 - RNA, 19 nt, Artificial Sequence
  Description of Artificial Sequence: Synthetic oligonucleotide
ccauauuggcgcuuuaaaa

SEQ ID NO: 1858154 - RNA, 19 nt, Artificial Sequence
  Description of Artificial Sequence: Synthetic oligonucleotide
cucgggcauaaaccugaag

SEQ ID NO: 1858155 - RNA, 19 nt, Artificial Sequence
  Description of Artificial Sequence: Synthetic oligonucleotide
ggccucguacaucuuaaca

SEQ ID NO: 1858156 - RNA, 19 nt, Artificial Sequence
  Description of Artificial Sequence: Synthetic oligonucleotide
cuucaaaauguggucauau

SEQ ID NO: 1858157 - RNA, 19 nt, Artificial Sequence
  Description of Artificial Sequence: Synthetic oligonucleotide
uccccugauucuguggcau

SEQ ID NO: 1858158 - RNA, 19 nt, Artificial Sequence
  Description of Artificial Sequence: Synthetic oligonucleotide
aggacucuacucguuccca

SEQ ID NO: 1858159 - RNA, 19 nt, Artificial Sequence
  Description of Artificial Sequence: Synthetic oligonucleotide
guaccccuuuucaucaaca

SEQ ID NO: 1858160 - RNA, 19 nt, Artificial Sequence
  Description of Artificial Sequence: Synthetic oligonucleotide
gaucaugguuguauucaua

SEQ ID NO: 1858161 - RNA, 19 nt, Artificial Sequence
  Description of Artificial Sequence: Synthetic oligonucleotide
guguuaugaucuauguagu

SEQ ID NO: 1858162 - RNA, 19 nt, Artificial Sequence
  Description of Artificial Sequence: Synthetic oligonucleotide
cacugggagcacaggggug

SEQ ID NO: 1858163 - RNA, 19 nt, Artificial Sequence
  Description of Artificial Sequence: Synthetic oligonucleotide
auuggcgcuuuaaaagaua

SEQ ID NO: 1858164 - RNA, 19 nt, Artificial Sequence
  Description of Artificial Sequence: Synthetic oligonucleotide
ccuguaccccuuuucauca

SEQ ID NO: 1858165 - RNA, 19 nt, Artificial Sequence
  Description of Artificial Sequence: Synthetic oligonucleotide
cugguaugugaugggagga

SEQ ID NO: 1858166 - RNA, 19 nt, Artificial Sequence
  Description of Artificial Sequence: Synthetic oligonucleotide
cugcuaggcuccugacaag

SEQ ID NO: 1858167 - RNA, 19 nt, Artificial Sequence
  Description of Artificial Sequence: Synthetic oligonucleotide
cuaggcuccugacaaggua

SEQ ID NO: 1858168 - RNA, 19 nt, Artificial Sequence
  Description of Artificial Sequence: Synthetic oligonucleotide
ggcugguaugugaugggag

SEQ ID NO: 1858169 - RNA, 19 nt, Artificial Sequence
  Description of Artificial Sequence: Synthetic oligonucleotide
cuguggcugguaugugaug

SEQ ID NO: 1858170 - RNA, 19 nt, Artificial Sequence
  Description of Artificial Sequence: Synthetic oligonucleotide
cugggcauaccacugcugu

SEQ ID NO: 1858171 - RNA, 19 nt, Artificial Sequence
  Description of Artificial Sequence: Synthetic oligonucleotide
gaaccaugguuaguuaaau

SEQ ID NO: 1858172 - RNA, 19 nt, Artificial Sequence
  Description of Artificial Sequence: Synthetic oligonucleotide
gggcauaaaccugaagcca

SEQ ID NO: 1858173 - RNA, 19 nt, Artificial Sequence
  Description of Artificial Sequence: Synthetic oligonucleotide
gucauauuucacaggggcu

SEQ ID NO: 1858174 - RNA, 19 nt, Artificial Sequence
  Description of Artificial Sequence: Synthetic oligonucleotide
ggaaccagagucuccauuu

SEQ ID NO: 1858175 - RNA, 19 nt, Artificial Sequence
  Description of Artificial Sequence: Synthetic oligonucleotide
gagccauacucucgaggaa

SEQ ID NO: 1858176 - RNA, 19 nt, Artificial Sequence
  Description of Artificial Sequence: Synthetic oligonucleotide
gccauauuggcgcuuuaaa

SEQ ID NO: 1858177 - RNA, 19 nt, Artificial Sequence
  Description of Artificial Sequence: Synthetic oligonucleotide
ggaggaggcugaucauacc

SEQ ID NO: 1858178 - RNA, 19 nt, Artificial Sequence
  Description of Artificial Sequence: Synthetic oligonucleotide
uggaagcauaugccauauu

SEQ ID NO: 1858179 - RNA, 19 nt, Artificial Sequence
  Description of Artificial Sequence: Synthetic oligonucleotide
cagcauucccugguaggug

SEQ ID NO: 1858180 - RNA, 19 nt, Artificial Sequence
  Description of Artificial Sequence: Synthetic oligonucleotide
cugcaguaugauaaggauu

SEQ ID NO: 1858181 - RNA, 19 nt, Artificial Sequence
  Description of Artificial Sequence: Synthetic oligonucleotide
ggauuugcagggaccagga

SEQ ID NO: 1858182 - RNA, 19 nt, Artificial Sequence
  Description of Artificial Sequence: Synthetic oligonucleotide
ccacauaauagguuccaaa

SEQ ID NO: 1858183 - RNA, 19 nt, Artificial Sequence
  Description of Artificial Sequence: Synthetic oligonucleotide
augggaggaggcugaucau

SEQ ID NO: 1858184 - RNA, 19 nt, Artificial Sequence
  Description of Artificial Sequence: Synthetic oligonucleotide
gcuccugacaagguaagaa

SEQ ID NO: 1858185 - RNA, 19 nt, Artificial Sequence
  Description of Artificial Sequence: Synthetic oligonucleotide
guaucgggaaccagagucu

SEQ ID NO: 1858186 - RNA, 19 nt, Artificial Sequence
  Description of Artificial Sequence: Synthetic oligonucleotide
cagcaaaauuaacuucugu

SEQ ID NO: 1858187 - RNA, 19 nt, Artificial Sequence
  Description of Artificial Sequence: Synthetic oligonucleotide
ccaaauaguaaguugccuu

SEQ ID NO: 1858188 - RNA, 19 nt, Artificial Sequence
  Description of Artificial Sequence: Synthetic oligonucleotide
ugacuccaaugaguuguau

SEQ ID NO: 1858189 - RNA, 19 nt, Artificial Sequence
  Description of Artificial Sequence: Synthetic oligonucleotide
cgaggaacaucugcuaggc

SEQ ID NO: 1858190 - RNA, 19 nt, Artificial Sequence
  Description of Artificial Sequence: Synthetic oligonucleotide
cucucccaauaccugaagu

SEQ ID NO: 1858191 - RNA, 19 nt, Artificial Sequence
  Description of Artificial Sequence: Synthetic oligonucleotide
gaucauaccggggcacacu

SEQ ID NO: 1858192 - RNA, 19 nt, Artificial Sequence
  Description of Artificial Sequence: Synthetic oligonucleotide
caauaccugaagugugccu

SEQ ID NO: 1858193 - RNA, 19 nt, Artificial Sequence
  Description of Artificial Sequence: Synthetic oligonucleotide
ggcucgggcauaaaccuga

SEQ ID NO: 1858194 - RNA, 19 nt, Artificial Sequence
  Description of Artificial Sequence: Synthetic oligonucleotide
gaaggugcagacagucuau

SEQ ID NO: 1858195 - RNA, 19 nt, Artificial Sequence
  Description of Artificial Sequence: Synthetic oligonucleotide
cauaugccauauuggcgcu

SEQ ID NO: 1858196 - RNA, 19 nt, Artificial Sequence
  Description of Artificial Sequence: Synthetic oligonucleotide
gcuugcgauuuuccaacuc

SEQ ID NO: 1858197 - RNA, 19 nt, Artificial Sequence
  Description of Artificial Sequence: Synthetic oligonucleotide
gucuguaggccucguacau

SEQ ID NO: 1858198 - RNA, 19 nt, Artificial Sequence
  Description of Artificial Sequence: Synthetic oligonucleotide
ggcugaucauaccggggca

SEQ ID NO: 1858199 - RNA, 19 nt, Artificial Sequence
  Description of Artificial Sequence: Synthetic oligonucleotide
gacugugaugagccauacu

SEQ ID NO: 1858200 - RNA, 19 nt, Artificial Sequence
  Description of Artificial Sequence: Synthetic oligonucleotide
gaccaggagggacuggauu

SEQ ID NO: 1858201 - RNA, 19 nt, Artificial Sequence
  Description of Artificial Sequence: Synthetic oligonucleotide
ccuggguaugaugaugcuc

SEQ ID NO: 1858202 - RNA, 19 nt, Artificial Sequence
  Description of Artificial Sequence: Synthetic oligonucleotide
ucccaugcugcugggcaua

SEQ ID NO: 1858203 - RNA, 19 nt, Artificial Sequence
  Description of Artificial Sequence: Synthetic oligonucleotide
gggaagggguaaaucuuca

SEQ ID NO: 1858204 - RNA, 19 nt, Artificial Sequence
  Description of Artificial Sequence: Synthetic oligonucleotide
ggauugugauaaaguuaac

SEQ ID NO: 1858205 - RNA, 19 nt, Artificial Sequence
  Description of Artificial Sequence: Synthetic oligonucleotide
gcaguaugauaaggauuug

SEQ ID NO: 1858206 - RNA, 19 nt, Artificial Sequence
  Description of Artificial Sequence: Synthetic oligonucleotide
gaagugugccuccccugau

SEQ ID NO: 1858207 - RNA, 19 nt, Artificial Sequence
  Description of Artificial Sequence: Synthetic oligonucleotide
cugggagcacaggggugcc

SEQ ID NO: 1858208 - RNA, 19 nt, Artificial Sequence
  Description of Artificial Sequence: Synthetic oligonucleotide
augacuccaaugaguugua

SEQ ID NO: 1858209 - RNA, 19 nt, Artificial Sequence
  Description of Artificial Sequence: Synthetic oligonucleotide
cuccccugauucuguggca

SEQ ID NO: 1858210 - RNA, 19 nt, Artificial Sequence
  Description of Artificial Sequence: Synthetic oligonucleotide
cagacagucuauugcuuuu

SEQ ID NO: 1858211 - RNA, 19 nt, Artificial Sequence
  Description of Artificial Sequence: Synthetic oligonucleotide
gggcauaccacugcugucu

SEQ ID NO: 1858212 - RNA, 19 nt, Artificial Sequence
  Description of Artificial Sequence: Synthetic oligonucleotide
uagcagcaacucucccaau

SEQ ID NO: 1858213 - RNA, 19 nt, Artificial Sequence
  Description of Artificial Sequence: Synthetic oligonucleotide
auaugccauauuggcgcuu

SEQ ID NO: 1858214 - RNA, 19 nt, Artificial Sequence
  Description of Artificial Sequence: Synthetic oligonucleotide
gccauacucucgaggaaca

SEQ ID NO: 1858215 - RNA, 19 nt, Artificial Sequence
  Description of Artificial Sequence: Synthetic oligonucleotide
gcgcuuuaaaagauaacau

SEQ ID NO: 1858216 - RNA, 19 nt, Artificial Sequence
  Description of Artificial Sequence: Synthetic oligonucleotide
ccucguacaucuuaacaau

SEQ ID NO: 1858217 - RNA, 19 nt, Artificial Sequence
  Description of Artificial Sequence: Synthetic oligonucleotide
augccauauuggcgcuuua

SEQ ID NO: 1858218 - RNA, 19 nt, Artificial Sequence
  Description of Artificial Sequence: Synthetic oligonucleotide
cugcugucucugcuugcga

SEQ ID NO: 1858219 - RNA, 19 nt, Artificial Sequence
  Description of Artificial Sequence: Synthetic oligonucleotide
cuguaccccuuuucaucaa

SEQ ID NO: 1858220 - RNA, 19 nt, Artificial Sequence
  Description of Artificial Sequence: Synthetic oligonucleotide
cucguucaagaggaugacu

SEQ ID NO: 1858221 - RNA, 19 nt, Artificial Sequence
  Description of Artificial Sequence: Synthetic oligonucleotide
ggacuggauuccuuucagu

SEQ ID NO: 1858222 - RNA, 19 nt, Artificial Sequence
  Description of Artificial Sequence: Synthetic oligonucleotide
cccucucauuguccagucc

SEQ ID NO: 1858223 - RNA, 19 nt, Artificial Sequence
  Description of Artificial Sequence: Synthetic oligonucleotide
ccaaauucugaggacucua

SEQ ID NO: 1858224 - RNA, 19 nt, Artificial Sequence
  Description of Artificial Sequence: Synthetic oligonucleotide
cuucagaaccaugguuagu

SEQ ID NO: 1858225 - RNA, 19 nt, Artificial Sequence
  Description of Artificial Sequence: Synthetic oligonucleotide
aggagggacuggauuccuu

SEQ ID NO: 1858226 - RNA, 19 nt, Artificial Sequence
  Description of Artificial Sequence: Synthetic oligonucleotide
ugccuguacugagcccuuu

SEQ ID NO: 1858227 - RNA, 19 nt, Artificial Sequence
  Description of Artificial Sequence: Synthetic oligonucleotide
cugaagccagucagggauu

SEQ ID NO: 1858228 - RNA, 19 nt, Artificial Sequence
  Description of Artificial Sequence: Synthetic oligonucleotide
cugucucugcuugcgauuu

SEQ ID NO: 1858229 - RNA, 19 nt, Artificial Sequence
  Description of Artificial Sequence: Synthetic oligonucleotide
gugugccuccccugauucu

SEQ ID NO: 1858230 - RNA, 19 nt, Artificial Sequence
  Description of Artificial Sequence: Synthetic oligonucleotide
gcauaaaccugaagccagu

SEQ ID NO: 1858231 - RNA, 19 nt, Artificial Sequence
  Description of Artificial Sequence: Synthetic oligonucleotide
ggacucuacucguucccau

SEQ ID NO: 1858232 - RNA, 19 nt, Artificial Sequence
  Description of Artificial Sequence: Synthetic oligonucleotide
gcccuuuuauuugugugau

SEQ ID NO: 1858233 - RNA, 19 nt, Artificial Sequence
  Description of Artificial Sequence: Synthetic oligonucleotide
ggcuccugacaagguaaga

SEQ ID NO: 1858234 - RNA, 19 nt, Artificial Sequence
  Description of Artificial Sequence: Synthetic oligonucleotide
ggaagagaucaugguugua

SEQ ID NO: 1858235 - RNA, 19 nt, Artificial Sequence
  Description of Artificial Sequence: Synthetic oligonucleotide
guacuuguuugcagucauu

SEQ ID NO: 1858236 - RNA, 19 nt, Artificial Sequence
  Description of Artificial Sequence: Synthetic oligonucleotide
gcauaccacugcugucucu

SEQ ID NO: 1858237 - RNA, 19 nt, Artificial Sequence
  Description of Artificial Sequence: Synthetic oligonucleotide
ccaagagauguagcagcaa

SEQ ID NO: 1858238 - RNA, 19 nt, Artificial Sequence
  Description of Artificial Sequence: Synthetic oligonucleotide
gcuaggcuccugacaaggu

SEQ ID NO: 1858239 - RNA, 19 nt, Artificial Sequence
  Description of Artificial Sequence: Synthetic oligonucleotide
gccuggguaugaugaugcu

SEQ ID NO: 1858240 - RNA, 19 nt, Artificial Sequence
  Description of Artificial Sequence: Synthetic oligonucleotide
ccggggcacacugggagca

SEQ ID NO: 1858241 - RNA, 19 nt, Artificial Sequence
  Description of Artificial Sequence: Synthetic oligonucleotide
ccuuuucaucaacaauauu

SEQ ID NO: 1858242 - RNA, 19 nt, Artificial Sequence
  Description of Artificial Sequence: Synthetic oligonucleotide
gccuguacugagcccuuuu

SEQ ID NO: 1858243 - RNA, 19 nt, Artificial Sequence
  Description of Artificial Sequence: Synthetic oligonucleotide
gugaugggaggaggcugau

SEQ ID NO: 1858244 - RNA, 19 nt, Artificial Sequence
  Description of Artificial Sequence: Synthetic oligonucleotide
gcucgggcauaaaccugaa

SEQ ID NO: 1858245 - RNA, 19 nt, Artificial Sequence
  Description of Artificial Sequence: Synthetic oligonucleotide
ggaccaggagggacuggau

SEQ ID NO: 1858246 - RNA, 19 nt, Artificial Sequence
  Description of Artificial Sequence: Synthetic oligonucleotide
ccuucucguucaagaggau

SEQ ID NO: 1858247 - RNA, 19 nt, Artificial Sequence
  Description of Artificial Sequence: Synthetic oligonucleotide
ccccugauucuguggcauu

SEQ ID NO: 1858248 - RNA, 19 nt, Artificial Sequence
  Description of Artificial Sequence: Synthetic oligonucleotide
cguucccauccaggaggaa

SEQ ID NO: 1858249 - RNA, 19 nt, Artificial Sequence
  Description of Artificial Sequence: Synthetic oligonucleotide
cgggaaccagagucuccau

SEQ ID NO: 1858250 - RNA, 19 nt, Artificial Sequence
  Description of Artificial Sequence: Synthetic oligonucleotide
acauacacaggcuugaugc

SEQ ID NO: 1858251 - RNA, 19 nt, Artificial Sequence
  Description of Artificial Sequence: Synthetic oligonucleotide
aacuuugccagccuucacc

SEQ ID NO: 1858252 - RNA, 19 nt, Artificial Sequence
  Description of Artificial Sequence: Synthetic oligonucleotide
uucuccaucaugcggaugg

SEQ ID NO: 1858253 - RNA, 19 nt, Artificial Sequence
  Description of Artificial Sequence: Synthetic oligonucleotide
cuugaugucauucucucgg

SEQ ID NO: 1858254 - RNA, 19 nt, Artificial Sequence
  Description of Artificial Sequence: Synthetic oligonucleotide
agugaggcaguccaugucc

SEQ ID NO: 1858255 - RNA, 19 nt, Artificial Sequence
  Description of Artificial Sequence: Synthetic oligonucleotide
guagucacuacccagcagg

SEQ ID NO: 1858256 - RNA, 19 nt, Artificial Sequence
  Description of Artificial Sequence: Synthetic oligonucleotide
gagaucuacaaacugcucc

SEQ ID NO: 1858257 - RNA, 19 nt, Artificial Sequence
  Description of Artificial Sequence: Synthetic oligonucleotide
ucagaugucgcauuaguac

SEQ ID NO: 1858258 - RNA, 19 nt, Artificial Sequence
  Description of Artificial Sequence: Synthetic oligonucleotide
aaaacugcuuuucaccaca

SEQ ID NO: 1858259 - RNA, 19 nt, Artificial Sequence
  Description of Artificial Sequence: Synthetic oligonucleotide
uugaagaaaucaucuaggc

SEQ ID NO: 1858260 - RNA, 19 nt, Artificial Sequence
  Description of Artificial Sequence: Synthetic oligonucleotide
acugcguuuggccagcucg

SEQ ID NO: 1858261 - RNA, 19 nt, Artificial Sequence
  Description of Artificial Sequence: Synthetic oligonucleotide
aagaaaucaucuaggcggc

SEQ ID NO: 1858262 - RNA, 19 nt, Artificial Sequence
  Description of Artificial Sequence: Synthetic oligonucleotide
cuuguugggauccagccgc

SEQ ID NO: 1858263 - RNA, 19 nt, Artificial Sequence
  Description of Artificial Sequence: Synthetic oligonucleotide
auuugaccaacucuucuuc

SEQ ID NO: 1858264 - RNA, 19 nt, Artificial Sequence
  Description of Artificial Sequence: Synthetic oligonucleotide
ucucacaguagucacuacc

SEQ ID NO: 1858265 - RNA, 19 nt, Artificial Sequence
  Description of Artificial Sequence: Synthetic oligonucleotide
ucggcaauuaguuuggcaa

SEQ ID NO: 1858266 - RNA, 19 nt, Artificial Sequence
  Description of Artificial Sequence: Synthetic oligonucleotide
ugcggcauaaacuuugcca

SEQ ID NO: 1858267 - RNA, 19 nt, Artificial Sequence
  Description of Artificial Sequence: Synthetic oligonucleotide
cacaucggcaauuaguuug

SEQ ID NO: 1858268 - RNA, 19 nt, Artificial Sequence
  Description of Artificial Sequence: Synthetic oligonucleotide
ucaucauuguguugcuugg

SEQ ID NO: 1858269 - RNA, 19 nt, Artificial Sequence
  Description of Artificial Sequence: Synthetic oligonucleotide
agguggaacucuuggaugg

SEQ ID NO: 1858270 - RNA, 19 nt, Artificial Sequence
  Description of Artificial Sequence: Synthetic oligonucleotide
aauuugaccaacucuucuu

SEQ ID NO: 1858271 - RNA, 19 nt, Artificial Sequence
  Description of Artificial Sequence: Synthetic oligonucleotide
uuuggcaaggcuugaauuc

SEQ ID NO: 1858272 - RNA, 19 nt, Artificial Sequence
  Description of Artificial Sequence: Synthetic oligonucleotide
acaugaauuugaccaacuc

SEQ ID NO: 1858273 - RNA, 19 nt, Artificial Sequence
  Description of Artificial Sequence: Synthetic oligonucleotide
auacucucacaguagucac

SEQ ID NO: 1858274 - RNA, 19 nt, Artificial Sequence
  Description of Artificial Sequence: Synthetic oligonucleotide
ugcagagaucuacaaacug

SEQ ID NO: 1858275 - RNA, 19 nt, Artificial Sequence
  Description of Artificial Sequence: Synthetic oligonucleotide
aaaagugaggcaguccaug

SEQ ID NO: 1858276 - RNA, 19 nt, Artificial Sequence
  Description of Artificial Sequence: Synthetic oligonucleotide
aaagugaggcaguccaugu

SEQ ID NO: 1858277 - RNA, 19 nt, Artificial Sequence
  Description of Artificial Sequence: Synthetic oligonucleotide
uacuuguugggauccagcc

SEQ ID NO: 1858278 - RNA, 19 nt, Artificial Sequence
  Description of Artificial Sequence: Synthetic oligonucleotide
aaagacauacacaggcuug

SEQ ID NO: 1858279 - RNA, 19 nt, Artificial Sequence
  Description of Artificial Sequence: Synthetic oligonucleotide
ugucgcauuaguacagggc

SEQ ID NO: 1858280 - RNA, 19 nt, Artificial Sequence
  Description of Artificial Sequence: Synthetic oligonucleotide
gaauucucuccucagaaaa

SEQ ID NO: 1858281 - RNA, 19 nt, Artificial Sequence
  Description of Artificial Sequence: Synthetic oligonucleotide
aauuaguuuggcaaggcuu

SEQ ID NO: 1858282 - RNA, 19 nt, Artificial Sequence
  Description of Artificial Sequence: Synthetic oligonucleotide
gauacucucacaguaguca

SEQ ID NO: 1858283 - RNA, 19 nt, Artificial Sequence
  Description of Artificial Sequence: Synthetic oligonucleotide
augcccaugagacucagca

SEQ ID NO: 1858284 - RNA, 19 nt, Artificial Sequence
  Description of Artificial Sequence: Synthetic oligonucleotide
ucacuacccagcaggaugc

SEQ ID NO: 1858285 - RNA, 19 nt, Artificial Sequence
  Description of Artificial Sequence: Synthetic oligonucleotide
auuaguacagggcugccaa

SEQ ID NO: 1858286 - RNA, 19 nt, Artificial Sequence
  Description of Artificial Sequence: Synthetic oligonucleotide
aagugaggcaguccauguc

SEQ ID NO: 1858287 - RNA, 19 nt, Artificial Sequence
  Description of Artificial Sequence: Synthetic oligonucleotide
uacgcuuagccgaggagag

SEQ ID NO: 1858288 - RNA, 19 nt, Artificial Sequence
  Description of Artificial Sequence: Synthetic oligonucleotide
acuacgaauucucuccuca

SEQ ID NO: 1858289 - RNA, 19 nt, Artificial Sequence
  Description of Artificial Sequence: Synthetic oligonucleotide
uuuggcucgcuccacuuca

SEQ ID NO: 1858290 - RNA, 19 nt, Artificial Sequence
  Description of Artificial Sequence: Synthetic oligonucleotide
acuuguugggauccagccg

SEQ ID NO: 1858291 - RNA, 19 nt, Artificial Sequence
  Description of Artificial Sequence: Synthetic oligonucleotide
ucaagguacgggaugccca

SEQ ID NO: 1858292 - RNA, 19 nt, Artificial Sequence
  Description of Artificial Sequence: Synthetic oligonucleotide
agacucagcagguguuugc

SEQ ID NO: 1858293 - RNA, 19 nt, Artificial Sequence
  Description of Artificial Sequence: Synthetic oligonucleotide
ugagccagucacuuugaag

SEQ ID NO: 1858294 - RNA, 19 nt, Artificial Sequence
  Description of Artificial Sequence: Synthetic oligonucleotide
ccgucaaagacauacacag

SEQ ID NO: 1858295 - RNA, 19 nt, Artificial Sequence
  Description of Artificial Sequence: Synthetic oligonucleotide
gucacuacccagcaggaug

SEQ ID NO: 1858296 - RNA, 19 nt, Artificial Sequence
  Description of Artificial Sequence: Synthetic oligonucleotide
acugggugcgucaagguac

SEQ ID NO: 1858297 - RNA, 19 nt, Artificial Sequence
  Description of Artificial Sequence: Synthetic oligonucleotide
guagaacaugcccaucagg

SEQ ID NO: 1858298 - RNA, 19 nt, Artificial Sequence
  Description of Artificial Sequence: Synthetic oligonucleotide
aaacuuugccagccuucac

SEQ ID NO: 1858299 - RNA, 19 nt, Artificial Sequence
  Description of Artificial Sequence: Synthetic oligonucleotide
ucauucugcagcacauccc

SEQ ID NO: 1858300 - RNA, 19 nt, Artificial Sequence
  Description of Artificial Sequence: Synthetic oligonucleotide
cuuugugaacuucuccacc

SEQ ID NO: 1858301 - RNA, 19 nt, Artificial Sequence
  Description of Artificial Sequence: Synthetic oligonucleotide
caggacgcggcucaggugg

SEQ ID NO: 1858302 - RNA, 19 nt, Artificial Sequence
  Description of Artificial Sequence: Synthetic oligonucleotide
uucaccacacaugaauuug

SEQ ID NO: 1858303 - RNA, 19 nt, Artificial Sequence
  Description of Artificial Sequence: Synthetic oligonucleotide
uuacgcuuagccgaggaga

SEQ ID NO: 1858304 - RNA, 19 nt, Artificial Sequence
  Description of Artificial Sequence: Synthetic oligonucleotide
gaacaggguacuuguuggg

SEQ ID NO: 1858305 - RNA, 19 nt, Artificial Sequence
  Description of Artificial Sequence: Synthetic oligonucleotide
ccaguuuucuggaacaggg

SEQ ID NO: 1858306 - RNA, 19 nt, Artificial Sequence
  Description of Artificial Sequence: Synthetic oligonucleotide
gaaaucaucuaggcggccc

SEQ ID NO: 1858307 - RNA, 19 nt, Artificial Sequence
  Description of Artificial Sequence: Synthetic oligonucleotide
ucaccacacaugaauuuga

SEQ ID NO: 1858308 - RNA, 19 nt, Artificial Sequence
  Description of Artificial Sequence: Synthetic oligonucleotide
uucagcuucagcucgccuc

SEQ ID NO: 1858309 - RNA, 19 nt, Artificial Sequence
  Description of Artificial Sequence: Synthetic oligonucleotide
cacaguagucacuacccag

SEQ ID NO: 1858310 - RNA, 19 nt, Artificial Sequence
  Description of Artificial Sequence: Synthetic oligonucleotide
ugccgucaaagacauacac

SEQ ID NO: 1858311 - RNA, 19 nt, Artificial Sequence
  Description of Artificial Sequence: Synthetic oligonucleotide
aauggaggggaggacacgu

SEQ ID NO: 1858312 - RNA, 19 nt, Artificial Sequence
  Description of Artificial Sequence: Synthetic oligonucleotide
acagcaaucaggaacuggu

SEQ ID NO: 1858313 - RNA, 19 nt, Artificial Sequence
  Description of Artificial Sequence: Synthetic oligonucleotide
ucuuggaugggcagcuucu

SEQ ID NO: 1858314 - RNA, 19 nt, Artificial Sequence
  Description of Artificial Sequence: Synthetic oligonucleotide
caaggcuugaauucccaug

SEQ ID NO: 1858315 - RNA, 19 nt, Artificial Sequence
  Description of Artificial Sequence: Synthetic oligonucleotide
acacaugaauuugaccaac

SEQ ID NO: 1858316 - RNA, 19 nt, Artificial Sequence
  Description of Artificial Sequence: Synthetic oligonucleotide
aauggccaccuugcgaccg

SEQ ID NO: 1858317 - RNA, 19 nt, Artificial Sequence
  Description of Artificial Sequence: Synthetic oligonucleotide
ccacacaugaauuugacca

SEQ ID NO: 1858318 - RNA, 19 nt, Artificial Sequence
  Description of Artificial Sequence: Synthetic oligonucleotide
guuugcacucaucauugug

SEQ ID NO: 1858319 - RNA, 19 nt, Artificial Sequence
  Description of Artificial Sequence: Synthetic oligonucleotide
ucggauggcacugggagcc

SEQ ID NO: 1858320 - RNA, 19 nt, Artificial Sequence
  Description of Artificial Sequence: Synthetic oligonucleotide
agaacaugcccaucaggug

SEQ ID NO: 1858321 - RNA, 19 nt, Artificial Sequence
  Description of Artificial Sequence: Synthetic oligonucleotide
ucaccagccgcuuugugaa

SEQ ID NO: 1858322 - RNA, 19 nt, Artificial Sequence
  Description of Artificial Sequence: Synthetic oligonucleotide
cucacuggcagucagaugu

SEQ ID NO: 1858323 - RNA, 19 nt, Artificial Sequence
  Description of Artificial Sequence: Synthetic oligonucleotide
uggguucuggcuccuuacg

SEQ ID NO: 1858324 - RNA, 19 nt, Artificial Sequence
  Description of Artificial Sequence: Synthetic oligonucleotide
uuggcaaggcuugaauucc

SEQ ID NO: 1858325 - RNA, 19 nt, Artificial Sequence
  Description of Artificial Sequence: Synthetic oligonucleotide
aggguacuuguugggaucc

SEQ ID NO: 1858326 - RNA, 19 nt, Artificial Sequence
  Description of Artificial Sequence: Synthetic oligonucleotide
agucagaugucgcauuagu

SEQ ID NO: 1858327 - RNA, 19 nt, Artificial Sequence
  Description of Artificial Sequence: Synthetic oligonucleotide
acgaauucucuccucagaa

SEQ ID NO: 1858328 - RNA, 19 nt, Artificial Sequence
  Description of Artificial Sequence: Synthetic oligonucleotide
gcggcauaaacuuugccag

SEQ ID NO: 1858329 - RNA, 19 nt, Artificial Sequence
  Description of Artificial Sequence: Synthetic oligonucleotide
agcgcagcuggccucugcc

SEQ ID NO: 1858330 - RNA, 19 nt, Artificial Sequence
  Description of Artificial Sequence: Synthetic oligonucleotide
uguugcuuggugaccuuca

SEQ ID NO: 1858331 - RNA, 19 nt, Artificial Sequence
  Description of Artificial Sequence: Synthetic oligonucleotide
gcgaacagcaaucaggaac

SEQ ID NO: 1858332 - RNA, 19 nt, Artificial Sequence
  Description of Artificial Sequence: Synthetic oligonucleotide
cugcuuuucaccacacaug

SEQ ID NO: 1858333 - RNA, 19 nt, Artificial Sequence
  Description of Artificial Sequence: Synthetic oligonucleotide
cauacacaggcuugaugcc

SEQ ID NO: 1858334 - RNA, 19 nt, Artificial Sequence
  Description of Artificial Sequence: Synthetic oligonucleotide
ugcgucaagguacgggaug

SEQ ID NO: 1858335 - RNA, 19 nt, Artificial Sequence
  Description of Artificial Sequence: Synthetic oligonucleotide
gcucuuaugcuucuggaug

SEQ ID NO: 1858336 - RNA, 19 nt, Artificial Sequence
  Description of Artificial Sequence: Synthetic oligonucleotide
auuuggcucgcuccacuuc

SEQ ID NO: 1858337 - RNA, 19 nt, Artificial Sequence
  Description of Artificial Sequence: Synthetic oligonucleotide
guguuugcacucaucauug

SEQ ID NO: 1858338 - RNA, 19 nt, Artificial Sequence
  Description of Artificial Sequence: Synthetic oligonucleotide
cuuacucagccgcuugacc

SEQ ID NO: 1858339 - RNA, 19 nt, Artificial Sequence
  Description of Artificial Sequence: Synthetic oligonucleotide
agccgcuugaccccacuac

SEQ ID NO: 1858340 - RNA, 19 nt, Artificial Sequence
  Description of Artificial Sequence: Synthetic oligonucleotide
ucauucucucggauggcac

SEQ ID NO: 1858341 - RNA, 19 nt, Artificial Sequence
  Description of Artificial Sequence: Synthetic oligonucleotide
guggcuugccgucaaagac

SEQ ID NO: 1858342 - RNA, 19 nt, Artificial Sequence
  Description of Artificial Sequence: Synthetic oligonucleotide
uggcuccuuacgcuuagcc

SEQ ID NO: 1858343 - RNA, 19 nt, Artificial Sequence
  Description of Artificial Sequence: Synthetic oligonucleotide
gucaggggacaauggaggg

SEQ ID NO: 1858344 - RNA, 19 nt, Artificial Sequence
  Description of Artificial Sequence: Synthetic oligonucleotide
cucgaugcucuuaugcuuc

SEQ ID NO: 1858345 - RNA, 19 nt, Artificial Sequence
  Description of Artificial Sequence: Synthetic oligonucleotide
uuagcaggccccuuggguu

SEQ ID NO: 1858346 - RNA, 19 nt, Artificial Sequence
  Description of Artificial Sequence: Synthetic oligonucleotide
acaauggaggggaggacac

SEQ ID NO: 1858347 - RNA, 19 nt, Artificial Sequence
  Description of Artificial Sequence: Synthetic oligonucleotide
cccacuacgaauucucucc

SEQ ID NO: 1858348 - RNA, 19 nt, Artificial Sequence
  Description of Artificial Sequence: Synthetic oligonucleotide
aacucuuggaugggcagcu

SEQ ID NO: 1858349 - RNA, 19 nt, Artificial Sequence
  Description of Artificial Sequence: Synthetic oligonucleotide
auucccaugguaacacagg

SEQ ID NO: 1858350 - RNA, 19 nt, Artificial Sequence
  Description of Artificial Sequence: Synthetic oligonucleotide
aacaggguacuuguuggga

SEQ ID NO: 1858351 - RNA, 19 nt, Artificial Sequence
  Description of Artificial Sequence: Synthetic oligonucleotide
guuuucuggaacaggguac

SEQ ID NO: 1858352 - RNA, 19 nt, Artificial Sequence
  Description of Artificial Sequence: Synthetic oligonucleotide
ggugcgguagaacaugccc

SEQ ID NO: 1858353 - RNA, 19 nt, Artificial Sequence
  Description of Artificial Sequence: Synthetic oligonucleotide
ucgcauuaguacagggcug

SEQ ID NO: 1858354 - RNA, 19 nt, Artificial Sequence
  Description of Artificial Sequence: Synthetic oligonucleotide
ucauuuggcucgcuccacu

SEQ ID NO: 1858355 - RNA, 19 nt, Artificial Sequence
  Description of Artificial Sequence: Synthetic oligonucleotide
cucacugggugcgucaagg

SEQ ID NO: 1858356 - RNA, 19 nt, Artificial Sequence
  Description of Artificial Sequence: Synthetic oligonucleotide
acaucggcaauuaguuugg

SEQ ID NO: 1858357 - RNA, 19 nt, Artificial Sequence
  Description of Artificial Sequence: Synthetic oligonucleotide
aguagucacuacccagcag

SEQ ID NO: 1858358 - RNA, 19 nt, Artificial Sequence
  Description of Artificial Sequence: Synthetic oligonucleotide
ucucucggauggcacuggg

SEQ ID NO: 1858359 - RNA, 19 nt, Artificial Sequence
  Description of Artificial Sequence: Synthetic oligonucleotide
cagaugucgcauuaguaca

SEQ ID NO: 1858360 - RNA, 19 nt, Artificial Sequence
  Description of Artificial Sequence: Synthetic oligonucleotide
uuggaugggcagcuucuug

SEQ ID NO: 1858361 - RNA, 19 nt, Artificial Sequence
  Description of Artificial Sequence: Synthetic oligonucleotide
uugaugucauucucucgga

SEQ ID NO: 1858362 - RNA, 19 nt, Artificial Sequence
  Description of Artificial Sequence: Synthetic oligonucleotide
caccuugcgaccgaaguag

SEQ ID NO: 1858363 - RNA, 19 nt, Artificial Sequence
  Description of Artificial Sequence: Synthetic oligonucleotide
uuagccgaggagagugagc

SEQ ID NO: 1858364 - RNA, 19 nt, Artificial Sequence
  Description of Artificial Sequence: Synthetic oligonucleotide
uagaugcucauggaaggca

SEQ ID NO: 1858365 - RNA, 19 nt, Artificial Sequence
  Description of Artificial Sequence: Synthetic oligonucleotide
gcacucaucauuguguugc

SEQ ID NO: 1858366 - RNA, 19 nt, Artificial Sequence
  Description of Artificial Sequence: Synthetic oligonucleotide
aguuuggcaaggcuugaau

SEQ ID NO: 1858367 - RNA, 19 nt, Artificial Sequence
  Description of Artificial Sequence: Synthetic oligonucleotide
gaauuugaccaacucuucu

SEQ ID NO: 1858368 - RNA, 19 nt, Artificial Sequence
  Description of Artificial Sequence: Synthetic oligonucleotide
gucgcauuaguacagggcu

SEQ ID NO: 1858369 - RNA, 19 nt, Artificial Sequence
  Description of Artificial Sequence: Synthetic oligonucleotide
uugcgaccgaaguagcucu

SEQ ID NO: 1858370 - RNA, 19 nt, Artificial Sequence
  Description of Artificial Sequence: Synthetic oligonucleotide
uucuucauuuggcucgcuc

SEQ ID NO: 1858371 - RNA, 19 nt, Artificial Sequence
  Description of Artificial Sequence: Synthetic oligonucleotide
uugaccaacucuucuucau

SEQ ID NO: 1858372 - RNA, 19 nt, Artificial Sequence
  Description of Artificial Sequence: Synthetic oligonucleotide
cagguguuugcacucauca

SEQ ID NO: 1858373 - RNA, 19 nt, Artificial Sequence
  Description of Artificial Sequence: Synthetic oligonucleotide
cucuuaugcuucuggauga

SEQ ID NO: 1858374 - RNA, 19 nt, Artificial Sequence
  Description of Artificial Sequence: Synthetic oligonucleotide
ugcucuuaugcuucuggau

SEQ ID NO: 1858375 - RNA, 19 nt, Artificial Sequence
  Description of Artificial Sequence: Synthetic oligonucleotide
uagucacuacccagcagga

SEQ ID NO: 1858376 - RNA, 19 nt, Artificial Sequence
  Description of Artificial Sequence: Synthetic oligonucleotide
ggucaggggacaauggagg

SEQ ID NO: 1858377 - RNA, 19 nt, Artificial Sequence
  Description of Artificial Sequence: Synthetic oligonucleotide
uacucucacaguagucacu

SEQ ID NO: 1858378 - RNA, 19 nt, Artificial Sequence
  Description of Artificial Sequence: Synthetic oligonucleotide
acuggcagucagaugucgc

SEQ ID NO: 1858379 - RNA, 19 nt, Artificial Sequence
  Description of Artificial Sequence: Synthetic oligonucleotide
guagcucuugaugucauuc

SEQ ID NO: 1858380 - RNA, 19 nt, Artificial Sequence
  Description of Artificial Sequence: Synthetic oligonucleotide
cuuacgcuuagccgaggag

SEQ ID NO: 1858381 - RNA, 19 nt, Artificial Sequence
  Description of Artificial Sequence: Synthetic oligonucleotide
cagguggaacucuuggaug

SEQ ID NO: 1858382 - RNA, 19 nt, Artificial Sequence
  Description of Artificial Sequence: Synthetic oligonucleotide
agaugucgcauuaguacag

SEQ ID NO: 1858383 - RNA, 19 nt, Artificial Sequence
  Description of Artificial Sequence: Synthetic oligonucleotide
uugggauccagccgccgca

SEQ ID NO: 1858384 - RNA, 19 nt, Artificial Sequence
  Description of Artificial Sequence: Synthetic oligonucleotide
aucggcaauuaguuuggca

SEQ ID NO: 1858385 - RNA, 19 nt, Artificial Sequence
  Description of Artificial Sequence: Synthetic oligonucleotide
ggcuccuuacgcuuagccg

SEQ ID NO: 1858386 - RNA, 19 nt, Artificial Sequence
  Description of Artificial Sequence: Synthetic oligonucleotide
cagcacauccccacccugg

SEQ ID NO: 1858387 - RNA, 19 nt, Artificial Sequence
  Description of Artificial Sequence: Synthetic oligonucleotide
gagccaguuuucuggaaca

SEQ ID NO: 1858388 - RNA, 19 nt, Artificial Sequence
  Description of Artificial Sequence: Synthetic oligonucleotide
ggcaauuaguuuggcaagg

SEQ ID NO: 1858389 - RNA, 19 nt, Artificial Sequence
  Description of Artificial Sequence: Synthetic oligonucleotide
gaacucuuggaugggcagc

SEQ ID NO: 1858390 - RNA, 19 nt, Artificial Sequence
  Description of Artificial Sequence: Synthetic oligonucleotide
uuguggagccaguuuucug

SEQ ID NO: 1858391 - RNA, 19 nt, Artificial Sequence
  Description of Artificial Sequence: Synthetic oligonucleotide
cugggugcgucaagguacg

SEQ ID NO: 1858392 - RNA, 19 nt, Artificial Sequence
  Description of Artificial Sequence: Synthetic oligonucleotide
aucuccucgaugcucuuau

SEQ ID NO: 1858393 - RNA, 19 nt, Artificial Sequence
  Description of Artificial Sequence: Synthetic oligonucleotide
ggaugagguccacagcccg

SEQ ID NO: 1858394 - RNA, 19 nt, Artificial Sequence
  Description of Artificial Sequence: Synthetic oligonucleotide
auggugcgguagaacaugc

SEQ ID NO: 1858395 - RNA, 19 nt, Artificial Sequence
  Description of Artificial Sequence: Synthetic oligonucleotide
augcucuuaugcuucugga

SEQ ID NO: 1858396 - RNA, 19 nt, Artificial Sequence
  Description of Artificial Sequence: Synthetic oligonucleotide
gcucagguggaacucuugg

SEQ ID NO: 1858397 - RNA, 19 nt, Artificial Sequence
  Description of Artificial Sequence: Synthetic oligonucleotide
gcuccuuacgcuuagccga

SEQ ID NO: 1858398 - RNA, 19 nt, Artificial Sequence
  Description of Artificial Sequence: Synthetic oligonucleotide
aggcaguccauguccucgg

SEQ ID NO: 1858399 - RNA, 19 nt, Artificial Sequence
  Description of Artificial Sequence: Synthetic oligonucleotide
gguagaacaugcccaucag

SEQ ID NO: 1858400 - RNA, 19 nt, Artificial Sequence
  Description of Artificial Sequence: Synthetic oligonucleotide
uugccgucaaagacauaca

SEQ ID NO: 1858401 - RNA, 19 nt, Artificial Sequence
  Description of Artificial Sequence: Synthetic oligonucleotide
ugcgguagaacaugcccau

SEQ ID NO: 1858402 - RNA, 19 nt, Artificial Sequence
  Description of Artificial Sequence: Synthetic oligonucleotide
cuugcgaccgaaguagcuc

SEQ ID NO: 1858403 - RNA, 19 nt, Artificial Sequence
  Description of Artificial Sequence: Synthetic oligonucleotide
ggcauaaacuuugccagcc

SEQ ID NO: 1858404 - RNA, 19 nt, Artificial Sequence
  Description of Artificial Sequence: Synthetic oligonucleotide
auacacaggcuugaugcca

SEQ ID NO: 1858405 - RNA, 19 nt, Artificial Sequence
  Description of Artificial Sequence: Synthetic oligonucleotide
agagaucuacaaacugcuc

SEQ ID NO: 1858406 - RNA, 19 nt, Artificial Sequence
  Description of Artificial Sequence: Synthetic oligonucleotide
guugggauccagccgccgc

SEQ ID NO: 1858407 - RNA, 19 nt, Artificial Sequence
  Description of Artificial Sequence: Synthetic oligonucleotide
cgcacgaucuccucgaugc

SEQ ID NO: 1858408 - RNA, 19 nt, Artificial Sequence
  Description of Artificial Sequence: Synthetic oligonucleotide
ucuuacucagccgcuugac

SEQ ID NO: 1858409 - RNA, 19 nt, Artificial Sequence
  Description of Artificial Sequence: Synthetic oligonucleotide
ugguaacacaggagcgaug

SEQ ID NO: 1858410 - RNA, 19 nt, Artificial Sequence
  Description of Artificial Sequence: Synthetic oligonucleotide
ccccuuuugaacuucccag

SEQ ID NO: 1858411 - RNA, 19 nt, Artificial Sequence
  Description of Artificial Sequence: Synthetic oligonucleotide
cagagaucuacaaacugcu

SEQ ID NO: 1858412 - RNA, 19 nt, Artificial Sequence
  Description of Artificial Sequence: Synthetic oligonucleotide
uguuugcacucaucauugu

SEQ ID NO: 1858413 - RNA, 19 nt, Artificial Sequence
  Description of Artificial Sequence: Synthetic oligonucleotide
aggacacguuuuauuuccc

SEQ ID NO: 1858414 - RNA, 19 nt, Artificial Sequence
  Description of Artificial Sequence: Synthetic oligonucleotide
agcucgccugacuucagcu

SEQ ID NO: 1858415 - RNA, 19 nt, Artificial Sequence
  Description of Artificial Sequence: Synthetic oligonucleotide
ucagcugugguggcuugcc

SEQ ID NO: 1858416 - RNA, 19 nt, Artificial Sequence
  Description of Artificial Sequence: Synthetic oligonucleotide
ccaaaagugaggcagucca

SEQ ID NO: 1858417 - RNA, 19 nt, Artificial Sequence
  Description of Artificial Sequence: Synthetic oligonucleotide
cuuagccgaggagagugag

SEQ ID NO: 1858418 - RNA, 19 nt, Artificial Sequence
  Description of Artificial Sequence: Synthetic oligonucleotide
cucggauggcacugggagc

SEQ ID NO: 1858419 - RNA, 19 nt, Artificial Sequence
  Description of Artificial Sequence: Synthetic oligonucleotide
uuaguuuggcaaggcuuga

SEQ ID NO: 1858420 - RNA, 19 nt, Artificial Sequence
  Description of Artificial Sequence: Synthetic oligonucleotide
ggugcgucaagguacggga

SEQ ID NO: 1858421 - RNA, 19 nt, Artificial Sequence
  Description of Artificial Sequence: Synthetic oligonucleotide
agccacaucggcaauuagu

SEQ ID NO: 1858422 - RNA, 19 nt, Artificial Sequence
  Description of Artificial Sequence: Synthetic oligonucleotide
ucuaggcggcccugggugc

SEQ ID NO: 1858423 - RNA, 19 nt, Artificial Sequence
  Description of Artificial Sequence: Synthetic oligonucleotide
cuccuuacgcuuagccgag

SEQ ID NO: 1858424 - RNA, 19 nt, Artificial Sequence
  Description of Artificial Sequence: Synthetic oligonucleotide
aucaucuaggcggcccugg

SEQ ID NO: 1858425 - RNA, 19 nt, Artificial Sequence
  Description of Artificial Sequence: Synthetic oligonucleotide
ugguggcuugccgucaaag

SEQ ID NO: 1858426 - RNA, 19 nt, Artificial Sequence
  Description of Artificial Sequence: Synthetic oligonucleotide
gaugagguccacagcccgc

SEQ ID NO: 1858427 - RNA, 19 nt, Artificial Sequence
  Description of Artificial Sequence: Synthetic oligonucleotide
uggugcgguagaacaugcc

SEQ ID NO: 1858428 - RNA, 19 nt, Artificial Sequence
  Description of Artificial Sequence: Synthetic oligonucleotide
uuucagcuucagcucgccu

SEQ ID NO: 1858429 - RNA, 19 nt, Artificial Sequence
  Description of Artificial Sequence: Synthetic oligonucleotide
caugguaacacaggagcga

SEQ ID NO: 1858430 - RNA, 19 nt, Artificial Sequence
  Description of Artificial Sequence: Synthetic oligonucleotide
uggaggggaggacacguuu

SEQ ID NO: 1858431 - RNA, 19 nt, Artificial Sequence
  Description of Artificial Sequence: Synthetic oligonucleotide
gaacugguagaugcucaug

SEQ ID NO: 1858432 - RNA, 19 nt, Artificial Sequence
  Description of Artificial Sequence: Synthetic oligonucleotide
ucgccucucacugcguuug

SEQ ID NO: 1858433 - RNA, 19 nt, Artificial Sequence
  Description of Artificial Sequence: Synthetic oligonucleotide
uuguugggauccagccgcc

SEQ ID NO: 1858434 - RNA, 19 nt, Artificial Sequence
  Description of Artificial Sequence: Synthetic oligonucleotide
gucaagguacgggaugccc

SEQ ID NO: 1858435 - RNA, 19 nt, Artificial Sequence
  Description of Artificial Sequence: Synthetic oligonucleotide
cucuuggaugggcagcuuc

SEQ ID NO: 1858436 - RNA, 19 nt, Artificial Sequence
  Description of Artificial Sequence: Synthetic oligonucleotide
gcggcucuuacucagccgc

SEQ ID NO: 1858437 - RNA, 19 nt, Artificial Sequence
  Description of Artificial Sequence: Synthetic oligonucleotide
uucucucggauggcacugg

SEQ ID NO: 1858438 - RNA, 19 nt, Artificial Sequence
  Description of Artificial Sequence: Synthetic oligonucleotide
uuaguacagggcugccaaa

SEQ ID NO: 1858439 - RNA, 19 nt, Artificial Sequence
  Description of Artificial Sequence: Synthetic oligonucleotide
gaccccacuacgaauucuc

SEQ ID NO: 1858440 - RNA, 19 nt, Artificial Sequence
  Description of Artificial Sequence: Synthetic oligonucleotide
gagacucagcagguguuug

SEQ ID NO: 1858441 - RNA, 19 nt, Artificial Sequence
  Description of Artificial Sequence: Synthetic oligonucleotide
uugaccccacuacgaauuc

SEQ ID NO: 1858442 - RNA, 19 nt, Artificial Sequence
  Description of Artificial Sequence: Synthetic oligonucleotide
cucucacugcguuuggcca

SEQ ID NO: 1858443 - RNA, 19 nt, Artificial Sequence
  Description of Artificial Sequence: Synthetic oligonucleotide
cacugggagccacaucggc

SEQ ID NO: 1858444 - RNA, 19 nt, Artificial Sequence
  Description of Artificial Sequence: Synthetic oligonucleotide
cugguagaugcucauggaa

SEQ ID NO: 1858445 - RNA, 19 nt, Artificial Sequence
  Description of Artificial Sequence: Synthetic oligonucleotide
uguugggauccagccgccg

SEQ ID NO: 1858446 - RNA, 19 nt, Artificial Sequence
  Description of Artificial Sequence: Synthetic oligonucleotide
cacacaugaauuugaccaa

SEQ ID NO: 1858447 - RNA, 19 nt, Artificial Sequence
  Description of Artificial Sequence: Synthetic oligonucleotide
caggcuugaugccauucuc

SEQ ID NO: 1858448 - RNA, 19 nt, Artificial Sequence
  Description of Artificial Sequence: Synthetic oligonucleotide
gccgcuugaccccacuacg

SEQ ID NO: 1858449 - RNA, 19 nt, Artificial Sequence
  Description of Artificial Sequence: Synthetic oligonucleotide
uguccucgguggcugcggc

SEQ ID NO: 1858450 - RNA, 19 nt, Artificial Sequence
  Description of Artificial Sequence: Synthetic oligonucleotide
cacauccccacccuggcga

SEQ ID NO: 1858451 - RNA, 19 nt, Artificial Sequence
  Description of Artificial Sequence: Synthetic oligonucleotide
guaacacaggagcgauggc

SEQ ID NO: 1858452 - RNA, 19 nt, Artificial Sequence
  Description of Artificial Sequence: Synthetic oligonucleotide
ggugaccuucaccagccgc

SEQ ID NO: 1858453 - RNA, 19 nt, Artificial Sequence
  Description of Artificial Sequence: Synthetic oligonucleotide
ugucauucucucggauggc

SEQ ID NO: 1858454 - RNA, 19 nt, Artificial Sequence
  Description of Artificial Sequence: Synthetic oligonucleotide
aggaacugguagaugcuca

SEQ ID NO: 1858455 - RNA, 19 nt, Artificial Sequence
  Description of Artificial Sequence: Synthetic oligonucleotide
acgaucuccucgaugcucu

SEQ ID NO: 1858456 - RNA, 19 nt, Artificial Sequence
  Description of Artificial Sequence: Synthetic oligonucleotide
agccagucacuuugaagaa

SEQ ID NO: 1858457 - RNA, 19 nt, Artificial Sequence
  Description of Artificial Sequence: Synthetic oligonucleotide
ggaggacacguuuuauuuc

SEQ ID NO: 1858458 - RNA, 19 nt, Artificial Sequence
  Description of Artificial Sequence: Synthetic oligonucleotide
cuuugccagccuucaccag

SEQ ID NO: 1858459 - RNA, 19 nt, Artificial Sequence
  Description of Artificial Sequence: Synthetic oligonucleotide
acccuggcgaacagcaauc

SEQ ID NO: 1858460 - RNA, 19 nt, Artificial Sequence
  Description of Artificial Sequence: Synthetic oligonucleotide
agggcagcgcagcuggccu

SEQ ID NO: 1858461 - RNA, 19 nt, Artificial Sequence
  Description of Artificial Sequence: Synthetic oligonucleotide
ucgccugacuucagcugug

SEQ ID NO: 1858462 - RNA, 19 nt, Artificial Sequence
  Description of Artificial Sequence: Synthetic oligonucleotide
accuugcgaccgaaguagc

SEQ ID NO: 1858463 - RNA, 19 nt, Artificial Sequence
  Description of Artificial Sequence: Synthetic oligonucleotide
guggcugcggcauaaacuu

SEQ ID NO: 1858464 - RNA, 19 nt, Artificial Sequence
  Description of Artificial Sequence: Synthetic oligonucleotide
ccucucacugcguuuggcc

SEQ ID NO: 1858465 - RNA, 19 nt, Artificial Sequence
  Description of Artificial Sequence: Synthetic oligonucleotide
acuacccagcaggaugcag

SEQ ID NO: 1858466 - RNA, 19 nt, Artificial Sequence
  Description of Artificial Sequence: Synthetic oligonucleotide
uggcucgcuccacuucagc

SEQ ID NO: 1858467 - RNA, 19 nt, Artificial Sequence
  Description of Artificial Sequence: Synthetic oligonucleotide
cugcggcauaaacuuugcc

SEQ ID NO: 1858468 - RNA, 19 nt, Artificial Sequence
  Description of Artificial Sequence: Synthetic oligonucleotide
gcaauuaguuuggcaaggc

SEQ ID NO: 1858469 - RNA, 19 nt, Artificial Sequence
  Description of Artificial Sequence: Synthetic oligonucleotide
caauggaggggaggacacg

SEQ ID NO: 1858470 - RNA, 19 nt, Artificial Sequence
  Description of Artificial Sequence: Synthetic oligonucleotide
gguguuugcacucaucauu

SEQ ID NO: 1858471 - RNA, 19 nt, Artificial Sequence
  Description of Artificial Sequence: Synthetic oligonucleotide
gugcgguagaacaugccca

SEQ ID NO: 1858472 - RNA, 19 nt, Artificial Sequence
  Description of Artificial Sequence: Synthetic oligonucleotide
gggucaggggacaauggag

SEQ ID NO: 1858473 - RNA, 19 nt, Artificial Sequence
  Description of Artificial Sequence: Synthetic oligonucleotide
ugagacucagcagguguuu

SEQ ID NO: 1858474 - RNA, 19 nt, Artificial Sequence
  Description of Artificial Sequence: Synthetic oligonucleotide
cacuacgaauucucuccuc

SEQ ID NO: 1858475 - RNA, 19 nt, Artificial Sequence
  Description of Artificial Sequence: Synthetic oligonucleotide
uucagcugugguggcuugc

SEQ ID NO: 1858476 - RNA, 19 nt, Artificial Sequence
  Description of Artificial Sequence: Synthetic oligonucleotide
caaagacauacacaggcuu

SEQ ID NO: 1858477 - RNA, 19 nt, Artificial Sequence
  Description of Artificial Sequence: Synthetic oligonucleotide
augcggauggugcgguaga

SEQ ID NO: 1858478 - RNA, 19 nt, Artificial Sequence
  Description of Artificial Sequence: Synthetic oligonucleotide
auccagccgccgcacgauc

SEQ ID NO: 1858479 - RNA, 19 nt, Artificial Sequence
  Description of Artificial Sequence: Synthetic oligonucleotide
caguagucacuacccagca

SEQ ID NO: 1858480 - RNA, 19 nt, Artificial Sequence
  Description of Artificial Sequence: Synthetic oligonucleotide
caauuaguuuggcaaggcu

SEQ ID NO: 1858481 - RNA, 19 nt, Artificial Sequence
  Description of Artificial Sequence: Synthetic oligonucleotide
agcuuccuuguggagccag

SEQ ID NO: 1858482 - RNA, 19 nt, Artificial Sequence
  Description of Artificial Sequence: Synthetic oligonucleotide
aggcuugaauucccauggu

SEQ ID NO: 1858483 - RNA, 19 nt, Artificial Sequence
  Description of Artificial Sequence: Synthetic oligonucleotide
cuuagcaggccccuugggu

SEQ ID NO: 1858484 - RNA, 19 nt, Artificial Sequence
  Description of Artificial Sequence: Synthetic oligonucleotide
cauuaguacagggcugcca

SEQ ID NO: 1858485 - RNA, 19 nt, Artificial Sequence
  Description of Artificial Sequence: Synthetic oligonucleotide
ugggcagcuucuuggccuc

SEQ ID NO: 1858486 - RNA, 19 nt, Artificial Sequence
  Description of Artificial Sequence: Synthetic oligonucleotide
ugcguuuggccagcucgcc

SEQ ID NO: 1858487 - RNA, 19 nt, Artificial Sequence
  Description of Artificial Sequence: Synthetic oligonucleotide
cacgaucuccucgaugcuc

SEQ ID NO: 1858488 - RNA, 19 nt, Artificial Sequence
  Description of Artificial Sequence: Synthetic oligonucleotide
cauguccucgguggcugcg

SEQ ID NO: 1858489 - RNA, 19 nt, Artificial Sequence
  Description of Artificial Sequence: Synthetic oligonucleotide
ggcugcggcauaaacuuug

SEQ ID NO: 1858490 - RNA, 19 nt, Artificial Sequence
  Description of Artificial Sequence: Synthetic oligonucleotide
ugcccuggcggcucuuacu

SEQ ID NO: 1858491 - RNA, 19 nt, Artificial Sequence
  Description of Artificial Sequence: Synthetic oligonucleotide
cagucagaugucgcauuag

SEQ ID NO: 1858492 - RNA, 19 nt, Artificial Sequence
  Description of Artificial Sequence: Synthetic oligonucleotide
ccggauacucucacaguag

SEQ ID NO: 1858493 - RNA, 19 nt, Artificial Sequence
  Description of Artificial Sequence: Synthetic oligonucleotide
cucacugcguuuggccagc

SEQ ID NO: 1858494 - RNA, 19 nt, Artificial Sequence
  Description of Artificial Sequence: Synthetic oligonucleotide
acgcggcucagguggaacu

SEQ ID NO: 1858495 - RNA, 19 nt, Artificial Sequence
  Description of Artificial Sequence: Synthetic oligonucleotide
acgggaugcccaugagacu

SEQ ID NO: 1858496 - RNA, 19 nt, Artificial Sequence
  Description of Artificial Sequence: Synthetic oligonucleotide
ugggugcugcccuggcggc

SEQ ID NO: 1858497 - RNA, 19 nt, Artificial Sequence
  Description of Artificial Sequence: Synthetic oligonucleotide
gaggggaggacacguuuua

SEQ ID NO: 1858498 - RNA, 19 nt, Artificial Sequence
  Description of Artificial Sequence: Synthetic oligonucleotide
cucuuacucagccgcuuga

SEQ ID NO: 1858499 - RNA, 19 nt, Artificial Sequence
  Description of Artificial Sequence: Synthetic oligonucleotide
aucaugcggauggugcggu

SEQ ID NO: 1858500 - RNA, 19 nt, Artificial Sequence
  Description of Artificial Sequence: Synthetic oligonucleotide
aagguacgggaugcccaug

SEQ ID NO: 1858501 - RNA, 19 nt, Artificial Sequence
  Description of Artificial Sequence: Synthetic oligonucleotide
uccuuacgcuuagccgagg

SEQ ID NO: 1858502 - RNA, 19 nt, Artificial Sequence
  Description of Artificial Sequence: Synthetic oligonucleotide
gaugccccggauacucuca

SEQ ID NO: 1858503 - RNA, 19 nt, Artificial Sequence
  Description of Artificial Sequence: Synthetic oligonucleotide
gggugcgucaagguacggg

SEQ ID NO: 1858504 - RNA, 19 nt, Artificial Sequence
  Description of Artificial Sequence: Synthetic oligonucleotide
cacaugaauuugaccaacu

SEQ ID NO: 1858505 - RNA, 19 nt, Artificial Sequence
  Description of Artificial Sequence: Synthetic oligonucleotide
agcagguguuugcacucau

SEQ ID NO: 1858506 - RNA, 19 nt, Artificial Sequence
  Description of Artificial Sequence: Synthetic oligonucleotide
ggcggcucuuacucagccg

SEQ ID NO: 1858507 - RNA, 19 nt, Artificial Sequence
  Description of Artificial Sequence: Synthetic oligonucleotide
gcucuuacucagccgcuug

SEQ ID NO: 1858508 - RNA, 19 nt, Artificial Sequence
  Description of Artificial Sequence: Synthetic oligonucleotide
gaugcccaugagacucagc

SEQ ID NO: 1858509 - RNA, 19 nt, Artificial Sequence
  Description of Artificial Sequence: Synthetic oligonucleotide
gcccgcuugggcccgaugc

SEQ ID NO: 1858510 - RNA, 19 nt, Artificial Sequence
  Description of Artificial Sequence: Synthetic oligonucleotide
gggcugccaaaagugaggc

SEQ ID NO: 1858511 - RNA, 19 nt, Artificial Sequence
  Description of Artificial Sequence: Synthetic oligonucleotide
ggggacaauggaggggagg

SEQ ID NO: 1858512 - RNA, 19 nt, Artificial Sequence
  Description of Artificial Sequence: Synthetic oligonucleotide
agugagccagucacuuuga

SEQ ID NO: 1858513 - RNA, 19 nt, Artificial Sequence
  Description of Artificial Sequence: Synthetic oligonucleotide
gcgucaagguacgggaugc

SEQ ID NO: 1858514 - RNA, 19 nt, Artificial Sequence
  Description of Artificial Sequence: Synthetic oligonucleotide
cuuggguucuggcuccuua

SEQ ID NO: 1858515 - RNA, 19 nt, Artificial Sequence
  Description of Artificial Sequence: Synthetic oligonucleotide
gcucgcuccacuucagcuc

SEQ ID NO: 1858516 - RNA, 19 nt, Artificial Sequence
  Description of Artificial Sequence: Synthetic oligonucleotide
gguucuggcuccuuacgcu

SEQ ID NO: 1858517 - RNA, 19 nt, Artificial Sequence
  Description of Artificial Sequence: Synthetic oligonucleotide
caucggcaauuaguuuggc

SEQ ID NO: 1858518 - RNA, 19 nt, Artificial Sequence
  Description of Artificial Sequence: Synthetic oligonucleotide
cggcaauuaguuuggcaag

SEQ ID NO: 1858519 - RNA, 19 nt, Artificial Sequence
  Description of Artificial Sequence: Synthetic oligonucleotide
ccgcuuugugaacuucucc

SEQ ID NO: 1858520 - RNA, 19 nt, Artificial Sequence
  Description of Artificial Sequence: Synthetic oligonucleotide
gcucgccugacuucagcug

SEQ ID NO: 1858521 - RNA, 19 nt, Artificial Sequence
  Description of Artificial Sequence: Synthetic oligonucleotide
gggaggacacguuuuauuu

SEQ ID NO: 1858522 - RNA, 19 nt, Artificial Sequence
  Description of Artificial Sequence: Synthetic oligonucleotide
auggccaccuugcgaccga

SEQ ID NO: 1858523 - RNA, 19 nt, Artificial Sequence
  Description of Artificial Sequence: Synthetic oligonucleotide
ggauacucucacaguaguc

SEQ ID NO: 1858524 - RNA, 19 nt, Artificial Sequence
  Description of Artificial Sequence: Synthetic oligonucleotide
uugggcccgaugccccgga

SEQ ID NO: 1858525 - RNA, 19 nt, Artificial Sequence
  Description of Artificial Sequence: Synthetic oligonucleotide
gugaccuucaccagccgcu

SEQ ID NO: 1858526 - RNA, 19 nt, Artificial Sequence
  Description of Artificial Sequence: Synthetic oligonucleotide
cgcauuaguacagggcugc

SEQ ID NO: 1858527 - RNA, 19 nt, Artificial Sequence
  Description of Artificial Sequence: Synthetic oligonucleotide
gaccgaaguagcucuugau

SEQ ID NO: 1858528 - RNA, 19 nt, Artificial Sequence
  Description of Artificial Sequence: Synthetic oligonucleotide
cucgccugacuucagcugu

SEQ ID NO: 1858529 - RNA, 19 nt, Artificial Sequence
  Description of Artificial Sequence: Synthetic oligonucleotide
gacgcggcucagguggaac

SEQ ID NO: 1858530 - RNA, 19 nt, Artificial Sequence
  Description of Artificial Sequence: Synthetic oligonucleotide
ugcggauggugcgguagaa

SEQ ID NO: 1858531 - RNA, 19 nt, Artificial Sequence
  Description of Artificial Sequence: Synthetic oligonucleotide
ccaggaagagcugcugagc

SEQ ID NO: 1858532 - RNA, 19 nt, Artificial Sequence
  Description of Artificial Sequence: Synthetic oligonucleotide
cucucggauggcacuggga

SEQ ID NO: 1858533 - RNA, 19 nt, Artificial Sequence
  Description of Artificial Sequence: Synthetic oligonucleotide
agucacuacccagcaggau

SEQ ID NO: 1858534 - RNA, 19 nt, Artificial Sequence
  Description of Artificial Sequence: Synthetic oligonucleotide
cuugggcccgaugccccgg

SEQ ID NO: 1858535 - RNA, 19 nt, Artificial Sequence
  Description of Artificial Sequence: Synthetic oligonucleotide
gccccuuggguucuggcuc

SEQ ID NO: 1858536 - RNA, 19 nt, Artificial Sequence
  Description of Artificial Sequence: Synthetic oligonucleotide
gcugugguggcuugccguc

SEQ ID NO: 1858537 - RNA, 19 nt, Artificial Sequence
  Description of Artificial Sequence: Synthetic oligonucleotide
ugcgaccgaaguagcucuu

SEQ ID NO: 1858538 - RNA, 19 nt, Artificial Sequence
  Description of Artificial Sequence: Synthetic oligonucleotide
caguuuucuggaacagggu

SEQ ID NO: 1858539 - RNA, 19 nt, Artificial Sequence
  Description of Artificial Sequence: Synthetic oligonucleotide
ugggugcgucaagguacgg

SEQ ID NO: 1858540 - RNA, 19 nt, Artificial Sequence
  Description of Artificial Sequence: Synthetic oligonucleotide
uggcugcggcauaaacuuu

SEQ ID NO: 1858541 - RNA, 19 nt, Artificial Sequence
  Description of Artificial Sequence: Synthetic oligonucleotide
ugggagccacaucggcaau

SEQ ID NO: 1858542 - RNA, 19 nt, Artificial Sequence
  Description of Artificial Sequence: Synthetic oligonucleotide
ggauccagccgccgcacga

SEQ ID NO: 1858543 - RNA, 19 nt, Artificial Sequence
  Description of Artificial Sequence: Synthetic oligonucleotide
cagcaaucaggaacuggua

SEQ ID NO: 1858544 - RNA, 19 nt, Artificial Sequence
  Description of Artificial Sequence: Synthetic oligonucleotide
cacugggugcgucaaggua

SEQ ID NO: 1858545 - RNA, 19 nt, Artificial Sequence
  Description of Artificial Sequence: Synthetic oligonucleotide
gcccuggcggcucuuacuc

SEQ ID NO: 1858546 - RNA, 19 nt, Artificial Sequence
  Description of Artificial Sequence: Synthetic oligonucleotide
cgcuuagccgaggagagug

SEQ ID NO: 1858547 - RNA, 19 nt, Artificial Sequence
  Description of Artificial Sequence: Synthetic oligonucleotide
uuuggccagcucgccugac

SEQ ID NO: 1858548 - RNA, 19 nt, Artificial Sequence
  Description of Artificial Sequence: Synthetic oligonucleotide
acucagccgcuugacccca

SEQ ID NO: 1858549 - RNA, 19 nt, Artificial Sequence
  Description of Artificial Sequence: Synthetic oligonucleotide
ccccacuacgaauucucuc

SEQ ID NO: 1858550 - RNA, 19 nt, Artificial Sequence
  Description of Artificial Sequence: Synthetic oligonucleotide
accccacuacgaauucucu

SEQ ID NO: 1858551 - RNA, 19 nt, Artificial Sequence
  Description of Artificial Sequence: Synthetic oligonucleotide
acucaucauuguguugcuu

SEQ ID NO: 1858552 - RNA, 19 nt, Artificial Sequence
  Description of Artificial Sequence: Synthetic oligonucleotide
ccagucacuuugaagaaau

SEQ ID NO: 1858553 - RNA, 19 nt, Artificial Sequence
  Description of Artificial Sequence: Synthetic oligonucleotide
cuuguggagccaguuuucu

SEQ ID NO: 1858554 - RNA, 19 nt, Artificial Sequence
  Description of Artificial Sequence: Synthetic oligonucleotide
gcuugggcccgaugccccg

SEQ ID NO: 1858555 - RNA, 19 nt, Artificial Sequence
  Description of Artificial Sequence: Synthetic oligonucleotide
caagguacgggaugcccau

SEQ ID NO: 1858556 - RNA, 19 nt, Artificial Sequence
  Description of Artificial Sequence: Synthetic oligonucleotide
gcugcggcauaaacuuugc

SEQ ID NO: 1858557 - RNA, 19 nt, Artificial Sequence
  Description of Artificial Sequence: Synthetic oligonucleotide
cugcaggacgcggcucagg

SEQ ID NO: 1858558 - RNA, 19 nt, Artificial Sequence
  Description of Artificial Sequence: Synthetic oligonucleotide
cugcccuggcggcucuuac

SEQ ID NO: 1858559 - RNA, 19 nt, Artificial Sequence
  Description of Artificial Sequence: Synthetic oligonucleotide
gggauccagccgccgcacg

SEQ ID NO: 1858560 - RNA, 19 nt, Artificial Sequence
  Description of Artificial Sequence: Synthetic oligonucleotide
cccggauacucucacagua

SEQ ID NO: 1858561 - RNA, 19 nt, Artificial Sequence
  Description of Artificial Sequence: Synthetic oligonucleotide
caccagccgcuuugugaac

SEQ ID NO: 1858562 - RNA, 19 nt, Artificial Sequence
  Description of Artificial Sequence: Synthetic oligonucleotide
cuggcuccuuacgcuuagc

SEQ ID NO: 1858563 - RNA, 19 nt, Artificial Sequence
  Description of Artificial Sequence: Synthetic oligonucleotide
gcauuaguacagggcugcc

SEQ ID NO: 1858564 - RNA, 19 nt, Artificial Sequence
  Description of Artificial Sequence: Synthetic oligonucleotide
cacagcccgcuugggcccg

SEQ ID NO: 1858565 - RNA, 19 nt, Artificial Sequence
  Description of Artificial Sequence: Synthetic oligonucleotide
gccaccuugcgaccgaagu

SEQ ID NO: 1858566 - RNA, 19 nt, Artificial Sequence
  Description of Artificial Sequence: Synthetic oligonucleotide
ccuuuugaacuucccagcu

SEQ ID NO: 1858567 - RNA, 19 nt, Artificial Sequence
  Description of Artificial Sequence: Synthetic oligonucleotide
gccacaucggcaauuaguu

SEQ ID NO: 1858568 - RNA, 19 nt, Artificial Sequence
  Description of Artificial Sequence: Synthetic oligonucleotide
ggcaaggcuugaauuccca

SEQ ID NO: 1858569 - RNA, 19 nt, Artificial Sequence
  Description of Artificial Sequence: Synthetic oligonucleotide
acgcuuagccgaggagagu

SEQ ID NO: 1858570 - RNA, 19 nt, Artificial Sequence
  Description of Artificial Sequence: Synthetic oligonucleotide
cacugcguuuggccagcuc

SEQ ID NO: 1858571 - RNA, 19 nt, Artificial Sequence
  Description of Artificial Sequence: Synthetic oligonucleotide
gccagcucgccugacuuca

SEQ ID NO: 1858572 - RNA, 19 nt, Artificial Sequence
  Description of Artificial Sequence: Synthetic oligonucleotide
cccgcuugggcccgaugcc

SEQ ID NO: 1858573 - RNA, 19 nt, Artificial Sequence
  Description of Artificial Sequence: Synthetic oligonucleotide
ccuuacgcuuagccgagga

SEQ ID NO: 1858574 - RNA, 19 nt, Artificial Sequence
  Description of Artificial Sequence: Synthetic oligonucleotide
cauuuggcucgcuccacuu

SEQ ID NO: 1858575 - RNA, 19 nt, Artificial Sequence
  Description of Artificial Sequence: Synthetic oligonucleotide
ggcucagguggaacucuug

SEQ ID NO: 1858576 - RNA, 19 nt, Artificial Sequence
  Description of Artificial Sequence: Synthetic oligonucleotide
ggagccacaucggcaauua

SEQ ID NO: 1858577 - RNA, 19 nt, Artificial Sequence
  Description of Artificial Sequence: Synthetic oligonucleotide
cucagccgcuugaccccac

SEQ ID NO: 1858578 - RNA, 19 nt, Artificial Sequence
  Description of Artificial Sequence: Synthetic oligonucleotide
ucacugcguuuggccagcu

SEQ ID NO: 1858579 - RNA, 19 nt, Artificial Sequence
  Description of Artificial Sequence: Synthetic oligonucleotide
cagccgcuuugugaacuuc

SEQ ID NO: 1858580 - RNA, 19 nt, Artificial Sequence
  Description of Artificial Sequence: Synthetic oligonucleotide
gcgaccgaaguagcucuug

SEQ ID NO: 1858581 - RNA, 19 nt, Artificial Sequence
  Description of Artificial Sequence: Synthetic oligonucleotide
caucuaggcggcccugggu

SEQ ID NO: 1858582 - RNA, 19 nt, Artificial Sequence
  Description of Artificial Sequence: Synthetic oligonucleotide
ccgccgcacgaucuccucg

SEQ ID NO: 1858583 - RNA, 19 nt, Artificial Sequence
  Description of Artificial Sequence: Synthetic oligonucleotide
cagcagguguuugcacuca

SEQ ID NO: 1858584 - RNA, 19 nt, Artificial Sequence
  Description of Artificial Sequence: Synthetic oligonucleotide
cgaauucucuccucagaaa

SEQ ID NO: 1858585 - RNA, 19 nt, Artificial Sequence
  Description of Artificial Sequence: Synthetic oligonucleotide
gcagguguuugcacucauc

SEQ ID NO: 1858586 - RNA, 19 nt, Artificial Sequence
  Description of Artificial Sequence: Synthetic oligonucleotide
gauccagccgccgcacgau

SEQ ID NO: 1858587 - RNA, 19 nt, Artificial Sequence
  Description of Artificial Sequence: Synthetic oligonucleotide
ucgguggcugcggcauaaa

SEQ ID NO: 1858588 - RNA, 19 nt, Artificial Sequence
  Description of Artificial Sequence: Synthetic oligonucleotide
uggccaccuugcgaccgaa

SEQ ID NO: 1858589 - RNA, 19 nt, Artificial Sequence
  Description of Artificial Sequence: Synthetic oligonucleotide
cucgguggcugcggcauaa

SEQ ID NO: 1858590 - RNA, 19 nt, Artificial Sequence
  Description of Artificial Sequence: Synthetic oligonucleotide
ggcgaacagcaaucaggaa

SEQ ID NO: 1858591 - RNA, 19 nt, Artificial Sequence
  Description of Artificial Sequence: Synthetic oligonucleotide
ugggcccgaugccccggau

SEQ ID NO: 1858592 - RNA, 19 nt, Artificial Sequence
  Description of Artificial Sequence: Synthetic oligonucleotide
gcuugaccccacuacgaau

SEQ ID NO: 1858593 - RNA, 19 nt, Artificial Sequence
  Description of Artificial Sequence: Synthetic oligonucleotide
gccucucacugcguuuggc

SEQ ID NO: 1858594 - RNA, 19 nt, Artificial Sequence
  Description of Artificial Sequence: Synthetic oligonucleotide
cugugguggcuugccguca

SEQ ID NO: 1858595 - RNA, 19 nt, Artificial Sequence
  Description of Artificial Sequence: Synthetic oligonucleotide
cauccccacccuggcgaac

SEQ ID NO: 1858596 - RNA, 19 nt, Artificial Sequence
  Description of Artificial Sequence: Synthetic oligonucleotide
ccucacugggugcgucaag

SEQ ID NO: 1858597 - RNA, 19 nt, Artificial Sequence
  Description of Artificial Sequence: Synthetic oligonucleotide
ccgcuugggcccgaugccc

SEQ ID NO: 1858598 - RNA, 19 nt, Artificial Sequence
  Description of Artificial Sequence: Synthetic oligonucleotide
agccgccgcacgaucuccu

SEQ ID NO: 1858599 - RNA, 19 nt, Artificial Sequence
  Description of Artificial Sequence: Synthetic oligonucleotide
acucuuggaugggcagcuu

SEQ ID NO: 1858600 - RNA, 19 nt, Artificial Sequence
  Description of Artificial Sequence: Synthetic oligonucleotide
gcuuagccgaggagaguga

SEQ ID NO: 1858601 - RNA, 19 nt, Artificial Sequence
  Description of Artificial Sequence: Synthetic oligonucleotide
ggagagugagccagucacu

SEQ ID NO: 1858602 - RNA, 19 nt, Artificial Sequence
  Description of Artificial Sequence: Synthetic oligonucleotide
ccgcacgaucuccucgaug

SEQ ID NO: 1858603 - RNA, 19 nt, Artificial Sequence
  Description of Artificial Sequence: Synthetic oligonucleotide
ccaccuugcgaccgaagua

SEQ ID NO: 1858604 - RNA, 19 nt, Artificial Sequence
  Description of Artificial Sequence: Synthetic oligonucleotide
gugguggcuugccgucaaa

SEQ ID NO: 1858605 - RNA, 19 nt, Artificial Sequence
  Description of Artificial Sequence: Synthetic oligonucleotide
cuggaacaggguacuuguu

SEQ ID NO: 1858606 - RNA, 19 nt, Artificial Sequence
  Description of Artificial Sequence: Synthetic oligonucleotide
ggauggugcgguagaacau

SEQ ID NO: 1858607 - RNA, 19 nt, Artificial Sequence
  Description of Artificial Sequence: Synthetic oligonucleotide
cacuacccagcaggaugca

SEQ ID NO: 1858608 - RNA, 19 nt, Artificial Sequence
  Description of Artificial Sequence: Synthetic oligonucleotide
ggccaccuugcgaccgaag

SEQ ID NO: 1858609 - RNA, 19 nt, Artificial Sequence
  Description of Artificial Sequence: Synthetic oligonucleotide
agcucgccucucacugcgu

SEQ ID NO: 1858610 - RNA, 19 nt, Artificial Sequence
  Description of Artificial Sequence: Synthetic oligonucleotide
cagccgcuugaccccacua

SEQ ID NO: 1858611 - RNA, 19 nt, Artificial Sequence
  Description of Artificial Sequence: Synthetic oligonucleotide
cuuggaugggcagcuucuu

SEQ ID NO: 1858612 - RNA, 19 nt, Artificial Sequence
  Description of Artificial Sequence: Synthetic oligonucleotide
cucgccucucacugcguuu

SEQ ID NO: 1858613 - RNA, 19 nt, Artificial Sequence
  Description of Artificial Sequence: Synthetic oligonucleotide
cgccugacuucagcugugg

SEQ ID NO: 1858614 - RNA, 19 nt, Artificial Sequence
  Description of Artificial Sequence: Synthetic oligonucleotide
gugcgucaagguacgggau

SEQ ID NO: 1858615 - RNA, 19 nt, Artificial Sequence
  Description of Artificial Sequence: Synthetic oligonucleotide
gcgguagaacaugcccauc

SEQ ID NO: 1858616 - RNA, 19 nt, Artificial Sequence
  Description of Artificial Sequence: Synthetic oligonucleotide
gcguuuggccagcucgccu

SEQ ID NO: 1858617 - RNA, 19 nt, Artificial Sequence
  Description of Artificial Sequence: Synthetic oligonucleotide
cuaggcggcccugggugcu

SEQ ID NO: 1858618 - RNA, 19 nt, Artificial Sequence
  Description of Artificial Sequence: Synthetic oligonucleotide
gccgccgcacgaucuccuc

SEQ ID NO: 1858619 - RNA, 19 nt, Artificial Sequence
  Description of Artificial Sequence: Synthetic oligonucleotide
cgcuugaccccacuacgaa

SEQ ID NO: 1858620 - RNA, 19 nt, Artificial Sequence
  Description of Artificial Sequence: Synthetic oligonucleotide
gggcccgaugccccggaua

SEQ ID NO: 1858621 - RNA, 19 nt, Artificial Sequence
  Description of Artificial Sequence: Synthetic oligonucleotide
ggcaguccauguccucggu

SEQ ID NO: 1858622 - RNA, 19 nt, Artificial Sequence
  Description of Artificial Sequence: Synthetic oligonucleotide
gcacgaucuccucgaugcu

SEQ ID NO: 1858623 - RNA, 19 nt, Artificial Sequence
  Description of Artificial Sequence: Synthetic oligonucleotide
gccugacuucagcuguggu

SEQ ID NO: 1858624 - RNA, 19 nt, Artificial Sequence
  Description of Artificial Sequence: Synthetic oligonucleotide
cgccgcacgaucuccucga

SEQ ID NO: 1858625 - RNA, 19 nt, Artificial Sequence
  Description of Artificial Sequence: Synthetic oligonucleotide
cgccucucacugcguuugg

SEQ ID NO: 1858626 - RNA, 19 nt, Artificial Sequence
  Description of Artificial Sequence: Synthetic oligonucleotide
cccuggcggcucuuacuca

SEQ ID NO: 1858627 - RNA, 19 nt, Artificial Sequence
  Description of Artificial Sequence: Synthetic oligonucleotide
acagcccgcuugggcccga

SEQ ID NO: 1858628 - RNA, 19 nt, Artificial Sequence
  Description of Artificial Sequence: Synthetic oligonucleotide
ggcagcgcagcuggccucu

SEQ ID NO: 1858629 - RNA, 19 nt, Artificial Sequence
  Description of Artificial Sequence: Synthetic oligonucleotide
ccacaucggcaauuaguuu

SEQ ID NO: 1858630 - RNA, 19 nt, Artificial Sequence
  Description of Artificial Sequence: Synthetic oligonucleotide
cgcggcucagguggaacuc

SEQ ID NO: 1858631 - RNA, 19 nt, Artificial Sequence
  Description of Artificial Sequence: Synthetic oligonucleotide
ggcucuuacucagccgcuu

SEQ ID NO: 1858632 - RNA, 19 nt, Artificial Sequence
  Description of Artificial Sequence: Synthetic oligonucleotide
gcgcagcuggccucugccu

SEQ ID NO: 1858633 - RNA, 19 nt, Artificial Sequence
  Description of Artificial Sequence: Synthetic oligonucleotide
ccccggauacucucacagu

SEQ ID NO: 1858634 - RNA, 19 nt, Artificial Sequence
  Description of Artificial Sequence: Synthetic oligonucleotide
ccccgccuccugagccugc

SEQ ID NO: 1858635 - RNA, 19 nt, Artificial Sequence
  Description of Artificial Sequence: Synthetic oligonucleotide
ggacgcggcucagguggaa

SEQ ID NO: 1858636 - RNA, 19 nt, Artificial Sequence
  Description of Artificial Sequence: Synthetic oligonucleotide
ccgaggagagugagccagu

SEQ ID NO: 1858637 - RNA, 19 nt, Artificial Sequence
  Description of Artificial Sequence: Synthetic oligonucleotide
gcugcccuggcggcucuua

SEQ ID NO: 1858638 - RNA, 19 nt, Artificial Sequence
  Description of Artificial Sequence: Synthetic oligonucleotide
gggcagcuucuuggccuca

SEQ ID NO: 1858639 - RNA, 19 nt, Artificial Sequence
  Description of Artificial Sequence: Synthetic oligonucleotide
ccgaugccccggauacucu

SEQ ID NO: 1858640 - RNA, 19 nt, Artificial Sequence
  Description of Artificial Sequence: Synthetic oligonucleotide
gccgcacgaucuccucgau

SEQ ID NO: 1858641 - RNA, 19 nt, Artificial Sequence
  Description of Artificial Sequence: Synthetic oligonucleotide
cggauggcacugggagcca

SEQ ID NO: 1858642 - RNA, 19 nt, Artificial Sequence
  Description of Artificial Sequence: Synthetic oligonucleotide
cggcucagguggaacucuu

SEQ ID NO: 1858643 - RNA, 19 nt, Artificial Sequence
  Description of Artificial Sequence: Synthetic oligonucleotide
cagcccgcuugggcccgau

SEQ ID NO: 1858644 - RNA, 19 nt, Artificial Sequence
  Description of Artificial Sequence: Synthetic oligonucleotide
aaacauaaaauucuuaagg

SEQ ID NO: 1858645 - RNA, 19 nt, Artificial Sequence
  Description of Artificial Sequence: Synthetic oligonucleotide
aaaauuagcugauauugcc

SEQ ID NO: 1858646 - RNA, 19 nt, Artificial Sequence
  Description of Artificial Sequence: Synthetic oligonucleotide
acuacuguaguuaugaucc

SEQ ID NO: 1858647 - RNA, 19 nt, Artificial Sequence
  Description of Artificial Sequence: Synthetic oligonucleotide
  modified_base (7)..(7): a, c, u, g, unknown or other
aaggaanaaagagaaaagg

SEQ ID NO: 1858648 - RNA, 19 nt, Artificial Sequence
  Description of Artificial Sequence: Synthetic oligonucleotide
aauuagcugauauugccac

SEQ ID NO: 1858649 - RNA, 19 nt, Artificial Sequence
  Description of Artificial Sequence: Synthetic oligonucleotide
aaaagaaaagaaaagaaaa

SEQ ID NO: 1858650 - RNA, 19 nt, Artificial Sequence
  Description of Artificial Sequence: Synthetic oligonucleotide
gaugcuauuccuuauggcc

SEQ ID NO: 1858651 - RNA, 19 nt, Artificial Sequence
  Description of Artificial Sequence: Synthetic oligonucleotide
uuuuaaaccuaacgguugg

SEQ ID NO: 1858652 - RNA, 19 nt, Artificial Sequence
  Description of Artificial Sequence: Synthetic oligonucleotide
aguucuauggcuucaaucu

SEQ ID NO: 1858653 - RNA, 19 nt, Artificial Sequence
  Description of Artificial Sequence: Synthetic oligonucleotide
auuugaaucacuccuggag

SEQ ID NO: 1858654 - RNA, 19 nt, Artificial Sequence
  Description of Artificial Sequence: Synthetic oligonucleotide
aaaugcuuuuguaaaacgg

SEQ ID NO: 1858655 - RNA, 19 nt, Artificial Sequence
  Description of Artificial Sequence: Synthetic oligonucleotide
auucuuaaggguccaaaac

SEQ ID NO: 1858656 - RNA, 19 nt, Artificial Sequence
  Description of Artificial Sequence: Synthetic oligonucleotide
aacaggaccgaaucccugc

SEQ ID NO: 1858657 - RNA, 19 nt, Artificial Sequence
  Description of Artificial Sequence: Synthetic oligonucleotide
uccuuuaaacauaaaauuc

SEQ ID NO: 1858658 - RNA, 19 nt, Artificial Sequence
  Description of Artificial Sequence: Synthetic oligonucleotide
guaguuaugauccuccuug

SEQ ID NO: 1858659 - RNA, 19 nt, Artificial Sequence
  Description of Artificial Sequence: Synthetic oligonucleotide
  modified_base (8)..(8): a, c, u, g, unknown or other
aaaggaanaaagagaaaag

SEQ ID NO: 1858660 - RNA, 19 nt, Artificial Sequence
  Description of Artificial Sequence: Synthetic oligonucleotide
ucaauaugaguucuauggc

SEQ ID NO: 1858661 - RNA, 19 nt, Artificial Sequence
  Description of Artificial Sequence: Synthetic oligonucleotide
auugccacaaaucauuaga

SEQ ID NO: 1858662 - RNA, 19 nt, Artificial Sequence
  Description of Artificial Sequence: Synthetic oligonucleotide
uuaauguugacaucccugu

SEQ ID NO: 1858663 - RNA, 19 nt, Artificial Sequence
  Description of Artificial Sequence: Synthetic oligonucleotide
uuugaaucacuccuggagu

SEQ ID NO: 1858664 - RNA, 19 nt, Artificial Sequence
  Description of Artificial Sequence: Synthetic oligonucleotide
auuagaaaucuccugacau

SEQ ID NO: 1858665 - RNA, 19 nt, Artificial Sequence
  Description of Artificial Sequence: Synthetic oligonucleotide
ucuccugacaugcugaaac

SEQ ID NO: 1858666 - RNA, 19 nt, Artificial Sequence
  Description of Artificial Sequence: Synthetic oligonucleotide
auggccguaaguucaaaac

SEQ ID NO: 1858667 - RNA, 19 nt, Artificial Sequence
  Description of Artificial Sequence: Synthetic oligonucleotide
uguaaaacggcugaguguc

SEQ ID NO: 1858668 - RNA, 19 nt, Artificial Sequence
  Description of Artificial Sequence: Synthetic oligonucleotide
aaaccuaacgguuggccug

SEQ ID NO: 1858669 - RNA, 19 nt, Artificial Sequence
  Description of Artificial Sequence: Synthetic oligonucleotide
aaggguccaaaaccaaagg

SEQ ID NO: 1858670 - RNA, 19 nt, Artificial Sequence
  Description of Artificial Sequence: Synthetic oligonucleotide
guuucugacaggcugcagg

SEQ ID NO: 1858671 - RNA, 19 nt, Artificial Sequence
  Description of Artificial Sequence: Synthetic oligonucleotide
aucccaaugggagugaucg

SEQ ID NO: 1858672 - RNA, 19 nt, Artificial Sequence
  Description of Artificial Sequence: Synthetic oligonucleotide
agcaaugguuaauuuuggc

SEQ ID NO: 1858673 - RNA, 19 nt, Artificial Sequence
  Description of Artificial Sequence: Synthetic oligonucleotide
aaaucauuagaaaucuccu

SEQ ID NO: 1858674 - RNA, 19 nt, Artificial Sequence
  Description of Artificial Sequence: Synthetic oligonucleotide
aguucaaaacaaaucagag

SEQ ID NO: 1858675 - RNA, 19 nt, Artificial Sequence
  Description of Artificial Sequence: Synthetic oligonucleotide
uucaaucuccuuuaaacau

SEQ ID NO: 1858676 - RNA, 19 nt, Artificial Sequence
  Description of Artificial Sequence: Synthetic oligonucleotide
ucuuagguggcacaggaau

SEQ ID NO: 1858677 - RNA, 19 nt, Artificial Sequence
  Description of Artificial Sequence: Synthetic oligonucleotide
aaguucaaaacaaaucaga

SEQ ID NO: 1858678 - RNA, 19 nt, Artificial Sequence
  Description of Artificial Sequence: Synthetic oligonucleotide
ugguaauucugcaugcgug

SEQ ID NO: 1858679 - RNA, 19 nt, Artificial Sequence
  Description of Artificial Sequence: Synthetic oligonucleotide
augcgugccucuuaggugg

SEQ ID NO: 1858680 - RNA, 19 nt, Artificial Sequence
  Description of Artificial Sequence: Synthetic oligonucleotide
cugagcaugguaauucugc

SEQ ID NO: 1858681 - RNA, 19 nt, Artificial Sequence
  Description of Artificial Sequence: Synthetic oligonucleotide
aauucugcaugcgugccuc

SEQ ID NO: 1858682 - RNA, 19 nt, Artificial Sequence
  Description of Artificial Sequence: Synthetic oligonucleotide
uucaucacucugaacacac

SEQ ID NO: 1858683 - RNA, 19 nt, Artificial Sequence
  Description of Artificial Sequence: Synthetic oligonucleotide
aagaaaugcuuuuguaaaa

SEQ ID NO: 1858684 - RNA, 19 nt, Artificial Sequence
  Description of Artificial Sequence: Synthetic oligonucleotide
aaaccaaauggccguaagu

SEQ ID NO: 1858685 - RNA, 19 nt, Artificial Sequence
  Description of Artificial Sequence: Synthetic oligonucleotide
ugugcugggaugcguaucc

SEQ ID NO: 1858686 - RNA, 19 nt, Artificial Sequence
  Description of Artificial Sequence: Synthetic oligonucleotide
acucugaacacacugacuu

SEQ ID NO: 1858687 - RNA, 19 nt, Artificial Sequence
  Description of Artificial Sequence: Synthetic oligonucleotide
gagugaucggcaaugggcg

SEQ ID NO: 1858688 - RNA, 19 nt, Artificial Sequence
  Description of Artificial Sequence: Synthetic oligonucleotide
cugauauugccacaaauca

SEQ ID NO: 1858689 - RNA, 19 nt, Artificial Sequence
  Description of Artificial Sequence: Synthetic oligonucleotide
ugcuuuuguaaaacggcug

SEQ ID NO: 1858690 - RNA, 19 nt, Artificial Sequence
  Description of Artificial Sequence: Synthetic oligonucleotide
cuuauggccgccgucaucc

SEQ ID NO: 1858691 - RNA, 19 nt, Artificial Sequence
  Description of Artificial Sequence: Synthetic oligonucleotide
agucucugcacuugcuccc

SEQ ID NO: 1858692 - RNA, 19 nt, Artificial Sequence
  Description of Artificial Sequence: Synthetic oligonucleotide
gaauguucguuccugugac

SEQ ID NO: 1858693 - RNA, 19 nt, Artificial Sequence
  Description of Artificial Sequence: Synthetic oligonucleotide
uuaaaccuaacgguuggcc

SEQ ID NO: 1858694 - RNA, 19 nt, Artificial Sequence
  Description of Artificial Sequence: Synthetic oligonucleotide
auuaauguugacaucccug

SEQ ID NO: 1858695 - RNA, 19 nt, Artificial Sequence
  Description of Artificial Sequence: Synthetic oligonucleotide
aaauuagcugauauugcca

SEQ ID NO: 1858696 - RNA, 19 nt, Artificial Sequence
  Description of Artificial Sequence: Synthetic oligonucleotide
uggccguaaguucaaaaca

SEQ ID NO: 1858697 - RNA, 19 nt, Artificial Sequence
  Description of Artificial Sequence: Synthetic oligonucleotide
uuaaggguccaaaaccaaa

SEQ ID NO: 1858698 - RNA, 19 nt, Artificial Sequence
  Description of Artificial Sequence: Synthetic oligonucleotide
gauaaagaaaugcuuuugu

SEQ ID NO: 1858699 - RNA, 19 nt, Artificial Sequence
  Description of Artificial Sequence: Synthetic oligonucleotide
aagugcaggagcgaaccgg

SEQ ID NO: 1858700 - RNA, 19 nt, Artificial Sequence
  Description of Artificial Sequence: Synthetic oligonucleotide
cuuggggucaccacugacc

SEQ ID NO: 1858701 - RNA, 19 nt, Artificial Sequence
  Description of Artificial Sequence: Synthetic oligonucleotide
ugauauugccacaaaucau

SEQ ID NO: 1858702 - RNA, 19 nt, Artificial Sequence
  Description of Artificial Sequence: Synthetic oligonucleotide
ucggcuuuugucuucagau

SEQ ID NO: 1858703 - RNA, 19 nt, Artificial Sequence
  Description of Artificial Sequence: Synthetic oligonucleotide
ugcaggagcgaaccggccg

SEQ ID NO: 1858704 - RNA, 19 nt, Artificial Sequence
  Description of Artificial Sequence: Synthetic oligonucleotide
uaguuaugauccuccuugg

SEQ ID NO: 1858705 - RNA, 19 nt, Artificial Sequence
  Description of Artificial Sequence: Synthetic oligonucleotide
uauugccacaaaucauuag

SEQ ID NO: 1858706 - RNA, 19 nt, Artificial Sequence
  Description of Artificial Sequence: Synthetic oligonucleotide
aaccaaauggccguaaguu

SEQ ID NO: 1858707 - RNA, 19 nt, Artificial Sequence
  Description of Artificial Sequence: Synthetic oligonucleotide
aauaugaguucuauggcuu

SEQ ID NO: 1858708 - RNA, 19 nt, Artificial Sequence
  Description of Artificial Sequence: Synthetic oligonucleotide
uguucaaacaggaccgaau

SEQ ID NO: 1858709 - RNA, 19 nt, Artificial Sequence
  Description of Artificial Sequence: Synthetic oligonucleotide
uuuuguaaaacggcugagu

SEQ ID NO: 1858710 - RNA, 19 nt, Artificial Sequence
  Description of Artificial Sequence: Synthetic oligonucleotide
aaucagagacuuguuucag

SEQ ID NO: 1858711 - RNA, 19 nt, Artificial Sequence
  Description of Artificial Sequence: Synthetic oligonucleotide
guucaaacaggaccgaauc

SEQ ID NO: 1858712 - RNA, 19 nt, Artificial Sequence
  Description of Artificial Sequence: Synthetic oligonucleotide
augcugaaaccaaauggcc

SEQ ID NO: 1858713 - RNA, 19 nt, Artificial Sequence
  Description of Artificial Sequence: Synthetic oligonucleotide
uugccacaaaucauuagaa

SEQ ID NO: 1858714 - RNA, 19 nt, Artificial Sequence
  Description of Artificial Sequence: Synthetic oligonucleotide
augcuauuccuuauggccg

SEQ ID NO: 1858715 - RNA, 19 nt, Artificial Sequence
  Description of Artificial Sequence: Synthetic oligonucleotide
ugcuccauuugaaucacuc

SEQ ID NO: 1858716 - RNA, 19 nt, Artificial Sequence
  Description of Artificial Sequence: Synthetic oligonucleotide
caucacucugaacacacug

SEQ ID NO: 1858717 - RNA, 19 nt, Artificial Sequence
  Description of Artificial Sequence: Synthetic oligonucleotide
gaguucuauggcuucaauc

SEQ ID NO: 1858718 - RNA, 19 nt, Artificial Sequence
  Description of Artificial Sequence: Synthetic oligonucleotide
ugagugucaauaugaguuc

SEQ ID NO: 1858719 - RNA, 19 nt, Artificial Sequence
  Description of Artificial Sequence: Synthetic oligonucleotide
aauggccguaaguucaaaa

SEQ ID NO: 1858720 - RNA, 19 nt, Artificial Sequence
  Description of Artificial Sequence: Synthetic oligonucleotide
ucaucgucgcucucagggg

SEQ ID NO: 1858721 - RNA, 19 nt, Artificial Sequence
  Description of Artificial Sequence: Synthetic oligonucleotide
cacuacuguaguuaugauc

SEQ ID NO: 1858722 - RNA, 19 nt, Artificial Sequence
  Description of Artificial Sequence: Synthetic oligonucleotide
acuggggagccacacggcg

SEQ ID NO: 1858723 - RNA, 19 nt, Artificial Sequence
  Description of Artificial Sequence: Synthetic oligonucleotide
guuucaucacucugaacac

SEQ ID NO: 1858724 - RNA, 19 nt, Artificial Sequence
  Description of Artificial Sequence: Synthetic oligonucleotide
augcguauccgcugucccc

SEQ ID NO: 1858725 - RNA, 19 nt, Artificial Sequence
  Description of Artificial Sequence: Synthetic oligonucleotide
gguaauucugcaugcgugc

SEQ ID NO: 1858726 - RNA, 19 nt, Artificial Sequence
  Description of Artificial Sequence: Synthetic oligonucleotide
uccgcauccggcaacugcu

SEQ ID NO: 1858727 - RNA, 19 nt, Artificial Sequence
  Description of Artificial Sequence: Synthetic oligonucleotide
gaugcguauccgcuguccc

SEQ ID NO: 1858728 - RNA, 19 nt, Artificial Sequence
  Description of Artificial Sequence: Synthetic oligonucleotide
uaaaauucuuaagggucca

SEQ ID NO: 1858729 - RNA, 19 nt, Artificial Sequence
  Description of Artificial Sequence: Synthetic oligonucleotide
ugcuauuccuuauggccgc

SEQ ID NO: 1858730 - RNA, 19 nt, Artificial Sequence
  Description of Artificial Sequence: Synthetic oligonucleotide
augguaauucugcaugcgu

SEQ ID NO: 1858731 - RNA, 19 nt, Artificial Sequence
  Description of Artificial Sequence: Synthetic oligonucleotide
ucggcuuagaacccuugcu

SEQ ID NO: 1858732 - RNA, 19 nt, Artificial Sequence
  Description of Artificial Sequence: Synthetic oligonucleotide
agugcaggagcgaaccggc

SEQ ID NO: 1858733 - RNA, 19 nt, Artificial Sequence
  Description of Artificial Sequence: Synthetic oligonucleotide
gcucucauggcucuggaag

SEQ ID NO: 1858734 - RNA, 19 nt, Artificial Sequence
  Description of Artificial Sequence: Synthetic oligonucleotide
caaaaccaaaggagugggg

SEQ ID NO: 1858735 - RNA, 19 nt, Artificial Sequence
  Description of Artificial Sequence: Synthetic oligonucleotide
aaugggagugaucggcaau

SEQ ID NO: 1858736 - RNA, 19 nt, Artificial Sequence
  Description of Artificial Sequence: Synthetic oligonucleotide
uugguggcaaacucguagu

SEQ ID NO: 1858737 - RNA, 19 nt, Artificial Sequence
  Description of Artificial Sequence: Synthetic oligonucleotide
ugacaugcugaaaccaaau

SEQ ID NO: 1858738 - RNA, 19 nt, Artificial Sequence
  Description of Artificial Sequence: Synthetic oligonucleotide
auccggcaacugcugaugc

SEQ ID NO: 1858739 - RNA, 19 nt, Artificial Sequence
  Description of Artificial Sequence: Synthetic oligonucleotide
uugaaucacuccuggagua

SEQ ID NO: 1858740 - RNA, 19 nt, Artificial Sequence
  Description of Artificial Sequence: Synthetic oligonucleotide
ggugcuucgagcauuggag

SEQ ID NO: 1858741 - RNA, 19 nt, Artificial Sequence
  Description of Artificial Sequence: Synthetic oligonucleotide
uuuaaaccuaacgguuggc

SEQ ID NO: 1858742 - RNA, 19 nt, Artificial Sequence
  Description of Artificial Sequence: Synthetic oligonucleotide
gaacccuugcuccauuuga

SEQ ID NO: 1858743 - RNA, 19 nt, Artificial Sequence
  Description of Artificial Sequence: Synthetic oligonucleotide
ggaagcuucccucacugcc

SEQ ID NO: 1858744 - RNA, 19 nt, Artificial Sequence
  Description of Artificial Sequence: Synthetic oligonucleotide
aauguucguuccugugaca

SEQ ID NO: 1858745 - RNA, 19 nt, Artificial Sequence
  Description of Artificial Sequence: Synthetic oligonucleotide
ggguccaaaaccaaaggag

SEQ ID NO: 1858746 - RNA, 19 nt, Artificial Sequence
  Description of Artificial Sequence: Synthetic oligonucleotide
agugaucggcaaugggcgg

SEQ ID NO: 1858747 - RNA, 19 nt, Artificial Sequence
  Description of Artificial Sequence: Synthetic oligonucleotide
gugcuucgagcauuggagg

SEQ ID NO: 1858748 - RNA, 19 nt, Artificial Sequence
  Description of Artificial Sequence: Synthetic oligonucleotide
ugcuucgagcauuggagga

SEQ ID NO: 1858749 - RNA, 19 nt, Artificial Sequence
  Description of Artificial Sequence: Synthetic oligonucleotide
aacggcugagugucaauau

SEQ ID NO: 1858750 - RNA, 19 nt, Artificial Sequence
  Description of Artificial Sequence: Synthetic oligonucleotide
caucccuguggguucagcc

SEQ ID NO: 1858751 - RNA, 19 nt, Artificial Sequence
  Description of Artificial Sequence: Synthetic oligonucleotide
ggagugaucggcaaugggc

SEQ ID NO: 1858752 - RNA, 19 nt, Artificial Sequence
  Description of Artificial Sequence: Synthetic oligonucleotide
caugguaauucugcaugcg

SEQ ID NO: 1858753 - RNA, 19 nt, Artificial Sequence
  Description of Artificial Sequence: Synthetic oligonucleotide
cuuggcgaagugcugucgc

SEQ ID NO: 1858754 - RNA, 19 nt, Artificial Sequence
  Description of Artificial Sequence: Synthetic oligonucleotide
uauuccuuauggccgccgu

SEQ ID NO: 1858755 - RNA, 19 nt, Artificial Sequence
  Description of Artificial Sequence: Synthetic oligonucleotide
ucugaacacacugacuuuu

SEQ ID NO: 1858756 - RNA, 19 nt, Artificial Sequence
  Description of Artificial Sequence: Synthetic oligonucleotide
ucucaguccgcauccggca

SEQ ID NO: 1858757 - RNA, 19 nt, Artificial Sequence
  Description of Artificial Sequence: Synthetic oligonucleotide
cuuuuguaaaacggcugag

SEQ ID NO: 1858758 - RNA, 19 nt, Artificial Sequence
  Description of Artificial Sequence: Synthetic oligonucleotide
ggcaaacucguaguggucg

SEQ ID NO: 1858759 - RNA, 19 nt, Artificial Sequence
  Description of Artificial Sequence: Synthetic oligonucleotide
caugcgugccucuuaggug

SEQ ID NO: 1858760 - RNA, 19 nt, Artificial Sequence
  Description of Artificial Sequence: Synthetic oligonucleotide
ugguggcaaacucguagug

SEQ ID NO: 1858761 - RNA, 19 nt, Artificial Sequence
  Description of Artificial Sequence: Synthetic oligonucleotide
cuccugacaugcugaaacc

SEQ ID NO: 1858762 - RNA, 19 nt, Artificial Sequence
  Description of Artificial Sequence: Synthetic oligonucleotide
cuggaagcuucccucacug

SEQ ID NO: 1858763 - RNA, 19 nt, Artificial Sequence
  Description of Artificial Sequence: Synthetic oligonucleotide
guggucgucagcugaggag

SEQ ID NO: 1858764 - RNA, 19 nt, Artificial Sequence
  Description of Artificial Sequence: Synthetic oligonucleotide
aucagagacuuguuucagu

SEQ ID NO: 1858765 - RNA, 19 nt, Artificial Sequence
  Description of Artificial Sequence: Synthetic oligonucleotide
agugugucgcucggggacc

SEQ ID NO: 1858766 - RNA, 19 nt, Artificial Sequence
  Description of Artificial Sequence: Synthetic oligonucleotide
uuuugaggggcaguguguc

SEQ ID NO: 1858767 - RNA, 19 nt, Artificial Sequence
  Description of Artificial Sequence: Synthetic oligonucleotide
acucucaguccgcauccgg

SEQ ID NO: 1858768 - RNA, 19 nt, Artificial Sequence
  Description of Artificial Sequence: Synthetic oligonucleotide
ugggaugcguauccgcugu

SEQ ID NO: 1858769 - RNA, 19 nt, Artificial Sequence
  Description of Artificial Sequence: Synthetic oligonucleotide
gaggaggaggaggaggaag

SEQ ID NO: 1858770 - RNA, 19 nt, Artificial Sequence
  Description of Artificial Sequence: Synthetic oligonucleotide
caauaugaguucuauggcu

SEQ ID NO: 1858771 - RNA, 19 nt, Artificial Sequence
  Description of Artificial Sequence: Synthetic oligonucleotide
acggcugagugucaauaug

SEQ ID NO: 1858772 - RNA, 19 nt, Artificial Sequence
  Description of Artificial Sequence: Synthetic oligonucleotide
agauggagucgcuggcggg

SEQ ID NO: 1858773 - RNA, 19 nt, Artificial Sequence
  Description of Artificial Sequence: Synthetic oligonucleotide
ucuugugcugggaugcgua

SEQ ID NO: 1858774 - RNA, 19 nt, Artificial Sequence
  Description of Artificial Sequence: Synthetic oligonucleotide
uggggagccacacggcggc

SEQ ID NO: 1858775 - RNA, 19 nt, Artificial Sequence
  Description of Artificial Sequence: Synthetic oligonucleotide
cauuagaaaucuccugaca

SEQ ID NO: 1858776 - RNA, 19 nt, Artificial Sequence
  Description of Artificial Sequence: Synthetic oligonucleotide
augcuuuuguaaaacggcu

SEQ ID NO: 1858777 - RNA, 19 nt, Artificial Sequence
  Description of Artificial Sequence: Synthetic oligonucleotide
aaaacggcugagugucaau

SEQ ID NO: 1858778 - RNA, 19 nt, Artificial Sequence
  Description of Artificial Sequence: Synthetic oligonucleotide
caaucuccuuuaaacauaa

SEQ ID NO: 1858779 - RNA, 19 nt, Artificial Sequence
  Description of Artificial Sequence: Synthetic oligonucleotide
caaugguuaauuuuggcuu

SEQ ID NO: 1858780 - RNA, 19 nt, Artificial Sequence
  Description of Artificial Sequence: Synthetic oligonucleotide
uccugacaugcugaaacca

SEQ ID NO: 1858781 - RNA, 19 nt, Artificial Sequence
  Description of Artificial Sequence: Synthetic oligonucleotide
guaauucugcaugcgugcc

SEQ ID NO: 1858782 - RNA, 19 nt, Artificial Sequence
  Description of Artificial Sequence: Synthetic oligonucleotide
gcuuuuguaaaacggcuga

SEQ ID NO: 1858783 - RNA, 19 nt, Artificial Sequence
  Description of Artificial Sequence: Synthetic oligonucleotide
ucggggaccuuccuugccu

SEQ ID NO: 1858784 - RNA, 19 nt, Artificial Sequence
  Description of Artificial Sequence: Synthetic oligonucleotide
aaacggcugagugucaaua

SEQ ID NO: 1858785 - RNA, 19 nt, Artificial Sequence
  Description of Artificial Sequence: Synthetic oligonucleotide
aggggcagugugucgcucg

SEQ ID NO: 1858786 - RNA, 19 nt, Artificial Sequence
  Description of Artificial Sequence: Synthetic oligonucleotide
uaaaacggcugagugucaa

SEQ ID NO: 1858787 - RNA, 19 nt, Artificial Sequence
  Description of Artificial Sequence: Synthetic oligonucleotide
gcugauauugccacaaauc

SEQ ID NO: 1858788 - RNA, 19 nt, Artificial Sequence
  Description of Artificial Sequence: Synthetic oligonucleotide
gaaacagcccucggcuuag

SEQ ID NO: 1858789 - RNA, 19 nt, Artificial Sequence
  Description of Artificial Sequence: Synthetic oligonucleotide
aaaauucuuaaggguccaa

SEQ ID NO: 1858790 - RNA, 19 nt, Artificial Sequence
  Description of Artificial Sequence: Synthetic oligonucleotide
cucggcuuagaacccuugc

SEQ ID NO: 1858791 - RNA, 19 nt, Artificial Sequence
  Description of Artificial Sequence: Synthetic oligonucleotide
ggaauguucguuccuguga

SEQ ID NO: 1858792 - RNA, 19 nt, Artificial Sequence
  Description of Artificial Sequence: Synthetic oligonucleotide
cuccauuugaaucacuccu

SEQ ID NO: 1858793 - RNA, 19 nt, Artificial Sequence
  Description of Artificial Sequence: Synthetic oligonucleotide
ugcugggaugcguauccgc

SEQ ID NO: 1858794 - RNA, 19 nt, Artificial Sequence
  Description of Artificial Sequence: Synthetic oligonucleotide
gguggcaaacucguagugg

SEQ ID NO: 1858795 - RNA, 19 nt, Artificial Sequence
  Description of Artificial Sequence: Synthetic oligonucleotide
accuuccuugccuuggcga

SEQ ID NO: 1858796 - RNA, 19 nt, Artificial Sequence
  Description of Artificial Sequence: Synthetic oligonucleotide
cagugugucgcucggggac

SEQ ID NO: 1858797 - RNA, 19 nt, Artificial Sequence
  Description of Artificial Sequence: Synthetic oligonucleotide
accgaaucccugccaagug

SEQ ID NO: 1858798 - RNA, 19 nt, Artificial Sequence
  Description of Artificial Sequence: Synthetic oligonucleotide
ugggagugaucggcaaugg

SEQ ID NO: 1858799 - RNA, 19 nt, Artificial Sequence
  Description of Artificial Sequence: Synthetic oligonucleotide
cacacggggcucuucaguc

SEQ ID NO: 1858800 - RNA, 19 nt, Artificial Sequence
  Description of Artificial Sequence: Synthetic oligonucleotide
aguggucgucagcugagga

SEQ ID NO: 1858801 - RNA, 19 nt, Artificial Sequence
  Description of Artificial Sequence: Synthetic oligonucleotide
ugaguucuauggcuucaau

SEQ ID NO: 1858802 - RNA, 19 nt, Artificial Sequence
  Description of Artificial Sequence: Synthetic oligonucleotide
uccccuugguggcaaacuc

SEQ ID NO: 1858803 - RNA, 19 nt, Artificial Sequence
  Description of Artificial Sequence: Synthetic oligonucleotide
ggcacuacuguaguuauga

SEQ ID NO: 1858804 - RNA, 19 nt, Artificial Sequence
  Description of Artificial Sequence: Synthetic oligonucleotide
ucccaaugggagugaucgg

SEQ ID NO: 1858805 - RNA, 19 nt, Artificial Sequence
  Description of Artificial Sequence: Synthetic oligonucleotide
uacuguaguuaugauccuc

SEQ ID NO: 1858806 - RNA, 19 nt, Artificial Sequence
  Description of Artificial Sequence: Synthetic oligonucleotide
ggcagugugucgcucgggg

SEQ ID NO: 1858807 - RNA, 19 nt, Artificial Sequence
  Description of Artificial Sequence: Synthetic oligonucleotide
cugaggaggaggaggagga

SEQ ID NO: 1858808 - RNA, 19 nt, Artificial Sequence
  Description of Artificial Sequence: Synthetic oligonucleotide
aucacucugaacacacuga

SEQ ID NO: 1858809 - RNA, 19 nt, Artificial Sequence
  Description of Artificial Sequence: Synthetic oligonucleotide
cucggucucacuguggcuc

SEQ ID NO: 1858810 - RNA, 19 nt, Artificial Sequence
  Description of Artificial Sequence: Synthetic oligonucleotide
ugcaugcgugccucuuagg

SEQ ID NO: 1858811 - RNA, 19 nt, Artificial Sequence
  Description of Artificial Sequence: Synthetic oligonucleotide
ucucacuguggcucucaug

SEQ ID NO: 1858812 - RNA, 19 nt, Artificial Sequence
  Description of Artificial Sequence: Synthetic oligonucleotide
aaccuaacgguuggccuga

SEQ ID NO: 1858813 - RNA, 19 nt, Artificial Sequence
  Description of Artificial Sequence: Synthetic oligonucleotide
gcaaugguuaauuuuggcu

SEQ ID NO: 1858814 - RNA, 19 nt, Artificial Sequence
  Description of Artificial Sequence: Synthetic oligonucleotide
auguucguuccugugacau

SEQ ID NO: 1858815 - RNA, 19 nt, Artificial Sequence
  Description of Artificial Sequence: Synthetic oligonucleotide
cugcaugcgugccucuuag

SEQ ID NO: 1858816 - RNA, 19 nt, Artificial Sequence
  Description of Artificial Sequence: Synthetic oligonucleotide
gcaugguaauucugcaugc

SEQ ID NO: 1858817 - RNA, 19 nt, Artificial Sequence
  Description of Artificial Sequence: Synthetic oligonucleotide
cuccccaguuucaucacuc

SEQ ID NO: 1858818 - RNA, 19 nt, Artificial Sequence
  Description of Artificial Sequence: Synthetic oligonucleotide
ucaguccgcauccggcaac

SEQ ID NO: 1858819 - RNA, 19 nt, Artificial Sequence
  Description of Artificial Sequence: Synthetic oligonucleotide
uauggccgccgucauccca

SEQ ID NO: 1858820 - RNA, 19 nt, Artificial Sequence
  Description of Artificial Sequence: Synthetic oligonucleotide
guaguggucgucagcugag

SEQ ID NO: 1858821 - RNA, 19 nt, Artificial Sequence
  Description of Artificial Sequence: Synthetic oligonucleotide
ccaaauggccguaaguuca

SEQ ID NO: 1858822 - RNA, 19 nt, Artificial Sequence
  Description of Artificial Sequence: Synthetic oligonucleotide
ggcacaggaauguucguuc

SEQ ID NO: 1858823 - RNA, 19 nt, Artificial Sequence
  Description of Artificial Sequence: Synthetic oligonucleotide
aggaccgaaucccugccaa

SEQ ID NO: 1858824 - RNA, 19 nt, Artificial Sequence
  Description of Artificial Sequence: Synthetic oligonucleotide
ugucgcucggggaccuucc

SEQ ID NO: 1858825 - RNA, 19 nt, Artificial Sequence
  Description of Artificial Sequence: Synthetic oligonucleotide
guggcaaacucguaguggu

SEQ ID NO: 1858826 - RNA, 19 nt, Artificial Sequence
  Description of Artificial Sequence: Synthetic oligonucleotide
cacacggcggcucacucuc

SEQ ID NO: 1858827 - RNA, 19 nt, Artificial Sequence
  Description of Artificial Sequence: Synthetic oligonucleotide
gaaccggccgccucuuuca

SEQ ID NO: 1858828 - RNA, 19 nt, Artificial Sequence
  Description of Artificial Sequence: Synthetic oligonucleotide
cauuugaaucacuccugga

SEQ ID NO: 1858829 - RNA, 19 nt, Artificial Sequence
  Description of Artificial Sequence: Synthetic oligonucleotide
guucguuccugugacauua

SEQ ID NO: 1858830 - RNA, 19 nt, Artificial Sequence
  Description of Artificial Sequence: Synthetic oligonucleotide
aacagcccucggcuuagaa

SEQ ID NO: 1858831 - RNA, 19 nt, Artificial Sequence
  Description of Artificial Sequence: Synthetic oligonucleotide
uaguggucgucagcugagg

SEQ ID NO: 1858832 - RNA, 19 nt, Artificial Sequence
  Description of Artificial Sequence: Synthetic oligonucleotide
cuauuccuuauggccgccg

SEQ ID NO: 1858833 - RNA, 19 nt, Artificial Sequence
  Description of Artificial Sequence: Synthetic oligonucleotide
guccgcauccggcaacugc

SEQ ID NO: 1858834 - RNA, 19 nt, Artificial Sequence
  Description of Artificial Sequence: Synthetic oligonucleotide
ugcugaugcuauuccuuau

SEQ ID NO: 1858835 - RNA, 19 nt, Artificial Sequence
  Description of Artificial Sequence: Synthetic oligonucleotide
uggcgggagaggugcuucg

SEQ ID NO: 1858836 - RNA, 19 nt, Artificial Sequence
  Description of Artificial Sequence: Synthetic oligonucleotide
uggcacuacuguaguuaug

SEQ ID NO: 1858837 - RNA, 19 nt, Artificial Sequence
  Description of Artificial Sequence: Synthetic oligonucleotide
cugggaugcguauccgcug

SEQ ID NO: 1858838 - RNA, 19 nt, Artificial Sequence
  Description of Artificial Sequence: Synthetic oligonucleotide
ucggcaaugggcggacgcc

SEQ ID NO: 1858839 - RNA, 19 nt, Artificial Sequence
  Description of Artificial Sequence: Synthetic oligonucleotide
ugccuuggcgaagugcugu

SEQ ID NO: 1858840 - RNA, 19 nt, Artificial Sequence
  Description of Artificial Sequence: Synthetic oligonucleotide
uuagaacccuugcuccauu

SEQ ID NO: 1858841 - RNA, 19 nt, Artificial Sequence
  Description of Artificial Sequence: Synthetic oligonucleotide
uccccaguuucaucacucu

SEQ ID NO: 1858842 - RNA, 19 nt, Artificial Sequence
  Description of Artificial Sequence: Synthetic oligonucleotide
cuugcuccccaguuucauc

SEQ ID NO: 1858843 - RNA, 19 nt, Artificial Sequence
  Description of Artificial Sequence: Synthetic oligonucleotide
gccgucaucccaaugggag

SEQ ID NO: 1858844 - RNA, 19 nt, Artificial Sequence
  Description of Artificial Sequence: Synthetic oligonucleotide
aaugggcggacgccaggaa

SEQ ID NO: 1858845 - RNA, 19 nt, Artificial Sequence
  Description of Artificial Sequence: Synthetic oligonucleotide
ucgagcauuggaggacuug

SEQ ID NO: 1858846 - RNA, 19 nt, Artificial Sequence
  Description of Artificial Sequence: Synthetic oligonucleotide
cugaccacuggggagccac

SEQ ID NO: 1858847 - RNA, 19 nt, Artificial Sequence
  Description of Artificial Sequence: Synthetic oligonucleotide
gcggcucacucucaguccg

SEQ ID NO: 1858848 - RNA, 19 nt, Artificial Sequence
  Description of Artificial Sequence: Synthetic oligonucleotide
acaucccuguggguucagc

SEQ ID NO: 1858849 - RNA, 19 nt, Artificial Sequence
  Description of Artificial Sequence: Synthetic oligonucleotide
gggagugaucggcaauggg

SEQ ID NO: 1858850 - RNA, 19 nt, Artificial Sequence
  Description of Artificial Sequence: Synthetic oligonucleotide
uggcaaacucguagugguc

SEQ ID NO: 1858851 - RNA, 19 nt, Artificial Sequence
  Description of Artificial Sequence: Synthetic oligonucleotide
ccaagugcaggagcgaacc

SEQ ID NO: 1858852 - RNA, 19 nt, Artificial Sequence
  Description of Artificial Sequence: Synthetic oligonucleotide
uuccuugccuuggcgaagu

SEQ ID NO: 1858853 - RNA, 19 nt, Artificial Sequence
  Description of Artificial Sequence: Synthetic oligonucleotide
gaaucacuccuggaguaaa

SEQ ID NO: 1858854 - RNA, 19 nt, Artificial Sequence
  Description of Artificial Sequence: Synthetic oligonucleotide
auauugccacaaaucauua

SEQ ID NO: 1858855 - RNA, 19 nt, Artificial Sequence
  Description of Artificial Sequence: Synthetic oligonucleotide
cuucuugugcugggaugcg

SEQ ID NO: 1858856 - RNA, 19 nt, Artificial Sequence
  Description of Artificial Sequence: Synthetic oligonucleotide
gcugaaaccaaauggccgu

SEQ ID NO: 1858857 - RNA, 19 nt, Artificial Sequence
  Description of Artificial Sequence: Synthetic oligonucleotide
agaggugcuucgagcauug

SEQ ID NO: 1858858 - RNA, 19 nt, Artificial Sequence
  Description of Artificial Sequence: Synthetic oligonucleotide
uagaacccuugcuccauuu

SEQ ID NO: 1858859 - RNA, 19 nt, Artificial Sequence
  Description of Artificial Sequence: Synthetic oligonucleotide
cccaaugggagugaucggc

SEQ ID NO: 1858860 - RNA, 19 nt, Artificial Sequence
  Description of Artificial Sequence: Synthetic oligonucleotide
cauccggcaacugcugaug

SEQ ID NO: 1858861 - RNA, 19 nt, Artificial Sequence
  Description of Artificial Sequence: Synthetic oligonucleotide
gcacaggaauguucguucc

SEQ ID NO: 1858862 - RNA, 19 nt, Artificial Sequence
  Description of Artificial Sequence: Synthetic oligonucleotide
uguucguuccugugacauu

SEQ ID NO: 1858863 - RNA, 19 nt, Artificial Sequence
  Description of Artificial Sequence: Synthetic oligonucleotide
guugacaucccuguggguu

SEQ ID NO: 1858864 - RNA, 19 nt, Artificial Sequence
  Description of Artificial Sequence: Synthetic oligonucleotide
augggcggacgccaggaaa

SEQ ID NO: 1858865 - RNA, 19 nt, Artificial Sequence
  Description of Artificial Sequence: Synthetic oligonucleotide
ugaggggcagugugucgcu

SEQ ID NO: 1858866 - RNA, 19 nt, Artificial Sequence
  Description of Artificial Sequence: Synthetic oligonucleotide
ugaucggcaaugggcggac

SEQ ID NO: 1858867 - RNA, 19 nt, Artificial Sequence
  Description of Artificial Sequence: Synthetic oligonucleotide
cauuaauguugacaucccu

SEQ ID NO: 1858868 - RNA, 19 nt, Artificial Sequence
  Description of Artificial Sequence: Synthetic oligonucleotide
caucccaaugggagugauc

SEQ ID NO: 1858869 - RNA, 19 nt, Artificial Sequence
  Description of Artificial Sequence: Synthetic oligonucleotide
uugcuccauuugaaucacu

SEQ ID NO: 1858870 - RNA, 19 nt, Artificial Sequence
  Description of Artificial Sequence: Synthetic oligonucleotide
uccuuauggccgccgucau

SEQ ID NO: 1858871 - RNA, 19 nt, Artificial Sequence
  Description of Artificial Sequence: Synthetic oligonucleotide
ugacaucccuguggguuca

SEQ ID NO: 1858872 - RNA, 19 nt, Artificial Sequence
  Description of Artificial Sequence: Synthetic oligonucleotide
aaauggccguaaguucaaa

SEQ ID NO: 1858873 - RNA, 19 nt, Artificial Sequence
  Description of Artificial Sequence: Synthetic oligonucleotide
cgauuggugauguuguuca

SEQ ID NO: 1858874 - RNA, 19 nt, Artificial Sequence
  Description of Artificial Sequence: Synthetic oligonucleotide
caaauggccguaaguucaa

SEQ ID NO: 1858875 - RNA, 19 nt, Artificial Sequence
  Description of Artificial Sequence: Synthetic oligonucleotide
gguccaaaaccaaaggagu

SEQ ID NO: 1858876 - RNA, 19 nt, Artificial Sequence
  Description of Artificial Sequence: Synthetic oligonucleotide
uggccguccgauuggugau

SEQ ID NO: 1858877 - RNA, 19 nt, Artificial Sequence
  Description of Artificial Sequence: Synthetic oligonucleotide
ccccuugguggcaaacucg

SEQ ID NO: 1858878 - RNA, 19 nt, Artificial Sequence
  Description of Artificial Sequence: Synthetic oligonucleotide
cccuugcuccauuugaauc

SEQ ID NO: 1858879 - RNA, 19 nt, Artificial Sequence
  Description of Artificial Sequence: Synthetic oligonucleotide
ugcgugccucuuagguggc

SEQ ID NO: 1858880 - RNA, 19 nt, Artificial Sequence
  Description of Artificial Sequence: Synthetic oligonucleotide
ccgaaucccugccaagugc

SEQ ID NO: 1858881 - RNA, 19 nt, Artificial Sequence
  Description of Artificial Sequence: Synthetic oligonucleotide
cacggggcucuucagucuc

SEQ ID NO: 1858882 - RNA, 19 nt, Artificial Sequence
  Description of Artificial Sequence: Synthetic oligonucleotide
cucggggaccuuccuugcc

SEQ ID NO: 1858883 - RNA, 19 nt, Artificial Sequence
  Description of Artificial Sequence: Synthetic oligonucleotide
guuguucaaacaggaccga

SEQ ID NO: 1858884 - RNA, 19 nt, Artificial Sequence
  Description of Artificial Sequence: Synthetic oligonucleotide
cugcugaugcuauuccuua

SEQ ID NO: 1858885 - RNA, 19 nt, Artificial Sequence
  Description of Artificial Sequence: Synthetic oligonucleotide
agcccucggcuuagaaccc

SEQ ID NO: 1858886 - RNA, 19 nt, Artificial Sequence
  Description of Artificial Sequence: Synthetic oligonucleotide
uccgauuggugauguuguu

SEQ ID NO: 1858887 - RNA, 19 nt, Artificial Sequence
  Description of Artificial Sequence: Synthetic oligonucleotide
uugugcugggaugcguauc

SEQ ID NO: 1858888 - RNA, 19 nt, Artificial Sequence
  Description of Artificial Sequence: Synthetic oligonucleotide
agugucaauaugaguucua

SEQ ID NO: 1858889 - RNA, 19 nt, Artificial Sequence
  Description of Artificial Sequence: Synthetic oligonucleotide
cacggcggcucacucucag

SEQ ID NO: 1858890 - RNA, 19 nt, Artificial Sequence
  Description of Artificial Sequence: Synthetic oligonucleotide
uccugucauccuccucggu

SEQ ID NO: 1858891 - RNA, 19 nt, Artificial Sequence
  Description of Artificial Sequence: Synthetic oligonucleotide
auucugcaugcgugccucu

SEQ ID NO: 1858892 - RNA, 19 nt, Artificial Sequence
  Description of Artificial Sequence: Synthetic oligonucleotide
caccacugaccacugggga

SEQ ID NO: 1858893 - RNA, 19 nt, Artificial Sequence
  Description of Artificial Sequence: Synthetic oligonucleotide
caaugggagugaucggcaa

SEQ ID NO: 1858894 - RNA, 19 nt, Artificial Sequence
  Description of Artificial Sequence: Synthetic oligonucleotide
ucaucccaaugggagugau

SEQ ID NO: 1858895 - RNA, 19 nt, Artificial Sequence
  Description of Artificial Sequence: Synthetic oligonucleotide
ccugagcaugguaauucug

SEQ ID NO: 1858896 - RNA, 19 nt, Artificial Sequence
  Description of Artificial Sequence: Synthetic oligonucleotide
gaucggcaaugggcggacg

SEQ ID NO: 1858897 - RNA, 19 nt, Artificial Sequence
  Description of Artificial Sequence: Synthetic oligonucleotide
ggaaacagcccucggcuua

SEQ ID NO: 1858898 - RNA, 19 nt, Artificial Sequence
  Description of Artificial Sequence: Synthetic oligonucleotide
gaccgaaucccugccaagu

SEQ ID NO: 1858899 - RNA, 19 nt, Artificial Sequence
  Description of Artificial Sequence: Synthetic oligonucleotide
ggaugcguauccgcugucc

SEQ ID NO: 1858900 - RNA, 19 nt, Artificial Sequence
  Description of Artificial Sequence: Synthetic oligonucleotide
ggcggcucacucucagucc

SEQ ID NO: 1858901 - RNA, 19 nt, Artificial Sequence
  Description of Artificial Sequence: Synthetic oligonucleotide
uucgagcauuggaggacuu

SEQ ID NO: 1858902 - RNA, 19 nt, Artificial Sequence
  Description of Artificial Sequence: Synthetic oligonucleotide
ggaccgaaucccugccaag

SEQ ID NO: 1858903 - RNA, 19 nt, Artificial Sequence
  Description of Artificial Sequence: Synthetic oligonucleotide
aaccggccgccucuuucau

SEQ ID NO: 1858904 - RNA, 19 nt, Artificial Sequence
  Description of Artificial Sequence: Synthetic oligonucleotide
uccuugccuuggcgaagug

SEQ ID NO: 1858905 - RNA, 19 nt, Artificial Sequence
  Description of Artificial Sequence: Synthetic oligonucleotide
gugaucggcaaugggcgga

SEQ ID NO: 1858906 - RNA, 19 nt, Artificial Sequence
  Description of Artificial Sequence: Synthetic oligonucleotide
gcaaugggcggacgccagg

SEQ ID NO: 1858907 - RNA, 19 nt, Artificial Sequence
  Description of Artificial Sequence: Synthetic oligonucleotide
gaggugcuucgagcauugg

SEQ ID NO: 1858908 - RNA, 19 nt, Artificial Sequence
  Description of Artificial Sequence: Synthetic oligonucleotide
ggaggacuuggcacuacug

SEQ ID NO: 1858909 - RNA, 19 nt, Artificial Sequence
  Description of Artificial Sequence: Synthetic oligonucleotide
ugaggaggaggaggaggaa

SEQ ID NO: 1858910 - RNA, 19 nt, Artificial Sequence
  Description of Artificial Sequence: Synthetic oligonucleotide
ugccccuuggccguccgau

SEQ ID NO: 1858911 - RNA, 19 nt, Artificial Sequence
  Description of Artificial Sequence: Synthetic oligonucleotide
ggggcagugugucgcucgg

SEQ ID NO: 1858912 - RNA, 19 nt, Artificial Sequence
  Description of Artificial Sequence: Synthetic oligonucleotide
cacucucaguccgcauccg

SEQ ID NO: 1858913 - RNA, 19 nt, Artificial Sequence
  Description of Artificial Sequence: Synthetic oligonucleotide
ggcgaagugcugucgcuuc

SEQ ID NO: 1858914 - RNA, 19 nt, Artificial Sequence
  Description of Artificial Sequence: Synthetic oligonucleotide
gagucgcuggcgggagagg

SEQ ID NO: 1858915 - RNA, 19 nt, Artificial Sequence
  Description of Artificial Sequence: Synthetic oligonucleotide
ccucuuagguggcacagga

SEQ ID NO: 1858916 - RNA, 19 nt, Artificial Sequence
  Description of Artificial Sequence: Synthetic oligonucleotide
guccgauuggugauguugu

SEQ ID NO: 1858917 - RNA, 19 nt, Artificial Sequence
  Description of Artificial Sequence: Synthetic oligonucleotide
gugucaauaugaguucuau

SEQ ID NO: 1858918 - RNA, 19 nt, Artificial Sequence
  Description of Artificial Sequence: Synthetic oligonucleotide
gugcugggaugcguauccg

SEQ ID NO: 1858919 - RNA, 19 nt, Artificial Sequence
  Description of Artificial Sequence: Synthetic oligonucleotide
uggggucaccacugaccac

SEQ ID NO: 1858920 - RNA, 19 nt, Artificial Sequence
  Description of Artificial Sequence: Synthetic oligonucleotide
gcaugcgugccucuuaggu

SEQ ID NO: 1858921 - RNA, 19 nt, Artificial Sequence
  Description of Artificial Sequence: Synthetic oligonucleotide
uggcgaagugcugucgcuu

SEQ ID NO: 1858922 - RNA, 19 nt, Artificial Sequence
  Description of Artificial Sequence: Synthetic oligonucleotide
cucuuagguggcacaggaa

SEQ ID NO: 1858923 - RNA, 19 nt, Artificial Sequence
  Description of Artificial Sequence: Synthetic oligonucleotide
guaaaacggcugaguguca

SEQ ID NO: 1858924 - RNA, 19 nt, Artificial Sequence
  Description of Artificial Sequence: Synthetic oligonucleotide
caaugggcggacgccagga

SEQ ID NO: 1858925 - RNA, 19 nt, Artificial Sequence
  Description of Artificial Sequence: Synthetic oligonucleotide
ucgcucggggaccuuccuu

SEQ ID NO: 1858926 - RNA, 19 nt, Artificial Sequence
  Description of Artificial Sequence: Synthetic oligonucleotide
uucugcaugcgugccucuu

SEQ ID NO: 1858927 - RNA, 19 nt, Artificial Sequence
  Description of Artificial Sequence: Synthetic oligonucleotide
cacugaccacuggggagcc

SEQ ID NO: 1858928 - RNA, 19 nt, Artificial Sequence
  Description of Artificial Sequence: Synthetic oligonucleotide
gcugagugucaauaugagu

SEQ ID NO: 1858929 - RNA, 19 nt, Artificial Sequence
  Description of Artificial Sequence: Synthetic oligonucleotide
cggcuuagaacccuugcuc

SEQ ID NO: 1858930 - RNA, 19 nt, Artificial Sequence
  Description of Artificial Sequence: Synthetic oligonucleotide
gcggacgccaggaaacagc

SEQ ID NO: 1858931 - RNA, 19 nt, Artificial Sequence
  Description of Artificial Sequence: Synthetic oligonucleotide
cuggcgggagaggugcuuc

SEQ ID NO: 1858932 - RNA, 19 nt, Artificial Sequence
  Description of Artificial Sequence: Synthetic oligonucleotide
ccaaugggagugaucggca

SEQ ID NO: 1858933 - RNA, 19 nt, Artificial Sequence
  Description of Artificial Sequence: Synthetic oligonucleotide
aaacagcccucggcuuaga

SEQ ID NO: 1858934 - RNA, 19 nt, Artificial Sequence
  Description of Artificial Sequence: Synthetic oligonucleotide
ccgccgucaucccaauggg

SEQ ID NO: 1858935 - RNA, 19 nt, Artificial Sequence
  Description of Artificial Sequence: Synthetic oligonucleotide
acggcggcucacucucagu

SEQ ID NO: 1858936 - RNA, 19 nt, Artificial Sequence
  Description of Artificial Sequence: Synthetic oligonucleotide
uggccugagcaugguaauu

SEQ ID NO: 1858937 - RNA, 19 nt, Artificial Sequence
  Description of Artificial Sequence: Synthetic oligonucleotide
ccgauuggugauguuguuc

SEQ ID NO: 1858938 - RNA, 19 nt, Artificial Sequence
  Description of Artificial Sequence: Synthetic oligonucleotide
aucuccugacaugcugaaa

SEQ ID NO: 1858939 - RNA, 19 nt, Artificial Sequence
  Description of Artificial Sequence: Synthetic oligonucleotide
gagcgaaccggccgccucu

SEQ ID NO: 1858940 - RNA, 19 nt, Artificial Sequence
  Description of Artificial Sequence: Synthetic oligonucleotide
gccucuuagguggcacagg

SEQ ID NO: 1858941 - RNA, 19 nt, Artificial Sequence
  Description of Artificial Sequence: Synthetic oligonucleotide
gacaucccuguggguucag

SEQ ID NO: 1858942 - RNA, 19 nt, Artificial Sequence
  Description of Artificial Sequence: Synthetic oligonucleotide
cucaguccgcauccggcaa

SEQ ID NO: 1858943 - RNA, 19 nt, Artificial Sequence
  Description of Artificial Sequence: Synthetic oligonucleotide
cuacuguaguuaugauccu

SEQ ID NO: 1858944 - RNA, 19 nt, Artificial Sequence
  Description of Artificial Sequence: Synthetic oligonucleotide
cgaaucccugccaagugca

SEQ ID NO: 1858945 - RNA, 19 nt, Artificial Sequence
  Description of Artificial Sequence: Synthetic oligonucleotide
cgcucggggaccuuccuug

SEQ ID NO: 1858946 - RNA, 19 nt, Artificial Sequence
  Description of Artificial Sequence: Synthetic oligonucleotide
uucugccccuuggccgucc

SEQ ID NO: 1858947 - RNA, 19 nt, Artificial Sequence
  Description of Artificial Sequence: Synthetic oligonucleotide
cuuagaacccuugcuccau

SEQ ID NO: 1858948 - RNA, 19 nt, Artificial Sequence
  Description of Artificial Sequence: Synthetic oligonucleotide
ccuuggcgaagugcugucg

SEQ ID NO: 1858949 - RNA, 19 nt, Artificial Sequence
  Description of Artificial Sequence: Synthetic oligonucleotide
caggagcgaaccggccgcc

SEQ ID NO: 1858950 - RNA, 19 nt, Artificial Sequence
  Description of Artificial Sequence: Synthetic oligonucleotide
gccguaaguucaaaacaaa

SEQ ID NO: 1858951 - RNA, 19 nt, Artificial Sequence
  Description of Artificial Sequence: Synthetic oligonucleotide
agccacacggcggcucacu

SEQ ID NO: 1858952 - RNA, 19 nt, Artificial Sequence
  Description of Artificial Sequence: Synthetic oligonucleotide
cuugugcugggaugcguau

SEQ ID NO: 1858953 - RNA, 19 nt, Artificial Sequence
  Description of Artificial Sequence: Synthetic oligonucleotide
ccuaacgguuggccugagc

SEQ ID NO: 1858954 - RNA, 19 nt, Artificial Sequence
  Description of Artificial Sequence: Synthetic oligonucleotide
ccuuccuugccuuggcgaa

SEQ ID NO: 1858955 - RNA, 19 nt, Artificial Sequence
  Description of Artificial Sequence: Synthetic oligonucleotide
gcuauuccuuauggccgcc

SEQ ID NO: 1858956 - RNA, 19 nt, Artificial Sequence
  Description of Artificial Sequence: Synthetic oligonucleotide
cucugaacacacugacuuu

SEQ ID NO: 1858957 - RNA, 19 nt, Artificial Sequence
  Description of Artificial Sequence: Synthetic oligonucleotide
gugucgcucggggaccuuc

SEQ ID NO: 1858958 - RNA, 19 nt, Artificial Sequence
  Description of Artificial Sequence: Synthetic oligonucleotide
ggcggacgccaggaaacag

SEQ ID NO: 1858959 - RNA, 19 nt, Artificial Sequence
  Description of Artificial Sequence: Synthetic oligonucleotide
gaggggcagugugucgcuc

SEQ ID NO: 1858960 - RNA, 19 nt, Artificial Sequence
  Description of Artificial Sequence: Synthetic oligonucleotide
aguccgcauccggcaacug

SEQ ID NO: 1858961 - RNA, 19 nt, Artificial Sequence
  Description of Artificial Sequence: Synthetic oligonucleotide
ccucggcuuagaacccuug

SEQ ID NO: 1858962 - RNA, 19 nt, Artificial Sequence
  Description of Artificial Sequence: Synthetic oligonucleotide
gcugggaugcguauccgcu

SEQ ID NO: 1858963 - RNA, 19 nt, Artificial Sequence
  Description of Artificial Sequence: Synthetic oligonucleotide
accuaacgguuggccugag

SEQ ID NO: 1858964 - RNA, 19 nt, Artificial Sequence
  Description of Artificial Sequence: Synthetic oligonucleotide
aggagcgaaccggccgccu

SEQ ID NO: 1858965 - RNA, 19 nt, Artificial Sequence
  Description of Artificial Sequence: Synthetic oligonucleotide
ccuuauggccgccgucauc

SEQ ID NO: 1858966 - RNA, 19 nt, Artificial Sequence
  Description of Artificial Sequence: Synthetic oligonucleotide
acugaccacuggggagcca

SEQ ID NO: 1858967 - RNA, 19 nt, Artificial Sequence
  Description of Artificial Sequence: Synthetic oligonucleotide
ggacgccaggaaacagccc

SEQ ID NO: 1858968 - RNA, 19 nt, Artificial Sequence
  Description of Artificial Sequence: Synthetic oligonucleotide
cggcggcucacucucaguc

SEQ ID NO: 1858969 - RNA, 19 nt, Artificial Sequence
  Description of Artificial Sequence: Synthetic oligonucleotide
gggcagugugucgcucggg

SEQ ID NO: 1858970 - RNA, 19 nt, Artificial Sequence
  Description of Artificial Sequence: Synthetic oligonucleotide
ccggccgccucuuucaucu

SEQ ID NO: 1858971 - RNA, 19 nt, Artificial Sequence
  Description of Artificial Sequence: Synthetic oligonucleotide
ggucgucagcugaggagga

SEQ ID NO: 1858972 - RNA, 19 nt, Artificial Sequence
  Description of Artificial Sequence: Synthetic oligonucleotide
cgaaccggccgccucuuuc

SEQ ID NO: 1858973 - RNA, 19 nt, Artificial Sequence
  Description of Artificial Sequence: Synthetic oligonucleotide
gccacacggcggcucacuc

SEQ ID NO: 1858974 - RNA, 19 nt, Artificial Sequence
  Description of Artificial Sequence: Synthetic oligonucleotide
gggaugcguauccgcuguc

SEQ ID NO: 1858975 - RNA, 19 nt, Artificial Sequence
  Description of Artificial Sequence: Synthetic oligonucleotide
uggccgccgucaucccaau

SEQ ID NO: 1858976 - RNA, 19 nt, Artificial Sequence
  Description of Artificial Sequence: Synthetic oligonucleotide
ccgcauccggcaacugcug

SEQ ID NO: 1858977 - RNA, 19 nt, Artificial Sequence
  Description of Artificial Sequence: Synthetic oligonucleotide
ggccguccgauuggugaug

SEQ ID NO: 1858978 - RNA, 19 nt, Artificial Sequence
  Description of Artificial Sequence: Synthetic oligonucleotide
cgugccucuuagguggcac

SEQ ID NO: 1858979 - RNA, 19 nt, Artificial Sequence
  Description of Artificial Sequence: Synthetic oligonucleotide
gcauccggcaacugcugau

SEQ ID NO: 1858980 - RNA, 19 nt, Artificial Sequence
  Description of Artificial Sequence: Synthetic oligonucleotide
agcgaaccggccgccucuu

SEQ ID NO: 1858981 - RNA, 19 nt, Artificial Sequence
  Description of Artificial Sequence: Synthetic oligonucleotide
ccggcaacugcugaugcua

SEQ ID NO: 1858982 - RNA, 19 nt, Artificial Sequence
  Description of Artificial Sequence: Synthetic oligonucleotide
gucgcucggggaccuuccu

SEQ ID NO: 1858983 - RNA, 19 nt, Artificial Sequence
  Description of Artificial Sequence: Synthetic oligonucleotide
ugugucgcucggggaccuu

SEQ ID NO: 1858984 - RNA, 19 nt, Artificial Sequence
  Description of Artificial Sequence: Synthetic oligonucleotide
gggagccacacggcggcuc

SEQ ID NO: 1858985 - RNA, 19 nt, Artificial Sequence
  Description of Artificial Sequence: Synthetic oligonucleotide
acacggcggcucacucuca

SEQ ID NO: 1858986 - RNA, 19 nt, Artificial Sequence
  Description of Artificial Sequence: Synthetic oligonucleotide
caguccgcauccggcaacu

SEQ ID NO: 1858987 - RNA, 19 nt, Artificial Sequence
  Description of Artificial Sequence: Synthetic oligonucleotide
ggcgggagaggugcuucga

SEQ ID NO: 1858988 - RNA, 19 nt, Artificial Sequence
  Description of Artificial Sequence: Synthetic oligonucleotide
gggcggacgccaggaaaca

SEQ ID NO: 1858989 - RNA, 19 nt, Artificial Sequence
  Description of Artificial Sequence: Synthetic oligonucleotide
ggccgccgucaucccaaug

SEQ ID NO: 1858990 - RNA, 19 nt, Artificial Sequence
  Description of Artificial Sequence: Synthetic oligonucleotide
ccgucaucccaaugggagu

SEQ ID NO: 1858991 - RNA, 19 nt, Artificial Sequence
  Description of Artificial Sequence: Synthetic oligonucleotide
ggcaacugcugaugcuauu

SEQ ID NO: 1858992 - RNA, 19 nt, Artificial Sequence
  Description of Artificial Sequence: Synthetic oligonucleotide
cugccccuuggccguccga

SEQ ID NO: 1858993 - RNA, 19 nt, Artificial Sequence
  Description of Artificial Sequence: Synthetic oligonucleotide
cgcauccggcaacugcuga

SEQ ID NO: 1858994 - RNA, 19 nt, Artificial Sequence
  Description of Artificial Sequence: Synthetic oligonucleotide
cgccgucaucccaauggga

SEQ ID NO: 1858995 - RNA, 19 nt, Artificial Sequence
  Description of Artificial Sequence: Synthetic oligonucleotide
gccguccgauuggugaugu

SEQ ID NO: 1858996 - RNA, 19 nt, Artificial Sequence
  Description of Artificial Sequence: Synthetic oligonucleotide
cggcaaugggcggacgcca

SEQ ID NO: 1858997 - RNA, 19 nt, Artificial Sequence
  Description of Artificial Sequence: Synthetic oligonucleotide
gcccucggcuuagaacccu

SEQ ID NO: 1858998 - RNA, 19 nt, Artificial Sequence
  Description of Artificial Sequence: Synthetic oligonucleotide
ccuuggccguccgauuggu

SEQ ID NO: 1858999 - RNA, 19 nt, Artificial Sequence
  Description of Artificial Sequence: Synthetic oligonucleotide
gccccuuggccguccgauu

SEQ ID NO: 1859000 - RNA, 19 nt, Artificial Sequence
  Description of Artificial Sequence: Synthetic oligonucleotide
gcuggcgggagaggugcuu

SEQ ID NO: 1859001 - RNA, 19 nt, Artificial Sequence
  Description of Artificial Sequence: Synthetic oligonucleotide
cggcaacugcugaugcuau

SEQ ID NO: 1859002 - RNA, 19 nt, Artificial Sequence
  Description of Artificial Sequence: Synthetic oligonucleotide
cccucggcuuagaacccuu

SEQ ID NO: 1859003 - RNA, 19 nt, Artificial Sequence
  Description of Artificial Sequence: Synthetic oligonucleotide
cggucucacuguggcucuc

SEQ ID NO: 1859004 - RNA, 19 nt, Artificial Sequence
  Description of Artificial Sequence: Synthetic oligonucleotide
ggggagccacacggcggcu

SEQ ID NO: 1859005 - RNA, 19 nt, Artificial Sequence
  Description of Artificial Sequence: Synthetic oligonucleotide
gcgaaccggccgccucuuu

SEQ ID NO: 1859006 - RNA, 19 nt, Artificial Sequence
  Description of Artificial Sequence: Synthetic oligonucleotide
ccguccgauuggugauguu

SEQ ID NO: 1859007 - RNA, 19 nt, Artificial Sequence
  Description of Artificial Sequence: Synthetic oligonucleotide
aagagaaggaagcauaggg

SEQ ID NO: 1859008 - RNA, 19 nt, Artificial Sequence
  Description of Artificial Sequence: Synthetic oligonucleotide
aaagguucaagacuugagg

SEQ ID NO: 1859009 - RNA, 19 nt, Artificial Sequence
  Description of Artificial Sequence: Synthetic oligonucleotide
uuuaguugcaggauggccc

SEQ ID NO: 1859010 - RNA, 19 nt, Artificial Sequence
  Description of Artificial Sequence: Synthetic oligonucleotide
aucugcgugaacucgaugc

SEQ ID NO: 1859011 - RNA, 19 nt, Artificial Sequence
  Description of Artificial Sequence: Synthetic oligonucleotide
aaacagguugcccauggcg

SEQ ID NO: 1859012 - RNA, 19 nt, Artificial Sequence
  Description of Artificial Sequence: Synthetic oligonucleotide
agugauugcauucagcucu

SEQ ID NO: 1859013 - RNA, 19 nt, Artificial Sequence
  Description of Artificial Sequence: Synthetic oligonucleotide
aguaagaaccccuuaacug

SEQ ID NO: 1859014 - RNA, 19 nt, Artificial Sequence
  Description of Artificial Sequence: Synthetic oligonucleotide
aaccccuuaacugaagccc

SEQ ID NO: 1859015 - RNA, 19 nt, Artificial Sequence
  Description of Artificial Sequence: Synthetic oligonucleotide
ugagugauugcauucagcu

SEQ ID NO: 1859016 - RNA, 19 nt, Artificial Sequence
  Description of Artificial Sequence: Synthetic oligonucleotide
agagacaagagaaggaagc

SEQ ID NO: 1859017 - RNA, 19 nt, Artificial Sequence
  Description of Artificial Sequence: Synthetic oligonucleotide
acauaaaagguucaagacu

SEQ ID NO: 1859018 - RNA, 19 nt, Artificial Sequence
  Description of Artificial Sequence: Synthetic oligonucleotide
aagguucaagacuugaggu

SEQ ID NO: 1859019 - RNA, 19 nt, Artificial Sequence
  Description of Artificial Sequence: Synthetic oligonucleotide
gaagcuuucugccagcagc

SEQ ID NO: 1859020 - RNA, 19 nt, Artificial Sequence
  Description of Artificial Sequence: Synthetic oligonucleotide
aagcauagggaccccaagg

SEQ ID NO: 1859021 - RNA, 19 nt, Artificial Sequence
  Description of Artificial Sequence: Synthetic oligonucleotide
uuugugaagaccccaaguc

SEQ ID NO: 1859022 - RNA, 19 nt, Artificial Sequence
  Description of Artificial Sequence: Synthetic oligonucleotide
ugugggucaguucucagag

SEQ ID NO: 1859023 - RNA, 19 nt, Artificial Sequence
  Description of Artificial Sequence: Synthetic oligonucleotide
aucgauuugccgcugguac

SEQ ID NO: 1859024 - RNA, 19 nt, Artificial Sequence
  Description of Artificial Sequence: Synthetic oligonucleotide
cuagauuuguccauucagc

SEQ ID NO: 1859025 - RNA, 19 nt, Artificial Sequence
  Description of Artificial Sequence: Synthetic oligonucleotide
gauuuguccauucagcaga

SEQ ID NO: 1859026 - RNA, 19 nt, Artificial Sequence
  Description of Artificial Sequence: Synthetic oligonucleotide
uuguccauucagcagaaug

SEQ ID NO: 1859027 - RNA, 19 nt, Artificial Sequence
  Description of Artificial Sequence: Synthetic oligonucleotide
uauucagacacucguugcc

SEQ ID NO: 1859028 - RNA, 19 nt, Artificial Sequence
  Description of Artificial Sequence: Synthetic oligonucleotide
ugcuccaagagauuuggag

SEQ ID NO: 1859029 - RNA, 19 nt, Artificial Sequence
  Description of Artificial Sequence: Synthetic oligonucleotide
gagaaggaagcauagggac

SEQ ID NO: 1859030 - RNA, 19 nt, Artificial Sequence
  Description of Artificial Sequence: Synthetic oligonucleotide
gaacucgaugcucugaacc

SEQ ID NO: 1859031 - RNA, 19 nt, Artificial Sequence
  Description of Artificial Sequence: Synthetic oligonucleotide
cucgauuuguuccugagug

SEQ ID NO: 1859032 - RNA, 19 nt, Artificial Sequence
  Description of Artificial Sequence: Synthetic oligonucleotide
gagaguccaaguuacgaag

SEQ ID NO: 1859033 - RNA, 19 nt, Artificial Sequence
  Description of Artificial Sequence: Synthetic oligonucleotide
uucucagagaaucccugcg

SEQ ID NO: 1859034 - RNA, 19 nt, Artificial Sequence
  Description of Artificial Sequence: Synthetic oligonucleotide
guuucugucaggaaggggc

SEQ ID NO: 1859035 - RNA, 19 nt, Artificial Sequence
  Description of Artificial Sequence: Synthetic oligonucleotide
uguccggucaagcagcugc

SEQ ID NO: 1859036 - RNA, 19 nt, Artificial Sequence
  Description of Artificial Sequence: Synthetic oligonucleotide
ugguaacucgauuuguucc

SEQ ID NO: 1859037 - RNA, 19 nt, Artificial Sequence
  Description of Artificial Sequence: Synthetic oligonucleotide
uuuugugaagaccccaagu

SEQ ID NO: 1859038 - RNA, 19 nt, Artificial Sequence
  Description of Artificial Sequence: Synthetic oligonucleotide
aguacccuaggguuucugc

SEQ ID NO: 1859039 - RNA, 19 nt, Artificial Sequence
  Description of Artificial Sequence: Synthetic oligonucleotide
aacagguugcccauggcgg

SEQ ID NO: 1859040 - RNA, 19 nt, Artificial Sequence
  Description of Artificial Sequence: Synthetic oligonucleotide
aacuucaagaugucuuucu

SEQ ID NO: 1859041 - RNA, 19 nt, Artificial Sequence
  Description of Artificial Sequence: Synthetic oligonucleotide
uguugcuuuaguugcagga

SEQ ID NO: 1859042 - RNA, 19 nt, Artificial Sequence
  Description of Artificial Sequence: Synthetic oligonucleotide
cuugcggccaaacagguug

SEQ ID NO: 1859043 - RNA, 19 nt, Artificial Sequence
  Description of Artificial Sequence: Synthetic oligonucleotide
cuucuugcggccaaacagg

SEQ ID NO: 1859044 - RNA, 19 nt, Artificial Sequence
  Description of Artificial Sequence: Synthetic oligonucleotide
uuuggagagcagcaguacc

SEQ ID NO: 1859045 - RNA, 19 nt, Artificial Sequence
  Description of Artificial Sequence: Synthetic oligonucleotide
uuauucagacacucguugc

SEQ ID NO: 1859046 - RNA, 19 nt, Artificial Sequence
  Description of Artificial Sequence: Synthetic oligonucleotide
uuggagagcagcaguaccc

SEQ ID NO: 1859047 - RNA, 19 nt, Artificial Sequence
  Description of Artificial Sequence: Synthetic oligonucleotide
guaagaaccccuuaacuga

SEQ ID NO: 1859048 - RNA, 19 nt, Artificial Sequence
  Description of Artificial Sequence: Synthetic oligonucleotide
gaugcuccaagagauuugg

SEQ ID NO: 1859049 - RNA, 19 nt, Artificial Sequence
  Description of Artificial Sequence: Synthetic oligonucleotide
cuccaagagauuuggagag

SEQ ID NO: 1859050 - RNA, 19 nt, Artificial Sequence
  Description of Artificial Sequence: Synthetic oligonucleotide
uugacacgcagccaaacac

SEQ ID NO: 1859051 - RNA, 19 nt, Artificial Sequence
  Description of Artificial Sequence: Synthetic oligonucleotide
aacucgaugcucugaacca

SEQ ID NO: 1859052 - RNA, 19 nt, Artificial Sequence
  Description of Artificial Sequence: Synthetic oligonucleotide
gaugucaggccccugugag

SEQ ID NO: 1859053 - RNA, 19 nt, Artificial Sequence
  Description of Artificial Sequence: Synthetic oligonucleotide
agauuuguccauucagcag

SEQ ID NO: 1859054 - RNA, 19 nt, Artificial Sequence
  Description of Artificial Sequence: Synthetic oligonucleotide
cuucaucucaaucugcgug

SEQ ID NO: 1859055 - RNA, 19 nt, Artificial Sequence
  Description of Artificial Sequence: Synthetic oligonucleotide
auggacaucaccuggugca

SEQ ID NO: 1859056 - RNA, 19 nt, Artificial Sequence
  Description of Artificial Sequence: Synthetic oligonucleotide
uucaucucaaucugcguga

SEQ ID NO: 1859057 - RNA, 19 nt, Artificial Sequence
  Description of Artificial Sequence: Synthetic oligonucleotide
agcagaauggccccugguc

SEQ ID NO: 1859058 - RNA, 19 nt, Artificial Sequence
  Description of Artificial Sequence: Synthetic oligonucleotide
uguccaggacuccaugggg

SEQ ID NO: 1859059 - RNA, 19 nt, Artificial Sequence
  Description of Artificial Sequence: Synthetic oligonucleotide
uaggguuucugccacuagc

SEQ ID NO: 1859060 - RNA, 19 nt, Artificial Sequence
  Description of Artificial Sequence: Synthetic oligonucleotide
guucuuuccugccaucccg

SEQ ID NO: 1859061 - RNA, 19 nt, Artificial Sequence
  Description of Artificial Sequence: Synthetic oligonucleotide
uugcuuuaguugcaggaug

SEQ ID NO: 1859062 - RNA, 19 nt, Artificial Sequence
  Description of Artificial Sequence: Synthetic oligonucleotide
uuacgaagcugccacuagc

SEQ ID NO: 1859063 - RNA, 19 nt, Artificial Sequence
  Description of Artificial Sequence: Synthetic oligonucleotide
ugggucaguucucagagaa

SEQ ID NO: 1859064 - RNA, 19 nt, Artificial Sequence
  Description of Artificial Sequence: Synthetic oligonucleotide
ucaaucugcgugaacucga

SEQ ID NO: 1859065 - RNA, 19 nt, Artificial Sequence
  Description of Artificial Sequence: Synthetic oligonucleotide
caaacauaaaagguucaag

SEQ ID NO: 1859066 - RNA, 19 nt, Artificial Sequence
  Description of Artificial Sequence: Synthetic oligonucleotide
cagcucaucgauuugccgc

SEQ ID NO: 1859067 - RNA, 19 nt, Artificial Sequence
  Description of Artificial Sequence: Synthetic oligonucleotide
caugagaacagcaccagga

SEQ ID NO: 1859068 - RNA, 19 nt, Artificial Sequence
  Description of Artificial Sequence: Synthetic oligonucleotide
cucuauggacaucaccugg

SEQ ID NO: 1859069 - RNA, 19 nt, Artificial Sequence
  Description of Artificial Sequence: Synthetic oligonucleotide
aaucccugcgagucccugg

SEQ ID NO: 1859070 - RNA, 19 nt, Artificial Sequence
  Description of Artificial Sequence: Synthetic oligonucleotide
caucuuauucagacacucg

SEQ ID NO: 1859071 - RNA, 19 nt, Artificial Sequence
  Description of Artificial Sequence: Synthetic oligonucleotide
ucgaugcucugaaccaugg

SEQ ID NO: 1859072 - RNA, 19 nt, Artificial Sequence
  Description of Artificial Sequence: Synthetic oligonucleotide
agaguccaaguuacgaagc

SEQ ID NO: 1859073 - RNA, 19 nt, Artificial Sequence
  Description of Artificial Sequence: Synthetic oligonucleotide
cugggugaagcuuucugcc

SEQ ID NO: 1859074 - RNA, 19 nt, Artificial Sequence
  Description of Artificial Sequence: Synthetic oligonucleotide
ucuuuugugaagaccccaa

SEQ ID NO: 1859075 - RNA, 19 nt, Artificial Sequence
  Description of Artificial Sequence: Synthetic oligonucleotide
aggguuucugccacuagcc

SEQ ID NO: 1859076 - RNA, 19 nt, Artificial Sequence
  Description of Artificial Sequence: Synthetic oligonucleotide
ugggucucguccaggaucc

SEQ ID NO: 1859077 - RNA, 19 nt, Artificial Sequence
  Description of Artificial Sequence: Synthetic oligonucleotide
ucucagagaaucccugcga

SEQ ID NO: 1859078 - RNA, 19 nt, Artificial Sequence
  Description of Artificial Sequence: Synthetic oligonucleotide
uacgaagcugccacuagcu

SEQ ID NO: 1859079 - RNA, 19 nt, Artificial Sequence
  Description of Artificial Sequence: Synthetic oligonucleotide
cugagggauagcaggaggc

SEQ ID NO: 1859080 - RNA, 19 nt, Artificial Sequence
  Description of Artificial Sequence: Synthetic oligonucleotide
acuagcucggccugccugg

SEQ ID NO: 1859081 - RNA, 19 nt, Artificial Sequence
  Description of Artificial Sequence: Synthetic oligonucleotide
gaaccccuuaacugaagcc

SEQ ID NO: 1859082 - RNA, 19 nt, Artificial Sequence
  Description of Artificial Sequence: Synthetic oligonucleotide
uccaguugcugcgugaccc

SEQ ID NO: 1859083 - RNA, 19 nt, Artificial Sequence
  Description of Artificial Sequence: Synthetic oligonucleotide
ugacacgcagccaaacacu

SEQ ID NO: 1859084 - RNA, 19 nt, Artificial Sequence
  Description of Artificial Sequence: Synthetic oligonucleotide
uuaguugcaggauggcccu

SEQ ID NO: 1859085 - RNA, 19 nt, Artificial Sequence
  Description of Artificial Sequence: Synthetic oligonucleotide
agcauagggaccccaaggu

SEQ ID NO: 1859086 - RNA, 19 nt, Artificial Sequence
  Description of Artificial Sequence: Synthetic oligonucleotide
ugcgugaacucgaugcucu

SEQ ID NO: 1859087 - RNA, 19 nt, Artificial Sequence
  Description of Artificial Sequence: Synthetic oligonucleotide
cuagccugcagagaaacug

SEQ ID NO: 1859088 - RNA, 19 nt, Artificial Sequence
  Description of Artificial Sequence: Synthetic oligonucleotide
aggaaccucugguaacucg

SEQ ID NO: 1859089 - RNA, 19 nt, Artificial Sequence
  Description of Artificial Sequence: Synthetic oligonucleotide
ugaaggaaccucugguaac

SEQ ID NO: 1859090 - RNA, 19 nt, Artificial Sequence
  Description of Artificial Sequence: Synthetic oligonucleotide
cauaaaagguucaagacuu

SEQ ID NO: 1859091 - RNA, 19 nt, Artificial Sequence
  Description of Artificial Sequence: Synthetic oligonucleotide
gaagcauagggaccccaag

SEQ ID NO: 1859092 - RNA, 19 nt, Artificial Sequence
  Description of Artificial Sequence: Synthetic oligonucleotide
cucagagaaucccugcgag

SEQ ID NO: 1859093 - RNA, 19 nt, Artificial Sequence
  Description of Artificial Sequence: Synthetic oligonucleotide
uaagaaccccuuaacugaa

SEQ ID NO: 1859094 - RNA, 19 nt, Artificial Sequence
  Description of Artificial Sequence: Synthetic oligonucleotide
cuuuaguugcaggauggcc

SEQ ID NO: 1859095 - RNA, 19 nt, Artificial Sequence
  Description of Artificial Sequence: Synthetic oligonucleotide
ugucaggccccugugagcc

SEQ ID NO: 1859096 - RNA, 19 nt, Artificial Sequence
  Description of Artificial Sequence: Synthetic oligonucleotide
agagcagcaguacccuagg

SEQ ID NO: 1859097 - RNA, 19 nt, Artificial Sequence
  Description of Artificial Sequence: Synthetic oligonucleotide
agcagcaguacccuagggu

SEQ ID NO: 1859098 - RNA, 19 nt, Artificial Sequence
  Description of Artificial Sequence: Synthetic oligonucleotide
uucucuguccggucaagca

SEQ ID NO: 1859099 - RNA, 19 nt, Artificial Sequence
  Description of Artificial Sequence: Synthetic oligonucleotide
ucugguaacucgauuuguu

SEQ ID NO: 1859100 - RNA, 19 nt, Artificial Sequence
  Description of Artificial Sequence: Synthetic oligonucleotide
uccaucaccuucaucucaa

SEQ ID NO: 1859101 - RNA, 19 nt, Artificial Sequence
  Description of Artificial Sequence: Synthetic oligonucleotide
uccuagauuuguccauuca

SEQ ID NO: 1859102 - RNA, 19 nt, Artificial Sequence
  Description of Artificial Sequence: Synthetic oligonucleotide
uuccaucaccuucaucuca

SEQ ID NO: 1859103 - RNA, 19 nt, Artificial Sequence
  Description of Artificial Sequence: Synthetic oligonucleotide
ugucaccaacuucaagaug

SEQ ID NO: 1859104 - RNA, 19 nt, Artificial Sequence
  Description of Artificial Sequence: Synthetic oligonucleotide
aggcaggucacacggacug

SEQ ID NO: 1859105 - RNA, 19 nt, Artificial Sequence
  Description of Artificial Sequence: Synthetic oligonucleotide
uacacacccauuggaacag

SEQ ID NO: 1859106 - RNA, 19 nt, Artificial Sequence
  Description of Artificial Sequence: Synthetic oligonucleotide
ugccucgugggucucgucc

SEQ ID NO: 1859107 - RNA, 19 nt, Artificial Sequence
  Description of Artificial Sequence: Synthetic oligonucleotide
guacacacccauuggaaca

SEQ ID NO: 1859108 - RNA, 19 nt, Artificial Sequence
  Description of Artificial Sequence: Synthetic oligonucleotide
guacccuaggguuucugcc

SEQ ID NO: 1859109 - RNA, 19 nt, Artificial Sequence
  Description of Artificial Sequence: Synthetic oligonucleotide
gguucaagacuugaggugc

SEQ ID NO: 1859110 - RNA, 19 nt, Artificial Sequence
  Description of Artificial Sequence: Synthetic oligonucleotide
cucuguccggucaagcagc

SEQ ID NO: 1859111 - RNA, 19 nt, Artificial Sequence
  Description of Artificial Sequence: Synthetic oligonucleotide
cugagugauugcauucagc

SEQ ID NO: 1859112 - RNA, 19 nt, Artificial Sequence
  Description of Artificial Sequence: Synthetic oligonucleotide
aaacugagggauagcagga

SEQ ID NO: 1859113 - RNA, 19 nt, Artificial Sequence
  Description of Artificial Sequence: Synthetic oligonucleotide
cuuuugugaagaccccaag

SEQ ID NO: 1859114 - RNA, 19 nt, Artificial Sequence
  Description of Artificial Sequence: Synthetic oligonucleotide
augucaggccccugugagc

SEQ ID NO: 1859115 - RNA, 19 nt, Artificial Sequence
  Description of Artificial Sequence: Synthetic oligonucleotide
cacccauuggaacaggguc

SEQ ID NO: 1859116 - RNA, 19 nt, Artificial Sequence
  Description of Artificial Sequence: Synthetic oligonucleotide
accucugguaacucgauuu

SEQ ID NO: 1859117 - RNA, 19 nt, Artificial Sequence
  Description of Artificial Sequence: Synthetic oligonucleotide
ugccaaagaugcuccaaga

SEQ ID NO: 1859118 - RNA, 19 nt, Artificial Sequence
  Description of Artificial Sequence: Synthetic oligonucleotide
agagaaggaagcauaggga

SEQ ID NO: 1859119 - RNA, 19 nt, Artificial Sequence
  Description of Artificial Sequence: Synthetic oligonucleotide
cugguaacucgauuuguuc

SEQ ID NO: 1859120 - RNA, 19 nt, Artificial Sequence
  Description of Artificial Sequence: Synthetic oligonucleotide
aggucacacggacuggguc

SEQ ID NO: 1859121 - RNA, 19 nt, Artificial Sequence
  Description of Artificial Sequence: Synthetic oligonucleotide
guuacgaagcugccacuag

SEQ ID NO: 1859122 - RNA, 19 nt, Artificial Sequence
  Description of Artificial Sequence: Synthetic oligonucleotide
uacccuaggguuucugcca

SEQ ID NO: 1859123 - RNA, 19 nt, Artificial Sequence
  Description of Artificial Sequence: Synthetic oligonucleotide
agagauuuggagagcagca

SEQ ID NO: 1859124 - RNA, 19 nt, Artificial Sequence
  Description of Artificial Sequence: Synthetic oligonucleotide
aaucugcgugaacucgaug

SEQ ID NO: 1859125 - RNA, 19 nt, Artificial Sequence
  Description of Artificial Sequence: Synthetic oligonucleotide
cacgcagccaaacacucug

SEQ ID NO: 1859126 - RNA, 19 nt, Artificial Sequence
  Description of Artificial Sequence: Synthetic oligonucleotide
gauagcaggaggccaggca

SEQ ID NO: 1859127 - RNA, 19 nt, Artificial Sequence
  Description of Artificial Sequence: Synthetic oligonucleotide
ucguugcccaccugaagcc

SEQ ID NO: 1859128 - RNA, 19 nt, Artificial Sequence
  Description of Artificial Sequence: Synthetic oligonucleotide
accccuuaacugaagcccc

SEQ ID NO: 1859129 - RNA, 19 nt, Artificial Sequence
  Description of Artificial Sequence: Synthetic oligonucleotide
ugaugucaggccccuguga

SEQ ID NO: 1859130 - RNA, 19 nt, Artificial Sequence
  Description of Artificial Sequence: Synthetic oligonucleotide
caagagaaggaagcauagg

SEQ ID NO: 1859131 - RNA, 19 nt, Artificial Sequence
  Description of Artificial Sequence: Synthetic oligonucleotide
agcucaucgauuugccgcu

SEQ ID NO: 1859132 - RNA, 19 nt, Artificial Sequence
  Description of Artificial Sequence: Synthetic oligonucleotide
ugagggauagcaggaggcc

SEQ ID NO: 1859133 - RNA, 19 nt, Artificial Sequence
  Description of Artificial Sequence: Synthetic oligonucleotide
cagagaaucccugcgaguc

SEQ ID NO: 1859134 - RNA, 19 nt, Artificial Sequence
  Description of Artificial Sequence: Synthetic oligonucleotide
acccuaggguuucugccac

SEQ ID NO: 1859135 - RNA, 19 nt, Artificial Sequence
  Description of Artificial Sequence: Synthetic oligonucleotide
acacucguugcccaccuga

SEQ ID NO: 1859136 - RNA, 19 nt, Artificial Sequence
  Description of Artificial Sequence: Synthetic oligonucleotide
ugcucagugacccggcuuu

SEQ ID NO: 1859137 - RNA, 19 nt, Artificial Sequence
  Description of Artificial Sequence: Synthetic oligonucleotide
aaguuacgaagcugccacu

SEQ ID NO: 1859138 - RNA, 19 nt, Artificial Sequence
  Description of Artificial Sequence: Synthetic oligonucleotide
uucuggguuucugucagga

SEQ ID NO: 1859139 - RNA, 19 nt, Artificial Sequence
  Description of Artificial Sequence: Synthetic oligonucleotide
caagagauuuggagagcag

SEQ ID NO: 1859140 - RNA, 19 nt, Artificial Sequence
  Description of Artificial Sequence: Synthetic oligonucleotide
ugcgugacccucuucuggu

SEQ ID NO: 1859141 - RNA, 19 nt, Artificial Sequence
  Description of Artificial Sequence: Synthetic oligonucleotide
gagugauugcauucagcuc

SEQ ID NO: 1859142 - RNA, 19 nt, Artificial Sequence
  Description of Artificial Sequence: Synthetic oligonucleotide
gagacaagagaaggaagca

SEQ ID NO: 1859143 - RNA, 19 nt, Artificial Sequence
  Description of Artificial Sequence: Synthetic oligonucleotide
gcagaauggccccuggucc

SEQ ID NO: 1859144 - RNA, 19 nt, Artificial Sequence
  Description of Artificial Sequence: Synthetic oligonucleotide
aaggaaccucugguaacuc

SEQ ID NO: 1859145 - RNA, 19 nt, Artificial Sequence
  Description of Artificial Sequence: Synthetic oligonucleotide
ugggugaagcuuucugcca

SEQ ID NO: 1859146 - RNA, 19 nt, Artificial Sequence
  Description of Artificial Sequence: Synthetic oligonucleotide
agcucaugagggcagcaga

SEQ ID NO: 1859147 - RNA, 19 nt, Artificial Sequence
  Description of Artificial Sequence: Synthetic oligonucleotide
ucgauuugccgcugguacu

SEQ ID NO: 1859148 - RNA, 19 nt, Artificial Sequence
  Description of Artificial Sequence: Synthetic oligonucleotide
uaacucgauuuguuccuga

SEQ ID NO: 1859149 - RNA, 19 nt, Artificial Sequence
  Description of Artificial Sequence: Synthetic oligonucleotide
gcagccaaacacucugugg

SEQ ID NO: 1859150 - RNA, 19 nt, Artificial Sequence
  Description of Artificial Sequence: Synthetic oligonucleotide
cugcgugacccucuucugg

SEQ ID NO: 1859151 - RNA, 19 nt, Artificial Sequence
  Description of Artificial Sequence: Synthetic oligonucleotide
ucaucgauuugccgcuggu

SEQ ID NO: 1859152 - RNA, 19 nt, Artificial Sequence
  Description of Artificial Sequence: Synthetic oligonucleotide
gaggugccaaagaugcucc

SEQ ID NO: 1859153 - RNA, 19 nt, Artificial Sequence
  Description of Artificial Sequence: Synthetic oligonucleotide
gccaaagaugcuccaagag

SEQ ID NO: 1859154 - RNA, 19 nt, Artificial Sequence
  Description of Artificial Sequence: Synthetic oligonucleotide
uuugccgcugguacuccac

SEQ ID NO: 1859155 - RNA, 19 nt, Artificial Sequence
  Description of Artificial Sequence: Synthetic oligonucleotide
guugacacgcagccaaaca

SEQ ID NO: 1859156 - RNA, 19 nt, Artificial Sequence
  Description of Artificial Sequence: Synthetic oligonucleotide
accaggaguagcccugaug

SEQ ID NO: 1859157 - RNA, 19 nt, Artificial Sequence
  Description of Artificial Sequence: Synthetic oligonucleotide
cauagggaccccaaggucu

SEQ ID NO: 1859158 - RNA, 19 nt, Artificial Sequence
  Description of Artificial Sequence: Synthetic oligonucleotide
ugaacucgaugcucugaac

SEQ ID NO: 1859159 - RNA, 19 nt, Artificial Sequence
  Description of Artificial Sequence: Synthetic oligonucleotide
gcuccaagagauuuggaga

SEQ ID NO: 1859160 - RNA, 19 nt, Artificial Sequence
  Description of Artificial Sequence: Synthetic oligonucleotide
cacaguaagaaccccuuaa

SEQ ID NO: 1859161 - RNA, 19 nt, Artificial Sequence
  Description of Artificial Sequence: Synthetic oligonucleotide
caccuggugcaucuuauuc

SEQ ID NO: 1859162 - RNA, 19 nt, Artificial Sequence
  Description of Artificial Sequence: Synthetic oligonucleotide
accaacuucaagaugucuu

SEQ ID NO: 1859163 - RNA, 19 nt, Artificial Sequence
  Description of Artificial Sequence: Synthetic oligonucleotide
guacuccacugccucgugg

SEQ ID NO: 1859164 - RNA, 19 nt, Artificial Sequence
  Description of Artificial Sequence: Synthetic oligonucleotide
ugcucugaaccauggcuuc

SEQ ID NO: 1859165 - RNA, 19 nt, Artificial Sequence
  Description of Artificial Sequence: Synthetic oligonucleotide
cucgaugcucugaaccaug

SEQ ID NO: 1859166 - RNA, 19 nt, Artificial Sequence
  Description of Artificial Sequence: Synthetic oligonucleotide
ccuggugcaucuuauucag

SEQ ID NO: 1859167 - RNA, 19 nt, Artificial Sequence
  Description of Artificial Sequence: Synthetic oligonucleotide
cuggagaguccaaguuacg

SEQ ID NO: 1859168 - RNA, 19 nt, Artificial Sequence
  Description of Artificial Sequence: Synthetic oligonucleotide
aggcuccuagauuugucca

SEQ ID NO: 1859169 - RNA, 19 nt, Artificial Sequence
  Description of Artificial Sequence: Synthetic oligonucleotide
uccaagagauuuggagagc

SEQ ID NO: 1859170 - RNA, 19 nt, Artificial Sequence
  Description of Artificial Sequence: Synthetic oligonucleotide
caccuucaucucaaucugc

SEQ ID NO: 1859171 - RNA, 19 nt, Artificial Sequence
  Description of Artificial Sequence: Synthetic oligonucleotide
ugcgagucccuggagaguc

SEQ ID NO: 1859172 - RNA, 19 nt, Artificial Sequence
  Description of Artificial Sequence: Synthetic oligonucleotide
uguccugcucagugacccg

SEQ ID NO: 1859173 - RNA, 19 nt, Artificial Sequence
  Description of Artificial Sequence: Synthetic oligonucleotide
gggugaagcuuucugccag

SEQ ID NO: 1859174 - RNA, 19 nt, Artificial Sequence
  Description of Artificial Sequence: Synthetic oligonucleotide
cugguacuccacugccucg

SEQ ID NO: 1859175 - RNA, 19 nt, Artificial Sequence
  Description of Artificial Sequence: Synthetic oligonucleotide
aagaaccccuuaacugaag

SEQ ID NO: 1859176 - RNA, 19 nt, Artificial Sequence
  Description of Artificial Sequence: Synthetic oligonucleotide
caaacagguugcccauggc

SEQ ID NO: 1859177 - RNA, 19 nt, Artificial Sequence
  Description of Artificial Sequence: Synthetic oligonucleotide
cacuagccugcagagaaac

SEQ ID NO: 1859178 - RNA, 19 nt, Artificial Sequence
  Description of Artificial Sequence: Synthetic oligonucleotide
acccggcuuugcuucuugc

SEQ ID NO: 1859179 - RNA, 19 nt, Artificial Sequence
  Description of Artificial Sequence: Synthetic oligonucleotide
agccaaacacucugugggu

SEQ ID NO: 1859180 - RNA, 19 nt, Artificial Sequence
  Description of Artificial Sequence: Synthetic oligonucleotide
agggauagcaggaggccag

SEQ ID NO: 1859181 - RNA, 19 nt, Artificial Sequence
  Description of Artificial Sequence: Synthetic oligonucleotide
ccccaaacauaaaagguuc

SEQ ID NO: 1859182 - RNA, 19 nt, Artificial Sequence
  Description of Artificial Sequence: Synthetic oligonucleotide
aacacucugugggucaguu

SEQ ID NO: 1859183 - RNA, 19 nt, Artificial Sequence
  Description of Artificial Sequence: Synthetic oligonucleotide
gugaacucgaugcucugaa

SEQ ID NO: 1859184 - RNA, 19 nt, Artificial Sequence
  Description of Artificial Sequence: Synthetic oligonucleotide
gacuugaggugccaaagau

SEQ ID NO: 1859185 - RNA, 19 nt, Artificial Sequence
  Description of Artificial Sequence: Synthetic oligonucleotide
gacacgcagccaaacacuc

SEQ ID NO: 1859186 - RNA, 19 nt, Artificial Sequence
  Description of Artificial Sequence: Synthetic oligonucleotide
ucuguccggucaagcagcu

SEQ ID NO: 1859187 - RNA, 19 nt, Artificial Sequence
  Description of Artificial Sequence: Synthetic oligonucleotide
ucccgguaccucuucuucu

SEQ ID NO: 1859188 - RNA, 19 nt, Artificial Sequence
  Description of Artificial Sequence: Synthetic oligonucleotide
ucccuggagaguccaaguu

SEQ ID NO: 1859189 - RNA, 19 nt, Artificial Sequence
  Description of Artificial Sequence: Synthetic oligonucleotide
ggaccccaaggucugaggc

SEQ ID NO: 1859190 - RNA, 19 nt, Artificial Sequence
  Description of Artificial Sequence: Synthetic oligonucleotide
cccgcuguugcuuuaguug

SEQ ID NO: 1859191 - RNA, 19 nt, Artificial Sequence
  Description of Artificial Sequence: Synthetic oligonucleotide
agaauggccccugguccac

SEQ ID NO: 1859192 - RNA, 19 nt, Artificial Sequence
  Description of Artificial Sequence: Synthetic oligonucleotide
uucaagacuugaggugcca

SEQ ID NO: 1859193 - RNA, 19 nt, Artificial Sequence
  Description of Artificial Sequence: Synthetic oligonucleotide
cacacuggccagcgcagcc

SEQ ID NO: 1859194 - RNA, 19 nt, Artificial Sequence
  Description of Artificial Sequence: Synthetic oligonucleotide
guaacucgauuuguuccug

SEQ ID NO: 1859195 - RNA, 19 nt, Artificial Sequence
  Description of Artificial Sequence: Synthetic oligonucleotide
uuggcccguucuuuccugc

SEQ ID NO: 1859196 - RNA, 19 nt, Artificial Sequence
  Description of Artificial Sequence: Synthetic oligonucleotide
ggucacacggacuggguca

SEQ ID NO: 1859197 - RNA, 19 nt, Artificial Sequence
  Description of Artificial Sequence: Synthetic oligonucleotide
aucccugcgagucccugga

SEQ ID NO: 1859198 - RNA, 19 nt, Artificial Sequence
  Description of Artificial Sequence: Synthetic oligonucleotide
cacacggacugggucagcc

SEQ ID NO: 1859199 - RNA, 19 nt, Artificial Sequence
  Description of Artificial Sequence: Synthetic oligonucleotide
gaaggaaccucugguaacu

SEQ ID NO: 1859200 - RNA, 19 nt, Artificial Sequence
  Description of Artificial Sequence: Synthetic oligonucleotide
cuaggguuucugccacuag

SEQ ID NO: 1859201 - RNA, 19 nt, Artificial Sequence
  Description of Artificial Sequence: Synthetic oligonucleotide
aguuacgaagcugccacua

SEQ ID NO: 1859202 - RNA, 19 nt, Artificial Sequence
  Description of Artificial Sequence: Synthetic oligonucleotide
ggagaguccaaguuacgaa

SEQ ID NO: 1859203 - RNA, 19 nt, Artificial Sequence
  Description of Artificial Sequence: Synthetic oligonucleotide
cugaugucaggccccugug

SEQ ID NO: 1859204 - RNA, 19 nt, Artificial Sequence
  Description of Artificial Sequence: Synthetic oligonucleotide
caaacacucugugggucag

SEQ ID NO: 1859205 - RNA, 19 nt, Artificial Sequence
  Description of Artificial Sequence: Synthetic oligonucleotide
guucaagacuugaggugcc

SEQ ID NO: 1859206 - RNA, 19 nt, Artificial Sequence
  Description of Artificial Sequence: Synthetic oligonucleotide
agggucuugucaccaacuu

SEQ ID NO: 1859207 - RNA, 19 nt, Artificial Sequence
  Description of Artificial Sequence: Synthetic oligonucleotide
gcagcucaucgauuugccg

SEQ ID NO: 1859208 - RNA, 19 nt, Artificial Sequence
  Description of Artificial Sequence: Synthetic oligonucleotide
cuccuagauuuguccauuc

SEQ ID NO: 1859209 - RNA, 19 nt, Artificial Sequence
  Description of Artificial Sequence: Synthetic oligonucleotide
ugguucucuguccggucaa

SEQ ID NO: 1859210 - RNA, 19 nt, Artificial Sequence
  Description of Artificial Sequence: Synthetic oligonucleotide
ucggccugccuggaucugg

SEQ ID NO: 1859211 - RNA, 19 nt, Artificial Sequence
  Description of Artificial Sequence: Synthetic oligonucleotide
ccggcuuugcuucuugcgg

SEQ ID NO: 1859212 - RNA, 19 nt, Artificial Sequence
  Description of Artificial Sequence: Synthetic oligonucleotide
cugcagagaaacugaggga

SEQ ID NO: 1859213 - RNA, 19 nt, Artificial Sequence
  Description of Artificial Sequence: Synthetic oligonucleotide
auagggaccccaaggucug

SEQ ID NO: 1859214 - RNA, 19 nt, Artificial Sequence
  Description of Artificial Sequence: Synthetic oligonucleotide
ugccgcugguacuccacug

SEQ ID NO: 1859215 - RNA, 19 nt, Artificial Sequence
  Description of Artificial Sequence: Synthetic oligonucleotide
gaacagggucuugucacca

SEQ ID NO: 1859216 - RNA, 19 nt, Artificial Sequence
  Description of Artificial Sequence: Synthetic oligonucleotide
gaguccaaguuacgaagcu

SEQ ID NO: 1859217 - RNA, 19 nt, Artificial Sequence
  Description of Artificial Sequence: Synthetic oligonucleotide
cugugggucaguucucaga

SEQ ID NO: 1859218 - RNA, 19 nt, Artificial Sequence
  Description of Artificial Sequence: Synthetic oligonucleotide
gguaacucgauuuguuccu

SEQ ID NO: 1859219 - RNA, 19 nt, Artificial Sequence
  Description of Artificial Sequence: Synthetic oligonucleotide
ucaucucaaucugcgugaa

SEQ ID NO: 1859220 - RNA, 19 nt, Artificial Sequence
  Description of Artificial Sequence: Synthetic oligonucleotide
auuugccgcugguacucca

SEQ ID NO: 1859221 - RNA, 19 nt, Artificial Sequence
  Description of Artificial Sequence: Synthetic oligonucleotide
gauuugccgcugguacucc

SEQ ID NO: 1859222 - RNA, 19 nt, Artificial Sequence
  Description of Artificial Sequence: Synthetic oligonucleotide
guucucuguccggucaagc

SEQ ID NO: 1859223 - RNA, 19 nt, Artificial Sequence
  Description of Artificial Sequence: Synthetic oligonucleotide
ccugcgagucccuggagag

SEQ ID NO: 1859224 - RNA, 19 nt, Artificial Sequence
  Description of Artificial Sequence: Synthetic oligonucleotide
ucaggccccugugagccgc

SEQ ID NO: 1859225 - RNA, 19 nt, Artificial Sequence
  Description of Artificial Sequence: Synthetic oligonucleotide
gucacacggacugggucag

SEQ ID NO: 1859226 - RNA, 19 nt, Artificial Sequence
  Description of Artificial Sequence: Synthetic oligonucleotide
gguuucugucaggaagggg

SEQ ID NO: 1859227 - RNA, 19 nt, Artificial Sequence
  Description of Artificial Sequence: Synthetic oligonucleotide
ggugaagcuuucugccagc

SEQ ID NO: 1859228 - RNA, 19 nt, Artificial Sequence
  Description of Artificial Sequence: Synthetic oligonucleotide
gugagccgcggcuccagcc

SEQ ID NO: 1859229 - RNA, 19 nt, Artificial Sequence
  Description of Artificial Sequence: Synthetic oligonucleotide
aguugcaggauggcccugu

SEQ ID NO: 1859230 - RNA, 19 nt, Artificial Sequence
  Description of Artificial Sequence: Synthetic oligonucleotide
uggcccguucuuuccugcc

SEQ ID NO: 1859231 - RNA, 19 nt, Artificial Sequence
  Description of Artificial Sequence: Synthetic oligonucleotide
ccaugagaacagcaccagg

SEQ ID NO: 1859232 - RNA, 19 nt, Artificial Sequence
  Description of Artificial Sequence: Synthetic oligonucleotide
gcucaugagggcagcagag

SEQ ID NO: 1859233 - RNA, 19 nt, Artificial Sequence
  Description of Artificial Sequence: Synthetic oligonucleotide
ggaaccucugguaacucga

SEQ ID NO: 1859234 - RNA, 19 nt, Artificial Sequence
  Description of Artificial Sequence: Synthetic oligonucleotide
aggcacaguaagaaccccu

SEQ ID NO: 1859235 - RNA, 19 nt, Artificial Sequence
  Description of Artificial Sequence: Synthetic oligonucleotide
cugguucucuguccgguca

SEQ ID NO: 1859236 - RNA, 19 nt, Artificial Sequence
  Description of Artificial Sequence: Synthetic oligonucleotide
gggguacacacccauugga

SEQ ID NO: 1859237 - RNA, 19 nt, Artificial Sequence
  Description of Artificial Sequence: Synthetic oligonucleotide
ggcccuguccugcucagug

SEQ ID NO: 1859238 - RNA, 19 nt, Artificial Sequence
  Description of Artificial Sequence: Synthetic oligonucleotide
aaacacucugugggucagu

SEQ ID NO: 1859239 - RNA, 19 nt, Artificial Sequence
  Description of Artificial Sequence: Synthetic oligonucleotide
caucucaaucugcgugaac

SEQ ID NO: 1859240 - RNA, 19 nt, Artificial Sequence
  Description of Artificial Sequence: Synthetic oligonucleotide
acacggacugggucagcca

SEQ ID NO: 1859241 - RNA, 19 nt, Artificial Sequence
  Description of Artificial Sequence: Synthetic oligonucleotide
aagcugccacuagcucggc

SEQ ID NO: 1859242 - RNA, 19 nt, Artificial Sequence
  Description of Artificial Sequence: Synthetic oligonucleotide
ucuugcggccaaacagguu

SEQ ID NO: 1859243 - RNA, 19 nt, Artificial Sequence
  Description of Artificial Sequence: Synthetic oligonucleotide
cuccaguugcugcgugacc

SEQ ID NO: 1859244 - RNA, 19 nt, Artificial Sequence
  Description of Artificial Sequence: Synthetic oligonucleotide
guacugccucagcuugucc

SEQ ID NO: 1859245 - RNA, 19 nt, Artificial Sequence
  Description of Artificial Sequence: Synthetic oligonucleotide
gacccggcuuugcuucuug

SEQ ID NO: 1859246 - RNA, 19 nt, Artificial Sequence
  Description of Artificial Sequence: Synthetic oligonucleotide
cagcucaugagggcagcag

SEQ ID NO: 1859247 - RNA, 19 nt, Artificial Sequence
  Description of Artificial Sequence: Synthetic oligonucleotide
caggaguagcccugauguc

SEQ ID NO: 1859248 - RNA, 19 nt, Artificial Sequence
  Description of Artificial Sequence: Synthetic oligonucleotide
ccaggaguagcccugaugu

SEQ ID NO: 1859249 - RNA, 19 nt, Artificial Sequence
  Description of Artificial Sequence: Synthetic oligonucleotide
aucaccuggugcaucuuau

SEQ ID NO: 1859250 - RNA, 19 nt, Artificial Sequence
  Description of Artificial Sequence: Synthetic oligonucleotide
cagcuuggcccguucuuuc

SEQ ID NO: 1859251 - RNA, 19 nt, Artificial Sequence
  Description of Artificial Sequence: Synthetic oligonucleotide
acucgaugcucugaaccau

SEQ ID NO: 1859252 - RNA, 19 nt, Artificial Sequence
  Description of Artificial Sequence: Synthetic oligonucleotide
uggacaucaccuggugcau

SEQ ID NO: 1859253 - RNA, 19 nt, Artificial Sequence
  Description of Artificial Sequence: Synthetic oligonucleotide
gacacucguugcccaccug

SEQ ID NO: 1859254 - RNA, 19 nt, Artificial Sequence
  Description of Artificial Sequence: Synthetic oligonucleotide
cccggcuuugcuucuugcg

SEQ ID NO: 1859255 - RNA, 19 nt, Artificial Sequence
  Description of Artificial Sequence: Synthetic oligonucleotide
ucccugcgagucccuggag

SEQ ID NO: 1859256 - RNA, 19 nt, Artificial Sequence
  Description of Artificial Sequence: Synthetic oligonucleotide
aggugccaaagaugcucca

SEQ ID NO: 1859257 - RNA, 19 nt, Artificial Sequence
  Description of Artificial Sequence: Synthetic oligonucleotide
ccccaagucaggcuccuag

SEQ ID NO: 1859258 - RNA, 19 nt, Artificial Sequence
  Description of Artificial Sequence: Synthetic oligonucleotide
gcauagggaccccaagguc

SEQ ID NO: 1859259 - RNA, 19 nt, Artificial Sequence
  Description of Artificial Sequence: Synthetic oligonucleotide
cauuggaacagggucuugu

SEQ ID NO: 1859260 - RNA, 19 nt, Artificial Sequence
  Description of Artificial Sequence: Synthetic oligonucleotide
cugcgugaacucgaugcuc

SEQ ID NO: 1859261 - RNA, 19 nt, Artificial Sequence
  Description of Artificial Sequence: Synthetic oligonucleotide
ccggucaagcagcugcucc

SEQ ID NO: 1859262 - RNA, 19 nt, Artificial Sequence
  Description of Artificial Sequence: Synthetic oligonucleotide
acuagccugcagagaaacu

SEQ ID NO: 1859263 - RNA, 19 nt, Artificial Sequence
  Description of Artificial Sequence: Synthetic oligonucleotide
ugccacuagccugcagaga

SEQ ID NO: 1859264 - RNA, 19 nt, Artificial Sequence
  Description of Artificial Sequence: Synthetic oligonucleotide
cucugaaccauggcuucca

SEQ ID NO: 1859265 - RNA, 19 nt, Artificial Sequence
  Description of Artificial Sequence: Synthetic oligonucleotide
ugcggccaaacagguugcc

SEQ ID NO: 1859266 - RNA, 19 nt, Artificial Sequence
  Description of Artificial Sequence: Synthetic oligonucleotide
auggccccugguccaccuc

SEQ ID NO: 1859267 - RNA, 19 nt, Artificial Sequence
  Description of Artificial Sequence: Synthetic oligonucleotide
cucaugagggcagcagaga

SEQ ID NO: 1859268 - RNA, 19 nt, Artificial Sequence
  Description of Artificial Sequence: Synthetic oligonucleotide
gcuuuaguugcaggauggc

SEQ ID NO: 1859269 - RNA, 19 nt, Artificial Sequence
  Description of Artificial Sequence: Synthetic oligonucleotide
gcagcaguacccuaggguu

SEQ ID NO: 1859270 - RNA, 19 nt, Artificial Sequence
  Description of Artificial Sequence: Synthetic oligonucleotide
aguugcugcgugacccucu

SEQ ID NO: 1859271 - RNA, 19 nt, Artificial Sequence
  Description of Artificial Sequence: Synthetic oligonucleotide
agucaggcuccuagauuug

SEQ ID NO: 1859272 - RNA, 19 nt, Artificial Sequence
  Description of Artificial Sequence: Synthetic oligonucleotide
aucccgcaacagcugccug

SEQ ID NO: 1859273 - RNA, 19 nt, Artificial Sequence
  Description of Artificial Sequence: Synthetic oligonucleotide
cuuugcuucuugcggccaa

SEQ ID NO: 1859274 - RNA, 19 nt, Artificial Sequence
  Description of Artificial Sequence: Synthetic oligonucleotide
gaauggccccugguccacc

SEQ ID NO: 1859275 - RNA, 19 nt, Artificial Sequence
  Description of Artificial Sequence: Synthetic oligonucleotide
aggucugaggcaggucaca

SEQ ID NO: 1859276 - RNA, 19 nt, Artificial Sequence
  Description of Artificial Sequence: Synthetic oligonucleotide
uuuguccauucagcagaau

SEQ ID NO: 1859277 - RNA, 19 nt, Artificial Sequence
  Description of Artificial Sequence: Synthetic oligonucleotide
gguugacacgcagccaaac

SEQ ID NO: 1859278 - RNA, 19 nt, Artificial Sequence
  Description of Artificial Sequence: Synthetic oligonucleotide
cauggcggccccgcgccgg

SEQ ID NO: 1859279 - RNA, 19 nt, Artificial Sequence
  Description of Artificial Sequence: Synthetic oligonucleotide
gugggucaguucucagaga

SEQ ID NO: 1859280 - RNA, 19 nt, Artificial Sequence
  Description of Artificial Sequence: Synthetic oligonucleotide
aggggcucugaaggaaccu

SEQ ID NO: 1859281 - RNA, 19 nt, Artificial Sequence
  Description of Artificial Sequence: Synthetic oligonucleotide
gcugcgugacccucuucug

SEQ ID NO: 1859282 - RNA, 19 nt, Artificial Sequence
  Description of Artificial Sequence: Synthetic oligonucleotide
cuggugcaucuuauucaga

SEQ ID NO: 1859283 - RNA, 19 nt, Artificial Sequence
  Description of Artificial Sequence: Synthetic oligonucleotide
cacucguugcccaccugaa

SEQ ID NO: 1859284 - RNA, 19 nt, Artificial Sequence
  Description of Artificial Sequence: Synthetic oligonucleotide
ugauugcauucagcucuuc

SEQ ID NO: 1859285 - RNA, 19 nt, Artificial Sequence
  Description of Artificial Sequence: Synthetic oligonucleotide
acacgcagccaaacacucu

SEQ ID NO: 1859286 - RNA, 19 nt, Artificial Sequence
  Description of Artificial Sequence: Synthetic oligonucleotide
uaguugcaggauggcccug

SEQ ID NO: 1859287 - RNA, 19 nt, Artificial Sequence
  Description of Artificial Sequence: Synthetic oligonucleotide
gguacugccucagcuuguc

SEQ ID NO: 1859288 - RNA, 19 nt, Artificial Sequence
  Description of Artificial Sequence: Synthetic oligonucleotide
ggguacacacccauuggaa

SEQ ID NO: 1859289 - RNA, 19 nt, Artificial Sequence
  Description of Artificial Sequence: Synthetic oligonucleotide
gccaaacacucuguggguc

SEQ ID NO: 1859290 - RNA, 19 nt, Artificial Sequence
  Description of Artificial Sequence: Synthetic oligonucleotide
cagggucuugucaccaacu

SEQ ID NO: 1859291 - RNA, 19 nt, Artificial Sequence
  Description of Artificial Sequence: Synthetic oligonucleotide
uccggucaagcagcugcuc

SEQ ID NO: 1859292 - RNA, 19 nt, Artificial Sequence
  Description of Artificial Sequence: Synthetic oligonucleotide
caguacccuaggguuucug

SEQ ID NO: 1859293 - RNA, 19 nt, Artificial Sequence
  Description of Artificial Sequence: Synthetic oligonucleotide
ccgcugguacuccacugcc

SEQ ID NO: 1859294 - RNA, 19 nt, Artificial Sequence
  Description of Artificial Sequence: Synthetic oligonucleotide
cugugagccgcggcuccag

SEQ ID NO: 1859295 - RNA, 19 nt, Artificial Sequence
  Description of Artificial Sequence: Synthetic oligonucleotide
gcucugaaccauggcuucc

SEQ ID NO: 1859296 - RNA, 19 nt, Artificial Sequence
  Description of Artificial Sequence: Synthetic oligonucleotide
ccaucccgcaacagcugcc

SEQ ID NO: 1859297 - RNA, 19 nt, Artificial Sequence
  Description of Artificial Sequence: Synthetic oligonucleotide
gugacccucuucugguacu

SEQ ID NO: 1859298 - RNA, 19 nt, Artificial Sequence
  Description of Artificial Sequence: Synthetic oligonucleotide
gcuccaguugcugcgugac

SEQ ID NO: 1859299 - RNA, 19 nt, Artificial Sequence
  Description of Artificial Sequence: Synthetic oligonucleotide
gauuuguuccugagugauu

SEQ ID NO: 1859300 - RNA, 19 nt, Artificial Sequence
  Description of Artificial Sequence: Synthetic oligonucleotide
auccuccugggugaagcuu

SEQ ID NO: 1859301 - RNA, 19 nt, Artificial Sequence
  Description of Artificial Sequence: Synthetic oligonucleotide
ggaagcauagggaccccaa

SEQ ID NO: 1859302 - RNA, 19 nt, Artificial Sequence
  Description of Artificial Sequence: Synthetic oligonucleotide
caucgauuugccgcuggua

SEQ ID NO: 1859303 - RNA, 19 nt, Artificial Sequence
  Description of Artificial Sequence: Synthetic oligonucleotide
ccaaguuacgaagcugcca

SEQ ID NO: 1859304 - RNA, 19 nt, Artificial Sequence
  Description of Artificial Sequence: Synthetic oligonucleotide
augcuccaagagauuugga

SEQ ID NO: 1859305 - RNA, 19 nt, Artificial Sequence
  Description of Artificial Sequence: Synthetic oligonucleotide
cucugguaacucgauuugu

SEQ ID NO: 1859306 - RNA, 19 nt, Artificial Sequence
  Description of Artificial Sequence: Synthetic oligonucleotide
caaucugcgugaacucgau

SEQ ID NO: 1859307 - RNA, 19 nt, Artificial Sequence
  Description of Artificial Sequence: Synthetic oligonucleotide
cgugacccucuucugguac

SEQ ID NO: 1859308 - RNA, 19 nt, Artificial Sequence
  Description of Artificial Sequence: Synthetic oligonucleotide
acgcagccaaacacucugu

SEQ ID NO: 1859309 - RNA, 19 nt, Artificial Sequence
  Description of Artificial Sequence: Synthetic oligonucleotide
agaaucccugcgagucccu

SEQ ID NO: 1859310 - RNA, 19 nt, Artificial Sequence
  Description of Artificial Sequence: Synthetic oligonucleotide
gcgugaacucgaugcucug

SEQ ID NO: 1859311 - RNA, 19 nt, Artificial Sequence
  Description of Artificial Sequence: Synthetic oligonucleotide
uagcucggccugccuggau

SEQ ID NO: 1859312 - RNA, 19 nt, Artificial Sequence
  Description of Artificial Sequence: Synthetic oligonucleotide
gaaccucugguaacucgau

SEQ ID NO: 1859313 - RNA, 19 nt, Artificial Sequence
  Description of Artificial Sequence: Synthetic oligonucleotide
gccucgugggucucgucca

SEQ ID NO: 1859314 - RNA, 19 nt, Artificial Sequence
  Description of Artificial Sequence: Synthetic oligonucleotide
gaggcaggucacacggacu

SEQ ID NO: 1859315 - RNA, 19 nt, Artificial Sequence
  Description of Artificial Sequence: Synthetic oligonucleotide
gcggccaaacagguugccc

SEQ ID NO: 1859316 - RNA, 19 nt, Artificial Sequence
  Description of Artificial Sequence: Synthetic oligonucleotide
cacggacugggucagccau

SEQ ID NO: 1859317 - RNA, 19 nt, Artificial Sequence
  Description of Artificial Sequence: Synthetic oligonucleotide
guugcccaccugaagcccu

SEQ ID NO: 1859318 - RNA, 19 nt, Artificial Sequence
  Description of Artificial Sequence: Synthetic oligonucleotide
ggcccguucuuuccugcca

SEQ ID NO: 1859319 - RNA, 19 nt, Artificial Sequence
  Description of Artificial Sequence: Synthetic oligonucleotide
cauucagcucuuccaggau

SEQ ID NO: 1859320 - RNA, 19 nt, Artificial Sequence
  Description of Artificial Sequence: Synthetic oligonucleotide
cccaagucaggcuccuaga

SEQ ID NO: 1859321 - RNA, 19 nt, Artificial Sequence
  Description of Artificial Sequence: Synthetic oligonucleotide
cgcagccaaacacucugug

SEQ ID NO: 1859322 - RNA, 19 nt, Artificial Sequence
  Description of Artificial Sequence: Synthetic oligonucleotide
cauccuccugggugaagcu

SEQ ID NO: 1859323 - RNA, 19 nt, Artificial Sequence
  Description of Artificial Sequence: Synthetic oligonucleotide
ggucucguccaggauccuc

SEQ ID NO: 1859324 - RNA, 19 nt, Artificial Sequence
  Description of Artificial Sequence: Synthetic oligonucleotide
caggguugacacgcagcca

SEQ ID NO: 1859325 - RNA, 19 nt, Artificial Sequence
  Description of Artificial Sequence: Synthetic oligonucleotide
cuugucccgcuguugcuuu

SEQ ID NO: 1859326 - RNA, 19 nt, Artificial Sequence
  Description of Artificial Sequence: Synthetic oligonucleotide
gccaaacagguugcccaug

SEQ ID NO: 1859327 - RNA, 19 nt, Artificial Sequence
  Description of Artificial Sequence: Synthetic oligonucleotide
aggaggccaggcacaguaa

SEQ ID NO: 1859328 - RNA, 19 nt, Artificial Sequence
  Description of Artificial Sequence: Synthetic oligonucleotide
cccuggagaguccaaguua

SEQ ID NO: 1859329 - RNA, 19 nt, Artificial Sequence
  Description of Artificial Sequence: Synthetic oligonucleotide
cccugugagccgcggcucc

SEQ ID NO: 1859330 - RNA, 19 nt, Artificial Sequence
  Description of Artificial Sequence: Synthetic oligonucleotide
guugcugcgugacccucuu

SEQ ID NO: 1859331 - RNA, 19 nt, Artificial Sequence
  Description of Artificial Sequence: Synthetic oligonucleotide
ggacaucaccuggugcauc

SEQ ID NO: 1859332 - RNA, 19 nt, Artificial Sequence
  Description of Artificial Sequence: Synthetic oligonucleotide
ggagagcagcaguacccua

SEQ ID NO: 1859333 - RNA, 19 nt, Artificial Sequence
  Description of Artificial Sequence: Synthetic oligonucleotide
ccugaugucaggccccugu

SEQ ID NO: 1859334 - RNA, 19 nt, Artificial Sequence
  Description of Artificial Sequence: Synthetic oligonucleotide
caucccgcaacagcugccu

SEQ ID NO: 1859335 - RNA, 19 nt, Artificial Sequence
  Description of Artificial Sequence: Synthetic oligonucleotide
ggacugggucagccaugag

SEQ ID NO: 1859336 - RNA, 19 nt, Artificial Sequence
  Description of Artificial Sequence: Synthetic oligonucleotide
ugacccggcuuugcuucuu

SEQ ID NO: 1859337 - RNA, 19 nt, Artificial Sequence
  Description of Artificial Sequence: Synthetic oligonucleotide
cagcaguacccuaggguuu

SEQ ID NO: 1859338 - RNA, 19 nt, Artificial Sequence
  Description of Artificial Sequence: Synthetic oligonucleotide
uggcccuguccugcucagu

SEQ ID NO: 1859339 - RNA, 19 nt, Artificial Sequence
  Description of Artificial Sequence: Synthetic oligonucleotide
cccucagcucaugagggca

SEQ ID NO: 1859340 - RNA, 19 nt, Artificial Sequence
  Description of Artificial Sequence: Synthetic oligonucleotide
gcccuguccugcucaguga

SEQ ID NO: 1859341 - RNA, 19 nt, Artificial Sequence
  Description of Artificial Sequence: Synthetic oligonucleotide
cuagcucggccugccugga

SEQ ID NO: 1859342 - RNA, 19 nt, Artificial Sequence
  Description of Artificial Sequence: Synthetic oligonucleotide
cccugcgagucccuggaga

SEQ ID NO: 1859343 - RNA, 19 nt, Artificial Sequence
  Description of Artificial Sequence: Synthetic oligonucleotide
ugcccaccugaagcccuuc

SEQ ID NO: 1859344 - RNA, 19 nt, Artificial Sequence
  Description of Artificial Sequence: Synthetic oligonucleotide
cugccucgugggucucguc

SEQ ID NO: 1859345 - RNA, 19 nt, Artificial Sequence
  Description of Artificial Sequence: Synthetic oligonucleotide
gcggcuccagccaccagca

SEQ ID NO: 1859346 - RNA, 19 nt, Artificial Sequence
  Description of Artificial Sequence: Synthetic oligonucleotide
cguugcccaccugaagccc

SEQ ID NO: 1859347 - RNA, 19 nt, Artificial Sequence
  Description of Artificial Sequence: Synthetic oligonucleotide
ggccccugugagccgcggc

SEQ ID NO: 1859348 - RNA, 19 nt, Artificial Sequence
  Description of Artificial Sequence: Synthetic oligonucleotide
ggcacaguaagaaccccuu

SEQ ID NO: 1859349 - RNA, 19 nt, Artificial Sequence
  Description of Artificial Sequence: Synthetic oligonucleotide
gugauugcauucagcucuu

SEQ ID NO: 1859350 - RNA, 19 nt, Artificial Sequence
  Description of Artificial Sequence: Synthetic oligonucleotide
gggcucugaaggaaccucu

SEQ ID NO: 1859351 - RNA, 19 nt, Artificial Sequence
  Description of Artificial Sequence: Synthetic oligonucleotide
ccaagucaggcuccuagau

SEQ ID NO: 1859352 - RNA, 19 nt, Artificial Sequence
  Description of Artificial Sequence: Synthetic oligonucleotide
guccggucaagcagcugcu

SEQ ID NO: 1859353 - RNA, 19 nt, Artificial Sequence
  Description of Artificial Sequence: Synthetic oligonucleotide
gcgagucccuggagagucc

SEQ ID NO: 1859354 - RNA, 19 nt, Artificial Sequence
  Description of Artificial Sequence: Synthetic oligonucleotide
ccuaggguuucugccacua

SEQ ID NO: 1859355 - RNA, 19 nt, Artificial Sequence
  Description of Artificial Sequence: Synthetic oligonucleotide
cugcucagugacccggcuu

SEQ ID NO: 1859356 - RNA, 19 nt, Artificial Sequence
  Description of Artificial Sequence: Synthetic oligonucleotide
ccauuggaacagggucuug

SEQ ID NO: 1859357 - RNA, 19 nt, Artificial Sequence
  Description of Artificial Sequence: Synthetic oligonucleotide
cgugaacucgaugcucuga

SEQ ID NO: 1859358 - RNA, 19 nt, Artificial Sequence
  Description of Artificial Sequence: Synthetic oligonucleotide
ccacuagccugcagagaaa

SEQ ID NO: 1859359 - RNA, 19 nt, Artificial Sequence
  Description of Artificial Sequence: Synthetic oligonucleotide
ggguugacacgcagccaaa

SEQ ID NO: 1859360 - RNA, 19 nt, Artificial Sequence
  Description of Artificial Sequence: Synthetic oligonucleotide
gcuccuagauuuguccauu

SEQ ID NO: 1859361 - RNA, 19 nt, Artificial Sequence
  Description of Artificial Sequence: Synthetic oligonucleotide
ccauggcggccccgcgccg

SEQ ID NO: 1859362 - RNA, 19 nt, Artificial Sequence
  Description of Artificial Sequence: Synthetic oligonucleotide
gcgugacccucuucuggua

SEQ ID NO: 1859363 - RNA, 19 nt, Artificial Sequence
  Description of Artificial Sequence: Synthetic oligonucleotide
uggcggccccgcgccggcc

SEQ ID NO: 1859364 - RNA, 19 nt, Artificial Sequence
  Description of Artificial Sequence: Synthetic oligonucleotide
gcuguguccaggacuccau

SEQ ID NO: 1859365 - RNA, 19 nt, Artificial Sequence
  Description of Artificial Sequence: Synthetic oligonucleotide
cugcgagucccuggagagu

SEQ ID NO: 1859366 - RNA, 19 nt, Artificial Sequence
  Description of Artificial Sequence: Synthetic oligonucleotide
cggacugggucagccauga

SEQ ID NO: 1859367 - RNA, 19 nt, Artificial Sequence
  Description of Artificial Sequence: Synthetic oligonucleotide
gcuugucccgcuguugcuu

SEQ ID NO: 1859368 - RNA, 19 nt, Artificial Sequence
  Description of Artificial Sequence: Synthetic oligonucleotide
ccaguugcugcgugacccu

SEQ ID NO: 1859369 - RNA, 19 nt, Artificial Sequence
  Description of Artificial Sequence: Synthetic oligonucleotide
gcucccgguaccucuucuu

SEQ ID NO: 1859370 - RNA, 19 nt, Artificial Sequence
  Description of Artificial Sequence: Synthetic oligonucleotide
gggucaguucucagagaau

SEQ ID NO: 1859371 - RNA, 19 nt, Artificial Sequence
  Description of Artificial Sequence: Synthetic oligonucleotide
cccgguaccucuucuucuu

SEQ ID NO: 1859372 - RNA, 19 nt, Artificial Sequence
  Description of Artificial Sequence: Synthetic oligonucleotide
ggccuuggcaggggcuucu

SEQ ID NO: 1859373 - RNA, 19 nt, Artificial Sequence
  Description of Artificial Sequence: Synthetic oligonucleotide
cgcugguacuccacugccu

SEQ ID NO: 1859374 - RNA, 19 nt, Artificial Sequence
  Description of Artificial Sequence: Synthetic oligonucleotide
gcaguacccuaggguuucu

SEQ ID NO: 1859375 - RNA, 19 nt, Artificial Sequence
  Description of Artificial Sequence: Synthetic oligonucleotide
ccccgcgccggccggcuga

SEQ ID NO: 1859376 - RNA, 19 nt, Artificial Sequence
  Description of Artificial Sequence: Synthetic oligonucleotide
gcgcagcccuucaggccuc

SEQ ID NO: 1859377 - RNA, 19 nt, Artificial Sequence
  Description of Artificial Sequence: Synthetic oligonucleotide
cccuaggguuucugccacu

SEQ ID NO: 1859378 - RNA, 19 nt, Artificial Sequence
  Description of Artificial Sequence: Synthetic oligonucleotide
cccgcgccggccggcugag

SEQ ID NO: 1859379 - RNA, 19 nt, Artificial Sequence
  Description of Artificial Sequence: Synthetic oligonucleotide
cgugggucucguccaggau

SEQ ID NO: 1859380 - RNA, 19 nt, Artificial Sequence
  Description of Artificial Sequence: Synthetic oligonucleotide
gggucucguccaggauccu

SEQ ID NO: 1859381 - RNA, 19 nt, Artificial Sequence
  Description of Artificial Sequence: Synthetic oligonucleotide
aacagguagaacugggucc

SEQ ID NO: 1859382 - RNA, 19 nt, Artificial Sequence
  Description of Artificial Sequence: Synthetic oligonucleotide
gaguaugugaaauaaagug

SEQ ID NO: 1859383 - RNA, 19 nt, Artificial Sequence
  Description of Artificial Sequence: Synthetic oligonucleotide
gauggaauaggucacuugg

SEQ ID NO: 1859384 - RNA, 19 nt, Artificial Sequence
  Description of Artificial Sequence: Synthetic oligonucleotide
aacgaguauaagcaugggc

SEQ ID NO: 1859385 - RNA, 19 nt, Artificial Sequence
  Description of Artificial Sequence: Synthetic oligonucleotide
aguaugugaaauaaagugc

SEQ ID NO: 1859386 - RNA, 19 nt, Artificial Sequence
  Description of Artificial Sequence: Synthetic oligonucleotide
auaagcaugggccaccagc

SEQ ID NO: 1859387 - RNA, 19 nt, Artificial Sequence
  Description of Artificial Sequence: Synthetic oligonucleotide
uuugguaugauuuuccuuc

SEQ ID NO: 1859388 - RNA, 19 nt, Artificial Sequence
  Description of Artificial Sequence: Synthetic oligonucleotide
aaacuggguauuuucugcc

SEQ ID NO: 1859389 - RNA, 19 nt, Artificial Sequence
  Description of Artificial Sequence: Synthetic oligonucleotide
uacauaguggauccgaucc

SEQ ID NO: 1859390 - RNA, 19 nt, Artificial Sequence
  Description of Artificial Sequence: Synthetic oligonucleotide
acgaguauaagcaugggcc

SEQ ID NO: 1859391 - RNA, 19 nt, Artificial Sequence
  Description of Artificial Sequence: Synthetic oligonucleotide
ugcauauuauauucaaagg

SEQ ID NO: 1859392 - RNA, 19 nt, Artificial Sequence
  Description of Artificial Sequence: Synthetic oligonucleotide
uguaguaccaggccaagag

SEQ ID NO: 1859393 - RNA, 19 nt, Artificial Sequence
  Description of Artificial Sequence: Synthetic oligonucleotide
ugguuguuuaguuagaggu

SEQ ID NO: 1859394 - RNA, 19 nt, Artificial Sequence
  Description of Artificial Sequence: Synthetic oligonucleotide
caaaugacaggacaggucc

SEQ ID NO: 1859395 - RNA, 19 nt, Artificial Sequence
  Description of Artificial Sequence: Synthetic oligonucleotide
guaugugaaauaaagugcg

SEQ ID NO: 1859396 - RNA, 19 nt, Artificial Sequence
  Description of Artificial Sequence: Synthetic oligonucleotide
uguagaacugcuugaauug

SEQ ID NO: 1859397 - RNA, 19 nt, Artificial Sequence
  Description of Artificial Sequence: Synthetic oligonucleotide
uguaacgaguauaagcaug

SEQ ID NO: 1859398 - RNA, 19 nt, Artificial Sequence
  Description of Artificial Sequence: Synthetic oligonucleotide
uuuucucuugccagcaugg

SEQ ID NO: 1859399 - RNA, 19 nt, Artificial Sequence
  Description of Artificial Sequence: Synthetic oligonucleotide
uggaauaggucacuugggg

SEQ ID NO: 1859400 - RNA, 19 nt, Artificial Sequence
  Description of Artificial Sequence: Synthetic oligonucleotide
uuaaauagcuccuucuuaa

SEQ ID NO: 1859401 - RNA, 19 nt, Artificial Sequence
  Description of Artificial Sequence: Synthetic oligonucleotide
ucaaacagguagaacuggg

SEQ ID NO: 1859402 - RNA, 19 nt, Artificial Sequence
  Description of Artificial Sequence: Synthetic oligonucleotide
cauguaacgaguauaagca

SEQ ID NO: 1859403 - RNA, 19 nt, Artificial Sequence
  Description of Artificial Sequence: Synthetic oligonucleotide
aacugcuugaauugcuggg

SEQ ID NO: 1859404 - RNA, 19 nt, Artificial Sequence
  Description of Artificial Sequence: Synthetic oligonucleotide
gcauauuauauucaaaggc

SEQ ID NO: 1859405 - RNA, 19 nt, Artificial Sequence
  Description of Artificial Sequence: Synthetic oligonucleotide
uuuaguuagagguggagau

SEQ ID NO: 1859406 - RNA, 19 nt, Artificial Sequence
  Description of Artificial Sequence: Synthetic oligonucleotide
guuguuuaguuagaggugg

SEQ ID NO: 1859407 - RNA, 19 nt, Artificial Sequence
  Description of Artificial Sequence: Synthetic oligonucleotide
uaugugaaauaaagugcgg

SEQ ID NO: 1859408 - RNA, 19 nt, Artificial Sequence
  Description of Artificial Sequence: Synthetic oligonucleotide
gacagcuagaacgagcugg

SEQ ID NO: 1859409 - RNA, 19 nt, Artificial Sequence
  Description of Artificial Sequence: Synthetic oligonucleotide
auuguccacaugcucaaac

SEQ ID NO: 1859410 - RNA, 19 nt, Artificial Sequence
  Description of Artificial Sequence: Synthetic oligonucleotide
ucaucuaccccuuccgagg

SEQ ID NO: 1859411 - RNA, 19 nt, Artificial Sequence
  Description of Artificial Sequence: Synthetic oligonucleotide
aagacauuguugcugagua

SEQ ID NO: 1859412 - RNA, 19 nt, Artificial Sequence
  Description of Artificial Sequence: Synthetic oligonucleotide
guagguaggaugcaaauga

SEQ ID NO: 1859413 - RNA, 19 nt, Artificial Sequence
  Description of Artificial Sequence: Synthetic oligonucleotide
uaguuagagguggagauag

SEQ ID NO: 1859414 - RNA, 19 nt, Artificial Sequence
  Description of Artificial Sequence: Synthetic oligonucleotide
guaacgaguauaagcaugg

SEQ ID NO: 1859415 - RNA, 19 nt, Artificial Sequence
  Description of Artificial Sequence: Synthetic oligonucleotide
auucaaaggcuuuguuggc

SEQ ID NO: 1859416 - RNA, 19 nt, Artificial Sequence
  Description of Artificial Sequence: Synthetic oligonucleotide
agcuagaacgagcuggagg

SEQ ID NO: 1859417 - RNA, 19 nt, Artificial Sequence
  Description of Artificial Sequence: Synthetic oligonucleotide
cuucacauguaguaccagg

SEQ ID NO: 1859418 - RNA, 19 nt, Artificial Sequence
  Description of Artificial Sequence: Synthetic oligonucleotide
cuugggguagguaggaugc

SEQ ID NO: 1859419 - RNA, 19 nt, Artificial Sequence
  Description of Artificial Sequence: Synthetic oligonucleotide
caaacuggguauuuucugc

SEQ ID NO: 1859420 - RNA, 19 nt, Artificial Sequence
  Description of Artificial Sequence: Synthetic oligonucleotide
gguauuuucugcccggucg

SEQ ID NO: 1859421 - RNA, 19 nt, Artificial Sequence
  Description of Artificial Sequence: Synthetic oligonucleotide
ugaauaucugcauauuaua

SEQ ID NO: 1859422 - RNA, 19 nt, Artificial Sequence
  Description of Artificial Sequence: Synthetic oligonucleotide
aguuucagugcccucuggg

SEQ ID NO: 1859423 - RNA, 19 nt, Artificial Sequence
  Description of Artificial Sequence: Synthetic oligonucleotide
uguuuucucgaacccagca

SEQ ID NO: 1859424 - RNA, 19 nt, Artificial Sequence
  Description of Artificial Sequence: Synthetic oligonucleotide
accaaagaaauacuccaug

SEQ ID NO: 1859425 - RNA, 19 nt, Artificial Sequence
  Description of Artificial Sequence: Synthetic oligonucleotide
acagguagaacuggguccc

SEQ ID NO: 1859426 - RNA, 19 nt, Artificial Sequence
  Description of Artificial Sequence: Synthetic oligonucleotide
ggggcauuuacguacaucc

SEQ ID NO: 1859427 - RNA, 19 nt, Artificial Sequence
  Description of Artificial Sequence: Synthetic oligonucleotide
ugugaaauaaagugcggua

SEQ ID NO: 1859428 - RNA, 19 nt, Artificial Sequence
  Description of Artificial Sequence: Synthetic oligonucleotide
uucucugacucaucuaccc

SEQ ID NO: 1859429 - RNA, 19 nt, Artificial Sequence
  Description of Artificial Sequence: Synthetic oligonucleotide
cauucugcccuacauagug

SEQ ID NO: 1859430 - RNA, 19 nt, Artificial Sequence
  Description of Artificial Sequence: Synthetic oligonucleotide
uugcuuguuuucucgaacc

SEQ ID NO: 1859431 - RNA, 19 nt, Artificial Sequence
  Description of Artificial Sequence: Synthetic oligonucleotide
gucuucaccaaagaaauac

SEQ ID NO: 1859432 - RNA, 19 nt, Artificial Sequence
  Description of Artificial Sequence: Synthetic oligonucleotide
aguauaagcaugggccacc

SEQ ID NO: 1859433 - RNA, 19 nt, Artificial Sequence
  Description of Artificial Sequence: Synthetic oligonucleotide
gcuagaacgagcuggaggc

SEQ ID NO: 1859434 - RNA, 19 nt, Artificial Sequence
  Description of Artificial Sequence: Synthetic oligonucleotide
uuuucucgaacccagcauu

SEQ ID NO: 1859435 - RNA, 19 nt, Artificial Sequence
  Description of Artificial Sequence: Synthetic oligonucleotide
agguccgucagucucugcg

SEQ ID NO: 1859436 - RNA, 19 nt, Artificial Sequence
  Description of Artificial Sequence: Synthetic oligonucleotide
aauaggucacuugggguag

SEQ ID NO: 1859437 - RNA, 19 nt, Artificial Sequence
  Description of Artificial Sequence: Synthetic oligonucleotide
gguaggaugcaaaugacag

SEQ ID NO: 1859438 - RNA, 19 nt, Artificial Sequence
  Description of Artificial Sequence: Synthetic oligonucleotide
ucuucaccaaagaaauacu

SEQ ID NO: 1859439 - RNA, 19 nt, Artificial Sequence
  Description of Artificial Sequence: Synthetic oligonucleotide
uccauguccuugaucagug

SEQ ID NO: 1859440 - RNA, 19 nt, Artificial Sequence
  Description of Artificial Sequence: Synthetic oligonucleotide
ccauguaacgaguauaagc

SEQ ID NO: 1859441 - RNA, 19 nt, Artificial Sequence
  Description of Artificial Sequence: Synthetic oligonucleotide
guaggaugcaaaugacagg

SEQ ID NO: 1859442 - RNA, 19 nt, Artificial Sequence
  Description of Artificial Sequence: Synthetic oligonucleotide
uaucugcauauuauauuca

SEQ ID NO: 1859443 - RNA, 19 nt, Artificial Sequence
  Description of Artificial Sequence: Synthetic oligonucleotide
uucacugaauaucugcaua

SEQ ID NO: 1859444 - RNA, 19 nt, Artificial Sequence
  Description of Artificial Sequence: Synthetic oligonucleotide
agagaggucugccauuuug

SEQ ID NO: 1859445 - RNA, 19 nt, Artificial Sequence
  Description of Artificial Sequence: Synthetic oligonucleotide
uccgguguagcuccauggg

SEQ ID NO: 1859446 - RNA, 19 nt, Artificial Sequence
  Description of Artificial Sequence: Synthetic oligonucleotide
ucgugugcuuccuuggucc

SEQ ID NO: 1859447 - RNA, 19 nt, Artificial Sequence
  Description of Artificial Sequence: Synthetic oligonucleotide
ucacugaauaucugcauau

SEQ ID NO: 1859448 - RNA, 19 nt, Artificial Sequence
  Description of Artificial Sequence: Synthetic oligonucleotide
ugcccuacauaguggaucc

SEQ ID NO: 1859449 - RNA, 19 nt, Artificial Sequence
  Description of Artificial Sequence: Synthetic oligonucleotide
ucaagggcugaguauguga

SEQ ID NO: 1859450 - RNA, 19 nt, Artificial Sequence
  Description of Artificial Sequence: Synthetic oligonucleotide
agcuuaaauagcuccuucu

SEQ ID NO: 1859451 - RNA, 19 nt, Artificial Sequence
  Description of Artificial Sequence: Synthetic oligonucleotide
gaauaggucacuuggggua

SEQ ID NO: 1859452 - RNA, 19 nt, Artificial Sequence
  Description of Artificial Sequence: Synthetic oligonucleotide
cauauuucugggcagccuc

SEQ ID NO: 1859453 - RNA, 19 nt, Artificial Sequence
  Description of Artificial Sequence: Synthetic oligonucleotide
uauauucaaaggcuuuguu

SEQ ID NO: 1859454 - RNA, 19 nt, Artificial Sequence
  Description of Artificial Sequence: Synthetic oligonucleotide
ugcuuguuuucucgaaccc

SEQ ID NO: 1859455 - RNA, 19 nt, Artificial Sequence
  Description of Artificial Sequence: Synthetic oligonucleotide
gugguuguuuaguuagagg

SEQ ID NO: 1859456 - RNA, 19 nt, Artificial Sequence
  Description of Artificial Sequence: Synthetic oligonucleotide
accuuugucuggcugagca

SEQ ID NO: 1859457 - RNA, 19 nt, Artificial Sequence
  Description of Artificial Sequence: Synthetic oligonucleotide
ggcaagcuuaaauagcucc

SEQ ID NO: 1859458 - RNA, 19 nt, Artificial Sequence
  Description of Artificial Sequence: Synthetic oligonucleotide
uguuuaguuagagguggag

SEQ ID NO: 1859459 - RNA, 19 nt, Artificial Sequence
  Description of Artificial Sequence: Synthetic oligonucleotide
uccucaagggcugaguaug

SEQ ID NO: 1859460 - RNA, 19 nt, Artificial Sequence
  Description of Artificial Sequence: Synthetic oligonucleotide
ccuuuaggagcucagagag

SEQ ID NO: 1859461 - RNA, 19 nt, Artificial Sequence
  Description of Artificial Sequence: Synthetic oligonucleotide
ggucacuugggguagguag

SEQ ID NO: 1859462 - RNA, 19 nt, Artificial Sequence
  Description of Artificial Sequence: Synthetic oligonucleotide
uuuucuagugucuggcuuu

SEQ ID NO: 1859463 - RNA, 19 nt, Artificial Sequence
  Description of Artificial Sequence: Synthetic oligonucleotide
cuuugucuggcugagcagc

SEQ ID NO: 1859464 - RNA, 19 nt, Artificial Sequence
  Description of Artificial Sequence: Synthetic oligonucleotide
ucucugacucaucuacccc

SEQ ID NO: 1859465 - RNA, 19 nt, Artificial Sequence
  Description of Artificial Sequence: Synthetic oligonucleotide
ucugccgcuuggcaggucc

SEQ ID NO: 1859466 - RNA, 19 nt, Artificial Sequence
  Description of Artificial Sequence: Synthetic oligonucleotide
aagugcgguaguggcaagc

SEQ ID NO: 1859467 - RNA, 19 nt, Artificial Sequence
  Description of Artificial Sequence: Synthetic oligonucleotide
ucuuaauguuuccuuucaa

SEQ ID NO: 1859468 - RNA, 19 nt, Artificial Sequence
  Description of Artificial Sequence: Synthetic oligonucleotide
aguaccaggccaagagucc

SEQ ID NO: 1859469 - RNA, 19 nt, Artificial Sequence
  Description of Artificial Sequence: Synthetic oligonucleotide
auugcugggcauuguccac

SEQ ID NO: 1859470 - RNA, 19 nt, Artificial Sequence
  Description of Artificial Sequence: Synthetic oligonucleotide
uccuucacauguaguacca

SEQ ID NO: 1859471 - RNA, 19 nt, Artificial Sequence
  Description of Artificial Sequence: Synthetic oligonucleotide
cucaucuaccccuuccgag

SEQ ID NO: 1859472 - RNA, 19 nt, Artificial Sequence
  Description of Artificial Sequence: Synthetic oligonucleotide
uggucuucaaauucauguc

SEQ ID NO: 1859473 - RNA, 19 nt, Artificial Sequence
  Description of Artificial Sequence: Synthetic oligonucleotide
cuugcugcccucacucugg

SEQ ID NO: 1859474 - RNA, 19 nt, Artificial Sequence
  Description of Artificial Sequence: Synthetic oligonucleotide
gaauugcugggcauugucc

SEQ ID NO: 1859475 - RNA, 19 nt, Artificial Sequence
  Description of Artificial Sequence: Synthetic oligonucleotide
aaauucauguccagggcau

SEQ ID NO: 1859476 - RNA, 19 nt, Artificial Sequence
  Description of Artificial Sequence: Synthetic oligonucleotide
uucugcccuacauagugga

SEQ ID NO: 1859477 - RNA, 19 nt, Artificial Sequence
  Description of Artificial Sequence: Synthetic oligonucleotide
ggcauuuacguacaucccc

SEQ ID NO: 1859478 - RNA, 19 nt, Artificial Sequence
  Description of Artificial Sequence: Synthetic oligonucleotide
uuauugguugcuuguuuuc

SEQ ID NO: 1859479 - RNA, 19 nt, Artificial Sequence
  Description of Artificial Sequence: Synthetic oligonucleotide
aacgagcuggaggcuaggc

SEQ ID NO: 1859480 - RNA, 19 nt, Artificial Sequence
  Description of Artificial Sequence: Synthetic oligonucleotide
guaguggcaagcuuaaaua

SEQ ID NO: 1859481 - RNA, 19 nt, Artificial Sequence
  Description of Artificial Sequence: Synthetic oligonucleotide
caaauucauguccagggca

SEQ ID NO: 1859482 - RNA, 19 nt, Artificial Sequence
  Description of Artificial Sequence: Synthetic oligonucleotide
uauugguugcuuguuuucu

SEQ ID NO: 1859483 - RNA, 19 nt, Artificial Sequence
  Description of Artificial Sequence: Synthetic oligonucleotide
ggucccuuccuuuaggagc

SEQ ID NO: 1859484 - RNA, 19 nt, Artificial Sequence
  Description of Artificial Sequence: Synthetic oligonucleotide
uuuugguaugauuuuccuu

SEQ ID NO: 1859485 - RNA, 19 nt, Artificial Sequence
  Description of Artificial Sequence: Synthetic oligonucleotide
cucaaacagguagaacugg

SEQ ID NO: 1859486 - RNA, 19 nt, Artificial Sequence
  Description of Artificial Sequence: Synthetic oligonucleotide
uagguaggaugcaaaugac

SEQ ID NO: 1859487 - RNA, 19 nt, Artificial Sequence
  Description of Artificial Sequence: Synthetic oligonucleotide
guugcuuguuuucucgaac

SEQ ID NO: 1859488 - RNA, 19 nt, Artificial Sequence
  Description of Artificial Sequence: Synthetic oligonucleotide
aguucacugaauaucugca

SEQ ID NO: 1859489 - RNA, 19 nt, Artificial Sequence
  Description of Artificial Sequence: Synthetic oligonucleotide
ucuguagaacugcuugaau

SEQ ID NO: 1859490 - RNA, 19 nt, Artificial Sequence
  Description of Artificial Sequence: Synthetic oligonucleotide
agacauuguugcugaguag

SEQ ID NO: 1859491 - RNA, 19 nt, Artificial Sequence
  Description of Artificial Sequence: Synthetic oligonucleotide
gauccgauccacauauuuc

SEQ ID NO: 1859492 - RNA, 19 nt, Artificial Sequence
  Description of Artificial Sequence: Synthetic oligonucleotide
uugguaugauuuuccuucu

SEQ ID NO: 1859493 - RNA, 19 nt, Artificial Sequence
  Description of Artificial Sequence: Synthetic oligonucleotide
uuguuuaguuagaggugga

SEQ ID NO: 1859494 - RNA, 19 nt, Artificial Sequence
  Description of Artificial Sequence: Synthetic oligonucleotide
ucucgaacccagcauuaaa

SEQ ID NO: 1859495 - RNA, 19 nt, Artificial Sequence
  Description of Artificial Sequence: Synthetic oligonucleotide
ggagauagggauggaauag

SEQ ID NO: 1859496 - RNA, 19 nt, Artificial Sequence
  Description of Artificial Sequence: Synthetic oligonucleotide
uccgauccacauauuucug

SEQ ID NO: 1859497 - RNA, 19 nt, Artificial Sequence
  Description of Artificial Sequence: Synthetic oligonucleotide
uauuucugggcagccucgg

SEQ ID NO: 1859498 - RNA, 19 nt, Artificial Sequence
  Description of Artificial Sequence: Synthetic oligonucleotide
ugcauggggaacccguccu

SEQ ID NO: 1859499 - RNA, 19 nt, Artificial Sequence
  Description of Artificial Sequence: Synthetic oligonucleotide
guuuaguuagagguggaga

SEQ ID NO: 1859500 - RNA, 19 nt, Artificial Sequence
  Description of Artificial Sequence: Synthetic oligonucleotide
auggaauaggucacuuggg

SEQ ID NO: 1859501 - RNA, 19 nt, Artificial Sequence
  Description of Artificial Sequence: Synthetic oligonucleotide
uuguuuucucgaacccagc

SEQ ID NO: 1859502 - RNA, 19 nt, Artificial Sequence
  Description of Artificial Sequence: Synthetic oligonucleotide
uaacgaguauaagcauggg

SEQ ID NO: 1859503 - RNA, 19 nt, Artificial Sequence
  Description of Artificial Sequence: Synthetic oligonucleotide
uuucucgaacccagcauua

SEQ ID NO: 1859504 - RNA, 19 nt, Artificial Sequence
  Description of Artificial Sequence: Synthetic oligonucleotide
ugggcauuguccacaugcu

SEQ ID NO: 1859505 - RNA, 19 nt, Artificial Sequence
  Description of Artificial Sequence: Synthetic oligonucleotide
cacauguaguaccaggcca

SEQ ID NO: 1859506 - RNA, 19 nt, Artificial Sequence
  Description of Artificial Sequence: Synthetic oligonucleotide
uggguggucuuuguuucgg

SEQ ID NO: 1859507 - RNA, 19 nt, Artificial Sequence
  Description of Artificial Sequence: Synthetic oligonucleotide
cuacauaguggauccgauc

SEQ ID NO: 1859508 - RNA, 19 nt, Artificial Sequence
  Description of Artificial Sequence: Synthetic oligonucleotide
uuggucccuuccuuuagga

SEQ ID NO: 1859509 - RNA, 19 nt, Artificial Sequence
  Description of Artificial Sequence: Synthetic oligonucleotide
aaaggcuggguggucuuug

SEQ ID NO: 1859510 - RNA, 19 nt, Artificial Sequence
  Description of Artificial Sequence: Synthetic oligonucleotide
ucauucugcccuacauagu

SEQ ID NO: 1859511 - RNA, 19 nt, Artificial Sequence
  Description of Artificial Sequence: Synthetic oligonucleotide
uaguggauccgauccacau

SEQ ID NO: 1859512 - RNA, 19 nt, Artificial Sequence
  Description of Artificial Sequence: Synthetic oligonucleotide
uggucccuuccuuuaggag

SEQ ID NO: 1859513 - RNA, 19 nt, Artificial Sequence
  Description of Artificial Sequence: Synthetic oligonucleotide
uggaggcuaggcuuccuca

SEQ ID NO: 1859514 - RNA, 19 nt, Artificial Sequence
  Description of Artificial Sequence: Synthetic oligonucleotide
auguaacgaguauaagcau

SEQ ID NO: 1859515 - RNA, 19 nt, Artificial Sequence
  Description of Artificial Sequence: Synthetic oligonucleotide
aaagugcgguaguggcaag

SEQ ID NO: 1859516 - RNA, 19 nt, Artificial Sequence
  Description of Artificial Sequence: Synthetic oligonucleotide
guccagggcauucauucug

SEQ ID NO: 1859517 - RNA, 19 nt, Artificial Sequence
  Description of Artificial Sequence: Synthetic oligonucleotide
cauaguggauccgauccac

SEQ ID NO: 1859518 - RNA, 19 nt, Artificial Sequence
  Description of Artificial Sequence: Synthetic oligonucleotide
ucuuuguuucgguccauuu

SEQ ID NO: 1859519 - RNA, 19 nt, Artificial Sequence
  Description of Artificial Sequence: Synthetic oligonucleotide
cugaauaucugcauauuau

SEQ ID NO: 1859520 - RNA, 19 nt, Artificial Sequence
  Description of Artificial Sequence: Synthetic oligonucleotide
uuguuucgguccauuuccu

SEQ ID NO: 1859521 - RNA, 19 nt, Artificial Sequence
  Description of Artificial Sequence: Synthetic oligonucleotide
aaaggggcauuuacguaca

SEQ ID NO: 1859522 - RNA, 19 nt, Artificial Sequence
  Description of Artificial Sequence: Synthetic oligonucleotide
cucgaacccagcauuaaaa

SEQ ID NO: 1859523 - RNA, 19 nt, Artificial Sequence
  Description of Artificial Sequence: Synthetic oligonucleotide
cucacucuggucccucugc

SEQ ID NO: 1859524 - RNA, 19 nt, Artificial Sequence
  Description of Artificial Sequence: Synthetic oligonucleotide
uccgaggucuccacuucug

SEQ ID NO: 1859525 - RNA, 19 nt, Artificial Sequence
  Description of Artificial Sequence: Synthetic oligonucleotide
cauucuggcucuguagaac

SEQ ID NO: 1859526 - RNA, 19 nt, Artificial Sequence
  Description of Artificial Sequence: Synthetic oligonucleotide
uucuggcucuguagaacug

SEQ ID NO: 1859527 - RNA, 19 nt, Artificial Sequence
  Description of Artificial Sequence: Synthetic oligonucleotide
guugcugccuuccagugua

SEQ ID NO: 1859528 - RNA, 19 nt, Artificial Sequence
  Description of Artificial Sequence: Synthetic oligonucleotide
guccggaaggggcaguugc

SEQ ID NO: 1859529 - RNA, 19 nt, Artificial Sequence
  Description of Artificial Sequence: Synthetic oligonucleotide
aagucaccugaggugguug

SEQ ID NO: 1859530 - RNA, 19 nt, Artificial Sequence
  Description of Artificial Sequence: Synthetic oligonucleotide
uuaguuagagguggagaua

SEQ ID NO: 1859531 - RNA, 19 nt, Artificial Sequence
  Description of Artificial Sequence: Synthetic oligonucleotide
gaguauaagcaugggccac

SEQ ID NO: 1859532 - RNA, 19 nt, Artificial Sequence
  Description of Artificial Sequence: Synthetic oligonucleotide
ugguugcuuguuuucucga

SEQ ID NO: 1859533 - RNA, 19 nt, Artificial Sequence
  Description of Artificial Sequence: Synthetic oligonucleotide
acucaucuaccccuuccga

SEQ ID NO: 1859534 - RNA, 19 nt, Artificial Sequence
  Description of Artificial Sequence: Synthetic oligonucleotide
auucugcccuacauagugg

SEQ ID NO: 1859535 - RNA, 19 nt, Artificial Sequence
  Description of Artificial Sequence: Synthetic oligonucleotide
gguuguuuaguuagaggug

SEQ ID NO: 1859536 - RNA, 19 nt, Artificial Sequence
  Description of Artificial Sequence: Synthetic oligonucleotide
gcugagcagcauaaaaggg

SEQ ID NO: 1859537 - RNA, 19 nt, Artificial Sequence
  Description of Artificial Sequence: Synthetic oligonucleotide
auaaagugcgguaguggca

SEQ ID NO: 1859538 - RNA, 19 nt, Artificial Sequence
  Description of Artificial Sequence: Synthetic oligonucleotide
ucccagucuucaccaaaga

SEQ ID NO: 1859539 - RNA, 19 nt, Artificial Sequence
  Description of Artificial Sequence: Synthetic oligonucleotide
agggcugaguaugugaaau

SEQ ID NO: 1859540 - RNA, 19 nt, Artificial Sequence
  Description of Artificial Sequence: Synthetic oligonucleotide
uguuucgguccauuuccuc

SEQ ID NO: 1859541 - RNA, 19 nt, Artificial Sequence
  Description of Artificial Sequence: Synthetic oligonucleotide
cagucuucaccaaagaaau

SEQ ID NO: 1859542 - RNA, 19 nt, Artificial Sequence
  Description of Artificial Sequence: Synthetic oligonucleotide
aagggcugaguaugugaaa

SEQ ID NO: 1859543 - RNA, 19 nt, Artificial Sequence
  Description of Artificial Sequence: Synthetic oligonucleotide
ggugguuguuuaguuagag

SEQ ID NO: 1859544 - RNA, 19 nt, Artificial Sequence
  Description of Artificial Sequence: Synthetic oligonucleotide
cacauauuucugggcagcc

SEQ ID NO: 1859545 - RNA, 19 nt, Artificial Sequence
  Description of Artificial Sequence: Synthetic oligonucleotide
aaggcuggguggucuuugu

SEQ ID NO: 1859546 - RNA, 19 nt, Artificial Sequence
  Description of Artificial Sequence: Synthetic oligonucleotide
cugacagcuagaacgagcu

SEQ ID NO: 1859547 - RNA, 19 nt, Artificial Sequence
  Description of Artificial Sequence: Synthetic oligonucleotide
ucagugcuuccuuccggug

SEQ ID NO: 1859548 - RNA, 19 nt, Artificial Sequence
  Description of Artificial Sequence: Synthetic oligonucleotide
cacucuggucccucugccg

SEQ ID NO: 1859549 - RNA, 19 nt, Artificial Sequence
  Description of Artificial Sequence: Synthetic oligonucleotide
uuccgaggucuccacuucu

SEQ ID NO: 1859550 - RNA, 19 nt, Artificial Sequence
  Description of Artificial Sequence: Synthetic oligonucleotide
aguugcugccuuccagugu

SEQ ID NO: 1859551 - RNA, 19 nt, Artificial Sequence
  Description of Artificial Sequence: Synthetic oligonucleotide
uggcaagcuuaaauagcuc

SEQ ID NO: 1859552 - RNA, 19 nt, Artificial Sequence
  Description of Artificial Sequence: Synthetic oligonucleotide
uucaccugcuccucccagu

SEQ ID NO: 1859553 - RNA, 19 nt, Artificial Sequence
  Description of Artificial Sequence: Synthetic oligonucleotide
caagggcugaguaugugaa

SEQ ID NO: 1859554 - RNA, 19 nt, Artificial Sequence
  Description of Artificial Sequence: Synthetic oligonucleotide
guggauccgauccacauau

SEQ ID NO: 1859555 - RNA, 19 nt, Artificial Sequence
  Description of Artificial Sequence: Synthetic oligonucleotide
ugcuuccuuggucccuucc

SEQ ID NO: 1859556 - RNA, 19 nt, Artificial Sequence
  Description of Artificial Sequence: Synthetic oligonucleotide
gguagguaggaugcaaaug

SEQ ID NO: 1859557 - RNA, 19 nt, Artificial Sequence
  Description of Artificial Sequence: Synthetic oligonucleotide
aggggcauuuacguacauc

SEQ ID NO: 1859558 - RNA, 19 nt, Artificial Sequence
  Description of Artificial Sequence: Synthetic oligonucleotide
ggauggaauaggucacuug

SEQ ID NO: 1859559 - RNA, 19 nt, Artificial Sequence
  Description of Artificial Sequence: Synthetic oligonucleotide
agcacuucaccugcuccuc

SEQ ID NO: 1859560 - RNA, 19 nt, Artificial Sequence
  Description of Artificial Sequence: Synthetic oligonucleotide
agugcuuccuuccggugua

SEQ ID NO: 1859561 - RNA, 19 nt, Artificial Sequence
  Description of Artificial Sequence: Synthetic oligonucleotide
agguaggaugcaaaugaca

SEQ ID NO: 1859562 - RNA, 19 nt, Artificial Sequence
  Description of Artificial Sequence: Synthetic oligonucleotide
ugcuugaauugcugggcau

SEQ ID NO: 1859563 - RNA, 19 nt, Artificial Sequence
  Description of Artificial Sequence: Synthetic oligonucleotide
aguggauccgauccacaua

SEQ ID NO: 1859564 - RNA, 19 nt, Artificial Sequence
  Description of Artificial Sequence: Synthetic oligonucleotide
aaaagucaccugagguggu

SEQ ID NO: 1859565 - RNA, 19 nt, Artificial Sequence
  Description of Artificial Sequence: Synthetic oligonucleotide
gguaugauuuuccuucucu

SEQ ID NO: 1859566 - RNA, 19 nt, Artificial Sequence
  Description of Artificial Sequence: Synthetic oligonucleotide
acauguaguaccaggccaa

SEQ ID NO: 1859567 - RNA, 19 nt, Artificial Sequence
  Description of Artificial Sequence: Synthetic oligonucleotide
aacccguccuccugguuuu

SEQ ID NO: 1859568 - RNA, 19 nt, Artificial Sequence
  Description of Artificial Sequence: Synthetic oligonucleotide
uuucucuugccagcaugga

SEQ ID NO: 1859569 - RNA, 19 nt, Artificial Sequence
  Description of Artificial Sequence: Synthetic oligonucleotide
cugcccuacauaguggauc

SEQ ID NO: 1859570 - RNA, 19 nt, Artificial Sequence
  Description of Artificial Sequence: Synthetic oligonucleotide
uccgucagucucugcguca

SEQ ID NO: 1859571 - RNA, 19 nt, Artificial Sequence
  Description of Artificial Sequence: Synthetic oligonucleotide
aggaugcaaaugacaggac

SEQ ID NO: 1859572 - RNA, 19 nt, Artificial Sequence
  Description of Artificial Sequence: Synthetic oligonucleotide
guaccuuugucuggcugag

SEQ ID NO: 1859573 - RNA, 19 nt, Artificial Sequence
  Description of Artificial Sequence: Synthetic oligonucleotide
cauggggaacccguccucc

SEQ ID NO: 1859574 - RNA, 19 nt, Artificial Sequence
  Description of Artificial Sequence: Synthetic oligonucleotide
ucugccauuuugguaugau

SEQ ID NO: 1859575 - RNA, 19 nt, Artificial Sequence
  Description of Artificial Sequence: Synthetic oligonucleotide
acauauuucugggcagccu

SEQ ID NO: 1859576 - RNA, 19 nt, Artificial Sequence
  Description of Artificial Sequence: Synthetic oligonucleotide
guggcaagcuuaaauagcu

SEQ ID NO: 1859577 - RNA, 19 nt, Artificial Sequence
  Description of Artificial Sequence: Synthetic oligonucleotide
agugcgguaguggcaagcu

SEQ ID NO: 1859578 - RNA, 19 nt, Artificial Sequence
  Description of Artificial Sequence: Synthetic oligonucleotide
aguuagagguggagauagg

SEQ ID NO: 1859579 - RNA, 19 nt, Artificial Sequence
  Description of Artificial Sequence: Synthetic oligonucleotide
ggaggcuaggcuuccucag

SEQ ID NO: 1859580 - RNA, 19 nt, Artificial Sequence
  Description of Artificial Sequence: Synthetic oligonucleotide
gaagacauuguugcugagu

SEQ ID NO: 1859581 - RNA, 19 nt, Artificial Sequence
  Description of Artificial Sequence: Synthetic oligonucleotide
gcucaaacagguagaacug

SEQ ID NO: 1859582 - RNA, 19 nt, Artificial Sequence
  Description of Artificial Sequence: Synthetic oligonucleotide
uggggaguuucagugcccu

SEQ ID NO: 1859583 - RNA, 19 nt, Artificial Sequence
  Description of Artificial Sequence: Synthetic oligonucleotide
gaggucugccauuuuggua

SEQ ID NO: 1859584 - RNA, 19 nt, Artificial Sequence
  Description of Artificial Sequence: Synthetic oligonucleotide
uugaauugcugggcauugu

SEQ ID NO: 1859585 - RNA, 19 nt, Artificial Sequence
  Description of Artificial Sequence: Synthetic oligonucleotide
gguaguggcaagcuuaaau

SEQ ID NO: 1859586 - RNA, 19 nt, Artificial Sequence
  Description of Artificial Sequence: Synthetic oligonucleotide
aauucauguccagggcauu

SEQ ID NO: 1859587 - RNA, 19 nt, Artificial Sequence
  Description of Artificial Sequence: Synthetic oligonucleotide
ggcaguugcugccuuccag

SEQ ID NO: 1859588 - RNA, 19 nt, Artificial Sequence
  Description of Artificial Sequence: Synthetic oligonucleotide
cuggcugagcagcauaaaa

SEQ ID NO: 1859589 - RNA, 19 nt, Artificial Sequence
  Description of Artificial Sequence: Synthetic oligonucleotide
aucuaccccuuccgagguc

SEQ ID NO: 1859590 - RNA, 19 nt, Artificial Sequence
  Description of Artificial Sequence: Synthetic oligonucleotide
guauuuucugcccggucgu

SEQ ID NO: 1859591 - RNA, 19 nt, Artificial Sequence
  Description of Artificial Sequence: Synthetic oligonucleotide
cuuccgaggucuccacuuc

SEQ ID NO: 1859592 - RNA, 19 nt, Artificial Sequence
  Description of Artificial Sequence: Synthetic oligonucleotide
uucucgaacccagcauuaa

SEQ ID NO: 1859593 - RNA, 19 nt, Artificial Sequence
  Description of Artificial Sequence: Synthetic oligonucleotide
aguguaccuuugucuggcu

SEQ ID NO: 1859594 - RNA, 19 nt, Artificial Sequence
  Description of Artificial Sequence: Synthetic oligonucleotide
gucgugugcuuccuugguc

SEQ ID NO: 1859595 - RNA, 19 nt, Artificial Sequence
  Description of Artificial Sequence: Synthetic oligonucleotide
uuggcagguccgucagucu

SEQ ID NO: 1859596 - RNA, 19 nt, Artificial Sequence
  Description of Artificial Sequence: Synthetic oligonucleotide
guaguaccaggccaagagu

SEQ ID NO: 1859597 - RNA, 19 nt, Artificial Sequence
  Description of Artificial Sequence: Synthetic oligonucleotide
cugcuugaauugcugggca

SEQ ID NO: 1859598 - RNA, 19 nt, Artificial Sequence
  Description of Artificial Sequence: Synthetic oligonucleotide
gguccuucacauguaguac

SEQ ID NO: 1859599 - RNA, 19 nt, Artificial Sequence
  Description of Artificial Sequence: Synthetic oligonucleotide
cauguccuugaucagugcu

SEQ ID NO: 1859600 - RNA, 19 nt, Artificial Sequence
  Description of Artificial Sequence: Synthetic oligonucleotide
caaacagguagaacugggu

SEQ ID NO: 1859601 - RNA, 19 nt, Artificial Sequence
  Description of Artificial Sequence: Synthetic oligonucleotide
cauucauucuggcucugua

SEQ ID NO: 1859602 - RNA, 19 nt, Artificial Sequence
  Description of Artificial Sequence: Synthetic oligonucleotide
uuucuagugucuggcuuuu

SEQ ID NO: 1859603 - RNA, 19 nt, Artificial Sequence
  Description of Artificial Sequence: Synthetic oligonucleotide
ucaccugaggugguuguuu

SEQ ID NO: 1859604 - RNA, 19 nt, Artificial Sequence
  Description of Artificial Sequence: Synthetic oligonucleotide
ggaauaggucacuuggggu

SEQ ID NO: 1859605 - RNA, 19 nt, Artificial Sequence
  Description of Artificial Sequence: Synthetic oligonucleotide
gguggucuuuguuucgguc

SEQ ID NO: 1859606 - RNA, 19 nt, Artificial Sequence
  Description of Artificial Sequence: Synthetic oligonucleotide
auggggaacccguccuccu

SEQ ID NO: 1859607 - RNA, 19 nt, Artificial Sequence
  Description of Artificial Sequence: Synthetic oligonucleotide
caugcucaaacagguagaa

SEQ ID NO: 1859608 - RNA, 19 nt, Artificial Sequence
  Description of Artificial Sequence: Synthetic oligonucleotide
gaacccguccuccugguuu

SEQ ID NO: 1859609 - RNA, 19 nt, Artificial Sequence
  Description of Artificial Sequence: Synthetic oligonucleotide
aaggggcauuuacguacau

SEQ ID NO: 1859610 - RNA, 19 nt, Artificial Sequence
  Description of Artificial Sequence: Synthetic oligonucleotide
ugccuuccaguguaccuuu

SEQ ID NO: 1859611 - RNA, 19 nt, Artificial Sequence
  Description of Artificial Sequence: Synthetic oligonucleotide
guucacugaauaucugcau

SEQ ID NO: 1859612 - RNA, 19 nt, Artificial Sequence
  Description of Artificial Sequence: Synthetic oligonucleotide
ggcugaguaugugaaauaa

SEQ ID NO: 1859613 - RNA, 19 nt, Artificial Sequence
  Description of Artificial Sequence: Synthetic oligonucleotide
auguaguaccaggccaaga

SEQ ID NO: 1859614 - RNA, 19 nt, Artificial Sequence
  Description of Artificial Sequence: Synthetic oligonucleotide
auaguggauccgauccaca

SEQ ID NO: 1859615 - RNA, 19 nt, Artificial Sequence
  Description of Artificial Sequence: Synthetic oligonucleotide
guccuugaucagugcuucc

SEQ ID NO: 1859616 - RNA, 19 nt, Artificial Sequence
  Description of Artificial Sequence: Synthetic oligonucleotide
guaccaggccaagagucca

SEQ ID NO: 1859617 - RNA, 19 nt, Artificial Sequence
  Description of Artificial Sequence: Synthetic oligonucleotide
uagcucuugcugcccucac

SEQ ID NO: 1859618 - RNA, 19 nt, Artificial Sequence
  Description of Artificial Sequence: Synthetic oligonucleotide
caucgugcauggggaaccc

SEQ ID NO: 1859619 - RNA, 19 nt, Artificial Sequence
  Description of Artificial Sequence: Synthetic oligonucleotide
uugggguagguaggaugca

SEQ ID NO: 1859620 - RNA, 19 nt, Artificial Sequence
  Description of Artificial Sequence: Synthetic oligonucleotide
aucgugcauggggaacccg

SEQ ID NO: 1859621 - RNA, 19 nt, Artificial Sequence
  Description of Artificial Sequence: Synthetic oligonucleotide
ugcuuccuuccgguguagc

SEQ ID NO: 1859622 - RNA, 19 nt, Artificial Sequence
  Description of Artificial Sequence: Synthetic oligonucleotide
uguccggaaggggcaguug

SEQ ID NO: 1859623 - RNA, 19 nt, Artificial Sequence
  Description of Artificial Sequence: Synthetic oligonucleotide
gucucugcgucagggacuc

SEQ ID NO: 1859624 - RNA, 19 nt, Artificial Sequence
  Description of Artificial Sequence: Synthetic oligonucleotide
ccacauauuucugggcagc

SEQ ID NO: 1859625 - RNA, 19 nt, Artificial Sequence
  Description of Artificial Sequence: Synthetic oligonucleotide
uggcucuguagaacugcuu

SEQ ID NO: 1859626 - RNA, 19 nt, Artificial Sequence
  Description of Artificial Sequence: Synthetic oligonucleotide
guggagauagggauggaau

SEQ ID NO: 1859627 - RNA, 19 nt, Artificial Sequence
  Description of Artificial Sequence: Synthetic oligonucleotide
ucccaucgugcauggggaa

SEQ ID NO: 1859628 - RNA, 19 nt, Artificial Sequence
  Description of Artificial Sequence: Synthetic oligonucleotide
cugccgcuuggcagguccg

SEQ ID NO: 1859629 - RNA, 19 nt, Artificial Sequence
  Description of Artificial Sequence: Synthetic oligonucleotide
ccaucgugcauggggaacc

SEQ ID NO: 1859630 - RNA, 19 nt, Artificial Sequence
  Description of Artificial Sequence: Synthetic oligonucleotide
gguugcuuguuuucucgaa

SEQ ID NO: 1859631 - RNA, 19 nt, Artificial Sequence
  Description of Artificial Sequence: Synthetic oligonucleotide
uaccccuuccgaggucucc

SEQ ID NO: 1859632 - RNA, 19 nt, Artificial Sequence
  Description of Artificial Sequence: Synthetic oligonucleotide
guccgucagucucugcguc

SEQ ID NO: 1859633 - RNA, 19 nt, Artificial Sequence
  Description of Artificial Sequence: Synthetic oligonucleotide
cuuccccggugcuggggag

SEQ ID NO: 1859634 - RNA, 19 nt, Artificial Sequence
  Description of Artificial Sequence: Synthetic oligonucleotide
aggagcucagagaggucug

SEQ ID NO: 1859635 - RNA, 19 nt, Artificial Sequence
  Description of Artificial Sequence: Synthetic oligonucleotide
gggcauuuacguacauccc

SEQ ID NO: 1859636 - RNA, 19 nt, Artificial Sequence
  Description of Artificial Sequence: Synthetic oligonucleotide
uugcugccuuccaguguac

SEQ ID NO: 1859637 - RNA, 19 nt, Artificial Sequence
  Description of Artificial Sequence: Synthetic oligonucleotide
uaccuuugucuggcugagc

SEQ ID NO: 1859638 - RNA, 19 nt, Artificial Sequence
  Description of Artificial Sequence: Synthetic oligonucleotide
caccaaagaaauacuccau

SEQ ID NO: 1859639 - RNA, 19 nt, Artificial Sequence
  Description of Artificial Sequence: Synthetic oligonucleotide
gguguagcuccaugggaaa

SEQ ID NO: 1859640 - RNA, 19 nt, Artificial Sequence
  Description of Artificial Sequence: Synthetic oligonucleotide
gaguagcucuugcugcccu

SEQ ID NO: 1859641 - RNA, 19 nt, Artificial Sequence
  Description of Artificial Sequence: Synthetic oligonucleotide
guagcuccaugggaaaaua

SEQ ID NO: 1859642 - RNA, 19 nt, Artificial Sequence
  Description of Artificial Sequence: Synthetic oligonucleotide
accuggccuccugaaaggu

SEQ ID NO: 1859643 - RNA, 19 nt, Artificial Sequence
  Description of Artificial Sequence: Synthetic oligonucleotide
cgaguauaagcaugggcca

SEQ ID NO: 1859644 - RNA, 19 nt, Artificial Sequence
  Description of Artificial Sequence: Synthetic oligonucleotide
aggugguuguuuaguuaga

SEQ ID NO: 1859645 - RNA, 19 nt, Artificial Sequence
  Description of Artificial Sequence: Synthetic oligonucleotide
ggauccgauccacauauuu

SEQ ID NO: 1859646 - RNA, 19 nt, Artificial Sequence
  Description of Artificial Sequence: Synthetic oligonucleotide
uggauccgauccacauauu

SEQ ID NO: 1859647 - RNA, 19 nt, Artificial Sequence
  Description of Artificial Sequence: Synthetic oligonucleotide
gcaguugcugccuuccagu

SEQ ID NO: 1859648 - RNA, 19 nt, Artificial Sequence
  Description of Artificial Sequence: Synthetic oligonucleotide
ggggcaguugcugccuucc

SEQ ID NO: 1859649 - RNA, 19 nt, Artificial Sequence
  Description of Artificial Sequence: Synthetic oligonucleotide
gacagguccuucacaugua

SEQ ID NO: 1859650 - RNA, 19 nt, Artificial Sequence
  Description of Artificial Sequence: Synthetic oligonucleotide
ccggucgugugcuuccuug

SEQ ID NO: 1859651 - RNA, 19 nt, Artificial Sequence
  Description of Artificial Sequence: Synthetic oligonucleotide
cagcuagaacgagcuggag

SEQ ID NO: 1859652 - RNA, 19 nt, Artificial Sequence
  Description of Artificial Sequence: Synthetic oligonucleotide
cagggcauucauucuggcu

SEQ ID NO: 1859653 - RNA, 19 nt, Artificial Sequence
  Description of Artificial Sequence: Synthetic oligonucleotide
gcaagcuuaaauagcuccu

SEQ ID NO: 1859654 - RNA, 19 nt, Artificial Sequence
  Description of Artificial Sequence: Synthetic oligonucleotide
cugguucauucugcccuac

SEQ ID NO: 1859655 - RNA, 19 nt, Artificial Sequence
  Description of Artificial Sequence: Synthetic oligonucleotide
caucuaccccuuccgaggu

SEQ ID NO: 1859656 - RNA, 19 nt, Artificial Sequence
  Description of Artificial Sequence: Synthetic oligonucleotide
uggggccacagaguucuuu

SEQ ID NO: 1859657 - RNA, 19 nt, Artificial Sequence
  Description of Artificial Sequence: Synthetic oligonucleotide
ccagggcauucauucuggc

SEQ ID NO: 1859658 - RNA, 19 nt, Artificial Sequence
  Description of Artificial Sequence: Synthetic oligonucleotide
cccauguaacgaguauaag

SEQ ID NO: 1859659 - RNA, 19 nt, Artificial Sequence
  Description of Artificial Sequence: Synthetic oligonucleotide
cagggccacacugacagcu

SEQ ID NO: 1859660 - RNA, 19 nt, Artificial Sequence
  Description of Artificial Sequence: Synthetic oligonucleotide
cuaccccuuccgaggucuc

SEQ ID NO: 1859661 - RNA, 19 nt, Artificial Sequence
  Description of Artificial Sequence: Synthetic oligonucleotide
caagcuuaaauagcuccuu

SEQ ID NO: 1859662 - RNA, 19 nt, Artificial Sequence
  Description of Artificial Sequence: Synthetic oligonucleotide
ugccgcuuggcagguccgu

SEQ ID NO: 1859663 - RNA, 19 nt, Artificial Sequence
  Description of Artificial Sequence: Synthetic oligonucleotide
cccuucccaucgugcaugg

SEQ ID NO: 1859664 - RNA, 19 nt, Artificial Sequence
  Description of Artificial Sequence: Synthetic oligonucleotide
ccuucacauguaguaccag

SEQ ID NO: 1859665 - RNA, 19 nt, Artificial Sequence
  Description of Artificial Sequence: Synthetic oligonucleotide
ccacacugacagcuagaac

SEQ ID NO: 1859666 - RNA, 19 nt, Artificial Sequence
  Description of Artificial Sequence: Synthetic oligonucleotide
cagguccgucagucucugc

SEQ ID NO: 1859667 - RNA, 19 nt, Artificial Sequence
  Description of Artificial Sequence: Synthetic oligonucleotide
cggucgugugcuuccuugg

SEQ ID NO: 1859668 - RNA, 19 nt, Artificial Sequence
  Description of Artificial Sequence: Synthetic oligonucleotide
cugccauuuugguaugauu

SEQ ID NO: 1859669 - RNA, 19 nt, Artificial Sequence
  Description of Artificial Sequence: Synthetic oligonucleotide
gggcugaguaugugaaaua

SEQ ID NO: 1859670 - RNA, 19 nt, Artificial Sequence
  Description of Artificial Sequence: Synthetic oligonucleotide
cgugugcuuccuugguccc

SEQ ID NO: 1859671 - RNA, 19 nt, Artificial Sequence
  Description of Artificial Sequence: Synthetic oligonucleotide
ccgucagucucugcgucag

SEQ ID NO: 1859672 - RNA, 19 nt, Artificial Sequence
  Description of Artificial Sequence: Synthetic oligonucleotide
gcauggggaacccguccuc

SEQ ID NO: 1859673 - RNA, 19 nt, Artificial Sequence
  Description of Artificial Sequence: Synthetic oligonucleotide
ggcuggguggucuuuguuu

SEQ ID NO: 1859674 - RNA, 19 nt, Artificial Sequence
  Description of Artificial Sequence: Synthetic oligonucleotide
gggguagguaggaugcaaa

SEQ ID NO: 1859675 - RNA, 19 nt, Artificial Sequence
  Description of Artificial Sequence: Synthetic oligonucleotide
cccuacauaguggauccga

SEQ ID NO: 1859676 - RNA, 19 nt, Artificial Sequence
  Description of Artificial Sequence: Synthetic oligonucleotide
cgguguagcuccaugggaa

SEQ ID NO: 1859677 - RNA, 19 nt, Artificial Sequence
  Description of Artificial Sequence: Synthetic oligonucleotide
gguccgucagucucugcgu

SEQ ID NO: 1859678 - RNA, 19 nt, Artificial Sequence
  Description of Artificial Sequence: Synthetic oligonucleotide
aggucacuugggguaggua

SEQ ID NO: 1859679 - RNA, 19 nt, Artificial Sequence
  Description of Artificial Sequence: Synthetic oligonucleotide
ucugcccggucgugugcuu

SEQ ID NO: 1859680 - RNA, 19 nt, Artificial Sequence
  Description of Artificial Sequence: Synthetic oligonucleotide
cugcccggucgugugcuuc

SEQ ID NO: 1859681 - RNA, 19 nt, Artificial Sequence
  Description of Artificial Sequence: Synthetic oligonucleotide
cucagagaggucugccauu

SEQ ID NO: 1859682 - RNA, 19 nt, Artificial Sequence
  Description of Artificial Sequence: Synthetic oligonucleotide
ccgguguagcuccauggga

SEQ ID NO: 1859683 - RNA, 19 nt, Artificial Sequence
  Description of Artificial Sequence: Synthetic oligonucleotide
ccccuucccaucgugcaug

SEQ ID NO: 1859684 - RNA, 19 nt, Artificial Sequence
  Description of Artificial Sequence: Synthetic oligonucleotide
agguggagauagggaugga

SEQ ID NO: 1859685 - RNA, 19 nt, Artificial Sequence
  Description of Artificial Sequence: Synthetic oligonucleotide
uccccggugcuggggaguu

SEQ ID NO: 1859686 - RNA, 19 nt, Artificial Sequence
  Description of Artificial Sequence: Synthetic oligonucleotide
cccaucgugcauggggaac

SEQ ID NO: 1859687 - RNA, 19 nt, Artificial Sequence
  Description of Artificial Sequence: Synthetic oligonucleotide
ggucgugugcuuccuuggu

SEQ ID NO: 1859688 - RNA, 19 nt, Artificial Sequence
  Description of Artificial Sequence: Synthetic oligonucleotide
gcagguccgucagucucug

SEQ ID NO: 1859689 - RNA, 19 nt, Artificial Sequence
  Description of Artificial Sequence: Synthetic oligonucleotide
cauuguccacaugcucaaa

SEQ ID NO: 1859690 - RNA, 19 nt, Artificial Sequence
  Description of Artificial Sequence: Synthetic oligonucleotide
cgugcauggggaacccguc

SEQ ID NO: 1859691 - RNA, 19 nt, Artificial Sequence
  Description of Artificial Sequence: Synthetic oligonucleotide
gcccuacauaguggauccg

SEQ ID NO: 1859692 - RNA, 19 nt, Artificial Sequence
  Description of Artificial Sequence: Synthetic oligonucleotide
gugcuuccuuggucccuuc

SEQ ID NO: 1859693 - RNA, 19 nt, Artificial Sequence
  Description of Artificial Sequence: Synthetic oligonucleotide
ccuacauaguggauccgau

SEQ ID NO: 1859694 - RNA, 19 nt, Artificial Sequence
  Description of Artificial Sequence: Synthetic oligonucleotide
gcgguaguggcaagcuuaa

SEQ ID NO: 1859695 - RNA, 19 nt, Artificial Sequence
  Description of Artificial Sequence: Synthetic oligonucleotide
gucuuuguuucgguccauu

SEQ ID NO: 1859696 - RNA, 19 nt, Artificial Sequence
  Description of Artificial Sequence: Synthetic oligonucleotide
gcuugaauugcugggcauu

SEQ ID NO: 1859697 - RNA, 19 nt, Artificial Sequence
  Description of Artificial Sequence: Synthetic oligonucleotide
cccggugcuggggaguuuc

SEQ ID NO: 1859698 - RNA, 19 nt, Artificial Sequence
  Description of Artificial Sequence: Synthetic oligonucleotide
ccuuccccggugcugggga

SEQ ID NO: 1859699 - RNA, 19 nt, Artificial Sequence
  Description of Artificial Sequence: Synthetic oligonucleotide
gggcaguugcugccuucca

SEQ ID NO: 1859700 - RNA, 19 nt, Artificial Sequence
  Description of Artificial Sequence: Synthetic oligonucleotide
ccugaggugguuguuuagu

SEQ ID NO: 1859701 - RNA, 19 nt, Artificial Sequence
  Description of Artificial Sequence: Synthetic oligonucleotide
ccgcuuggcagguccguca

SEQ ID NO: 1859702 - RNA, 19 nt, Artificial Sequence
  Description of Artificial Sequence: Synthetic oligonucleotide
ccucagcauagccauggcu

SEQ ID NO: 1859703 - RNA, 19 nt, Artificial Sequence
  Description of Artificial Sequence: Synthetic oligonucleotide
ggguggucuuuguuucggu

SEQ ID NO: 1859704 - RNA, 19 nt, Artificial Sequence
  Description of Artificial Sequence: Synthetic oligonucleotide
gugugcuuccuuggucccu

SEQ ID NO: 1859705 - RNA, 19 nt, Artificial Sequence
  Description of Artificial Sequence: Synthetic oligonucleotide
ggcagguccgucagucucu

SEQ ID NO: 1859706 - RNA, 19 nt, Artificial Sequence
  Description of Artificial Sequence: Synthetic oligonucleotide
ccccuuccgaggucuccac

SEQ ID NO: 1859707 - RNA, 19 nt, Artificial Sequence
  Description of Artificial Sequence: Synthetic oligonucleotide
ccuuccaguguaccuuugu

SEQ ID NO: 1859708 - RNA, 19 nt, Artificial Sequence
  Description of Artificial Sequence: Synthetic oligonucleotide
gugcgguaguggcaagcuu

SEQ ID NO: 1859709 - RNA, 19 nt, Artificial Sequence
  Description of Artificial Sequence: Synthetic oligonucleotide
ccuuccgaggucuccacuu

SEQ ID NO: 1859710 - RNA, 19 nt, Artificial Sequence
  Description of Artificial Sequence: Synthetic oligonucleotide
gggauggaauaggucacuu

SEQ ID NO: 1859711 - RNA, 19 nt, Artificial Sequence
  Description of Artificial Sequence: Synthetic oligonucleotide
cccuuccccggugcugggg

SEQ ID NO: 1859712 - RNA, 19 nt, Artificial Sequence
  Description of Artificial Sequence: Synthetic oligonucleotide
ccucaagggcugaguaugu

SEQ ID NO: 1859713 - RNA, 19 nt, Artificial Sequence
  Description of Artificial Sequence: Synthetic oligonucleotide
gggaacccguccuccuggu

SEQ ID NO: 1859714 - RNA, 19 nt, Artificial Sequence
  Description of Artificial Sequence: Synthetic oligonucleotide
gccgcuuggcagguccguc

SEQ ID NO: 1859715 - RNA, 19 nt, Artificial Sequence
  Description of Artificial Sequence: Synthetic oligonucleotide
cccuuccuuuaggagcuca

SEQ ID NO: 1859716 - RNA, 19 nt, Artificial Sequence
  Description of Artificial Sequence: Synthetic oligonucleotide
gggcaaaggcugggugguc

SEQ ID NO: 1859717 - RNA, 19 nt, Artificial Sequence
  Description of Artificial Sequence: Synthetic oligonucleotide
caaaggcuggguggucuuu

SEQ ID NO: 1859718 - RNA, 19 nt, Artificial Sequence
  Description of Artificial Sequence: Synthetic oligonucleotide
cuguccggaaggggcaguu

SEQ ID NO: 1859719 - RNA, 19 nt, Artificial Sequence
  Description of Artificial Sequence: Synthetic oligonucleotide
cagagaggucugccauuuu

SEQ ID NO: 1859720 - RNA, 19 nt, Artificial Sequence
  Description of Artificial Sequence: Synthetic oligonucleotide
ccggugcuggggaguuuca

SEQ ID NO: 1859721 - RNA, 19 nt, Artificial Sequence
  Description of Artificial Sequence: Synthetic oligonucleotide
ggaacccguccuccugguu

SEQ ID NO: 1859722 - RNA, 19 nt, Artificial Sequence
  Description of Artificial Sequence: Synthetic oligonucleotide
cccuuccgaggucuccacu

SEQ ID NO: 1859723 - RNA, 19 nt, Artificial Sequence
  Description of Artificial Sequence: Synthetic oligonucleotide
cgguaguggcaagcuuaaa

SEQ ID NO: 1859724 - RNA, 19 nt, Artificial Sequence
  Description of Artificial Sequence: Synthetic oligonucleotide
gcccggucgugugcuuccu

SEQ ID NO: 1859725 - RNA, 19 nt, Artificial Sequence
  Description of Artificial Sequence: Synthetic oligonucleotide
cccggucgugugcuuccuu

SEQ ID NO: 1859726 - RNA, 19 nt, Artificial Sequence
  Description of Artificial Sequence: Synthetic oligonucleotide
ccccggugcuggggaguuu

SEQ ID NO: 1859727 - RNA, 19 nt, Artificial Sequence
  Description of Artificial Sequence: Synthetic oligonucleotide
aaucccaaugcucagaagc

SEQ ID NO: 1859728 - RNA, 19 nt, Artificial Sequence
  Description of Artificial Sequence: Synthetic oligonucleotide
uguuuuaccaauuuggagc

SEQ ID NO: 1859729 - RNA, 19 nt, Artificial Sequence
  Description of Artificial Sequence: Synthetic oligonucleotide
uuuuauagcuauauaacag

SEQ ID NO: 1859730 - RNA, 19 nt, Artificial Sequence
  Description of Artificial Sequence: Synthetic oligonucleotide
gaauguauaaaauugucug

SEQ ID NO: 1859731 - RNA, 19 nt, Artificial Sequence
  Description of Artificial Sequence: Synthetic oligonucleotide
uuaauuacaacuguuaaca

SEQ ID NO: 1859732 - RNA, 19 nt, Artificial Sequence
  Description of Artificial Sequence: Synthetic oligonucleotide
ucuugagugaucaaggaag

SEQ ID NO: 1859733 - RNA, 19 nt, Artificial Sequence
  Description of Artificial Sequence: Synthetic oligonucleotide
uauauaacagcucuaauau

SEQ ID NO: 1859734 - RNA, 19 nt, Artificial Sequence
  Description of Artificial Sequence: Synthetic oligonucleotide
ugauuuaauuuacagaucu

SEQ ID NO: 1859735 - RNA, 19 nt, Artificial Sequence
  Description of Artificial Sequence: Synthetic oligonucleotide
ucuuaugugcauaugcugg

SEQ ID NO: 1859736 - RNA, 19 nt, Artificial Sequence
  Description of Artificial Sequence: Synthetic oligonucleotide
auagaugaaauugucaucg

SEQ ID NO: 1859737 - RNA, 19 nt, Artificial Sequence
  Description of Artificial Sequence: Synthetic oligonucleotide
ugaguuuuaacucauccca

SEQ ID NO: 1859738 - RNA, 19 nt, Artificial Sequence
  Description of Artificial Sequence: Synthetic oligonucleotide
gaugccuucagcuuuaagc

SEQ ID NO: 1859739 - RNA, 19 nt, Artificial Sequence
  Description of Artificial Sequence: Synthetic oligonucleotide
agcucuaauauuuugugac

SEQ ID NO: 1859740 - RNA, 19 nt, Artificial Sequence
  Description of Artificial Sequence: Synthetic oligonucleotide
aaagaaaccugcauuuucc

SEQ ID NO: 1859741 - RNA, 19 nt, Artificial Sequence
  Description of Artificial Sequence: Synthetic oligonucleotide
ucuucucucuuaaagaugc

SEQ ID NO: 1859742 - RNA, 19 nt, Artificial Sequence
  Description of Artificial Sequence: Synthetic oligonucleotide
uuuacagaucucaaggaag

SEQ ID NO: 1859743 - RNA, 19 nt, Artificial Sequence
  Description of Artificial Sequence: Synthetic oligonucleotide
uguauugugacacuauaga

SEQ ID NO: 1859744 - RNA, 19 nt, Artificial Sequence
  Description of Artificial Sequence: Synthetic oligonucleotide
uuuaccagcuaacaaaugu

SEQ ID NO: 1859745 - RNA, 19 nt, Artificial Sequence
  Description of Artificial Sequence: Synthetic oligonucleotide
uauaaaauugucuggccgc

SEQ ID NO: 1859746 - RNA, 19 nt, Artificial Sequence
  Description of Artificial Sequence: Synthetic oligonucleotide
guuauuguuacccacacca

SEQ ID NO: 1859747 - RNA, 19 nt, Artificial Sequence
  Description of Artificial Sequence: Synthetic oligonucleotide
auagcuauauaacagcucu

SEQ ID NO: 1859748 - RNA, 19 nt, Artificial Sequence
  Description of Artificial Sequence: Synthetic oligonucleotide
cuugacacaauauuuuacc

SEQ ID NO: 1859749 - RNA, 19 nt, Artificial Sequence
  Description of Artificial Sequence: Synthetic oligonucleotide
uauaacagcucuaauauuu

SEQ ID NO: 1859750 - RNA, 19 nt, Artificial Sequence
  Description of Artificial Sequence: Synthetic oligonucleotide
ucuauguccugcaagagac

SEQ ID NO: 1859751 - RNA, 19 nt, Artificial Sequence
  Description of Artificial Sequence: Synthetic oligonucleotide
auguauaaaauugucuggc

SEQ ID NO: 1859752 - RNA, 19 nt, Artificial Sequence
  Description of Artificial Sequence: Synthetic oligonucleotide
uuuggagcugcaaagaaac

SEQ ID NO: 1859753 - RNA, 19 nt, Artificial Sequence
  Description of Artificial Sequence: Synthetic oligonucleotide
uguacacucaaauauuuga

SEQ ID NO: 1859754 - RNA, 19 nt, Artificial Sequence
  Description of Artificial Sequence: Synthetic oligonucleotide
guauaaaauugucuggccg

SEQ ID NO: 1859755 - RNA, 19 nt, Artificial Sequence
  Description of Artificial Sequence: Synthetic oligonucleotide
uuauuccuuaauuacaacu

SEQ ID NO: 1859756 - RNA, 19 nt, Artificial Sequence
  Description of Artificial Sequence: Synthetic oligonucleotide
uacacucaaauauuugagg

SEQ ID NO: 1859757 - RNA, 19 nt, Artificial Sequence
  Description of Artificial Sequence: Synthetic oligonucleotide
uguuuauuccuuaauuaca

SEQ ID NO: 1859758 - RNA, 19 nt, Artificial Sequence
  Description of Artificial Sequence: Synthetic oligonucleotide
caucuuuaaucaaagcugg

SEQ ID NO: 1859759 - RNA, 19 nt, Artificial Sequence
  Description of Artificial Sequence: Synthetic oligonucleotide
aaauaaguuucacauugcu

SEQ ID NO: 1859760 - RNA, 19 nt, Artificial Sequence
  Description of Artificial Sequence: Synthetic oligonucleotide
uaauguaucaaccacuguu

SEQ ID NO: 1859761 - RNA, 19 nt, Artificial Sequence
  Description of Artificial Sequence: Synthetic oligonucleotide
uucaugacagucuugagaa

SEQ ID NO: 1859762 - RNA, 19 nt, Artificial Sequence
  Description of Artificial Sequence: Synthetic oligonucleotide
aauuuacagaucucaagga

SEQ ID NO: 1859763 - RNA, 19 nt, Artificial Sequence
  Description of Artificial Sequence: Synthetic oligonucleotide
aggacaguaauguaucaac

SEQ ID NO: 1859764 - RNA, 19 nt, Artificial Sequence
  Description of Artificial Sequence: Synthetic oligonucleotide
aaaauaaguuucacauugc

SEQ ID NO: 1859765 - RNA, 19 nt, Artificial Sequence
  Description of Artificial Sequence: Synthetic oligonucleotide
ucuuaaagacaacucaaga

SEQ ID NO: 1859766 - RNA, 19 nt, Artificial Sequence
  Description of Artificial Sequence: Synthetic oligonucleotide
uuugaagcagucucagugg

SEQ ID NO: 1859767 - RNA, 19 nt, Artificial Sequence
  Description of Artificial Sequence: Synthetic oligonucleotide
auuacaacuguuaacacug

SEQ ID NO: 1859768 - RNA, 19 nt, Artificial Sequence
  Description of Artificial Sequence: Synthetic oligonucleotide
uauagugagggcuugugug

SEQ ID NO: 1859769 - RNA, 19 nt, Artificial Sequence
  Description of Artificial Sequence: Synthetic oligonucleotide
aagugugcuaaucugccag

SEQ ID NO: 1859770 - RNA, 19 nt, Artificial Sequence
  Description of Artificial Sequence: Synthetic oligonucleotide
ugagaauguauaaaauugu

SEQ ID NO: 1859771 - RNA, 19 nt, Artificial Sequence
  Description of Artificial Sequence: Synthetic oligonucleotide
uauggcuuaagccuugucu

SEQ ID NO: 1859772 - RNA, 19 nt, Artificial Sequence
  Description of Artificial Sequence: Synthetic oligonucleotide
aucaauuuguuuucaugac

SEQ ID NO: 1859773 - RNA, 19 nt, Artificial Sequence
  Description of Artificial Sequence: Synthetic oligonucleotide
uuauagcuauauaacagcu

SEQ ID NO: 1859774 - RNA, 19 nt, Artificial Sequence
  Description of Artificial Sequence: Synthetic oligonucleotide
uuuuguuauagugagggcu

SEQ ID NO: 1859775 - RNA, 19 nt, Artificial Sequence
  Description of Artificial Sequence: Synthetic oligonucleotide
uuguauugugacacuauag

SEQ ID NO: 1859776 - RNA, 19 nt, Artificial Sequence
  Description of Artificial Sequence: Synthetic oligonucleotide
guaaggacuucucugaagc

SEQ ID NO: 1859777 - RNA, 19 nt, Artificial Sequence
  Description of Artificial Sequence: Synthetic oligonucleotide
uauuugaggacaguaaugu

SEQ ID NO: 1859778 - RNA, 19 nt, Artificial Sequence
  Description of Artificial Sequence: Synthetic oligonucleotide
ucuguuuuaccaauuugga

SEQ ID NO: 1859779 - RNA, 19 nt, Artificial Sequence
  Description of Artificial Sequence: Synthetic oligonucleotide
uuuugugacauuuuguauu

SEQ ID NO: 1859780 - RNA, 19 nt, Artificial Sequence
  Description of Artificial Sequence: Synthetic oligonucleotide
uucauuuucugaaguaaca

SEQ ID NO: 1859781 - RNA, 19 nt, Artificial Sequence
  Description of Artificial Sequence: Synthetic oligonucleotide
ugaaauugucaucggacug

SEQ ID NO: 1859782 - RNA, 19 nt, Artificial Sequence
  Description of Artificial Sequence: Synthetic oligonucleotide
auggcagugaacaagggac

SEQ ID NO: 1859783 - RNA, 19 nt, Artificial Sequence
  Description of Artificial Sequence: Synthetic oligonucleotide
uccugcaagagacugaggu

SEQ ID NO: 1859784 - RNA, 19 nt, Artificial Sequence
  Description of Artificial Sequence: Synthetic oligonucleotide
uguauaaaauugucuggcc

SEQ ID NO: 1859785 - RNA, 19 nt, Artificial Sequence
  Description of Artificial Sequence: Synthetic oligonucleotide
aucucaaggaaguguacac

SEQ ID NO: 1859786 - RNA, 19 nt, Artificial Sequence
  Description of Artificial Sequence: Synthetic oligonucleotide
guucuuacuuacuugacac

SEQ ID NO: 1859787 - RNA, 19 nt, Artificial Sequence
  Description of Artificial Sequence: Synthetic oligonucleotide
uguucuuacuuacuugaca

SEQ ID NO: 1859788 - RNA, 19 nt, Artificial Sequence
  Description of Artificial Sequence: Synthetic oligonucleotide
uuuaacucaucccauuguc

SEQ ID NO: 1859789 - RNA, 19 nt, Artificial Sequence
  Description of Artificial Sequence: Synthetic oligonucleotide
gaugaaauugucaucggac

SEQ ID NO: 1859790 - RNA, 19 nt, Artificial Sequence
  Description of Artificial Sequence: Synthetic oligonucleotide
uuacagaucucaaggaagu

SEQ ID NO: 1859791 - RNA, 19 nt, Artificial Sequence
  Description of Artificial Sequence: Synthetic oligonucleotide
ucacuuugacuaaagaaaa

SEQ ID NO: 1859792 - RNA, 19 nt, Artificial Sequence
  Description of Artificial Sequence: Synthetic oligonucleotide
ugucuuaaagacaacucaa

SEQ ID NO: 1859793 - RNA, 19 nt, Artificial Sequence
  Description of Artificial Sequence: Synthetic oligonucleotide
uccaaaauuauucuucauu

SEQ ID NO: 1859794 - RNA, 19 nt, Artificial Sequence
  Description of Artificial Sequence: Synthetic oligonucleotide
aacucaucccauugucuac

SEQ ID NO: 1859795 - RNA, 19 nt, Artificial Sequence
  Description of Artificial Sequence: Synthetic oligonucleotide
gauacuauuucuucauguc

SEQ ID NO: 1859796 - RNA, 19 nt, Artificial Sequence
  Description of Artificial Sequence: Synthetic oligonucleotide
uucacauugcuucauucac

SEQ ID NO: 1859797 - RNA, 19 nt, Artificial Sequence
  Description of Artificial Sequence: Synthetic oligonucleotide
uuugugauacuauuucuuc

SEQ ID NO: 1859798 - RNA, 19 nt, Artificial Sequence
  Description of Artificial Sequence: Synthetic oligonucleotide
aagucagccuuccuauuuc

SEQ ID NO: 1859799 - RNA, 19 nt, Artificial Sequence
  Description of Artificial Sequence: Synthetic oligonucleotide
ucagcuuuaagccgguacu

SEQ ID NO: 1859800 - RNA, 19 nt, Artificial Sequence
  Description of Artificial Sequence: Synthetic oligonucleotide
uuaagccuugucuguaagg

SEQ ID NO: 1859801 - RNA, 19 nt, Artificial Sequence
  Description of Artificial Sequence: Synthetic oligonucleotide
uaacauuaaucuuugugau

SEQ ID NO: 1859802 - RNA, 19 nt, Artificial Sequence
  Description of Artificial Sequence: Synthetic oligonucleotide
uuuggcuauagagugaaac

SEQ ID NO: 1859803 - RNA, 19 nt, Artificial Sequence
  Description of Artificial Sequence: Synthetic oligonucleotide
aaagacaacucaagagaac

SEQ ID NO: 1859804 - RNA, 19 nt, Artificial Sequence
  Description of Artificial Sequence: Synthetic oligonucleotide
uuuaaucaaagcuggguua

SEQ ID NO: 1859805 - RNA, 19 nt, Artificial Sequence
  Description of Artificial Sequence: Synthetic oligonucleotide
ucugucuuaaagacaacuc

SEQ ID NO: 1859806 - RNA, 19 nt, Artificial Sequence
  Description of Artificial Sequence: Synthetic oligonucleotide
gaaguguacacucaaauau

SEQ ID NO: 1859807 - RNA, 19 nt, Artificial Sequence
  Description of Artificial Sequence: Synthetic oligonucleotide
cucugaagcuucuaugucc

SEQ ID NO: 1859808 - RNA, 19 nt, Artificial Sequence
  Description of Artificial Sequence: Synthetic oligonucleotide
cuuaugugcauaugcuggg

SEQ ID NO: 1859809 - RNA, 19 nt, Artificial Sequence
  Description of Artificial Sequence: Synthetic oligonucleotide
auggcuuaagccuugucug

SEQ ID NO: 1859810 - RNA, 19 nt, Artificial Sequence
  Description of Artificial Sequence: Synthetic oligonucleotide
aauuuggagcugcaaagaa

SEQ ID NO: 1859811 - RNA, 19 nt, Artificial Sequence
  Description of Artificial Sequence: Synthetic oligonucleotide
aauguuauuguuacccaca

SEQ ID NO: 1859812 - RNA, 19 nt, Artificial Sequence
  Description of Artificial Sequence: Synthetic oligonucleotide
agaagugugcuaaucugcc

SEQ ID NO: 1859813 - RNA, 19 nt, Artificial Sequence
  Description of Artificial Sequence: Synthetic oligonucleotide
caauauuuuaccagcuaac

SEQ ID NO: 1859814 - RNA, 19 nt, Artificial Sequence
  Description of Artificial Sequence: Synthetic oligonucleotide
uuuaccaauuuggagcugc

SEQ ID NO: 1859815 - RNA, 19 nt, Artificial Sequence
  Description of Artificial Sequence: Synthetic oligonucleotide
aaauugucaucggacugac

SEQ ID NO: 1859816 - RNA, 19 nt, Artificial Sequence
  Description of Artificial Sequence: Synthetic oligonucleotide
ugcauuuuccugcuaaauc

SEQ ID NO: 1859817 - RNA, 19 nt, Artificial Sequence
  Description of Artificial Sequence: Synthetic oligonucleotide
uuacuugacacaauauuuu

SEQ ID NO: 1859818 - RNA, 19 nt, Artificial Sequence
  Description of Artificial Sequence: Synthetic oligonucleotide
augaaauugucaucggacu

SEQ ID NO: 1859819 - RNA, 19 nt, Artificial Sequence
  Description of Artificial Sequence: Synthetic oligonucleotide
augucuuuuagaaagguga

SEQ ID NO: 1859820 - RNA, 19 nt, Artificial Sequence
  Description of Artificial Sequence: Synthetic oligonucleotide
ucuuuaaucaaagcugggu

SEQ ID NO: 1859821 - RNA, 19 nt, Artificial Sequence
  Description of Artificial Sequence: Synthetic oligonucleotide
aagccuugucuguaaggac

SEQ ID NO: 1859822 - RNA, 19 nt, Artificial Sequence
  Description of Artificial Sequence: Synthetic oligonucleotide
uagagugaaacucugucuu

SEQ ID NO: 1859823 - RNA, 19 nt, Artificial Sequence
  Description of Artificial Sequence: Synthetic oligonucleotide
ucuugagaauguauaaaau

SEQ ID NO: 1859824 - RNA, 19 nt, Artificial Sequence
  Description of Artificial Sequence: Synthetic oligonucleotide
uuaacucaucccauugucu

SEQ ID NO: 1859825 - RNA, 19 nt, Artificial Sequence
  Description of Artificial Sequence: Synthetic oligonucleotide
aaaauugucuggccgcuaa

SEQ ID NO: 1859826 - RNA, 19 nt, Artificial Sequence
  Description of Artificial Sequence: Synthetic oligonucleotide
uuuguauugugacacuaua

SEQ ID NO: 1859827 - RNA, 19 nt, Artificial Sequence
  Description of Artificial Sequence: Synthetic oligonucleotide
gagaacguaccgcagguug

SEQ ID NO: 1859828 - RNA, 19 nt, Artificial Sequence
  Description of Artificial Sequence: Synthetic oligonucleotide
cuauauaacagcucuaaua

SEQ ID NO: 1859829 - RNA, 19 nt, Artificial Sequence
  Description of Artificial Sequence: Synthetic oligonucleotide
uuuguuauagugagggcuu

SEQ ID NO: 1859830 - RNA, 19 nt, Artificial Sequence
  Description of Artificial Sequence: Synthetic oligonucleotide
uccugcuaaaucaacugga

SEQ ID NO: 1859831 - RNA, 19 nt, Artificial Sequence
  Description of Artificial Sequence: Synthetic oligonucleotide
uguaaggacuucucugaag

SEQ ID NO: 1859832 - RNA, 19 nt, Artificial Sequence
  Description of Artificial Sequence: Synthetic oligonucleotide
aagagaacguaccgcaggu

SEQ ID NO: 1859833 - RNA, 19 nt, Artificial Sequence
  Description of Artificial Sequence: Synthetic oligonucleotide
uauagaugaaauugucauc

SEQ ID NO: 1859834 - RNA, 19 nt, Artificial Sequence
  Description of Artificial Sequence: Synthetic oligonucleotide
acuuacuugacacaauauu

SEQ ID NO: 1859835 - RNA, 19 nt, Artificial Sequence
  Description of Artificial Sequence: Synthetic oligonucleotide
uucuauguccugcaagaga

SEQ ID NO: 1859836 - RNA, 19 nt, Artificial Sequence
  Description of Artificial Sequence: Synthetic oligonucleotide
uugugugaguuuuaacuca

SEQ ID NO: 1859837 - RNA, 19 nt, Artificial Sequence
  Description of Artificial Sequence: Synthetic oligonucleotide
aaauacaaaugaccucagu

SEQ ID NO: 1859838 - RNA, 19 nt, Artificial Sequence
  Description of Artificial Sequence: Synthetic oligonucleotide
uuuugaucuccaaaauuau

SEQ ID NO: 1859839 - RNA, 19 nt, Artificial Sequence
  Description of Artificial Sequence: Synthetic oligonucleotide
agugugcuaaucugccagc

SEQ ID NO: 1859840 - RNA, 19 nt, Artificial Sequence
  Description of Artificial Sequence: Synthetic oligonucleotide
uacuauuucuucaugucuu

SEQ ID NO: 1859841 - RNA, 19 nt, Artificial Sequence
  Description of Artificial Sequence: Synthetic oligonucleotide
ucuuacuuacuugacacaa

SEQ ID NO: 1859842 - RNA, 19 nt, Artificial Sequence
  Description of Artificial Sequence: Synthetic oligonucleotide
cuguuuuaccaauuuggag

SEQ ID NO: 1859843 - RNA, 19 nt, Artificial Sequence
  Description of Artificial Sequence: Synthetic oligonucleotide
uaagccuugucuguaagga

SEQ ID NO: 1859844 - RNA, 19 nt, Artificial Sequence
  Description of Artificial Sequence: Synthetic oligonucleotide
uucagcuuuaagccgguac

SEQ ID NO: 1859845 - RNA, 19 nt, Artificial Sequence
  Description of Artificial Sequence: Synthetic oligonucleotide
ugucaucggacugacaccc

SEQ ID NO: 1859846 - RNA, 19 nt, Artificial Sequence
  Description of Artificial Sequence: Synthetic oligonucleotide
agucagccuuccuauuucc

SEQ ID NO: 1859847 - RNA, 19 nt, Artificial Sequence
  Description of Artificial Sequence: Synthetic oligonucleotide
caagagaacguaccgcagg

SEQ ID NO: 1859848 - RNA, 19 nt, Artificial Sequence
  Description of Artificial Sequence: Synthetic oligonucleotide
acuugacacaauauuuuac

SEQ ID NO: 1859849 - RNA, 19 nt, Artificial Sequence
  Description of Artificial Sequence: Synthetic oligonucleotide
aauuaucaauuuguuuuca

SEQ ID NO: 1859850 - RNA, 19 nt, Artificial Sequence
  Description of Artificial Sequence: Synthetic oligonucleotide
aacagcucuaauauuuugu

SEQ ID NO: 1859851 - RNA, 19 nt, Artificial Sequence
  Description of Artificial Sequence: Synthetic oligonucleotide
uuuuguauugugacacuau

SEQ ID NO: 1859852 - RNA, 19 nt, Artificial Sequence
  Description of Artificial Sequence: Synthetic oligonucleotide
uuauagugagggcuugugu

SEQ ID NO: 1859853 - RNA, 19 nt, Artificial Sequence
  Description of Artificial Sequence: Synthetic oligonucleotide
cauaccuguaaucccaaug

SEQ ID NO: 1859854 - RNA, 19 nt, Artificial Sequence
  Description of Artificial Sequence: Synthetic oligonucleotide
cucaaauauuugaggacag

SEQ ID NO: 1859855 - RNA, 19 nt, Artificial Sequence
  Description of Artificial Sequence: Synthetic oligonucleotide
aauguaucaaccacuguuu

SEQ ID NO: 1859856 - RNA, 19 nt, Artificial Sequence
  Description of Artificial Sequence: Synthetic oligonucleotide
uuuauuccuuaauuacaac

SEQ ID NO: 1859857 - RNA, 19 nt, Artificial Sequence
  Description of Artificial Sequence: Synthetic oligonucleotide
ugcuguuuauuccuuaauu

SEQ ID NO: 1859858 - RNA, 19 nt, Artificial Sequence
  Description of Artificial Sequence: Synthetic oligonucleotide
ucaaggaaguguacacuca

SEQ ID NO: 1859859 - RNA, 19 nt, Artificial Sequence
  Description of Artificial Sequence: Synthetic oligonucleotide
agaugaaauugucaucgga

SEQ ID NO: 1859860 - RNA, 19 nt, Artificial Sequence
  Description of Artificial Sequence: Synthetic oligonucleotide
aaauugucuggccgcuaag

SEQ ID NO: 1859861 - RNA, 19 nt, Artificial Sequence
  Description of Artificial Sequence: Synthetic oligonucleotide
guacacucaaauauuugag

SEQ ID NO: 1859862 - RNA, 19 nt, Artificial Sequence
  Description of Artificial Sequence: Synthetic oligonucleotide
acaacucaagagaacguac

SEQ ID NO: 1859863 - RNA, 19 nt, Artificial Sequence
  Description of Artificial Sequence: Synthetic oligonucleotide
uuaacacugcagagaagug

SEQ ID NO: 1859864 - RNA, 19 nt, Artificial Sequence
  Description of Artificial Sequence: Synthetic oligonucleotide
caauguuauuguuacccac

SEQ ID NO: 1859865 - RNA, 19 nt, Artificial Sequence
  Description of Artificial Sequence: Synthetic oligonucleotide
guuuugaucuccaaaauua

SEQ ID NO: 1859866 - RNA, 19 nt, Artificial Sequence
  Description of Artificial Sequence: Synthetic oligonucleotide
gagaauguauaaaauuguc

SEQ ID NO: 1859867 - RNA, 19 nt, Artificial Sequence
  Description of Artificial Sequence: Synthetic oligonucleotide
acaacuguuaacacugcag

SEQ ID NO: 1859868 - RNA, 19 nt, Artificial Sequence
  Description of Artificial Sequence: Synthetic oligonucleotide
acaauguuauuguuaccca

SEQ ID NO: 1859869 - RNA, 19 nt, Artificial Sequence
  Description of Artificial Sequence: Synthetic oligonucleotide
auuuugugacauuuuguau

SEQ ID NO: 1859870 - RNA, 19 nt, Artificial Sequence
  Description of Artificial Sequence: Synthetic oligonucleotide
uuugaucuccaaaauuauu

SEQ ID NO: 1859871 - RNA, 19 nt, Artificial Sequence
  Description of Artificial Sequence: Synthetic oligonucleotide
aggaaguguacacucaaau

SEQ ID NO: 1859872 - RNA, 19 nt, Artificial Sequence
  Description of Artificial Sequence: Synthetic oligonucleotide
uuaccagcuaacaaauguu

SEQ ID NO: 1859873 - RNA, 19 nt, Artificial Sequence
  Description of Artificial Sequence: Synthetic oligonucleotide
aacaagggacguguugcac

SEQ ID NO: 1859874 - RNA, 19 nt, Artificial Sequence
  Description of Artificial Sequence: Synthetic oligonucleotide
aauaaguuucacauugcuu

SEQ ID NO: 1859875 - RNA, 19 nt, Artificial Sequence
  Description of Artificial Sequence: Synthetic oligonucleotide
ucucucuuaaagaugccuu

SEQ ID NO: 1859876 - RNA, 19 nt, Artificial Sequence
  Description of Artificial Sequence: Synthetic oligonucleotide
aaucaaagcuggguuauaa

SEQ ID NO: 1859877 - RNA, 19 nt, Artificial Sequence
  Description of Artificial Sequence: Synthetic oligonucleotide
gaaggagacaugcucuuuc

SEQ ID NO: 1859878 - RNA, 19 nt, Artificial Sequence
  Description of Artificial Sequence: Synthetic oligonucleotide
uuaaucaaagcuggguuau

SEQ ID NO: 1859879 - RNA, 19 nt, Artificial Sequence
  Description of Artificial Sequence: Synthetic oligonucleotide
uuagaaaggugaauuucuu

SEQ ID NO: 1859880 - RNA, 19 nt, Artificial Sequence
  Description of Artificial Sequence: Synthetic oligonucleotide
acuguuaacacugcagaga

SEQ ID NO: 1859881 - RNA, 19 nt, Artificial Sequence
  Description of Artificial Sequence: Synthetic oligonucleotide
uuuucaugacagucuugag

SEQ ID NO: 1859882 - RNA, 19 nt, Artificial Sequence
  Description of Artificial Sequence: Synthetic oligonucleotide
aguggcuugaaggagacau

SEQ ID NO: 1859883 - RNA, 19 nt, Artificial Sequence
  Description of Artificial Sequence: Synthetic oligonucleotide
uguaucaaccacuguuuaa

SEQ ID NO: 1859884 - RNA, 19 nt, Artificial Sequence
  Description of Artificial Sequence: Synthetic oligonucleotide
gaaauugucaucggacuga

SEQ ID NO: 1859885 - RNA, 19 nt, Artificial Sequence
  Description of Artificial Sequence: Synthetic oligonucleotide
acuauagaugaaauuguca

SEQ ID NO: 1859886 - RNA, 19 nt, Artificial Sequence
  Description of Artificial Sequence: Synthetic oligonucleotide
cuauagaugaaauugucau

SEQ ID NO: 1859887 - RNA, 19 nt, Artificial Sequence
  Description of Artificial Sequence: Synthetic oligonucleotide
ugccuucagcuuuaagccg

SEQ ID NO: 1859888 - RNA, 19 nt, Artificial Sequence
  Description of Artificial Sequence: Synthetic oligonucleotide
ugcauaugcugggagacug

SEQ ID NO: 1859889 - RNA, 19 nt, Artificial Sequence
  Description of Artificial Sequence: Synthetic oligonucleotide
uuguuacccacaccaacac

SEQ ID NO: 1859890 - RNA, 19 nt, Artificial Sequence
  Description of Artificial Sequence: Synthetic oligonucleotide
agcacauauuaugaaaaca

SEQ ID NO: 1859891 - RNA, 19 nt, Artificial Sequence
  Description of Artificial Sequence: Synthetic oligonucleotide
auagugagggcuuguguga

SEQ ID NO: 1859892 - RNA, 19 nt, Artificial Sequence
  Description of Artificial Sequence: Synthetic oligonucleotide
cacuauagaugaaauuguc

SEQ ID NO: 1859893 - RNA, 19 nt, Artificial Sequence
  Description of Artificial Sequence: Synthetic oligonucleotide
ugugcauaugcugggagac

SEQ ID NO: 1859894 - RNA, 19 nt, Artificial Sequence
  Description of Artificial Sequence: Synthetic oligonucleotide
uccuauuuccuccuuccuc

SEQ ID NO: 1859895 - RNA, 19 nt, Artificial Sequence
  Description of Artificial Sequence: Synthetic oligonucleotide
aauugucuggccgcuaagu

SEQ ID NO: 1859896 - RNA, 19 nt, Artificial Sequence
  Description of Artificial Sequence: Synthetic oligonucleotide
guuaacacugcagagaagu

SEQ ID NO: 1859897 - RNA, 19 nt, Artificial Sequence
  Description of Artificial Sequence: Synthetic oligonucleotide
uaacacugcagagaagugu

SEQ ID NO: 1859898 - RNA, 19 nt, Artificial Sequence
  Description of Artificial Sequence: Synthetic oligonucleotide
gauggcagugaacaaggga

SEQ ID NO: 1859899 - RNA, 19 nt, Artificial Sequence
  Description of Artificial Sequence: Synthetic oligonucleotide
ugugugaguuuuaacucau

SEQ ID NO: 1859900 - RNA, 19 nt, Artificial Sequence
  Description of Artificial Sequence: Synthetic oligonucleotide
gucuuaaagacaacucaag

SEQ ID NO: 1859901 - RNA, 19 nt, Artificial Sequence
  Description of Artificial Sequence: Synthetic oligonucleotide
uuccuuccuacauuuaaau

SEQ ID NO: 1859902 - RNA, 19 nt, Artificial Sequence
  Description of Artificial Sequence: Synthetic oligonucleotide
uggcuauagagugaaacuc

SEQ ID NO: 1859903 - RNA, 19 nt, Artificial Sequence
  Description of Artificial Sequence: Synthetic oligonucleotide
uuauuguuacccacaccaa

SEQ ID NO: 1859904 - RNA, 19 nt, Artificial Sequence
  Description of Artificial Sequence: Synthetic oligonucleotide
ucaaggaagucaucuuuaa

SEQ ID NO: 1859905 - RNA, 19 nt, Artificial Sequence
  Description of Artificial Sequence: Synthetic oligonucleotide
uuuuggaauuguucuuacu

SEQ ID NO: 1859906 - RNA, 19 nt, Artificial Sequence
  Description of Artificial Sequence: Synthetic oligonucleotide
uuacaacuguuaacacugc

SEQ ID NO: 1859907 - RNA, 19 nt, Artificial Sequence
  Description of Artificial Sequence: Synthetic oligonucleotide
ugcaagagacugagguucc

SEQ ID NO: 1859908 - RNA, 19 nt, Artificial Sequence
  Description of Artificial Sequence: Synthetic oligonucleotide
auuuuaccagcuaacaaau

SEQ ID NO: 1859909 - RNA, 19 nt, Artificial Sequence
  Description of Artificial Sequence: Synthetic oligonucleotide
uguuaacacugcagagaag

SEQ ID NO: 1859910 - RNA, 19 nt, Artificial Sequence
  Description of Artificial Sequence: Synthetic oligonucleotide
uucuuacuuacuugacaca

SEQ ID NO: 1859911 - RNA, 19 nt, Artificial Sequence
  Description of Artificial Sequence: Synthetic oligonucleotide
uaaucugccagcacauauu

SEQ ID NO: 1859912 - RNA, 19 nt, Artificial Sequence
  Description of Artificial Sequence: Synthetic oligonucleotide
uucucucuuaaagaugccu

SEQ ID NO: 1859913 - RNA, 19 nt, Artificial Sequence
  Description of Artificial Sequence: Synthetic oligonucleotide
ucaucggacugacacccug

SEQ ID NO: 1859914 - RNA, 19 nt, Artificial Sequence
  Description of Artificial Sequence: Synthetic oligonucleotide
uacuuacuugacacaauau

SEQ ID NO: 1859915 - RNA, 19 nt, Artificial Sequence
  Description of Artificial Sequence: Synthetic oligonucleotide
uaccagcuaacaaauguuu

SEQ ID NO: 1859916 - RNA, 19 nt, Artificial Sequence
  Description of Artificial Sequence: Synthetic oligonucleotide
uugucaucggacugacacc

SEQ ID NO: 1859917 - RNA, 19 nt, Artificial Sequence
  Description of Artificial Sequence: Synthetic oligonucleotide
agggacguguugcacagug

SEQ ID NO: 1859918 - RNA, 19 nt, Artificial Sequence
  Description of Artificial Sequence: Synthetic oligonucleotide
acagaucucaaggaagugu

SEQ ID NO: 1859919 - RNA, 19 nt, Artificial Sequence
  Description of Artificial Sequence: Synthetic oligonucleotide
auuaaucuuugugauacua

SEQ ID NO: 1859920 - RNA, 19 nt, Artificial Sequence
  Description of Artificial Sequence: Synthetic oligonucleotide
cuuaagccuugucuguaag

SEQ ID NO: 1859921 - RNA, 19 nt, Artificial Sequence
  Description of Artificial Sequence: Synthetic oligonucleotide
aguuuuaacucaucccauu

SEQ ID NO: 1859922 - RNA, 19 nt, Artificial Sequence
  Description of Artificial Sequence: Synthetic oligonucleotide
ugcucuuucuguguuuuga

SEQ ID NO: 1859923 - RNA, 19 nt, Artificial Sequence
  Description of Artificial Sequence: Synthetic oligonucleotide
accuguaaucccaaugcuc

SEQ ID NO: 1859924 - RNA, 19 nt, Artificial Sequence
  Description of Artificial Sequence: Synthetic oligonucleotide
guuuuaccaauuuggagcu

SEQ ID NO: 1859925 - RNA, 19 nt, Artificial Sequence
  Description of Artificial Sequence: Synthetic oligonucleotide
cuuacuugacacaauauuu

SEQ ID NO: 1859926 - RNA, 19 nt, Artificial Sequence
  Description of Artificial Sequence: Synthetic oligonucleotide
uugucuguaaggacuucuc

SEQ ID NO: 1859927 - RNA, 19 nt, Artificial Sequence
  Description of Artificial Sequence: Synthetic oligonucleotide
gaucucaaggaaguguaca

SEQ ID NO: 1859928 - RNA, 19 nt, Artificial Sequence
  Description of Artificial Sequence: Synthetic oligonucleotide
cuaacaaauguuuagccuu

SEQ ID NO: 1859929 - RNA, 19 nt, Artificial Sequence
  Description of Artificial Sequence: Synthetic oligonucleotide
aggugaauuucuugaguga

SEQ ID NO: 1859930 - RNA, 19 nt, Artificial Sequence
  Description of Artificial Sequence: Synthetic oligonucleotide
agcuauauaacagcucuaa

SEQ ID NO: 1859931 - RNA, 19 nt, Artificial Sequence
  Description of Artificial Sequence: Synthetic oligonucleotide
ucaaauauuugaggacagu

SEQ ID NO: 1859932 - RNA, 19 nt, Artificial Sequence
  Description of Artificial Sequence: Synthetic oligonucleotide
cagcacauauuaugaaaac

SEQ ID NO: 1859933 - RNA, 19 nt, Artificial Sequence
  Description of Artificial Sequence: Synthetic oligonucleotide
uccuuccuacauuuaaauc

SEQ ID NO: 1859934 - RNA, 19 nt, Artificial Sequence
  Description of Artificial Sequence: Synthetic oligonucleotide
ugcuaaucugccagcacau

SEQ ID NO: 1859935 - RNA, 19 nt, Artificial Sequence
  Description of Artificial Sequence: Synthetic oligonucleotide
acaguggaugcuugacuag

SEQ ID NO: 1859936 - RNA, 19 nt, Artificial Sequence
  Description of Artificial Sequence: Synthetic oligonucleotide
aggacauucccaagauggc

SEQ ID NO: 1859937 - RNA, 19 nt, Artificial Sequence
  Description of Artificial Sequence: Synthetic oligonucleotide
ugugcuaaucugccagcac

SEQ ID NO: 1859938 - RNA, 19 nt, Artificial Sequence
  Description of Artificial Sequence: Synthetic oligonucleotide
uccuacauuuaaaucuguu

SEQ ID NO: 1859939 - RNA, 19 nt, Artificial Sequence
  Description of Artificial Sequence: Synthetic oligonucleotide
cugcuaaaucaacuggaug

SEQ ID NO: 1859940 - RNA, 19 nt, Artificial Sequence
  Description of Artificial Sequence: Synthetic oligonucleotide
ugacacuauagaugaaauu

SEQ ID NO: 1859941 - RNA, 19 nt, Artificial Sequence
  Description of Artificial Sequence: Synthetic oligonucleotide
acguguugcacaguggaug

SEQ ID NO: 1859942 - RNA, 19 nt, Artificial Sequence
  Description of Artificial Sequence: Synthetic oligonucleotide
cuugagaauguauaaaauu

SEQ ID NO: 1859943 - RNA, 19 nt, Artificial Sequence
  Description of Artificial Sequence: Synthetic oligonucleotide
gugcuaaucugccagcaca

SEQ ID NO: 1859944 - RNA, 19 nt, Artificial Sequence
  Description of Artificial Sequence: Synthetic oligonucleotide
ugcuucauucaccuucuua

SEQ ID NO: 1859945 - RNA, 19 nt, Artificial Sequence
  Description of Artificial Sequence: Synthetic oligonucleotide
ucucaaggaaguguacacu

SEQ ID NO: 1859946 - RNA, 19 nt, Artificial Sequence
  Description of Artificial Sequence: Synthetic oligonucleotide
gugaacaagggacguguug

SEQ ID NO: 1859947 - RNA, 19 nt, Artificial Sequence
  Description of Artificial Sequence: Synthetic oligonucleotide
uuaccaauuuggagcugca

SEQ ID NO: 1859948 - RNA, 19 nt, Artificial Sequence
  Description of Artificial Sequence: Synthetic oligonucleotide
ucucaguggcuugaaggag

SEQ ID NO: 1859949 - RNA, 19 nt, Artificial Sequence
  Description of Artificial Sequence: Synthetic oligonucleotide
aaggacuucucugaagcuu

SEQ ID NO: 1859950 - RNA, 19 nt, Artificial Sequence
  Description of Artificial Sequence: Synthetic oligonucleotide
aaguguacacucaaauauu

SEQ ID NO: 1859951 - RNA, 19 nt, Artificial Sequence
  Description of Artificial Sequence: Synthetic oligonucleotide
uuacccacaccaacaccca

SEQ ID NO: 1859952 - RNA, 19 nt, Artificial Sequence
  Description of Artificial Sequence: Synthetic oligonucleotide
cuucaagaccagcuuuggc

SEQ ID NO: 1859953 - RNA, 19 nt, Artificial Sequence
  Description of Artificial Sequence: Synthetic oligonucleotide
gaagcaggaggauugcugu

SEQ ID NO: 1859954 - RNA, 19 nt, Artificial Sequence
  Description of Artificial Sequence: Synthetic oligonucleotide
guuauagugagggcuugug

SEQ ID NO: 1859955 - RNA, 19 nt, Artificial Sequence
  Description of Artificial Sequence: Synthetic oligonucleotide
cuggguuauaagcuuucug

SEQ ID NO: 1859956 - RNA, 19 nt, Artificial Sequence
  Description of Artificial Sequence: Synthetic oligonucleotide
gaauuguucuuacuuacuu

SEQ ID NO: 1859957 - RNA, 19 nt, Artificial Sequence
  Description of Artificial Sequence: Synthetic oligonucleotide
guaaucccaaugcucagaa

SEQ ID NO: 1859958 - RNA, 19 nt, Artificial Sequence
  Description of Artificial Sequence: Synthetic oligonucleotide
ccaacacccacucaacagg

SEQ ID NO: 1859959 - RNA, 19 nt, Artificial Sequence
  Description of Artificial Sequence: Synthetic oligonucleotide
cacccugugcuguuuauuc

SEQ ID NO: 1859960 - RNA, 19 nt, Artificial Sequence
  Description of Artificial Sequence: Synthetic oligonucleotide
caguggaugcuugacuagg

SEQ ID NO: 1859961 - RNA, 19 nt, Artificial Sequence
  Description of Artificial Sequence: Synthetic oligonucleotide
ccaaacuguaauguaacag

SEQ ID NO: 1859962 - RNA, 19 nt, Artificial Sequence
  Description of Artificial Sequence: Synthetic oligonucleotide
acaggacauucccaagaug

SEQ ID NO: 1859963 - RNA, 19 nt, Artificial Sequence
  Description of Artificial Sequence: Synthetic oligonucleotide
agacaugcucuuucugugu

SEQ ID NO: 1859964 - RNA, 19 nt, Artificial Sequence
  Description of Artificial Sequence: Synthetic oligonucleotide
aacacccacucaacaggac

SEQ ID NO: 1859965 - RNA, 19 nt, Artificial Sequence
  Description of Artificial Sequence: Synthetic oligonucleotide
uuaugugcauaugcuggga

SEQ ID NO: 1859966 - RNA, 19 nt, Artificial Sequence
  Description of Artificial Sequence: Synthetic oligonucleotide
gcuucuauguccugcaaga

SEQ ID NO: 1859967 - RNA, 19 nt, Artificial Sequence
  Description of Artificial Sequence: Synthetic oligonucleotide
aacguaccgcagguugugg

SEQ ID NO: 1859968 - RNA, 19 nt, Artificial Sequence
  Description of Artificial Sequence: Synthetic oligonucleotide
uuccuauuuccuccuuccu

SEQ ID NO: 1859969 - RNA, 19 nt, Artificial Sequence
  Description of Artificial Sequence: Synthetic oligonucleotide
gaagugugcuaaucugcca

SEQ ID NO: 1859970 - RNA, 19 nt, Artificial Sequence
  Description of Artificial Sequence: Synthetic oligonucleotide
uuccucauguuccuuccua

SEQ ID NO: 1859971 - RNA, 19 nt, Artificial Sequence
  Description of Artificial Sequence: Synthetic oligonucleotide
ccuguaaucccaaugcuca

SEQ ID NO: 1859972 - RNA, 19 nt, Artificial Sequence
  Description of Artificial Sequence: Synthetic oligonucleotide
agccuugucuguaaggacu

SEQ ID NO: 1859973 - RNA, 19 nt, Artificial Sequence
  Description of Artificial Sequence: Synthetic oligonucleotide
caucccauugucuacuuua

SEQ ID NO: 1859974 - RNA, 19 nt, Artificial Sequence
  Description of Artificial Sequence: Synthetic oligonucleotide
ccuuccuacauuuaaaucu

SEQ ID NO: 1859975 - RNA, 19 nt, Artificial Sequence
  Description of Artificial Sequence: Synthetic oligonucleotide
uacagaucucaaggaagug

SEQ ID NO: 1859976 - RNA, 19 nt, Artificial Sequence
  Description of Artificial Sequence: Synthetic oligonucleotide
uggcuuaagccuugucugu

SEQ ID NO: 1859977 - RNA, 19 nt, Artificial Sequence
  Description of Artificial Sequence: Synthetic oligonucleotide
caacaggacauucccaaga

SEQ ID NO: 1859978 - RNA, 19 nt, Artificial Sequence
  Description of Artificial Sequence: Synthetic oligonucleotide
auuugaggacaguaaugua

SEQ ID NO: 1859979 - RNA, 19 nt, Artificial Sequence
  Description of Artificial Sequence: Synthetic oligonucleotide
gaacaagggacguguugca

SEQ ID NO: 1859980 - RNA, 19 nt, Artificial Sequence
  Description of Artificial Sequence: Synthetic oligonucleotide
cugccagcacauauuauga

SEQ ID NO: 1859981 - RNA, 19 nt, Artificial Sequence
  Description of Artificial Sequence: Synthetic oligonucleotide
ucggacugacacccugugc

SEQ ID NO: 1859982 - RNA, 19 nt, Artificial Sequence
  Description of Artificial Sequence: Synthetic oligonucleotide
gacaacucaagagaacgua

SEQ ID NO: 1859983 - RNA, 19 nt, Artificial Sequence
  Description of Artificial Sequence: Synthetic oligonucleotide
aggagacaugcucuuucug

SEQ ID NO: 1859984 - RNA, 19 nt, Artificial Sequence
  Description of Artificial Sequence: Synthetic oligonucleotide
cuuuaaucaaagcuggguu

SEQ ID NO: 1859985 - RNA, 19 nt, Artificial Sequence
  Description of Artificial Sequence: Synthetic oligonucleotide
uuguuauagugagggcuug

SEQ ID NO: 1859986 - RNA, 19 nt, Artificial Sequence
  Description of Artificial Sequence: Synthetic oligonucleotide
auguaucaaccacuguuua

SEQ ID NO: 1859987 - RNA, 19 nt, Artificial Sequence
  Description of Artificial Sequence: Synthetic oligonucleotide
cuucucucuuaaagaugcc

SEQ ID NO: 1859988 - RNA, 19 nt, Artificial Sequence
  Description of Artificial Sequence: Synthetic oligonucleotide
gauggcuggagcccaaacu

SEQ ID NO: 1859989 - RNA, 19 nt, Artificial Sequence
  Description of Artificial Sequence: Synthetic oligonucleotide
acacaauauuuuaccagcu

SEQ ID NO: 1859990 - RNA, 19 nt, Artificial Sequence
  Description of Artificial Sequence: Synthetic oligonucleotide
aucggacugacacccugug

SEQ ID NO: 1859991 - RNA, 19 nt, Artificial Sequence
  Description of Artificial Sequence: Synthetic oligonucleotide
uguuauagugagggcuugu

SEQ ID NO: 1859992 - RNA, 19 nt, Artificial Sequence
  Description of Artificial Sequence: Synthetic oligonucleotide
cuucuauguccugcaagag

SEQ ID NO: 1859993 - RNA, 19 nt, Artificial Sequence
  Description of Artificial Sequence: Synthetic oligonucleotide
ugcacaguggaugcuugac

SEQ ID NO: 1859994 - RNA, 19 nt, Artificial Sequence
  Description of Artificial Sequence: Synthetic oligonucleotide
uagcuauauaacagcucua

SEQ ID NO: 1859995 - RNA, 19 nt, Artificial Sequence
  Description of Artificial Sequence: Synthetic oligonucleotide
gaacguaccgcagguugug

SEQ ID NO: 1859996 - RNA, 19 nt, Artificial Sequence
  Description of Artificial Sequence: Synthetic oligonucleotide
agagugaaacucugucuua

SEQ ID NO: 1859997 - RNA, 19 nt, Artificial Sequence
  Description of Artificial Sequence: Synthetic oligonucleotide
ugccagcacauauuaugaa

SEQ ID NO: 1859998 - RNA, 19 nt, Artificial Sequence
  Description of Artificial Sequence: Synthetic oligonucleotide
cacauugcuucauucaccu

SEQ ID NO: 1859999 - RNA, 19 nt, Artificial Sequence
  Description of Artificial Sequence: Synthetic oligonucleotide
gggcucauaccuguaaucc

SEQ ID NO: 1860000 - RNA, 19 nt, Artificial Sequence
  Description of Artificial Sequence: Synthetic oligonucleotide
cagucuugagaauguauaa

SEQ ID NO: 1860001 - RNA, 19 nt, Artificial Sequence
  Description of Artificial Sequence: Synthetic oligonucleotide
guaucaaccacuguuuaau

SEQ ID NO: 1860002 - RNA, 19 nt, Artificial Sequence
  Description of Artificial Sequence: Synthetic oligonucleotide
acacugcagagaagugugc

SEQ ID NO: 1860003 - RNA, 19 nt, Artificial Sequence
  Description of Artificial Sequence: Synthetic oligonucleotide
ucccauugucuacuuuaaa

SEQ ID NO: 1860004 - RNA, 19 nt, Artificial Sequence
  Description of Artificial Sequence: Synthetic oligonucleotide
cagcucuaauauuuuguga

SEQ ID NO: 1860005 - RNA, 19 nt, Artificial Sequence
  Description of Artificial Sequence: Synthetic oligonucleotide
caauuuggagcugcaaaga

SEQ ID NO: 1860006 - RNA, 19 nt, Artificial Sequence
  Description of Artificial Sequence: Synthetic oligonucleotide
ggacguguugcacagugga

SEQ ID NO: 1860007 - RNA, 19 nt, Artificial Sequence
  Description of Artificial Sequence: Synthetic oligonucleotide
gcuaacaaauguuuagccu

SEQ ID NO: 1860008 - RNA, 19 nt, Artificial Sequence
  Description of Artificial Sequence: Synthetic oligonucleotide
aaggaaguguacacucaaa

SEQ ID NO: 1860009 - RNA, 19 nt, Artificial Sequence
  Description of Artificial Sequence: Synthetic oligonucleotide
agugaucaaggaagucauc

SEQ ID NO: 1860010 - RNA, 19 nt, Artificial Sequence
  Description of Artificial Sequence: Synthetic oligonucleotide
agcccaaacuguaauguaa

SEQ ID NO: 1860011 - RNA, 19 nt, Artificial Sequence
  Description of Artificial Sequence: Synthetic oligonucleotide
cuuugugauacuauuucuu

SEQ ID NO: 1860012 - RNA, 19 nt, Artificial Sequence
  Description of Artificial Sequence: Synthetic oligonucleotide
uugcacaguggaugcuuga

SEQ ID NO: 1860013 - RNA, 19 nt, Artificial Sequence
  Description of Artificial Sequence: Synthetic oligonucleotide
ucaccuucuuaugugcaua

SEQ ID NO: 1860014 - RNA, 19 nt, Artificial Sequence
  Description of Artificial Sequence: Synthetic oligonucleotide
uuuuaccaauuuggagcug

SEQ ID NO: 1860015 - RNA, 19 nt, Artificial Sequence
  Description of Artificial Sequence: Synthetic oligonucleotide
uggccgcuaagucagccuu

SEQ ID NO: 1860016 - RNA, 19 nt, Artificial Sequence
  Description of Artificial Sequence: Synthetic oligonucleotide
cacauauuaugaaaacaau

SEQ ID NO: 1860017 - RNA, 19 nt, Artificial Sequence
  Description of Artificial Sequence: Synthetic oligonucleotide
aagcugaagcaggaggauu

SEQ ID NO: 1860018 - RNA, 19 nt, Artificial Sequence
  Description of Artificial Sequence: Synthetic oligonucleotide
gcucuaauauuuugugaca

SEQ ID NO: 1860019 - RNA, 19 nt, Artificial Sequence
  Description of Artificial Sequence: Synthetic oligonucleotide
uugagugaucaaggaaguc

SEQ ID NO: 1860020 - RNA, 19 nt, Artificial Sequence
  Description of Artificial Sequence: Synthetic oligonucleotide
acguaccgcagguugugga

SEQ ID NO: 1860021 - RNA, 19 nt, Artificial Sequence
  Description of Artificial Sequence: Synthetic oligonucleotide
agaacguaccgcagguugu

SEQ ID NO: 1860022 - RNA, 19 nt, Artificial Sequence
  Description of Artificial Sequence: Synthetic oligonucleotide
uaccgcagguuguggauau

SEQ ID NO: 1860023 - RNA, 19 nt, Artificial Sequence
  Description of Artificial Sequence: Synthetic oligonucleotide
ugggagacuggauguuaaa

SEQ ID NO: 1860024 - RNA, 19 nt, Artificial Sequence
  Description of Artificial Sequence: Synthetic oligonucleotide
ucauaccuguaaucccaau

SEQ ID NO: 1860025 - RNA, 19 nt, Artificial Sequence
  Description of Artificial Sequence: Synthetic oligonucleotide
cuaaucugccagcacauau

SEQ ID NO: 1860026 - RNA, 19 nt, Artificial Sequence
  Description of Artificial Sequence: Synthetic oligonucleotide
ucaugacagucuugagaau

SEQ ID NO: 1860027 - RNA, 19 nt, Artificial Sequence
  Description of Artificial Sequence: Synthetic oligonucleotide
ccuuaauuacaacuguuaa

SEQ ID NO: 1860028 - RNA, 19 nt, Artificial Sequence
  Description of Artificial Sequence: Synthetic oligonucleotide
ccacucaacaggacauucc

SEQ ID NO: 1860029 - RNA, 19 nt, Artificial Sequence
  Description of Artificial Sequence: Synthetic oligonucleotide
aguggaugcuugacuaggu

SEQ ID NO: 1860030 - RNA, 19 nt, Artificial Sequence
  Description of Artificial Sequence: Synthetic oligonucleotide
cguguugcacaguggaugc

SEQ ID NO: 1860031 - RNA, 19 nt, Artificial Sequence
  Description of Artificial Sequence: Synthetic oligonucleotide
agugagggcuugugugagu

SEQ ID NO: 1860032 - RNA, 19 nt, Artificial Sequence
  Description of Artificial Sequence: Synthetic oligonucleotide
ugacacccugugcuguuua

SEQ ID NO: 1860033 - RNA, 19 nt, Artificial Sequence
  Description of Artificial Sequence: Synthetic oligonucleotide
uaaaauugucuggccgcua

SEQ ID NO: 1860034 - RNA, 19 nt, Artificial Sequence
  Description of Artificial Sequence: Synthetic oligonucleotide
cauucccaagauggcagug

SEQ ID NO: 1860035 - RNA, 19 nt, Artificial Sequence
  Description of Artificial Sequence: Synthetic oligonucleotide
gagcccaaacuguaaugua

SEQ ID NO: 1860036 - RNA, 19 nt, Artificial Sequence
  Description of Artificial Sequence: Synthetic oligonucleotide
gcucauaccuguaauccca

SEQ ID NO: 1860037 - RNA, 19 nt, Artificial Sequence
  Description of Artificial Sequence: Synthetic oligonucleotide
accagcuaacaaauguuua

SEQ ID NO: 1860038 - RNA, 19 nt, Artificial Sequence
  Description of Artificial Sequence: Synthetic oligonucleotide
cagucucaguggcuugaag

SEQ ID NO: 1860039 - RNA, 19 nt, Artificial Sequence
  Description of Artificial Sequence: Synthetic oligonucleotide
acaugcucuuucuguguuu

SEQ ID NO: 1860040 - RNA, 19 nt, Artificial Sequence
  Description of Artificial Sequence: Synthetic oligonucleotide
uaaucaaagcuggguuaua

SEQ ID NO: 1860041 - RNA, 19 nt, Artificial Sequence
  Description of Artificial Sequence: Synthetic oligonucleotide
cugaaguaacauuaaucuu

SEQ ID NO: 1860042 - RNA, 19 nt, Artificial Sequence
  Description of Artificial Sequence: Synthetic oligonucleotide
ugacagucuugagaaugua

SEQ ID NO: 1860043 - RNA, 19 nt, Artificial Sequence
  Description of Artificial Sequence: Synthetic oligonucleotide
agcuuuaagccgguacuuu

SEQ ID NO: 1860044 - RNA, 19 nt, Artificial Sequence
  Description of Artificial Sequence: Synthetic oligonucleotide
accuucuuaugugcauaug

SEQ ID NO: 1860045 - RNA, 19 nt, Artificial Sequence
  Description of Artificial Sequence: Synthetic oligonucleotide
guaauguaucaaccacugu

SEQ ID NO: 1860046 - RNA, 19 nt, Artificial Sequence
  Description of Artificial Sequence: Synthetic oligonucleotide
ggacauucccaagauggca

SEQ ID NO: 1860047 - RNA, 19 nt, Artificial Sequence
  Description of Artificial Sequence: Synthetic oligonucleotide
gcuaagucagccuuccuau

SEQ ID NO: 1860048 - RNA, 19 nt, Artificial Sequence
  Description of Artificial Sequence: Synthetic oligonucleotide
acccacaccaacacccacu

SEQ ID NO: 1860049 - RNA, 19 nt, Artificial Sequence
  Description of Artificial Sequence: Synthetic oligonucleotide
cugggagacuggauguuaa

SEQ ID NO: 1860050 - RNA, 19 nt, Artificial Sequence
  Description of Artificial Sequence: Synthetic oligonucleotide
cucauaccuguaaucccaa

SEQ ID NO: 1860051 - RNA, 19 nt, Artificial Sequence
  Description of Artificial Sequence: Synthetic oligonucleotide
ggacugacacccugugcug

SEQ ID NO: 1860052 - RNA, 19 nt, Artificial Sequence
  Description of Artificial Sequence: Synthetic oligonucleotide
cauuuuguauugugacacu

SEQ ID NO: 1860053 - RNA, 19 nt, Artificial Sequence
  Description of Artificial Sequence: Synthetic oligonucleotide
gcccaaacuguaauguaac

SEQ ID NO: 1860054 - RNA, 19 nt, Artificial Sequence
  Description of Artificial Sequence: Synthetic oligonucleotide
cuuacuuacuugacacaau

SEQ ID NO: 1860055 - RNA, 19 nt, Artificial Sequence
  Description of Artificial Sequence: Synthetic oligonucleotide
gugugcuaaucugccagca

SEQ ID NO: 1860056 - RNA, 19 nt, Artificial Sequence
  Description of Artificial Sequence: Synthetic oligonucleotide
cucauguuccuuccuacau

SEQ ID NO: 1860057 - RNA, 19 nt, Artificial Sequence
  Description of Artificial Sequence: Synthetic oligonucleotide
gugacacuauagaugaaau

SEQ ID NO: 1860058 - RNA, 19 nt, Artificial Sequence
  Description of Artificial Sequence: Synthetic oligonucleotide
cagugaacaagggacgugu

SEQ ID NO: 1860059 - RNA, 19 nt, Artificial Sequence
  Description of Artificial Sequence: Synthetic oligonucleotide
cuaaaucaacuggauggcu

SEQ ID NO: 1860060 - RNA, 19 nt, Artificial Sequence
  Description of Artificial Sequence: Synthetic oligonucleotide
ggcuauagagugaaacucu

SEQ ID NO: 1860061 - RNA, 19 nt, Artificial Sequence
  Description of Artificial Sequence: Synthetic oligonucleotide
acauugcuucauucaccuu

SEQ ID NO: 1860062 - RNA, 19 nt, Artificial Sequence
  Description of Artificial Sequence: Synthetic oligonucleotide
cauuaaucuuugugauacu

SEQ ID NO: 1860063 - RNA, 19 nt, Artificial Sequence
  Description of Artificial Sequence: Synthetic oligonucleotide
gggacguguugcacagugg

SEQ ID NO: 1860064 - RNA, 19 nt, Artificial Sequence
  Description of Artificial Sequence: Synthetic oligonucleotide
auaugcugggagacuggau

SEQ ID NO: 1860065 - RNA, 19 nt, Artificial Sequence
  Description of Artificial Sequence: Synthetic oligonucleotide
gcuuaagccuugucuguaa

SEQ ID NO: 1860066 - RNA, 19 nt, Artificial Sequence
  Description of Artificial Sequence: Synthetic oligonucleotide
gcagugaacaagggacgug

SEQ ID NO: 1860067 - RNA, 19 nt, Artificial Sequence
  Description of Artificial Sequence: Synthetic oligonucleotide
gucuuuuagaaaggugaau

SEQ ID NO: 1860068 - RNA, 19 nt, Artificial Sequence
  Description of Artificial Sequence: Synthetic oligonucleotide
agagaacguaccgcagguu

SEQ ID NO: 1860069 - RNA, 19 nt, Artificial Sequence
  Description of Artificial Sequence: Synthetic oligonucleotide
gccgcuaagucagccuucc

SEQ ID NO: 1860070 - RNA, 19 nt, Artificial Sequence
  Description of Artificial Sequence: Synthetic oligonucleotide
ggaauuguucuuacuuacu

SEQ ID NO: 1860071 - RNA, 19 nt, Artificial Sequence
  Description of Artificial Sequence: Synthetic oligonucleotide
cugugcuguuuauuccuua

SEQ ID NO: 1860072 - RNA, 19 nt, Artificial Sequence
  Description of Artificial Sequence: Synthetic oligonucleotide
guccugcaagagacugagg

SEQ ID NO: 1860073 - RNA, 19 nt, Artificial Sequence
  Description of Artificial Sequence: Synthetic oligonucleotide
uugcuucauucaccuucuu

SEQ ID NO: 1860074 - RNA, 19 nt, Artificial Sequence
  Description of Artificial Sequence: Synthetic oligonucleotide
gcuauauaacagcucuaau

SEQ ID NO: 1860075 - RNA, 19 nt, Artificial Sequence
  Description of Artificial Sequence: Synthetic oligonucleotide
acacccugugcuguuuauu

SEQ ID NO: 1860076 - RNA, 19 nt, Artificial Sequence
  Description of Artificial Sequence: Synthetic oligonucleotide
cuuuggcuauagagugaaa

SEQ ID NO: 1860077 - RNA, 19 nt, Artificial Sequence
  Description of Artificial Sequence: Synthetic oligonucleotide
caucggacugacacccugu

SEQ ID NO: 1860078 - RNA, 19 nt, Artificial Sequence
  Description of Artificial Sequence: Synthetic oligonucleotide
uggauggcuggagcccaaa

SEQ ID NO: 1860079 - RNA, 19 nt, Artificial Sequence
  Description of Artificial Sequence: Synthetic oligonucleotide
cuggagcccaaacuguaau

SEQ ID NO: 1860080 - RNA, 19 nt, Artificial Sequence
  Description of Artificial Sequence: Synthetic oligonucleotide
ggaugcuugacuagguuuu

SEQ ID NO: 1860081 - RNA, 19 nt, Artificial Sequence
  Description of Artificial Sequence: Synthetic oligonucleotide
caccuucuuaugugcauau

SEQ ID NO: 1860082 - RNA, 19 nt, Artificial Sequence
  Description of Artificial Sequence: Synthetic oligonucleotide
guaccgcagguuguggaua

SEQ ID NO: 1860083 - RNA, 19 nt, Artificial Sequence
  Description of Artificial Sequence: Synthetic oligonucleotide
gacacccugugcuguuuau

SEQ ID NO: 1860084 - RNA, 19 nt, Artificial Sequence
  Description of Artificial Sequence: Synthetic oligonucleotide
gcacaguggaugcuugacu

SEQ ID NO: 1860085 - RNA, 19 nt, Artificial Sequence
  Description of Artificial Sequence: Synthetic oligonucleotide
gacguguugcacaguggau

SEQ ID NO: 1860086 - RNA, 19 nt, Artificial Sequence
  Description of Artificial Sequence: Synthetic oligonucleotide
acccacucaacaggacauu

SEQ ID NO: 1860087 - RNA, 19 nt, Artificial Sequence
  Description of Artificial Sequence: Synthetic oligonucleotide
cggacugacacccugugcu

SEQ ID NO: 1860088 - RNA, 19 nt, Artificial Sequence
  Description of Artificial Sequence: Synthetic oligonucleotide
ccugcuaaaucaacuggau

SEQ ID NO: 1860089 - RNA, 19 nt, Artificial Sequence
  Description of Artificial Sequence: Synthetic oligonucleotide
ccaagauggcagugaacaa

SEQ ID NO: 1860090 - RNA, 19 nt, Artificial Sequence
  Description of Artificial Sequence: Synthetic oligonucleotide
cuggccgcuaagucagccu

SEQ ID NO: 1860091 - RNA, 19 nt, Artificial Sequence
  Description of Artificial Sequence: Synthetic oligonucleotide
auguuccuuccuacauuua

SEQ ID NO: 1860092 - RNA, 19 nt, Artificial Sequence
  Description of Artificial Sequence: Synthetic oligonucleotide
agggcuugugugaguuuua

SEQ ID NO: 1860093 - RNA, 19 nt, Artificial Sequence
  Description of Artificial Sequence: Synthetic oligonucleotide
gugcauaugcugggagacu

SEQ ID NO: 1860094 - RNA, 19 nt, Artificial Sequence
  Description of Artificial Sequence: Synthetic oligonucleotide
cgcuaagucagccuuccua

SEQ ID NO: 1860095 - RNA, 19 nt, Artificial Sequence
  Description of Artificial Sequence: Synthetic oligonucleotide
cuggauggcuggagcccaa

SEQ ID NO: 1860096 - RNA, 19 nt, Artificial Sequence
  Description of Artificial Sequence: Synthetic oligonucleotide
gcugggagacuggauguua

SEQ ID NO: 1860097 - RNA, 19 nt, Artificial Sequence
  Description of Artificial Sequence: Synthetic oligonucleotide
cucaucccauugucuacuu

SEQ ID NO: 1860098 - RNA, 19 nt, Artificial Sequence
  Description of Artificial Sequence: Synthetic oligonucleotide
cagcuuuaagccgguacuu

SEQ ID NO: 1860099 - RNA, 19 nt, Artificial Sequence
  Description of Artificial Sequence: Synthetic oligonucleotide
gcuaaucugccagcacaua

SEQ ID NO: 1860100 - RNA, 19 nt, Artificial Sequence
  Description of Artificial Sequence: Synthetic oligonucleotide
ggccgcuaagucagccuuc

SEQ ID NO: 1860101 - RNA, 19 nt, Artificial Sequence
  Description of Artificial Sequence: Synthetic oligonucleotide
caguggcuugaaggagaca

SEQ ID NO: 1860102 - RNA, 19 nt, Artificial Sequence
  Description of Artificial Sequence: Synthetic oligonucleotide
gucaucggacugacacccu

SEQ ID NO: 1860103 - RNA, 19 nt, Artificial Sequence
  Description of Artificial Sequence: Synthetic oligonucleotide
gccuugucuguaaggacuu

SEQ ID NO: 1860104 - RNA, 19 nt, Artificial Sequence
  Description of Artificial Sequence: Synthetic oligonucleotide
gcaagagacugagguuccu

SEQ ID NO: 1860105 - RNA, 19 nt, Artificial Sequence
  Description of Artificial Sequence: Synthetic oligonucleotide
ccacaccaacacccacuca

SEQ ID NO: 1860106 - RNA, 19 nt, Artificial Sequence
  Description of Artificial Sequence: Synthetic oligonucleotide
cguaccgcagguuguggau

SEQ ID NO: 1860107 - RNA, 19 nt, Artificial Sequence
  Description of Artificial Sequence: Synthetic oligonucleotide
ccgcuaagucagccuuccu

SEQ ID NO: 1860108 - RNA, 19 nt, Artificial Sequence
  Description of Artificial Sequence: Synthetic oligonucleotide
aacucaaaauuauagauac

SEQ ID NO: 1860109 - RNA, 19 nt, Artificial Sequence
  Description of Artificial Sequence: Synthetic oligonucleotide
agauaauuaaaucuggacc

SEQ ID NO: 1860110 - RNA, 19 nt, Artificial Sequence
  Description of Artificial Sequence: Synthetic oligonucleotide
uauauaacuaaacaauugg

SEQ ID NO: 1860111 - RNA, 19 nt, Artificial Sequence
  Description of Artificial Sequence: Synthetic oligonucleotide
ugugauuaaacaaagacug

SEQ ID NO: 1860112 - RNA, 19 nt, Artificial Sequence
  Description of Artificial Sequence: Synthetic oligonucleotide
auaugauuaagauagauug

SEQ ID NO: 1860113 - RNA, 19 nt, Artificial Sequence
  Description of Artificial Sequence: Synthetic oligonucleotide
gauaauuaaaucuggaccc

SEQ ID NO: 1860114 - RNA, 19 nt, Artificial Sequence
  Description of Artificial Sequence: Synthetic oligonucleotide
agaacaugguacuagagcc

SEQ ID NO: 1860115 - RNA, 19 nt, Artificial Sequence
  Description of Artificial Sequence: Synthetic oligonucleotide
uucuauauuaacuugaacu

SEQ ID NO: 1860116 - RNA, 19 nt, Artificial Sequence
  Description of Artificial Sequence: Synthetic oligonucleotide
aagaacaugguacuagagc

SEQ ID NO: 1860117 - RNA, 19 nt, Artificial Sequence
  Description of Artificial Sequence: Synthetic oligonucleotide
aauugguaaacauauaagu

SEQ ID NO: 1860118 - RNA, 19 nt, Artificial Sequence
  Description of Artificial Sequence: Synthetic oligonucleotide
uuuaauuagaaauuuggca

SEQ ID NO: 1860119 - RNA, 19 nt, Artificial Sequence
  Description of Artificial Sequence: Synthetic oligonucleotide
uuuuauuaacgacuaaccg

SEQ ID NO: 1860120 - RNA, 19 nt, Artificial Sequence
  Description of Artificial Sequence: Synthetic oligonucleotide
uaauuucugucuuagaggg

SEQ ID NO: 1860121 - RNA, 19 nt, Artificial Sequence
  Description of Artificial Sequence: Synthetic oligonucleotide
uuaauuagaaauuuggcaa

SEQ ID NO: 1860122 - RNA, 19 nt, Artificial Sequence
  Description of Artificial Sequence: Synthetic oligonucleotide
cacaguacaacuaaggucc

SEQ ID NO: 1860123 - RNA, 19 nt, Artificial Sequence
  Description of Artificial Sequence: Synthetic oligonucleotide
aagacuagaggccaaacag

SEQ ID NO: 1860124 - RNA, 19 nt, Artificial Sequence
  Description of Artificial Sequence: Synthetic oligonucleotide
uuaauuucugucuuagagg

SEQ ID NO: 1860125 - RNA, 19 nt, Artificial Sequence
  Description of Artificial Sequence: Synthetic oligonucleotide
aaauuauagauacggcuuc

SEQ ID NO: 1860126 - RNA, 19 nt, Artificial Sequence
  Description of Artificial Sequence: Synthetic oligonucleotide
uguuauauuugacaguaag

SEQ ID NO: 1860127 - RNA, 19 nt, Artificial Sequence
  Description of Artificial Sequence: Synthetic oligonucleotide
aagauagauugcuaagagc

SEQ ID NO: 1860128 - RNA, 19 nt, Artificial Sequence
  Description of Artificial Sequence: Synthetic oligonucleotide
aauauauauagccuccuca

SEQ ID NO: 1860129 - RNA, 19 nt, Artificial Sequence
  Description of Artificial Sequence: Synthetic oligonucleotide
uuuauuaacgacuaaccgu

SEQ ID NO: 1860130 - RNA, 19 nt, Artificial Sequence
  Description of Artificial Sequence: Synthetic oligonucleotide
acaacuaagguccaugagg

SEQ ID NO: 1860131 - RNA, 19 nt, Artificial Sequence
  Description of Artificial Sequence: Synthetic oligonucleotide
ucuacagucagguuaauca

SEQ ID NO: 1860132 - RNA, 19 nt, Artificial Sequence
  Description of Artificial Sequence: Synthetic oligonucleotide
cucaaaauuauagauacgg

SEQ ID NO: 1860133 - RNA, 19 nt, Artificial Sequence
  Description of Artificial Sequence: Synthetic oligonucleotide
aauuauuccuucucgguug

SEQ ID NO: 1860134 - RNA, 19 nt, Artificial Sequence
  Description of Artificial Sequence: Synthetic oligonucleotide
auuuuauuaacgacuaacc

SEQ ID NO: 1860135 - RNA, 19 nt, Artificial Sequence
  Description of Artificial Sequence: Synthetic oligonucleotide
uuauuaacgacuaaccguc

SEQ ID NO: 1860136 - RNA, 19 nt, Artificial Sequence
  Description of Artificial Sequence: Synthetic oligonucleotide
uggaaauuauuccuucucg

SEQ ID NO: 1860137 - RNA, 19 nt, Artificial Sequence
  Description of Artificial Sequence: Synthetic oligonucleotide
agagaauacaacaaguaac

SEQ ID NO: 1860138 - RNA, 19 nt, Artificial Sequence
  Description of Artificial Sequence: Synthetic oligonucleotide
uuauauuugacaguaagaa

SEQ ID NO: 1860139 - RNA, 19 nt, Artificial Sequence
  Description of Artificial Sequence: Synthetic oligonucleotide
uguaucuacagucagguua

SEQ ID NO: 1860140 - RNA, 19 nt, Artificial Sequence
  Description of Artificial Sequence: Synthetic oligonucleotide
ugugccacuaccaucagug

SEQ ID NO: 1860141 - RNA, 19 nt, Artificial Sequence
  Description of Artificial Sequence: Synthetic oligonucleotide
uguguucugaccuuaagca

SEQ ID NO: 1860142 - RNA, 19 nt, Artificial Sequence
  Description of Artificial Sequence: Synthetic oligonucleotide
acuaagagaauacaacaag

SEQ ID NO: 1860143 - RNA, 19 nt, Artificial Sequence
  Description of Artificial Sequence: Synthetic oligonucleotide
ugaaacuccauaauuaaau

SEQ ID NO: 1860144 - RNA, 19 nt, Artificial Sequence
  Description of Artificial Sequence: Synthetic oligonucleotide
ugguauaacacaguaaugc

SEQ ID NO: 1860145 - RNA, 19 nt, Artificial Sequence
  Description of Artificial Sequence: Synthetic oligonucleotide
aaugaagaagcugacagca

SEQ ID NO: 1860146 - RNA, 19 nt, Artificial Sequence
  Description of Artificial Sequence: Synthetic oligonucleotide
gauuuagagauucggaaug

SEQ ID NO: 1860147 - RNA, 19 nt, Artificial Sequence
  Description of Artificial Sequence: Synthetic oligonucleotide
aagauuuagagauucggaa

SEQ ID NO: 1860148 - RNA, 19 nt, Artificial Sequence
  Description of Artificial Sequence: Synthetic oligonucleotide
ucuauauuaacuugaacua

SEQ ID NO: 1860149 - RNA, 19 nt, Artificial Sequence
  Description of Artificial Sequence: Synthetic oligonucleotide
uccauacucaguuaaaugu

SEQ ID NO: 1860150 - RNA, 19 nt, Artificial Sequence
  Description of Artificial Sequence: Synthetic oligonucleotide
uguuacuaauuucacaacu

SEQ ID NO: 1860151 - RNA, 19 nt, Artificial Sequence
  Description of Artificial Sequence: Synthetic oligonucleotide
auuaagauagauugcuaag

SEQ ID NO: 1860152 - RNA, 19 nt, Artificial Sequence
  Description of Artificial Sequence: Synthetic oligonucleotide
ucaaaauuauagauacggc

SEQ ID NO: 1860153 - RNA, 19 nt, Artificial Sequence
  Description of Artificial Sequence: Synthetic oligonucleotide
agucagguuaaucagacca

SEQ ID NO: 1860154 - RNA, 19 nt, Artificial Sequence
  Description of Artificial Sequence: Synthetic oligonucleotide
uaugauuaagauagauugc

SEQ ID NO: 1860155 - RNA, 19 nt, Artificial Sequence
  Description of Artificial Sequence: Synthetic oligonucleotide
uaaacaauugguaaacaua

SEQ ID NO: 1860156 - RNA, 19 nt, Artificial Sequence
  Description of Artificial Sequence: Synthetic oligonucleotide
agauagauugcuaagagca

SEQ ID NO: 1860157 - RNA, 19 nt, Artificial Sequence
  Description of Artificial Sequence: Synthetic oligonucleotide
aaacaauugguaaacauau

SEQ ID NO: 1860158 - RNA, 19 nt, Artificial Sequence
  Description of Artificial Sequence: Synthetic oligonucleotide
auagauacggcuucuauau

SEQ ID NO: 1860159 - RNA, 19 nt, Artificial Sequence
  Description of Artificial Sequence: Synthetic oligonucleotide
auuaacgacuaaccguccc

SEQ ID NO: 1860160 - RNA, 19 nt, Artificial Sequence
  Description of Artificial Sequence: Synthetic oligonucleotide
ucugauauguguucugacc

SEQ ID NO: 1860161 - RNA, 19 nt, Artificial Sequence
  Description of Artificial Sequence: Synthetic oligonucleotide
uccauaauuaaauaugauu

SEQ ID NO: 1860162 - RNA, 19 nt, Artificial Sequence
  Description of Artificial Sequence: Synthetic oligonucleotide
uguauaaguuuccaagaac

SEQ ID NO: 1860163 - RNA, 19 nt, Artificial Sequence
  Description of Artificial Sequence: Synthetic oligonucleotide
aagcuuuaugguuuuaccu

SEQ ID NO: 1860164 - RNA, 19 nt, Artificial Sequence
  Description of Artificial Sequence: Synthetic oligonucleotide
aguggaguaaagucaagag

SEQ ID NO: 1860165 - RNA, 19 nt, Artificial Sequence
  Description of Artificial Sequence: Synthetic oligonucleotide
caacuaagguccaugaggc

SEQ ID NO: 1860166 - RNA, 19 nt, Artificial Sequence
  Description of Artificial Sequence: Synthetic oligonucleotide
aaaauuauagauacggcuu

SEQ ID NO: 1860167 - RNA, 19 nt, Artificial Sequence
  Description of Artificial Sequence: Synthetic oligonucleotide
uguguaauguaucuacagu

SEQ ID NO: 1860168 - RNA, 19 nt, Artificial Sequence
  Description of Artificial Sequence: Synthetic oligonucleotide
acagaauacagugauuuuc

SEQ ID NO: 1860169 - RNA, 19 nt, Artificial Sequence
  Description of Artificial Sequence: Synthetic oligonucleotide
uuaagauagauugcuaaga

SEQ ID NO: 1860170 - RNA, 19 nt, Artificial Sequence
  Description of Artificial Sequence: Synthetic oligonucleotide
uauauuaacuugaacuaua

SEQ ID NO: 1860171 - RNA, 19 nt, Artificial Sequence
  Description of Artificial Sequence: Synthetic oligonucleotide
ugaccuuaagcacauacaa

SEQ ID NO: 1860172 - RNA, 19 nt, Artificial Sequence
  Description of Artificial Sequence: Synthetic oligonucleotide
uguguauugucacguaccc

SEQ ID NO: 1860173 - RNA, 19 nt, Artificial Sequence
  Description of Artificial Sequence: Synthetic oligonucleotide
uuucuaagauaauuaaauc

SEQ ID NO: 1860174 - RNA, 19 nt, Artificial Sequence
  Description of Artificial Sequence: Synthetic oligonucleotide
cauauaaguacacaguaca

SEQ ID NO: 1860175 - RNA, 19 nt, Artificial Sequence
  Description of Artificial Sequence: Synthetic oligonucleotide
agaaauuuggcaaaacuca

SEQ ID NO: 1860176 - RNA, 19 nt, Artificial Sequence
  Description of Artificial Sequence: Synthetic oligonucleotide
uaacuuuuauuccagucuc

SEQ ID NO: 1860177 - RNA, 19 nt, Artificial Sequence
  Description of Artificial Sequence: Synthetic oligonucleotide
ugucacguaccccaaagug

SEQ ID NO: 1860178 - RNA, 19 nt, Artificial Sequence
  Description of Artificial Sequence: Synthetic oligonucleotide
aaauuauuccuucucgguu

SEQ ID NO: 1860179 - RNA, 19 nt, Artificial Sequence
  Description of Artificial Sequence: Synthetic oligonucleotide
aaagaagggauguuacuaa

SEQ ID NO: 1860180 - RNA, 19 nt, Artificial Sequence
  Description of Artificial Sequence: Synthetic oligonucleotide
uagccuauggauuuuauua

SEQ ID NO: 1860181 - RNA, 19 nt, Artificial Sequence
  Description of Artificial Sequence: Synthetic oligonucleotide
uuggcauuauaaaccaacc

SEQ ID NO: 1860182 - RNA, 19 nt, Artificial Sequence
  Description of Artificial Sequence: Synthetic oligonucleotide
auuaaacaaagacugggau

SEQ ID NO: 1860183 - RNA, 19 nt, Artificial Sequence
  Description of Artificial Sequence: Synthetic oligonucleotide
acuaccaucagugccguac

SEQ ID NO: 1860184 - RNA, 19 nt, Artificial Sequence
  Description of Artificial Sequence: Synthetic oligonucleotide
aaauguuccugauagccua

SEQ ID NO: 1860185 - RNA, 19 nt, Artificial Sequence
  Description of Artificial Sequence: Synthetic oligonucleotide
uaaaucuggacccuacuau

SEQ ID NO: 1860186 - RNA, 19 nt, Artificial Sequence
  Description of Artificial Sequence: Synthetic oligonucleotide
uauaaguacacaguacaac

SEQ ID NO: 1860187 - RNA, 19 nt, Artificial Sequence
  Description of Artificial Sequence: Synthetic oligonucleotide
aaauaugauuaagauagau

SEQ ID NO: 1860188 - RNA, 19 nt, Artificial Sequence
  Description of Artificial Sequence: Synthetic oligonucleotide
uauauuugacaguaagaaa

SEQ ID NO: 1860189 - RNA, 19 nt, Artificial Sequence
  Description of Artificial Sequence: Synthetic oligonucleotide
uggacaaaccauugcagcc

SEQ ID NO: 1860190 - RNA, 19 nt, Artificial Sequence
  Description of Artificial Sequence: Synthetic oligonucleotide
uacggcuucuauauuaacu

SEQ ID NO: 1860191 - RNA, 19 nt, Artificial Sequence
  Description of Artificial Sequence: Synthetic oligonucleotide
agccccuuuaauuagaaau

SEQ ID NO: 1860192 - RNA, 19 nt, Artificial Sequence
  Description of Artificial Sequence: Synthetic oligonucleotide
acgacuaaccgucccauuc

SEQ ID NO: 1860193 - RNA, 19 nt, Artificial Sequence
  Description of Artificial Sequence: Synthetic oligonucleotide
uuuaccuuguaagucaagu

SEQ ID NO: 1860194 - RNA, 19 nt, Artificial Sequence
  Description of Artificial Sequence: Synthetic oligonucleotide
ucacguaccccaaagugga

SEQ ID NO: 1860195 - RNA, 19 nt, Artificial Sequence
  Description of Artificial Sequence: Synthetic oligonucleotide
guaauguaucuacagucag

SEQ ID NO: 1860196 - RNA, 19 nt, Artificial Sequence
  Description of Artificial Sequence: Synthetic oligonucleotide
uggauuuuauuaacgacua

SEQ ID NO: 1860197 - RNA, 19 nt, Artificial Sequence
  Description of Artificial Sequence: Synthetic oligonucleotide
ugccguacaaaauuacccc

SEQ ID NO: 1860198 - RNA, 19 nt, Artificial Sequence
  Description of Artificial Sequence: Synthetic oligonucleotide
ucuagggaaaagugggaag

SEQ ID NO: 1860199 - RNA, 19 nt, Artificial Sequence
  Description of Artificial Sequence: Synthetic oligonucleotide
acuaugauggugaagaaaa

SEQ ID NO: 1860200 - RNA, 19 nt, Artificial Sequence
  Description of Artificial Sequence: Synthetic oligonucleotide
ggaaauuauuccuucucgg

SEQ ID NO: 1860201 - RNA, 19 nt, Artificial Sequence
  Description of Artificial Sequence: Synthetic oligonucleotide
agguuaaucagaccaguug

SEQ ID NO: 1860202 - RNA, 19 nt, Artificial Sequence
  Description of Artificial Sequence: Synthetic oligonucleotide
aaucuggacccuacuauac

SEQ ID NO: 1860203 - RNA, 19 nt, Artificial Sequence
  Description of Artificial Sequence: Synthetic oligonucleotide
guuccagugaacuccauac

SEQ ID NO: 1860204 - RNA, 19 nt, Artificial Sequence
  Description of Artificial Sequence: Synthetic oligonucleotide
auugucacguaccccaaag

SEQ ID NO: 1860205 - RNA, 19 nt, Artificial Sequence
  Description of Artificial Sequence: Synthetic oligonucleotide
auguuacuaauuucacaac

SEQ ID NO: 1860206 - RNA, 19 nt, Artificial Sequence
  Description of Artificial Sequence: Synthetic oligonucleotide
uuaacgacuaaccguccca

SEQ ID NO: 1860207 - RNA, 19 nt, Artificial Sequence
  Description of Artificial Sequence: Synthetic oligonucleotide
ucccauaaagcucaguuuu

SEQ ID NO: 1860208 - RNA, 19 nt, Artificial Sequence
  Description of Artificial Sequence: Synthetic oligonucleotide
agagcuaguugguauaaca

SEQ ID NO: 1860209 - RNA, 19 nt, Artificial Sequence
  Description of Artificial Sequence: Synthetic oligonucleotide
acuccauaauccauggccc

SEQ ID NO: 1860210 - RNA, 19 nt, Artificial Sequence
  Description of Artificial Sequence: Synthetic oligonucleotide
aaucuucuagggaaaagug

SEQ ID NO: 1860211 - RNA, 19 nt, Artificial Sequence
  Description of Artificial Sequence: Synthetic oligonucleotide
ugucccauaaagcucaguu

SEQ ID NO: 1860212 - RNA, 19 nt, Artificial Sequence
  Description of Artificial Sequence: Synthetic oligonucleotide
acauauaaguacacaguac

SEQ ID NO: 1860213 - RNA, 19 nt, Artificial Sequence
  Description of Artificial Sequence: Synthetic oligonucleotide
uauauagccuccucacuca

SEQ ID NO: 1860214 - RNA, 19 nt, Artificial Sequence
  Description of Artificial Sequence: Synthetic oligonucleotide
agauuuagagauucggaau

SEQ ID NO: 1860215 - RNA, 19 nt, Artificial Sequence
  Description of Artificial Sequence: Synthetic oligonucleotide
auuauuccuucucgguugg

SEQ ID NO: 1860216 - RNA, 19 nt, Artificial Sequence
  Description of Artificial Sequence: Synthetic oligonucleotide
cauuauaaaccaacccuug

SEQ ID NO: 1860217 - RNA, 19 nt, Artificial Sequence
  Description of Artificial Sequence: Synthetic oligonucleotide
auacucaguuaaauguucc

SEQ ID NO: 1860218 - RNA, 19 nt, Artificial Sequence
  Description of Artificial Sequence: Synthetic oligonucleotide
uacaacuaagguccaugag

SEQ ID NO: 1860219 - RNA, 19 nt, Artificial Sequence
  Description of Artificial Sequence: Synthetic oligonucleotide
uaaaccaacccuugugcca

SEQ ID NO: 1860220 - RNA, 19 nt, Artificial Sequence
  Description of Artificial Sequence: Synthetic oligonucleotide
caaaauuauagauacggcu

SEQ ID NO: 1860221 - RNA, 19 nt, Artificial Sequence
  Description of Artificial Sequence: Synthetic oligonucleotide
aaaucuggacccuacuaua

SEQ ID NO: 1860222 - RNA, 19 nt, Artificial Sequence
  Description of Artificial Sequence: Synthetic oligonucleotide
uacagugauuuucuaagau

SEQ ID NO: 1860223 - RNA, 19 nt, Artificial Sequence
  Description of Artificial Sequence: Synthetic oligonucleotide
cucgguuggcauuauaaac

SEQ ID NO: 1860224 - RNA, 19 nt, Artificial Sequence
  Description of Artificial Sequence: Synthetic oligonucleotide
aagacuuauuuaaaggaaa

SEQ ID NO: 1860225 - RNA, 19 nt, Artificial Sequence
  Description of Artificial Sequence: Synthetic oligonucleotide
uauguguucugaccuuaag

SEQ ID NO: 1860226 - RNA, 19 nt, Artificial Sequence
  Description of Artificial Sequence: Synthetic oligonucleotide
acccaagacuuauuuaaag

SEQ ID NO: 1860227 - RNA, 19 nt, Artificial Sequence
  Description of Artificial Sequence: Synthetic oligonucleotide
uuccugauagccuauggau

SEQ ID NO: 1860228 - RNA, 19 nt, Artificial Sequence
  Description of Artificial Sequence: Synthetic oligonucleotide
auauaacuaaacaauuggu

SEQ ID NO: 1860229 - RNA, 19 nt, Artificial Sequence
  Description of Artificial Sequence: Synthetic oligonucleotide
uacagucagguuaaucaga

SEQ ID NO: 1860230 - RNA, 19 nt, Artificial Sequence
  Description of Artificial Sequence: Synthetic oligonucleotide
uuagagauucggaauguuu

SEQ ID NO: 1860231 - RNA, 19 nt, Artificial Sequence
  Description of Artificial Sequence: Synthetic oligonucleotide
auuccagucucugauaugu

SEQ ID NO: 1860232 - RNA, 19 nt, Artificial Sequence
  Description of Artificial Sequence: Synthetic oligonucleotide
cuauggauuuuauuaacga

SEQ ID NO: 1860233 - RNA, 19 nt, Artificial Sequence
  Description of Artificial Sequence: Synthetic oligonucleotide
aaucagaccaguuguuaua

SEQ ID NO: 1860234 - RNA, 19 nt, Artificial Sequence
  Description of Artificial Sequence: Synthetic oligonucleotide
acccuguuugcacaccagc

SEQ ID NO: 1860235 - RNA, 19 nt, Artificial Sequence
  Description of Artificial Sequence: Synthetic oligonucleotide
aucuucuagggaaaagugg

SEQ ID NO: 1860236 - RNA, 19 nt, Artificial Sequence
  Description of Artificial Sequence: Synthetic oligonucleotide
guuggcauuauaaaccaac

SEQ ID NO: 1860237 - RNA, 19 nt, Artificial Sequence
  Description of Artificial Sequence: Synthetic oligonucleotide
aauuauagauacggcuucu

SEQ ID NO: 1860238 - RNA, 19 nt, Artificial Sequence
  Description of Artificial Sequence: Synthetic oligonucleotide
cuaagguccaugaggcacc

SEQ ID NO: 1860239 - RNA, 19 nt, Artificial Sequence
  Description of Artificial Sequence: Synthetic oligonucleotide
ucuaaccucuggacaaacc

SEQ ID NO: 1860240 - RNA, 19 nt, Artificial Sequence
  Description of Artificial Sequence: Synthetic oligonucleotide
aucagugccguacaaaauu

SEQ ID NO: 1860241 - RNA, 19 nt, Artificial Sequence
  Description of Artificial Sequence: Synthetic oligonucleotide
gaagacuagaggccaaaca

SEQ ID NO: 1860242 - RNA, 19 nt, Artificial Sequence
  Description of Artificial Sequence: Synthetic oligonucleotide
aagaagggauguuacuaau

SEQ ID NO: 1860243 - RNA, 19 nt, Artificial Sequence
  Description of Artificial Sequence: Synthetic oligonucleotide
ggccaaacagaauacagug

SEQ ID NO: 1860244 - RNA, 19 nt, Artificial Sequence
  Description of Artificial Sequence: Synthetic oligonucleotide
agcuuuaugguuuuaccuu

SEQ ID NO: 1860245 - RNA, 19 nt, Artificial Sequence
  Description of Artificial Sequence: Synthetic oligonucleotide
gucacguaccccaaagugg

SEQ ID NO: 1860246 - RNA, 19 nt, Artificial Sequence
  Description of Artificial Sequence: Synthetic oligonucleotide
agauacggcuucuauauua

SEQ ID NO: 1860247 - RNA, 19 nt, Artificial Sequence
  Description of Artificial Sequence: Synthetic oligonucleotide
ccuauggauuuuauuaacg

SEQ ID NO: 1860248 - RNA, 19 nt, Artificial Sequence
  Description of Artificial Sequence: Synthetic oligonucleotide
caagauuuagagauucgga

SEQ ID NO: 1860249 - RNA, 19 nt, Artificial Sequence
  Description of Artificial Sequence: Synthetic oligonucleotide
aguggaaauuauuccuucu

SEQ ID NO: 1860250 - RNA, 19 nt, Artificial Sequence
  Description of Artificial Sequence: Synthetic oligonucleotide
auagauugcuaagagcaca

SEQ ID NO: 1860251 - RNA, 19 nt, Artificial Sequence
  Description of Artificial Sequence: Synthetic oligonucleotide
uauuaacgacuaaccgucc

SEQ ID NO: 1860252 - RNA, 19 nt, Artificial Sequence
  Description of Artificial Sequence: Synthetic oligonucleotide
gaaauuauuccuucucggu

SEQ ID NO: 1860253 - RNA, 19 nt, Artificial Sequence
  Description of Artificial Sequence: Synthetic oligonucleotide
ugauuaagauagauugcua

SEQ ID NO: 1860254 - RNA, 19 nt, Artificial Sequence
  Description of Artificial Sequence: Synthetic oligonucleotide
cuccauacucaguuaaaug

SEQ ID NO: 1860255 - RNA, 19 nt, Artificial Sequence
  Description of Artificial Sequence: Synthetic oligonucleotide
cauguguauugucacguac

SEQ ID NO: 1860256 - RNA, 19 nt, Artificial Sequence
  Description of Artificial Sequence: Synthetic oligonucleotide
uacuagagccccuuuaauu

SEQ ID NO: 1860257 - RNA, 19 nt, Artificial Sequence
  Description of Artificial Sequence: Synthetic oligonucleotide
cccaagacuuauuuaaagg

SEQ ID NO: 1860258 - RNA, 19 nt, Artificial Sequence
  Description of Artificial Sequence: Synthetic oligonucleotide
cuagagccccuuuaauuag

SEQ ID NO: 1860259 - RNA, 19 nt, Artificial Sequence
  Description of Artificial Sequence: Synthetic oligonucleotide
aaaguggaaauuauuccuu

SEQ ID NO: 1860260 - RNA, 19 nt, Artificial Sequence
  Description of Artificial Sequence: Synthetic oligonucleotide
aacuaugauggugaagaaa

SEQ ID NO: 1860261 - RNA, 19 nt, Artificial Sequence
  Description of Artificial Sequence: Synthetic oligonucleotide
aagagcuaguugguauaac

SEQ ID NO: 1860262 - RNA, 19 nt, Artificial Sequence
  Description of Artificial Sequence: Synthetic oligonucleotide
aaccgucccauuccuaaga

SEQ ID NO: 1860263 - RNA, 19 nt, Artificial Sequence
  Description of Artificial Sequence: Synthetic oligonucleotide
cugcucaaauauauauagc

SEQ ID NO: 1860264 - RNA, 19 nt, Artificial Sequence
  Description of Artificial Sequence: Synthetic oligonucleotide
acucaguuaaauguuccug

SEQ ID NO: 1860265 - RNA, 19 nt, Artificial Sequence
  Description of Artificial Sequence: Synthetic oligonucleotide
uacucaguuaaauguuccu

SEQ ID NO: 1860266 - RNA, 19 nt, Artificial Sequence
  Description of Artificial Sequence: Synthetic oligonucleotide
auacagugauuuucuaaga

SEQ ID NO: 1860267 - RNA, 19 nt, Artificial Sequence
  Description of Artificial Sequence: Synthetic oligonucleotide
uuacucuccuccacuaaaa

SEQ ID NO: 1860268 - RNA, 19 nt, Artificial Sequence
  Description of Artificial Sequence: Synthetic oligonucleotide
uuaccuuguaagucaagua

SEQ ID NO: 1860269 - RNA, 19 nt, Artificial Sequence
  Description of Artificial Sequence: Synthetic oligonucleotide
uaagcacauacaacccugu

SEQ ID NO: 1860270 - RNA, 19 nt, Artificial Sequence
  Description of Artificial Sequence: Synthetic oligonucleotide
ucagugccguacaaaauua

SEQ ID NO: 1860271 - RNA, 19 nt, Artificial Sequence
  Description of Artificial Sequence: Synthetic oligonucleotide
agaagcugacagcacuaag

SEQ ID NO: 1860272 - RNA, 19 nt, Artificial Sequence
  Description of Artificial Sequence: Synthetic oligonucleotide
auacggcuucuauauuaac

SEQ ID NO: 1860273 - RNA, 19 nt, Artificial Sequence
  Description of Artificial Sequence: Synthetic oligonucleotide
agccaccuacuccauaauc

SEQ ID NO: 1860274 - RNA, 19 nt, Artificial Sequence
  Description of Artificial Sequence: Synthetic oligonucleotide
auaauuaaaucuggacccu

SEQ ID NO: 1860275 - RNA, 19 nt, Artificial Sequence
  Description of Artificial Sequence: Synthetic oligonucleotide
ucucgguuggcauuauaaa

SEQ ID NO: 1860276 - RNA, 19 nt, Artificial Sequence
  Description of Artificial Sequence: Synthetic oligonucleotide
cugugauuaaacaaagacu

SEQ ID NO: 1860277 - RNA, 19 nt, Artificial Sequence
  Description of Artificial Sequence: Synthetic oligonucleotide
ugguuuuaccuuguaaguc

SEQ ID NO: 1860278 - RNA, 19 nt, Artificial Sequence
  Description of Artificial Sequence: Synthetic oligonucleotide
uauuccuucucgguuggca

SEQ ID NO: 1860279 - RNA, 19 nt, Artificial Sequence
  Description of Artificial Sequence: Synthetic oligonucleotide
agccuauggauuuuauuaa

SEQ ID NO: 1860280 - RNA, 19 nt, Artificial Sequence
  Description of Artificial Sequence: Synthetic oligonucleotide
gaacaugguacuagagccc

SEQ ID NO: 1860281 - RNA, 19 nt, Artificial Sequence
  Description of Artificial Sequence: Synthetic oligonucleotide
ggcauuauaaaccaacccu

SEQ ID NO: 1860282 - RNA, 19 nt, Artificial Sequence
  Description of Artificial Sequence: Synthetic oligonucleotide
gagcuaguugguauaacac

SEQ ID NO: 1860283 - RNA, 19 nt, Artificial Sequence
  Description of Artificial Sequence: Synthetic oligonucleotide
agaagacuagaggccaaac

SEQ ID NO: 1860284 - RNA, 19 nt, Artificial Sequence
  Description of Artificial Sequence: Synthetic oligonucleotide
uucuagggaaaagugggaa

SEQ ID NO: 1860285 - RNA, 19 nt, Artificial Sequence
  Description of Artificial Sequence: Synthetic oligonucleotide
ugaguggaguaaagucaag

SEQ ID NO: 1860286 - RNA, 19 nt, Artificial Sequence
  Description of Artificial Sequence: Synthetic oligonucleotide
uuccagugaacuccauacu

SEQ ID NO: 1860287 - RNA, 19 nt, Artificial Sequence
  Description of Artificial Sequence: Synthetic oligonucleotide
auuuagagauucggaaugu

SEQ ID NO: 1860288 - RNA, 19 nt, Artificial Sequence
  Description of Artificial Sequence: Synthetic oligonucleotide
cacuaagagaauacaacaa

SEQ ID NO: 1860289 - RNA, 19 nt, Artificial Sequence
  Description of Artificial Sequence: Synthetic oligonucleotide
uggacccuacuauacauuu

SEQ ID NO: 1860290 - RNA, 19 nt, Artificial Sequence
  Description of Artificial Sequence: Synthetic oligonucleotide
aguuuuggcaaaucuucua

SEQ ID NO: 1860291 - RNA, 19 nt, Artificial Sequence
  Description of Artificial Sequence: Synthetic oligonucleotide
guacaacuaagguccauga

SEQ ID NO: 1860292 - RNA, 19 nt, Artificial Sequence
  Description of Artificial Sequence: Synthetic oligonucleotide
guaagucaaguacauauau

SEQ ID NO: 1860293 - RNA, 19 nt, Artificial Sequence
  Description of Artificial Sequence: Synthetic oligonucleotide
guguucugaccuuaagcac

SEQ ID NO: 1860294 - RNA, 19 nt, Artificial Sequence
  Description of Artificial Sequence: Synthetic oligonucleotide
acauacaacccuguuugca

SEQ ID NO: 1860295 - RNA, 19 nt, Artificial Sequence
  Description of Artificial Sequence: Synthetic oligonucleotide
cucugauauguguucugac

SEQ ID NO: 1860296 - RNA, 19 nt, Artificial Sequence
  Description of Artificial Sequence: Synthetic oligonucleotide
gaguggaguaaagucaaga

SEQ ID NO: 1860297 - RNA, 19 nt, Artificial Sequence
  Description of Artificial Sequence: Synthetic oligonucleotide
gacuagaggccaaacagaa

SEQ ID NO: 1860298 - RNA, 19 nt, Artificial Sequence
  Description of Artificial Sequence: Synthetic oligonucleotide
agacuuauuuaaaggaaaa

SEQ ID NO: 1860299 - RNA, 19 nt, Artificial Sequence
  Description of Artificial Sequence: Synthetic oligonucleotide
gguuaaucagaccaguugu

SEQ ID NO: 1860300 - RNA, 19 nt, Artificial Sequence
  Description of Artificial Sequence: Synthetic oligonucleotide
acagcacuaagagaauaca

SEQ ID NO: 1860301 - RNA, 19 nt, Artificial Sequence
  Description of Artificial Sequence: Synthetic oligonucleotide
aagucaagagcuaguuggu

SEQ ID NO: 1860302 - RNA, 19 nt, Artificial Sequence
  Description of Artificial Sequence: Synthetic oligonucleotide
cugaccuuaagcacauaca

SEQ ID NO: 1860303 - RNA, 19 nt, Artificial Sequence
  Description of Artificial Sequence: Synthetic oligonucleotide
uuguuauauuugacaguaa

SEQ ID NO: 1860304 - RNA, 19 nt, Artificial Sequence
  Description of Artificial Sequence: Synthetic oligonucleotide
auaauccauggccccuguc

SEQ ID NO: 1860305 - RNA, 19 nt, Artificial Sequence
  Description of Artificial Sequence: Synthetic oligonucleotide
auauaaguacacaguacaa

SEQ ID NO: 1860306 - RNA, 19 nt, Artificial Sequence
  Description of Artificial Sequence: Synthetic oligonucleotide
aucuggacccuacuauaca

SEQ ID NO: 1860307 - RNA, 19 nt, Artificial Sequence
  Description of Artificial Sequence: Synthetic oligonucleotide
auuccuucucgguuggcau

SEQ ID NO: 1860308 - RNA, 19 nt, Artificial Sequence
  Description of Artificial Sequence: Synthetic oligonucleotide
cuaaccgucccauuccuaa

SEQ ID NO: 1860309 - RNA, 19 nt, Artificial Sequence
  Description of Artificial Sequence: Synthetic oligonucleotide
cugauauguguucugaccu

SEQ ID NO: 1860310 - RNA, 19 nt, Artificial Sequence
  Description of Artificial Sequence: Synthetic oligonucleotide
ugaacuccauacucaguua

SEQ ID NO: 1860311 - RNA, 19 nt, Artificial Sequence
  Description of Artificial Sequence: Synthetic oligonucleotide
ugauauguguucugaccuu

SEQ ID NO: 1860312 - RNA, 19 nt, Artificial Sequence
  Description of Artificial Sequence: Synthetic oligonucleotide
accuacuccauaauccaug

SEQ ID NO: 1860313 - RNA, 19 nt, Artificial Sequence
  Description of Artificial Sequence: Synthetic oligonucleotide
ucccauuccuaagaagacu

SEQ ID NO: 1860314 - RNA, 19 nt, Artificial Sequence
  Description of Artificial Sequence: Synthetic oligonucleotide
gccacuaccaucagugccg

SEQ ID NO: 1860315 - RNA, 19 nt, Artificial Sequence
  Description of Artificial Sequence: Synthetic oligonucleotide
aaaccauugcagccccaaa

SEQ ID NO: 1860316 - RNA, 19 nt, Artificial Sequence
  Description of Artificial Sequence: Synthetic oligonucleotide
cagccaaaauggcaauagc

SEQ ID NO: 1860317 - RNA, 19 nt, Artificial Sequence
  Description of Artificial Sequence: Synthetic oligonucleotide
acucuccuccacuaaaaua

SEQ ID NO: 1860318 - RNA, 19 nt, Artificial Sequence
  Description of Artificial Sequence: Synthetic oligonucleotide
agcaggcaacuguauaagu

SEQ ID NO: 1860319 - RNA, 19 nt, Artificial Sequence
  Description of Artificial Sequence: Synthetic oligonucleotide
gauacggcuucuauauuaa

SEQ ID NO: 1860320 - RNA, 19 nt, Artificial Sequence
  Description of Artificial Sequence: Synthetic oligonucleotide
acaacccuguuugcacacc

SEQ ID NO: 1860321 - RNA, 19 nt, Artificial Sequence
  Description of Artificial Sequence: Synthetic oligonucleotide
cacauacaacccuguuugc

SEQ ID NO: 1860322 - RNA, 19 nt, Artificial Sequence
  Description of Artificial Sequence: Synthetic oligonucleotide
agacuagaggccaaacaga

SEQ ID NO: 1860323 - RNA, 19 nt, Artificial Sequence
  Description of Artificial Sequence: Synthetic oligonucleotide
agaauacagugauuuucua

SEQ ID NO: 1860324 - RNA, 19 nt, Artificial Sequence
  Description of Artificial Sequence: Synthetic oligonucleotide
cuugaacuauaugaagaga

SEQ ID NO: 1860325 - RNA, 19 nt, Artificial Sequence
  Description of Artificial Sequence: Synthetic oligonucleotide
gcugguuucuguucagggc

SEQ ID NO: 1860326 - RNA, 19 nt, Artificial Sequence
  Description of Artificial Sequence: Synthetic oligonucleotide
cuuacucuccuccacuaaa

SEQ ID NO: 1860327 - RNA, 19 nt, Artificial Sequence
  Description of Artificial Sequence: Synthetic oligonucleotide
aaguuuccaagaacauggu

SEQ ID NO: 1860328 - RNA, 19 nt, Artificial Sequence
  Description of Artificial Sequence: Synthetic oligonucleotide
gguauaacacaguaaugcu

SEQ ID NO: 1860329 - RNA, 19 nt, Artificial Sequence
  Description of Artificial Sequence: Synthetic oligonucleotide
agcugacagcacuaagaga

SEQ ID NO: 1860330 - RNA, 19 nt, Artificial Sequence
  Description of Artificial Sequence: Synthetic oligonucleotide
aggccaaacagaauacagu

SEQ ID NO: 1860331 - RNA, 19 nt, Artificial Sequence
  Description of Artificial Sequence: Synthetic oligonucleotide
uuuagagauucggaauguu

SEQ ID NO: 1860332 - RNA, 19 nt, Artificial Sequence
  Description of Artificial Sequence: Synthetic oligonucleotide
cagugccguacaaaauuac

SEQ ID NO: 1860333 - RNA, 19 nt, Artificial Sequence
  Description of Artificial Sequence: Synthetic oligonucleotide
gauauguguucugaccuua

SEQ ID NO: 1860334 - RNA, 19 nt, Artificial Sequence
  Description of Artificial Sequence: Synthetic oligonucleotide
ccauaaagcucaguuuugg

SEQ ID NO: 1860335 - RNA, 19 nt, Artificial Sequence
  Description of Artificial Sequence: Synthetic oligonucleotide
aguugguauaacacaguaa

SEQ ID NO: 1860336 - RNA, 19 nt, Artificial Sequence
  Description of Artificial Sequence: Synthetic oligonucleotide
uagaggguugaaacuccau

SEQ ID NO: 1860337 - RNA, 19 nt, Artificial Sequence
  Description of Artificial Sequence: Synthetic oligonucleotide
gguacuagagccccuuuaa

SEQ ID NO: 1860338 - RNA, 19 nt, Artificial Sequence
  Description of Artificial Sequence: Synthetic oligonucleotide
agaauacaacaaguaacuu

SEQ ID NO: 1860339 - RNA, 19 nt, Artificial Sequence
  Description of Artificial Sequence: Synthetic oligonucleotide
caccacuguguaauguauc

SEQ ID NO: 1860340 - RNA, 19 nt, Artificial Sequence
  Description of Artificial Sequence: Synthetic oligonucleotide
ucacaacuaugauggugaa

SEQ ID NO: 1860341 - RNA, 19 nt, Artificial Sequence
  Description of Artificial Sequence: Synthetic oligonucleotide
uuguagcaggcaacuguau

SEQ ID NO: 1860342 - RNA, 19 nt, Artificial Sequence
  Description of Artificial Sequence: Synthetic oligonucleotide
uaacgacuaaccgucccau

SEQ ID NO: 1860343 - RNA, 19 nt, Artificial Sequence
  Description of Artificial Sequence: Synthetic oligonucleotide
aacgacuaaccgucccauu

SEQ ID NO: 1860344 - RNA, 19 nt, Artificial Sequence
  Description of Artificial Sequence: Synthetic oligonucleotide
gccuauggauuuuauuaac

SEQ ID NO: 1860345 - RNA, 19 nt, Artificial Sequence
  Description of Artificial Sequence: Synthetic oligonucleotide
uuguuguagcaggcaacug

SEQ ID NO: 1860346 - RNA, 19 nt, Artificial Sequence
  Description of Artificial Sequence: Synthetic oligonucleotide
gucaagagcuaguugguau

SEQ ID NO: 1860347 - RNA, 19 nt, Artificial Sequence
  Description of Artificial Sequence: Synthetic oligonucleotide
auuauagauacggcuucua

SEQ ID NO: 1860348 - RNA, 19 nt, Artificial Sequence
  Description of Artificial Sequence: Synthetic oligonucleotide
guaaugcugacagccacaa

SEQ ID NO: 1860349 - RNA, 19 nt, Artificial Sequence
  Description of Artificial Sequence: Synthetic oligonucleotide
caacuguauaaguuuccaa

SEQ ID NO: 1860350 - RNA, 19 nt, Artificial Sequence
  Description of Artificial Sequence: Synthetic oligonucleotide
guuguagcaggcaacugua

SEQ ID NO: 1860351 - RNA, 19 nt, Artificial Sequence
  Description of Artificial Sequence: Synthetic oligonucleotide
uagauacggcuucuauauu

SEQ ID NO: 1860352 - RNA, 19 nt, Artificial Sequence
  Description of Artificial Sequence: Synthetic oligonucleotide
cuagggaaaagugggaagu

SEQ ID NO: 1860353 - RNA, 19 nt, Artificial Sequence
  Description of Artificial Sequence: Synthetic oligonucleotide
cuauauuaacuugaacuau

SEQ ID NO: 1860354 - RNA, 19 nt, Artificial Sequence
  Description of Artificial Sequence: Synthetic oligonucleotide
auaaugcugcucaaauaua

SEQ ID NO: 1860355 - RNA, 19 nt, Artificial Sequence
  Description of Artificial Sequence: Synthetic oligonucleotide
ucugucuuagaggguugaa

SEQ ID NO: 1860356 - RNA, 19 nt, Artificial Sequence
  Description of Artificial Sequence: Synthetic oligonucleotide
gugccacuaccaucagugc

SEQ ID NO: 1860357 - RNA, 19 nt, Artificial Sequence
  Description of Artificial Sequence: Synthetic oligonucleotide
accgucccauuccuaagaa

SEQ ID NO: 1860358 - RNA, 19 nt, Artificial Sequence
  Description of Artificial Sequence: Synthetic oligonucleotide
cuaccaucagugccguaca

SEQ ID NO: 1860359 - RNA, 19 nt, Artificial Sequence
  Description of Artificial Sequence: Synthetic oligonucleotide
guaaagucaagagcuaguu

SEQ ID NO: 1860360 - RNA, 19 nt, Artificial Sequence
  Description of Artificial Sequence: Synthetic oligonucleotide
gggauguuacuaauuucac

SEQ ID NO: 1860361 - RNA, 19 nt, Artificial Sequence
  Description of Artificial Sequence: Synthetic oligonucleotide
agucaaaagaagggauguu

SEQ ID NO: 1860362 - RNA, 19 nt, Artificial Sequence
  Description of Artificial Sequence: Synthetic oligonucleotide
cacauuuccuucacccuua

SEQ ID NO: 1860363 - RNA, 19 nt, Artificial Sequence
  Description of Artificial Sequence: Synthetic oligonucleotide
ccagugaacuccauacuca

SEQ ID NO: 1860364 - RNA, 19 nt, Artificial Sequence
  Description of Artificial Sequence: Synthetic oligonucleotide
gacuaaccgucccauuccu

SEQ ID NO: 1860365 - RNA, 19 nt, Artificial Sequence
  Description of Artificial Sequence: Synthetic oligonucleotide
aaccaacccuugugccacu

SEQ ID NO: 1860366 - RNA, 19 nt, Artificial Sequence
  Description of Artificial Sequence: Synthetic oligonucleotide
ccaagaacaugguacuaga

SEQ ID NO: 1860367 - RNA, 19 nt, Artificial Sequence
  Description of Artificial Sequence: Synthetic oligonucleotide
cccauaaagcucaguuuug

SEQ ID NO: 1860368 - RNA, 19 nt, Artificial Sequence
  Description of Artificial Sequence: Synthetic oligonucleotide
ccauuccuaagaagacuag

SEQ ID NO: 1860369 - RNA, 19 nt, Artificial Sequence
  Description of Artificial Sequence: Synthetic oligonucleotide
cugucuuagaggguugaaa

SEQ ID NO: 1860370 - RNA, 19 nt, Artificial Sequence
  Description of Artificial Sequence: Synthetic oligonucleotide
ccaaacagaauacagugau

SEQ ID NO: 1860371 - RNA, 19 nt, Artificial Sequence
  Description of Artificial Sequence: Synthetic oligonucleotide
acguaccccaaaguggaaa

SEQ ID NO: 1860372 - RNA, 19 nt, Artificial Sequence
  Description of Artificial Sequence: Synthetic oligonucleotide
agucaagagcuaguuggua

SEQ ID NO: 1860373 - RNA, 19 nt, Artificial Sequence
  Description of Artificial Sequence: Synthetic oligonucleotide
cuccauaauuaaauaugau

SEQ ID NO: 1860374 - RNA, 19 nt, Artificial Sequence
  Description of Artificial Sequence: Synthetic oligonucleotide
auauguguucugaccuuaa

SEQ ID NO: 1860375 - RNA, 19 nt, Artificial Sequence
  Description of Artificial Sequence: Synthetic oligonucleotide
guuugcacaccagccaugu

SEQ ID NO: 1860376 - RNA, 19 nt, Artificial Sequence
  Description of Artificial Sequence: Synthetic oligonucleotide
cccugucccauaaagcuca

SEQ ID NO: 1860377 - RNA, 19 nt, Artificial Sequence
  Description of Artificial Sequence: Synthetic oligonucleotide
ccaaaauggcaauagcagu

SEQ ID NO: 1860378 - RNA, 19 nt, Artificial Sequence
  Description of Artificial Sequence: Synthetic oligonucleotide
gcuucuauauuaacuugaa

SEQ ID NO: 1860379 - RNA, 19 nt, Artificial Sequence
  Description of Artificial Sequence: Synthetic oligonucleotide
acuagaggccaaacagaau

SEQ ID NO: 1860380 - RNA, 19 nt, Artificial Sequence
  Description of Artificial Sequence: Synthetic oligonucleotide
ccaccuacuccauaaucca

SEQ ID NO: 1860381 - RNA, 19 nt, Artificial Sequence
  Description of Artificial Sequence: Synthetic oligonucleotide
ccuguuugcacaccagcca

SEQ ID NO: 1860382 - RNA, 19 nt, Artificial Sequence
  Description of Artificial Sequence: Synthetic oligonucleotide
cgacuaaccgucccauucc

SEQ ID NO: 1860383 - RNA, 19 nt, Artificial Sequence
  Description of Artificial Sequence: Synthetic oligonucleotide
aggcaccacuguguaaugu

SEQ ID NO: 1860384 - RNA, 19 nt, Artificial Sequence
  Description of Artificial Sequence: Synthetic oligonucleotide
ggcaccacuguguaaugua

SEQ ID NO: 1860385 - RNA, 19 nt, Artificial Sequence
  Description of Artificial Sequence: Synthetic oligonucleotide
gucccauaaagcucaguuu

SEQ ID NO: 1860386 - RNA, 19 nt, Artificial Sequence
  Description of Artificial Sequence: Synthetic oligonucleotide
gccaaacagaauacaguga

SEQ ID NO: 1860387 - RNA, 19 nt, Artificial Sequence
  Description of Artificial Sequence: Synthetic oligonucleotide
gcauuauaaaccaacccuu

SEQ ID NO: 1860388 - RNA, 19 nt, Artificial Sequence
  Description of Artificial Sequence: Synthetic oligonucleotide
guuaaucagaccaguuguu

SEQ ID NO: 1860389 - RNA, 19 nt, Artificial Sequence
  Description of Artificial Sequence: Synthetic oligonucleotide
acccuacuauacauuuccu

SEQ ID NO: 1860390 - RNA, 19 nt, Artificial Sequence
  Description of Artificial Sequence: Synthetic oligonucleotide
guacuagagccccuuuaau

SEQ ID NO: 1860391 - RNA, 19 nt, Artificial Sequence
  Description of Artificial Sequence: Synthetic oligonucleotide
cuucacccuuacucuccuc

SEQ ID NO: 1860392 - RNA, 19 nt, Artificial Sequence
  Description of Artificial Sequence: Synthetic oligonucleotide
guucagggcugugauuaaa

SEQ ID NO: 1860393 - RNA, 19 nt, Artificial Sequence
  Description of Artificial Sequence: Synthetic oligonucleotide
ccuccacuaaaauaaugcu

SEQ ID NO: 1860394 - RNA, 19 nt, Artificial Sequence
  Description of Artificial Sequence: Synthetic oligonucleotide
caucagugccguacaaaau

SEQ ID NO: 1860395 - RNA, 19 nt, Artificial Sequence
  Description of Artificial Sequence: Synthetic oligonucleotide
ccauaauccauggccccug

SEQ ID NO: 1860396 - RNA, 19 nt, Artificial Sequence
  Description of Artificial Sequence: Synthetic oligonucleotide
gcugacagccacaacccaa

SEQ ID NO: 1860397 - RNA, 19 nt, Artificial Sequence
  Description of Artificial Sequence: Synthetic oligonucleotide
acaugguacuagagccccu

SEQ ID NO: 1860398 - RNA, 19 nt, Artificial Sequence
  Description of Artificial Sequence: Synthetic oligonucleotide
gccauguguauugucacgu

SEQ ID NO: 1860399 - RNA, 19 nt, Artificial Sequence
  Description of Artificial Sequence: Synthetic oligonucleotide
ggacccuacuauacauuuc

SEQ ID NO: 1860400 - RNA, 19 nt, Artificial Sequence
  Description of Artificial Sequence: Synthetic oligonucleotide
acuaaccgucccauuccua

SEQ ID NO: 1860401 - RNA, 19 nt, Artificial Sequence
  Description of Artificial Sequence: Synthetic oligonucleotide
auggccccugucccauaaa

SEQ ID NO: 1860402 - RNA, 19 nt, Artificial Sequence
  Description of Artificial Sequence: Synthetic oligonucleotide
caccuacuccauaauccau

SEQ ID NO: 1860403 - RNA, 19 nt, Artificial Sequence
  Description of Artificial Sequence: Synthetic oligonucleotide
cuggacccuacuauacauu

SEQ ID NO: 1860404 - RNA, 19 nt, Artificial Sequence
  Description of Artificial Sequence: Synthetic oligonucleotide
cuucucgguuggcauuaua

SEQ ID NO: 1860405 - RNA, 19 nt, Artificial Sequence
  Description of Artificial Sequence: Synthetic oligonucleotide
acucaucaccaaagcuuua

SEQ ID NO: 1860406 - RNA, 19 nt, Artificial Sequence
  Description of Artificial Sequence: Synthetic oligonucleotide
cacguaccccaaaguggaa

SEQ ID NO: 1860407 - RNA, 19 nt, Artificial Sequence
  Description of Artificial Sequence: Synthetic oligonucleotide
ccaacccuugugccacuac

SEQ ID NO: 1860408 - RNA, 19 nt, Artificial Sequence
  Description of Artificial Sequence: Synthetic oligonucleotide
caugguacuagagccccuu

SEQ ID NO: 1860409 - RNA, 19 nt, Artificial Sequence
  Description of Artificial Sequence: Synthetic oligonucleotide
cacaccagccauguguauu

SEQ ID NO: 1860410 - RNA, 19 nt, Artificial Sequence
  Description of Artificial Sequence: Synthetic oligonucleotide
accaacccuugugccacua

SEQ ID NO: 1860411 - RNA, 19 nt, Artificial Sequence
  Description of Artificial Sequence: Synthetic oligonucleotide
ccuuacucuccuccacuaa

SEQ ID NO: 1860412 - RNA, 19 nt, Artificial Sequence
  Description of Artificial Sequence: Synthetic oligonucleotide
cguaccccaaaguggaaau

SEQ ID NO: 1860413 - RNA, 19 nt, Artificial Sequence
  Description of Artificial Sequence: Synthetic oligonucleotide
caguacaacuaagguccau

SEQ ID NO: 1860414 - RNA, 19 nt, Artificial Sequence
  Description of Artificial Sequence: Synthetic oligonucleotide
cccuugaguggaguaaagu

SEQ ID NO: 1860415 - RNA, 19 nt, Artificial Sequence
  Description of Artificial Sequence: Synthetic oligonucleotide
cacuaccaucagugccgua

SEQ ID NO: 1860416 - RNA, 19 nt, Artificial Sequence
  Description of Artificial Sequence: Synthetic oligonucleotide
ccacaacccaagacuuauu

SEQ ID NO: 1860417 - RNA, 19 nt, Artificial Sequence
  Description of Artificial Sequence: Synthetic oligonucleotide
ccacuaccaucagugccgu

SEQ ID NO: 1860418 - RNA, 19 nt, Artificial Sequence
  Description of Artificial Sequence: Synthetic oligonucleotide
aagaauauuauacacccac

SEQ ID NO: 1860419 - RNA, 19 nt, Artificial Sequence
  Description of Artificial Sequence: Synthetic oligonucleotide
aauaacaucuuacacuuga

SEQ ID NO: 1860420 - RNA, 19 nt, Artificial Sequence
  Description of Artificial Sequence: Synthetic oligonucleotide
uuuuguacucuaaagccgg

SEQ ID NO: 1860421 - RNA, 19 nt, Artificial Sequence
  Description of Artificial Sequence: Synthetic oligonucleotide
ugcuaaaaggucaagaaac

SEQ ID NO: 1860422 - RNA, 19 nt, Artificial Sequence
  Description of Artificial Sequence: Synthetic oligonucleotide
uuuagggaaaaucacucag

SEQ ID NO: 1860423 - RNA, 19 nt, Artificial Sequence
  Description of Artificial Sequence: Synthetic oligonucleotide
aagagugcgcuguugauag

SEQ ID NO: 1860424 - RNA, 19 nt, Artificial Sequence
  Description of Artificial Sequence: Synthetic oligonucleotide
aaaugauuuugucccgcgc

SEQ ID NO: 1860425 - RNA, 19 nt, Artificial Sequence
  Description of Artificial Sequence: Synthetic oligonucleotide
aaaaugauuuugucccgcg

SEQ ID NO: 1860426 - RNA, 19 nt, Artificial Sequence
  Description of Artificial Sequence: Synthetic oligonucleotide
auggcaaucaaguacaggu

SEQ ID NO: 1860427 - RNA, 19 nt, Artificial Sequence
  Description of Artificial Sequence: Synthetic oligonucleotide
aguguuuggggucacacuc

SEQ ID NO: 1860428 - RNA, 19 nt, Artificial Sequence
  Description of Artificial Sequence: Synthetic oligonucleotide
gaagggaucggauaccccg

SEQ ID NO: 1860429 - RNA, 19 nt, Artificial Sequence
  Description of Artificial Sequence: Synthetic oligonucleotide
ugaggaauacaacaguaca

SEQ ID NO: 1860430 - RNA, 19 nt, Artificial Sequence
  Description of Artificial Sequence: Synthetic oligonucleotide
auaguaagagggcagguag

SEQ ID NO: 1860431 - RNA, 19 nt, Artificial Sequence
  Description of Artificial Sequence: Synthetic oligonucleotide
uguucuaccugaaauggug

SEQ ID NO: 1860432 - RNA, 19 nt, Artificial Sequence
  Description of Artificial Sequence: Synthetic oligonucleotide
auauuauacacccacugga

SEQ ID NO: 1860433 - RNA, 19 nt, Artificial Sequence
  Description of Artificial Sequence: Synthetic oligonucleotide
agaauugcaacuugagcuc

SEQ ID NO: 1860434 - RNA, 19 nt, Artificial Sequence
  Description of Artificial Sequence: Synthetic oligonucleotide
aaguacuuuauucuccugu

SEQ ID NO: 1860435 - RNA, 19 nt, Artificial Sequence
  Description of Artificial Sequence: Synthetic oligonucleotide
uuucucuugaguugaggcg

SEQ ID NO: 1860436 - RNA, 19 nt, Artificial Sequence
  Description of Artificial Sequence: Synthetic oligonucleotide
uacaacaguacaaaauaac

SEQ ID NO: 1860437 - RNA, 19 nt, Artificial Sequence
  Description of Artificial Sequence: Synthetic oligonucleotide
ugucaagaauauuauacac

SEQ ID NO: 1860438 - RNA, 19 nt, Artificial Sequence
  Description of Artificial Sequence: Synthetic oligonucleotide
acgguaagcggacaggggc

SEQ ID NO: 1860439 - RNA, 19 nt, Artificial Sequence
  Description of Artificial Sequence: Synthetic oligonucleotide
caggaaaaugauuuugucc

SEQ ID NO: 1860440 - RNA, 19 nt, Artificial Sequence
  Description of Artificial Sequence: Synthetic oligonucleotide
uguuccuguagucaucucc

SEQ ID NO: 1860441 - RNA, 19 nt, Artificial Sequence
  Description of Artificial Sequence: Synthetic oligonucleotide
gauaucauuggagaauugc

SEQ ID NO: 1860442 - RNA, 19 nt, Artificial Sequence
  Description of Artificial Sequence: Synthetic oligonucleotide
uaacaucuuacacuugacc

SEQ ID NO: 1860443 - RNA, 19 nt, Artificial Sequence
  Description of Artificial Sequence: Synthetic oligonucleotide
cuugaccucugcuaaaagg

SEQ ID NO: 1860444 - RNA, 19 nt, Artificial Sequence
  Description of Artificial Sequence: Synthetic oligonucleotide
agucucucggaucaggcgg

SEQ ID NO: 1860445 - RNA, 19 nt, Artificial Sequence
  Description of Artificial Sequence: Synthetic oligonucleotide
uguagguacacgcgaaggc

SEQ ID NO: 1860446 - RNA, 19 nt, Artificial Sequence
  Description of Artificial Sequence: Synthetic oligonucleotide
uucccaugcaggaaaauga

SEQ ID NO: 1860447 - RNA, 19 nt, Artificial Sequence
  Description of Artificial Sequence: Synthetic oligonucleotide
gaaauggugucuucucuag

SEQ ID NO: 1860448 - RNA, 19 nt, Artificial Sequence
  Description of Artificial Sequence: Synthetic oligonucleotide
uguugauaguguuuggggu

SEQ ID NO: 1860449 - RNA, 19 nt, Artificial Sequence
  Description of Artificial Sequence: Synthetic oligonucleotide
uccuaagcgcaaaaguaag

SEQ ID NO: 1860450 - RNA, 19 nt, Artificial Sequence
  Description of Artificial Sequence: Synthetic oligonucleotide
acucuaaagccggagaacg

SEQ ID NO: 1860451 - RNA, 19 nt, Artificial Sequence
  Description of Artificial Sequence: Synthetic oligonucleotide
uguacucuaaagccggaga

SEQ ID NO: 1860452 - RNA, 19 nt, Artificial Sequence
  Description of Artificial Sequence: Synthetic oligonucleotide
ugcaacuugagcucagggc

SEQ ID NO: 1860453 - RNA, 19 nt, Artificial Sequence
  Description of Artificial Sequence: Synthetic oligonucleotide
auuauacacccacuggaug

SEQ ID NO: 1860454 - RNA, 19 nt, Artificial Sequence
  Description of Artificial Sequence: Synthetic oligonucleotide
uagguacacgcgaaggcgg

SEQ ID NO: 1860455 - RNA, 19 nt, Artificial Sequence
  Description of Artificial Sequence: Synthetic oligonucleotide
caaguacaggucaucaagc

SEQ ID NO: 1860456 - RNA, 19 nt, Artificial Sequence
  Description of Artificial Sequence: Synthetic oligonucleotide
cuaagcgcaaaaguaagag

SEQ ID NO: 1860457 - RNA, 19 nt, Artificial Sequence
  Description of Artificial Sequence: Synthetic oligonucleotide
gucaagaauauuauacacc

SEQ ID NO: 1860458 - RNA, 19 nt, Artificial Sequence
  Description of Artificial Sequence: Synthetic oligonucleotide
acaacaguacaaaauaaca

SEQ ID NO: 1860459 - RNA, 19 nt, Artificial Sequence
  Description of Artificial Sequence: Synthetic oligonucleotide
acaguacaaaauaacaucu

SEQ ID NO: 1860460 - RNA, 19 nt, Artificial Sequence
  Description of Artificial Sequence: Synthetic oligonucleotide
aaggcggucuccugucacc

SEQ ID NO: 1860461 - RNA, 19 nt, Artificial Sequence
  Description of Artificial Sequence: Synthetic oligonucleotide
gcaggugauaguaagaggg

SEQ ID NO: 1860462 - RNA, 19 nt, Artificial Sequence
  Description of Artificial Sequence: Synthetic oligonucleotide
uacacuugaccucugcuaa

SEQ ID NO: 1860463 - RNA, 19 nt, Artificial Sequence
  Description of Artificial Sequence: Synthetic oligonucleotide
uucucuugaguugaggcgc

SEQ ID NO: 1860464 - RNA, 19 nt, Artificial Sequence
  Description of Artificial Sequence: Synthetic oligonucleotide
aguaagagugcgcuguuga

SEQ ID NO: 1860465 - RNA, 19 nt, Artificial Sequence
  Description of Artificial Sequence: Synthetic oligonucleotide
acuaccccaaacccagccc

SEQ ID NO: 1860466 - RNA, 19 nt, Artificial Sequence
  Description of Artificial Sequence: Synthetic oligonucleotide
agaggcaccauugccaacg

SEQ ID NO: 1860467 - RNA, 19 nt, Artificial Sequence
  Description of Artificial Sequence: Synthetic oligonucleotide
cagagauaaaagcccagcc

SEQ ID NO: 1860468 - RNA, 19 nt, Artificial Sequence
  Description of Artificial Sequence: Synthetic oligonucleotide
ugcaggugauaguaagagg

SEQ ID NO: 1860469 - RNA, 19 nt, Artificial Sequence
  Description of Artificial Sequence: Synthetic oligonucleotide
auaguguuuggggucacac

SEQ ID NO: 1860470 - RNA, 19 nt, Artificial Sequence
  Description of Artificial Sequence: Synthetic oligonucleotide
uguuccucaguaguggcag

SEQ ID NO: 1860471 - RNA, 19 nt, Artificial Sequence
  Description of Artificial Sequence: Synthetic oligonucleotide
ucagagauaaaagcccagc

SEQ ID NO: 1860472 - RNA, 19 nt, Artificial Sequence
  Description of Artificial Sequence: Synthetic oligonucleotide
aaagccggagaacgguaag

SEQ ID NO: 1860473 - RNA, 19 nt, Artificial Sequence
  Description of Artificial Sequence: Synthetic oligonucleotide
aguacaggucaucaagcug

SEQ ID NO: 1860474 - RNA, 19 nt, Artificial Sequence
  Description of Artificial Sequence: Synthetic oligonucleotide
uccacuugaggucugggau

SEQ ID NO: 1860475 - RNA, 19 nt, Artificial Sequence
  Description of Artificial Sequence: Synthetic oligonucleotide
guagguacacgcgaaggcg

SEQ ID NO: 1860476 - RNA, 19 nt, Artificial Sequence
  Description of Artificial Sequence: Synthetic oligonucleotide
gaacgguaagcggacaggg

SEQ ID NO: 1860477 - RNA, 19 nt, Artificial Sequence
  Description of Artificial Sequence: Synthetic oligonucleotide
aagccggagaacgguaagc

SEQ ID NO: 1860478 - RNA, 19 nt, Artificial Sequence
  Description of Artificial Sequence: Synthetic oligonucleotide
augauuuugucccgcgcag

SEQ ID NO: 1860479 - RNA, 19 nt, Artificial Sequence
  Description of Artificial Sequence: Synthetic oligonucleotide
uaagcgcaaaaguaagagu

SEQ ID NO: 1860480 - RNA, 19 nt, Artificial Sequence
  Description of Artificial Sequence: Synthetic oligonucleotide
ucucuaggaucacaacagc

SEQ ID NO: 1860481 - RNA, 19 nt, Artificial Sequence
  Description of Artificial Sequence: Synthetic oligonucleotide
guugauaguguuugggguc

SEQ ID NO: 1860482 - RNA, 19 nt, Artificial Sequence
  Description of Artificial Sequence: Synthetic oligonucleotide
gagaacgguaagcggacag

SEQ ID NO: 1860483 - RNA, 19 nt, Artificial Sequence
  Description of Artificial Sequence: Synthetic oligonucleotide
uaagagggcagguagugua

SEQ ID NO: 1860484 - RNA, 19 nt, Artificial Sequence
  Description of Artificial Sequence: Synthetic oligonucleotide
agcgcaaaaguaagagugc

SEQ ID NO: 1860485 - RNA, 19 nt, Artificial Sequence
  Description of Artificial Sequence: Synthetic oligonucleotide
auaucacucagaugccuug

SEQ ID NO: 1860486 - RNA, 19 nt, Artificial Sequence
  Description of Artificial Sequence: Synthetic oligonucleotide
auaucauuggagaauugca

SEQ ID NO: 1860487 - RNA, 19 nt, Artificial Sequence
  Description of Artificial Sequence: Synthetic oligonucleotide
ucucuugaguugaggcgcg

SEQ ID NO: 1860488 - RNA, 19 nt, Artificial Sequence
  Description of Artificial Sequence: Synthetic oligonucleotide
uauaucacucagaugccuu

SEQ ID NO: 1860489 - RNA, 19 nt, Artificial Sequence
  Description of Artificial Sequence: Synthetic oligonucleotide
ucuaaagccggagaacggu

SEQ ID NO: 1860490 - RNA, 19 nt, Artificial Sequence
  Description of Artificial Sequence: Synthetic oligonucleotide
gggucaucgguccuaagcg

SEQ ID NO: 1860491 - RNA, 19 nt, Artificial Sequence
  Description of Artificial Sequence: Synthetic oligonucleotide
ugaggucccgaagggaucg

SEQ ID NO: 1860492 - RNA, 19 nt, Artificial Sequence
  Description of Artificial Sequence: Synthetic oligonucleotide
uaucacucagaugccuugg

SEQ ID NO: 1860493 - RNA, 19 nt, Artificial Sequence
  Description of Artificial Sequence: Synthetic oligonucleotide
aguguagguacacgcgaag

SEQ ID NO: 1860494 - RNA, 19 nt, Artificial Sequence
  Description of Artificial Sequence: Synthetic oligonucleotide
gugauaguaagagggcagg

SEQ ID NO: 1860495 - RNA, 19 nt, Artificial Sequence
  Description of Artificial Sequence: Synthetic oligonucleotide
ucacaacagcaucuucucc

SEQ ID NO: 1860496 - RNA, 19 nt, Artificial Sequence
  Description of Artificial Sequence: Synthetic oligonucleotide
uuauaucacucagaugccu

SEQ ID NO: 1860497 - RNA, 19 nt, Artificial Sequence
  Description of Artificial Sequence: Synthetic oligonucleotide
ggagaauugcaacuugagc

SEQ ID NO: 1860498 - RNA, 19 nt, Artificial Sequence
  Description of Artificial Sequence: Synthetic oligonucleotide
ucccgaagggaucggauac

SEQ ID NO: 1860499 - RNA, 19 nt, Artificial Sequence
  Description of Artificial Sequence: Synthetic oligonucleotide
agguguuucucuguggcag

SEQ ID NO: 1860500 - RNA, 19 nt, Artificial Sequence
  Description of Artificial Sequence: Synthetic oligonucleotide
acgugcaggugauaguaag

SEQ ID NO: 1860501 - RNA, 19 nt, Artificial Sequence
  Description of Artificial Sequence: Synthetic oligonucleotide
uugauaguguuugggguca

SEQ ID NO: 1860502 - RNA, 19 nt, Artificial Sequence
  Description of Artificial Sequence: Synthetic oligonucleotide
aguaagagggcagguagug

SEQ ID NO: 1860503 - RNA, 19 nt, Artificial Sequence
  Description of Artificial Sequence: Synthetic oligonucleotide
cucuaaagccggagaacgg

SEQ ID NO: 1860504 - RNA, 19 nt, Artificial Sequence
  Description of Artificial Sequence: Synthetic oligonucleotide
uccuucucggagaauguuc

SEQ ID NO: 1860505 - RNA, 19 nt, Artificial Sequence
  Description of Artificial Sequence: Synthetic oligonucleotide
agguuauaggugcuguaga

SEQ ID NO: 1860506 - RNA, 19 nt, Artificial Sequence
  Description of Artificial Sequence: Synthetic oligonucleotide
uaaagccggagaacgguaa

SEQ ID NO: 1860507 - RNA, 19 nt, Artificial Sequence
  Description of Artificial Sequence: Synthetic oligonucleotide
guaguguagguacacgcga

SEQ ID NO: 1860508 - RNA, 19 nt, Artificial Sequence
  Description of Artificial Sequence: Synthetic oligonucleotide
aggugugcccgcuccacac

SEQ ID NO: 1860509 - RNA, 19 nt, Artificial Sequence
  Description of Artificial Sequence: Synthetic oligonucleotide
uaguaagagggcagguagu

SEQ ID NO: 1860510 - RNA, 19 nt, Artificial Sequence
  Description of Artificial Sequence: Synthetic oligonucleotide
cagguuauaggugcuguag

SEQ ID NO: 1860511 - RNA, 19 nt, Artificial Sequence
  Description of Artificial Sequence: Synthetic oligonucleotide
uggcaaucaaguacagguc

SEQ ID NO: 1860512 - RNA, 19 nt, Artificial Sequence
  Description of Artificial Sequence: Synthetic oligonucleotide
uuuguacucuaaagccgga

SEQ ID NO: 1860513 - RNA, 19 nt, Artificial Sequence
  Description of Artificial Sequence: Synthetic oligonucleotide
aagggaucggauaccccgg

SEQ ID NO: 1860514 - RNA, 19 nt, Artificial Sequence
  Description of Artificial Sequence: Synthetic oligonucleotide
gauaccccggcgauggcag

SEQ ID NO: 1860515 - RNA, 19 nt, Artificial Sequence
  Description of Artificial Sequence: Synthetic oligonucleotide
ucuucucuaggaucacaac

SEQ ID NO: 1860516 - RNA, 19 nt, Artificial Sequence
  Description of Artificial Sequence: Synthetic oligonucleotide
uuccacuugaggucuggga

SEQ ID NO: 1860517 - RNA, 19 nt, Artificial Sequence
  Description of Artificial Sequence: Synthetic oligonucleotide
ggagccucaaagcccaggg

SEQ ID NO: 1860518 - RNA, 19 nt, Artificial Sequence
  Description of Artificial Sequence: Synthetic oligonucleotide
aacgguaagcggacagggg

SEQ ID NO: 1860519 - RNA, 19 nt, Artificial Sequence
  Description of Artificial Sequence: Synthetic oligonucleotide
agccggagaacgguaagcg

SEQ ID NO: 1860520 - RNA, 19 nt, Artificial Sequence
  Description of Artificial Sequence: Synthetic oligonucleotide
uguauccccagaguccuca

SEQ ID NO: 1860521 - RNA, 19 nt, Artificial Sequence
  Description of Artificial Sequence: Synthetic oligonucleotide
gguaguguagguacacgcg

SEQ ID NO: 1860522 - RNA, 19 nt, Artificial Sequence
  Description of Artificial Sequence: Synthetic oligonucleotide
guguagguacacgcgaagg

SEQ ID NO: 1860523 - RNA, 19 nt, Artificial Sequence
  Description of Artificial Sequence: Synthetic oligonucleotide
uaguguagguacacgcgaa

SEQ ID NO: 1860524 - RNA, 19 nt, Artificial Sequence
  Description of Artificial Sequence: Synthetic oligonucleotide
aauugcaacuugagcucag

SEQ ID NO: 1860525 - RNA, 19 nt, Artificial Sequence
  Description of Artificial Sequence: Synthetic oligonucleotide
acuugaccucugcuaaaag

SEQ ID NO: 1860526 - RNA, 19 nt, Artificial Sequence
  Description of Artificial Sequence: Synthetic oligonucleotide
gagugcgcuguugauagug

SEQ ID NO: 1860527 - RNA, 19 nt, Artificial Sequence
  Description of Artificial Sequence: Synthetic oligonucleotide
agggaaaaucacucagaga

SEQ ID NO: 1860528 - RNA, 19 nt, Artificial Sequence
  Description of Artificial Sequence: Synthetic oligonucleotide
guacucuaaagccggagaa

SEQ ID NO: 1860529 - RNA, 19 nt, Artificial Sequence
  Description of Artificial Sequence: Synthetic oligonucleotide
ggcaaucaaguacagguca

SEQ ID NO: 1860530 - RNA, 19 nt, Artificial Sequence
  Description of Artificial Sequence: Synthetic oligonucleotide
uacucuaaagccggagaac

SEQ ID NO: 1860531 - RNA, 19 nt, Artificial Sequence
  Description of Artificial Sequence: Synthetic oligonucleotide
cagucucucggaucaggcg

SEQ ID NO: 1860532 - RNA, 19 nt, Artificial Sequence
  Description of Artificial Sequence: Synthetic oligonucleotide
aaguaagagugcgcuguug

SEQ ID NO: 1860533 - RNA, 19 nt, Artificial Sequence
  Description of Artificial Sequence: Synthetic oligonucleotide
uauacacccacuggaugcu

SEQ ID NO: 1860534 - RNA, 19 nt, Artificial Sequence
  Description of Artificial Sequence: Synthetic oligonucleotide
ucggguucgcgcuuucucu

SEQ ID NO: 1860535 - RNA, 19 nt, Artificial Sequence
  Description of Artificial Sequence: Synthetic oligonucleotide
ggugauaguaagagggcag

SEQ ID NO: 1860536 - RNA, 19 nt, Artificial Sequence
  Description of Artificial Sequence: Synthetic oligonucleotide
uauaggugcuguagauauc

SEQ ID NO: 1860537 - RNA, 19 nt, Artificial Sequence
  Description of Artificial Sequence: Synthetic oligonucleotide
ucggagaauguuccucagu

SEQ ID NO: 1860538 - RNA, 19 nt, Artificial Sequence
  Description of Artificial Sequence: Synthetic oligonucleotide
uaagagugcgcuguugaua

SEQ ID NO: 1860539 - RNA, 19 nt, Artificial Sequence
  Description of Artificial Sequence: Synthetic oligonucleotide
ggagaauguuccucaguag

SEQ ID NO: 1860540 - RNA, 19 nt, Artificial Sequence
  Description of Artificial Sequence: Synthetic oligonucleotide
uagcgcuucaggauggcuu

SEQ ID NO: 1860541 - RNA, 19 nt, Artificial Sequence
  Description of Artificial Sequence: Synthetic oligonucleotide
ugauaguaagagggcaggu

SEQ ID NO: 1860542 - RNA, 19 nt, Artificial Sequence
  Description of Artificial Sequence: Synthetic oligonucleotide
aaagcccagcccacacuac

SEQ ID NO: 1860543 - RNA, 19 nt, Artificial Sequence
  Description of Artificial Sequence: Synthetic oligonucleotide
guugaggcgcgguauccgc

SEQ ID NO: 1860544 - RNA, 19 nt, Artificial Sequence
  Description of Artificial Sequence: Synthetic oligonucleotide
uuggggucacacuccaggu

SEQ ID NO: 1860545 - RNA, 19 nt, Artificial Sequence
  Description of Artificial Sequence: Synthetic oligonucleotide
aguugaggcgcgguauccg

SEQ ID NO: 1860546 - RNA, 19 nt, Artificial Sequence
  Description of Artificial Sequence: Synthetic oligonucleotide
aggugggguaaagugaugu

SEQ ID NO: 1860547 - RNA, 19 nt, Artificial Sequence
  Description of Artificial Sequence: Synthetic oligonucleotide
ucgguccuaagcgcaaaag

SEQ ID NO: 1860548 - RNA, 19 nt, Artificial Sequence
  Description of Artificial Sequence: Synthetic oligonucleotide
gagccgggagccucaaagc

SEQ ID NO: 1860549 - RNA, 19 nt, Artificial Sequence
  Description of Artificial Sequence: Synthetic oligonucleotide
ugcgcuguugauaguguuu

SEQ ID NO: 1860550 - RNA, 19 nt, Artificial Sequence
  Description of Artificial Sequence: Synthetic oligonucleotide
ugaggcgcgguauccgcca

SEQ ID NO: 1860551 - RNA, 19 nt, Artificial Sequence
  Description of Artificial Sequence: Synthetic oligonucleotide
uugaguugaggcgcgguau

SEQ ID NO: 1860552 - RNA, 19 nt, Artificial Sequence
  Description of Artificial Sequence: Synthetic oligonucleotide
gugcacgugcaggugauag

SEQ ID NO: 1860553 - RNA, 19 nt, Artificial Sequence
  Description of Artificial Sequence: Synthetic oligonucleotide
ucaucgguccuaagcgcaa

SEQ ID NO: 1860554 - RNA, 19 nt, Artificial Sequence
  Description of Artificial Sequence: Synthetic oligonucleotide
guagauaucauuggagaau

SEQ ID NO: 1860555 - RNA, 19 nt, Artificial Sequence
  Description of Artificial Sequence: Synthetic oligonucleotide
caccugguagcgcuucagg

SEQ ID NO: 1860556 - RNA, 19 nt, Artificial Sequence
  Description of Artificial Sequence: Synthetic oligonucleotide
guaguggcaggugcucugg

SEQ ID NO: 1860557 - RNA, 19 nt, Artificial Sequence
  Description of Artificial Sequence: Synthetic oligonucleotide
ucagggcuccccguuagga

SEQ ID NO: 1860558 - RNA, 19 nt, Artificial Sequence
  Description of Artificial Sequence: Synthetic oligonucleotide
gcgcaaaaguaagagugcg

SEQ ID NO: 1860559 - RNA, 19 nt, Artificial Sequence
  Description of Artificial Sequence: Synthetic oligonucleotide
gaguugaggcgcgguaucc

SEQ ID NO: 1860560 - RNA, 19 nt, Artificial Sequence
  Description of Artificial Sequence: Synthetic oligonucleotide
uccccguuaggaguugggc

SEQ ID NO: 1860561 - RNA, 19 nt, Artificial Sequence
  Description of Artificial Sequence: Synthetic oligonucleotide
cagguaguguagguacacg

SEQ ID NO: 1860562 - RNA, 19 nt, Artificial Sequence
  Description of Artificial Sequence: Synthetic oligonucleotide
guccuaagcgcaaaaguaa

SEQ ID NO: 1860563 - RNA, 19 nt, Artificial Sequence
  Description of Artificial Sequence: Synthetic oligonucleotide
ggggucacacuccagguuc

SEQ ID NO: 1860564 - RNA, 19 nt, Artificial Sequence
  Description of Artificial Sequence: Synthetic oligonucleotide
ggucaucgguccuaagcgc

SEQ ID NO: 1860565 - RNA, 19 nt, Artificial Sequence
  Description of Artificial Sequence: Synthetic oligonucleotide
cuggagugaggucccgaag

SEQ ID NO: 1860566 - RNA, 19 nt, Artificial Sequence
  Description of Artificial Sequence: Synthetic oligonucleotide
ucuugaguugaggcgcggu

SEQ ID NO: 1860567 - RNA, 19 nt, Artificial Sequence
  Description of Artificial Sequence: Synthetic oligonucleotide
aagcggacaggggcagagg

SEQ ID NO: 1860568 - RNA, 19 nt, Artificial Sequence
  Description of Artificial Sequence: Synthetic oligonucleotide
acagguuauaggugcugua

SEQ ID NO: 1860569 - RNA, 19 nt, Artificial Sequence
  Description of Artificial Sequence: Synthetic oligonucleotide
guguuuggggucacacucc

SEQ ID NO: 1860570 - RNA, 19 nt, Artificial Sequence
  Description of Artificial Sequence: Synthetic oligonucleotide
acaauucggucagcuucgg

SEQ ID NO: 1860571 - RNA, 19 nt, Artificial Sequence
  Description of Artificial Sequence: Synthetic oligonucleotide
uucggccuucuugucaaga

SEQ ID NO: 1860572 - RNA, 19 nt, Artificial Sequence
  Description of Artificial Sequence: Synthetic oligonucleotide
cuccccguuaggaguuggg

SEQ ID NO: 1860573 - RNA, 19 nt, Artificial Sequence
  Description of Artificial Sequence: Synthetic oligonucleotide
cccagaguccucauucacc

SEQ ID NO: 1860574 - RNA, 19 nt, Artificial Sequence
  Description of Artificial Sequence: Synthetic oligonucleotide
agauaucauuggagaauug

SEQ ID NO: 1860575 - RNA, 19 nt, Artificial Sequence
  Description of Artificial Sequence: Synthetic oligonucleotide
gcggucuccugucaccugg

SEQ ID NO: 1860576 - RNA, 19 nt, Artificial Sequence
  Description of Artificial Sequence: Synthetic oligonucleotide
cucggguucgcgcuuucuc

SEQ ID NO: 1860577 - RNA, 19 nt, Artificial Sequence
  Description of Artificial Sequence: Synthetic oligonucleotide
uaccccaaacccagcccac

SEQ ID NO: 1860578 - RNA, 19 nt, Artificial Sequence
  Description of Artificial Sequence: Synthetic oligonucleotide
guucgcgcuuucucuugag

SEQ ID NO: 1860579 - RNA, 19 nt, Artificial Sequence
  Description of Artificial Sequence: Synthetic oligonucleotide
cacguguucuaccugaaau

SEQ ID NO: 1860580 - RNA, 19 nt, Artificial Sequence
  Description of Artificial Sequence: Synthetic oligonucleotide
acacgcgaaggcggucucc

SEQ ID NO: 1860581 - RNA, 19 nt, Artificial Sequence
  Description of Artificial Sequence: Synthetic oligonucleotide
gguccuaagcgcaaaagua

SEQ ID NO: 1860582 - RNA, 19 nt, Artificial Sequence
  Description of Artificial Sequence: Synthetic oligonucleotide
cuaaagccggagaacggua

SEQ ID NO: 1860583 - RNA, 19 nt, Artificial Sequence
  Description of Artificial Sequence: Synthetic oligonucleotide
acacuugaccucugcuaaa

SEQ ID NO: 1860584 - RNA, 19 nt, Artificial Sequence
  Description of Artificial Sequence: Synthetic oligonucleotide
cuugagcucagggcucccc

SEQ ID NO: 1860585 - RNA, 19 nt, Artificial Sequence
  Description of Artificial Sequence: Synthetic oligonucleotide
ccccguuaggaguugggcc

SEQ ID NO: 1860586 - RNA, 19 nt, Artificial Sequence
  Description of Artificial Sequence: Synthetic oligonucleotide
ccagucucucggaucaggc

SEQ ID NO: 1860587 - RNA, 19 nt, Artificial Sequence
  Description of Artificial Sequence: Synthetic oligonucleotide
cuuggaggaaacagguuau

SEQ ID NO: 1860588 - RNA, 19 nt, Artificial Sequence
  Description of Artificial Sequence: Synthetic oligonucleotide
caccauugccaacgccugc

SEQ ID NO: 1860589 - RNA, 19 nt, Artificial Sequence
  Description of Artificial Sequence: Synthetic oligonucleotide
caugcugcccggggaagag

SEQ ID NO: 1860590 - RNA, 19 nt, Artificial Sequence
  Description of Artificial Sequence: Synthetic oligonucleotide
ugugcccgcuccacaccug

SEQ ID NO: 1860591 - RNA, 19 nt, Artificial Sequence
  Description of Artificial Sequence: Synthetic oligonucleotide
ggaucggauaccccggcga

SEQ ID NO: 1860592 - RNA, 19 nt, Artificial Sequence
  Description of Artificial Sequence: Synthetic oligonucleotide
uugucccgcgcagacuccc

SEQ ID NO: 1860593 - RNA, 19 nt, Artificial Sequence
  Description of Artificial Sequence: Synthetic oligonucleotide
gauaguguuuggggucaca

SEQ ID NO: 1860594 - RNA, 19 nt, Artificial Sequence
  Description of Artificial Sequence: Synthetic oligonucleotide
aucgguccuaagcgcaaaa

SEQ ID NO: 1860595 - RNA, 19 nt, Artificial Sequence
  Description of Artificial Sequence: Synthetic oligonucleotide
aagugcacgugcaggugau

SEQ ID NO: 1860596 - RNA, 19 nt, Artificial Sequence
  Description of Artificial Sequence: Synthetic oligonucleotide
gggauaaggacaaagccau

SEQ ID NO: 1860597 - RNA, 19 nt, Artificial Sequence
  Description of Artificial Sequence: Synthetic oligonucleotide
cuugaguugaggcgcggua

SEQ ID NO: 1860598 - RNA, 19 nt, Artificial Sequence
  Description of Artificial Sequence: Synthetic oligonucleotide
gguuauaggugcuguagau

SEQ ID NO: 1860599 - RNA, 19 nt, Artificial Sequence
  Description of Artificial Sequence: Synthetic oligonucleotide
cugugaggaauacaacagu

SEQ ID NO: 1860600 - RNA, 19 nt, Artificial Sequence
  Description of Artificial Sequence: Synthetic oligonucleotide
agugcgcuguugauagugu

SEQ ID NO: 1860601 - RNA, 19 nt, Artificial Sequence
  Description of Artificial Sequence: Synthetic oligonucleotide
ccggagaacgguaagcgga

SEQ ID NO: 1860602 - RNA, 19 nt, Artificial Sequence
  Description of Artificial Sequence: Synthetic oligonucleotide
uacacgcgaaggcggucuc

SEQ ID NO: 1860603 - RNA, 19 nt, Artificial Sequence
  Description of Artificial Sequence: Synthetic oligonucleotide
gggaucggauaccccggcg

SEQ ID NO: 1860604 - RNA, 19 nt, Artificial Sequence
  Description of Artificial Sequence: Synthetic oligonucleotide
uugccaacgccugcuuccu

SEQ ID NO: 1860605 - RNA, 19 nt, Artificial Sequence
  Description of Artificial Sequence: Synthetic oligonucleotide
ugucaccugguagcgcuuc

SEQ ID NO: 1860606 - RNA, 19 nt, Artificial Sequence
  Description of Artificial Sequence: Synthetic oligonucleotide
gguaagcggacaggggcag

SEQ ID NO: 1860607 - RNA, 19 nt, Artificial Sequence
  Description of Artificial Sequence: Synthetic oligonucleotide
cagcccacuagcuccccuc

SEQ ID NO: 1860608 - RNA, 19 nt, Artificial Sequence
  Description of Artificial Sequence: Synthetic oligonucleotide
ugcccgcuccacaccugag

SEQ ID NO: 1860609 - RNA, 19 nt, Artificial Sequence
  Description of Artificial Sequence: Synthetic oligonucleotide
accucugcuaaaaggucaa

SEQ ID NO: 1860610 - RNA, 19 nt, Artificial Sequence
  Description of Artificial Sequence: Synthetic oligonucleotide
ugauaguguuuggggucac

SEQ ID NO: 1860611 - RNA, 19 nt, Artificial Sequence
  Description of Artificial Sequence: Synthetic oligonucleotide
ggccacguguucuaccuga

SEQ ID NO: 1860612 - RNA, 19 nt, Artificial Sequence
  Description of Artificial Sequence: Synthetic oligonucleotide
gcuaaaaggucaagaaacu

SEQ ID NO: 1860613 - RNA, 19 nt, Artificial Sequence
  Description of Artificial Sequence: Synthetic oligonucleotide
aucggauaccccggcgaug

SEQ ID NO: 1860614 - RNA, 19 nt, Artificial Sequence
  Description of Artificial Sequence: Synthetic oligonucleotide
guucuaccugaaauggugu

SEQ ID NO: 1860615 - RNA, 19 nt, Artificial Sequence
  Description of Artificial Sequence: Synthetic oligonucleotide
cccguuaggaguugggcca

SEQ ID NO: 1860616 - RNA, 19 nt, Artificial Sequence
  Description of Artificial Sequence: Synthetic oligonucleotide
agaugccuuggaggaaaca

SEQ ID NO: 1860617 - RNA, 19 nt, Artificial Sequence
  Description of Artificial Sequence: Synthetic oligonucleotide
gaucggauaccccggcgau

SEQ ID NO: 1860618 - RNA, 19 nt, Artificial Sequence
  Description of Artificial Sequence: Synthetic oligonucleotide
cucuugaguugaggcgcgg

SEQ ID NO: 1860619 - RNA, 19 nt, Artificial Sequence
  Description of Artificial Sequence: Synthetic oligonucleotide
auacacccacuggaugcug

SEQ ID NO: 1860620 - RNA, 19 nt, Artificial Sequence
  Description of Artificial Sequence: Synthetic oligonucleotide
ugucccgcgcagacucccu

SEQ ID NO: 1860621 - RNA, 19 nt, Artificial Sequence
  Description of Artificial Sequence: Synthetic oligonucleotide
ccuaagcgcaaaaguaaga

SEQ ID NO: 1860622 - RNA, 19 nt, Artificial Sequence
  Description of Artificial Sequence: Synthetic oligonucleotide
gucccgaagggaucggaua

SEQ ID NO: 1860623 - RNA, 19 nt, Artificial Sequence
  Description of Artificial Sequence: Synthetic oligonucleotide
agagugcgcuguugauagu

SEQ ID NO: 1860624 - RNA, 19 nt, Artificial Sequence
  Description of Artificial Sequence: Synthetic oligonucleotide
guaagagugcgcuguugau

SEQ ID NO: 1860625 - RNA, 19 nt, Artificial Sequence
  Description of Artificial Sequence: Synthetic oligonucleotide
gaggucccgaagggaucgg

SEQ ID NO: 1860626 - RNA, 19 nt, Artificial Sequence
  Description of Artificial Sequence: Synthetic oligonucleotide
gccaacgccugcuuccuuc

SEQ ID NO: 1860627 - RNA, 19 nt, Artificial Sequence
  Description of Artificial Sequence: Synthetic oligonucleotide
gcagguaguguagguacac

SEQ ID NO: 1860628 - RNA, 19 nt, Artificial Sequence
  Description of Artificial Sequence: Synthetic oligonucleotide
gguguauccccagaguccu

SEQ ID NO: 1860629 - RNA, 19 nt, Artificial Sequence
  Description of Artificial Sequence: Synthetic oligonucleotide
ggugugcccgcuccacacc

SEQ ID NO: 1860630 - RNA, 19 nt, Artificial Sequence
  Description of Artificial Sequence: Synthetic oligonucleotide
cgcgcuuucucuugaguug

SEQ ID NO: 1860631 - RNA, 19 nt, Artificial Sequence
  Description of Artificial Sequence: Synthetic oligonucleotide
agguacacgcgaaggcggu

SEQ ID NO: 1860632 - RNA, 19 nt, Artificial Sequence
  Description of Artificial Sequence: Synthetic oligonucleotide
ggcgcgguauccgccaugc

SEQ ID NO: 1860633 - RNA, 19 nt, Artificial Sequence
  Description of Artificial Sequence: Synthetic oligonucleotide
cagaggcaccauugccaac

SEQ ID NO: 1860634 - RNA, 19 nt, Artificial Sequence
  Description of Artificial Sequence: Synthetic oligonucleotide
agacucccucaguacuuuu

SEQ ID NO: 1860635 - RNA, 19 nt, Artificial Sequence
  Description of Artificial Sequence: Synthetic oligonucleotide
guugggccacguguucuac

SEQ ID NO: 1860636 - RNA, 19 nt, Artificial Sequence
  Description of Artificial Sequence: Synthetic oligonucleotide
cacgugcaggugauaguaa

SEQ ID NO: 1860637 - RNA, 19 nt, Artificial Sequence
  Description of Artificial Sequence: Synthetic oligonucleotide
ccacaccugagccgggagc

SEQ ID NO: 1860638 - RNA, 19 nt, Artificial Sequence
  Description of Artificial Sequence: Synthetic oligonucleotide
gguccugacgcauguauuu

SEQ ID NO: 1860639 - RNA, 19 nt, Artificial Sequence
  Description of Artificial Sequence: Synthetic oligonucleotide
gugcccgcuccacaccuga

SEQ ID NO: 1860640 - RNA, 19 nt, Artificial Sequence
  Description of Artificial Sequence: Synthetic oligonucleotide
gguucgcgcuuucucuuga

SEQ ID NO: 1860641 - RNA, 19 nt, Artificial Sequence
  Description of Artificial Sequence: Synthetic oligonucleotide
acgcgaaggcggucuccug

SEQ ID NO: 1860642 - RNA, 19 nt, Artificial Sequence
  Description of Artificial Sequence: Synthetic oligonucleotide
aggcgcgguauccgccaug

SEQ ID NO: 1860643 - RNA, 19 nt, Artificial Sequence
  Description of Artificial Sequence: Synthetic oligonucleotide
cgcuccacaccugagccgg

SEQ ID NO: 1860644 - RNA, 19 nt, Artificial Sequence
  Description of Artificial Sequence: Synthetic oligonucleotide
accccaaacccagcccacu

SEQ ID NO: 1860645 - RNA, 19 nt, Artificial Sequence
  Description of Artificial Sequence: Synthetic oligonucleotide
caggguacaccacgguugu

SEQ ID NO: 1860646 - RNA, 19 nt, Artificial Sequence
  Description of Artificial Sequence: Synthetic oligonucleotide
auaccccggcgauggcaga

SEQ ID NO: 1860647 - RNA, 19 nt, Artificial Sequence
  Description of Artificial Sequence: Synthetic oligonucleotide
aucuuacacuugaccucug

SEQ ID NO: 1860648 - RNA, 19 nt, Artificial Sequence
  Description of Artificial Sequence: Synthetic oligonucleotide
guacacgcgaaggcggucu

SEQ ID NO: 1860649 - RNA, 19 nt, Artificial Sequence
  Description of Artificial Sequence: Synthetic oligonucleotide
gcccgcuccacaccugagc

SEQ ID NO: 1860650 - RNA, 19 nt, Artificial Sequence
  Description of Artificial Sequence: Synthetic oligonucleotide
cuccagguguauccccaga

SEQ ID NO: 1860651 - RNA, 19 nt, Artificial Sequence
  Description of Artificial Sequence: Synthetic oligonucleotide
guguucuaccugaaauggu

SEQ ID NO: 1860652 - RNA, 19 nt, Artificial Sequence
  Description of Artificial Sequence: Synthetic oligonucleotide
cggagaacgguaagcggac

SEQ ID NO: 1860653 - RNA, 19 nt, Artificial Sequence
  Description of Artificial Sequence: Synthetic oligonucleotide
gcacgugcaggugauagua

SEQ ID NO: 1860654 - RNA, 19 nt, Artificial Sequence
  Description of Artificial Sequence: Synthetic oligonucleotide
ggauaccccggcgauggca

SEQ ID NO: 1860655 - RNA, 19 nt, Artificial Sequence
  Description of Artificial Sequence: Synthetic oligonucleotide
gcgcagacucccucaguac

SEQ ID NO: 1860656 - RNA, 19 nt, Artificial Sequence
  Description of Artificial Sequence: Synthetic oligonucleotide
gugugcccgcuccacaccu

SEQ ID NO: 1860657 - RNA, 19 nt, Artificial Sequence
  Description of Artificial Sequence: Synthetic oligonucleotide
gcgaaggcggucuccuguc

SEQ ID NO: 1860658 - RNA, 19 nt, Artificial Sequence
  Description of Artificial Sequence: Synthetic oligonucleotide
cgaagggaucggauacccc

SEQ ID NO: 1860659 - RNA, 19 nt, Artificial Sequence
  Description of Artificial Sequence: Synthetic oligonucleotide
guuaggaguugggccacgu

SEQ ID NO: 1860660 - RNA, 19 nt, Artificial Sequence
  Description of Artificial Sequence: Synthetic oligonucleotide
gguagcgcuucaggauggc

SEQ ID NO: 1860661 - RNA, 19 nt, Artificial Sequence
  Description of Artificial Sequence: Synthetic oligonucleotide
gucccgcgcagacucccuc

SEQ ID NO: 1860662 - RNA, 19 nt, Artificial Sequence
  Description of Artificial Sequence: Synthetic oligonucleotide
ccggcgauggcagauggca

SEQ ID NO: 1860663 - RNA, 19 nt, Artificial Sequence
  Description of Artificial Sequence: Synthetic oligonucleotide
ugccaacgccugcuuccuu

SEQ ID NO: 1860664 - RNA, 19 nt, Artificial Sequence
  Description of Artificial Sequence: Synthetic oligonucleotide
accccggcgauggcagaug

SEQ ID NO: 1860665 - RNA, 19 nt, Artificial Sequence
  Description of Artificial Sequence: Synthetic oligonucleotide
ggcgauggcagauggcaau

SEQ ID NO: 1860666 - RNA, 19 nt, Artificial Sequence
  Description of Artificial Sequence: Synthetic oligonucleotide
cccgaagggaucggauacc

SEQ ID NO: 1860667 - RNA, 19 nt, Artificial Sequence
  Description of Artificial Sequence: Synthetic oligonucleotide
guaagcggacaggggcaga

SEQ ID NO: 1860668 - RNA, 19 nt, Artificial Sequence
  Description of Artificial Sequence: Synthetic oligonucleotide
ccccggcgauggcagaugg

SEQ ID NO: 1860669 - RNA, 19 nt, Artificial Sequence
  Description of Artificial Sequence: Synthetic oligonucleotide
ccaggugggguaaagugau

SEQ ID NO: 1860670 - RNA, 19 nt, Artificial Sequence
  Description of Artificial Sequence: Synthetic oligonucleotide
ggcggucuccugucaccug

SEQ ID NO: 1860671 - RNA, 19 nt, Artificial Sequence
  Description of Artificial Sequence: Synthetic oligonucleotide
ggagaacgguaagcggaca

SEQ ID NO: 1860672 - RNA, 19 nt, Artificial Sequence
  Description of Artificial Sequence: Synthetic oligonucleotide
cacuagcuccccucuugcu

SEQ ID NO: 1860673 - RNA, 19 nt, Artificial Sequence
  Description of Artificial Sequence: Synthetic oligonucleotide
ggguacaccacgguuguuu

SEQ ID NO: 1860674 - RNA, 19 nt, Artificial Sequence
  Description of Artificial Sequence: Synthetic oligonucleotide
guagcgcuucaggauggcu

SEQ ID NO: 1860675 - RNA, 19 nt, Artificial Sequence
  Description of Artificial Sequence: Synthetic oligonucleotide
caucgguccuaagcgcaaa

SEQ ID NO: 1860676 - RNA, 19 nt, Artificial Sequence
  Description of Artificial Sequence: Synthetic oligonucleotide
gugcgcuguugauaguguu

SEQ ID NO: 1860677 - RNA, 19 nt, Artificial Sequence
  Description of Artificial Sequence: Synthetic oligonucleotide
gguacacgcgaaggcgguc

SEQ ID NO: 1860678 - RNA, 19 nt, Artificial Sequence
  Description of Artificial Sequence: Synthetic oligonucleotide
gcucuggagugaggucccg

SEQ ID NO: 1860679 - RNA, 19 nt, Artificial Sequence
  Description of Artificial Sequence: Synthetic oligonucleotide
gcugcccggggaagagccg

SEQ ID NO: 1860680 - RNA, 19 nt, Artificial Sequence
  Description of Artificial Sequence: Synthetic oligonucleotide
cacgcgaaggcggucuccu

SEQ ID NO: 1860681 - RNA, 19 nt, Artificial Sequence
  Description of Artificial Sequence: Synthetic oligonucleotide
ugccucggguucgcgcuuu

SEQ ID NO: 1860682 - RNA, 19 nt, Artificial Sequence
  Description of Artificial Sequence: Synthetic oligonucleotide
guccugacgcauguauuuu

SEQ ID NO: 1860683 - RNA, 19 nt, Artificial Sequence
  Description of Artificial Sequence: Synthetic oligonucleotide
cccggcgauggcagauggc

SEQ ID NO: 1860684 - RNA, 19 nt, Artificial Sequence
  Description of Artificial Sequence: Synthetic oligonucleotide
ccguuaggaguugggccac

SEQ ID NO: 1860685 - RNA, 19 nt, Artificial Sequence
  Description of Artificial Sequence: Synthetic oligonucleotide
guccuucucggagaauguu

SEQ ID NO: 1860686 - RNA, 19 nt, Artificial Sequence
  Description of Artificial Sequence: Synthetic oligonucleotide
gcggacaggggcagaggca

SEQ ID NO: 1860687 - RNA, 19 nt, Artificial Sequence
  Description of Artificial Sequence: Synthetic oligonucleotide
ccagcccacacuaccccaa

SEQ ID NO: 1860688 - RNA, 19 nt, Artificial Sequence
  Description of Artificial Sequence: Synthetic oligonucleotide
cgguccuaagcgcaaaagu

SEQ ID NO: 1860689 - RNA, 19 nt, Artificial Sequence
  Description of Artificial Sequence: Synthetic oligonucleotide
cguuaggaguugggccacg

SEQ ID NO: 1860690 - RNA, 19 nt, Artificial Sequence
  Description of Artificial Sequence: Synthetic oligonucleotide
cugcccggggaagagccgu

SEQ ID NO: 1860691 - RNA, 19 nt, Artificial Sequence
  Description of Artificial Sequence: Synthetic oligonucleotide
gaggcgcgguauccgccau

SEQ ID NO: 1860692 - RNA, 19 nt, Artificial Sequence
  Description of Artificial Sequence: Synthetic oligonucleotide
ccacguguucuaccugaaa

SEQ ID NO: 1860693 - RNA, 19 nt, Artificial Sequence
  Description of Artificial Sequence: Synthetic oligonucleotide
cgcagacucccucaguacu

SEQ ID NO: 1860694 - RNA, 19 nt, Artificial Sequence
  Description of Artificial Sequence: Synthetic oligonucleotide
ccaacgccugcuuccuucu

SEQ ID NO: 1860695 - RNA, 19 nt, Artificial Sequence
  Description of Artificial Sequence: Synthetic oligonucleotide
cugagccgggagccucaaa

SEQ ID NO: 1860696 - RNA, 19 nt, Artificial Sequence
  Description of Artificial Sequence: Synthetic oligonucleotide
gccacguguucuaccugaa

SEQ ID NO: 1860697 - RNA, 19 nt, Artificial Sequence
  Description of Artificial Sequence: Synthetic oligonucleotide
ggucccgaagggaucggau

SEQ ID NO: 1860698 - RNA, 19 nt, Artificial Sequence
  Description of Artificial Sequence: Synthetic oligonucleotide
ccccaaacccagcccacua

SEQ ID NO: 1860699 - RNA, 19 nt, Artificial Sequence
  Description of Artificial Sequence: Synthetic oligonucleotide
ggucugggauaaggacaaa

SEQ ID NO: 1860700 - RNA, 19 nt, Artificial Sequence
  Description of Artificial Sequence: Synthetic oligonucleotide
ggcggagguccugacgcau

SEQ ID NO: 1860701 - RNA, 19 nt, Artificial Sequence
  Description of Artificial Sequence: Synthetic oligonucleotide
gccucggguucgcgcuuuc

SEQ ID NO: 1860702 - RNA, 19 nt, Artificial Sequence
  Description of Artificial Sequence: Synthetic oligonucleotide
cccagcccacuagcucccc

SEQ ID NO: 1860703 - RNA, 19 nt, Artificial Sequence
  Description of Artificial Sequence: Synthetic oligonucleotide
cggauaccccggcgauggc

SEQ ID NO: 1860704 - RNA, 19 nt, Artificial Sequence
  Description of Artificial Sequence: Synthetic oligonucleotide
cgggagccucaaagcccag

SEQ ID NO: 1860705 - RNA, 19 nt, Artificial Sequence
  Description of Artificial Sequence: Synthetic oligonucleotide
gggcuccccguuaggaguu

SEQ ID NO: 1860706 - RNA, 19 nt, Artificial Sequence
  Description of Artificial Sequence: Synthetic oligonucleotide
cugccucggguucgcgcuu

SEQ ID NO: 1860707 - RNA, 19 nt, Artificial Sequence
  Description of Artificial Sequence: Synthetic oligonucleotide
cggguucgcgcuuucucuu

SEQ ID NO: 1860708 - RNA, 19 nt, Artificial Sequence
  Description of Artificial Sequence: Synthetic oligonucleotide
ccugagccgggagccucaa

SEQ ID NO: 1860709 - RNA, 19 nt, Artificial Sequence
  Description of Artificial Sequence: Synthetic oligonucleotide
gcgcgguauccgccaugcu

SEQ ID NO: 1860710 - RNA, 19 nt, Artificial Sequence
  Description of Artificial Sequence: Synthetic oligonucleotide
ccucggguucgcgcuuucu

SEQ ID NO: 1860711 - RNA, 19 nt, Artificial Sequence
  Description of Artificial Sequence: Synthetic oligonucleotide
ccgcgcagacucccucagu

SEQ ID NO: 1860712 - RNA, 19 nt, Artificial Sequence
  Description of Artificial Sequence: Synthetic oligonucleotide
auaaagaccaccgacagcc

SEQ ID NO: 1860713 - RNA, 19 nt, Artificial Sequence
  Description of Artificial Sequence: Synthetic oligonucleotide
ugguagaacccacaaaugg

SEQ ID NO: 1860714 - RNA, 19 nt, Artificial Sequence
  Description of Artificial Sequence: Synthetic oligonucleotide
aguguguuaaggcugagag

SEQ ID NO: 1860715 - RNA, 19 nt, Artificial Sequence
  Description of Artificial Sequence: Synthetic oligonucleotide
aaggccagaacucuuucac

SEQ ID NO: 1860716 - RNA, 19 nt, Artificial Sequence
  Description of Artificial Sequence: Synthetic oligonucleotide
ucaagguugcuguacaggg

SEQ ID NO: 1860717 - RNA, 19 nt, Artificial Sequence
  Description of Artificial Sequence: Synthetic oligonucleotide
uggguguccuuauagaugg

SEQ ID NO: 1860718 - RNA, 19 nt, Artificial Sequence
  Description of Artificial Sequence: Synthetic oligonucleotide
agacucagcagguaugucc

SEQ ID NO: 1860719 - RNA, 19 nt, Artificial Sequence
  Description of Artificial Sequence: Synthetic oligonucleotide
aagggaugaccacaguccc

SEQ ID NO: 1860720 - RNA, 19 nt, Artificial Sequence
  Description of Artificial Sequence: Synthetic oligonucleotide
augcuaaccucucaggccc

SEQ ID NO: 1860721 - RNA, 19 nt, Artificial Sequence
  Description of Artificial Sequence: Synthetic oligonucleotide
uauagauggugucaaggcc

SEQ ID NO: 1860722 - RNA, 19 nt, Artificial Sequence
  Description of Artificial Sequence: Synthetic oligonucleotide
uucacaccgcucaagaucc

SEQ ID NO: 1860723 - RNA, 19 nt, Artificial Sequence
  Description of Artificial Sequence: Synthetic oligonucleotide
ugcgguggaagauauagag

SEQ ID NO: 1860724 - RNA, 19 nt, Artificial Sequence
  Description of Artificial Sequence: Synthetic oligonucleotide
accagguaagccuaccugc

SEQ ID NO: 1860725 - RNA, 19 nt, Artificial Sequence
  Description of Artificial Sequence: Synthetic oligonucleotide
uuagugaccaggcagugac

SEQ ID NO: 1860726 - RNA, 19 nt, Artificial Sequence
  Description of Artificial Sequence: Synthetic oligonucleotide
ugcacuaguaugcuaaccu

SEQ ID NO: 1860727 - RNA, 19 nt, Artificial Sequence
  Description of Artificial Sequence: Synthetic oligonucleotide
agauaaagaccaccgacag

SEQ ID NO: 1860728 - RNA, 19 nt, Artificial Sequence
  Description of Artificial Sequence: Synthetic oligonucleotide
gaugcgguggaagauauag

SEQ ID NO: 1860729 - RNA, 19 nt, Artificial Sequence
  Description of Artificial Sequence: Synthetic oligonucleotide
uaguaugcuaaccucucag

SEQ ID NO: 1860730 - RNA, 19 nt, Artificial Sequence
  Description of Artificial Sequence: Synthetic oligonucleotide
aauggguguccuuauagau

SEQ ID NO: 1860731 - RNA, 19 nt, Artificial Sequence
  Description of Artificial Sequence: Synthetic oligonucleotide
uaugcuaaccucucaggcc

SEQ ID NO: 1860732 - RNA, 19 nt, Artificial Sequence
  Description of Artificial Sequence: Synthetic oligonucleotide
uaacaguucacgguguggg

SEQ ID NO: 1860733 - RNA, 19 nt, Artificial Sequence
  Description of Artificial Sequence: Synthetic oligonucleotide
aguaugcuaaccucucagg

SEQ ID NO: 1860734 - RNA, 19 nt, Artificial Sequence
  Description of Artificial Sequence: Synthetic oligonucleotide
ucuuggguuggcuuuagug

SEQ ID NO: 1860735 - RNA, 19 nt, Artificial Sequence
  Description of Artificial Sequence: Synthetic oligonucleotide
uguuucaucgucccacacc

SEQ ID NO: 1860736 - RNA, 19 nt, Artificial Sequence
  Description of Artificial Sequence: Synthetic oligonucleotide
acguguaugcacuaguaug

SEQ ID NO: 1860737 - RNA, 19 nt, Artificial Sequence
  Description of Artificial Sequence: Synthetic oligonucleotide
gauauagagaaaacccgag

SEQ ID NO: 1860738 - RNA, 19 nt, Artificial Sequence
  Description of Artificial Sequence: Synthetic oligonucleotide
aagauaaagaccaccgaca

SEQ ID NO: 1860739 - RNA, 19 nt, Artificial Sequence
  Description of Artificial Sequence: Synthetic oligonucleotide
aaauggguguccuuauaga

SEQ ID NO: 1860740 - RNA, 19 nt, Artificial Sequence
  Description of Artificial Sequence: Synthetic oligonucleotide
uaagccuaccugcagguca

SEQ ID NO: 1860741 - RNA, 19 nt, Artificial Sequence
  Description of Artificial Sequence: Synthetic oligonucleotide
agauguaacaguucacggu

SEQ ID NO: 1860742 - RNA, 19 nt, Artificial Sequence
  Description of Artificial Sequence: Synthetic oligonucleotide
aggaaaguguguuaaggcu

SEQ ID NO: 1860743 - RNA, 19 nt, Artificial Sequence
  Description of Artificial Sequence: Synthetic oligonucleotide
ugugacuaccaugaaguag

SEQ ID NO: 1860744 - RNA, 19 nt, Artificial Sequence
  Description of Artificial Sequence: Synthetic oligonucleotide
cacaaggccugguagaacc

SEQ ID NO: 1860745 - RNA, 19 nt, Artificial Sequence
  Description of Artificial Sequence: Synthetic oligonucleotide
aaagaccaccgacagccag

SEQ ID NO: 1860746 - RNA, 19 nt, Artificial Sequence
  Description of Artificial Sequence: Synthetic oligonucleotide
uacagaugaaguccuuuug

SEQ ID NO: 1860747 - RNA, 19 nt, Artificial Sequence
  Description of Artificial Sequence: Synthetic oligonucleotide
uccacuguggcuaucccga

SEQ ID NO: 1860748 - RNA, 19 nt, Artificial Sequence
  Description of Artificial Sequence: Synthetic oligonucleotide
cucucagugacucagagaa

SEQ ID NO: 1860749 - RNA, 19 nt, Artificial Sequence
  Description of Artificial Sequence: Synthetic oligonucleotide
ucuugcucaagguugcugu

SEQ ID NO: 1860750 - RNA, 19 nt, Artificial Sequence
  Description of Artificial Sequence: Synthetic oligonucleotide
ugcccaagaucucacaaga

SEQ ID NO: 1860751 - RNA, 19 nt, Artificial Sequence
  Description of Artificial Sequence: Synthetic oligonucleotide
acucagagaagggaugacc

SEQ ID NO: 1860752 - RNA, 19 nt, Artificial Sequence
  Description of Artificial Sequence: Synthetic oligonucleotide
guaugcuaaccucucaggc

SEQ ID NO: 1860753 - RNA, 19 nt, Artificial Sequence
  Description of Artificial Sequence: Synthetic oligonucleotide
aaaacccgaguccacggca

SEQ ID NO: 1860754 - RNA, 19 nt, Artificial Sequence
  Description of Artificial Sequence: Synthetic oligonucleotide
auggugggcauguaucugg

SEQ ID NO: 1860755 - RNA, 19 nt, Artificial Sequence
  Description of Artificial Sequence: Synthetic oligonucleotide
cauauggugggcauguauc

SEQ ID NO: 1860756 - RNA, 19 nt, Artificial Sequence
  Description of Artificial Sequence: Synthetic oligonucleotide
auauagagaaaacccgagu

SEQ ID NO: 1860757 - RNA, 19 nt, Artificial Sequence
  Description of Artificial Sequence: Synthetic oligonucleotide
acugggaaccauuuucuug

SEQ ID NO: 1860758 - RNA, 19 nt, Artificial Sequence
  Description of Artificial Sequence: Synthetic oligonucleotide
gugggcauguaucugguag

SEQ ID NO: 1860759 - RNA, 19 nt, Artificial Sequence
  Description of Artificial Sequence: Synthetic oligonucleotide
uguaucugguagaugugac

SEQ ID NO: 1860760 - RNA, 19 nt, Artificial Sequence
  Description of Artificial Sequence: Synthetic oligonucleotide
acaagagcaaguagcacgg

SEQ ID NO: 1860761 - RNA, 19 nt, Artificial Sequence
  Description of Artificial Sequence: Synthetic oligonucleotide
agguaagccuaccugcagg

SEQ ID NO: 1860762 - RNA, 19 nt, Artificial Sequence
  Description of Artificial Sequence: Synthetic oligonucleotide
ggagauguaacaguucacg

SEQ ID NO: 1860763 - RNA, 19 nt, Artificial Sequence
  Description of Artificial Sequence: Synthetic oligonucleotide
uguaacaguucacggugug

SEQ ID NO: 1860764 - RNA, 19 nt, Artificial Sequence
  Description of Artificial Sequence: Synthetic oligonucleotide
gguguuacagaugaagucc

SEQ ID NO: 1860765 - RNA, 19 nt, Artificial Sequence
  Description of Artificial Sequence: Synthetic oligonucleotide
gauaaagaccaccgacagc

SEQ ID NO: 1860766 - RNA, 19 nt, Artificial Sequence
  Description of Artificial Sequence: Synthetic oligonucleotide
aguucaugcuggcuguguc

SEQ ID NO: 1860767 - RNA, 19 nt, Artificial Sequence
  Description of Artificial Sequence: Synthetic oligonucleotide
cucacguggacguguaugc

SEQ ID NO: 1860768 - RNA, 19 nt, Artificial Sequence
  Description of Artificial Sequence: Synthetic oligonucleotide
aucccgaccuuuguuaggc

SEQ ID NO: 1860769 - RNA, 19 nt, Artificial Sequence
  Description of Artificial Sequence: Synthetic oligonucleotide
ucacaacaaccacugggcc

SEQ ID NO: 1860770 - RNA, 19 nt, Artificial Sequence
  Description of Artificial Sequence: Synthetic oligonucleotide
cuuggguuggcuuuaguga

SEQ ID NO: 1860771 - RNA, 19 nt, Artificial Sequence
  Description of Artificial Sequence: Synthetic oligonucleotide
gagucacaaggccugguag

SEQ ID NO: 1860772 - RNA, 19 nt, Artificial Sequence
  Description of Artificial Sequence: Synthetic oligonucleotide
aagagcaaguagcacggau

SEQ ID NO: 1860773 - RNA, 19 nt, Artificial Sequence
  Description of Artificial Sequence: Synthetic oligonucleotide
agauauagagaaaacccga

SEQ ID NO: 1860774 - RNA, 19 nt, Artificial Sequence
  Description of Artificial Sequence: Synthetic oligonucleotide
gguagaacccacaaauggg

SEQ ID NO: 1860775 - RNA, 19 nt, Artificial Sequence
  Description of Artificial Sequence: Synthetic oligonucleotide
ucgucauagcagacguugg

SEQ ID NO: 1860776 - RNA, 19 nt, Artificial Sequence
  Description of Artificial Sequence: Synthetic oligonucleotide
gcacggauggucuugaacc

SEQ ID NO: 1860777 - RNA, 19 nt, Artificial Sequence
  Description of Artificial Sequence: Synthetic oligonucleotide
agcaagcuaccacucgugg

SEQ ID NO: 1860778 - RNA, 19 nt, Artificial Sequence
  Description of Artificial Sequence: Synthetic oligonucleotide
auauggugggcauguaucu

SEQ ID NO: 1860779 - RNA, 19 nt, Artificial Sequence
  Description of Artificial Sequence: Synthetic oligonucleotide
uuuguuucaucgucccaca

SEQ ID NO: 1860780 - RNA, 19 nt, Artificial Sequence
  Description of Artificial Sequence: Synthetic oligonucleotide
uagaacccacaaaugggug

SEQ ID NO: 1860781 - RNA, 19 nt, Artificial Sequence
  Description of Artificial Sequence: Synthetic oligonucleotide
acuuccgaguuuuccggcg

SEQ ID NO: 1860782 - RNA, 19 nt, Artificial Sequence
  Description of Artificial Sequence: Synthetic oligonucleotide
auagauggugucaaggcca

SEQ ID NO: 1860783 - RNA, 19 nt, Artificial Sequence
  Description of Artificial Sequence: Synthetic oligonucleotide
gauccacagagcaagcuac

SEQ ID NO: 1860784 - RNA, 19 nt, Artificial Sequence
  Description of Artificial Sequence: Synthetic oligonucleotide
aucucacaagagcaaguag

SEQ ID NO: 1860785 - RNA, 19 nt, Artificial Sequence
  Description of Artificial Sequence: Synthetic oligonucleotide
ucggaagauaaagaccacc

SEQ ID NO: 1860786 - RNA, 19 nt, Artificial Sequence
  Description of Artificial Sequence: Synthetic oligonucleotide
guuuccgauguuugcggcg

SEQ ID NO: 1860787 - RNA, 19 nt, Artificial Sequence
  Description of Artificial Sequence: Synthetic oligonucleotide
acuaguaugcuaaccucuc

SEQ ID NO: 1860788 - RNA, 19 nt, Artificial Sequence
  Description of Artificial Sequence: Synthetic oligonucleotide
uguccuuauagaugguguc

SEQ ID NO: 1860789 - RNA, 19 nt, Artificial Sequence
  Description of Artificial Sequence: Synthetic oligonucleotide
ugcucaagguugcuguaca

SEQ ID NO: 1860790 - RNA, 19 nt, Artificial Sequence
  Description of Artificial Sequence: Synthetic oligonucleotide
ggagaucacauaugguggg

SEQ ID NO: 1860791 - RNA, 19 nt, Artificial Sequence
  Description of Artificial Sequence: Synthetic oligonucleotide
guguguuaaggcugagagg

SEQ ID NO: 1860792 - RNA, 19 nt, Artificial Sequence
  Description of Artificial Sequence: Synthetic oligonucleotide
uaucugguagaugugacuu

SEQ ID NO: 1860793 - RNA, 19 nt, Artificial Sequence
  Description of Artificial Sequence: Synthetic oligonucleotide
gaaaacccgaguccacggc

SEQ ID NO: 1860794 - RNA, 19 nt, Artificial Sequence
  Description of Artificial Sequence: Synthetic oligonucleotide
ggacggaagaccuccaugc

SEQ ID NO: 1860795 - RNA, 19 nt, Artificial Sequence
  Description of Artificial Sequence: Synthetic oligonucleotide
uaguccuuguagaugcggu

SEQ ID NO: 1860796 - RNA, 19 nt, Artificial Sequence
  Description of Artificial Sequence: Synthetic oligonucleotide
ucacauauggugggcaugu

SEQ ID NO: 1860797 - RNA, 19 nt, Artificial Sequence
  Description of Artificial Sequence: Synthetic oligonucleotide
aucugguagaugugacuuc

SEQ ID NO: 1860798 - RNA, 19 nt, Artificial Sequence
  Description of Artificial Sequence: Synthetic oligonucleotide
agucacaaggccugguaga

SEQ ID NO: 1860799 - RNA, 19 nt, Artificial Sequence
  Description of Artificial Sequence: Synthetic oligonucleotide
cucacucucagugacucag

SEQ ID NO: 1860800 - RNA, 19 nt, Artificial Sequence
  Description of Artificial Sequence: Synthetic oligonucleotide
gguagaugugacuuccgag

SEQ ID NO: 1860801 - RNA, 19 nt, Artificial Sequence
  Description of Artificial Sequence: Synthetic oligonucleotide
aggucacggauacacaccu

SEQ ID NO: 1860802 - RNA, 19 nt, Artificial Sequence
  Description of Artificial Sequence: Synthetic oligonucleotide
cuaucccgaccuuuguuag

SEQ ID NO: 1860803 - RNA, 19 nt, Artificial Sequence
  Description of Artificial Sequence: Synthetic oligonucleotide
cagggauccacagagcaag

SEQ ID NO: 1860804 - RNA, 19 nt, Artificial Sequence
  Description of Artificial Sequence: Synthetic oligonucleotide
augcacuaguaugcuaacc

SEQ ID NO: 1860805 - RNA, 19 nt, Artificial Sequence
  Description of Artificial Sequence: Synthetic oligonucleotide
guaggugaagaccuucuuc

SEQ ID NO: 1860806 - RNA, 19 nt, Artificial Sequence
  Description of Artificial Sequence: Synthetic oligonucleotide
auaguccuuguagaugcgg

SEQ ID NO: 1860807 - RNA, 19 nt, Artificial Sequence
  Description of Artificial Sequence: Synthetic oligonucleotide
guagaugugacuuccgagu

SEQ ID NO: 1860808 - RNA, 19 nt, Artificial Sequence
  Description of Artificial Sequence: Synthetic oligonucleotide
caagcuaccacucguggca

SEQ ID NO: 1860809 - RNA, 19 nt, Artificial Sequence
  Description of Artificial Sequence: Synthetic oligonucleotide
guuucaucgucccacaccu

SEQ ID NO: 1860810 - RNA, 19 nt, Artificial Sequence
  Description of Artificial Sequence: Synthetic oligonucleotide
gggagaucacauauggugg

SEQ ID NO: 1860811 - RNA, 19 nt, Artificial Sequence
  Description of Artificial Sequence: Synthetic oligonucleotide
ugagaggugagagguaccu

SEQ ID NO: 1860812 - RNA, 19 nt, Artificial Sequence
  Description of Artificial Sequence: Synthetic oligonucleotide
aagccuaccugcaggucac

SEQ ID NO: 1860813 - RNA, 19 nt, Artificial Sequence
  Description of Artificial Sequence: Synthetic oligonucleotide
agagguaccugcccaagau

SEQ ID NO: 1860814 - RNA, 19 nt, Artificial Sequence
  Description of Artificial Sequence: Synthetic oligonucleotide
gaaaguguguuaaggcuga

SEQ ID NO: 1860815 - RNA, 19 nt, Artificial Sequence
  Description of Artificial Sequence: Synthetic oligonucleotide
cuccaugcaucucuugccc

SEQ ID NO: 1860816 - RNA, 19 nt, Artificial Sequence
  Description of Artificial Sequence: Synthetic oligonucleotide
ucagagaagggaugaccac

SEQ ID NO: 1860817 - RNA, 19 nt, Artificial Sequence
  Description of Artificial Sequence: Synthetic oligonucleotide
uuuuccggcgccggggacg

SEQ ID NO: 1860818 - RNA, 19 nt, Artificial Sequence
  Description of Artificial Sequence: Synthetic oligonucleotide
gaugcagauggcugcugug

SEQ ID NO: 1860819 - RNA, 19 nt, Artificial Sequence
  Description of Artificial Sequence: Synthetic oligonucleotide
cugguagaacccacaaaug

SEQ ID NO: 1860820 - RNA, 19 nt, Artificial Sequence
  Description of Artificial Sequence: Synthetic oligonucleotide
uaugcacuaguaugcuaac

SEQ ID NO: 1860821 - RNA, 19 nt, Artificial Sequence
  Description of Artificial Sequence: Synthetic oligonucleotide
guaacaguucacggugugg

SEQ ID NO: 1860822 - RNA, 19 nt, Artificial Sequence
  Description of Artificial Sequence: Synthetic oligonucleotide
ugggcauguaucugguaga

SEQ ID NO: 1860823 - RNA, 19 nt, Artificial Sequence
  Description of Artificial Sequence: Synthetic oligonucleotide
guaugcacuaguaugcuaa

SEQ ID NO: 1860824 - RNA, 19 nt, Artificial Sequence
  Description of Artificial Sequence: Synthetic oligonucleotide
acauauggugggcauguau

SEQ ID NO: 1860825 - RNA, 19 nt, Artificial Sequence
  Description of Artificial Sequence: Synthetic oligonucleotide
uagaugcgguggaagauau

SEQ ID NO: 1860826 - RNA, 19 nt, Artificial Sequence
  Description of Artificial Sequence: Synthetic oligonucleotide
caagaucccuuguagaaaa

SEQ ID NO: 1860827 - RNA, 19 nt, Artificial Sequence
  Description of Artificial Sequence: Synthetic oligonucleotide
cauguaucugguagaugug

SEQ ID NO: 1860828 - RNA, 19 nt, Artificial Sequence
  Description of Artificial Sequence: Synthetic oligonucleotide
agacgcacaugggacaccg

SEQ ID NO: 1860829 - RNA, 19 nt, Artificial Sequence
  Description of Artificial Sequence: Synthetic oligonucleotide
cacggauggucuugaaccc

SEQ ID NO: 1860830 - RNA, 19 nt, Artificial Sequence
  Description of Artificial Sequence: Synthetic oligonucleotide
ucacggauacacaccugca

SEQ ID NO: 1860831 - RNA, 19 nt, Artificial Sequence
  Description of Artificial Sequence: Synthetic oligonucleotide
uaccacucguggcauguca

SEQ ID NO: 1860832 - RNA, 19 nt, Artificial Sequence
  Description of Artificial Sequence: Synthetic oligonucleotide
cugcccaagaucucacaag

SEQ ID NO: 1860833 - RNA, 19 nt, Artificial Sequence
  Description of Artificial Sequence: Synthetic oligonucleotide
caggucacggauacacacc

SEQ ID NO: 1860834 - RNA, 19 nt, Artificial Sequence
  Description of Artificial Sequence: Synthetic oligonucleotide
ugggucgggagauguaaca

SEQ ID NO: 1860835 - RNA, 19 nt, Artificial Sequence
  Description of Artificial Sequence: Synthetic oligonucleotide
cagguaggcgaccucacug

SEQ ID NO: 1860836 - RNA, 19 nt, Artificial Sequence
  Description of Artificial Sequence: Synthetic oligonucleotide
uugggagaucacauauggu

SEQ ID NO: 1860837 - RNA, 19 nt, Artificial Sequence
  Description of Artificial Sequence: Synthetic oligonucleotide
cucguggcaugucauaguc

SEQ ID NO: 1860838 - RNA, 19 nt, Artificial Sequence
  Description of Artificial Sequence: Synthetic oligonucleotide
uggguuggcuuuagugacc

SEQ ID NO: 1860839 - RNA, 19 nt, Artificial Sequence
  Description of Artificial Sequence: Synthetic oligonucleotide
agugaccaggcagugacca

SEQ ID NO: 1860840 - RNA, 19 nt, Artificial Sequence
  Description of Artificial Sequence: Synthetic oligonucleotide
gauggugucaaggccagaa

SEQ ID NO: 1860841 - RNA, 19 nt, Artificial Sequence
  Description of Artificial Sequence: Synthetic oligonucleotide
agugacucagagaagggau

SEQ ID NO: 1860842 - RNA, 19 nt, Artificial Sequence
  Description of Artificial Sequence: Synthetic oligonucleotide
cagacguuggggcagccug

SEQ ID NO: 1860843 - RNA, 19 nt, Artificial Sequence
  Description of Artificial Sequence: Synthetic oligonucleotide
uuuagugaccaggcaguga

SEQ ID NO: 1860844 - RNA, 19 nt, Artificial Sequence
  Description of Artificial Sequence: Synthetic oligonucleotide
gaguuuuccggcgccgggg

SEQ ID NO: 1860845 - RNA, 19 nt, Artificial Sequence
  Description of Artificial Sequence: Synthetic oligonucleotide
aaccacugggccauugugu

SEQ ID NO: 1860846 - RNA, 19 nt, Artificial Sequence
  Description of Artificial Sequence: Synthetic oligonucleotide
ucguggcaugucauagucc

SEQ ID NO: 1860847 - RNA, 19 nt, Artificial Sequence
  Description of Artificial Sequence: Synthetic oligonucleotide
aaacccgaguccacggcag

SEQ ID NO: 1860848 - RNA, 19 nt, Artificial Sequence
  Description of Artificial Sequence: Synthetic oligonucleotide
agguaccugcccaagaucu

SEQ ID NO: 1860849 - RNA, 19 nt, Artificial Sequence
  Description of Artificial Sequence: Synthetic oligonucleotide
aaguguguuaaggcugaga

SEQ ID NO: 1860850 - RNA, 19 nt, Artificial Sequence
  Description of Artificial Sequence: Synthetic oligonucleotide
uguaugcacuaguaugcua

SEQ ID NO: 1860851 - RNA, 19 nt, Artificial Sequence
  Description of Artificial Sequence: Synthetic oligonucleotide
gacuuccgaguuuuccggc

SEQ ID NO: 1860852 - RNA, 19 nt, Artificial Sequence
  Description of Artificial Sequence: Synthetic oligonucleotide
cacucucagugacucagag

SEQ ID NO: 1860853 - RNA, 19 nt, Artificial Sequence
  Description of Artificial Sequence: Synthetic oligonucleotide
gaugcggcccagugcagug

SEQ ID NO: 1860854 - RNA, 19 nt, Artificial Sequence
  Description of Artificial Sequence: Synthetic oligonucleotide
accgacagccagaugcggc

SEQ ID NO: 1860855 - RNA, 19 nt, Artificial Sequence
  Description of Artificial Sequence: Synthetic oligonucleotide
gagaucacauauggugggc

SEQ ID NO: 1860856 - RNA, 19 nt, Artificial Sequence
  Description of Artificial Sequence: Synthetic oligonucleotide
ucagugccucacguggacg

SEQ ID NO: 1860857 - RNA, 19 nt, Artificial Sequence
  Description of Artificial Sequence: Synthetic oligonucleotide
uaaagaccaccgacagcca

SEQ ID NO: 1860858 - RNA, 19 nt, Artificial Sequence
  Description of Artificial Sequence: Synthetic oligonucleotide
auggguguccuuauagaug

SEQ ID NO: 1860859 - RNA, 19 nt, Artificial Sequence
  Description of Artificial Sequence: Synthetic oligonucleotide
cugguagaugugacuuccg

SEQ ID NO: 1860860 - RNA, 19 nt, Artificial Sequence
  Description of Artificial Sequence: Synthetic oligonucleotide
uuguuucaucgucccacac

SEQ ID NO: 1860861 - RNA, 19 nt, Artificial Sequence
  Description of Artificial Sequence: Synthetic oligonucleotide
uucuugcucaagguugcug

SEQ ID NO: 1860862 - RNA, 19 nt, Artificial Sequence
  Description of Artificial Sequence: Synthetic oligonucleotide
ugcaggucacggauacaca

SEQ ID NO: 1860863 - RNA, 19 nt, Artificial Sequence
  Description of Artificial Sequence: Synthetic oligonucleotide
cuuccgaguuuuccggcgc

SEQ ID NO: 1860864 - RNA, 19 nt, Artificial Sequence
  Description of Artificial Sequence: Synthetic oligonucleotide
gcugcugugacuaccauga

SEQ ID NO: 1860865 - RNA, 19 nt, Artificial Sequence
  Description of Artificial Sequence: Synthetic oligonucleotide
uccaugcaucucuugccca

SEQ ID NO: 1860866 - RNA, 19 nt, Artificial Sequence
  Description of Artificial Sequence: Synthetic oligonucleotide
ugagagguaccugcccaag

SEQ ID NO: 1860867 - RNA, 19 nt, Artificial Sequence
  Description of Artificial Sequence: Synthetic oligonucleotide
uuccgaguuuuccggcgcc

SEQ ID NO: 1860868 - RNA, 19 nt, Artificial Sequence
  Description of Artificial Sequence: Synthetic oligonucleotide
acucucagugacucagaga

SEQ ID NO: 1860869 - RNA, 19 nt, Artificial Sequence
  Description of Artificial Sequence: Synthetic oligonucleotide
agaucacauauggugggca

SEQ ID NO: 1860870 - RNA, 19 nt, Artificial Sequence
  Description of Artificial Sequence: Synthetic oligonucleotide
aagaccaccgacagccaga

SEQ ID NO: 1860871 - RNA, 19 nt, Artificial Sequence
  Description of Artificial Sequence: Synthetic oligonucleotide
acggcagccuugaagauga

SEQ ID NO: 1860872 - RNA, 19 nt, Artificial Sequence
  Description of Artificial Sequence: Synthetic oligonucleotide
cacucguggcaugucauag

SEQ ID NO: 1860873 - RNA, 19 nt, Artificial Sequence
  Description of Artificial Sequence: Synthetic oligonucleotide
guuugcggcggugucugcg

SEQ ID NO: 1860874 - RNA, 19 nt, Artificial Sequence
  Description of Artificial Sequence: Synthetic oligonucleotide
acggaagaccuccaugcau

SEQ ID NO: 1860875 - RNA, 19 nt, Artificial Sequence
  Description of Artificial Sequence: Synthetic oligonucleotide
uuugcggcggugucugcgu

SEQ ID NO: 1860876 - RNA, 19 nt, Artificial Sequence
  Description of Artificial Sequence: Synthetic oligonucleotide
caaccacugggccauugug

SEQ ID NO: 1860877 - RNA, 19 nt, Artificial Sequence
  Description of Artificial Sequence: Synthetic oligonucleotide
ucugcguucccggucuucu

SEQ ID NO: 1860878 - RNA, 19 nt, Artificial Sequence
  Description of Artificial Sequence: Synthetic oligonucleotide
gagguaccugcccaagauc

SEQ ID NO: 1860879 - RNA, 19 nt, Artificial Sequence
  Description of Artificial Sequence: Synthetic oligonucleotide
aguuuuccggcgccgggga

SEQ ID NO: 1860880 - RNA, 19 nt, Artificial Sequence
  Description of Artificial Sequence: Synthetic oligonucleotide
gcaggucacggauacacac

SEQ ID NO: 1860881 - RNA, 19 nt, Artificial Sequence
  Description of Artificial Sequence: Synthetic oligonucleotide
ucgggagauguaacaguuc

SEQ ID NO: 1860882 - RNA, 19 nt, Artificial Sequence
  Description of Artificial Sequence: Synthetic oligonucleotide
uagugaccaggcagugacc

SEQ ID NO: 1860883 - RNA, 19 nt, Artificial Sequence
  Description of Artificial Sequence: Synthetic oligonucleotide
auguuugcggcggugucug

SEQ ID NO: 1860884 - RNA, 19 nt, Artificial Sequence
  Description of Artificial Sequence: Synthetic oligonucleotide
ucccggucuucucgguagg

SEQ ID NO: 1860885 - RNA, 19 nt, Artificial Sequence
  Description of Artificial Sequence: Synthetic oligonucleotide
ggcgaccucacugagguug

SEQ ID NO: 1860886 - RNA, 19 nt, Artificial Sequence
  Description of Artificial Sequence: Synthetic oligonucleotide
uuaggccaucauuuucauc

SEQ ID NO: 1860887 - RNA, 19 nt, Artificial Sequence
  Description of Artificial Sequence: Synthetic oligonucleotide
acucguggcaugucauagu

SEQ ID NO: 1860888 - RNA, 19 nt, Artificial Sequence
  Description of Artificial Sequence: Synthetic oligonucleotide
cuuuagugaccaggcagug

SEQ ID NO: 1860889 - RNA, 19 nt, Artificial Sequence
  Description of Artificial Sequence: Synthetic oligonucleotide
uggugggcauguaucuggu

SEQ ID NO: 1860890 - RNA, 19 nt, Artificial Sequence
  Description of Artificial Sequence: Synthetic oligonucleotide
aggccagaacucuuucaca

SEQ ID NO: 1860891 - RNA, 19 nt, Artificial Sequence
  Description of Artificial Sequence: Synthetic oligonucleotide
aggccgccccucuucuugc

SEQ ID NO: 1860892 - RNA, 19 nt, Artificial Sequence
  Description of Artificial Sequence: Synthetic oligonucleotide
ugagguugaguaggaugca

SEQ ID NO: 1860893 - RNA, 19 nt, Artificial Sequence
  Description of Artificial Sequence: Synthetic oligonucleotide
ucgucccacaccucuucug

SEQ ID NO: 1860894 - RNA, 19 nt, Artificial Sequence
  Description of Artificial Sequence: Synthetic oligonucleotide
guagaacccacaaaugggu

SEQ ID NO: 1860895 - RNA, 19 nt, Artificial Sequence
  Description of Artificial Sequence: Synthetic oligonucleotide
uuuccggcgccggggacgg

SEQ ID NO: 1860896 - RNA, 19 nt, Artificial Sequence
  Description of Artificial Sequence: Synthetic oligonucleotide
ugucaaggccagaacucuu

SEQ ID NO: 1860897 - RNA, 19 nt, Artificial Sequence
  Description of Artificial Sequence: Synthetic oligonucleotide
gcaaguagcacggaugguc

SEQ ID NO: 1860898 - RNA, 19 nt, Artificial Sequence
  Description of Artificial Sequence: Synthetic oligonucleotide
gcugugacuaccaugaagu

SEQ ID NO: 1860899 - RNA, 19 nt, Artificial Sequence
  Description of Artificial Sequence: Synthetic oligonucleotide
uuucuuggguuggcuuuag

SEQ ID NO: 1860900 - RNA, 19 nt, Artificial Sequence
  Description of Artificial Sequence: Synthetic oligonucleotide
gacggaagaccuccaugca

SEQ ID NO: 1860901 - RNA, 19 nt, Artificial Sequence
  Description of Artificial Sequence: Synthetic oligonucleotide
acaaauggguguccuuaua

SEQ ID NO: 1860902 - RNA, 19 nt, Artificial Sequence
  Description of Artificial Sequence: Synthetic oligonucleotide
ugggccauuguguccucac

SEQ ID NO: 1860903 - RNA, 19 nt, Artificial Sequence
  Description of Artificial Sequence: Synthetic oligonucleotide
cacuaguaugcuaaccucu

SEQ ID NO: 1860904 - RNA, 19 nt, Artificial Sequence
  Description of Artificial Sequence: Synthetic oligonucleotide
agaugugacuuccgaguuu

SEQ ID NO: 1860905 - RNA, 19 nt, Artificial Sequence
  Description of Artificial Sequence: Synthetic oligonucleotide
ggugagagguaccugccca

SEQ ID NO: 1860906 - RNA, 19 nt, Artificial Sequence
  Description of Artificial Sequence: Synthetic oligonucleotide
cuaguaugcuaaccucuca

SEQ ID NO: 1860907 - RNA, 19 nt, Artificial Sequence
  Description of Artificial Sequence: Synthetic oligonucleotide
gagagguaccugcccaaga

SEQ ID NO: 1860908 - RNA, 19 nt, Artificial Sequence
  Description of Artificial Sequence: Synthetic oligonucleotide
agugaccagguaagccuac

SEQ ID NO: 1860909 - RNA, 19 nt, Artificial Sequence
  Description of Artificial Sequence: Synthetic oligonucleotide
cucagugccucacguggac

SEQ ID NO: 1860910 - RNA, 19 nt, Artificial Sequence
  Description of Artificial Sequence: Synthetic oligonucleotide
aaguagcacggauggucuu

SEQ ID NO: 1860911 - RNA, 19 nt, Artificial Sequence
  Description of Artificial Sequence: Synthetic oligonucleotide
gguuuccgauguuugcggc

SEQ ID NO: 1860912 - RNA, 19 nt, Artificial Sequence
  Description of Artificial Sequence: Synthetic oligonucleotide
ccuccaugcaucucuugcc

SEQ ID NO: 1860913 - RNA, 19 nt, Artificial Sequence
  Description of Artificial Sequence: Synthetic oligonucleotide
cacaugggacaccgggaag

SEQ ID NO: 1860914 - RNA, 19 nt, Artificial Sequence
  Description of Artificial Sequence: Synthetic oligonucleotide
caugcaucucuugcccacc

SEQ ID NO: 1860915 - RNA, 19 nt, Artificial Sequence
  Description of Artificial Sequence: Synthetic oligonucleotide
gacguguaugcacuaguau

SEQ ID NO: 1860916 - RNA, 19 nt, Artificial Sequence
  Description of Artificial Sequence: Synthetic oligonucleotide
uggggcguuggguuuccga

SEQ ID NO: 1860917 - RNA, 19 nt, Artificial Sequence
  Description of Artificial Sequence: Synthetic oligonucleotide
cggauacacaccugcaucc

SEQ ID NO: 1860918 - RNA, 19 nt, Artificial Sequence
  Description of Artificial Sequence: Synthetic oligonucleotide
uggcuaucccgaccuuugu

SEQ ID NO: 1860919 - RNA, 19 nt, Artificial Sequence
  Description of Artificial Sequence: Synthetic oligonucleotide
cuaaccucucaggcccugg

SEQ ID NO: 1860920 - RNA, 19 nt, Artificial Sequence
  Description of Artificial Sequence: Synthetic oligonucleotide
caaguagcacggauggucu

SEQ ID NO: 1860921 - RNA, 19 nt, Artificial Sequence
  Description of Artificial Sequence: Synthetic oligonucleotide
ucacguggacguguaugca

SEQ ID NO: 1860922 - RNA, 19 nt, Artificial Sequence
  Description of Artificial Sequence: Synthetic oligonucleotide
accgcucaagaucccuugu

SEQ ID NO: 1860923 - RNA, 19 nt, Artificial Sequence
  Description of Artificial Sequence: Synthetic oligonucleotide
caucgucccacaccucuuc

SEQ ID NO: 1860924 - RNA, 19 nt, Artificial Sequence
  Description of Artificial Sequence: Synthetic oligonucleotide
guaccugcccaagaucuca

SEQ ID NO: 1860925 - RNA, 19 nt, Artificial Sequence
  Description of Artificial Sequence: Synthetic oligonucleotide
gcacuaguaugcuaaccuc

SEQ ID NO: 1860926 - RNA, 19 nt, Artificial Sequence
  Description of Artificial Sequence: Synthetic oligonucleotide
uguggcuaucccgaccuuu

SEQ ID NO: 1860927 - RNA, 19 nt, Artificial Sequence
  Description of Artificial Sequence: Synthetic oligonucleotide
gggacggaagaccuccaug

SEQ ID NO: 1860928 - RNA, 19 nt, Artificial Sequence
  Description of Artificial Sequence: Synthetic oligonucleotide
cacggcagccuugaagaug

SEQ ID NO: 1860929 - RNA, 19 nt, Artificial Sequence
  Description of Artificial Sequence: Synthetic oligonucleotide
gacucagagaagggaugac

SEQ ID NO: 1860930 - RNA, 19 nt, Artificial Sequence
  Description of Artificial Sequence: Synthetic oligonucleotide
ccagaugcggcccagugca

SEQ ID NO: 1860931 - RNA, 19 nt, Artificial Sequence
  Description of Artificial Sequence: Synthetic oligonucleotide
ucacaaggccugguagaac

SEQ ID NO: 1860932 - RNA, 19 nt, Artificial Sequence
  Description of Artificial Sequence: Synthetic oligonucleotide
gcuaucccgaccuuuguua

SEQ ID NO: 1860933 - RNA, 19 nt, Artificial Sequence
  Description of Artificial Sequence: Synthetic oligonucleotide
uccgauguuugcggcggug

SEQ ID NO: 1860934 - RNA, 19 nt, Artificial Sequence
  Description of Artificial Sequence: Synthetic oligonucleotide
aucucuugcccaccaggua

SEQ ID NO: 1860935 - RNA, 19 nt, Artificial Sequence
  Description of Artificial Sequence: Synthetic oligonucleotide
gaccuccaugcaucucuug

SEQ ID NO: 1860936 - RNA, 19 nt, Artificial Sequence
  Description of Artificial Sequence: Synthetic oligonucleotide
ucacaccgcucaagauccc

SEQ ID NO: 1860937 - RNA, 19 nt, Artificial Sequence
  Description of Artificial Sequence: Synthetic oligonucleotide
gauguuugcggcggugucu

SEQ ID NO: 1860938 - RNA, 19 nt, Artificial Sequence
  Description of Artificial Sequence: Synthetic oligonucleotide
gggucgggagauguaacag

SEQ ID NO: 1860939 - RNA, 19 nt, Artificial Sequence
  Description of Artificial Sequence: Synthetic oligonucleotide
ggauccacagagcaagcua

SEQ ID NO: 1860940 - RNA, 19 nt, Artificial Sequence
  Description of Artificial Sequence: Synthetic oligonucleotide
ucccgaccuuuguuaggcc

SEQ ID NO: 1860941 - RNA, 19 nt, Artificial Sequence
  Description of Artificial Sequence: Synthetic oligonucleotide
gggaugaccacagucccca

SEQ ID NO: 1860942 - RNA, 19 nt, Artificial Sequence
  Description of Artificial Sequence: Synthetic oligonucleotide
caucucuugcccaccaggu

SEQ ID NO: 1860943 - RNA, 19 nt, Artificial Sequence
  Description of Artificial Sequence: Synthetic oligonucleotide
gucacaaggccugguagaa

SEQ ID NO: 1860944 - RNA, 19 nt, Artificial Sequence
  Description of Artificial Sequence: Synthetic oligonucleotide
acggauggucuugaacccu

SEQ ID NO: 1860945 - RNA, 19 nt, Artificial Sequence
  Description of Artificial Sequence: Synthetic oligonucleotide
agaugcggcccagugcagu

SEQ ID NO: 1860946 - RNA, 19 nt, Artificial Sequence
  Description of Artificial Sequence: Synthetic oligonucleotide
gugaccagguaagccuacc

SEQ ID NO: 1860947 - RNA, 19 nt, Artificial Sequence
  Description of Artificial Sequence: Synthetic oligonucleotide
guguccuuauagauggugu

SEQ ID NO: 1860948 - RNA, 19 nt, Artificial Sequence
  Description of Artificial Sequence: Synthetic oligonucleotide
ccucacugagguugaguag

SEQ ID NO: 1860949 - RNA, 19 nt, Artificial Sequence
  Description of Artificial Sequence: Synthetic oligonucleotide
ggcggugucugcguucccg

SEQ ID NO: 1860950 - RNA, 19 nt, Artificial Sequence
  Description of Artificial Sequence: Synthetic oligonucleotide
cgcucaagaucccuuguag

SEQ ID NO: 1860951 - RNA, 19 nt, Artificial Sequence
  Description of Artificial Sequence: Synthetic oligonucleotide
gugagagguaccugcccaa

SEQ ID NO: 1860952 - RNA, 19 nt, Artificial Sequence
  Description of Artificial Sequence: Synthetic oligonucleotide
gaccuuuguuaggccauca

SEQ ID NO: 1860953 - RNA, 19 nt, Artificial Sequence
  Description of Artificial Sequence: Synthetic oligonucleotide
caccugcauccacuguggc

SEQ ID NO: 1860954 - RNA, 19 nt, Artificial Sequence
  Description of Artificial Sequence: Synthetic oligonucleotide
uguuugcggcggugucugc

SEQ ID NO: 1860955 - RNA, 19 nt, Artificial Sequence
  Description of Artificial Sequence: Synthetic oligonucleotide
agaccaccgacagccagau

SEQ ID NO: 1860956 - RNA, 19 nt, Artificial Sequence
  Description of Artificial Sequence: Synthetic oligonucleotide
gguaagccuaccugcaggu

SEQ ID NO: 1860957 - RNA, 19 nt, Artificial Sequence
  Description of Artificial Sequence: Synthetic oligonucleotide
gccagaacucuuucacaac

SEQ ID NO: 1860958 - RNA, 19 nt, Artificial Sequence
  Description of Artificial Sequence: Synthetic oligonucleotide
guagcacggauggucuuga

SEQ ID NO: 1860959 - RNA, 19 nt, Artificial Sequence
  Description of Artificial Sequence: Synthetic oligonucleotide
gagacgcacaugggacacc

SEQ ID NO: 1860960 - RNA, 19 nt, Artificial Sequence
  Description of Artificial Sequence: Synthetic oligonucleotide
gacgcacaugggacaccgg

SEQ ID NO: 1860961 - RNA, 19 nt, Artificial Sequence
  Description of Artificial Sequence: Synthetic oligonucleotide
ugccucacguggacgugua

SEQ ID NO: 1860962 - RNA, 19 nt, Artificial Sequence
  Description of Artificial Sequence: Synthetic oligonucleotide
ggugucugcguucccgguc

SEQ ID NO: 1860963 - RNA, 19 nt, Artificial Sequence
  Description of Artificial Sequence: Synthetic oligonucleotide
cagugaccagguaagccua

SEQ ID NO: 1860964 - RNA, 19 nt, Artificial Sequence
  Description of Artificial Sequence: Synthetic oligonucleotide
augcgguggaagauauaga

SEQ ID NO: 1860965 - RNA, 19 nt, Artificial Sequence
  Description of Artificial Sequence: Synthetic oligonucleotide
agcaaguagcacggauggu

SEQ ID NO: 1860966 - RNA, 19 nt, Artificial Sequence
  Description of Artificial Sequence: Synthetic oligonucleotide
agugccucacguggacgug

SEQ ID NO: 1860967 - RNA, 19 nt, Artificial Sequence
  Description of Artificial Sequence: Synthetic oligonucleotide
gucuugaacccuggucuuc

SEQ ID NO: 1860968 - RNA, 19 nt, Artificial Sequence
  Description of Artificial Sequence: Synthetic oligonucleotide
gggcguuggguuuccgaug

SEQ ID NO: 1860969 - RNA, 19 nt, Artificial Sequence
  Description of Artificial Sequence: Synthetic oligonucleotide
guuaggccaucauuuucau

SEQ ID NO: 1860970 - RNA, 19 nt, Artificial Sequence
  Description of Artificial Sequence: Synthetic oligonucleotide
cagaugcggcccagugcag

SEQ ID NO: 1860971 - RNA, 19 nt, Artificial Sequence
  Description of Artificial Sequence: Synthetic oligonucleotide
ccucacguggacguguaug

SEQ ID NO: 1860972 - RNA, 19 nt, Artificial Sequence
  Description of Artificial Sequence: Synthetic oligonucleotide
ggagucacaaggccuggua

SEQ ID NO: 1860973 - RNA, 19 nt, Artificial Sequence
  Description of Artificial Sequence: Synthetic oligonucleotide
cugugacuaccaugaagua

SEQ ID NO: 1860974 - RNA, 19 nt, Artificial Sequence
  Description of Artificial Sequence: Synthetic oligonucleotide
guuuuccggcgccggggac

SEQ ID NO: 1860975 - RNA, 19 nt, Artificial Sequence
  Description of Artificial Sequence: Synthetic oligonucleotide
gaugaccacaguccccauu

SEQ ID NO: 1860976 - RNA, 19 nt, Artificial Sequence
  Description of Artificial Sequence: Synthetic oligonucleotide
caaggccugguagaaccca

SEQ ID NO: 1860977 - RNA, 19 nt, Artificial Sequence
  Description of Artificial Sequence: Synthetic oligonucleotide
gcuuuagugaccaggcagu

SEQ ID NO: 1860978 - RNA, 19 nt, Artificial Sequence
  Description of Artificial Sequence: Synthetic oligonucleotide
gugggucgggagauguaac

SEQ ID NO: 1860979 - RNA, 19 nt, Artificial Sequence
  Description of Artificial Sequence: Synthetic oligonucleotide
accacucguggcaugucau

SEQ ID NO: 1860980 - RNA, 19 nt, Artificial Sequence
  Description of Artificial Sequence: Synthetic oligonucleotide
cucgguaggccacaugcau

SEQ ID NO: 1860981 - RNA, 19 nt, Artificial Sequence
  Description of Artificial Sequence: Synthetic oligonucleotide
ggcguuggguuuccgaugu

SEQ ID NO: 1860982 - RNA, 19 nt, Artificial Sequence
  Description of Artificial Sequence: Synthetic oligonucleotide
ccauuguguccucacucuc

SEQ ID NO: 1860983 - RNA, 19 nt, Artificial Sequence
  Description of Artificial Sequence: Synthetic oligonucleotide
ggguuggcuuuagugacca

SEQ ID NO: 1860984 - RNA, 19 nt, Artificial Sequence
  Description of Artificial Sequence: Synthetic oligonucleotide
ccauuucacaggaaagugu

SEQ ID NO: 1860985 - RNA, 19 nt, Artificial Sequence
  Description of Artificial Sequence: Synthetic oligonucleotide
cagccuugaagaugagacu

SEQ ID NO: 1860986 - RNA, 19 nt, Artificial Sequence
  Description of Artificial Sequence: Synthetic oligonucleotide
gucgggagauguaacaguu

SEQ ID NO: 1860987 - RNA, 19 nt, Artificial Sequence
  Description of Artificial Sequence: Synthetic oligonucleotide
gcccaagaucucacaagag

SEQ ID NO: 1860988 - RNA, 19 nt, Artificial Sequence
  Description of Artificial Sequence: Synthetic oligonucleotide
cacaaauggguguccuuau

SEQ ID NO: 1860989 - RNA, 19 nt, Artificial Sequence
  Description of Artificial Sequence: Synthetic oligonucleotide
cacggauacacaccugcau

SEQ ID NO: 1860990 - RNA, 19 nt, Artificial Sequence
  Description of Artificial Sequence: Synthetic oligonucleotide
cagugccucacguggacgu

SEQ ID NO: 1860991 - RNA, 19 nt, Artificial Sequence
  Description of Artificial Sequence: Synthetic oligonucleotide
ggucuucucgguaggccac

SEQ ID NO: 1860992 - RNA, 19 nt, Artificial Sequence
  Description of Artificial Sequence: Synthetic oligonucleotide
gccuaccugcaggucacgg

SEQ ID NO: 1860993 - RNA, 19 nt, Artificial Sequence
  Description of Artificial Sequence: Synthetic oligonucleotide
uccggcgccggggacggaa

SEQ ID NO: 1860994 - RNA, 19 nt, Artificial Sequence
  Description of Artificial Sequence: Synthetic oligonucleotide
gcgguggaagauauagaga

SEQ ID NO: 1860995 - RNA, 19 nt, Artificial Sequence
  Description of Artificial Sequence: Synthetic oligonucleotide
agccuaccugcaggucacg

SEQ ID NO: 1860996 - RNA, 19 nt, Artificial Sequence
  Description of Artificial Sequence: Synthetic oligonucleotide
caugggacaccgggaagaa

SEQ ID NO: 1860997 - RNA, 19 nt, Artificial Sequence
  Description of Artificial Sequence: Synthetic oligonucleotide
cggauggucuugaacccug

SEQ ID NO: 1860998 - RNA, 19 nt, Artificial Sequence
  Description of Artificial Sequence: Synthetic oligonucleotide
ccuaccugcaggucacgga

SEQ ID NO: 1860999 - RNA, 19 nt, Artificial Sequence
  Description of Artificial Sequence: Synthetic oligonucleotide
ggacguguaugcacuagua

SEQ ID NO: 1861000 - RNA, 19 nt, Artificial Sequence
  Description of Artificial Sequence: Synthetic oligonucleotide
gaccaccgacagccagaug

SEQ ID NO: 1861001 - RNA, 19 nt, Artificial Sequence
  Description of Artificial Sequence: Synthetic oligonucleotide
cuaccacucguggcauguc

SEQ ID NO: 1861002 - RNA, 19 nt, Artificial Sequence
  Description of Artificial Sequence: Synthetic oligonucleotide
uugcggcggugucugcguu

SEQ ID NO: 1861003 - RNA, 19 nt, Artificial Sequence
  Description of Artificial Sequence: Synthetic oligonucleotide
cccgaccuuuguuaggcca

SEQ ID NO: 1861004 - RNA, 19 nt, Artificial Sequence
  Description of Artificial Sequence: Synthetic oligonucleotide
acaccgcucaagaucccuu

SEQ ID NO: 1861005 - RNA, 19 nt, Artificial Sequence
  Description of Artificial Sequence: Synthetic oligonucleotide
cgaguuuuccggcgccggg

SEQ ID NO: 1861006 - RNA, 19 nt, Artificial Sequence
  Description of Artificial Sequence: Synthetic oligonucleotide
ugucugcguucccggucuu

SEQ ID NO: 1861007 - RNA, 19 nt, Artificial Sequence
  Description of Artificial Sequence: Synthetic oligonucleotide
gguaccugcccaagaucuc

SEQ ID NO: 1861008 - RNA, 19 nt, Artificial Sequence
  Description of Artificial Sequence: Synthetic oligonucleotide
caagagcaaguagcacgga

SEQ ID NO: 1861009 - RNA, 19 nt, Artificial Sequence
  Description of Artificial Sequence: Synthetic oligonucleotide
ccgaguuuuccggcgccgg

SEQ ID NO: 1861010 - RNA, 19 nt, Artificial Sequence
  Description of Artificial Sequence: Synthetic oligonucleotide
gucccacaccucuucugcu

SEQ ID NO: 1861011 - RNA, 19 nt, Artificial Sequence
  Description of Artificial Sequence: Synthetic oligonucleotide
ggucacggauacacaccug

SEQ ID NO: 1861012 - RNA, 19 nt, Artificial Sequence
  Description of Artificial Sequence: Synthetic oligonucleotide
ggggcguuggguuuccgau

SEQ ID NO: 1861013 - RNA, 19 nt, Artificial Sequence
  Description of Artificial Sequence: Synthetic oligonucleotide
gggaaccauuuucuugggu

SEQ ID NO: 1861014 - RNA, 19 nt, Artificial Sequence
  Description of Artificial Sequence: Synthetic oligonucleotide
ccuuuguuaggccaucauu

SEQ ID NO: 1861015 - RNA, 19 nt, Artificial Sequence
  Description of Artificial Sequence: Synthetic oligonucleotide
gcuaccacucguggcaugu

SEQ ID NO: 1861016 - RNA, 19 nt, Artificial Sequence
  Description of Artificial Sequence: Synthetic oligonucleotide
gucugcguucccggucuuc

SEQ ID NO: 1861017 - RNA, 19 nt, Artificial Sequence
  Description of Artificial Sequence: Synthetic oligonucleotide
gcagggauccacagagcaa

SEQ ID NO: 1861018 - RNA, 19 nt, Artificial Sequence
  Description of Artificial Sequence: Synthetic oligonucleotide
ccacuguggcuaucccgac

SEQ ID NO: 1861019 - RNA, 19 nt, Artificial Sequence
  Description of Artificial Sequence: Synthetic oligonucleotide
ggucuugaacccuggucuu

SEQ ID NO: 1861020 - RNA, 19 nt, Artificial Sequence
  Description of Artificial Sequence: Synthetic oligonucleotide
agaugcgguggaagauaua

SEQ ID NO: 1861021 - RNA, 19 nt, Artificial Sequence
  Description of Artificial Sequence: Synthetic oligonucleotide
cuggggcguuggguuuccg

SEQ ID NO: 1861022 - RNA, 19 nt, Artificial Sequence
  Description of Artificial Sequence: Synthetic oligonucleotide
cgauguuugcggcgguguc

SEQ ID NO: 1861023 - RNA, 19 nt, Artificial Sequence
  Description of Artificial Sequence: Synthetic oligonucleotide
aguccccauuucacaggaa

SEQ ID NO: 1861024 - RNA, 19 nt, Artificial Sequence
  Description of Artificial Sequence: Synthetic oligonucleotide
gcccagugcaguggaguac

SEQ ID NO: 1861025 - RNA, 19 nt, Artificial Sequence
  Description of Artificial Sequence: Synthetic oligonucleotide
ggugggcauguaucuggua

SEQ ID NO: 1861026 - RNA, 19 nt, Artificial Sequence
  Description of Artificial Sequence: Synthetic oligonucleotide
ccccauuucacaggaaagu

SEQ ID NO: 1861027 - RNA, 19 nt, Artificial Sequence
  Description of Artificial Sequence: Synthetic oligonucleotide
gggauccacagagcaagcu

SEQ ID NO: 1861028 - RNA, 19 nt, Artificial Sequence
  Description of Artificial Sequence: Synthetic oligonucleotide
cacaccgcucaagaucccu

SEQ ID NO: 1861029 - RNA, 19 nt, Artificial Sequence
  Description of Artificial Sequence: Synthetic oligonucleotide
ggcuaucccgaccuuuguu

SEQ ID NO: 1861030 - RNA, 19 nt, Artificial Sequence
  Description of Artificial Sequence: Synthetic oligonucleotide
ccaguucaugcuggcugug

SEQ ID NO: 1861031 - RNA, 19 nt, Artificial Sequence
  Description of Artificial Sequence: Synthetic oligonucleotide
gcgaccucacugagguuga

SEQ ID NO: 1861032 - RNA, 19 nt, Artificial Sequence
  Description of Artificial Sequence: Synthetic oligonucleotide
uggggcagccuggcugcuu

SEQ ID NO: 1861033 - RNA, 19 nt, Artificial Sequence
  Description of Artificial Sequence: Synthetic oligonucleotide
cccagugcaguggaguacu

SEQ ID NO: 1861034 - RNA, 19 nt, Artificial Sequence
  Description of Artificial Sequence: Synthetic oligonucleotide
ccacucguggcaugucaua

SEQ ID NO: 1861035 - RNA, 19 nt, Artificial Sequence
  Description of Artificial Sequence: Synthetic oligonucleotide
ccgcucaagaucccuugua

SEQ ID NO: 1861036 - RNA, 19 nt, Artificial Sequence
  Description of Artificial Sequence: Synthetic oligonucleotide
ccgaccuuuguuaggccau

SEQ ID NO: 1861037 - RNA, 19 nt, Artificial Sequence
  Description of Artificial Sequence: Synthetic oligonucleotide
ggggacggaagaccuccau

SEQ ID NO: 1861038 - RNA, 19 nt, Artificial Sequence
  Description of Artificial Sequence: Synthetic oligonucleotide
cacugagguugaguaggau

SEQ ID NO: 1861039 - RNA, 19 nt, Artificial Sequence
  Description of Artificial Sequence: Synthetic oligonucleotide
cgaccuuuguuaggccauc

SEQ ID NO: 1861040 - RNA, 19 nt, Artificial Sequence
  Description of Artificial Sequence: Synthetic oligonucleotide
ggcugagaggugagaggua

SEQ ID NO: 1861041 - RNA, 19 nt, Artificial Sequence
  Description of Artificial Sequence: Synthetic oligonucleotide
gcggcccagugcaguggag

SEQ ID NO: 1861042 - RNA, 19 nt, Artificial Sequence
  Description of Artificial Sequence: Synthetic oligonucleotide
ccgauguuugcggcggugu

SEQ ID NO: 1861043 - RNA, 19 nt, Artificial Sequence
  Description of Artificial Sequence: Synthetic oligonucleotide
uuccggcgccggggacgga

SEQ ID NO: 1861044 - RNA, 19 nt, Artificial Sequence
  Description of Artificial Sequence: Synthetic oligonucleotide
ggccuccuugggagaucac

SEQ ID NO: 1861045 - RNA, 19 nt, Artificial Sequence
  Description of Artificial Sequence: Synthetic oligonucleotide
ggccgccccucuucuugcu

SEQ ID NO: 1861046 - RNA, 19 nt, Artificial Sequence
  Description of Artificial Sequence: Synthetic oligonucleotide
cagccagaugcggcccagu

SEQ ID NO: 1861047 - RNA, 19 nt, Artificial Sequence
  Description of Artificial Sequence: Synthetic oligonucleotide
cggggacggaagaccucca

SEQ ID NO: 1861048 - RNA, 19 nt, Artificial Sequence
  Description of Artificial Sequence: Synthetic oligonucleotide
gccucacguggacguguau

SEQ ID NO: 1861049 - RNA, 19 nt, Artificial Sequence
  Description of Artificial Sequence: Synthetic oligonucleotide
ccacggcagccuugaagau

SEQ ID NO: 1861050 - RNA, 19 nt, Artificial Sequence
  Description of Artificial Sequence: Synthetic oligonucleotide
cggcgccggggacggaaga

SEQ ID NO: 1861051 - RNA, 19 nt, Artificial Sequence
  Description of Artificial Sequence: Synthetic oligonucleotide
aaauguuuaaaauaacugg

SEQ ID NO: 1861052 - RNA, 19 nt, Artificial Sequence
  Description of Artificial Sequence: Synthetic oligonucleotide
aguaaaacagacuagaguc

SEQ ID NO: 1861053 - RNA, 19 nt, Artificial Sequence
  Description of Artificial Sequence: Synthetic oligonucleotide
aaagcuuuaaucuacaaca

SEQ ID NO: 1861054 - RNA, 19 nt, Artificial Sequence
  Description of Artificial Sequence: Synthetic oligonucleotide
uaaauuugcaauuaaaaug

SEQ ID NO: 1861055 - RNA, 19 nt, Artificial Sequence
  Description of Artificial Sequence: Synthetic oligonucleotide
aaauaaacuuguuagccac

SEQ ID NO: 1861056 - RNA, 19 nt, Artificial Sequence
  Description of Artificial Sequence: Synthetic oligonucleotide
uaaucuacaacaaaggaca

SEQ ID NO: 1861057 - RNA, 19 nt, Artificial Sequence
  Description of Artificial Sequence: Synthetic oligonucleotide
uuugaaacaagauaagaag

SEQ ID NO: 1861058 - RNA, 19 nt, Artificial Sequence
  Description of Artificial Sequence: Synthetic oligonucleotide
aguauuuacuacuauuacc

SEQ ID NO: 1861059 - RNA, 19 nt, Artificial Sequence
  Description of Artificial Sequence: Synthetic oligonucleotide
uucauauugacucuuauac

SEQ ID NO: 1861060 - RNA, 19 nt, Artificial Sequence
  Description of Artificial Sequence: Synthetic oligonucleotide
aaggauuaaggaugaaucc

SEQ ID NO: 1861061 - RNA, 19 nt, Artificial Sequence
  Description of Artificial Sequence: Synthetic oligonucleotide
aagauaagaagacaugguc

SEQ ID NO: 1861062 - RNA, 19 nt, Artificial Sequence
  Description of Artificial Sequence: Synthetic oligonucleotide
aauaaguaguuuugcagac

SEQ ID NO: 1861063 - RNA, 19 nt, Artificial Sequence
  Description of Artificial Sequence: Synthetic oligonucleotide
aauuucgcaacucaugaag

SEQ ID NO: 1861064 - RNA, 19 nt, Artificial Sequence
  Description of Artificial Sequence: Synthetic oligonucleotide
uaaacaacuacucuuguca

SEQ ID NO: 1861065 - RNA, 19 nt, Artificial Sequence
  Description of Artificial Sequence: Synthetic oligonucleotide
caaaggacagauuauagcg

SEQ ID NO: 1861066 - RNA, 19 nt, Artificial Sequence
  Description of Artificial Sequence: Synthetic oligonucleotide
gaaauacuuauuuugaaac

SEQ ID NO: 1861067 - RNA, 19 nt, Artificial Sequence
  Description of Artificial Sequence: Synthetic oligonucleotide
aauccuuacuaauuaauug

SEQ ID NO: 1861068 - RNA, 19 nt, Artificial Sequence
  Description of Artificial Sequence: Synthetic oligonucleotide
uuugaaacaugccuaagcc

SEQ ID NO: 1861069 - RNA, 19 nt, Artificial Sequence
  Description of Artificial Sequence: Synthetic oligonucleotide
uuaaucuacaacaaaggac

SEQ ID NO: 1861070 - RNA, 19 nt, Artificial Sequence
  Description of Artificial Sequence: Synthetic oligonucleotide
aaccuaacaauauucuuuc

SEQ ID NO: 1861071 - RNA, 19 nt, Artificial Sequence
  Description of Artificial Sequence: Synthetic oligonucleotide
aguaaagugacuuaggcaa

SEQ ID NO: 1861072 - RNA, 19 nt, Artificial Sequence
  Description of Artificial Sequence: Synthetic oligonucleotide
uuaacaaagaucuuuuagu

SEQ ID NO: 1861073 - RNA, 19 nt, Artificial Sequence
  Description of Artificial Sequence: Synthetic oligonucleotide
ucuguaguaaaacagacua

SEQ ID NO: 1861074 - RNA, 19 nt, Artificial Sequence
  Description of Artificial Sequence: Synthetic oligonucleotide
uuacuaauuaauuggaaga

SEQ ID NO: 1861075 - RNA, 19 nt, Artificial Sequence
  Description of Artificial Sequence: Synthetic oligonucleotide
ucuugcuuaacucucagca

SEQ ID NO: 1861076 - RNA, 19 nt, Artificial Sequence
  Description of Artificial Sequence: Synthetic oligonucleotide
uuuaaucuacaacaaagga

SEQ ID NO: 1861077 - RNA, 19 nt, Artificial Sequence
  Description of Artificial Sequence: Synthetic oligonucleotide
acaaaggacagauuauagc

SEQ ID NO: 1861078 - RNA, 19 nt, Artificial Sequence
  Description of Artificial Sequence: Synthetic oligonucleotide
auuaugauaauuguuuagg

SEQ ID NO: 1861079 - RNA, 19 nt, Artificial Sequence
  Description of Artificial Sequence: Synthetic oligonucleotide
uuaugauaauuguuuaggg

SEQ ID NO: 1861080 - RNA, 19 nt, Artificial Sequence
  Description of Artificial Sequence: Synthetic oligonucleotide
uaaaacugagacaauaagu

SEQ ID NO: 1861081 - RNA, 19 nt, Artificial Sequence
  Description of Artificial Sequence: Synthetic oligonucleotide
cagauuauagcgcagaaag

SEQ ID NO: 1861082 - RNA, 19 nt, Artificial Sequence
  Description of Artificial Sequence: Synthetic oligonucleotide
aacagaaguuaggagaacc

SEQ ID NO: 1861083 - RNA, 19 nt, Artificial Sequence
  Description of Artificial Sequence: Synthetic oligonucleotide
cuuacuaauuaauuggaag

SEQ ID NO: 1861084 - RNA, 19 nt, Artificial Sequence
  Description of Artificial Sequence: Synthetic oligonucleotide
ucuaaauuguaacaguuuc

SEQ ID NO: 1861085 - RNA, 19 nt, Artificial Sequence
  Description of Artificial Sequence: Synthetic oligonucleotide
aaaucaguacaauauuucu

SEQ ID NO: 1861086 - RNA, 19 nt, Artificial Sequence
  Description of Artificial Sequence: Synthetic oligonucleotide
uuuagugugagcucagucc

SEQ ID NO: 1861087 - RNA, 19 nt, Artificial Sequence
  Description of Artificial Sequence: Synthetic oligonucleotide
uauuugauaagucuuacuu

SEQ ID NO: 1861088 - RNA, 19 nt, Artificial Sequence
  Description of Artificial Sequence: Synthetic oligonucleotide
uguaagagguccauuauga

SEQ ID NO: 1861089 - RNA, 19 nt, Artificial Sequence
  Description of Artificial Sequence: Synthetic oligonucleotide
acaauaaguaguuuugcag

SEQ ID NO: 1861090 - RNA, 19 nt, Artificial Sequence
  Description of Artificial Sequence: Synthetic oligonucleotide
uuuaguaaagugacuuagg

SEQ ID NO: 1861091 - RNA, 19 nt, Artificial Sequence
  Description of Artificial Sequence: Synthetic oligonucleotide
aaugacaccacuuaccaua

SEQ ID NO: 1861092 - RNA, 19 nt, Artificial Sequence
  Description of Artificial Sequence: Synthetic oligonucleotide
uguuagaaguauuuaaaca

SEQ ID NO: 1861093 - RNA, 19 nt, Artificial Sequence
  Description of Artificial Sequence: Synthetic oligonucleotide
gauaagucuuacuucacag

SEQ ID NO: 1861094 - RNA, 19 nt, Artificial Sequence
  Description of Artificial Sequence: Synthetic oligonucleotide
ugcaauuaaaaugacacca

SEQ ID NO: 1861095 - RNA, 19 nt, Artificial Sequence
  Description of Artificial Sequence: Synthetic oligonucleotide
ugaaacaagauaagaagac

SEQ ID NO: 1861096 - RNA, 19 nt, Artificial Sequence
  Description of Artificial Sequence: Synthetic oligonucleotide
cuugauuagaguuggaaug

SEQ ID NO: 1861097 - RNA, 19 nt, Artificial Sequence
  Description of Artificial Sequence: Synthetic oligonucleotide
aagaucuuuuaguaaagug

SEQ ID NO: 1861098 - RNA, 19 nt, Artificial Sequence
  Description of Artificial Sequence: Synthetic oligonucleotide
uuuacuacuauuaccacua

SEQ ID NO: 1861099 - RNA, 19 nt, Artificial Sequence
  Description of Artificial Sequence: Synthetic oligonucleotide
aaauacuuauuuugaaaca

SEQ ID NO: 1861100 - RNA, 19 nt, Artificial Sequence
  Description of Artificial Sequence: Synthetic oligonucleotide
aaaucuaaauuguaacagu

SEQ ID NO: 1861101 - RNA, 19 nt, Artificial Sequence
  Description of Artificial Sequence: Synthetic oligonucleotide
ucaauuucgcaacucauga

SEQ ID NO: 1861102 - RNA, 19 nt, Artificial Sequence
  Description of Artificial Sequence: Synthetic oligonucleotide
uaccacuaaaacuacaagc

SEQ ID NO: 1861103 - RNA, 19 nt, Artificial Sequence
  Description of Artificial Sequence: Synthetic oligonucleotide
uacuuuuaccuacauaagc

SEQ ID NO: 1861104 - RNA, 19 nt, Artificial Sequence
  Description of Artificial Sequence: Synthetic oligonucleotide
ugugauuuuaagaacccga

SEQ ID NO: 1861105 - RNA, 19 nt, Artificial Sequence
  Description of Artificial Sequence: Synthetic oligonucleotide
uuuuaguaaagugacuuag

SEQ ID NO: 1861106 - RNA, 19 nt, Artificial Sequence
  Description of Artificial Sequence: Synthetic oligonucleotide
uuuaagaacccgaagcaac

SEQ ID NO: 1861107 - RNA, 19 nt, Artificial Sequence
  Description of Artificial Sequence: Synthetic oligonucleotide
uuuaccuacauaagcagac

SEQ ID NO: 1861108 - RNA, 19 nt, Artificial Sequence
  Description of Artificial Sequence: Synthetic oligonucleotide
aauuaauuggaagaucuga

SEQ ID NO: 1861109 - RNA, 19 nt, Artificial Sequence
  Description of Artificial Sequence: Synthetic oligonucleotide
uacuauuaccacuaaaacu

SEQ ID NO: 1861110 - RNA, 19 nt, Artificial Sequence
  Description of Artificial Sequence: Synthetic oligonucleotide
uucuaugaagcauuuagcu

SEQ ID NO: 1861111 - RNA, 19 nt, Artificial Sequence
  Description of Artificial Sequence: Synthetic oligonucleotide
uguaguaaaacagacuaga

SEQ ID NO: 1861112 - RNA, 19 nt, Artificial Sequence
  Description of Artificial Sequence: Synthetic oligonucleotide
uuagaaguauuuaaacaac

SEQ ID NO: 1861113 - RNA, 19 nt, Artificial Sequence
  Description of Artificial Sequence: Synthetic oligonucleotide
aaaggacagauuauagcgc

SEQ ID NO: 1861114 - RNA, 19 nt, Artificial Sequence
  Description of Artificial Sequence: Synthetic oligonucleotide
aaacuagcaaggauuaagg

SEQ ID NO: 1861115 - RNA, 19 nt, Artificial Sequence
  Description of Artificial Sequence: Synthetic oligonucleotide
guuagaaguauuuaaacaa

SEQ ID NO: 1861116 - RNA, 19 nt, Artificial Sequence
  Description of Artificial Sequence: Synthetic oligonucleotide
uaaagcuuuaaucuacaac

SEQ ID NO: 1861117 - RNA, 19 nt, Artificial Sequence
  Description of Artificial Sequence: Synthetic oligonucleotide
uaaacuagcaaggauuaag

SEQ ID NO: 1861118 - RNA, 19 nt, Artificial Sequence
  Description of Artificial Sequence: Synthetic oligonucleotide
acuuguuagccacaucagc

SEQ ID NO: 1861119 - RNA, 19 nt, Artificial Sequence
  Description of Artificial Sequence: Synthetic oligonucleotide
uuaaggaugaauccuuacu

SEQ ID NO: 1861120 - RNA, 19 nt, Artificial Sequence
  Description of Artificial Sequence: Synthetic oligonucleotide
uaugauaauuguuuagggu

SEQ ID NO: 1861121 - RNA, 19 nt, Artificial Sequence
  Description of Artificial Sequence: Synthetic oligonucleotide
aagaggucuugcuuaacuc

SEQ ID NO: 1861122 - RNA, 19 nt, Artificial Sequence
  Description of Artificial Sequence: Synthetic oligonucleotide
ucuaugaagcauuuagcug

SEQ ID NO: 1861123 - RNA, 19 nt, Artificial Sequence
  Description of Artificial Sequence: Synthetic oligonucleotide
augauaauuguuuagggua

SEQ ID NO: 1861124 - RNA, 19 nt, Artificial Sequence
  Description of Artificial Sequence: Synthetic oligonucleotide
uuauacaaguuguuagaag

SEQ ID NO: 1861125 - RNA, 19 nt, Artificial Sequence
  Description of Artificial Sequence: Synthetic oligonucleotide
uuuaaaguauuuacuacua

SEQ ID NO: 1861126 - RNA, 19 nt, Artificial Sequence
  Description of Artificial Sequence: Synthetic oligonucleotide
cucuuauacaaguuguuag

SEQ ID NO: 1861127 - RNA, 19 nt, Artificial Sequence
  Description of Artificial Sequence: Synthetic oligonucleotide
aaacaacuacucuugucag

SEQ ID NO: 1861128 - RNA, 19 nt, Artificial Sequence
  Description of Artificial Sequence: Synthetic oligonucleotide
ucuuauacaaguuguuaga

SEQ ID NO: 1861129 - RNA, 19 nt, Artificial Sequence
  Description of Artificial Sequence: Synthetic oligonucleotide
aaagaggucuugcuuaacu

SEQ ID NO: 1861130 - RNA, 19 nt, Artificial Sequence
  Description of Artificial Sequence: Synthetic oligonucleotide
uuuaggguaaauccugugu

SEQ ID NO: 1861131 - RNA, 19 nt, Artificial Sequence
  Description of Artificial Sequence: Synthetic oligonucleotide
uaaauuucacauuggcacc

SEQ ID NO: 1861132 - RNA, 19 nt, Artificial Sequence
  Description of Artificial Sequence: Synthetic oligonucleotide
gauuauagcgcagaaagca

SEQ ID NO: 1861133 - RNA, 19 nt, Artificial Sequence
  Description of Artificial Sequence: Synthetic oligonucleotide
acucuugucaguauguuac

SEQ ID NO: 1861134 - RNA, 19 nt, Artificial Sequence
  Description of Artificial Sequence: Synthetic oligonucleotide
cauacaaacaugcuucuac

SEQ ID NO: 1861135 - RNA, 19 nt, Artificial Sequence
  Description of Artificial Sequence: Synthetic oligonucleotide
uggauuuuauucauauuga

SEQ ID NO: 1861136 - RNA, 19 nt, Artificial Sequence
  Description of Artificial Sequence: Synthetic oligonucleotide
ugguaagucuccaacaacu

SEQ ID NO: 1861137 - RNA, 19 nt, Artificial Sequence
  Description of Artificial Sequence: Synthetic oligonucleotide
uuaacucucagcacacaag

SEQ ID NO: 1861138 - RNA, 19 nt, Artificial Sequence
  Description of Artificial Sequence: Synthetic oligonucleotide
ugaaacaugccuaagccuu

SEQ ID NO: 1861139 - RNA, 19 nt, Artificial Sequence
  Description of Artificial Sequence: Synthetic oligonucleotide
ucuccaacaacuugauuag

SEQ ID NO: 1861140 - RNA, 19 nt, Artificial Sequence
  Description of Artificial Sequence: Synthetic oligonucleotide
aguaaauagugcuuuauuu

SEQ ID NO: 1861141 - RNA, 19 nt, Artificial Sequence
  Description of Artificial Sequence: Synthetic oligonucleotide
uggucuaccugucagaaaa

SEQ ID NO: 1861142 - RNA, 19 nt, Artificial Sequence
  Description of Artificial Sequence: Synthetic oligonucleotide
ugauuuuaagaacccgaag

SEQ ID NO: 1861143 - RNA, 19 nt, Artificial Sequence
  Description of Artificial Sequence: Synthetic oligonucleotide
ugcuuuauuugauaagucu

SEQ ID NO: 1861144 - RNA, 19 nt, Artificial Sequence
  Description of Artificial Sequence: Synthetic oligonucleotide
uuguuuaggguaaauccug

SEQ ID NO: 1861145 - RNA, 19 nt, Artificial Sequence
  Description of Artificial Sequence: Synthetic oligonucleotide
uuaauuggaagaucugaga

SEQ ID NO: 1861146 - RNA, 19 nt, Artificial Sequence
  Description of Artificial Sequence: Synthetic oligonucleotide
uaaggaugaauccuuacua

SEQ ID NO: 1861147 - RNA, 19 nt, Artificial Sequence
  Description of Artificial Sequence: Synthetic oligonucleotide
ucaguauguuacaauuucc

SEQ ID NO: 1861148 - RNA, 19 nt, Artificial Sequence
  Description of Artificial Sequence: Synthetic oligonucleotide
uugcuuaacucucagcaca

SEQ ID NO: 1861149 - RNA, 19 nt, Artificial Sequence
  Description of Artificial Sequence: Synthetic oligonucleotide
ugucagaaaacuaccacuc

SEQ ID NO: 1861150 - RNA, 19 nt, Artificial Sequence
  Description of Artificial Sequence: Synthetic oligonucleotide
uuauuuuagugugagcuca

SEQ ID NO: 1861151 - RNA, 19 nt, Artificial Sequence
  Description of Artificial Sequence: Synthetic oligonucleotide
agaaauacuuauuuugaaa

SEQ ID NO: 1861152 - RNA, 19 nt, Artificial Sequence
  Description of Artificial Sequence: Synthetic oligonucleotide
guuugaaacaugccuaagc

SEQ ID NO: 1861153 - RNA, 19 nt, Artificial Sequence
  Description of Artificial Sequence: Synthetic oligonucleotide
uuaagaacccgaagcaaca

SEQ ID NO: 1861154 - RNA, 19 nt, Artificial Sequence
  Description of Artificial Sequence: Synthetic oligonucleotide
uuuuaccuacauaagcaga

SEQ ID NO: 1861155 - RNA, 19 nt, Artificial Sequence
  Description of Artificial Sequence: Synthetic oligonucleotide
cauuaugauaauuguuuag

SEQ ID NO: 1861156 - RNA, 19 nt, Artificial Sequence
  Description of Artificial Sequence: Synthetic oligonucleotide
uguuacaauuuccaagagu

SEQ ID NO: 1861157 - RNA, 19 nt, Artificial Sequence
  Description of Artificial Sequence: Synthetic oligonucleotide
uauugacucuuauacaagu

SEQ ID NO: 1861158 - RNA, 19 nt, Artificial Sequence
  Description of Artificial Sequence: Synthetic oligonucleotide
uuaccacuaaaacuacaag

SEQ ID NO: 1861159 - RNA, 19 nt, Artificial Sequence
  Description of Artificial Sequence: Synthetic oligonucleotide
agacguuugaaacaugccu

SEQ ID NO: 1861160 - RNA, 19 nt, Artificial Sequence
  Description of Artificial Sequence: Synthetic oligonucleotide
acaacuugauuagaguugg

SEQ ID NO: 1861161 - RNA, 19 nt, Artificial Sequence
  Description of Artificial Sequence: Synthetic oligonucleotide
cuuuuaccuacauaagcag

SEQ ID NO: 1861162 - RNA, 19 nt, Artificial Sequence
  Description of Artificial Sequence: Synthetic oligonucleotide
agcacacaaguuuuaaaag

SEQ ID NO: 1861163 - RNA, 19 nt, Artificial Sequence
  Description of Artificial Sequence: Synthetic oligonucleotide
aacuggguuaacaaagauc

SEQ ID NO: 1861164 - RNA, 19 nt, Artificial Sequence
  Description of Artificial Sequence: Synthetic oligonucleotide
ugccuaagccuuuaaauca

SEQ ID NO: 1861165 - RNA, 19 nt, Artificial Sequence
  Description of Artificial Sequence: Synthetic oligonucleotide
uaggcaaggcuuaaacuag

SEQ ID NO: 1861166 - RNA, 19 nt, Artificial Sequence
  Description of Artificial Sequence: Synthetic oligonucleotide
ucgcaacucaugaagaaca

SEQ ID NO: 1861167 - RNA, 19 nt, Artificial Sequence
  Description of Artificial Sequence: Synthetic oligonucleotide
aacugagacaauaaguagu

SEQ ID NO: 1861168 - RNA, 19 nt, Artificial Sequence
  Description of Artificial Sequence: Synthetic oligonucleotide
auuaauuggaagaucugag

SEQ ID NO: 1861169 - RNA, 19 nt, Artificial Sequence
  Description of Artificial Sequence: Synthetic oligonucleotide
agaucuuuuaguaaaguga

SEQ ID NO: 1861170 - RNA, 19 nt, Artificial Sequence
  Description of Artificial Sequence: Synthetic oligonucleotide
cuuauuuugaaacaagaua

SEQ ID NO: 1861171 - RNA, 19 nt, Artificial Sequence
  Description of Artificial Sequence: Synthetic oligonucleotide
uccuuacuaauuaauugga

SEQ ID NO: 1861172 - RNA, 19 nt, Artificial Sequence
  Description of Artificial Sequence: Synthetic oligonucleotide
uaauuaauuggaagaucug

SEQ ID NO: 1861173 - RNA, 19 nt, Artificial Sequence
  Description of Artificial Sequence: Synthetic oligonucleotide
acuagcaaggauuaaggau

SEQ ID NO: 1861174 - RNA, 19 nt, Artificial Sequence
  Description of Artificial Sequence: Synthetic oligonucleotide
ucuuuuaguaaagugacuu

SEQ ID NO: 1861175 - RNA, 19 nt, Artificial Sequence
  Description of Artificial Sequence: Synthetic oligonucleotide
agacaauaaguaguuuugc

SEQ ID NO: 1861176 - RNA, 19 nt, Artificial Sequence
  Description of Artificial Sequence: Synthetic oligonucleotide
ucaugaauucaauuucgca

SEQ ID NO: 1861177 - RNA, 19 nt, Artificial Sequence
  Description of Artificial Sequence: Synthetic oligonucleotide
uaccauaguagucaacaga

SEQ ID NO: 1861178 - RNA, 19 nt, Artificial Sequence
  Description of Artificial Sequence: Synthetic oligonucleotide
uuuuauucauauugacucu

SEQ ID NO: 1861179 - RNA, 19 nt, Artificial Sequence
  Description of Artificial Sequence: Synthetic oligonucleotide
aguuaggagaaccuaacaa

SEQ ID NO: 1861180 - RNA, 19 nt, Artificial Sequence
  Description of Artificial Sequence: Synthetic oligonucleotide
uaguaaagugacuuaggca

SEQ ID NO: 1861181 - RNA, 19 nt, Artificial Sequence
  Description of Artificial Sequence: Synthetic oligonucleotide
acuagagucucuguaagag

SEQ ID NO: 1861182 - RNA, 19 nt, Artificial Sequence
  Description of Artificial Sequence: Synthetic oligonucleotide
uuuauuuuagugugagcuc

SEQ ID NO: 1861183 - RNA, 19 nt, Artificial Sequence
  Description of Artificial Sequence: Synthetic oligonucleotide
ugugcucuguaguaaaaca

SEQ ID NO: 1861184 - RNA, 19 nt, Artificial Sequence
  Description of Artificial Sequence: Synthetic oligonucleotide
uugauuagaguuggaaugc

SEQ ID NO: 1861185 - RNA, 19 nt, Artificial Sequence
  Description of Artificial Sequence: Synthetic oligonucleotide
ugcucuguaguaaaacaga

SEQ ID NO: 1861186 - RNA, 19 nt, Artificial Sequence
  Description of Artificial Sequence: Synthetic oligonucleotide
acuaauuaauuggaagauc

SEQ ID NO: 1861187 - RNA, 19 nt, Artificial Sequence
  Description of Artificial Sequence: Synthetic oligonucleotide
ucauauugacucuuauaca

SEQ ID NO: 1861188 - RNA, 19 nt, Artificial Sequence
  Description of Artificial Sequence: Synthetic oligonucleotide
cuaauuaauuggaagaucu

SEQ ID NO: 1861189 - RNA, 19 nt, Artificial Sequence
  Description of Artificial Sequence: Synthetic oligonucleotide
acuacuauuaccacuaaaa

SEQ ID NO: 1861190 - RNA, 19 nt, Artificial Sequence
  Description of Artificial Sequence: Synthetic oligonucleotide
ugaauccuuacuaauuaau

SEQ ID NO: 1861191 - RNA, 19 nt, Artificial Sequence
  Description of Artificial Sequence: Synthetic oligonucleotide
uuuaaacaacuacucuugu

SEQ ID NO: 1861192 - RNA, 19 nt, Artificial Sequence
  Description of Artificial Sequence: Synthetic oligonucleotide
gucuccaacaacuugauua

SEQ ID NO: 1861193 - RNA, 19 nt, Artificial Sequence
  Description of Artificial Sequence: Synthetic oligonucleotide
ucugguaagucuccaacaa

SEQ ID NO: 1861194 - RNA, 19 nt, Artificial Sequence
  Description of Artificial Sequence: Synthetic oligonucleotide
gauaagaagacauggucua

SEQ ID NO: 1861195 - RNA, 19 nt, Artificial Sequence
  Description of Artificial Sequence: Synthetic oligonucleotide
uuaggguaaauccuguguu

SEQ ID NO: 1861196 - RNA, 19 nt, Artificial Sequence
  Description of Artificial Sequence: Synthetic oligonucleotide
auuuugaaacaagauaaga

SEQ ID NO: 1861197 - RNA, 19 nt, Artificial Sequence
  Description of Artificial Sequence: Synthetic oligonucleotide
gaugaauccuuacuaauua

SEQ ID NO: 1861198 - RNA, 19 nt, Artificial Sequence
  Description of Artificial Sequence: Synthetic oligonucleotide
uuuauuugauaagucuuac

SEQ ID NO: 1861199 - RNA, 19 nt, Artificial Sequence
  Description of Artificial Sequence: Synthetic oligonucleotide
aaguuaggagaaccuaaca

SEQ ID NO: 1861200 - RNA, 19 nt, Artificial Sequence
  Description of Artificial Sequence: Synthetic oligonucleotide
aaucuaaauuguaacaguu

SEQ ID NO: 1861201 - RNA, 19 nt, Artificial Sequence
  Description of Artificial Sequence: Synthetic oligonucleotide
uaaauccuguguucuauga

SEQ ID NO: 1861202 - RNA, 19 nt, Artificial Sequence
  Description of Artificial Sequence: Synthetic oligonucleotide
uuuuagugugagcucaguc

SEQ ID NO: 1861203 - RNA, 19 nt, Artificial Sequence
  Description of Artificial Sequence: Synthetic oligonucleotide
gaagacauggucuaccugu

SEQ ID NO: 1861204 - RNA, 19 nt, Artificial Sequence
  Description of Artificial Sequence: Synthetic oligonucleotide
uuaccauaguagucaacag

SEQ ID NO: 1861205 - RNA, 19 nt, Artificial Sequence
  Description of Artificial Sequence: Synthetic oligonucleotide
uuauuugauaagucuuacu

SEQ ID NO: 1861206 - RNA, 19 nt, Artificial Sequence
  Description of Artificial Sequence: Synthetic oligonucleotide
uauuuuagugugagcucag

SEQ ID NO: 1861207 - RNA, 19 nt, Artificial Sequence
  Description of Artificial Sequence: Synthetic oligonucleotide
auagugcuuuauuugauaa

SEQ ID NO: 1861208 - RNA, 19 nt, Artificial Sequence
  Description of Artificial Sequence: Synthetic oligonucleotide
agauaagaagacauggucu

SEQ ID NO: 1861209 - RNA, 19 nt, Artificial Sequence
  Description of Artificial Sequence: Synthetic oligonucleotide
auacaaacaugcuucuacu

SEQ ID NO: 1861210 - RNA, 19 nt, Artificial Sequence
  Description of Artificial Sequence: Synthetic oligonucleotide
uugucaguauguuacaauu

SEQ ID NO: 1861211 - RNA, 19 nt, Artificial Sequence
  Description of Artificial Sequence: Synthetic oligonucleotide
uuaaggaucuugagaaaau

SEQ ID NO: 1861212 - RNA, 19 nt, Artificial Sequence
  Description of Artificial Sequence: Synthetic oligonucleotide
auacauacuuauauaaacu

SEQ ID NO: 1861213 - RNA, 19 nt, Artificial Sequence
  Description of Artificial Sequence: Synthetic oligonucleotide
gucaguauguuacaauuuc

SEQ ID NO: 1861214 - RNA, 19 nt, Artificial Sequence
  Description of Artificial Sequence: Synthetic oligonucleotide
uugaaacaugccuaagccu

SEQ ID NO: 1861215 - RNA, 19 nt, Artificial Sequence
  Description of Artificial Sequence: Synthetic oligonucleotide
agauuauagcgcagaaagc

SEQ ID NO: 1861216 - RNA, 19 nt, Artificial Sequence
  Description of Artificial Sequence: Synthetic oligonucleotide
cuuaccauaguagucaaca

SEQ ID NO: 1861217 - RNA, 19 nt, Artificial Sequence
  Description of Artificial Sequence: Synthetic oligonucleotide
agacuagagucucuguaag

SEQ ID NO: 1861218 - RNA, 19 nt, Artificial Sequence
  Description of Artificial Sequence: Synthetic oligonucleotide
acacaaguuuuaaaaguac

SEQ ID NO: 1861219 - RNA, 19 nt, Artificial Sequence
  Description of Artificial Sequence: Synthetic oligonucleotide
auaagucuuacuucacaga

SEQ ID NO: 1861220 - RNA, 19 nt, Artificial Sequence
  Description of Artificial Sequence: Synthetic oligonucleotide
uccaacucugguaagucuc

SEQ ID NO: 1861221 - RNA, 19 nt, Artificial Sequence
  Description of Artificial Sequence: Synthetic oligonucleotide
ugaauucaauuucgcaacu

SEQ ID NO: 1861222 - RNA, 19 nt, Artificial Sequence
  Description of Artificial Sequence: Synthetic oligonucleotide
uaccugucagaaaacuacc

SEQ ID NO: 1861223 - RNA, 19 nt, Artificial Sequence
  Description of Artificial Sequence: Synthetic oligonucleotide
auuguuuaggguaaauccu

SEQ ID NO: 1861224 - RNA, 19 nt, Artificial Sequence
  Description of Artificial Sequence: Synthetic oligonucleotide
aaacagacuagagucucug

SEQ ID NO: 1861225 - RNA, 19 nt, Artificial Sequence
  Description of Artificial Sequence: Synthetic oligonucleotide
uuauagcgcagaaagcaau

SEQ ID NO: 1861226 - RNA, 19 nt, Artificial Sequence
  Description of Artificial Sequence: Synthetic oligonucleotide
uaagcagacaaauguuuaa

SEQ ID NO: 1861227 - RNA, 19 nt, Artificial Sequence
  Description of Artificial Sequence: Synthetic oligonucleotide
uacuaauuaauuggaagau

SEQ ID NO: 1861228 - RNA, 19 nt, Artificial Sequence
  Description of Artificial Sequence: Synthetic oligonucleotide
aguauguuacaauuuccaa

SEQ ID NO: 1861229 - RNA, 19 nt, Artificial Sequence
  Description of Artificial Sequence: Synthetic oligonucleotide
caugcuucuacuuuuaccu

SEQ ID NO: 1861230 - RNA, 19 nt, Artificial Sequence
  Description of Artificial Sequence: Synthetic oligonucleotide
uguuuaggguaaauccugu

SEQ ID NO: 1861231 - RNA, 19 nt, Artificial Sequence
  Description of Artificial Sequence: Synthetic oligonucleotide
acaaacaugcuucuacuuu

SEQ ID NO: 1861232 - RNA, 19 nt, Artificial Sequence
  Description of Artificial Sequence: Synthetic oligonucleotide
uaaaacagacuagagucuc

SEQ ID NO: 1861233 - RNA, 19 nt, Artificial Sequence
  Description of Artificial Sequence: Synthetic oligonucleotide
uauucauauugacucuuau

SEQ ID NO: 1861234 - RNA, 19 nt, Artificial Sequence
  Description of Artificial Sequence: Synthetic oligonucleotide
agguccauuaugauaauug

SEQ ID NO: 1861235 - RNA, 19 nt, Artificial Sequence
  Description of Artificial Sequence: Synthetic oligonucleotide
auuagaguuggaaugcugu

SEQ ID NO: 1861236 - RNA, 19 nt, Artificial Sequence
  Description of Artificial Sequence: Synthetic oligonucleotide
cuaacaauauucuuucucu

SEQ ID NO: 1861237 - RNA, 19 nt, Artificial Sequence
  Description of Artificial Sequence: Synthetic oligonucleotide
cuguaguaaaacagacuag

SEQ ID NO: 1861238 - RNA, 19 nt, Artificial Sequence
  Description of Artificial Sequence: Synthetic oligonucleotide
ugugagcucaguccaacuc

SEQ ID NO: 1861239 - RNA, 19 nt, Artificial Sequence
  Description of Artificial Sequence: Synthetic oligonucleotide
ugaagcauuuagcuggauu

SEQ ID NO: 1861240 - RNA, 19 nt, Artificial Sequence
  Description of Artificial Sequence: Synthetic oligonucleotide
uaguuuugcagacguuuga

SEQ ID NO: 1861241 - RNA, 19 nt, Artificial Sequence
  Description of Artificial Sequence: Synthetic oligonucleotide
uaccuacauaagcagacaa

SEQ ID NO: 1861242 - RNA, 19 nt, Artificial Sequence
  Description of Artificial Sequence: Synthetic oligonucleotide
gaagcauuuagcuggauuu

SEQ ID NO: 1861243 - RNA, 19 nt, Artificial Sequence
  Description of Artificial Sequence: Synthetic oligonucleotide
uaggagaaccuaacaauau

SEQ ID NO: 1861244 - RNA, 19 nt, Artificial Sequence
  Description of Artificial Sequence: Synthetic oligonucleotide
acauuggcaccagaaaguc

SEQ ID NO: 1861245 - RNA, 19 nt, Artificial Sequence
  Description of Artificial Sequence: Synthetic oligonucleotide
cuugcuuaacucucagcac

SEQ ID NO: 1861246 - RNA, 19 nt, Artificial Sequence
  Description of Artificial Sequence: Synthetic oligonucleotide
aaagucaacuggccugccu

SEQ ID NO: 1861247 - RNA, 19 nt, Artificial Sequence
  Description of Artificial Sequence: Synthetic oligonucleotide
agaguuggaaugcugugau

SEQ ID NO: 1861248 - RNA, 19 nt, Artificial Sequence
  Description of Artificial Sequence: Synthetic oligonucleotide
ucuaccugucagaaaacua

SEQ ID NO: 1861249 - RNA, 19 nt, Artificial Sequence
  Description of Artificial Sequence: Synthetic oligonucleotide
aacuuguuagccacaucag

SEQ ID NO: 1861250 - RNA, 19 nt, Artificial Sequence
  Description of Artificial Sequence: Synthetic oligonucleotide
cuuaaacuagcaaggauua

SEQ ID NO: 1861251 - RNA, 19 nt, Artificial Sequence
  Description of Artificial Sequence: Synthetic oligonucleotide
accagaaagucaacuggcc

SEQ ID NO: 1861252 - RNA, 19 nt, Artificial Sequence
  Description of Artificial Sequence: Synthetic oligonucleotide
guucuaugaagcauuuagc

SEQ ID NO: 1861253 - RNA, 19 nt, Artificial Sequence
  Description of Artificial Sequence: Synthetic oligonucleotide
caguauguuacaauuucca

SEQ ID NO: 1861254 - RNA, 19 nt, Artificial Sequence
  Description of Artificial Sequence: Synthetic oligonucleotide
uggaagaucugagacaaua

SEQ ID NO: 1861255 - RNA, 19 nt, Artificial Sequence
  Description of Artificial Sequence: Synthetic oligonucleotide
aaucuacaacaaaggacag

SEQ ID NO: 1861256 - RNA, 19 nt, Artificial Sequence
  Description of Artificial Sequence: Synthetic oligonucleotide
aguuggaaugcugugauuu

SEQ ID NO: 1861257 - RNA, 19 nt, Artificial Sequence
  Description of Artificial Sequence: Synthetic oligonucleotide
aguaguuuugcagacguuu

SEQ ID NO: 1861258 - RNA, 19 nt, Artificial Sequence
  Description of Artificial Sequence: Synthetic oligonucleotide
uuuauucauauugacucuu

SEQ ID NO: 1861259 - RNA, 19 nt, Artificial Sequence
  Description of Artificial Sequence: Synthetic oligonucleotide
ugucaguauguuacaauuu

SEQ ID NO: 1861260 - RNA, 19 nt, Artificial Sequence
  Description of Artificial Sequence: Synthetic oligonucleotide
uacaaguuguuagaaguau

SEQ ID NO: 1861261 - RNA, 19 nt, Artificial Sequence
  Description of Artificial Sequence: Synthetic oligonucleotide
uuucgcaacucaugaagaa

SEQ ID NO: 1861262 - RNA, 19 nt, Artificial Sequence
  Description of Artificial Sequence: Synthetic oligonucleotide
ggauuuuauucauauugac

SEQ ID NO: 1861263 - RNA, 19 nt, Artificial Sequence
  Description of Artificial Sequence: Synthetic oligonucleotide
gacaccacuuaccauagua

SEQ ID NO: 1861264 - RNA, 19 nt, Artificial Sequence
  Description of Artificial Sequence: Synthetic oligonucleotide
aauaaacuuguuagccaca

SEQ ID NO: 1861265 - RNA, 19 nt, Artificial Sequence
  Description of Artificial Sequence: Synthetic oligonucleotide
agaaccuaacaauauucuu

SEQ ID NO: 1861266 - RNA, 19 nt, Artificial Sequence
  Description of Artificial Sequence: Synthetic oligonucleotide
aacagacuagagucucugu

SEQ ID NO: 1861267 - RNA, 19 nt, Artificial Sequence
  Description of Artificial Sequence: Synthetic oligonucleotide
ugcuuaacucucagcacac

SEQ ID NO: 1861268 - RNA, 19 nt, Artificial Sequence
  Description of Artificial Sequence: Synthetic oligonucleotide
gauuagaguuggaaugcug

SEQ ID NO: 1861269 - RNA, 19 nt, Artificial Sequence
  Description of Artificial Sequence: Synthetic oligonucleotide
auauugacucuuauacaag

SEQ ID NO: 1861270 - RNA, 19 nt, Artificial Sequence
  Description of Artificial Sequence: Synthetic oligonucleotide
uauagcgcagaaagcaauu

SEQ ID NO: 1861271 - RNA, 19 nt, Artificial Sequence
  Description of Artificial Sequence: Synthetic oligonucleotide
aagacauggucuaccuguc

SEQ ID NO: 1861272 - RNA, 19 nt, Artificial Sequence
  Description of Artificial Sequence: Synthetic oligonucleotide
aggaugaauccuuacuaau

SEQ ID NO: 1861273 - RNA, 19 nt, Artificial Sequence
  Description of Artificial Sequence: Synthetic oligonucleotide
caguuucacucucaaacug

SEQ ID NO: 1861274 - RNA, 19 nt, Artificial Sequence
  Description of Artificial Sequence: Synthetic oligonucleotide
cuuguuagccacaucagcu

SEQ ID NO: 1861275 - RNA, 19 nt, Artificial Sequence
  Description of Artificial Sequence: Synthetic oligonucleotide
accacuuaccauaguaguc

SEQ ID NO: 1861276 - RNA, 19 nt, Artificial Sequence
  Description of Artificial Sequence: Synthetic oligonucleotide
acagacuagagucucugua

SEQ ID NO: 1861277 - RNA, 19 nt, Artificial Sequence
  Description of Artificial Sequence: Synthetic oligonucleotide
cagcacacaaguuuuaaaa

SEQ ID NO: 1861278 - RNA, 19 nt, Artificial Sequence
  Description of Artificial Sequence: Synthetic oligonucleotide
cagacguuugaaacaugcc

SEQ ID NO: 1861279 - RNA, 19 nt, Artificial Sequence
  Description of Artificial Sequence: Synthetic oligonucleotide
agugugagcucaguccaac

SEQ ID NO: 1861280 - RNA, 19 nt, Artificial Sequence
  Description of Artificial Sequence: Synthetic oligonucleotide
aggaucuugagaaaauuau

SEQ ID NO: 1861281 - RNA, 19 nt, Artificial Sequence
  Description of Artificial Sequence: Synthetic oligonucleotide
guuuaggguaaauccugug

SEQ ID NO: 1861282 - RNA, 19 nt, Artificial Sequence
  Description of Artificial Sequence: Synthetic oligonucleotide
agcuuuaaucuacaacaaa

SEQ ID NO: 1861283 - RNA, 19 nt, Artificial Sequence
  Description of Artificial Sequence: Synthetic oligonucleotide
uucgcaacucaugaagaac

SEQ ID NO: 1861284 - RNA, 19 nt, Artificial Sequence
  Description of Artificial Sequence: Synthetic oligonucleotide
cacacaaguuuuaaaagua

SEQ ID NO: 1861285 - RNA, 19 nt, Artificial Sequence
  Description of Artificial Sequence: Synthetic oligonucleotide
agaacccgaagcaacagca

SEQ ID NO: 1861286 - RNA, 19 nt, Artificial Sequence
  Description of Artificial Sequence: Synthetic oligonucleotide
agcauacaaacaugcuucu

SEQ ID NO: 1861287 - RNA, 19 nt, Artificial Sequence
  Description of Artificial Sequence: Synthetic oligonucleotide
cagaaaacuaccacucaga

SEQ ID NO: 1861288 - RNA, 19 nt, Artificial Sequence
  Description of Artificial Sequence: Synthetic oligonucleotide
augaauccuuacuaauuaa

SEQ ID NO: 1861289 - RNA, 19 nt, Artificial Sequence
  Description of Artificial Sequence: Synthetic oligonucleotide
ucuuaaggaucuugagaaa

SEQ ID NO: 1861290 - RNA, 19 nt, Artificial Sequence
  Description of Artificial Sequence: Synthetic oligonucleotide
ucaguacaauauuucuaaa

SEQ ID NO: 1861291 - RNA, 19 nt, Artificial Sequence
  Description of Artificial Sequence: Synthetic oligonucleotide
acaacuacucuugucagua

SEQ ID NO: 1861292 - RNA, 19 nt, Artificial Sequence
  Description of Artificial Sequence: Synthetic oligonucleotide
acaccacuuaccauaguag

SEQ ID NO: 1861293 - RNA, 19 nt, Artificial Sequence
  Description of Artificial Sequence: Synthetic oligonucleotide
uguguucuaugaagcauuu

SEQ ID NO: 1861294 - RNA, 19 nt, Artificial Sequence
  Description of Artificial Sequence: Synthetic oligonucleotide
guaguuuugcagacguuug

SEQ ID NO: 1861295 - RNA, 19 nt, Artificial Sequence
  Description of Artificial Sequence: Synthetic oligonucleotide
uuguaacaguuucacucuc

SEQ ID NO: 1861296 - RNA, 19 nt, Artificial Sequence
  Description of Artificial Sequence: Synthetic oligonucleotide
gccuucuuggauuagaaaa

SEQ ID NO: 1861297 - RNA, 19 nt, Artificial Sequence
  Description of Artificial Sequence: Synthetic oligonucleotide
aggagaaccuaacaauauu

SEQ ID NO: 1861298 - RNA, 19 nt, Artificial Sequence
  Description of Artificial Sequence: Synthetic oligonucleotide
uuguuagccacaucagcuu

SEQ ID NO: 1861299 - RNA, 19 nt, Artificial Sequence
  Description of Artificial Sequence: Synthetic oligonucleotide
aagcuuuaaucuacaacaa

SEQ ID NO: 1861300 - RNA, 19 nt, Artificial Sequence
  Description of Artificial Sequence: Synthetic oligonucleotide
uaaggaucuugagaaaauu

SEQ ID NO: 1861301 - RNA, 19 nt, Artificial Sequence
  Description of Artificial Sequence: Synthetic oligonucleotide
gacguuugaaacaugccua

SEQ ID NO: 1861302 - RNA, 19 nt, Artificial Sequence
  Description of Artificial Sequence: Synthetic oligonucleotide
ggagaaccuaacaauauuc

SEQ ID NO: 1861303 - RNA, 19 nt, Artificial Sequence
  Description of Artificial Sequence: Synthetic oligonucleotide
gaauucaauuucgcaacuc

SEQ ID NO: 1861304 - RNA, 19 nt, Artificial Sequence
  Description of Artificial Sequence: Synthetic oligonucleotide
auuucgcaacucaugaaga

SEQ ID NO: 1861305 - RNA, 19 nt, Artificial Sequence
  Description of Artificial Sequence: Synthetic oligonucleotide
cucaguccaacucugguaa

SEQ ID NO: 1861306 - RNA, 19 nt, Artificial Sequence
  Description of Artificial Sequence: Synthetic oligonucleotide
cuuaacucucagcacacaa

SEQ ID NO: 1861307 - RNA, 19 nt, Artificial Sequence
  Description of Artificial Sequence: Synthetic oligonucleotide
aggguaaauccuguguucu

SEQ ID NO: 1861308 - RNA, 19 nt, Artificial Sequence
  Description of Artificial Sequence: Synthetic oligonucleotide
aucugagacaauauuuuau

SEQ ID NO: 1861309 - RNA, 19 nt, Artificial Sequence
  Description of Artificial Sequence: Synthetic oligonucleotide
ugauuagaguuggaaugcu

SEQ ID NO: 1861310 - RNA, 19 nt, Artificial Sequence
  Description of Artificial Sequence: Synthetic oligonucleotide
uugcagacguuugaaacau

SEQ ID NO: 1861311 - RNA, 19 nt, Artificial Sequence
  Description of Artificial Sequence: Synthetic oligonucleotide
acguuugaaacaugccuaa

SEQ ID NO: 1861312 - RNA, 19 nt, Artificial Sequence
  Description of Artificial Sequence: Synthetic oligonucleotide
aaacugugcucuguaguaa

SEQ ID NO: 1861313 - RNA, 19 nt, Artificial Sequence
  Description of Artificial Sequence: Synthetic oligonucleotide
cugguaagucuccaacaac

SEQ ID NO: 1861314 - RNA, 19 nt, Artificial Sequence
  Description of Artificial Sequence: Synthetic oligonucleotide
guaacaguuucacucucaa

SEQ ID NO: 1861315 - RNA, 19 nt, Artificial Sequence
  Description of Artificial Sequence: Synthetic oligonucleotide
cuuauacaaguuguuagaa

SEQ ID NO: 1861316 - RNA, 19 nt, Artificial Sequence
  Description of Artificial Sequence: Synthetic oligonucleotide
gacuagagucucuguaaga

SEQ ID NO: 1861317 - RNA, 19 nt, Artificial Sequence
  Description of Artificial Sequence: Synthetic oligonucleotide
aggcaaggcuuaaacuagc

SEQ ID NO: 1861318 - RNA, 19 nt, Artificial Sequence
  Description of Artificial Sequence: Synthetic oligonucleotide
gaagaucugagacaauauu

SEQ ID NO: 1861319 - RNA, 19 nt, Artificial Sequence
  Description of Artificial Sequence: Synthetic oligonucleotide
ucaguccaacucugguaag

SEQ ID NO: 1861320 - RNA, 19 nt, Artificial Sequence
  Description of Artificial Sequence: Synthetic oligonucleotide
gacagauuauagcgcagaa

SEQ ID NO: 1861321 - RNA, 19 nt, Artificial Sequence
  Description of Artificial Sequence: Synthetic oligonucleotide
cuuuuaguaaagugacuua

SEQ ID NO: 1861322 - RNA, 19 nt, Artificial Sequence
  Description of Artificial Sequence: Synthetic oligonucleotide
auuauagcgcagaaagcaa

SEQ ID NO: 1861323 - RNA, 19 nt, Artificial Sequence
  Description of Artificial Sequence: Synthetic oligonucleotide
uagcgcagaaagcaauuuu

SEQ ID NO: 1861324 - RNA, 19 nt, Artificial Sequence
  Description of Artificial Sequence: Synthetic oligonucleotide
gcagacguuugaaacaugc

SEQ ID NO: 1861325 - RNA, 19 nt, Artificial Sequence
  Description of Artificial Sequence: Synthetic oligonucleotide
caauauucuuucucuuaga

SEQ ID NO: 1861326 - RNA, 19 nt, Artificial Sequence
  Description of Artificial Sequence: Synthetic oligonucleotide
uuaaacuagcaaggauuaa

SEQ ID NO: 1861327 - RNA, 19 nt, Artificial Sequence
  Description of Artificial Sequence: Synthetic oligonucleotide
uuacuacuauuaccacuaa

SEQ ID NO: 1861328 - RNA, 19 nt, Artificial Sequence
  Description of Artificial Sequence: Synthetic oligonucleotide
cagacuagagucucuguaa

SEQ ID NO: 1861329 - RNA, 19 nt, Artificial Sequence
  Description of Artificial Sequence: Synthetic oligonucleotide
gagaaccuaacaauauucu

SEQ ID NO: 1861330 - RNA, 19 nt, Artificial Sequence
  Description of Artificial Sequence: Synthetic oligonucleotide
augacaccacuuaccauag

SEQ ID NO: 1861331 - RNA, 19 nt, Artificial Sequence
  Description of Artificial Sequence: Synthetic oligonucleotide
gugauuuuaagaacccgaa

SEQ ID NO: 1861332 - RNA, 19 nt, Artificial Sequence
  Description of Artificial Sequence: Synthetic oligonucleotide
aacaugccuaagccuuuaa

SEQ ID NO: 1861333 - RNA, 19 nt, Artificial Sequence
  Description of Artificial Sequence: Synthetic oligonucleotide
aucuaaauuguaacaguuu

SEQ ID NO: 1861334 - RNA, 19 nt, Artificial Sequence
  Description of Artificial Sequence: Synthetic oligonucleotide
aucuacaacaaaggacaga

SEQ ID NO: 1861335 - RNA, 19 nt, Artificial Sequence
  Description of Artificial Sequence: Synthetic oligonucleotide
acuuaccauaguagucaac

SEQ ID NO: 1861336 - RNA, 19 nt, Artificial Sequence
  Description of Artificial Sequence: Synthetic oligonucleotide
accuaacaauauucuuucu

SEQ ID NO: 1861337 - RNA, 19 nt, Artificial Sequence
  Description of Artificial Sequence: Synthetic oligonucleotide
cacucagaaauauuuucua

SEQ ID NO: 1861338 - RNA, 19 nt, Artificial Sequence
  Description of Artificial Sequence: Synthetic oligonucleotide
gaauccuuacuaauuaauu

SEQ ID NO: 1861339 - RNA, 19 nt, Artificial Sequence
  Description of Artificial Sequence: Synthetic oligonucleotide
gauaauuguuuaggguaaa

SEQ ID NO: 1861340 - RNA, 19 nt, Artificial Sequence
  Description of Artificial Sequence: Synthetic oligonucleotide
cugugcucuguaguaaaac

SEQ ID NO: 1861341 - RNA, 19 nt, Artificial Sequence
  Description of Artificial Sequence: Synthetic oligonucleotide
caacaacuugauuagaguu

SEQ ID NO: 1861342 - RNA, 19 nt, Artificial Sequence
  Description of Artificial Sequence: Synthetic oligonucleotide
ugcagacguuugaaacaug

SEQ ID NO: 1861343 - RNA, 19 nt, Artificial Sequence
  Description of Artificial Sequence: Synthetic oligonucleotide
ccugucagaaaacuaccac

SEQ ID NO: 1861344 - RNA, 19 nt, Artificial Sequence
  Description of Artificial Sequence: Synthetic oligonucleotide
cacauuggcaccagaaagu

SEQ ID NO: 1861345 - RNA, 19 nt, Artificial Sequence
  Description of Artificial Sequence: Synthetic oligonucleotide
cuaagccuuuaaaucagua

SEQ ID NO: 1861346 - RNA, 19 nt, Artificial Sequence
  Description of Artificial Sequence: Synthetic oligonucleotide
auuuuagugugagcucagu

SEQ ID NO: 1861347 - RNA, 19 nt, Artificial Sequence
  Description of Artificial Sequence: Synthetic oligonucleotide
guaaaacagacuagagucu

SEQ ID NO: 1861348 - RNA, 19 nt, Artificial Sequence
  Description of Artificial Sequence: Synthetic oligonucleotide
gcugugauuuuaagaaccc

SEQ ID NO: 1861349 - RNA, 19 nt, Artificial Sequence
  Description of Artificial Sequence: Synthetic oligonucleotide
gcacacaaguuuuaaaagu

SEQ ID NO: 1861350 - RNA, 19 nt, Artificial Sequence
  Description of Artificial Sequence: Synthetic oligonucleotide
aucuuuuaguaaagugacu

SEQ ID NO: 1861351 - RNA, 19 nt, Artificial Sequence
  Description of Artificial Sequence: Synthetic oligonucleotide
aaacuaaaacugagacaau

SEQ ID NO: 1861352 - RNA, 19 nt, Artificial Sequence
  Description of Artificial Sequence: Synthetic oligonucleotide
ggucuugcuuaacucucag

SEQ ID NO: 1861353 - RNA, 19 nt, Artificial Sequence
  Description of Artificial Sequence: Synthetic oligonucleotide
ucuauccacaaagcaggua

SEQ ID NO: 1861354 - RNA, 19 nt, Artificial Sequence
  Description of Artificial Sequence: Synthetic oligonucleotide
aaacaugccuaagccuuua

SEQ ID NO: 1861355 - RNA, 19 nt, Artificial Sequence
  Description of Artificial Sequence: Synthetic oligonucleotide
accugucagaaaacuacca

SEQ ID NO: 1861356 - RNA, 19 nt, Artificial Sequence
  Description of Artificial Sequence: Synthetic oligonucleotide
gcucuguaguaaaacagac

SEQ ID NO: 1861357 - RNA, 19 nt, Artificial Sequence
  Description of Artificial Sequence: Synthetic oligonucleotide
ccaacucugguaagucucc

SEQ ID NO: 1861358 - RNA, 19 nt, Artificial Sequence
  Description of Artificial Sequence: Synthetic oligonucleotide
caauuucgcaacucaugaa

SEQ ID NO: 1861359 - RNA, 19 nt, Artificial Sequence
  Description of Artificial Sequence: Synthetic oligonucleotide
accuacauaagcagacaaa

SEQ ID NO: 1861360 - RNA, 19 nt, Artificial Sequence
  Description of Artificial Sequence: Synthetic oligonucleotide
agcagcauacaaacaugcu

SEQ ID NO: 1861361 - RNA, 19 nt, Artificial Sequence
  Description of Artificial Sequence: Synthetic oligonucleotide
cucuguaguaaaacagacu

SEQ ID NO: 1861362 - RNA, 19 nt, Artificial Sequence
  Description of Artificial Sequence: Synthetic oligonucleotide
cauuggcaccagaaaguca

SEQ ID NO: 1861363 - RNA, 19 nt, Artificial Sequence
  Description of Artificial Sequence: Synthetic oligonucleotide
cuugucaguauguuacaau

SEQ ID NO: 1861364 - RNA, 19 nt, Artificial Sequence
  Description of Artificial Sequence: Synthetic oligonucleotide
auagcgcagaaagcaauuu

SEQ ID NO: 1861365 - RNA, 19 nt, Artificial Sequence
  Description of Artificial Sequence: Synthetic oligonucleotide
aggacagauuauagcgcag

SEQ ID NO: 1861366 - RNA, 19 nt, Artificial Sequence
  Description of Artificial Sequence: Synthetic oligonucleotide
caccacuuaccauaguagu

SEQ ID NO: 1861367 - RNA, 19 nt, Artificial Sequence
  Description of Artificial Sequence: Synthetic oligonucleotide
cucuugucaguauguuaca

SEQ ID NO: 1861368 - RNA, 19 nt, Artificial Sequence
  Description of Artificial Sequence: Synthetic oligonucleotide
gaaagucaacuggccugcc

SEQ ID NO: 1861369 - RNA, 19 nt, Artificial Sequence
  Description of Artificial Sequence: Synthetic oligonucleotide
guuagccacaucagcuuca

SEQ ID NO: 1861370 - RNA, 19 nt, Artificial Sequence
  Description of Artificial Sequence: Synthetic oligonucleotide
cauggucuaccugucagaa

SEQ ID NO: 1861371 - RNA, 19 nt, Artificial Sequence
  Description of Artificial Sequence: Synthetic oligonucleotide
ucaacuggccugccuucuu

SEQ ID NO: 1861372 - RNA, 19 nt, Artificial Sequence
  Description of Artificial Sequence: Synthetic oligonucleotide
caacagaaguuaggagaac

SEQ ID NO: 1861373 - RNA, 19 nt, Artificial Sequence
  Description of Artificial Sequence: Synthetic oligonucleotide
ugacaccacuuaccauagu

SEQ ID NO: 1861374 - RNA, 19 nt, Artificial Sequence
  Description of Artificial Sequence: Synthetic oligonucleotide
aaacuaccacucagaaaua

SEQ ID NO: 1861375 - RNA, 19 nt, Artificial Sequence
  Description of Artificial Sequence: Synthetic oligonucleotide
auggucuaccugucagaaa

SEQ ID NO: 1861376 - RNA, 19 nt, Artificial Sequence
  Description of Artificial Sequence: Synthetic oligonucleotide
uagccacaucagcuucaug

SEQ ID NO: 1861377 - RNA, 19 nt, Artificial Sequence
  Description of Artificial Sequence: Synthetic oligonucleotide
ggacagauuauagcgcaga

SEQ ID NO: 1861378 - RNA, 19 nt, Artificial Sequence
  Description of Artificial Sequence: Synthetic oligonucleotide
guaagagguccauuaugau

SEQ ID NO: 1861379 - RNA, 19 nt, Artificial Sequence
  Description of Artificial Sequence: Synthetic oligonucleotide
agagguccauuaugauaau

SEQ ID NO: 1861380 - RNA, 19 nt, Artificial Sequence
  Description of Artificial Sequence: Synthetic oligonucleotide
cacuuaccauaguagucaa

SEQ ID NO: 1861381 - RNA, 19 nt, Artificial Sequence
  Description of Artificial Sequence: Synthetic oligonucleotide
aaguaguuuugcagacguu

SEQ ID NO: 1861382 - RNA, 19 nt, Artificial Sequence
  Description of Artificial Sequence: Synthetic oligonucleotide
ucucuguaagagguccauu

SEQ ID NO: 1861383 - RNA, 19 nt, Artificial Sequence
  Description of Artificial Sequence: Synthetic oligonucleotide
agucucuguaagaggucca

SEQ ID NO: 1861384 - RNA, 19 nt, Artificial Sequence
  Description of Artificial Sequence: Synthetic oligonucleotide
ccuuacuaauuaauuggaa

SEQ ID NO: 1861385 - RNA, 19 nt, Artificial Sequence
  Description of Artificial Sequence: Synthetic oligonucleotide
cacucucaaacugugcucu

SEQ ID NO: 1861386 - RNA, 19 nt, Artificial Sequence
  Description of Artificial Sequence: Synthetic oligonucleotide
gcaaggcuuaaacuagcaa

SEQ ID NO: 1861387 - RNA, 19 nt, Artificial Sequence
  Description of Artificial Sequence: Synthetic oligonucleotide
acugugcucuguaguaaaa

SEQ ID NO: 1861388 - RNA, 19 nt, Artificial Sequence
  Description of Artificial Sequence: Synthetic oligonucleotide
guccaacucugguaagucu

SEQ ID NO: 1861389 - RNA, 19 nt, Artificial Sequence
  Description of Artificial Sequence: Synthetic oligonucleotide
guuggaaugcugugauuuu

SEQ ID NO: 1861390 - RNA, 19 nt, Artificial Sequence
  Description of Artificial Sequence: Synthetic oligonucleotide
gcuucuacuuuuaccuaca

SEQ ID NO: 1861391 - RNA, 19 nt, Artificial Sequence
  Description of Artificial Sequence: Synthetic oligonucleotide
gacucuuauacaaguuguu

SEQ ID NO: 1861392 - RNA, 19 nt, Artificial Sequence
  Description of Artificial Sequence: Synthetic oligonucleotide
guccauuaugauaauuguu

SEQ ID NO: 1861393 - RNA, 19 nt, Artificial Sequence
  Description of Artificial Sequence: Synthetic oligonucleotide
ccuacauaagcagacaaau

SEQ ID NO: 1861394 - RNA, 19 nt, Artificial Sequence
  Description of Artificial Sequence: Synthetic oligonucleotide
ccaacaacuugauuagagu

SEQ ID NO: 1861395 - RNA, 19 nt, Artificial Sequence
  Description of Artificial Sequence: Synthetic oligonucleotide
gguaaauccuguguucuau

SEQ ID NO: 1861396 - RNA, 19 nt, Artificial Sequence
  Description of Artificial Sequence: Synthetic oligonucleotide
ggauuaaggaugaauccuu

SEQ ID NO: 1861397 - RNA, 19 nt, Artificial Sequence
  Description of Artificial Sequence: Synthetic oligonucleotide
ggaugaauccuuacuaauu

SEQ ID NO: 1861398 - RNA, 19 nt, Artificial Sequence
  Description of Artificial Sequence: Synthetic oligonucleotide
ggcaaggcuuaaacuagca

SEQ ID NO: 1861399 - RNA, 19 nt, Artificial Sequence
  Description of Artificial Sequence: Synthetic oligonucleotide
ggaucuugagaaaauuauu

SEQ ID NO: 1861400 - RNA, 19 nt, Artificial Sequence
  Description of Artificial Sequence: Synthetic oligonucleotide
ggucuaccugucagaaaac

SEQ ID NO: 1861401 - RNA, 19 nt, Artificial Sequence
  Description of Artificial Sequence: Synthetic oligonucleotide
ggaagaucugagacaauau

SEQ ID NO: 1861402 - RNA, 19 nt, Artificial Sequence
  Description of Artificial Sequence: Synthetic oligonucleotide
gugugagcucaguccaacu

SEQ ID NO: 1861403 - RNA, 19 nt, Artificial Sequence
  Description of Artificial Sequence: Synthetic oligonucleotide
ggguaaauccuguguucua

SEQ ID NO: 1861404 - RNA, 19 nt, Artificial Sequence
  Description of Artificial Sequence: Synthetic oligonucleotide
cguuugaaacaugccuaag

SEQ ID NO: 1861405 - RNA, 19 nt, Artificial Sequence
  Description of Artificial Sequence: Synthetic oligonucleotide
gaguuggaaugcugugauu

SEQ ID NO: 1861406 - RNA, 19 nt, Artificial Sequence
  Description of Artificial Sequence: Synthetic oligonucleotide
caguccaacucugguaagu

SEQ ID NO: 1861407 - RNA, 19 nt, Artificial Sequence
  Description of Artificial Sequence: Synthetic oligonucleotide
gucucuguaagagguccau

SEQ ID NO: 1861408 - RNA, 19 nt, Artificial Sequence
  Description of Artificial Sequence: Synthetic oligonucleotide
cuacaacaaaggacagauu

SEQ ID NO: 1861409 - RNA, 19 nt, Artificial Sequence
  Description of Artificial Sequence: Synthetic oligonucleotide
gucaacuggccugccuucu

SEQ ID NO: 1861410 - RNA, 19 nt, Artificial Sequence
  Description of Artificial Sequence: Synthetic oligonucleotide
ccgaagcaacagcauuuuc

SEQ ID NO: 1861411 - RNA, 19 nt, Artificial Sequence
  Description of Artificial Sequence: Synthetic oligonucleotide
caacuacucuugucaguau

SEQ ID NO: 1861412 - RNA, 19 nt, Artificial Sequence
  Description of Artificial Sequence: Synthetic oligonucleotide
ccugccuucuuggauuaga

SEQ ID NO: 1861413 - RNA, 19 nt, Artificial Sequence
  Description of Artificial Sequence: Synthetic oligonucleotide
cuacucuugucaguauguu

SEQ ID NO: 1861414 - RNA, 19 nt, Artificial Sequence
  Description of Artificial Sequence: Synthetic oligonucleotide
gccuuuaaaucaguacaau

SEQ ID NO: 1861415 - RNA, 19 nt, Artificial Sequence
  Description of Artificial Sequence: Synthetic oligonucleotide
cgcaacucaugaagaacaa

SEQ ID NO: 1861416 - RNA, 19 nt, Artificial Sequence
  Description of Artificial Sequence: Synthetic oligonucleotide
ggccugccuucuuggauua

SEQ ID NO: 1861417 - RNA, 19 nt, Artificial Sequence
  Description of Artificial Sequence: Synthetic oligonucleotide
gccugccuucuuggauuag

SEQ ID NO: 1861418 - RNA, 19 nt, Artificial Sequence
  Description of Artificial Sequence: Synthetic oligonucleotide
aauucuguuaucaugacag

SEQ ID NO: 1861419 - RNA, 19 nt, Artificial Sequence
  Description of Artificial Sequence: Synthetic oligonucleotide
ugauuuguggaaaacaugc

SEQ ID NO: 1861420 - RNA, 19 nt, Artificial Sequence
  Description of Artificial Sequence: Synthetic oligonucleotide
aaauaaacgcuuguguggc

SEQ ID NO: 1861421 - RNA, 19 nt, Artificial Sequence
  Description of Artificial Sequence: Synthetic oligonucleotide
uaaguuugcacauaggaca

SEQ ID NO: 1861422 - RNA, 19 nt, Artificial Sequence
  Description of Artificial Sequence: Synthetic oligonucleotide
uuuguuacugcuauguuga

SEQ ID NO: 1861423 - RNA, 19 nt, Artificial Sequence
  Description of Artificial Sequence: Synthetic oligonucleotide
aaacuggcaauaauaaacc

SEQ ID NO: 1861424 - RNA, 19 nt, Artificial Sequence
  Description of Artificial Sequence: Synthetic oligonucleotide
auuaaguuugcacauagga

SEQ ID NO: 1861425 - RNA, 19 nt, Artificial Sequence
  Description of Artificial Sequence: Synthetic oligonucleotide
gauauuaggagggacaaag

SEQ ID NO: 1861426 - RNA, 19 nt, Artificial Sequence
  Description of Artificial Sequence: Synthetic oligonucleotide
aauaauaucucccgugccu

SEQ ID NO: 1861427 - RNA, 19 nt, Artificial Sequence
  Description of Artificial Sequence: Synthetic oligonucleotide
caugauugguaaaugaugc

SEQ ID NO: 1861428 - RNA, 19 nt, Artificial Sequence
  Description of Artificial Sequence: Synthetic oligonucleotide
caaucagucagaaagcuag

SEQ ID NO: 1861429 - RNA, 19 nt, Artificial Sequence
  Description of Artificial Sequence: Synthetic oligonucleotide
aauaaaggauauugacacg

SEQ ID NO: 1861430 - RNA, 19 nt, Artificial Sequence
  Description of Artificial Sequence: Synthetic oligonucleotide
aggauauugacacgaagac

SEQ ID NO: 1861431 - RNA, 19 nt, Artificial Sequence
  Description of Artificial Sequence: Synthetic oligonucleotide
ugacacgaagacuagagag

SEQ ID NO: 1861432 - RNA, 19 nt, Artificial Sequence
  Description of Artificial Sequence: Synthetic oligonucleotide
uuugauauuaggagggaca

SEQ ID NO: 1861433 - RNA, 19 nt, Artificial Sequence
  Description of Artificial Sequence: Synthetic oligonucleotide
aaauauuaaguuugcacau

SEQ ID NO: 1861434 - RNA, 19 nt, Artificial Sequence
  Description of Artificial Sequence: Synthetic oligonucleotide
uuuuguuacugcuauguug

SEQ ID NO: 1861435 - RNA, 19 nt, Artificial Sequence
  Description of Artificial Sequence: Synthetic oligonucleotide
ucauuagcauucaagcuag

SEQ ID NO: 1861436 - RNA, 19 nt, Artificial Sequence
  Description of Artificial Sequence: Synthetic oligonucleotide
acaucauucugcuuauagc

SEQ ID NO: 1861437 - RNA, 19 nt, Artificial Sequence
  Description of Artificial Sequence: Synthetic oligonucleotide
cagaugaucagcaacuccg

SEQ ID NO: 1861438 - RNA, 19 nt, Artificial Sequence
  Description of Artificial Sequence: Synthetic oligonucleotide
ugcuauguugauuucaccc

SEQ ID NO: 1861439 - RNA, 19 nt, Artificial Sequence
  Description of Artificial Sequence: Synthetic oligonucleotide
uuaaguuugcacauaggac

SEQ ID NO: 1861440 - RNA, 19 nt, Artificial Sequence
  Description of Artificial Sequence: Synthetic oligonucleotide
auuguagaugacuacagca

SEQ ID NO: 1861441 - RNA, 19 nt, Artificial Sequence
  Description of Artificial Sequence: Synthetic oligonucleotide
cuuuaaaggugcaauuucc

SEQ ID NO: 1861442 - RNA, 19 nt, Artificial Sequence
  Description of Artificial Sequence: Synthetic oligonucleotide
aaagaaccguguuugagga

SEQ ID NO: 1861443 - RNA, 19 nt, Artificial Sequence
  Description of Artificial Sequence: Synthetic oligonucleotide
aaaggauauugacacgaag

SEQ ID NO: 1861444 - RNA, 19 nt, Artificial Sequence
  Description of Artificial Sequence: Synthetic oligonucleotide
aggaucacagcccagauga

SEQ ID NO: 1861445 - RNA, 19 nt, Artificial Sequence
  Description of Artificial Sequence: Synthetic oligonucleotide
uuauuauuguagaugacua

SEQ ID NO: 1861446 - RNA, 19 nt, Artificial Sequence
  Description of Artificial Sequence: Synthetic oligonucleotide
ugucaauuuacugauggcc

SEQ ID NO: 1861447 - RNA, 19 nt, Artificial Sequence
  Description of Artificial Sequence: Synthetic oligonucleotide
caaagaaccguguuugagg

SEQ ID NO: 1861448 - RNA, 19 nt, Artificial Sequence
  Description of Artificial Sequence: Synthetic oligonucleotide
uguucacuaagccaggggu

SEQ ID NO: 1861449 - RNA, 19 nt, Artificial Sequence
  Description of Artificial Sequence: Synthetic oligonucleotide
ucuaguugucaauuuacug

SEQ ID NO: 1861450 - RNA, 19 nt, Artificial Sequence
  Description of Artificial Sequence: Synthetic oligonucleotide
gauauugacacgaagacua

SEQ ID NO: 1861451 - RNA, 19 nt, Artificial Sequence
  Description of Artificial Sequence: Synthetic oligonucleotide
aguagaauaugagccacgc

SEQ ID NO: 1861452 - RNA, 19 nt, Artificial Sequence
  Description of Artificial Sequence: Synthetic oligonucleotide
ugaucuucgguuaacugcu

SEQ ID NO: 1861453 - RNA, 19 nt, Artificial Sequence
  Description of Artificial Sequence: Synthetic oligonucleotide
uagcauucaagcuagcugu

SEQ ID NO: 1861454 - RNA, 19 nt, Artificial Sequence
  Description of Artificial Sequence: Synthetic oligonucleotide
cugaucuucgguuaacugc

SEQ ID NO: 1861455 - RNA, 19 nt, Artificial Sequence
  Description of Artificial Sequence: Synthetic oligonucleotide
agugaucgaagucuggguc

SEQ ID NO: 1861456 - RNA, 19 nt, Artificial Sequence
  Description of Artificial Sequence: Synthetic oligonucleotide
aaggauauugacacgaaga

SEQ ID NO: 1861457 - RNA, 19 nt, Artificial Sequence
  Description of Artificial Sequence: Synthetic oligonucleotide
uuuaaaggugcaauuuccu

SEQ ID NO: 1861458 - RNA, 19 nt, Artificial Sequence
  Description of Artificial Sequence: Synthetic oligonucleotide
auuaggagggacaaagaac

SEQ ID NO: 1861459 - RNA, 19 nt, Artificial Sequence
  Description of Artificial Sequence: Synthetic oligonucleotide
cuuauagcucucuaugcag

SEQ ID NO: 1861460 - RNA, 19 nt, Artificial Sequence
  Description of Artificial Sequence: Synthetic oligonucleotide
auaaucaucaaaacaauaa

SEQ ID NO: 1861461 - RNA, 19 nt, Artificial Sequence
  Description of Artificial Sequence: Synthetic oligonucleotide
ugcuacauuaucaguacac

SEQ ID NO: 1861462 - RNA, 19 nt, Artificial Sequence
  Description of Artificial Sequence: Synthetic oligonucleotide
cauuguggaaagcagcccg

SEQ ID NO: 1861463 - RNA, 19 nt, Artificial Sequence
  Description of Artificial Sequence: Synthetic oligonucleotide
auuauuguagaugacuaca

SEQ ID NO: 1861464 - RNA, 19 nt, Artificial Sequence
  Description of Artificial Sequence: Synthetic oligonucleotide
uccaagacgacgcugguuc

SEQ ID NO: 1861465 - RNA, 19 nt, Artificial Sequence
  Description of Artificial Sequence: Synthetic oligonucleotide
agcaauaauaucucccgug

SEQ ID NO: 1861466 - RNA, 19 nt, Artificial Sequence
  Description of Artificial Sequence: Synthetic oligonucleotide
uuccauaucaaaugcuaca

SEQ ID NO: 1861467 - RNA, 19 nt, Artificial Sequence
  Description of Artificial Sequence: Synthetic oligonucleotide
gaagacuagagagccacgg

SEQ ID NO: 1861468 - RNA, 19 nt, Artificial Sequence
  Description of Artificial Sequence: Synthetic oligonucleotide
acggcugaaguucuuuggc

SEQ ID NO: 1861469 - RNA, 19 nt, Artificial Sequence
  Description of Artificial Sequence: Synthetic oligonucleotide
uuuccauaucaaaugcuac

SEQ ID NO: 1861470 - RNA, 19 nt, Artificial Sequence
  Description of Artificial Sequence: Synthetic oligonucleotide
aucaaaacaauaaaggaua

SEQ ID NO: 1861471 - RNA, 19 nt, Artificial Sequence
  Description of Artificial Sequence: Synthetic oligonucleotide
uuauagcucucuaugcaga

SEQ ID NO: 1861472 - RNA, 19 nt, Artificial Sequence
  Description of Artificial Sequence: Synthetic oligonucleotide
uauuauuguagaugacuac

SEQ ID NO: 1861473 - RNA, 19 nt, Artificial Sequence
  Description of Artificial Sequence: Synthetic oligonucleotide
auucuguuaucaugacagc

SEQ ID NO: 1861474 - RNA, 19 nt, Artificial Sequence
  Description of Artificial Sequence: Synthetic oligonucleotide
ugauugguaaaugaugcac

SEQ ID NO: 1861475 - RNA, 19 nt, Artificial Sequence
  Description of Artificial Sequence: Synthetic oligonucleotide
cugaugaucauguagcaga

SEQ ID NO: 1861476 - RNA, 19 nt, Artificial Sequence
  Description of Artificial Sequence: Synthetic oligonucleotide
ugcacagugaucgaagucu

SEQ ID NO: 1861477 - RNA, 19 nt, Artificial Sequence
  Description of Artificial Sequence: Synthetic oligonucleotide
uaucuuuaccccucaauuc

SEQ ID NO: 1861478 - RNA, 19 nt, Artificial Sequence
  Description of Artificial Sequence: Synthetic oligonucleotide
uuggcauuagcaauuuuau

SEQ ID NO: 1861479 - RNA, 19 nt, Artificial Sequence
  Description of Artificial Sequence: Synthetic oligonucleotide
agaaccguguuugaggauc

SEQ ID NO: 1861480 - RNA, 19 nt, Artificial Sequence
  Description of Artificial Sequence: Synthetic oligonucleotide
auugacacgaagacuagag

SEQ ID NO: 1861481 - RNA, 19 nt, Artificial Sequence
  Description of Artificial Sequence: Synthetic oligonucleotide
uucuaguugucaauuuacu

SEQ ID NO: 1861482 - RNA, 19 nt, Artificial Sequence
  Description of Artificial Sequence: Synthetic oligonucleotide
uucuuuggcggcauucgag

SEQ ID NO: 1861483 - RNA, 19 nt, Artificial Sequence
  Description of Artificial Sequence: Synthetic oligonucleotide
uuguggaaaacaugcuugc

SEQ ID NO: 1861484 - RNA, 19 nt, Artificial Sequence
  Description of Artificial Sequence: Synthetic oligonucleotide
gcuauguugauuucacccg

SEQ ID NO: 1861485 - RNA, 19 nt, Artificial Sequence
  Description of Artificial Sequence: Synthetic oligonucleotide
uguucuaguugucaauuua

SEQ ID NO: 1861486 - RNA, 19 nt, Artificial Sequence
  Description of Artificial Sequence: Synthetic oligonucleotide
aauaaucaucaaaacaaua

SEQ ID NO: 1861487 - RNA, 19 nt, Artificial Sequence
  Description of Artificial Sequence: Synthetic oligonucleotide
aauaugagccacgcugaag

SEQ ID NO: 1861488 - RNA, 19 nt, Artificial Sequence
  Description of Artificial Sequence: Synthetic oligonucleotide
acugcuauguugauuucac

SEQ ID NO: 1861489 - RNA, 19 nt, Artificial Sequence
  Description of Artificial Sequence: Synthetic oligonucleotide
augcuugcaagggagaauc

SEQ ID NO: 1861490 - RNA, 19 nt, Artificial Sequence
  Description of Artificial Sequence: Synthetic oligonucleotide
guuaucaugacagcaauaa

SEQ ID NO: 1861491 - RNA, 19 nt, Artificial Sequence
  Description of Artificial Sequence: Synthetic oligonucleotide
gacacgaagacuagagagc

SEQ ID NO: 1861492 - RNA, 19 nt, Artificial Sequence
  Description of Artificial Sequence: Synthetic oligonucleotide
auugguaaaugaugcacaa

SEQ ID NO: 1861493 - RNA, 19 nt, Artificial Sequence
  Description of Artificial Sequence: Synthetic oligonucleotide
guugauuucacccguucga

SEQ ID NO: 1861494 - RNA, 19 nt, Artificial Sequence
  Description of Artificial Sequence: Synthetic oligonucleotide
uugauuucacccguucgag

SEQ ID NO: 1861495 - RNA, 19 nt, Artificial Sequence
  Description of Artificial Sequence: Synthetic oligonucleotide
aucaugacagcaauaauau

SEQ ID NO: 1861496 - RNA, 19 nt, Artificial Sequence
  Description of Artificial Sequence: Synthetic oligonucleotide
ucuuuaccccucaauucug

SEQ ID NO: 1861497 - RNA, 19 nt, Artificial Sequence
  Description of Artificial Sequence: Synthetic oligonucleotide
acagguacaguguucacua

SEQ ID NO: 1861498 - RNA, 19 nt, Artificial Sequence
  Description of Artificial Sequence: Synthetic oligonucleotide
aaguagaauaugagccacg

SEQ ID NO: 1861499 - RNA, 19 nt, Artificial Sequence
  Description of Artificial Sequence: Synthetic oligonucleotide
uugacacgaagacuagaga

SEQ ID NO: 1861500 - RNA, 19 nt, Artificial Sequence
  Description of Artificial Sequence: Synthetic oligonucleotide
uggcucaaggccaagggaa

SEQ ID NO: 1861501 - RNA, 19 nt, Artificial Sequence
  Description of Artificial Sequence: Synthetic oligonucleotide
uaccccucaauucuguuau

SEQ ID NO: 1861502 - RNA, 19 nt, Artificial Sequence
  Description of Artificial Sequence: Synthetic oligonucleotide
ucugguaagccuuuccaua

SEQ ID NO: 1861503 - RNA, 19 nt, Artificial Sequence
  Description of Artificial Sequence: Synthetic oligonucleotide
uggcacaauuccuagggcu

SEQ ID NO: 1861504 - RNA, 19 nt, Artificial Sequence
  Description of Artificial Sequence: Synthetic oligonucleotide
agcuauugucauuuguaca

SEQ ID NO: 1861505 - RNA, 19 nt, Artificial Sequence
  Description of Artificial Sequence: Synthetic oligonucleotide
gauugguaaaugaugcaca

SEQ ID NO: 1861506 - RNA, 19 nt, Artificial Sequence
  Description of Artificial Sequence: Synthetic oligonucleotide
cacgcugaagaaauaauca

SEQ ID NO: 1861507 - RNA, 19 nt, Artificial Sequence
  Description of Artificial Sequence: Synthetic oligonucleotide
ucuuuggcggcauucgagu

SEQ ID NO: 1861508 - RNA, 19 nt, Artificial Sequence
  Description of Artificial Sequence: Synthetic oligonucleotide
caauaauaucucccgugcc

SEQ ID NO: 1861509 - RNA, 19 nt, Artificial Sequence
  Description of Artificial Sequence: Synthetic oligonucleotide
aauauuaaguuugcacaua

SEQ ID NO: 1861510 - RNA, 19 nt, Artificial Sequence
  Description of Artificial Sequence: Synthetic oligonucleotide
uguguaccugaucuucuga

SEQ ID NO: 1861511 - RNA, 19 nt, Artificial Sequence
  Description of Artificial Sequence: Synthetic oligonucleotide
gcaauaauaucucccgugc

SEQ ID NO: 1861512 - RNA, 19 nt, Artificial Sequence
  Description of Artificial Sequence: Synthetic oligonucleotide
aguucuuuggcggcauucg

SEQ ID NO: 1861513 - RNA, 19 nt, Artificial Sequence
  Description of Artificial Sequence: Synthetic oligonucleotide
acaugauuuguggaaaaca

SEQ ID NO: 1861514 - RNA, 19 nt, Artificial Sequence
  Description of Artificial Sequence: Synthetic oligonucleotide
uuggcugcaucuccaagac

SEQ ID NO: 1861515 - RNA, 19 nt, Artificial Sequence
  Description of Artificial Sequence: Synthetic oligonucleotide
uccauaucaaaugcuacau

SEQ ID NO: 1861516 - RNA, 19 nt, Artificial Sequence
  Description of Artificial Sequence: Synthetic oligonucleotide
ugaaguucgcaguggcuca

SEQ ID NO: 1861517 - RNA, 19 nt, Artificial Sequence
  Description of Artificial Sequence: Synthetic oligonucleotide
auaauaucucccgugccug

SEQ ID NO: 1861518 - RNA, 19 nt, Artificial Sequence
  Description of Artificial Sequence: Synthetic oligonucleotide
ucgguuaacugcuuggguu

SEQ ID NO: 1861519 - RNA, 19 nt, Artificial Sequence
  Description of Artificial Sequence: Synthetic oligonucleotide
cauuaucaguacacggcag

SEQ ID NO: 1861520 - RNA, 19 nt, Artificial Sequence
  Description of Artificial Sequence: Synthetic oligonucleotide
cuaugcagacugcacagug

SEQ ID NO: 1861521 - RNA, 19 nt, Artificial Sequence
  Description of Artificial Sequence: Synthetic oligonucleotide
aauaaacgcuuguguggca

SEQ ID NO: 1861522 - RNA, 19 nt, Artificial Sequence
  Description of Artificial Sequence: Synthetic oligonucleotide
ccgaacaacaucauucugc

SEQ ID NO: 1861523 - RNA, 19 nt, Artificial Sequence
  Description of Artificial Sequence: Synthetic oligonucleotide
uggcauuagcaauuuuaug

SEQ ID NO: 1861524 - RNA, 19 nt, Artificial Sequence
  Description of Artificial Sequence: Synthetic oligonucleotide
aucuccaagacgacgcugg

SEQ ID NO: 1861525 - RNA, 19 nt, Artificial Sequence
  Description of Artificial Sequence: Synthetic oligonucleotide
uuugcagcaaggcgaucca

SEQ ID NO: 1861526 - RNA, 19 nt, Artificial Sequence
  Description of Artificial Sequence: Synthetic oligonucleotide
aggcaaucagucagaaagc

SEQ ID NO: 1861527 - RNA, 19 nt, Artificial Sequence
  Description of Artificial Sequence: Synthetic oligonucleotide
aacugucgcuggcaagguc

SEQ ID NO: 1861528 - RNA, 19 nt, Artificial Sequence
  Description of Artificial Sequence: Synthetic oligonucleotide
gaugagucauggugaccgg

SEQ ID NO: 1861529 - RNA, 19 nt, Artificial Sequence
  Description of Artificial Sequence: Synthetic oligonucleotide
agaggagauaugccugaag

SEQ ID NO: 1861530 - RNA, 19 nt, Artificial Sequence
  Description of Artificial Sequence: Synthetic oligonucleotide
uguggaaagcagcccguga

SEQ ID NO: 1861531 - RNA, 19 nt, Artificial Sequence
  Description of Artificial Sequence: Synthetic oligonucleotide
uucgguuaacugcuugggu

SEQ ID NO: 1861532 - RNA, 19 nt, Artificial Sequence
  Description of Artificial Sequence: Synthetic oligonucleotide
uuguguaccugaucuucug

SEQ ID NO: 1861533 - RNA, 19 nt, Artificial Sequence
  Description of Artificial Sequence: Synthetic oligonucleotide
aguucgcaguggcucaagg

SEQ ID NO: 1861534 - RNA, 19 nt, Artificial Sequence
  Description of Artificial Sequence: Synthetic oligonucleotide
uccuagggcuuucaaaaua

SEQ ID NO: 1861535 - RNA, 19 nt, Artificial Sequence
  Description of Artificial Sequence: Synthetic oligonucleotide
cacggcugaaguucuuugg

SEQ ID NO: 1861536 - RNA, 19 nt, Artificial Sequence
  Description of Artificial Sequence: Synthetic oligonucleotide
ucaauuuacugauggccuu

SEQ ID NO: 1861537 - RNA, 19 nt, Artificial Sequence
  Description of Artificial Sequence: Synthetic oligonucleotide
uuuggcggcauucgaguuc

SEQ ID NO: 1861538 - RNA, 19 nt, Artificial Sequence
  Description of Artificial Sequence: Synthetic oligonucleotide
aaauaucuuuaccccucaa

SEQ ID NO: 1861539 - RNA, 19 nt, Artificial Sequence
  Description of Artificial Sequence: Synthetic oligonucleotide
acgcugaagaaauaaucau

SEQ ID NO: 1861540 - RNA, 19 nt, Artificial Sequence
  Description of Artificial Sequence: Synthetic oligonucleotide
gagcuccccaucuugagga

SEQ ID NO: 1861541 - RNA, 19 nt, Artificial Sequence
  Description of Artificial Sequence: Synthetic oligonucleotide
guguucacuaagccagggg

SEQ ID NO: 1861542 - RNA, 19 nt, Artificial Sequence
  Description of Artificial Sequence: Synthetic oligonucleotide
gcuacauuaucaguacacg

SEQ ID NO: 1861543 - RNA, 19 nt, Artificial Sequence
  Description of Artificial Sequence: Synthetic oligonucleotide
augagucauggugaccggc

SEQ ID NO: 1861544 - RNA, 19 nt, Artificial Sequence
  Description of Artificial Sequence: Synthetic oligonucleotide
agaauaugagccacgcuga

SEQ ID NO: 1861545 - RNA, 19 nt, Artificial Sequence
  Description of Artificial Sequence: Synthetic oligonucleotide
uguaccugaucuucugaau

SEQ ID NO: 1861546 - RNA, 19 nt, Artificial Sequence
  Description of Artificial Sequence: Synthetic oligonucleotide
uacugcuauguugauuuca

SEQ ID NO: 1861547 - RNA, 19 nt, Artificial Sequence
  Description of Artificial Sequence: Synthetic oligonucleotide
uguuugauauuaggaggga

SEQ ID NO: 1861548 - RNA, 19 nt, Artificial Sequence
  Description of Artificial Sequence: Synthetic oligonucleotide
gacuagagagccacggcug

SEQ ID NO: 1861549 - RNA, 19 nt, Artificial Sequence
  Description of Artificial Sequence: Synthetic oligonucleotide
augccugaaguucgcagug

SEQ ID NO: 1861550 - RNA, 19 nt, Artificial Sequence
  Description of Artificial Sequence: Synthetic oligonucleotide
uuggcggcauucgaguucc

SEQ ID NO: 1861551 - RNA, 19 nt, Artificial Sequence
  Description of Artificial Sequence: Synthetic oligonucleotide
gguacaguguucacuaagc

SEQ ID NO: 1861552 - RNA, 19 nt, Artificial Sequence
  Description of Artificial Sequence: Synthetic oligonucleotide
aguguucacuaagccaggg

SEQ ID NO: 1861553 - RNA, 19 nt, Artificial Sequence
  Description of Artificial Sequence: Synthetic oligonucleotide
gucgcgagcauuuguguac

SEQ ID NO: 1861554 - RNA, 19 nt, Artificial Sequence
  Description of Artificial Sequence: Synthetic oligonucleotide
acuacagcaaccgcauugu

SEQ ID NO: 1861555 - RNA, 19 nt, Artificial Sequence
  Description of Artificial Sequence: Synthetic oligonucleotide
uucaagcuagcuguggcuc

SEQ ID NO: 1861556 - RNA, 19 nt, Artificial Sequence
  Description of Artificial Sequence: Synthetic oligonucleotide
acgacgcugguuccugucg

SEQ ID NO: 1861557 - RNA, 19 nt, Artificial Sequence
  Description of Artificial Sequence: Synthetic oligonucleotide
agcaaggcgauccacuguu

SEQ ID NO: 1861558 - RNA, 19 nt, Artificial Sequence
  Description of Artificial Sequence: Synthetic oligonucleotide
guucgcaguggcucaaggc

SEQ ID NO: 1861559 - RNA, 19 nt, Artificial Sequence
  Description of Artificial Sequence: Synthetic oligonucleotide
aggacagguacaguguuca

SEQ ID NO: 1861560 - RNA, 19 nt, Artificial Sequence
  Description of Artificial Sequence: Synthetic oligonucleotide
guuugauauuaggagggac

SEQ ID NO: 1861561 - RNA, 19 nt, Artificial Sequence
  Description of Artificial Sequence: Synthetic oligonucleotide
agcagcccgugauauuuuc

SEQ ID NO: 1861562 - RNA, 19 nt, Artificial Sequence
  Description of Artificial Sequence: Synthetic oligonucleotide
caugauuuguggaaaacau

SEQ ID NO: 1861563 - RNA, 19 nt, Artificial Sequence
  Description of Artificial Sequence: Synthetic oligonucleotide
uaucucccgugccuggaug

SEQ ID NO: 1861564 - RNA, 19 nt, Artificial Sequence
  Description of Artificial Sequence: Synthetic oligonucleotide
aaacgcuuguguggcauga

SEQ ID NO: 1861565 - RNA, 19 nt, Artificial Sequence
  Description of Artificial Sequence: Synthetic oligonucleotide
uuaccccucaauucuguua

SEQ ID NO: 1861566 - RNA, 19 nt, Artificial Sequence
  Description of Artificial Sequence: Synthetic oligonucleotide
ucaagcuagcuguggcucu

SEQ ID NO: 1861567 - RNA, 19 nt, Artificial Sequence
  Description of Artificial Sequence: Synthetic oligonucleotide
auaucaaaugcuacauuau

SEQ ID NO: 1861568 - RNA, 19 nt, Artificial Sequence
  Description of Artificial Sequence: Synthetic oligonucleotide
gcaugauugguaaaugaug

SEQ ID NO: 1861569 - RNA, 19 nt, Artificial Sequence
  Description of Artificial Sequence: Synthetic oligonucleotide
uuaucaguacacggcagau

SEQ ID NO: 1861570 - RNA, 19 nt, Artificial Sequence
  Description of Artificial Sequence: Synthetic oligonucleotide
aggagauaugccugaaguu

SEQ ID NO: 1861571 - RNA, 19 nt, Artificial Sequence
  Description of Artificial Sequence: Synthetic oligonucleotide
ugaucgaagucugggucug

SEQ ID NO: 1861572 - RNA, 19 nt, Artificial Sequence
  Description of Artificial Sequence: Synthetic oligonucleotide
gacgcugguuccugucgcg

SEQ ID NO: 1861573 - RNA, 19 nt, Artificial Sequence
  Description of Artificial Sequence: Synthetic oligonucleotide
cauucgaguuccaacagcu

SEQ ID NO: 1861574 - RNA, 19 nt, Artificial Sequence
  Description of Artificial Sequence: Synthetic oligonucleotide
cacagugaucgaagucugg

SEQ ID NO: 1861575 - RNA, 19 nt, Artificial Sequence
  Description of Artificial Sequence: Synthetic oligonucleotide
gcuuauagcucucuaugca

SEQ ID NO: 1861576 - RNA, 19 nt, Artificial Sequence
  Description of Artificial Sequence: Synthetic oligonucleotide
cugcuauguugauuucacc

SEQ ID NO: 1861577 - RNA, 19 nt, Artificial Sequence
  Description of Artificial Sequence: Synthetic oligonucleotide
acacaugauuuguggaaaa

SEQ ID NO: 1861578 - RNA, 19 nt, Artificial Sequence
  Description of Artificial Sequence: Synthetic oligonucleotide
aagacgacgcugguuccug

SEQ ID NO: 1861579 - RNA, 19 nt, Artificial Sequence
  Description of Artificial Sequence: Synthetic oligonucleotide
aaucagucagaaagcuagu

SEQ ID NO: 1861580 - RNA, 19 nt, Artificial Sequence
  Description of Artificial Sequence: Synthetic oligonucleotide
auauugacacgaagacuag

SEQ ID NO: 1861581 - RNA, 19 nt, Artificial Sequence
  Description of Artificial Sequence: Synthetic oligonucleotide
gguaagccuuuccauauca

SEQ ID NO: 1861582 - RNA, 19 nt, Artificial Sequence
  Description of Artificial Sequence: Synthetic oligonucleotide
caucuugaggaagaggaga

SEQ ID NO: 1861583 - RNA, 19 nt, Artificial Sequence
  Description of Artificial Sequence: Synthetic oligonucleotide
agauaacucaaaauaucuu

SEQ ID NO: 1861584 - RNA, 19 nt, Artificial Sequence
  Description of Artificial Sequence: Synthetic oligonucleotide
cacaugauuuguggaaaac

SEQ ID NO: 1861585 - RNA, 19 nt, Artificial Sequence
  Description of Artificial Sequence: Synthetic oligonucleotide
augcuacauuaucaguaca

SEQ ID NO: 1861586 - RNA, 19 nt, Artificial Sequence
  Description of Artificial Sequence: Synthetic oligonucleotide
ucgaggagugagcucccca

SEQ ID NO: 1861587 - RNA, 19 nt, Artificial Sequence
  Description of Artificial Sequence: Synthetic oligonucleotide
caguguucacuaagccagg

SEQ ID NO: 1861588 - RNA, 19 nt, Artificial Sequence
  Description of Artificial Sequence: Synthetic oligonucleotide
cagcccgugauauuuucuc

SEQ ID NO: 1861589 - RNA, 19 nt, Artificial Sequence
  Description of Artificial Sequence: Synthetic oligonucleotide
auaaacgcuuguguggcau

SEQ ID NO: 1861590 - RNA, 19 nt, Artificial Sequence
  Description of Artificial Sequence: Synthetic oligonucleotide
agggagaauccgaacaaca

SEQ ID NO: 1861591 - RNA, 19 nt, Artificial Sequence
  Description of Artificial Sequence: Synthetic oligonucleotide
ugucgcgagcauuugugua

SEQ ID NO: 1861592 - RNA, 19 nt, Artificial Sequence
  Description of Artificial Sequence: Synthetic oligonucleotide
aggaggccaaaacuggcaa

SEQ ID NO: 1861593 - RNA, 19 nt, Artificial Sequence
  Description of Artificial Sequence: Synthetic oligonucleotide
caauuuacugauggccuuc

SEQ ID NO: 1861594 - RNA, 19 nt, Artificial Sequence
  Description of Artificial Sequence: Synthetic oligonucleotide
gucaauuuacugauggccu

SEQ ID NO: 1861595 - RNA, 19 nt, Artificial Sequence
  Description of Artificial Sequence: Synthetic oligonucleotide
gcuugcaagggagaauccg

SEQ ID NO: 1861596 - RNA, 19 nt, Artificial Sequence
  Description of Artificial Sequence: Synthetic oligonucleotide
ggagggacaaagaaccgug

SEQ ID NO: 1861597 - RNA, 19 nt, Artificial Sequence
  Description of Artificial Sequence: Synthetic oligonucleotide
ugguaagccuuuccauauc

SEQ ID NO: 1861598 - RNA, 19 nt, Artificial Sequence
  Description of Artificial Sequence: Synthetic oligonucleotide
agcccgugauauuuucucu

SEQ ID NO: 1861599 - RNA, 19 nt, Artificial Sequence
  Description of Artificial Sequence: Synthetic oligonucleotide
aagaaccguguuugaggau

SEQ ID NO: 1861600 - RNA, 19 nt, Artificial Sequence
  Description of Artificial Sequence: Synthetic oligonucleotide
gaauaugagccacgcugaa

SEQ ID NO: 1861601 - RNA, 19 nt, Artificial Sequence
  Description of Artificial Sequence: Synthetic oligonucleotide
uuccuagggcuuucaaaau

SEQ ID NO: 1861602 - RNA, 19 nt, Artificial Sequence
  Description of Artificial Sequence: Synthetic oligonucleotide
uucacccguucgaggagug

SEQ ID NO: 1861603 - RNA, 19 nt, Artificial Sequence
  Description of Artificial Sequence: Synthetic oligonucleotide
cuaagccagggguccacac

SEQ ID NO: 1861604 - RNA, 19 nt, Artificial Sequence
  Description of Artificial Sequence: Synthetic oligonucleotide
gcaaccgcauuguggaaag

SEQ ID NO: 1861605 - RNA, 19 nt, Artificial Sequence
  Description of Artificial Sequence: Synthetic oligonucleotide
uccugucgcgagcauuugu

SEQ ID NO: 1861606 - RNA, 19 nt, Artificial Sequence
  Description of Artificial Sequence: Synthetic oligonucleotide
gguucugguaagccuuucc

SEQ ID NO: 1861607 - RNA, 19 nt, Artificial Sequence
  Description of Artificial Sequence: Synthetic oligonucleotide
cauucugcuuauagcucuc

SEQ ID NO: 1861608 - RNA, 19 nt, Artificial Sequence
  Description of Artificial Sequence: Synthetic oligonucleotide
caagggagaauccgaacaa

SEQ ID NO: 1861609 - RNA, 19 nt, Artificial Sequence
  Description of Artificial Sequence: Synthetic oligonucleotide
aaccguguuugaggaucac

SEQ ID NO: 1861610 - RNA, 19 nt, Artificial Sequence
  Description of Artificial Sequence: Synthetic oligonucleotide
ggcauucgaguuccaacag

SEQ ID NO: 1861611 - RNA, 19 nt, Artificial Sequence
  Description of Artificial Sequence: Synthetic oligonucleotide
uuuaccccucaauucuguu

SEQ ID NO: 1861612 - RNA, 19 nt, Artificial Sequence
  Description of Artificial Sequence: Synthetic oligonucleotide
gcugaucuucgguuaacug

SEQ ID NO: 1861613 - RNA, 19 nt, Artificial Sequence
  Description of Artificial Sequence: Synthetic oligonucleotide
aucucccgugccuggauga

SEQ ID NO: 1861614 - RNA, 19 nt, Artificial Sequence
  Description of Artificial Sequence: Synthetic oligonucleotide
ggcaauaauaaaccauucu

SEQ ID NO: 1861615 - RNA, 19 nt, Artificial Sequence
  Description of Artificial Sequence: Synthetic oligonucleotide
ugauauuaggagggacaaa

SEQ ID NO: 1861616 - RNA, 19 nt, Artificial Sequence
  Description of Artificial Sequence: Synthetic oligonucleotide
uuguggaaagcagcccgug

SEQ ID NO: 1861617 - RNA, 19 nt, Artificial Sequence
  Description of Artificial Sequence: Synthetic oligonucleotide
agcucucuaugcagacugc

SEQ ID NO: 1861618 - RNA, 19 nt, Artificial Sequence
  Description of Artificial Sequence: Synthetic oligonucleotide
ucgcgagcauuuguguacc

SEQ ID NO: 1861619 - RNA, 19 nt, Artificial Sequence
  Description of Artificial Sequence: Synthetic oligonucleotide
cgcauuguggaaagcagcc

SEQ ID NO: 1861620 - RNA, 19 nt, Artificial Sequence
  Description of Artificial Sequence: Synthetic oligonucleotide
gcauucgaguuccaacagc

SEQ ID NO: 1861621 - RNA, 19 nt, Artificial Sequence
  Description of Artificial Sequence: Synthetic oligonucleotide
cacccguucgaggagugag

SEQ ID NO: 1861622 - RNA, 19 nt, Artificial Sequence
  Description of Artificial Sequence: Synthetic oligonucleotide
accgagggcugaucuucgg

SEQ ID NO: 1861623 - RNA, 19 nt, Artificial Sequence
  Description of Artificial Sequence: Synthetic oligonucleotide
agaugaucagcaacuccgu

SEQ ID NO: 1861624 - RNA, 19 nt, Artificial Sequence
  Description of Artificial Sequence: Synthetic oligonucleotide
acccguucgaggagugagc

SEQ ID NO: 1861625 - RNA, 19 nt, Artificial Sequence
  Description of Artificial Sequence: Synthetic oligonucleotide
caaaugcuacauuaucagu

SEQ ID NO: 1861626 - RNA, 19 nt, Artificial Sequence
  Description of Artificial Sequence: Synthetic oligonucleotide
ccagaugaucagcaacucc

SEQ ID NO: 1861627 - RNA, 19 nt, Artificial Sequence
  Description of Artificial Sequence: Synthetic oligonucleotide
auagcucucuaugcagacu

SEQ ID NO: 1861628 - RNA, 19 nt, Artificial Sequence
  Description of Artificial Sequence: Synthetic oligonucleotide
auuguggaaagcagcccgu

SEQ ID NO: 1861629 - RNA, 19 nt, Artificial Sequence
  Description of Artificial Sequence: Synthetic oligonucleotide
cuccccaucuugaggaaga

SEQ ID NO: 1861630 - RNA, 19 nt, Artificial Sequence
  Description of Artificial Sequence: Synthetic oligonucleotide
cugcacagugaucgaaguc

SEQ ID NO: 1861631 - RNA, 19 nt, Artificial Sequence
  Description of Artificial Sequence: Synthetic oligonucleotide
guucuuuggcggcauucga

SEQ ID NO: 1861632 - RNA, 19 nt, Artificial Sequence
  Description of Artificial Sequence: Synthetic oligonucleotide
caccgagggcugaucuucg

SEQ ID NO: 1861633 - RNA, 19 nt, Artificial Sequence
  Description of Artificial Sequence: Synthetic oligonucleotide
aagaggagauaugccugaa

SEQ ID NO: 1861634 - RNA, 19 nt, Artificial Sequence
  Description of Artificial Sequence: Synthetic oligonucleotide
ccugucgcgagcauuugug

SEQ ID NO: 1861635 - RNA, 19 nt, Artificial Sequence
  Description of Artificial Sequence: Synthetic oligonucleotide
uaucaguacacggcagauu

SEQ ID NO: 1861636 - RNA, 19 nt, Artificial Sequence
  Description of Artificial Sequence: Synthetic oligonucleotide
cagucagaaagcuaguguu

SEQ ID NO: 1861637 - RNA, 19 nt, Artificial Sequence
  Description of Artificial Sequence: Synthetic oligonucleotide
gugaucgaagucugggucu

SEQ ID NO: 1861638 - RNA, 19 nt, Artificial Sequence
  Description of Artificial Sequence: Synthetic oligonucleotide
cuauugucauuuguacaga

SEQ ID NO: 1861639 - RNA, 19 nt, Artificial Sequence
  Description of Artificial Sequence: Synthetic oligonucleotide
agccacgcugaagaaauaa

SEQ ID NO: 1861640 - RNA, 19 nt, Artificial Sequence
  Description of Artificial Sequence: Synthetic oligonucleotide
gacgacgcugguuccuguc

SEQ ID NO: 1861641 - RNA, 19 nt, Artificial Sequence
  Description of Artificial Sequence: Synthetic oligonucleotide
gaaccguguuugaggauca

SEQ ID NO: 1861642 - RNA, 19 nt, Artificial Sequence
  Description of Artificial Sequence: Synthetic oligonucleotide
ccgcauuguggaaagcagc

SEQ ID NO: 1861643 - RNA, 19 nt, Artificial Sequence
  Description of Artificial Sequence: Synthetic oligonucleotide
agcauucaagcuagcugug

SEQ ID NO: 1861644 - RNA, 19 nt, Artificial Sequence
  Description of Artificial Sequence: Synthetic oligonucleotide
ugcuuggguucugguaagc

SEQ ID NO: 1861645 - RNA, 19 nt, Artificial Sequence
  Description of Artificial Sequence: Synthetic oligonucleotide
accccucaauucuguuauc

SEQ ID NO: 1861646 - RNA, 19 nt, Artificial Sequence
  Description of Artificial Sequence: Synthetic oligonucleotide
caucuccaagacgacgcug

SEQ ID NO: 1861647 - RNA, 19 nt, Artificial Sequence
  Description of Artificial Sequence: Synthetic oligonucleotide
cacugaggaggccaaaacu

SEQ ID NO: 1861648 - RNA, 19 nt, Artificial Sequence
  Description of Artificial Sequence: Synthetic oligonucleotide
gcggcauucgaguuccaac

SEQ ID NO: 1861649 - RNA, 19 nt, Artificial Sequence
  Description of Artificial Sequence: Synthetic oligonucleotide
ggcuuucaaaauauuaagu

SEQ ID NO: 1861650 - RNA, 19 nt, Artificial Sequence
  Description of Artificial Sequence: Synthetic oligonucleotide
cugguaagccuuuccauau

SEQ ID NO: 1861651 - RNA, 19 nt, Artificial Sequence
  Description of Artificial Sequence: Synthetic oligonucleotide
guggaaagcagcccgugau

SEQ ID NO: 1861652 - RNA, 19 nt, Artificial Sequence
  Description of Artificial Sequence: Synthetic oligonucleotide
cgcuuguguggcaugauug

SEQ ID NO: 1861653 - RNA, 19 nt, Artificial Sequence
  Description of Artificial Sequence: Synthetic oligonucleotide
augagccacgcugaagaaa

SEQ ID NO: 1861654 - RNA, 19 nt, Artificial Sequence
  Description of Artificial Sequence: Synthetic oligonucleotide
uucgaggagugagcucccc

SEQ ID NO: 1861655 - RNA, 19 nt, Artificial Sequence
  Description of Artificial Sequence: Synthetic oligonucleotide
agacugcacagugaucgaa

SEQ ID NO: 1861656 - RNA, 19 nt, Artificial Sequence
  Description of Artificial Sequence: Synthetic oligonucleotide
aucauguagcagaguguga

SEQ ID NO: 1861657 - RNA, 19 nt, Artificial Sequence
  Description of Artificial Sequence: Synthetic oligonucleotide
ucgcuggcaaggucaccga

SEQ ID NO: 1861658 - RNA, 19 nt, Artificial Sequence
  Description of Artificial Sequence: Synthetic oligonucleotide
aacgcuuguguggcaugau

SEQ ID NO: 1861659 - RNA, 19 nt, Artificial Sequence
  Description of Artificial Sequence: Synthetic oligonucleotide
cuuuaccccucaauucugu

SEQ ID NO: 1861660 - RNA, 19 nt, Artificial Sequence
  Description of Artificial Sequence: Synthetic oligonucleotide
agaauccgaacaacaucau

SEQ ID NO: 1861661 - RNA, 19 nt, Artificial Sequence
  Description of Artificial Sequence: Synthetic oligonucleotide
aagcuagcuguggcucuga

SEQ ID NO: 1861662 - RNA, 19 nt, Artificial Sequence
  Description of Artificial Sequence: Synthetic oligonucleotide
ggauauugacacgaagacu

SEQ ID NO: 1861663 - RNA, 19 nt, Artificial Sequence
  Description of Artificial Sequence: Synthetic oligonucleotide
cacgaagacuagagagcca

SEQ ID NO: 1861664 - RNA, 19 nt, Artificial Sequence
  Description of Artificial Sequence: Synthetic oligonucleotide
gggguccacacaugauuug

SEQ ID NO: 1861665 - RNA, 19 nt, Artificial Sequence
  Description of Artificial Sequence: Synthetic oligonucleotide
uuccugucgcgagcauuug

SEQ ID NO: 1861666 - RNA, 19 nt, Artificial Sequence
  Description of Artificial Sequence: Synthetic oligonucleotide
cgguuaacugcuuggguuc

SEQ ID NO: 1861667 - RNA, 19 nt, Artificial Sequence
  Description of Artificial Sequence: Synthetic oligonucleotide
gcacagugaucgaagucug

SEQ ID NO: 1861668 - RNA, 19 nt, Artificial Sequence
  Description of Artificial Sequence: Synthetic oligonucleotide
aggucaccgagggcugauc

SEQ ID NO: 1861669 - RNA, 19 nt, Artificial Sequence
  Description of Artificial Sequence: Synthetic oligonucleotide
gaaguucgcaguggcucaa

SEQ ID NO: 1861670 - RNA, 19 nt, Artificial Sequence
  Description of Artificial Sequence: Synthetic oligonucleotide
cacuaagccagggguccac

SEQ ID NO: 1861671 - RNA, 19 nt, Artificial Sequence
  Description of Artificial Sequence: Synthetic oligonucleotide
cagugaucgaagucugggu

SEQ ID NO: 1861672 - RNA, 19 nt, Artificial Sequence
  Description of Artificial Sequence: Synthetic oligonucleotide
ucacccguucgaggaguga

SEQ ID NO: 1861673 - RNA, 19 nt, Artificial Sequence
  Description of Artificial Sequence: Synthetic oligonucleotide
cagacugcacagugaucga

SEQ ID NO: 1861674 - RNA, 19 nt, Artificial Sequence
  Description of Artificial Sequence: Synthetic oligonucleotide
agcuagcuguggcucugau

SEQ ID NO: 1861675 - RNA, 19 nt, Artificial Sequence
  Description of Artificial Sequence: Synthetic oligonucleotide
cugguuccugucgcgagca

SEQ ID NO: 1861676 - RNA, 19 nt, Artificial Sequence
  Description of Artificial Sequence: Synthetic oligonucleotide
ggcaaucagucagaaagcu

SEQ ID NO: 1861677 - RNA, 19 nt, Artificial Sequence
  Description of Artificial Sequence: Synthetic oligonucleotide
ugucgcuggcaaggucacc

SEQ ID NO: 1861678 - RNA, 19 nt, Artificial Sequence
  Description of Artificial Sequence: Synthetic oligonucleotide
gcgagcauuuguguaccug

SEQ ID NO: 1861679 - RNA, 19 nt, Artificial Sequence
  Description of Artificial Sequence: Synthetic oligonucleotide
ggcucaaggccaagggaac

SEQ ID NO: 1861680 - RNA, 19 nt, Artificial Sequence
  Description of Artificial Sequence: Synthetic oligonucleotide
ccucauuagcauucaagcu

SEQ ID NO: 1861681 - RNA, 19 nt, Artificial Sequence
  Description of Artificial Sequence: Synthetic oligonucleotide
caaccgcauuguggaaagc

SEQ ID NO: 1861682 - RNA, 19 nt, Artificial Sequence
  Description of Artificial Sequence: Synthetic oligonucleotide
cgaagacuagagagccacg

SEQ ID NO: 1861683 - RNA, 19 nt, Artificial Sequence
  Description of Artificial Sequence: Synthetic oligonucleotide
cggcauucgaguuccaaca

SEQ ID NO: 1861684 - RNA, 19 nt, Artificial Sequence
  Description of Artificial Sequence: Synthetic oligonucleotide
cacuguucuaguugucaau

SEQ ID NO: 1861685 - RNA, 19 nt, Artificial Sequence
  Description of Artificial Sequence: Synthetic oligonucleotide
cauuuguguaccugaucuu

SEQ ID NO: 1861686 - RNA, 19 nt, Artificial Sequence
  Description of Artificial Sequence: Synthetic oligonucleotide
guuccugucgcgagcauuu

SEQ ID NO: 1861687 - RNA, 19 nt, Artificial Sequence
  Description of Artificial Sequence: Synthetic oligonucleotide
gcgauccacuguuugauau

SEQ ID NO: 1861688 - RNA, 19 nt, Artificial Sequence
  Description of Artificial Sequence: Synthetic oligonucleotide
acgcugguuccugucgcga

SEQ ID NO: 1861689 - RNA, 19 nt, Artificial Sequence
  Description of Artificial Sequence: Synthetic oligonucleotide
ugguuccugucgcgagcau

SEQ ID NO: 1861690 - RNA, 19 nt, Artificial Sequence
  Description of Artificial Sequence: Synthetic oligonucleotide
cugucgcgagcauuugugu

SEQ ID NO: 1861691 - RNA, 19 nt, Artificial Sequence
  Description of Artificial Sequence: Synthetic oligonucleotide
cuguucuaguugucaauuu

SEQ ID NO: 1861692 - RNA, 19 nt, Artificial Sequence
  Description of Artificial Sequence: Synthetic oligonucleotide
ggucaccgagggcugaucu

SEQ ID NO: 1861693 - RNA, 19 nt, Artificial Sequence
  Description of Artificial Sequence: Synthetic oligonucleotide
gaacugucgcuggcaaggu

SEQ ID NO: 1861694 - RNA, 19 nt, Artificial Sequence
  Description of Artificial Sequence: Synthetic oligonucleotide
cuuuggcggcauucgaguu

SEQ ID NO: 1861695 - RNA, 19 nt, Artificial Sequence
  Description of Artificial Sequence: Synthetic oligonucleotide
cagcccagaugaucagcaa

SEQ ID NO: 1861696 - RNA, 19 nt, Artificial Sequence
  Description of Artificial Sequence: Synthetic oligonucleotide
cccagaugaucagcaacuc

SEQ ID NO: 1861697 - RNA, 19 nt, Artificial Sequence
  Description of Artificial Sequence: Synthetic oligonucleotide
cgacgcugguuccugucgc

SEQ ID NO: 1861698 - RNA, 19 nt, Artificial Sequence
  Description of Artificial Sequence: Synthetic oligonucleotide
cgugccuggaugagucaug

SEQ ID NO: 1861699 - RNA, 19 nt, Artificial Sequence
  Description of Artificial Sequence: Synthetic oligonucleotide
ggcgauccacuguuugaua

SEQ ID NO: 1861700 - RNA, 19 nt, Artificial Sequence
  Description of Artificial Sequence: Synthetic oligonucleotide
caagacgacgcugguuccu

SEQ ID NO: 1861701 - RNA, 19 nt, Artificial Sequence
  Description of Artificial Sequence: Synthetic oligonucleotide
ggcugaucuucgguuaacu

SEQ ID NO: 1861702 - RNA, 19 nt, Artificial Sequence
  Description of Artificial Sequence: Synthetic oligonucleotide
cgcugguuccugucgcgag

SEQ ID NO: 1861703 - RNA, 19 nt, Artificial Sequence
  Description of Artificial Sequence: Synthetic oligonucleotide
ggccaagggaacugucgcu

SEQ ID NO: 1861704 - RNA, 19 nt, Artificial Sequence
  Description of Artificial Sequence: Synthetic oligonucleotide
gggcugaucuucgguuaac

SEQ ID NO: 1861705 - RNA, 19 nt, Artificial Sequence
  Description of Artificial Sequence: Synthetic oligonucleotide
gucaccgagggcugaucuu

SEQ ID NO: 1861706 - RNA, 19 nt, Artificial Sequence
  Description of Artificial Sequence: Synthetic oligonucleotide
gcccgugauauuuucucuu

SEQ ID NO: 1861707 - RNA, 19 nt, Artificial Sequence
  Description of Artificial Sequence: Synthetic oligonucleotide
ccgugauauuuucucuuua

SEQ ID NO: 1861708 - RNA, 19 nt, Artificial Sequence
  Description of Artificial Sequence: Synthetic oligonucleotide
gagccacgcugaagaaaua

SEQ ID NO: 1861709 - RNA, 19 nt, Artificial Sequence
  Description of Artificial Sequence: Synthetic oligonucleotide
cgcuggcaaggucaccgag

SEQ ID NO: 1861710 - RNA, 19 nt, Artificial Sequence
  Description of Artificial Sequence: Synthetic oligonucleotide
ccguucgaggagugagcuc

SEQ ID NO: 1861711 - RNA, 19 nt, Artificial Sequence
  Description of Artificial Sequence: Synthetic oligonucleotide
ggcggcauucgaguuccaa

SEQ ID NO: 1861712 - RNA, 19 nt, Artificial Sequence
  Description of Artificial Sequence: Synthetic oligonucleotide
cccgugauauuuucucuuu

SEQ ID NO: 1861713 - RNA, 19 nt, Artificial Sequence
  Description of Artificial Sequence: Synthetic oligonucleotide
gcagcccgugauauuuucu

SEQ ID NO: 1861714 - RNA, 19 nt, Artificial Sequence
  Description of Artificial Sequence: Synthetic oligonucleotide
gguuccugucgcgagcauu

SEQ ID NO: 1861715 - RNA, 19 nt, Artificial Sequence
  Description of Artificial Sequence: Synthetic oligonucleotide
cuccaagacgacgcugguu

SEQ ID NO: 1861716 - RNA, 19 nt, Artificial Sequence
  Description of Artificial Sequence: Synthetic oligonucleotide
cccguucgaggagugagcu

SEQ ID NO: 1861717 - RNA, 19 nt, Artificial Sequence
  Description of Artificial Sequence: Synthetic oligonucleotide
ccgagggcugaucuucggu

SEQ ID NO: 1861718 - RNA, 19 nt, Artificial Sequence
  Description of Artificial Sequence: Synthetic oligonucleotide
cccgugccuggaugaguca

SEQ ID NO: 1861719 - RNA, 19 nt, Artificial Sequence
  Description of Artificial Sequence: Synthetic oligonucleotide
gcaaggcgauccacuguuu

SEQ ID NO: 1861720 - RNA, 19 nt, Artificial Sequence
  Description of Artificial Sequence: Synthetic oligonucleotide
ccgugccuggaugagucau

SEQ ID NO: 1861721 - RNA, 19 nt, Artificial Sequence
  Description of Artificial Sequence: Synthetic oligonucleotide
cgcgagcauuuguguaccu

SEQ ID NO: 1861722 - RNA, 19 nt, Artificial Sequence
  Description of Artificial Sequence: Synthetic oligonucleotide
aagagaacaagauaguucc

SEQ ID NO: 1861723 - RNA, 19 nt, Artificial Sequence
  Description of Artificial Sequence: Synthetic oligonucleotide
auuauaucuaaacagauca

SEQ ID NO: 1861724 - RNA, 19 nt, Artificial Sequence
  Description of Artificial Sequence: Synthetic oligonucleotide
cuagaagagaacaagauag

SEQ ID NO: 1861725 - RNA, 19 nt, Artificial Sequence
  Description of Artificial Sequence: Synthetic oligonucleotide
acauuauuagucuuggagc

SEQ ID NO: 1861726 - RNA, 19 nt, Artificial Sequence
  Description of Artificial Sequence: Synthetic oligonucleotide
acaaaguucaauuaucuuc

SEQ ID NO: 1861727 - RNA, 19 nt, Artificial Sequence
  Description of Artificial Sequence: Synthetic oligonucleotide
uaccaugucaccauuaagg

SEQ ID NO: 1861728 - RNA, 19 nt, Artificial Sequence
  Description of Artificial Sequence: Synthetic oligonucleotide
ugugaaagcuuucuaaagg

SEQ ID NO: 1861729 - RNA, 19 nt, Artificial Sequence
  Description of Artificial Sequence: Synthetic oligonucleotide
uaggauuauaucuaaacag

SEQ ID NO: 1861730 - RNA, 19 nt, Artificial Sequence
  Description of Artificial Sequence: Synthetic oligonucleotide
uauagcuuccuuuacaaag

SEQ ID NO: 1861731 - RNA, 19 nt, Artificial Sequence
  Description of Artificial Sequence: Synthetic oligonucleotide
uuuucugacacugacaucc

SEQ ID NO: 1861732 - RNA, 19 nt, Artificial Sequence
  Description of Artificial Sequence: Synthetic oligonucleotide
aaucauuuagcaugcacag

SEQ ID NO: 1861733 - RNA, 19 nt, Artificial Sequence
  Description of Artificial Sequence: Synthetic oligonucleotide
cuuucuaaagguuuguucc

SEQ ID NO: 1861734 - RNA, 19 nt, Artificial Sequence
  Description of Artificial Sequence: Synthetic oligonucleotide
caugucaccauuaagguag

SEQ ID NO: 1861735 - RNA, 19 nt, Artificial Sequence
  Description of Artificial Sequence: Synthetic oligonucleotide
ucaacuuucacuugaacug

SEQ ID NO: 1861736 - RNA, 19 nt, Artificial Sequence
  Description of Artificial Sequence: Synthetic oligonucleotide
accacaaucauuuagcaug

SEQ ID NO: 1861737 - RNA, 19 nt, Artificial Sequence
  Description of Artificial Sequence: Synthetic oligonucleotide
aucuaaacagaucaucagc

SEQ ID NO: 1861738 - RNA, 19 nt, Artificial Sequence
  Description of Artificial Sequence: Synthetic oligonucleotide
aaauucuucaguugaccac

SEQ ID NO: 1861739 - RNA, 19 nt, Artificial Sequence
  Description of Artificial Sequence: Synthetic oligonucleotide
auucuuucgagcuugauga

SEQ ID NO: 1861740 - RNA, 19 nt, Artificial Sequence
  Description of Artificial Sequence: Synthetic oligonucleotide
gauaguuccauucuugaug

SEQ ID NO: 1861741 - RNA, 19 nt, Artificial Sequence
  Description of Artificial Sequence: Synthetic oligonucleotide
ucuauagccaaaucaauug

SEQ ID NO: 1861742 - RNA, 19 nt, Artificial Sequence
  Description of Artificial Sequence: Synthetic oligonucleotide
aaaugaucugucugcuucc

SEQ ID NO: 1861743 - RNA, 19 nt, Artificial Sequence
  Description of Artificial Sequence: Synthetic oligonucleotide
ucuugaguaacucuuccag

SEQ ID NO: 1861744 - RNA, 19 nt, Artificial Sequence
  Description of Artificial Sequence: Synthetic oligonucleotide
aguacuuccucuucuauag

SEQ ID NO: 1861745 - RNA, 19 nt, Artificial Sequence
  Description of Artificial Sequence: Synthetic oligonucleotide
uuuauuucuguuagcagca

SEQ ID NO: 1861746 - RNA, 19 nt, Artificial Sequence
  Description of Artificial Sequence: Synthetic oligonucleotide
aaugugaccuucuugaauu

SEQ ID NO: 1861747 - RNA, 19 nt, Artificial Sequence
  Description of Artificial Sequence: Synthetic oligonucleotide
uaaacagaucaucagcgag

SEQ ID NO: 1861748 - RNA, 19 nt, Artificial Sequence
  Description of Artificial Sequence: Synthetic oligonucleotide
ucuacauccauccuuggcu

SEQ ID NO: 1861749 - RNA, 19 nt, Artificial Sequence
  Description of Artificial Sequence: Synthetic oligonucleotide
ucauuuagcaugcacagau

SEQ ID NO: 1861750 - RNA, 19 nt, Artificial Sequence
  Description of Artificial Sequence: Synthetic oligonucleotide
uuucuauggaaaaugauuu

SEQ ID NO: 1861751 - RNA, 19 nt, Artificial Sequence
  Description of Artificial Sequence: Synthetic oligonucleotide
uuugauggaggucugcugc

SEQ ID NO: 1861752 - RNA, 19 nt, Artificial Sequence
  Description of Artificial Sequence: Synthetic oligonucleotide
uugaccacaaucauuuagc

SEQ ID NO: 1861753 - RNA, 19 nt, Artificial Sequence
  Description of Artificial Sequence: Synthetic oligonucleotide
uucaacuuucacuugaacu

SEQ ID NO: 1861754 - RNA, 19 nt, Artificial Sequence
  Description of Artificial Sequence: Synthetic oligonucleotide
cacauuauuagucuuggag

SEQ ID NO: 1861755 - RNA, 19 nt, Artificial Sequence
  Description of Artificial Sequence: Synthetic oligonucleotide
ccuaaauucaguuaguagc

SEQ ID NO: 1861756 - RNA, 19 nt, Artificial Sequence
  Description of Artificial Sequence: Synthetic oligonucleotide
uauucuuucgagcuugaug

SEQ ID NO: 1861757 - RNA, 19 nt, Artificial Sequence
  Description of Artificial Sequence: Synthetic oligonucleotide
aacucuguauucuuucgag

SEQ ID NO: 1861758 - RNA, 19 nt, Artificial Sequence
  Description of Artificial Sequence: Synthetic oligonucleotide
uuacaaaguucaauuaucu

SEQ ID NO: 1861759 - RNA, 19 nt, Artificial Sequence
  Description of Artificial Sequence: Synthetic oligonucleotide
ucuuuugucgaccacagua

SEQ ID NO: 1861760 - RNA, 19 nt, Artificial Sequence
  Description of Artificial Sequence: Synthetic oligonucleotide
gugaccuaaauucaguuag

SEQ ID NO: 1861761 - RNA, 19 nt, Artificial Sequence
  Description of Artificial Sequence: Synthetic oligonucleotide
aaagguuuguuccacucca

SEQ ID NO: 1861762 - RNA, 19 nt, Artificial Sequence
  Description of Artificial Sequence: Synthetic oligonucleotide
uuuacauuaggauuauauc

SEQ ID NO: 1861763 - RNA, 19 nt, Artificial Sequence
  Description of Artificial Sequence: Synthetic oligonucleotide
aacaagauaguuccauucu

SEQ ID NO: 1861764 - RNA, 19 nt, Artificial Sequence
  Description of Artificial Sequence: Synthetic oligonucleotide
uuuguucuagaagagaaca

SEQ ID NO: 1861765 - RNA, 19 nt, Artificial Sequence
  Description of Artificial Sequence: Synthetic oligonucleotide
acaaucauuuagcaugcac

SEQ ID NO: 1861766 - RNA, 19 nt, Artificial Sequence
  Description of Artificial Sequence: Synthetic oligonucleotide
uguuucaucuucuugaguu

SEQ ID NO: 1861767 - RNA, 19 nt, Artificial Sequence
  Description of Artificial Sequence: Synthetic oligonucleotide
ucuucaguugaccacaauc

SEQ ID NO: 1861768 - RNA, 19 nt, Artificial Sequence
  Description of Artificial Sequence: Synthetic oligonucleotide
aauuucacuggagaaagcu

SEQ ID NO: 1861769 - RNA, 19 nt, Artificial Sequence
  Description of Artificial Sequence: Synthetic oligonucleotide
acauacauguaucugcuug

SEQ ID NO: 1861770 - RNA, 19 nt, Artificial Sequence
  Description of Artificial Sequence: Synthetic oligonucleotide
uuauuagucuuggagcugg

SEQ ID NO: 1861771 - RNA, 19 nt, Artificial Sequence
  Description of Artificial Sequence: Synthetic oligonucleotide
aaauucaguuaguagcacu

SEQ ID NO: 1861772 - RNA, 19 nt, Artificial Sequence
  Description of Artificial Sequence: Synthetic oligonucleotide
aacagaucaucagcgagac

SEQ ID NO: 1861773 - RNA, 19 nt, Artificial Sequence
  Description of Artificial Sequence: Synthetic oligonucleotide
acauguaucugcuugcucu

SEQ ID NO: 1861774 - RNA, 19 nt, Artificial Sequence
  Description of Artificial Sequence: Synthetic oligonucleotide
uuuggucuuucacucaaag

SEQ ID NO: 1861775 - RNA, 19 nt, Artificial Sequence
  Description of Artificial Sequence: Synthetic oligonucleotide
aaagcugguaguuuggguu

SEQ ID NO: 1861776 - RNA, 19 nt, Artificial Sequence
  Description of Artificial Sequence: Synthetic oligonucleotide
uacauuaggauuauaucua

SEQ ID NO: 1861777 - RNA, 19 nt, Artificial Sequence
  Description of Artificial Sequence: Synthetic oligonucleotide
aagauaguuccauucuuga

SEQ ID NO: 1861778 - RNA, 19 nt, Artificial Sequence
  Description of Artificial Sequence: Synthetic oligonucleotide
uuuuccaaagugagggugc

SEQ ID NO: 1861779 - RNA, 19 nt, Artificial Sequence
  Description of Artificial Sequence: Synthetic oligonucleotide
ugauaccacauuauuaguc

SEQ ID NO: 1861780 - RNA, 19 nt, Artificial Sequence
  Description of Artificial Sequence: Synthetic oligonucleotide
aaaugauuuacuggcaaga

SEQ ID NO: 1861781 - RNA, 19 nt, Artificial Sequence
  Description of Artificial Sequence: Synthetic oligonucleotide
cuuucuacauccauccuug

SEQ ID NO: 1861782 - RNA, 19 nt, Artificial Sequence
  Description of Artificial Sequence: Synthetic oligonucleotide
uugaugagcuaugagaucu

SEQ ID NO: 1861783 - RNA, 19 nt, Artificial Sequence
  Description of Artificial Sequence: Synthetic oligonucleotide
uuagucuuggagcuggacu

SEQ ID NO: 1861784 - RNA, 19 nt, Artificial Sequence
  Description of Artificial Sequence: Synthetic oligonucleotide
ucuagaagagaacaagaua

SEQ ID NO: 1861785 - RNA, 19 nt, Artificial Sequence
  Description of Artificial Sequence: Synthetic oligonucleotide
ucuauggaaaaugauuuac

SEQ ID NO: 1861786 - RNA, 19 nt, Artificial Sequence
  Description of Artificial Sequence: Synthetic oligonucleotide
uaaagguuuguuccacucc

SEQ ID NO: 1861787 - RNA, 19 nt, Artificial Sequence
  Description of Artificial Sequence: Synthetic oligonucleotide
auuucuguuagcagcaggg

SEQ ID NO: 1861788 - RNA, 19 nt, Artificial Sequence
  Description of Artificial Sequence: Synthetic oligonucleotide
aagcugguaguuuggguuc

SEQ ID NO: 1861789 - RNA, 19 nt, Artificial Sequence
  Description of Artificial Sequence: Synthetic oligonucleotide
uaaguuuccugugaaagcu

SEQ ID NO: 1861790 - RNA, 19 nt, Artificial Sequence
  Description of Artificial Sequence: Synthetic oligonucleotide
ucugauccuccaaugaugu

SEQ ID NO: 1861791 - RNA, 19 nt, Artificial Sequence
  Description of Artificial Sequence: Synthetic oligonucleotide
ucaccauuaagguagcuau

SEQ ID NO: 1861792 - RNA, 19 nt, Artificial Sequence
  Description of Artificial Sequence: Synthetic oligonucleotide
cuuucacucaaagacauac

SEQ ID NO: 1861793 - RNA, 19 nt, Artificial Sequence
  Description of Artificial Sequence: Synthetic oligonucleotide
gaagcuuuccugcuccagg

SEQ ID NO: 1861794 - RNA, 19 nt, Artificial Sequence
  Description of Artificial Sequence: Synthetic oligonucleotide
uuacugaccaccagugacc

SEQ ID NO: 1861795 - RNA, 19 nt, Artificial Sequence
  Description of Artificial Sequence: Synthetic oligonucleotide
ugaacugccaucucuggcu

SEQ ID NO: 1861796 - RNA, 19 nt, Artificial Sequence
  Description of Artificial Sequence: Synthetic oligonucleotide
agauuuucuauggaaaaug

SEQ ID NO: 1861797 - RNA, 19 nt, Artificial Sequence
  Description of Artificial Sequence: Synthetic oligonucleotide
guugaccacaaucauuuag

SEQ ID NO: 1861798 - RNA, 19 nt, Artificial Sequence
  Description of Artificial Sequence: Synthetic oligonucleotide
ugaucugucugcuuccuug

SEQ ID NO: 1861799 - RNA, 19 nt, Artificial Sequence
  Description of Artificial Sequence: Synthetic oligonucleotide
uuagcagcagggaauuuca

SEQ ID NO: 1861800 - RNA, 19 nt, Artificial Sequence
  Description of Artificial Sequence: Synthetic oligonucleotide
uuauccuguugcuuucugg

SEQ ID NO: 1861801 - RNA, 19 nt, Artificial Sequence
  Description of Artificial Sequence: Synthetic oligonucleotide
uuagcaugcacagauuucu

SEQ ID NO: 1861802 - RNA, 19 nt, Artificial Sequence
  Description of Artificial Sequence: Synthetic oligonucleotide
accuaaauucaguuaguag

SEQ ID NO: 1861803 - RNA, 19 nt, Artificial Sequence
  Description of Artificial Sequence: Synthetic oligonucleotide
gaacaagauaguuccauuc

SEQ ID NO: 1861804 - RNA, 19 nt, Artificial Sequence
  Description of Artificial Sequence: Synthetic oligonucleotide
cuaacucuguauucuuucg

SEQ ID NO: 1861805 - RNA, 19 nt, Artificial Sequence
  Description of Artificial Sequence: Synthetic oligonucleotide
aaaugugaccuucuugaau

SEQ ID NO: 1861806 - RNA, 19 nt, Artificial Sequence
  Description of Artificial Sequence: Synthetic oligonucleotide
auuuggaugaggacauugc

SEQ ID NO: 1861807 - RNA, 19 nt, Artificial Sequence
  Description of Artificial Sequence: Synthetic oligonucleotide
uccaagauuuucuauggaa

SEQ ID NO: 1861808 - RNA, 19 nt, Artificial Sequence
  Description of Artificial Sequence: Synthetic oligonucleotide
uucacuugaacugccaucu

SEQ ID NO: 1861809 - RNA, 19 nt, Artificial Sequence
  Description of Artificial Sequence: Synthetic oligonucleotide
ggaaaugugaccuucuuga

SEQ ID NO: 1861810 - RNA, 19 nt, Artificial Sequence
  Description of Artificial Sequence: Synthetic oligonucleotide
guaguuuggguucuucucc

SEQ ID NO: 1861811 - RNA, 19 nt, Artificial Sequence
  Description of Artificial Sequence: Synthetic oligonucleotide
uucuuuuggucuuucacuc

SEQ ID NO: 1861812 - RNA, 19 nt, Artificial Sequence
  Description of Artificial Sequence: Synthetic oligonucleotide
uucuauagccaaaucaauu

SEQ ID NO: 1861813 - RNA, 19 nt, Artificial Sequence
  Description of Artificial Sequence: Synthetic oligonucleotide
accauuaagguagcuauuc

SEQ ID NO: 1861814 - RNA, 19 nt, Artificial Sequence
  Description of Artificial Sequence: Synthetic oligonucleotide
uguacucuugaguaacucu

SEQ ID NO: 1861815 - RNA, 19 nt, Artificial Sequence
  Description of Artificial Sequence: Synthetic oligonucleotide
guaaguuuccugugaaagc

SEQ ID NO: 1861816 - RNA, 19 nt, Artificial Sequence
  Description of Artificial Sequence: Synthetic oligonucleotide
caagauaguuccauucuug

SEQ ID NO: 1861817 - RNA, 19 nt, Artificial Sequence
  Description of Artificial Sequence: Synthetic oligonucleotide
ugaguuauccuguugcuuu

SEQ ID NO: 1861818 - RNA, 19 nt, Artificial Sequence
  Description of Artificial Sequence: Synthetic oligonucleotide
ugauccuccaaugaugugu

SEQ ID NO: 1861819 - RNA, 19 nt, Artificial Sequence
  Description of Artificial Sequence: Synthetic oligonucleotide
agcuauuccuuucuacauc

SEQ ID NO: 1861820 - RNA, 19 nt, Artificial Sequence
  Description of Artificial Sequence: Synthetic oligonucleotide
auagccaaaucaauuguuc

SEQ ID NO: 1861821 - RNA, 19 nt, Artificial Sequence
  Description of Artificial Sequence: Synthetic oligonucleotide
uaucacccacaaaugaucu

SEQ ID NO: 1861822 - RNA, 19 nt, Artificial Sequence
  Description of Artificial Sequence: Synthetic oligonucleotide
uauccuguugcuuucuggu

SEQ ID NO: 1861823 - RNA, 19 nt, Artificial Sequence
  Description of Artificial Sequence: Synthetic oligonucleotide
ucgaccacaguaauucucu

SEQ ID NO: 1861824 - RNA, 19 nt, Artificial Sequence
  Description of Artificial Sequence: Synthetic oligonucleotide
ucucuaucacccacaaaug

SEQ ID NO: 1861825 - RNA, 19 nt, Artificial Sequence
  Description of Artificial Sequence: Synthetic oligonucleotide
uaccacauuauuagucuug

SEQ ID NO: 1861826 - RNA, 19 nt, Artificial Sequence
  Description of Artificial Sequence: Synthetic oligonucleotide
gaaguggaguuacugacca

SEQ ID NO: 1861827 - RNA, 19 nt, Artificial Sequence
  Description of Artificial Sequence: Synthetic oligonucleotide
ucaguuaguagcacuuuuc

SEQ ID NO: 1861828 - RNA, 19 nt, Artificial Sequence
  Description of Artificial Sequence: Synthetic oligonucleotide
uugucgaccacaguaauuc

SEQ ID NO: 1861829 - RNA, 19 nt, Artificial Sequence
  Description of Artificial Sequence: Synthetic oligonucleotide
aagguagcuauuccuuucu

SEQ ID NO: 1861830 - RNA, 19 nt, Artificial Sequence
  Description of Artificial Sequence: Synthetic oligonucleotide
uaugagaucugauccucca

SEQ ID NO: 1861831 - RNA, 19 nt, Artificial Sequence
  Description of Artificial Sequence: Synthetic oligonucleotide
uucuacauccauccuuggc

SEQ ID NO: 1861832 - RNA, 19 nt, Artificial Sequence
  Description of Artificial Sequence: Synthetic oligonucleotide
guagcuauuccuuucuaca

SEQ ID NO: 1861833 - RNA, 19 nt, Artificial Sequence
  Description of Artificial Sequence: Synthetic oligonucleotide
uggaaguucaucacuguua

SEQ ID NO: 1861834 - RNA, 19 nt, Artificial Sequence
  Description of Artificial Sequence: Synthetic oligonucleotide
uuuagcaugcacagauuuc

SEQ ID NO: 1861835 - RNA, 19 nt, Artificial Sequence
  Description of Artificial Sequence: Synthetic oligonucleotide
cugugaaagcuuucuaaag

SEQ ID NO: 1861836 - RNA, 19 nt, Artificial Sequence
  Description of Artificial Sequence: Synthetic oligonucleotide
cuaucacccacaaaugauc

SEQ ID NO: 1861837 - RNA, 19 nt, Artificial Sequence
  Description of Artificial Sequence: Synthetic oligonucleotide
aaacagaucaucagcgaga

SEQ ID NO: 1861838 - RNA, 19 nt, Artificial Sequence
  Description of Artificial Sequence: Synthetic oligonucleotide
gaaauguguuucuauagcu

SEQ ID NO: 1861839 - RNA, 19 nt, Artificial Sequence
  Description of Artificial Sequence: Synthetic oligonucleotide
aggauuauaucuaaacaga

SEQ ID NO: 1861840 - RNA, 19 nt, Artificial Sequence
  Description of Artificial Sequence: Synthetic oligonucleotide
gauuuggaugaggacauug

SEQ ID NO: 1861841 - RNA, 19 nt, Artificial Sequence
  Description of Artificial Sequence: Synthetic oligonucleotide
uuuacuggcaagagucuuc

SEQ ID NO: 1861842 - RNA, 19 nt, Artificial Sequence
  Description of Artificial Sequence: Synthetic oligonucleotide
uuuugauggaggucugcug

SEQ ID NO: 1861843 - RNA, 19 nt, Artificial Sequence
  Description of Artificial Sequence: Synthetic oligonucleotide
uagcacuuuucuuggaagc

SEQ ID NO: 1861844 - RNA, 19 nt, Artificial Sequence
  Description of Artificial Sequence: Synthetic oligonucleotide
guagcacuuuucuuggaag

SEQ ID NO: 1861845 - RNA, 19 nt, Artificial Sequence
  Description of Artificial Sequence: Synthetic oligonucleotide
uugaacugccaucucuggc

SEQ ID NO: 1861846 - RNA, 19 nt, Artificial Sequence
  Description of Artificial Sequence: Synthetic oligonucleotide
acaguaauucucuguugag

SEQ ID NO: 1861847 - RNA, 19 nt, Artificial Sequence
  Description of Artificial Sequence: Synthetic oligonucleotide
gguccaagauuuucuaugg

SEQ ID NO: 1861848 - RNA, 19 nt, Artificial Sequence
  Description of Artificial Sequence: Synthetic oligonucleotide
uccaaagugagggugcagc

SEQ ID NO: 1861849 - RNA, 19 nt, Artificial Sequence
  Description of Artificial Sequence: Synthetic oligonucleotide
uguuucaucuuuugucgac

SEQ ID NO: 1861850 - RNA, 19 nt, Artificial Sequence
  Description of Artificial Sequence: Synthetic oligonucleotide
caagagucuucccauuggg

SEQ ID NO: 1861851 - RNA, 19 nt, Artificial Sequence
  Description of Artificial Sequence: Synthetic oligonucleotide
aaugauguguggaagcuuu

SEQ ID NO: 1861852 - RNA, 19 nt, Artificial Sequence
  Description of Artificial Sequence: Synthetic oligonucleotide
uuguccuacaggcucacuc

SEQ ID NO: 1861853 - RNA, 19 nt, Artificial Sequence
  Description of Artificial Sequence: Synthetic oligonucleotide
uccugugaaagcuuucuaa

SEQ ID NO: 1861854 - RNA, 19 nt, Artificial Sequence
  Description of Artificial Sequence: Synthetic oligonucleotide
uuucugacacugacauccg

SEQ ID NO: 1861855 - RNA, 19 nt, Artificial Sequence
  Description of Artificial Sequence: Synthetic oligonucleotide
cacuuuucuuggaagcugc

SEQ ID NO: 1861856 - RNA, 19 nt, Artificial Sequence
  Description of Artificial Sequence: Synthetic oligonucleotide
ucuggaaguggaguuacug

SEQ ID NO: 1861857 - RNA, 19 nt, Artificial Sequence
  Description of Artificial Sequence: Synthetic oligonucleotide
aauucaguuaguagcacuu

SEQ ID NO: 1861858 - RNA, 19 nt, Artificial Sequence
  Description of Artificial Sequence: Synthetic oligonucleotide
gagaucugauccuccaaug

SEQ ID NO: 1861859 - RNA, 19 nt, Artificial Sequence
  Description of Artificial Sequence: Synthetic oligonucleotide
agcgagacucucuucuuuc

SEQ ID NO: 1861860 - RNA, 19 nt, Artificial Sequence
  Description of Artificial Sequence: Synthetic oligonucleotide
ucacccacaaaugaucugu

SEQ ID NO: 1861861 - RNA, 19 nt, Artificial Sequence
  Description of Artificial Sequence: Synthetic oligonucleotide
cacuggagaaagcugguag

SEQ ID NO: 1861862 - RNA, 19 nt, Artificial Sequence
  Description of Artificial Sequence: Synthetic oligonucleotide
gguuuuaugucucuaucac

SEQ ID NO: 1861863 - RNA, 19 nt, Artificial Sequence
  Description of Artificial Sequence: Synthetic oligonucleotide
uauuccuuucuacauccau

SEQ ID NO: 1861864 - RNA, 19 nt, Artificial Sequence
  Description of Artificial Sequence: Synthetic oligonucleotide
ugcuguaaguuuccuguga

SEQ ID NO: 1861865 - RNA, 19 nt, Artificial Sequence
  Description of Artificial Sequence: Synthetic oligonucleotide
cuuuucaacuuucacuuga

SEQ ID NO: 1861866 - RNA, 19 nt, Artificial Sequence
  Description of Artificial Sequence: Synthetic oligonucleotide
ucucuguugaguucaacuu

SEQ ID NO: 1861867 - RNA, 19 nt, Artificial Sequence
  Description of Artificial Sequence: Synthetic oligonucleotide
uuucacuugaacugccauc

SEQ ID NO: 1861868 - RNA, 19 nt, Artificial Sequence
  Description of Artificial Sequence: Synthetic oligonucleotide
cuuggagcuggacuugagg

SEQ ID NO: 1861869 - RNA, 19 nt, Artificial Sequence
  Description of Artificial Sequence: Synthetic oligonucleotide
cuugaacugccaucucugg

SEQ ID NO: 1861870 - RNA, 19 nt, Artificial Sequence
  Description of Artificial Sequence: Synthetic oligonucleotide
aaguucaauuaucuucuuu

SEQ ID NO: 1861871 - RNA, 19 nt, Artificial Sequence
  Description of Artificial Sequence: Synthetic oligonucleotide
uccuugcuuuuccaaagug

SEQ ID NO: 1861872 - RNA, 19 nt, Artificial Sequence
  Description of Artificial Sequence: Synthetic oligonucleotide
uguaccuccauuucauguu

SEQ ID NO: 1861873 - RNA, 19 nt, Artificial Sequence
  Description of Artificial Sequence: Synthetic oligonucleotide
uucucccuaaccaggguac

SEQ ID NO: 1861874 - RNA, 19 nt, Artificial Sequence
  Description of Artificial Sequence: Synthetic oligonucleotide
uuguucuagaagagaacaa

SEQ ID NO: 1861875 - RNA, 19 nt, Artificial Sequence
  Description of Artificial Sequence: Synthetic oligonucleotide
caggcucacucugagaugg

SEQ ID NO: 1861876 - RNA, 19 nt, Artificial Sequence
  Description of Artificial Sequence: Synthetic oligonucleotide
uuggucuuucacucaaaga

SEQ ID NO: 1861877 - RNA, 19 nt, Artificial Sequence
  Description of Artificial Sequence: Synthetic oligonucleotide
uggguuuuaugucucuauc

SEQ ID NO: 1861878 - RNA, 19 nt, Artificial Sequence
  Description of Artificial Sequence: Synthetic oligonucleotide
ucaugcuguaaguuuccug

SEQ ID NO: 1861879 - RNA, 19 nt, Artificial Sequence
  Description of Artificial Sequence: Synthetic oligonucleotide
accacaguaauucucuguu

SEQ ID NO: 1861880 - RNA, 19 nt, Artificial Sequence
  Description of Artificial Sequence: Synthetic oligonucleotide
cauugcuggauuuucuuca

SEQ ID NO: 1861881 - RNA, 19 nt, Artificial Sequence
  Description of Artificial Sequence: Synthetic oligonucleotide
cuuuuccaaagugagggug

SEQ ID NO: 1861882 - RNA, 19 nt, Artificial Sequence
  Description of Artificial Sequence: Synthetic oligonucleotide
acuggagaaagcugguagu

SEQ ID NO: 1861883 - RNA, 19 nt, Artificial Sequence
  Description of Artificial Sequence: Synthetic oligonucleotide
ugagauggaugcuccuugc

SEQ ID NO: 1861884 - RNA, 19 nt, Artificial Sequence
  Description of Artificial Sequence: Synthetic oligonucleotide
aguagcacuuuucuuggaa

SEQ ID NO: 1861885 - RNA, 19 nt, Artificial Sequence
  Description of Artificial Sequence: Synthetic oligonucleotide
acauuaggauuauaucuaa

SEQ ID NO: 1861886 - RNA, 19 nt, Artificial Sequence
  Description of Artificial Sequence: Synthetic oligonucleotide
gguuuguuccacuccagag

SEQ ID NO: 1861887 - RNA, 19 nt, Artificial Sequence
  Description of Artificial Sequence: Synthetic oligonucleotide
uuaagguagcuauuccuuu

SEQ ID NO: 1861888 - RNA, 19 nt, Artificial Sequence
  Description of Artificial Sequence: Synthetic oligonucleotide
gaguuacugaccaccagug

SEQ ID NO: 1861889 - RNA, 19 nt, Artificial Sequence
  Description of Artificial Sequence: Synthetic oligonucleotide
agaaagcugguaguuuggg

SEQ ID NO: 1861890 - RNA, 19 nt, Artificial Sequence
  Description of Artificial Sequence: Synthetic oligonucleotide
cuaugagaucugauccucc

SEQ ID NO: 1861891 - RNA, 19 nt, Artificial Sequence
  Description of Artificial Sequence: Synthetic oligonucleotide
uucaacuuucuuuucuguu

SEQ ID NO: 1861892 - RNA, 19 nt, Artificial Sequence
  Description of Artificial Sequence: Synthetic oligonucleotide
uuuugucgaccacaguaau

SEQ ID NO: 1861893 - RNA, 19 nt, Artificial Sequence
  Description of Artificial Sequence: Synthetic oligonucleotide
gagaaagcugguaguuugg

SEQ ID NO: 1861894 - RNA, 19 nt, Artificial Sequence
  Description of Artificial Sequence: Synthetic oligonucleotide
cauuauuagucuuggagcu

SEQ ID NO: 1861895 - RNA, 19 nt, Artificial Sequence
  Description of Artificial Sequence: Synthetic oligonucleotide
uuucuacauccauccuugg

SEQ ID NO: 1861896 - RNA, 19 nt, Artificial Sequence
  Description of Artificial Sequence: Synthetic oligonucleotide
ugaccuaaauucaguuagu

SEQ ID NO: 1861897 - RNA, 19 nt, Artificial Sequence
  Description of Artificial Sequence: Synthetic oligonucleotide
uggugcauggcugaaagua

SEQ ID NO: 1861898 - RNA, 19 nt, Artificial Sequence
  Description of Artificial Sequence: Synthetic oligonucleotide
uucuauggaaaaugauuua

SEQ ID NO: 1861899 - RNA, 19 nt, Artificial Sequence
  Description of Artificial Sequence: Synthetic oligonucleotide
caugcuguaaguuuccugu

SEQ ID NO: 1861900 - RNA, 19 nt, Artificial Sequence
  Description of Artificial Sequence: Synthetic oligonucleotide
uacaaaguucaauuaucuu

SEQ ID NO: 1861901 - RNA, 19 nt, Artificial Sequence
  Description of Artificial Sequence: Synthetic oligonucleotide
agggaauuucacuggagaa

SEQ ID NO: 1861902 - RNA, 19 nt, Artificial Sequence
  Description of Artificial Sequence: Synthetic oligonucleotide
uggaguuacugaccaccag

SEQ ID NO: 1861903 - RNA, 19 nt, Artificial Sequence
  Description of Artificial Sequence: Synthetic oligonucleotide
uuccaguacuuccucuucu

SEQ ID NO: 1861904 - RNA, 19 nt, Artificial Sequence
  Description of Artificial Sequence: Synthetic oligonucleotide
acaagauaguuccauucuu

SEQ ID NO: 1861905 - RNA, 19 nt, Artificial Sequence
  Description of Artificial Sequence: Synthetic oligonucleotide
ucaucagcgagacucucuu

SEQ ID NO: 1861906 - RNA, 19 nt, Artificial Sequence
  Description of Artificial Sequence: Synthetic oligonucleotide
ucuguacucuugaguaacu

SEQ ID NO: 1861907 - RNA, 19 nt, Artificial Sequence
  Description of Artificial Sequence: Synthetic oligonucleotide
agugaccuaaauucaguua

SEQ ID NO: 1861908 - RNA, 19 nt, Artificial Sequence
  Description of Artificial Sequence: Synthetic oligonucleotide
guuucaucuuuugucgacc

SEQ ID NO: 1861909 - RNA, 19 nt, Artificial Sequence
  Description of Artificial Sequence: Synthetic oligonucleotide
uaaauucaguuaguagcac

SEQ ID NO: 1861910 - RNA, 19 nt, Artificial Sequence
  Description of Artificial Sequence: Synthetic oligonucleotide
ucgagcuugaugagcuaug

SEQ ID NO: 1861911 - RNA, 19 nt, Artificial Sequence
  Description of Artificial Sequence: Synthetic oligonucleotide
uuucugguaccaugucacc

SEQ ID NO: 1861912 - RNA, 19 nt, Artificial Sequence
  Description of Artificial Sequence: Synthetic oligonucleotide
uagcuauuccuuucuacau

SEQ ID NO: 1861913 - RNA, 19 nt, Artificial Sequence
  Description of Artificial Sequence: Synthetic oligonucleotide
uguguuucuauagcuuccu

SEQ ID NO: 1861914 - RNA, 19 nt, Artificial Sequence
  Description of Artificial Sequence: Synthetic oligonucleotide
uacucuugaguaacucuuc

SEQ ID NO: 1861915 - RNA, 19 nt, Artificial Sequence
  Description of Artificial Sequence: Synthetic oligonucleotide
cagauuucuggaaguggag

SEQ ID NO: 1861916 - RNA, 19 nt, Artificial Sequence
  Description of Artificial Sequence: Synthetic oligonucleotide
auuagucuuggagcuggac

SEQ ID NO: 1861917 - RNA, 19 nt, Artificial Sequence
  Description of Artificial Sequence: Synthetic oligonucleotide
gguacuugauaccacauua

SEQ ID NO: 1861918 - RNA, 19 nt, Artificial Sequence
  Description of Artificial Sequence: Synthetic oligonucleotide
cuguauucuuucgagcuug

SEQ ID NO: 1861919 - RNA, 19 nt, Artificial Sequence
  Description of Artificial Sequence: Synthetic oligonucleotide
uguauucuuucgagcuuga

SEQ ID NO: 1861920 - RNA, 19 nt, Artificial Sequence
  Description of Artificial Sequence: Synthetic oligonucleotide
ucuguauucuuucgagcuu

SEQ ID NO: 1861921 - RNA, 19 nt, Artificial Sequence
  Description of Artificial Sequence: Synthetic oligonucleotide
guugaguucaacuuucuuu

SEQ ID NO: 1861922 - RNA, 19 nt, Artificial Sequence
  Description of Artificial Sequence: Synthetic oligonucleotide
auuaagguagcuauuccuu

SEQ ID NO: 1861923 - RNA, 19 nt, Artificial Sequence
  Description of Artificial Sequence: Synthetic oligonucleotide
uucugguaccaugucacca

SEQ ID NO: 1861924 - RNA, 19 nt, Artificial Sequence
  Description of Artificial Sequence: Synthetic oligonucleotide
ccacaaaugaucugucugc

SEQ ID NO: 1861925 - RNA, 19 nt, Artificial Sequence
  Description of Artificial Sequence: Synthetic oligonucleotide
guaccaugucaccauuaag

SEQ ID NO: 1861926 - RNA, 19 nt, Artificial Sequence
  Description of Artificial Sequence: Synthetic oligonucleotide
agauaguuccauucuugau

SEQ ID NO: 1861927 - RNA, 19 nt, Artificial Sequence
  Description of Artificial Sequence: Synthetic oligonucleotide
gcuguguuuguucuagaag

SEQ ID NO: 1861928 - RNA, 19 nt, Artificial Sequence
  Description of Artificial Sequence: Synthetic oligonucleotide
uucuaaagguuuguuccac

SEQ ID NO: 1861929 - RNA, 19 nt, Artificial Sequence
  Description of Artificial Sequence: Synthetic oligonucleotide
uggguucuucucccuaacc

SEQ ID NO: 1861930 - RNA, 19 nt, Artificial Sequence
  Description of Artificial Sequence: Synthetic oligonucleotide
ucccauuggguuuuauguc

SEQ ID NO: 1861931 - RNA, 19 nt, Artificial Sequence
  Description of Artificial Sequence: Synthetic oligonucleotide
cuuuugucgaccacaguaa

SEQ ID NO: 1861932 - RNA, 19 nt, Artificial Sequence
  Description of Artificial Sequence: Synthetic oligonucleotide
cuaaacagaucaucagcga

SEQ ID NO: 1861933 - RNA, 19 nt, Artificial Sequence
  Description of Artificial Sequence: Synthetic oligonucleotide
ucuguaccuccauuucaug

SEQ ID NO: 1861934 - RNA, 19 nt, Artificial Sequence
  Description of Artificial Sequence: Synthetic oligonucleotide
aaugaucugucugcuuccu

SEQ ID NO: 1861935 - RNA, 19 nt, Artificial Sequence
  Description of Artificial Sequence: Synthetic oligonucleotide
uuugucgaccacaguaauu

SEQ ID NO: 1861936 - RNA, 19 nt, Artificial Sequence
  Description of Artificial Sequence: Synthetic oligonucleotide
uucuuucgagcuugaugag

SEQ ID NO: 1861937 - RNA, 19 nt, Artificial Sequence
  Description of Artificial Sequence: Synthetic oligonucleotide
uggcucuguacucuugagu

SEQ ID NO: 1861938 - RNA, 19 nt, Artificial Sequence
  Description of Artificial Sequence: Synthetic oligonucleotide
auuauuagucuuggagcug

SEQ ID NO: 1861939 - RNA, 19 nt, Artificial Sequence
  Description of Artificial Sequence: Synthetic oligonucleotide
gugaaagcuuucuaaaggu

SEQ ID NO: 1861940 - RNA, 19 nt, Artificial Sequence
  Description of Artificial Sequence: Synthetic oligonucleotide
guaauucucuguugaguuc

SEQ ID NO: 1861941 - RNA, 19 nt, Artificial Sequence
  Description of Artificial Sequence: Synthetic oligonucleotide
aguuaguagcacuuuucuu

SEQ ID NO: 1861942 - RNA, 19 nt, Artificial Sequence
  Description of Artificial Sequence: Synthetic oligonucleotide
cucuucuaacucuguauuc

SEQ ID NO: 1861943 - RNA, 19 nt, Artificial Sequence
  Description of Artificial Sequence: Synthetic oligonucleotide
uucuaacucuguauucuuu

SEQ ID NO: 1861944 - RNA, 19 nt, Artificial Sequence
  Description of Artificial Sequence: Synthetic oligonucleotide
aucugauccuccaaugaug

SEQ ID NO: 1861945 - RNA, 19 nt, Artificial Sequence
  Description of Artificial Sequence: Synthetic oligonucleotide
acuugauaccacauuauua

SEQ ID NO: 1861946 - RNA, 19 nt, Artificial Sequence
  Description of Artificial Sequence: Synthetic oligonucleotide
cuuguugucucuguaccuc

SEQ ID NO: 1861947 - RNA, 19 nt, Artificial Sequence
  Description of Artificial Sequence: Synthetic oligonucleotide
cugucuggaaguucaucac

SEQ ID NO: 1861948 - RNA, 19 nt, Artificial Sequence
  Description of Artificial Sequence: Synthetic oligonucleotide
uucauguuucagccacucu

SEQ ID NO: 1861949 - RNA, 19 nt, Artificial Sequence
  Description of Artificial Sequence: Synthetic oligonucleotide
uuucauguuucagccacuc

SEQ ID NO: 1861950 - RNA, 19 nt, Artificial Sequence
  Description of Artificial Sequence: Synthetic oligonucleotide
aguuacugaccaccaguga

SEQ ID NO: 1861951 - RNA, 19 nt, Artificial Sequence
  Description of Artificial Sequence: Synthetic oligonucleotide
agcagggaauuucacugga

SEQ ID NO: 1861952 - RNA, 19 nt, Artificial Sequence
  Description of Artificial Sequence: Synthetic oligonucleotide
agauggaugcuccuugcuu

SEQ ID NO: 1861953 - RNA, 19 nt, Artificial Sequence
  Description of Artificial Sequence: Synthetic oligonucleotide
ucgcuuguugucucuguac

SEQ ID NO: 1861954 - RNA, 19 nt, Artificial Sequence
  Description of Artificial Sequence: Synthetic oligonucleotide
uacauguaucugcuugcuc

SEQ ID NO: 1861955 - RNA, 19 nt, Artificial Sequence
  Description of Artificial Sequence: Synthetic oligonucleotide
augauuuggaugaggacau

SEQ ID NO: 1861956 - RNA, 19 nt, Artificial Sequence
  Description of Artificial Sequence: Synthetic oligonucleotide
ucccuaaccaggguacuug

SEQ ID NO: 1861957 - RNA, 19 nt, Artificial Sequence
  Description of Artificial Sequence: Synthetic oligonucleotide
gguagcuauuccuuucuac

SEQ ID NO: 1861958 - RNA, 19 nt, Artificial Sequence
  Description of Artificial Sequence: Synthetic oligonucleotide
aagagucuucccauugggu

SEQ ID NO: 1861959 - RNA, 19 nt, Artificial Sequence
  Description of Artificial Sequence: Synthetic oligonucleotide
accagugaccuaaauucag

SEQ ID NO: 1861960 - RNA, 19 nt, Artificial Sequence
  Description of Artificial Sequence: Synthetic oligonucleotide
guuuguucuagaagagaac

SEQ ID NO: 1861961 - RNA, 19 nt, Artificial Sequence
  Description of Artificial Sequence: Synthetic oligonucleotide
cauuaagguagcuauuccu

SEQ ID NO: 1861962 - RNA, 19 nt, Artificial Sequence
  Description of Artificial Sequence: Synthetic oligonucleotide
cucuguauucuuucgagcu

SEQ ID NO: 1861963 - RNA, 19 nt, Artificial Sequence
  Description of Artificial Sequence: Synthetic oligonucleotide
auuuucuauggaaaaugau

SEQ ID NO: 1861964 - RNA, 19 nt, Artificial Sequence
  Description of Artificial Sequence: Synthetic oligonucleotide
cuuucgagcuugaugagcu

SEQ ID NO: 1861965 - RNA, 19 nt, Artificial Sequence
  Description of Artificial Sequence: Synthetic oligonucleotide
gguaguuuggguucuucuc

SEQ ID NO: 1861966 - RNA, 19 nt, Artificial Sequence
  Description of Artificial Sequence: Synthetic oligonucleotide
agguuuguuccacuccaga

SEQ ID NO: 1861967 - RNA, 19 nt, Artificial Sequence
  Description of Artificial Sequence: Synthetic oligonucleotide
uccuacaggcucacucuga

SEQ ID NO: 1861968 - RNA, 19 nt, Artificial Sequence
  Description of Artificial Sequence: Synthetic oligonucleotide
cuauggaaaaugauuuacu

SEQ ID NO: 1861969 - RNA, 19 nt, Artificial Sequence
  Description of Artificial Sequence: Synthetic oligonucleotide
uuuuggucuuucacucaaa

SEQ ID NO: 1861970 - RNA, 19 nt, Artificial Sequence
  Description of Artificial Sequence: Synthetic oligonucleotide
aucacccacaaaugaucug

SEQ ID NO: 1861971 - RNA, 19 nt, Artificial Sequence
  Description of Artificial Sequence: Synthetic oligonucleotide
guuauccuguugcuuucug

SEQ ID NO: 1861972 - RNA, 19 nt, Artificial Sequence
  Description of Artificial Sequence: Synthetic oligonucleotide
ugcgaaguccaaucuuuau

SEQ ID NO: 1861973 - RNA, 19 nt, Artificial Sequence
  Description of Artificial Sequence: Synthetic oligonucleotide
augcuguaaguuuccugug

SEQ ID NO: 1861974 - RNA, 19 nt, Artificial Sequence
  Description of Artificial Sequence: Synthetic oligonucleotide
caaagugagggugcagcag

SEQ ID NO: 1861975 - RNA, 19 nt, Artificial Sequence
  Description of Artificial Sequence: Synthetic oligonucleotide
uauuagucuuggagcugga

SEQ ID NO: 1861976 - RNA, 19 nt, Artificial Sequence
  Description of Artificial Sequence: Synthetic oligonucleotide
auguuucagccacucuucu

SEQ ID NO: 1861977 - RNA, 19 nt, Artificial Sequence
  Description of Artificial Sequence: Synthetic oligonucleotide
gaguuauccuguugcuuuc

SEQ ID NO: 1861978 - RNA, 19 nt, Artificial Sequence
  Description of Artificial Sequence: Synthetic oligonucleotide
uuggguucuucucccuaac

SEQ ID NO: 1861979 - RNA, 19 nt, Artificial Sequence
  Description of Artificial Sequence: Synthetic oligonucleotide
augaggacauugcuggauu

SEQ ID NO: 1861980 - RNA, 19 nt, Artificial Sequence
  Description of Artificial Sequence: Synthetic oligonucleotide
uuucgcuuguugucucugu

SEQ ID NO: 1861981 - RNA, 19 nt, Artificial Sequence
  Description of Artificial Sequence: Synthetic oligonucleotide
caggcuguguuuguucuag

SEQ ID NO: 1861982 - RNA, 19 nt, Artificial Sequence
  Description of Artificial Sequence: Synthetic oligonucleotide
auaccacauuauuagucuu

SEQ ID NO: 1861983 - RNA, 19 nt, Artificial Sequence
  Description of Artificial Sequence: Synthetic oligonucleotide
cuccaaugauguguggaag

SEQ ID NO: 1861984 - RNA, 19 nt, Artificial Sequence
  Description of Artificial Sequence: Synthetic oligonucleotide
caguugaccacaaucauuu

SEQ ID NO: 1861985 - RNA, 19 nt, Artificial Sequence
  Description of Artificial Sequence: Synthetic oligonucleotide
ccacaaucauuuagcaugc

SEQ ID NO: 1861986 - RNA, 19 nt, Artificial Sequence
  Description of Artificial Sequence: Synthetic oligonucleotide
agcuuccuuuacaaaguuc

SEQ ID NO: 1861987 - RNA, 19 nt, Artificial Sequence
  Description of Artificial Sequence: Synthetic oligonucleotide
gauggaugcuccuugcuuu

SEQ ID NO: 1861988 - RNA, 19 nt, Artificial Sequence
  Description of Artificial Sequence: Synthetic oligonucleotide
uccaguacuuccucuucua

SEQ ID NO: 1861989 - RNA, 19 nt, Artificial Sequence
  Description of Artificial Sequence: Synthetic oligonucleotide
ugucgaccacaguaauucu

SEQ ID NO: 1861990 - RNA, 19 nt, Artificial Sequence
  Description of Artificial Sequence: Synthetic oligonucleotide
uacugaccaccagugaccu

SEQ ID NO: 1861991 - RNA, 19 nt, Artificial Sequence
  Description of Artificial Sequence: Synthetic oligonucleotide
uccuuucuacauccauccu

SEQ ID NO: 1861992 - RNA, 19 nt, Artificial Sequence
  Description of Artificial Sequence: Synthetic oligonucleotide
cccacaaaugaucugucug

SEQ ID NO: 1861993 - RNA, 19 nt, Artificial Sequence
  Description of Artificial Sequence: Synthetic oligonucleotide
ggcucuguacucuugagua

SEQ ID NO: 1861994 - RNA, 19 nt, Artificial Sequence
  Description of Artificial Sequence: Synthetic oligonucleotide
ucuuucacucaaagacaua

SEQ ID NO: 1861995 - RNA, 19 nt, Artificial Sequence
  Description of Artificial Sequence: Synthetic oligonucleotide
uuccugugaaagcuuucua

SEQ ID NO: 1861996 - RNA, 19 nt, Artificial Sequence
  Description of Artificial Sequence: Synthetic oligonucleotide
gaugagcuaugagaucuga

SEQ ID NO: 1861997 - RNA, 19 nt, Artificial Sequence
  Description of Artificial Sequence: Synthetic oligonucleotide
acaggcucacucugagaug

SEQ ID NO: 1861998 - RNA, 19 nt, Artificial Sequence
  Description of Artificial Sequence: Synthetic oligonucleotide
cuuccaguacuuccucuuc

SEQ ID NO: 1861999 - RNA, 19 nt, Artificial Sequence
  Description of Artificial Sequence: Synthetic oligonucleotide
uucuuucgcuuguugucuc

SEQ ID NO: 1862000 - RNA, 19 nt, Artificial Sequence
  Description of Artificial Sequence: Synthetic oligonucleotide
ggcaagagucuucccauug

SEQ ID NO: 1862001 - RNA, 19 nt, Artificial Sequence
  Description of Artificial Sequence: Synthetic oligonucleotide
caggguacuugauaccaca

SEQ ID NO: 1862002 - RNA, 19 nt, Artificial Sequence
  Description of Artificial Sequence: Synthetic oligonucleotide
ugcugcgaaguccaaucuu

SEQ ID NO: 1862003 - RNA, 19 nt, Artificial Sequence
  Description of Artificial Sequence: Synthetic oligonucleotide
uugaguuauccuguugcuu

SEQ ID NO: 1862004 - RNA, 19 nt, Artificial Sequence
  Description of Artificial Sequence: Synthetic oligonucleotide
ggguucuucucccuaacca

SEQ ID NO: 1862005 - RNA, 19 nt, Artificial Sequence
  Description of Artificial Sequence: Synthetic oligonucleotide
cuauagccaaaucaauugu

SEQ ID NO: 1862006 - RNA, 19 nt, Artificial Sequence
  Description of Artificial Sequence: Synthetic oligonucleotide
guacuuccucuucuauagc

SEQ ID NO: 1862007 - RNA, 19 nt, Artificial Sequence
  Description of Artificial Sequence: Synthetic oligonucleotide
cauuaggauuauaucuaaa

SEQ ID NO: 1862008 - RNA, 19 nt, Artificial Sequence
  Description of Artificial Sequence: Synthetic oligonucleotide
gaaagcugguaguuugggu

SEQ ID NO: 1862009 - RNA, 19 nt, Artificial Sequence
  Description of Artificial Sequence: Synthetic oligonucleotide
gucucuguaccuccauuuc

SEQ ID NO: 1862010 - RNA, 19 nt, Artificial Sequence
  Description of Artificial Sequence: Synthetic oligonucleotide
ggugcauggcugaaaguag

SEQ ID NO: 1862011 - RNA, 19 nt, Artificial Sequence
  Description of Artificial Sequence: Synthetic oligonucleotide
cugaccaccagugaccuaa

SEQ ID NO: 1862012 - RNA, 19 nt, Artificial Sequence
  Description of Artificial Sequence: Synthetic oligonucleotide
ccauuaagguagcuauucc

SEQ ID NO: 1862013 - RNA, 19 nt, Artificial Sequence
  Description of Artificial Sequence: Synthetic oligonucleotide
aguuuggguucuucucccu

SEQ ID NO: 1862014 - RNA, 19 nt, Artificial Sequence
  Description of Artificial Sequence: Synthetic oligonucleotide
aucauuuagcaugcacaga

SEQ ID NO: 1862015 - RNA, 19 nt, Artificial Sequence
  Description of Artificial Sequence: Synthetic oligonucleotide
caugcacagauuucuggaa

SEQ ID NO: 1862016 - RNA, 19 nt, Artificial Sequence
  Description of Artificial Sequence: Synthetic oligonucleotide
gaccuaaauucaguuagua

SEQ ID NO: 1862017 - RNA, 19 nt, Artificial Sequence
  Description of Artificial Sequence: Synthetic oligonucleotide
uuuuggugcauggcugaaa

SEQ ID NO: 1862018 - RNA, 19 nt, Artificial Sequence
  Description of Artificial Sequence: Synthetic oligonucleotide
gcaugcacagauuucugga

SEQ ID NO: 1862019 - RNA, 19 nt, Artificial Sequence
  Description of Artificial Sequence: Synthetic oligonucleotide
guccuacaggcucacucug

SEQ ID NO: 1862020 - RNA, 19 nt, Artificial Sequence
  Description of Artificial Sequence: Synthetic oligonucleotide
uucaugcuguaaguuuccu

SEQ ID NO: 1862021 - RNA, 19 nt, Artificial Sequence
  Description of Artificial Sequence: Synthetic oligonucleotide
ccaagauuuucuauggaaa

SEQ ID NO: 1862022 - RNA, 19 nt, Artificial Sequence
  Description of Artificial Sequence: Synthetic oligonucleotide
gcugcugcgaaguccaauc

SEQ ID NO: 1862023 - RNA, 19 nt, Artificial Sequence
  Description of Artificial Sequence: Synthetic oligonucleotide
uaccuccauuucauguuuc

SEQ ID NO: 1862024 - RNA, 19 nt, Artificial Sequence
  Description of Artificial Sequence: Synthetic oligonucleotide
caucucuggcucuguacuc

SEQ ID NO: 1862025 - RNA, 19 nt, Artificial Sequence
  Description of Artificial Sequence: Synthetic oligonucleotide
caccagugaccuaaauuca

SEQ ID NO: 1862026 - RNA, 19 nt, Artificial Sequence
  Description of Artificial Sequence: Synthetic oligonucleotide
uuggugcauggcugaaagu

SEQ ID NO: 1862027 - RNA, 19 nt, Artificial Sequence
  Description of Artificial Sequence: Synthetic oligonucleotide
cuguuucaucuuuugucga

SEQ ID NO: 1862028 - RNA, 19 nt, Artificial Sequence
  Description of Artificial Sequence: Synthetic oligonucleotide
gcuuucugguaccauguca

SEQ ID NO: 1862029 - RNA, 19 nt, Artificial Sequence
  Description of Artificial Sequence: Synthetic oligonucleotide
gguaccaugucaccauuaa

SEQ ID NO: 1862030 - RNA, 19 nt, Artificial Sequence
  Description of Artificial Sequence: Synthetic oligonucleotide
uccgccucuugcuuuucaa

SEQ ID NO: 1862031 - RNA, 19 nt, Artificial Sequence
  Description of Artificial Sequence: Synthetic oligonucleotide
augauguguggaagcuuuc

SEQ ID NO: 1862032 - RNA, 19 nt, Artificial Sequence
  Description of Artificial Sequence: Synthetic oligonucleotide
ggaguuacugaccaccagu

SEQ ID NO: 1862033 - RNA, 19 nt, Artificial Sequence
  Description of Artificial Sequence: Synthetic oligonucleotide
caguuaguagcacuuuucu

SEQ ID NO: 1862034 - RNA, 19 nt, Artificial Sequence
  Description of Artificial Sequence: Synthetic oligonucleotide
cuuucgcuuguugucucug

SEQ ID NO: 1862035 - RNA, 19 nt, Artificial Sequence
  Description of Artificial Sequence: Synthetic oligonucleotide
aucuuuugucgaccacagu

SEQ ID NO: 1862036 - RNA, 19 nt, Artificial Sequence
  Description of Artificial Sequence: Synthetic oligonucleotide
ucacuugaacugccaucuc

SEQ ID NO: 1862037 - RNA, 19 nt, Artificial Sequence
  Description of Artificial Sequence: Synthetic oligonucleotide
uuccaaagugagggugcag

SEQ ID NO: 1862038 - RNA, 19 nt, Artificial Sequence
  Description of Artificial Sequence: Synthetic oligonucleotide
gucgaccacaguaauucuc

SEQ ID NO: 1862039 - RNA, 19 nt, Artificial Sequence
  Description of Artificial Sequence: Synthetic oligonucleotide
uucuucaguugaccacaau

SEQ ID NO: 1862040 - RNA, 19 nt, Artificial Sequence
  Description of Artificial Sequence: Synthetic oligonucleotide
ucagcgagacucucuucuu

SEQ ID NO: 1862041 - RNA, 19 nt, Artificial Sequence
  Description of Artificial Sequence: Synthetic oligonucleotide
gucaccauuaagguagcua

SEQ ID NO: 1862042 - RNA, 19 nt, Artificial Sequence
  Description of Artificial Sequence: Synthetic oligonucleotide
cuugaguuauccuguugcu

SEQ ID NO: 1862043 - RNA, 19 nt, Artificial Sequence
  Description of Artificial Sequence: Synthetic oligonucleotide
agucuuggagcuggacuug

SEQ ID NO: 1862044 - RNA, 19 nt, Artificial Sequence
  Description of Artificial Sequence: Synthetic oligonucleotide
aguuuccugugaaagcuuu

SEQ ID NO: 1862045 - RNA, 19 nt, Artificial Sequence
  Description of Artificial Sequence: Synthetic oligonucleotide
ccuguugcuuucugguacc

SEQ ID NO: 1862046 - RNA, 19 nt, Artificial Sequence
  Description of Artificial Sequence: Synthetic oligonucleotide
gaccacaaucauuuagcau

SEQ ID NO: 1862047 - RNA, 19 nt, Artificial Sequence
  Description of Artificial Sequence: Synthetic oligonucleotide
caguacuuccucuucuaua

SEQ ID NO: 1862048 - RNA, 19 nt, Artificial Sequence
  Description of Artificial Sequence: Synthetic oligonucleotide
agagaacaagauaguucca

SEQ ID NO: 1862049 - RNA, 19 nt, Artificial Sequence
  Description of Artificial Sequence: Synthetic oligonucleotide
cuucucccuaaccagggua

SEQ ID NO: 1862050 - RNA, 19 nt, Artificial Sequence
  Description of Artificial Sequence: Synthetic oligonucleotide
auuucauguuucagccacu

SEQ ID NO: 1862051 - RNA, 19 nt, Artificial Sequence
  Description of Artificial Sequence: Synthetic oligonucleotide
gagucuucccauuggguuu

SEQ ID NO: 1862052 - RNA, 19 nt, Artificial Sequence
  Description of Artificial Sequence: Synthetic oligonucleotide
uuguuccacuccagagauc

SEQ ID NO: 1862053 - RNA, 19 nt, Artificial Sequence
  Description of Artificial Sequence: Synthetic oligonucleotide
cuauuccuuucuacaucca

SEQ ID NO: 1862054 - RNA, 19 nt, Artificial Sequence
  Description of Artificial Sequence: Synthetic oligonucleotide
gcuaugagaucugauccuc

SEQ ID NO: 1862055 - RNA, 19 nt, Artificial Sequence
  Description of Artificial Sequence: Synthetic oligonucleotide
cacucuucuaacucuguau

SEQ ID NO: 1862056 - RNA, 19 nt, Artificial Sequence
  Description of Artificial Sequence: Synthetic oligonucleotide
uuucgagcuugaugagcua

SEQ ID NO: 1862057 - RNA, 19 nt, Artificial Sequence
  Description of Artificial Sequence: Synthetic oligonucleotide
ucucccuaaccaggguacu

SEQ ID NO: 1862058 - RNA, 19 nt, Artificial Sequence
  Description of Artificial Sequence: Synthetic oligonucleotide
aguugaccacaaucauuua

SEQ ID NO: 1862059 - RNA, 19 nt, Artificial Sequence
  Description of Artificial Sequence: Synthetic oligonucleotide
cacuugaacugccaucucu

SEQ ID NO: 1862060 - RNA, 19 nt, Artificial Sequence
  Description of Artificial Sequence: Synthetic oligonucleotide
cgcuuguugucucuguacc

SEQ ID NO: 1862061 - RNA, 19 nt, Artificial Sequence
  Description of Artificial Sequence: Synthetic oligonucleotide
ucacucugagauggaugcu

SEQ ID NO: 1862062 - RNA, 19 nt, Artificial Sequence
  Description of Artificial Sequence: Synthetic oligonucleotide
acagaucaucagcgagacu

SEQ ID NO: 1862063 - RNA, 19 nt, Artificial Sequence
  Description of Artificial Sequence: Synthetic oligonucleotide
cucuguaccuccauuucau

SEQ ID NO: 1862064 - RNA, 19 nt, Artificial Sequence
  Description of Artificial Sequence: Synthetic oligonucleotide
gcuugaugagcuaugagau

SEQ ID NO: 1862065 - RNA, 19 nt, Artificial Sequence
  Description of Artificial Sequence: Synthetic oligonucleotide
agguagcuauuccuuucua

SEQ ID NO: 1862066 - RNA, 19 nt, Artificial Sequence
  Description of Artificial Sequence: Synthetic oligonucleotide
ugaccaccagugaccuaaa

SEQ ID NO: 1862067 - RNA, 19 nt, Artificial Sequence
  Description of Artificial Sequence: Synthetic oligonucleotide
ccacaguaauucucuguug

SEQ ID NO: 1862068 - RNA, 19 nt, Artificial Sequence
  Description of Artificial Sequence: Synthetic oligonucleotide
caguaauucucuguugagu

SEQ ID NO: 1862069 - RNA, 19 nt, Artificial Sequence
  Description of Artificial Sequence: Synthetic oligonucleotide
ggcuguguuuguucuagaa

SEQ ID NO: 1862070 - RNA, 19 nt, Artificial Sequence
  Description of Artificial Sequence: Synthetic oligonucleotide
uggcaagagucuucccauu

SEQ ID NO: 1862071 - RNA, 19 nt, Artificial Sequence
  Description of Artificial Sequence: Synthetic oligonucleotide
gcucacucugagauggaug

SEQ ID NO: 1862072 - RNA, 19 nt, Artificial Sequence
  Description of Artificial Sequence: Synthetic oligonucleotide
agucuucccauuggguuuu

SEQ ID NO: 1862073 - RNA, 19 nt, Artificial Sequence
  Description of Artificial Sequence: Synthetic oligonucleotide
ugucaccauuaagguagcu

SEQ ID NO: 1862074 - RNA, 19 nt, Artificial Sequence
  Description of Artificial Sequence: Synthetic oligonucleotide
aggguacuugauaccacau

SEQ ID NO: 1862075 - RNA, 19 nt, Artificial Sequence
  Description of Artificial Sequence: Synthetic oligonucleotide
aggcuguguuuguucuaga

SEQ ID NO: 1862076 - RNA, 19 nt, Artificial Sequence
  Description of Artificial Sequence: Synthetic oligonucleotide
cacuccagagaucuucacu

SEQ ID NO: 1862077 - RNA, 19 nt, Artificial Sequence
  Description of Artificial Sequence: Synthetic oligonucleotide
cucuguugaguucaacuuu

SEQ ID NO: 1862078 - RNA, 19 nt, Artificial Sequence
  Description of Artificial Sequence: Synthetic oligonucleotide
gcuccaggaaaugugaccu

SEQ ID NO: 1862079 - RNA, 19 nt, Artificial Sequence
  Description of Artificial Sequence: Synthetic oligonucleotide
ccauuggguuuuaugucuc

SEQ ID NO: 1862080 - RNA, 19 nt, Artificial Sequence
  Description of Artificial Sequence: Synthetic oligonucleotide
cuacauccauccuuggcuu

SEQ ID NO: 1862081 - RNA, 19 nt, Artificial Sequence
  Description of Artificial Sequence: Synthetic oligonucleotide
guaccuccauuucauguuu

SEQ ID NO: 1862082 - RNA, 19 nt, Artificial Sequence
  Description of Artificial Sequence: Synthetic oligonucleotide
cagugaccuaaauucaguu

SEQ ID NO: 1862083 - RNA, 19 nt, Artificial Sequence
  Description of Artificial Sequence: Synthetic oligonucleotide
ccaaagugagggugcagca

SEQ ID NO: 1862084 - RNA, 19 nt, Artificial Sequence
  Description of Artificial Sequence: Synthetic oligonucleotide
ugauuuggaugaggacauu

SEQ ID NO: 1862085 - RNA, 19 nt, Artificial Sequence
  Description of Artificial Sequence: Synthetic oligonucleotide
gacauacauguaucugcuu

SEQ ID NO: 1862086 - RNA, 19 nt, Artificial Sequence
  Description of Artificial Sequence: Synthetic oligonucleotide
cugcgaaguccaaucuuua

SEQ ID NO: 1862087 - RNA, 19 nt, Artificial Sequence
  Description of Artificial Sequence: Synthetic oligonucleotide
gacauccgccucuugcuuu

SEQ ID NO: 1862088 - RNA, 19 nt, Artificial Sequence
  Description of Artificial Sequence: Synthetic oligonucleotide
ccaggguacuugauaccac

SEQ ID NO: 1862089 - RNA, 19 nt, Artificial Sequence
  Description of Artificial Sequence: Synthetic oligonucleotide
uguuagcagcagggaauuu

SEQ ID NO: 1862090 - RNA, 19 nt, Artificial Sequence
  Description of Artificial Sequence: Synthetic oligonucleotide
cauuggguuuuaugucucu

SEQ ID NO: 1862091 - RNA, 19 nt, Artificial Sequence
  Description of Artificial Sequence: Synthetic oligonucleotide
cuguugaguucaacuuucu

SEQ ID NO: 1862092 - RNA, 19 nt, Artificial Sequence
  Description of Artificial Sequence: Synthetic oligonucleotide
cuggaaguucaucacuguu

SEQ ID NO: 1862093 - RNA, 19 nt, Artificial Sequence
  Description of Artificial Sequence: Synthetic oligonucleotide
gcucuguacucuugaguaa

SEQ ID NO: 1862094 - RNA, 19 nt, Artificial Sequence
  Description of Artificial Sequence: Synthetic oligonucleotide
cauuuagcaugcacagauu

SEQ ID NO: 1862095 - RNA, 19 nt, Artificial Sequence
  Description of Artificial Sequence: Synthetic oligonucleotide
gcgaaguccaaucuuuauu

SEQ ID NO: 1862096 - RNA, 19 nt, Artificial Sequence
  Description of Artificial Sequence: Synthetic oligonucleotide
gcuuguugucucuguaccu

SEQ ID NO: 1862097 - RNA, 19 nt, Artificial Sequence
  Description of Artificial Sequence: Synthetic oligonucleotide
gccaaaucaauuguucuuu

SEQ ID NO: 1862098 - RNA, 19 nt, Artificial Sequence
  Description of Artificial Sequence: Synthetic oligonucleotide
ccauuucauguuucagcca

SEQ ID NO: 1862099 - RNA, 19 nt, Artificial Sequence
  Description of Artificial Sequence: Synthetic oligonucleotide
ccgccucuugcuuuucaac

SEQ ID NO: 1862100 - RNA, 19 nt, Artificial Sequence
  Description of Artificial Sequence: Synthetic oligonucleotide
cuguuucaucuucuugagu

SEQ ID NO: 1862101 - RNA, 19 nt, Artificial Sequence
  Description of Artificial Sequence: Synthetic oligonucleotide
ccucuucuauagccaaauc

SEQ ID NO: 1862102 - RNA, 19 nt, Artificial Sequence
  Description of Artificial Sequence: Synthetic oligonucleotide
acugaccaccagugaccua

SEQ ID NO: 1862103 - RNA, 19 nt, Artificial Sequence
  Description of Artificial Sequence: Synthetic oligonucleotide
cugcugcgaaguccaaucu

SEQ ID NO: 1862104 - RNA, 19 nt, Artificial Sequence
  Description of Artificial Sequence: Synthetic oligonucleotide
cccuaaccaggguacuuga

SEQ ID NO: 1862105 - RNA, 19 nt, Artificial Sequence
  Description of Artificial Sequence: Synthetic oligonucleotide
caggaaaugugaccuucuu

SEQ ID NO: 1862106 - RNA, 19 nt, Artificial Sequence
  Description of Artificial Sequence: Synthetic oligonucleotide
ccacauuauuagucuugga

SEQ ID NO: 1862107 - RNA, 19 nt, Artificial Sequence
  Description of Artificial Sequence: Synthetic oligonucleotide
gcugcgaaguccaaucuuu

SEQ ID NO: 1862108 - RNA, 19 nt, Artificial Sequence
  Description of Artificial Sequence: Synthetic oligonucleotide
caccauuaagguagcuauu

SEQ ID NO: 1862109 - RNA, 19 nt, Artificial Sequence
  Description of Artificial Sequence: Synthetic oligonucleotide
guauucuuucgagcuugau

SEQ ID NO: 1862110 - RNA, 19 nt, Artificial Sequence
  Description of Artificial Sequence: Synthetic oligonucleotide
ccuccuucaugcuguaagu

SEQ ID NO: 1862111 - RNA, 19 nt, Artificial Sequence
  Description of Artificial Sequence: Synthetic oligonucleotide
ccacucuucuaacucugua

SEQ ID NO: 1862112 - RNA, 19 nt, Artificial Sequence
  Description of Artificial Sequence: Synthetic oligonucleotide
aggcucacucugagaugga

SEQ ID NO: 1862113 - RNA, 19 nt, Artificial Sequence
  Description of Artificial Sequence: Synthetic oligonucleotide
cugguaccaugucaccauu

SEQ ID NO: 1862114 - RNA, 19 nt, Artificial Sequence
  Description of Artificial Sequence: Synthetic oligonucleotide
agggugcagcaggcugugu

SEQ ID NO: 1862115 - RNA, 19 nt, Artificial Sequence
  Description of Artificial Sequence: Synthetic oligonucleotide
ggcucacucugagauggau

SEQ ID NO: 1862116 - RNA, 19 nt, Artificial Sequence
  Description of Artificial Sequence: Synthetic oligonucleotide
cucccuaaccaggguacuu

SEQ ID NO: 1862117 - RNA, 19 nt, Artificial Sequence
  Description of Artificial Sequence: Synthetic oligonucleotide
cuuguccuacaggcucacu

SEQ ID NO: 1862118 - RNA, 19 nt, Artificial Sequence
  Description of Artificial Sequence: Synthetic oligonucleotide
ccuaaccaggguacuugau

SEQ ID NO: 1862119 - RNA, 19 nt, Artificial Sequence
  Description of Artificial Sequence: Synthetic oligonucleotide
guuccacuccagagaucuu

SEQ ID NO: 1862120 - RNA, 19 nt, Artificial Sequence
  Description of Artificial Sequence: Synthetic oligonucleotide
gcugguaguuuggguucuu

SEQ ID NO: 1862121 - RNA, 19 nt, Artificial Sequence
  Description of Artificial Sequence: Synthetic oligonucleotide
ucaacuucugaacagagug

SEQ ID NO: 1862122 - RNA, 19 nt, Artificial Sequence
  Description of Artificial Sequence: Synthetic oligonucleotide
gaaaagaagcaguagaggc

SEQ ID NO: 1862123 - RNA, 19 nt, Artificial Sequence
  Description of Artificial Sequence: Synthetic oligonucleotide
cuugauuaaauacagcacc

SEQ ID NO: 1862124 - RNA, 19 nt, Artificial Sequence
  Description of Artificial Sequence: Synthetic oligonucleotide
aacagaggagcuccaaugc

SEQ ID NO: 1862125 - RNA, 19 nt, Artificial Sequence
  Description of Artificial Sequence: Synthetic oligonucleotide
auugggauuacauacaaga

SEQ ID NO: 1862126 - RNA, 19 nt, Artificial Sequence
  Description of Artificial Sequence: Synthetic oligonucleotide
ucauaaaacagcuccggcg

SEQ ID NO: 1862127 - RNA, 19 nt, Artificial Sequence
  Description of Artificial Sequence: Synthetic oligonucleotide
agagguagaacuucuuugc

SEQ ID NO: 1862128 - RNA, 19 nt, Artificial Sequence
  Description of Artificial Sequence: Synthetic oligonucleotide
aauacuauuuugcucgcug

SEQ ID NO: 1862129 - RNA, 19 nt, Artificial Sequence
  Description of Artificial Sequence: Synthetic oligonucleotide
aaagaaccuggucugaaag

SEQ ID NO: 1862130 - RNA, 19 nt, Artificial Sequence
  Description of Artificial Sequence: Synthetic oligonucleotide
acuggugaaagucaacucg

SEQ ID NO: 1862131 - RNA, 19 nt, Artificial Sequence
  Description of Artificial Sequence: Synthetic oligonucleotide
acuccugaaagguaguccc

SEQ ID NO: 1862132 - RNA, 19 nt, Artificial Sequence
  Description of Artificial Sequence: Synthetic oligonucleotide
uccacuugauuaaauacag

SEQ ID NO: 1862133 - RNA, 19 nt, Artificial Sequence
  Description of Artificial Sequence: Synthetic oligonucleotide
aaccaaaucccugaaacuc

SEQ ID NO: 1862134 - RNA, 19 nt, Artificial Sequence
  Description of Artificial Sequence: Synthetic oligonucleotide
cuggucauaaaacagcucc

SEQ ID NO: 1862135 - RNA, 19 nt, Artificial Sequence
  Description of Artificial Sequence: Synthetic oligonucleotide
cauaaaacagcuccggcgg

SEQ ID NO: 1862136 - RNA, 19 nt, Artificial Sequence
  Description of Artificial Sequence: Synthetic oligonucleotide
cuagaaaacuccugaaagg

SEQ ID NO: 1862137 - RNA, 19 nt, Artificial Sequence
  Description of Artificial Sequence: Synthetic oligonucleotide
gauuacauacaagaucugg

SEQ ID NO: 1862138 - RNA, 19 nt, Artificial Sequence
  Description of Artificial Sequence: Synthetic oligonucleotide
aaacagaggagcuccaaug

SEQ ID NO: 1862139 - RNA, 19 nt, Artificial Sequence
  Description of Artificial Sequence: Synthetic oligonucleotide
aaacaguucaaucuagaaa

SEQ ID NO: 1862140 - RNA, 19 nt, Artificial Sequence
  Description of Artificial Sequence: Synthetic oligonucleotide
ugcaagacagcucuggccc

SEQ ID NO: 1862141 - RNA, 19 nt, Artificial Sequence
  Description of Artificial Sequence: Synthetic oligonucleotide
ucugaaagggauucccugg

SEQ ID NO: 1862142 - RNA, 19 nt, Artificial Sequence
  Description of Artificial Sequence: Synthetic oligonucleotide
ugcuguguuucucagacug

SEQ ID NO: 1862143 - RNA, 19 nt, Artificial Sequence
  Description of Artificial Sequence: Synthetic oligonucleotide
cagaguauaaagaagaaaa

SEQ ID NO: 1862144 - RNA, 19 nt, Artificial Sequence
  Description of Artificial Sequence: Synthetic oligonucleotide
uaaugcagccaucaaaaga

SEQ ID NO: 1862145 - RNA, 19 nt, Artificial Sequence
  Description of Artificial Sequence: Synthetic oligonucleotide
auacuauuuugcucgcugc

SEQ ID NO: 1862146 - RNA, 19 nt, Artificial Sequence
  Description of Artificial Sequence: Synthetic oligonucleotide
aguucaaucuagaaaacuc

SEQ ID NO: 1862147 - RNA, 19 nt, Artificial Sequence
  Description of Artificial Sequence: Synthetic oligonucleotide
auuacauacaagaucuggg

SEQ ID NO: 1862148 - RNA, 19 nt, Artificial Sequence
  Description of Artificial Sequence: Synthetic oligonucleotide
uguacugggugucaggucu

SEQ ID NO: 1862149 - RNA, 19 nt, Artificial Sequence
  Description of Artificial Sequence: Synthetic oligonucleotide
auauagucuccacucaguc

SEQ ID NO: 1862150 - RNA, 19 nt, Artificial Sequence
  Description of Artificial Sequence: Synthetic oligonucleotide
agaaccgcagccaaugucc

SEQ ID NO: 1862151 - RNA, 19 nt, Artificial Sequence
  Description of Artificial Sequence: Synthetic oligonucleotide
ugggauuacauacaagauc

SEQ ID NO: 1862152 - RNA, 19 nt, Artificial Sequence
  Description of Artificial Sequence: Synthetic oligonucleotide
guugcgaacguauuuccgg

SEQ ID NO: 1862153 - RNA, 19 nt, Artificial Sequence
  Description of Artificial Sequence: Synthetic oligonucleotide
uucaaucuagaaaacuccu

SEQ ID NO: 1862154 - RNA, 19 nt, Artificial Sequence
  Description of Artificial Sequence: Synthetic oligonucleotide
augcccacccaauagugcc

SEQ ID NO: 1862155 - RNA, 19 nt, Artificial Sequence
  Description of Artificial Sequence: Synthetic oligonucleotide
ucaaucuagaaaacuccug

SEQ ID NO: 1862156 - RNA, 19 nt, Artificial Sequence
  Description of Artificial Sequence: Synthetic oligonucleotide
gaguauaaagaagaaaaga

SEQ ID NO: 1862157 - RNA, 19 nt, Artificial Sequence
  Description of Artificial Sequence: Synthetic oligonucleotide
aaacagacagagguagaac

SEQ ID NO: 1862158 - RNA, 19 nt, Artificial Sequence
  Description of Artificial Sequence: Synthetic oligonucleotide
uggaugucaaucauccgug

SEQ ID NO: 1862159 - RNA, 19 nt, Artificial Sequence
  Description of Artificial Sequence: Synthetic oligonucleotide
aucccugaaacucuuuuag

SEQ ID NO: 1862160 - RNA, 19 nt, Artificial Sequence
  Description of Artificial Sequence: Synthetic oligonucleotide
uccaacagaaaagagggcu

SEQ ID NO: 1862161 - RNA, 19 nt, Artificial Sequence
  Description of Artificial Sequence: Synthetic oligonucleotide
uagaaaacuccugaaaggu

SEQ ID NO: 1862162 - RNA, 19 nt, Artificial Sequence
  Description of Artificial Sequence: Synthetic oligonucleotide
agaaccuggucugaaaggg

SEQ ID NO: 1862163 - RNA, 19 nt, Artificial Sequence
  Description of Artificial Sequence: Synthetic oligonucleotide
cuggugaaagucaacucgg

SEQ ID NO: 1862164 - RNA, 19 nt, Artificial Sequence
  Description of Artificial Sequence: Synthetic oligonucleotide
uucuggucauaaaacagcu

SEQ ID NO: 1862165 - RNA, 19 nt, Artificial Sequence
  Description of Artificial Sequence: Synthetic oligonucleotide
cuucugaacagagugagug

SEQ ID NO: 1862166 - RNA, 19 nt, Artificial Sequence
  Description of Artificial Sequence: Synthetic oligonucleotide
aaucuagaaaacuccugaa

SEQ ID NO: 1862167 - RNA, 19 nt, Artificial Sequence
  Description of Artificial Sequence: Synthetic oligonucleotide
ucucaacuucugaacagag

SEQ ID NO: 1862168 - RNA, 19 nt, Artificial Sequence
  Description of Artificial Sequence: Synthetic oligonucleotide
ugcauccugacucucaguc

SEQ ID NO: 1862169 - RNA, 19 nt, Artificial Sequence
  Description of Artificial Sequence: Synthetic oligonucleotide
agaguauaaagaagaaaag

SEQ ID NO: 1862170 - RNA, 19 nt, Artificial Sequence
  Description of Artificial Sequence: Synthetic oligonucleotide
gaugucaaucauccgugag

SEQ ID NO: 1862171 - RNA, 19 nt, Artificial Sequence
  Description of Artificial Sequence: Synthetic oligonucleotide
uugcgaacguauuuccggg

SEQ ID NO: 1862172 - RNA, 19 nt, Artificial Sequence
  Description of Artificial Sequence: Synthetic oligonucleotide
ucugcauccugacucucag

SEQ ID NO: 1862173 - RNA, 19 nt, Artificial Sequence
  Description of Artificial Sequence: Synthetic oligonucleotide
auuaaauacagcacccuca

SEQ ID NO: 1862174 - RNA, 19 nt, Artificial Sequence
  Description of Artificial Sequence: Synthetic oligonucleotide
gauucgacagcucucaacu

SEQ ID NO: 1862175 - RNA, 19 nt, Artificial Sequence
  Description of Artificial Sequence: Synthetic oligonucleotide
agaucugggcugccaaacc

SEQ ID NO: 1862176 - RNA, 19 nt, Artificial Sequence
  Description of Artificial Sequence: Synthetic oligonucleotide
uacuauuuugcucgcugca

SEQ ID NO: 1862177 - RNA, 19 nt, Artificial Sequence
  Description of Artificial Sequence: Synthetic oligonucleotide
guaaagccugcccuugugg

SEQ ID NO: 1862178 - RNA, 19 nt, Artificial Sequence
  Description of Artificial Sequence: Synthetic oligonucleotide
ggguauugggauuacauac

SEQ ID NO: 1862179 - RNA, 19 nt, Artificial Sequence
  Description of Artificial Sequence: Synthetic oligonucleotide
aaagucaacucgguggccu

SEQ ID NO: 1862180 - RNA, 19 nt, Artificial Sequence
  Description of Artificial Sequence: Synthetic oligonucleotide
caaucuagaaaacuccuga

SEQ ID NO: 1862181 - RNA, 19 nt, Artificial Sequence
  Description of Artificial Sequence: Synthetic oligonucleotide
gucuggaugucaaucaucc

SEQ ID NO: 1862182 - RNA, 19 nt, Artificial Sequence
  Description of Artificial Sequence: Synthetic oligonucleotide
gaugcuaaugcagccauca

SEQ ID NO: 1862183 - RNA, 19 nt, Artificial Sequence
  Description of Artificial Sequence: Synthetic oligonucleotide
uucgacagcucucaacuuc

SEQ ID NO: 1862184 - RNA, 19 nt, Artificial Sequence
  Description of Artificial Sequence: Synthetic oligonucleotide
gaagguccagaaaacagac

SEQ ID NO: 1862185 - RNA, 19 nt, Artificial Sequence
  Description of Artificial Sequence: Synthetic oligonucleotide
ugccaaaccaaaucccuga

SEQ ID NO: 1862186 - RNA, 19 nt, Artificial Sequence
  Description of Artificial Sequence: Synthetic oligonucleotide
aacucgguggccuggucug

SEQ ID NO: 1862187 - RNA, 19 nt, Artificial Sequence
  Description of Artificial Sequence: Synthetic oligonucleotide
acauccgauuucuuguuug

SEQ ID NO: 1862188 - RNA, 19 nt, Artificial Sequence
  Description of Artificial Sequence: Synthetic oligonucleotide
uugggauuacauacaagau

SEQ ID NO: 1862189 - RNA, 19 nt, Artificial Sequence
  Description of Artificial Sequence: Synthetic oligonucleotide
cugaugucaaugcccaccc

SEQ ID NO: 1862190 - RNA, 19 nt, Artificial Sequence
  Description of Artificial Sequence: Synthetic oligonucleotide
agggacauccgauuucuug

SEQ ID NO: 1862191 - RNA, 19 nt, Artificial Sequence
  Description of Artificial Sequence: Synthetic oligonucleotide
aaugcucgcucagucaucu

SEQ ID NO: 1862192 - RNA, 19 nt, Artificial Sequence
  Description of Artificial Sequence: Synthetic oligonucleotide
aaucccugaaacucuuuua

SEQ ID NO: 1862193 - RNA, 19 nt, Artificial Sequence
  Description of Artificial Sequence: Synthetic oligonucleotide
uguguuucucagacuggcc

SEQ ID NO: 1862194 - RNA, 19 nt, Artificial Sequence
  Description of Artificial Sequence: Synthetic oligonucleotide
ugaguugcgaacguauuuc

SEQ ID NO: 1862195 - RNA, 19 nt, Artificial Sequence
  Description of Artificial Sequence: Synthetic oligonucleotide
ugauuaaauacagcacccu

SEQ ID NO: 1862196 - RNA, 19 nt, Artificial Sequence
  Description of Artificial Sequence: Synthetic oligonucleotide
ucagaagcggggcuuucgc

SEQ ID NO: 1862197 - RNA, 19 nt, Artificial Sequence
  Description of Artificial Sequence: Synthetic oligonucleotide
ucauccgugaguugcgaac

SEQ ID NO: 1862198 - RNA, 19 nt, Artificial Sequence
  Description of Artificial Sequence: Synthetic oligonucleotide
uggguugugaucagcucca

SEQ ID NO: 1862199 - RNA, 19 nt, Artificial Sequence
  Description of Artificial Sequence: Synthetic oligonucleotide
ucuggaugucaaucauccg

SEQ ID NO: 1862200 - RNA, 19 nt, Artificial Sequence
  Description of Artificial Sequence: Synthetic oligonucleotide
ugaggaauuuugcacuuuu

SEQ ID NO: 1862201 - RNA, 19 nt, Artificial Sequence
  Description of Artificial Sequence: Synthetic oligonucleotide
agcucucaacuucugaaca

SEQ ID NO: 1862202 - RNA, 19 nt, Artificial Sequence
  Description of Artificial Sequence: Synthetic oligonucleotide
gaugucaaugcccacccaa

SEQ ID NO: 1862203 - RNA, 19 nt, Artificial Sequence
  Description of Artificial Sequence: Synthetic oligonucleotide
gucauaaaacagcuccggc

SEQ ID NO: 1862204 - RNA, 19 nt, Artificial Sequence
  Description of Artificial Sequence: Synthetic oligonucleotide
guagucccggauucgacag

SEQ ID NO: 1862205 - RNA, 19 nt, Artificial Sequence
  Description of Artificial Sequence: Synthetic oligonucleotide
ucgacagcucucaacuucu

SEQ ID NO: 1862206 - RNA, 19 nt, Artificial Sequence
  Description of Artificial Sequence: Synthetic oligonucleotide
uucgcuugcggccagugua

SEQ ID NO: 1862207 - RNA, 19 nt, Artificial Sequence
  Description of Artificial Sequence: Synthetic oligonucleotide
cuugcggccaguguacugg

SEQ ID NO: 1862208 - RNA, 19 nt, Artificial Sequence
  Description of Artificial Sequence: Synthetic oligonucleotide
caaucauccgugaguugcg

SEQ ID NO: 1862209 - RNA, 19 nt, Artificial Sequence
  Description of Artificial Sequence: Synthetic oligonucleotide
acuauuuugcucgcugcag

SEQ ID NO: 1862210 - RNA, 19 nt, Artificial Sequence
  Description of Artificial Sequence: Synthetic oligonucleotide
guuugcauugcagagccac

SEQ ID NO: 1862211 - RNA, 19 nt, Artificial Sequence
  Description of Artificial Sequence: Synthetic oligonucleotide
gucugaaagggauucccug

SEQ ID NO: 1862212 - RNA, 19 nt, Artificial Sequence
  Description of Artificial Sequence: Synthetic oligonucleotide
gucaggucuaaccuccuug

SEQ ID NO: 1862213 - RNA, 19 nt, Artificial Sequence
  Description of Artificial Sequence: Synthetic oligonucleotide
uccagaaccgcagccaaug

SEQ ID NO: 1862214 - RNA, 19 nt, Artificial Sequence
  Description of Artificial Sequence: Synthetic oligonucleotide
cugaaagggauucccuggc

SEQ ID NO: 1862215 - RNA, 19 nt, Artificial Sequence
  Description of Artificial Sequence: Synthetic oligonucleotide
cauccgauuucuuguuugc

SEQ ID NO: 1862216 - RNA, 19 nt, Artificial Sequence
  Description of Artificial Sequence: Synthetic oligonucleotide
uccgauuucuuguuugcau

SEQ ID NO: 1862217 - RNA, 19 nt, Artificial Sequence
  Description of Artificial Sequence: Synthetic oligonucleotide
agaagguccagaaaacaga

SEQ ID NO: 1862218 - RNA, 19 nt, Artificial Sequence
  Description of Artificial Sequence: Synthetic oligonucleotide
cugcaagacagcucuggcc

SEQ ID NO: 1862219 - RNA, 19 nt, Artificial Sequence
  Description of Artificial Sequence: Synthetic oligonucleotide
caucugcaggacuggaugc

SEQ ID NO: 1862220 - RNA, 19 nt, Artificial Sequence
  Description of Artificial Sequence: Synthetic oligonucleotide
ugacccucuggcaaacaga

SEQ ID NO: 1862221 - RNA, 19 nt, Artificial Sequence
  Description of Artificial Sequence: Synthetic oligonucleotide
gagauauagucuccacuca

SEQ ID NO: 1862222 - RNA, 19 nt, Artificial Sequence
  Description of Artificial Sequence: Synthetic oligonucleotide
uggucugaaagggauuccc

SEQ ID NO: 1862223 - RNA, 19 nt, Artificial Sequence
  Description of Artificial Sequence: Synthetic oligonucleotide
caaugcccacccaauagug

SEQ ID NO: 1862224 - RNA, 19 nt, Artificial Sequence
  Description of Artificial Sequence: Synthetic oligonucleotide
gacagcucuggccccgugg

SEQ ID NO: 1862225 - RNA, 19 nt, Artificial Sequence
  Description of Artificial Sequence: Synthetic oligonucleotide
ugaguucucaggguacagc

SEQ ID NO: 1862226 - RNA, 19 nt, Artificial Sequence
  Description of Artificial Sequence: Synthetic oligonucleotide
accgcagccaauguccaac

SEQ ID NO: 1862227 - RNA, 19 nt, Artificial Sequence
  Description of Artificial Sequence: Synthetic oligonucleotide
aagucaacucgguggccug

SEQ ID NO: 1862228 - RNA, 19 nt, Artificial Sequence
  Description of Artificial Sequence: Synthetic oligonucleotide
cauccgugaguugcgaacg

SEQ ID NO: 1862229 - RNA, 19 nt, Artificial Sequence
  Description of Artificial Sequence: Synthetic oligonucleotide
ggucauaaaacagcuccgg

SEQ ID NO: 1862230 - RNA, 19 nt, Artificial Sequence
  Description of Artificial Sequence: Synthetic oligonucleotide
ucccggauucgacagcucu

SEQ ID NO: 1862231 - RNA, 19 nt, Artificial Sequence
  Description of Artificial Sequence: Synthetic oligonucleotide
acagagguagaacuucuuu

SEQ ID NO: 1862232 - RNA, 19 nt, Artificial Sequence
  Description of Artificial Sequence: Synthetic oligonucleotide
aaauacuauuuugcucgcu

SEQ ID NO: 1862233 - RNA, 19 nt, Artificial Sequence
  Description of Artificial Sequence: Synthetic oligonucleotide
cagccaauguccaacagaa

SEQ ID NO: 1862234 - RNA, 19 nt, Artificial Sequence
  Description of Artificial Sequence: Synthetic oligonucleotide
uggacaagggcagaguaua

SEQ ID NO: 1862235 - RNA, 19 nt, Artificial Sequence
  Description of Artificial Sequence: Synthetic oligonucleotide
ucuaaccuccuugcccugg

SEQ ID NO: 1862236 - RNA, 19 nt, Artificial Sequence
  Description of Artificial Sequence: Synthetic oligonucleotide
ucuggucauaaaacagcuc

SEQ ID NO: 1862237 - RNA, 19 nt, Artificial Sequence
  Description of Artificial Sequence: Synthetic oligonucleotide
aaagagggcugacccucug

SEQ ID NO: 1862238 - RNA, 19 nt, Artificial Sequence
  Description of Artificial Sequence: Synthetic oligonucleotide
agcaguagaggcgccuggc

SEQ ID NO: 1862239 - RNA, 19 nt, Artificial Sequence
  Description of Artificial Sequence: Synthetic oligonucleotide
aguguacugggugucaggu

SEQ ID NO: 1862240 - RNA, 19 nt, Artificial Sequence
  Description of Artificial Sequence: Synthetic oligonucleotide
gggauuacauacaagaucu

SEQ ID NO: 1862241 - RNA, 19 nt, Artificial Sequence
  Description of Artificial Sequence: Synthetic oligonucleotide
gaagcggggcuuucgcuug

SEQ ID NO: 1862242 - RNA, 19 nt, Artificial Sequence
  Description of Artificial Sequence: Synthetic oligonucleotide
gguguggguagccagacuc

SEQ ID NO: 1862243 - RNA, 19 nt, Artificial Sequence
  Description of Artificial Sequence: Synthetic oligonucleotide
gguaaacaguucaaucuag

SEQ ID NO: 1862244 - RNA, 19 nt, Artificial Sequence
  Description of Artificial Sequence: Synthetic oligonucleotide
guguggagcccucucacug

SEQ ID NO: 1862245 - RNA, 19 nt, Artificial Sequence
  Description of Artificial Sequence: Synthetic oligonucleotide
aaacagcuccggcgguccg

SEQ ID NO: 1862246 - RNA, 19 nt, Artificial Sequence
  Description of Artificial Sequence: Synthetic oligonucleotide
aguugcgaacguauuuccg

SEQ ID NO: 1862247 - RNA, 19 nt, Artificial Sequence
  Description of Artificial Sequence: Synthetic oligonucleotide
guauugggauuacauacaa

SEQ ID NO: 1862248 - RNA, 19 nt, Artificial Sequence
  Description of Artificial Sequence: Synthetic oligonucleotide
agacucuccacuugauuaa

SEQ ID NO: 1862249 - RNA, 19 nt, Artificial Sequence
  Description of Artificial Sequence: Synthetic oligonucleotide
aagcggggcuuucgcuugc

SEQ ID NO: 1862250 - RNA, 19 nt, Artificial Sequence
  Description of Artificial Sequence: Synthetic oligonucleotide
cccugaaacucuuuuagug

SEQ ID NO: 1862251 - RNA, 19 nt, Artificial Sequence
  Description of Artificial Sequence: Synthetic oligonucleotide
cagacucuccacuugauua

SEQ ID NO: 1862252 - RNA, 19 nt, Artificial Sequence
  Description of Artificial Sequence: Synthetic oligonucleotide
cuccugaaagguagucccg

SEQ ID NO: 1862253 - RNA, 19 nt, Artificial Sequence
  Description of Artificial Sequence: Synthetic oligonucleotide
agggcagaguauaaagaag

SEQ ID NO: 1862254 - RNA, 19 nt, Artificial Sequence
  Description of Artificial Sequence: Synthetic oligonucleotide
aggguauugggauuacaua

SEQ ID NO: 1862255 - RNA, 19 nt, Artificial Sequence
  Description of Artificial Sequence: Synthetic oligonucleotide
ugcgaacguauuuccgggc

SEQ ID NO: 1862256 - RNA, 19 nt, Artificial Sequence
  Description of Artificial Sequence: Synthetic oligonucleotide
acaagaucugggcugccaa

SEQ ID NO: 1862257 - RNA, 19 nt, Artificial Sequence
  Description of Artificial Sequence: Synthetic oligonucleotide
aagguagucccggauucga

SEQ ID NO: 1862258 - RNA, 19 nt, Artificial Sequence
  Description of Artificial Sequence: Synthetic oligonucleotide
guagaagguccagaaaaca

SEQ ID NO: 1862259 - RNA, 19 nt, Artificial Sequence
  Description of Artificial Sequence: Synthetic oligonucleotide
ugcagguaaacaguucaau

SEQ ID NO: 1862260 - RNA, 19 nt, Artificial Sequence
  Description of Artificial Sequence: Synthetic oligonucleotide
cugccaaaccaaaucccug

SEQ ID NO: 1862261 - RNA, 19 nt, Artificial Sequence
  Description of Artificial Sequence: Synthetic oligonucleotide
gcugcagguaaacaguuca

SEQ ID NO: 1862262 - RNA, 19 nt, Artificial Sequence
  Description of Artificial Sequence: Synthetic oligonucleotide
acagagugaguggccaggg

SEQ ID NO: 1862263 - RNA, 19 nt, Artificial Sequence
  Description of Artificial Sequence: Synthetic oligonucleotide
ggugucaggucuaaccucc

SEQ ID NO: 1862264 - RNA, 19 nt, Artificial Sequence
  Description of Artificial Sequence: Synthetic oligonucleotide
cuggaacuucccaucucgc

SEQ ID NO: 1862265 - RNA, 19 nt, Artificial Sequence
  Description of Artificial Sequence: Synthetic oligonucleotide
cuggaugucaaucauccgu

SEQ ID NO: 1862266 - RNA, 19 nt, Artificial Sequence
  Description of Artificial Sequence: Synthetic oligonucleotide
ugcucugaguucucagggu

SEQ ID NO: 1862267 - RNA, 19 nt, Artificial Sequence
  Description of Artificial Sequence: Synthetic oligonucleotide
gaagcaguagaggcgccug

SEQ ID NO: 1862268 - RNA, 19 nt, Artificial Sequence
  Description of Artificial Sequence: Synthetic oligonucleotide
agaagcggggcuuucgcuu

SEQ ID NO: 1862269 - RNA, 19 nt, Artificial Sequence
  Description of Artificial Sequence: Synthetic oligonucleotide
agggcugacccucuggcaa

SEQ ID NO: 1862270 - RNA, 19 nt, Artificial Sequence
  Description of Artificial Sequence: Synthetic oligonucleotide
ugugcuccggucuccggcu

SEQ ID NO: 1862271 - RNA, 19 nt, Artificial Sequence
  Description of Artificial Sequence: Synthetic oligonucleotide
accaaaucccugaaacucu

SEQ ID NO: 1862272 - RNA, 19 nt, Artificial Sequence
  Description of Artificial Sequence: Synthetic oligonucleotide
cacuggugaaagucaacuc

SEQ ID NO: 1862273 - RNA, 19 nt, Artificial Sequence
  Description of Artificial Sequence: Synthetic oligonucleotide
uguguggagcccucucacu

SEQ ID NO: 1862274 - RNA, 19 nt, Artificial Sequence
  Description of Artificial Sequence: Synthetic oligonucleotide
aaucauccgugaguugcga

SEQ ID NO: 1862275 - RNA, 19 nt, Artificial Sequence
  Description of Artificial Sequence: Synthetic oligonucleotide
gacagcucucaacuucuga

SEQ ID NO: 1862276 - RNA, 19 nt, Artificial Sequence
  Description of Artificial Sequence: Synthetic oligonucleotide
uacaagaucugggcugcca

SEQ ID NO: 1862277 - RNA, 19 nt, Artificial Sequence
  Description of Artificial Sequence: Synthetic oligonucleotide
agccagacucuccacuuga

SEQ ID NO: 1862278 - RNA, 19 nt, Artificial Sequence
  Description of Artificial Sequence: Synthetic oligonucleotide
ugccccucuucugagauau

SEQ ID NO: 1862279 - RNA, 19 nt, Artificial Sequence
  Description of Artificial Sequence: Synthetic oligonucleotide
ugcccacccaauagugccc

SEQ ID NO: 1862280 - RNA, 19 nt, Artificial Sequence
  Description of Artificial Sequence: Synthetic oligonucleotide
gcucucaacuucugaacag

SEQ ID NO: 1862281 - RNA, 19 nt, Artificial Sequence
  Description of Artificial Sequence: Synthetic oligonucleotide
cucaguccagaaccgcagc

SEQ ID NO: 1862282 - RNA, 19 nt, Artificial Sequence
  Description of Artificial Sequence: Synthetic oligonucleotide
agucagccccuuuggcagg

SEQ ID NO: 1862283 - RNA, 19 nt, Artificial Sequence
  Description of Artificial Sequence: Synthetic oligonucleotide
gaacguauuuccgggcuuc

SEQ ID NO: 1862284 - RNA, 19 nt, Artificial Sequence
  Description of Artificial Sequence: Synthetic oligonucleotide
guagaggcgccuggcaggg

SEQ ID NO: 1862285 - RNA, 19 nt, Artificial Sequence
  Description of Artificial Sequence: Synthetic oligonucleotide
uugcggccaguguacuggg

SEQ ID NO: 1862286 - RNA, 19 nt, Artificial Sequence
  Description of Artificial Sequence: Synthetic oligonucleotide
uuucgcuugcggccagugu

SEQ ID NO: 1862287 - RNA, 19 nt, Artificial Sequence
  Description of Artificial Sequence: Synthetic oligonucleotide
ucgcuugcggccaguguac

SEQ ID NO: 1862288 - RNA, 19 nt, Artificial Sequence
  Description of Artificial Sequence: Synthetic oligonucleotide
ggggcuuucgcuugcggcc

SEQ ID NO: 1862289 - RNA, 19 nt, Artificial Sequence
  Description of Artificial Sequence: Synthetic oligonucleotide
cucacuggugaaagucaac

SEQ ID NO: 1862290 - RNA, 19 nt, Artificial Sequence
  Description of Artificial Sequence: Synthetic oligonucleotide
gauauagucuccacucagu

SEQ ID NO: 1862291 - RNA, 19 nt, Artificial Sequence
  Description of Artificial Sequence: Synthetic oligonucleotide
ccaacagaaaagagggcug

SEQ ID NO: 1862292 - RNA, 19 nt, Artificial Sequence
  Description of Artificial Sequence: Synthetic oligonucleotide
aaaagagggcugacccucu

SEQ ID NO: 1862293 - RNA, 19 nt, Artificial Sequence
  Description of Artificial Sequence: Synthetic oligonucleotide
aguccaccaccacgccacc

SEQ ID NO: 1862294 - RNA, 19 nt, Artificial Sequence
  Description of Artificial Sequence: Synthetic oligonucleotide
gaaagucaacucgguggcc

SEQ ID NO: 1862295 - RNA, 19 nt, Artificial Sequence
  Description of Artificial Sequence: Synthetic oligonucleotide
cagaaccgcagccaauguc

SEQ ID NO: 1862296 - RNA, 19 nt, Artificial Sequence
  Description of Artificial Sequence: Synthetic oligonucleotide
caggucuaaccuccuugcc

SEQ ID NO: 1862297 - RNA, 19 nt, Artificial Sequence
  Description of Artificial Sequence: Synthetic oligonucleotide
gguauugggauuacauaca

SEQ ID NO: 1862298 - RNA, 19 nt, Artificial Sequence
  Description of Artificial Sequence: Synthetic oligonucleotide
aggacccauucccugcucu

SEQ ID NO: 1862299 - RNA, 19 nt, Artificial Sequence
  Description of Artificial Sequence: Synthetic oligonucleotide
ggauucgacagcucucaac

SEQ ID NO: 1862300 - RNA, 19 nt, Artificial Sequence
  Description of Artificial Sequence: Synthetic oligonucleotide
cucuccacuugauuaaaua

SEQ ID NO: 1862301 - RNA, 19 nt, Artificial Sequence
  Description of Artificial Sequence: Synthetic oligonucleotide
uccggucuccggcuacgag

SEQ ID NO: 1862302 - RNA, 19 nt, Artificial Sequence
  Description of Artificial Sequence: Synthetic oligonucleotide
gguaaagccugcccuugug

SEQ ID NO: 1862303 - RNA, 19 nt, Artificial Sequence
  Description of Artificial Sequence: Synthetic oligonucleotide
caagacagcucuggccccg

SEQ ID NO: 1862304 - RNA, 19 nt, Artificial Sequence
  Description of Artificial Sequence: Synthetic oligonucleotide
auacaagaucugggcugcc

SEQ ID NO: 1862305 - RNA, 19 nt, Artificial Sequence
  Description of Artificial Sequence: Synthetic oligonucleotide
agucccggauucgacagcu

SEQ ID NO: 1862306 - RNA, 19 nt, Artificial Sequence
  Description of Artificial Sequence: Synthetic oligonucleotide
aacguauuuccgggcuuca

SEQ ID NO: 1862307 - RNA, 19 nt, Artificial Sequence
  Description of Artificial Sequence: Synthetic oligonucleotide
ucgcucagucaucuugguc

SEQ ID NO: 1862308 - RNA, 19 nt, Artificial Sequence
  Description of Artificial Sequence: Synthetic oligonucleotide
ucgcugcagguaaacaguu

SEQ ID NO: 1862309 - RNA, 19 nt, Artificial Sequence
  Description of Artificial Sequence: Synthetic oligonucleotide
uguggguagccagacucuc

SEQ ID NO: 1862310 - RNA, 19 nt, Artificial Sequence
  Description of Artificial Sequence: Synthetic oligonucleotide
agucaacucgguggccugg

SEQ ID NO: 1862311 - RNA, 19 nt, Artificial Sequence
  Description of Artificial Sequence: Synthetic oligonucleotide
ggcacuguuggggaagucc

SEQ ID NO: 1862312 - RNA, 19 nt, Artificial Sequence
  Description of Artificial Sequence: Synthetic oligonucleotide
uccgcugugcuccggucuc

SEQ ID NO: 1862313 - RNA, 19 nt, Artificial Sequence
  Description of Artificial Sequence: Synthetic oligonucleotide
gguagucccggauucgaca

SEQ ID NO: 1862314 - RNA, 19 nt, Artificial Sequence
  Description of Artificial Sequence: Synthetic oligonucleotide
uagucccggauucgacagc

SEQ ID NO: 1862315 - RNA, 19 nt, Artificial Sequence
  Description of Artificial Sequence: Synthetic oligonucleotide
gacaagggcagaguauaaa

SEQ ID NO: 1862316 - RNA, 19 nt, Artificial Sequence
  Description of Artificial Sequence: Synthetic oligonucleotide
cugagauauagucuccacu

SEQ ID NO: 1862317 - RNA, 19 nt, Artificial Sequence
  Description of Artificial Sequence: Synthetic oligonucleotide
gaggguauugggauuacau

SEQ ID NO: 1862318 - RNA, 19 nt, Artificial Sequence
  Description of Artificial Sequence: Synthetic oligonucleotide
agguagucccggauucgac

SEQ ID NO: 1862319 - RNA, 19 nt, Artificial Sequence
  Description of Artificial Sequence: Synthetic oligonucleotide
cucucaacuucugaacaga

SEQ ID NO: 1862320 - RNA, 19 nt, Artificial Sequence
  Description of Artificial Sequence: Synthetic oligonucleotide
aguucucaggguacagcug

SEQ ID NO: 1862321 - RNA, 19 nt, Artificial Sequence
  Description of Artificial Sequence: Synthetic oligonucleotide
aggguacagcugcaagaca

SEQ ID NO: 1862322 - RNA, 19 nt, Artificial Sequence
  Description of Artificial Sequence: Synthetic oligonucleotide
auccugacucucagucagc

SEQ ID NO: 1862323 - RNA, 19 nt, Artificial Sequence
  Description of Artificial Sequence: Synthetic oligonucleotide
aucauccgugaguugcgaa

SEQ ID NO: 1862324 - RNA, 19 nt, Artificial Sequence
  Description of Artificial Sequence: Synthetic oligonucleotide
ggucuaaccuccuugcccu

SEQ ID NO: 1862325 - RNA, 19 nt, Artificial Sequence
  Description of Artificial Sequence: Synthetic oligonucleotide
gcucgcucagucaucuugg

SEQ ID NO: 1862326 - RNA, 19 nt, Artificial Sequence
  Description of Artificial Sequence: Synthetic oligonucleotide
cagagugaguggccagggc

SEQ ID NO: 1862327 - RNA, 19 nt, Artificial Sequence
  Description of Artificial Sequence: Synthetic oligonucleotide
uugcuguguuucucagacu

SEQ ID NO: 1862328 - RNA, 19 nt, Artificial Sequence
  Description of Artificial Sequence: Synthetic oligonucleotide
auccgauuucuuguuugca

SEQ ID NO: 1862329 - RNA, 19 nt, Artificial Sequence
  Description of Artificial Sequence: Synthetic oligonucleotide
gaaccuggucugaaaggga

SEQ ID NO: 1862330 - RNA, 19 nt, Artificial Sequence
  Description of Artificial Sequence: Synthetic oligonucleotide
cucaggaggguauugggau

SEQ ID NO: 1862331 - RNA, 19 nt, Artificial Sequence
  Description of Artificial Sequence: Synthetic oligonucleotide
gggacauccgauuucuugu

SEQ ID NO: 1862332 - RNA, 19 nt, Artificial Sequence
  Description of Artificial Sequence: Synthetic oligonucleotide
auucgacagcucucaacuu

SEQ ID NO: 1862333 - RNA, 19 nt, Artificial Sequence
  Description of Artificial Sequence: Synthetic oligonucleotide
acugggugucaggucuaac

SEQ ID NO: 1862334 - RNA, 19 nt, Artificial Sequence
  Description of Artificial Sequence: Synthetic oligonucleotide
cacgccaccgguaaagccu

SEQ ID NO: 1862335 - RNA, 19 nt, Artificial Sequence
  Description of Artificial Sequence: Synthetic oligonucleotide
cucgcugcagguaaacagu

SEQ ID NO: 1862336 - RNA, 19 nt, Artificial Sequence
  Description of Artificial Sequence: Synthetic oligonucleotide
cuggucugaaagggauucc

SEQ ID NO: 1862337 - RNA, 19 nt, Artificial Sequence
  Description of Artificial Sequence: Synthetic oligonucleotide
ucucgcugccucagccucu

SEQ ID NO: 1862338 - RNA, 19 nt, Artificial Sequence
  Description of Artificial Sequence: Synthetic oligonucleotide
aggaggguauugggauuac

SEQ ID NO: 1862339 - RNA, 19 nt, Artificial Sequence
  Description of Artificial Sequence: Synthetic oligonucleotide
ucccaucucgcugccucag

SEQ ID NO: 1862340 - RNA, 19 nt, Artificial Sequence
  Description of Artificial Sequence: Synthetic oligonucleotide
caaugcucgcucagucauc

SEQ ID NO: 1862341 - RNA, 19 nt, Artificial Sequence
  Description of Artificial Sequence: Synthetic oligonucleotide
auccgugaguugcgaacgu

SEQ ID NO: 1862342 - RNA, 19 nt, Artificial Sequence
  Description of Artificial Sequence: Synthetic oligonucleotide
ccgggcuucauucugguca

SEQ ID NO: 1862343 - RNA, 19 nt, Artificial Sequence
  Description of Artificial Sequence: Synthetic oligonucleotide
agcuccggcgguccgcugu

SEQ ID NO: 1862344 - RNA, 19 nt, Artificial Sequence
  Description of Artificial Sequence: Synthetic oligonucleotide
ucaacucgguggccugguc

SEQ ID NO: 1862345 - RNA, 19 nt, Artificial Sequence
  Description of Artificial Sequence: Synthetic oligonucleotide
gcuguguuucucagacugg

SEQ ID NO: 1862346 - RNA, 19 nt, Artificial Sequence
  Description of Artificial Sequence: Synthetic oligonucleotide
ccaucucgcugccucagcc

SEQ ID NO: 1862347 - RNA, 19 nt, Artificial Sequence
  Description of Artificial Sequence: Synthetic oligonucleotide
acuucugaacagagugagu

SEQ ID NO: 1862348 - RNA, 19 nt, Artificial Sequence
  Description of Artificial Sequence: Synthetic oligonucleotide
uggccccguggacaagggc

SEQ ID NO: 1862349 - RNA, 19 nt, Artificial Sequence
  Description of Artificial Sequence: Synthetic oligonucleotide
cuuucgcuugcggccagug

SEQ ID NO: 1862350 - RNA, 19 nt, Artificial Sequence
  Description of Artificial Sequence: Synthetic oligonucleotide
uuucucagacuggccugga

SEQ ID NO: 1862351 - RNA, 19 nt, Artificial Sequence
  Description of Artificial Sequence: Synthetic oligonucleotide
cucagucaucuuggucugg

SEQ ID NO: 1862352 - RNA, 19 nt, Artificial Sequence
  Description of Artificial Sequence: Synthetic oligonucleotide
ugcuccggucuccggcuac

SEQ ID NO: 1862353 - RNA, 19 nt, Artificial Sequence
  Description of Artificial Sequence: Synthetic oligonucleotide
cagacuggccuggaacuuc

SEQ ID NO: 1862354 - RNA, 19 nt, Artificial Sequence
  Description of Artificial Sequence: Synthetic oligonucleotide
cugcagguaaacaguucaa

SEQ ID NO: 1862355 - RNA, 19 nt, Artificial Sequence
  Description of Artificial Sequence: Synthetic oligonucleotide
caccaggucccgccgugcc

SEQ ID NO: 1862356 - RNA, 19 nt, Artificial Sequence
  Description of Artificial Sequence: Synthetic oligonucleotide
cuggaugcaggugugggua

SEQ ID NO: 1862357 - RNA, 19 nt, Artificial Sequence
  Description of Artificial Sequence: Synthetic oligonucleotide
uuguggccuggguugugau

SEQ ID NO: 1862358 - RNA, 19 nt, Artificial Sequence
  Description of Artificial Sequence: Synthetic oligonucleotide
gugaguugcgaacguauuu

SEQ ID NO: 1862359 - RNA, 19 nt, Artificial Sequence
  Description of Artificial Sequence: Synthetic oligonucleotide
uaggacccauucccugcuc

SEQ ID NO: 1862360 - RNA, 19 nt, Artificial Sequence
  Description of Artificial Sequence: Synthetic oligonucleotide
uccgugaguugcgaacgua

SEQ ID NO: 1862361 - RNA, 19 nt, Artificial Sequence
  Description of Artificial Sequence: Synthetic oligonucleotide
aagacagcucuggccccgu

SEQ ID NO: 1862362 - RNA, 19 nt, Artificial Sequence
  Description of Artificial Sequence: Synthetic oligonucleotide
gcgccuggcagggacaucc

SEQ ID NO: 1862363 - RNA, 19 nt, Artificial Sequence
  Description of Artificial Sequence: Synthetic oligonucleotide
cccaauagugccccucuuc

SEQ ID NO: 1862364 - RNA, 19 nt, Artificial Sequence
  Description of Artificial Sequence: Synthetic oligonucleotide
guagccagacucuccacuu

SEQ ID NO: 1862365 - RNA, 19 nt, Artificial Sequence
  Description of Artificial Sequence: Synthetic oligonucleotide
ggcagggacauccgauuuc

SEQ ID NO: 1862366 - RNA, 19 nt, Artificial Sequence
  Description of Artificial Sequence: Synthetic oligonucleotide
cugaacagcugagaugcua

SEQ ID NO: 1862367 - RNA, 19 nt, Artificial Sequence
  Description of Artificial Sequence: Synthetic oligonucleotide
caaacagaggagcuccaau

SEQ ID NO: 1862368 - RNA, 19 nt, Artificial Sequence
  Description of Artificial Sequence: Synthetic oligonucleotide
gguagccagacucuccacu

SEQ ID NO: 1862369 - RNA, 19 nt, Artificial Sequence
  Description of Artificial Sequence: Synthetic oligonucleotide
acgccaccgguaaagccug

SEQ ID NO: 1862370 - RNA, 19 nt, Artificial Sequence
  Description of Artificial Sequence: Synthetic oligonucleotide
cuuguggccuggguuguga

SEQ ID NO: 1862371 - RNA, 19 nt, Artificial Sequence
  Description of Artificial Sequence: Synthetic oligonucleotide
gaacagcugagaugcuaau

SEQ ID NO: 1862372 - RNA, 19 nt, Artificial Sequence
  Description of Artificial Sequence: Synthetic oligonucleotide
cgcucagucaucuuggucu

SEQ ID NO: 1862373 - RNA, 19 nt, Artificial Sequence
  Description of Artificial Sequence: Synthetic oligonucleotide
uccgggcuucauucugguc

SEQ ID NO: 1862374 - RNA, 19 nt, Artificial Sequence
  Description of Artificial Sequence: Synthetic oligonucleotide
ccaccgguaaagccugccc

SEQ ID NO: 1862375 - RNA, 19 nt, Artificial Sequence
  Description of Artificial Sequence: Synthetic oligonucleotide
ucccgccgugccuucuugu

SEQ ID NO: 1862376 - RNA, 19 nt, Artificial Sequence
  Description of Artificial Sequence: Synthetic oligonucleotide
gguccagaaaacagacaga

SEQ ID NO: 1862377 - RNA, 19 nt, Artificial Sequence
  Description of Artificial Sequence: Synthetic oligonucleotide
ggccccguggacaagggca

SEQ ID NO: 1862378 - RNA, 19 nt, Artificial Sequence
  Description of Artificial Sequence: Synthetic oligonucleotide
caccgguaaagccugcccu

SEQ ID NO: 1862379 - RNA, 19 nt, Artificial Sequence
  Description of Artificial Sequence: Synthetic oligonucleotide
agggauucccuggcccaug

SEQ ID NO: 1862380 - RNA, 19 nt, Artificial Sequence
  Description of Artificial Sequence: Synthetic oligonucleotide
caggaggguauugggauua

SEQ ID NO: 1862381 - RNA, 19 nt, Artificial Sequence
  Description of Artificial Sequence: Synthetic oligonucleotide
caacucgguggccuggucu

SEQ ID NO: 1862382 - RNA, 19 nt, Artificial Sequence
  Description of Artificial Sequence: Synthetic oligonucleotide
gcccucucacuggugaaag

SEQ ID NO: 1862383 - RNA, 19 nt, Artificial Sequence
  Description of Artificial Sequence: Synthetic oligonucleotide
ccacgccaccgguaaagcc

SEQ ID NO: 1862384 - RNA, 19 nt, Artificial Sequence
  Description of Artificial Sequence: Synthetic oligonucleotide
acccaauagugccccucuu

SEQ ID NO: 1862385 - RNA, 19 nt, Artificial Sequence
  Description of Artificial Sequence: Synthetic oligonucleotide
agcggggcuuucgcuugcg

SEQ ID NO: 1862386 - RNA, 19 nt, Artificial Sequence
  Description of Artificial Sequence: Synthetic oligonucleotide
agcccucucacuggugaaa

SEQ ID NO: 1862387 - RNA, 19 nt, Artificial Sequence
  Description of Artificial Sequence: Synthetic oligonucleotide
cuaggacccauucccugcu

SEQ ID NO: 1862388 - RNA, 19 nt, Artificial Sequence
  Description of Artificial Sequence: Synthetic oligonucleotide
ccaauagugccccucuucu

SEQ ID NO: 1862389 - RNA, 19 nt, Artificial Sequence
  Description of Artificial Sequence: Synthetic oligonucleotide
acguauuuccgggcuucau

SEQ ID NO: 1862390 - RNA, 19 nt, Artificial Sequence
  Description of Artificial Sequence: Synthetic oligonucleotide
ccaguguacugggugucag

SEQ ID NO: 1862391 - RNA, 19 nt, Artificial Sequence
  Description of Artificial Sequence: Synthetic oligonucleotide
gcugccaaaccaaaucccu

SEQ ID NO: 1862392 - RNA, 19 nt, Artificial Sequence
  Description of Artificial Sequence: Synthetic oligonucleotide
gcugugcuccggucuccgg

SEQ ID NO: 1862393 - RNA, 19 nt, Artificial Sequence
  Description of Artificial Sequence: Synthetic oligonucleotide
gcacccucagaagcggggc

SEQ ID NO: 1862394 - RNA, 19 nt, Artificial Sequence
  Description of Artificial Sequence: Synthetic oligonucleotide
cucgcugccucagccucuc

SEQ ID NO: 1862395 - RNA, 19 nt, Artificial Sequence
  Description of Artificial Sequence: Synthetic oligonucleotide
gcgaacguauuuccgggcu

SEQ ID NO: 1862396 - RNA, 19 nt, Artificial Sequence
  Description of Artificial Sequence: Synthetic oligonucleotide
cacccaauagugccccucu

SEQ ID NO: 1862397 - RNA, 19 nt, Artificial Sequence
  Description of Artificial Sequence: Synthetic oligonucleotide
caucucgcugccucagccu

SEQ ID NO: 1862398 - RNA, 19 nt, Artificial Sequence
  Description of Artificial Sequence: Synthetic oligonucleotide
cccggauucgacagcucuc

SEQ ID NO: 1862399 - RNA, 19 nt, Artificial Sequence
  Description of Artificial Sequence: Synthetic oligonucleotide
guggagcccucucacuggu

SEQ ID NO: 1862400 - RNA, 19 nt, Artificial Sequence
  Description of Artificial Sequence: Synthetic oligonucleotide
ccacucaguccagaaccgc

SEQ ID NO: 1862401 - RNA, 19 nt, Artificial Sequence
  Description of Artificial Sequence: Synthetic oligonucleotide
agccaauguccaacagaaa

SEQ ID NO: 1862402 - RNA, 19 nt, Artificial Sequence
  Description of Artificial Sequence: Synthetic oligonucleotide
guggacaagggcagaguau

SEQ ID NO: 1862403 - RNA, 19 nt, Artificial Sequence
  Description of Artificial Sequence: Synthetic oligonucleotide
gccccguggacaagggcag

SEQ ID NO: 1862404 - RNA, 19 nt, Artificial Sequence
  Description of Artificial Sequence: Synthetic oligonucleotide
guccgcugugcuccggucu

SEQ ID NO: 1862405 - RNA, 19 nt, Artificial Sequence
  Description of Artificial Sequence: Synthetic oligonucleotide
gcccacccaauagugcccc

SEQ ID NO: 1862406 - RNA, 19 nt, Artificial Sequence
  Description of Artificial Sequence: Synthetic oligonucleotide
ggaggguauugggauuaca

SEQ ID NO: 1862407 - RNA, 19 nt, Artificial Sequence
  Description of Artificial Sequence: Synthetic oligonucleotide
gcuccggucuccggcuacg

SEQ ID NO: 1862408 - RNA, 19 nt, Artificial Sequence
  Description of Artificial Sequence: Synthetic oligonucleotide
ggucugaaagggauucccu

SEQ ID NO: 1862409 - RNA, 19 nt, Artificial Sequence
  Description of Artificial Sequence: Synthetic oligonucleotide
gcggggcuuucgcuugcgg

SEQ ID NO: 1862410 - RNA, 19 nt, Artificial Sequence
  Description of Artificial Sequence: Synthetic oligonucleotide
ccaaugcucgcucagucau

SEQ ID NO: 1862411 - RNA, 19 nt, Artificial Sequence
  Description of Artificial Sequence: Synthetic oligonucleotide
cccguggacaagggcagag

SEQ ID NO: 1862412 - RNA, 19 nt, Artificial Sequence
  Description of Artificial Sequence: Synthetic oligonucleotide
ggcuuucgcuugcggccag

SEQ ID NO: 1862413 - RNA, 19 nt, Artificial Sequence
  Description of Artificial Sequence: Synthetic oligonucleotide
gccaccgguaaagccugcc

SEQ ID NO: 1862414 - RNA, 19 nt, Artificial Sequence
  Description of Artificial Sequence: Synthetic oligonucleotide
ccggauucgacagcucuca

SEQ ID NO: 1862415 - RNA, 19 nt, Artificial Sequence
  Description of Artificial Sequence: Synthetic oligonucleotide
ucccgguccagggcagcau

SEQ ID NO: 1862416 - RNA, 19 nt, Artificial Sequence
  Description of Artificial Sequence: Synthetic oligonucleotide
cucgcucagucaucuuggu

SEQ ID NO: 1862417 - RNA, 19 nt, Artificial Sequence
  Description of Artificial Sequence: Synthetic oligonucleotide
caaaucccugaaacucuuu

SEQ ID NO: 1862418 - RNA, 19 nt, Artificial Sequence
  Description of Artificial Sequence: Synthetic oligonucleotide
ccgguaaagccugcccuug

SEQ ID NO: 1862419 - RNA, 19 nt, Artificial Sequence
  Description of Artificial Sequence: Synthetic oligonucleotide
gcgccugcgccucuccuuc

SEQ ID NO: 1862420 - RNA, 19 nt, Artificial Sequence
  Description of Artificial Sequence: Synthetic oligonucleotide
ggcgguccgcugugcuccg

SEQ ID NO: 1862421 - RNA, 19 nt, Artificial Sequence
  Description of Artificial Sequence: Synthetic oligonucleotide
ggacaagggcagaguauaa

SEQ ID NO: 1862422 - RNA, 19 nt, Artificial Sequence
  Description of Artificial Sequence: Synthetic oligonucleotide
augcucgcucagucaucuu

SEQ ID NO: 1862423 - RNA, 19 nt, Artificial Sequence
  Description of Artificial Sequence: Synthetic oligonucleotide
gcuccggcgguccgcugug

SEQ ID NO: 1862424 - RNA, 19 nt, Artificial Sequence
  Description of Artificial Sequence: Synthetic oligonucleotide
gggcugacccucuggcaaa

SEQ ID NO: 1862425 - RNA, 19 nt, Artificial Sequence
  Description of Artificial Sequence: Synthetic oligonucleotide
gggcuuucgcuugcggcca

SEQ ID NO: 1862426 - RNA, 19 nt, Artificial Sequence
  Description of Artificial Sequence: Synthetic oligonucleotide
ggccaguguacuggguguc

SEQ ID NO: 1862427 - RNA, 19 nt, Artificial Sequence
  Description of Artificial Sequence: Synthetic oligonucleotide
uagaggcgccuggcaggga

SEQ ID NO: 1862428 - RNA, 19 nt, Artificial Sequence
  Description of Artificial Sequence: Synthetic oligonucleotide
ccgauuucuuguuugcauu

SEQ ID NO: 1862429 - RNA, 19 nt, Artificial Sequence
  Description of Artificial Sequence: Synthetic oligonucleotide
gucaacucgguggccuggu

SEQ ID NO: 1862430 - RNA, 19 nt, Artificial Sequence
  Description of Artificial Sequence: Synthetic oligonucleotide
cguggacaagggcagagua

SEQ ID NO: 1862431 - RNA, 19 nt, Artificial Sequence
  Description of Artificial Sequence: Synthetic oligonucleotide
ggcugacccucuggcaaac

SEQ ID NO: 1862432 - RNA, 19 nt, Artificial Sequence
  Description of Artificial Sequence: Synthetic oligonucleotide
gccaguguacuggguguca

SEQ ID NO: 1862433 - RNA, 19 nt, Artificial Sequence
  Description of Artificial Sequence: Synthetic oligonucleotide
ccacccaauagugccccuc

SEQ ID NO: 1862434 - RNA, 19 nt, Artificial Sequence
  Description of Artificial Sequence: Synthetic oligonucleotide
cugcauccugacucucagu

SEQ ID NO: 1862435 - RNA, 19 nt, Artificial Sequence
  Description of Artificial Sequence: Synthetic oligonucleotide
caggucccgccgugccuuc

SEQ ID NO: 1862436 - RNA, 19 nt, Artificial Sequence
  Description of Artificial Sequence: Synthetic oligonucleotide
cgcagccaauguccaacag

SEQ ID NO: 1862437 - RNA, 19 nt, Artificial Sequence
  Description of Artificial Sequence: Synthetic oligonucleotide
cgcugcagguaaacaguuc

SEQ ID NO: 1862438 - RNA, 19 nt, Artificial Sequence
  Description of Artificial Sequence: Synthetic oligonucleotide
gggauucccuggcccaugu

SEQ ID NO: 1862439 - RNA, 19 nt, Artificial Sequence
  Description of Artificial Sequence: Synthetic oligonucleotide
cacccucagaagcggggcu

SEQ ID NO: 1862440 - RNA, 19 nt, Artificial Sequence
  Description of Artificial Sequence: Synthetic oligonucleotide
cggcgguccgcugugcucc

SEQ ID NO: 1862441 - RNA, 19 nt, Artificial Sequence
  Description of Artificial Sequence: Synthetic oligonucleotide
gccuggcagggacauccga

SEQ ID NO: 1862442 - RNA, 19 nt, Artificial Sequence
  Description of Artificial Sequence: Synthetic oligonucleotide
cccucuucugagauauagu

SEQ ID NO: 1862443 - RNA, 19 nt, Artificial Sequence
  Description of Artificial Sequence: Synthetic oligonucleotide
gugccccucuucugagaua

SEQ ID NO: 1862444 - RNA, 19 nt, Artificial Sequence
  Description of Artificial Sequence: Synthetic oligonucleotide
cucuggccccguggacaag

SEQ ID NO: 1862445 - RNA, 19 nt, Artificial Sequence
  Description of Artificial Sequence: Synthetic oligonucleotide
ccaaaucccugaaacucuu

SEQ ID NO: 1862446 - RNA, 19 nt, Artificial Sequence
  Description of Artificial Sequence: Synthetic oligonucleotide
ccgugaguugcgaacguau

SEQ ID NO: 1862447 - RNA, 19 nt, Artificial Sequence
  Description of Artificial Sequence: Synthetic oligonucleotide
ccuucuuguguggagcccu

SEQ ID NO: 1862448 - RNA, 19 nt, Artificial Sequence
  Description of Artificial Sequence: Synthetic oligonucleotide
cuccggcgguccgcugugc

SEQ ID NO: 1862449 - RNA, 19 nt, Artificial Sequence
  Description of Artificial Sequence: Synthetic oligonucleotide
ccgcagccaauguccaaca

SEQ ID NO: 1862450 - RNA, 19 nt, Artificial Sequence
  Description of Artificial Sequence: Synthetic oligonucleotide
gucccggauucgacagcuc

SEQ ID NO: 1862451 - RNA, 19 nt, Artificial Sequence
  Description of Artificial Sequence: Synthetic oligonucleotide
gugucaggucuaaccuccu

SEQ ID NO: 1862452 - RNA, 19 nt, Artificial Sequence
  Description of Artificial Sequence: Synthetic oligonucleotide
cuccggucuccggcuacga

SEQ ID NO: 1862453 - RNA, 19 nt, Artificial Sequence
  Description of Artificial Sequence: Synthetic oligonucleotide
ccggcgguccgcugugcuc

SEQ ID NO: 1862454 - RNA, 19 nt, Artificial Sequence
  Description of Artificial Sequence: Synthetic oligonucleotide
ggacccauucccugcucuu

SEQ ID NO: 1862455 - RNA, 19 nt, Artificial Sequence
  Description of Artificial Sequence: Synthetic oligonucleotide
gugcuccggucuccggcua

SEQ ID NO: 1862456 - RNA, 19 nt, Artificial Sequence
  Description of Artificial Sequence: Synthetic oligonucleotide
cagcuccggcgguccgcug

SEQ ID NO: 1862457 - RNA, 19 nt, Artificial Sequence
  Description of Artificial Sequence: Synthetic oligonucleotide
cgccuggcagggacauccg

SEQ ID NO: 1862458 - RNA, 19 nt, Artificial Sequence
  Description of Artificial Sequence: Synthetic oligonucleotide
ccuugcccuggcgccugcg

SEQ ID NO: 1862459 - RNA, 19 nt, Artificial Sequence
  Description of Artificial Sequence: Synthetic oligonucleotide
gcugacccucuggcaaaca

SEQ ID NO: 1862460 - RNA, 19 nt, Artificial Sequence
  Description of Artificial Sequence: Synthetic oligonucleotide
cccuagcagcaggucuccc

SEQ ID NO: 1862461 - RNA, 19 nt, Artificial Sequence
  Description of Artificial Sequence: Synthetic oligonucleotide
gacucucagucagccccuu

SEQ ID NO: 1862462 - RNA, 19 nt, Artificial Sequence
  Description of Artificial Sequence: Synthetic oligonucleotide
cagggacauccgauuucuu

SEQ ID NO: 1862463 - RNA, 19 nt, Artificial Sequence
  Description of Artificial Sequence: Synthetic oligonucleotide
ccgcugugcuccggucucc

SEQ ID NO: 1862464 - RNA, 19 nt, Artificial Sequence
  Description of Artificial Sequence: Synthetic oligonucleotide
cgugaguugcgaacguauu

SEQ ID NO: 1862465 - RNA, 19 nt, Artificial Sequence
  Description of Artificial Sequence: Synthetic oligonucleotide
ccgugccuucuugugugga

SEQ ID NO: 1862466 - RNA, 19 nt, Artificial Sequence
  Description of Artificial Sequence: Synthetic oligonucleotide
cccucucacuggugaaagu

SEQ ID NO: 1862467 - RNA, 19 nt, Artificial Sequence
  Description of Artificial Sequence: Synthetic oligonucleotide
gcccuggcgccugcgccuc

SEQ ID NO: 1862468 - RNA, 19 nt, Artificial Sequence
  Description of Artificial Sequence: Synthetic oligonucleotide
cgaacguauuuccgggcuu

SEQ ID NO: 1862469 - RNA, 19 nt, Artificial Sequence
  Description of Artificial Sequence: Synthetic oligonucleotide
cggauucgacagcucucaa

SEQ ID NO: 1862470 - RNA, 19 nt, Artificial Sequence
  Description of Artificial Sequence: Synthetic oligonucleotide
gcuuucgcuugcggccagu

SEQ ID NO: 1862471 - RNA, 19 nt, Artificial Sequence
  Description of Artificial Sequence: Synthetic oligonucleotide
cgguaaagccugcccuugu

SEQ ID NO: 1862472 - RNA, 19 nt, Artificial Sequence
  Description of Artificial Sequence: Synthetic oligonucleotide
ccguggacaagggcagagu

SEQ ID NO: 1862473 - RNA, 19 nt, Artificial Sequence
  Description of Artificial Sequence: Synthetic oligonucleotide
ccccguggacaagggcaga

SEQ ID NO: 1862474 - RNA, 19 nt, Artificial Sequence
  Description of Artificial Sequence: Synthetic oligonucleotide
cgcuugcggccaguguacu

SEQ ID NO: 1862475 - RNA, 19 nt, Artificial Sequence
  Description of Artificial Sequence: Synthetic oligonucleotide
agcaaaaggauuuugaggc

SEQ ID NO: 1862476 - RNA, 19 nt, Artificial Sequence
  Description of Artificial Sequence: Synthetic oligonucleotide
acagaaaacauccauugcc

SEQ ID NO: 1862477 - RNA, 19 nt, Artificial Sequence
  Description of Artificial Sequence: Synthetic oligonucleotide
uuauuuguggcagagacgg

SEQ ID NO: 1862478 - RNA, 19 nt, Artificial Sequence
  Description of Artificial Sequence: Synthetic oligonucleotide
aacaauuccuuccagaagu

SEQ ID NO: 1862479 - RNA, 19 nt, Artificial Sequence
  Description of Artificial Sequence: Synthetic oligonucleotide
aaaacgaagcagcagaugu

SEQ ID NO: 1862480 - RNA, 19 nt, Artificial Sequence
  Description of Artificial Sequence: Synthetic oligonucleotide
aaccugaugacccaaaugu

SEQ ID NO: 1862481 - RNA, 19 nt, Artificial Sequence
  Description of Artificial Sequence: Synthetic oligonucleotide
ucuugaacgaaaacgaagc

SEQ ID NO: 1862482 - RNA, 19 nt, Artificial Sequence
  Description of Artificial Sequence: Synthetic oligonucleotide
auuuagauagcucuguaag

SEQ ID NO: 1862483 - RNA, 19 nt, Artificial Sequence
  Description of Artificial Sequence: Synthetic oligonucleotide
ugaacgaaaacgaagcagc

SEQ ID NO: 1862484 - RNA, 19 nt, Artificial Sequence
  Description of Artificial Sequence: Synthetic oligonucleotide
aaguuaugguauucaagcc

SEQ ID NO: 1862485 - RNA, 19 nt, Artificial Sequence
  Description of Artificial Sequence: Synthetic oligonucleotide
aacagaaaacauccauugc

SEQ ID NO: 1862486 - RNA, 19 nt, Artificial Sequence
  Description of Artificial Sequence: Synthetic oligonucleotide
acagaauuuagauagcucu

SEQ ID NO: 1862487 - RNA, 19 nt, Artificial Sequence
  Description of Artificial Sequence: Synthetic oligonucleotide
guuuccuaaauccaaaggc

SEQ ID NO: 1862488 - RNA, 19 nt, Artificial Sequence
  Description of Artificial Sequence: Synthetic oligonucleotide
aaucucuuacaucuuuaac

SEQ ID NO: 1862489 - RNA, 19 nt, Artificial Sequence
  Description of Artificial Sequence: Synthetic oligonucleotide
cauccuuuauaucagacag

SEQ ID NO: 1862490 - RNA, 19 nt, Artificial Sequence
  Description of Artificial Sequence: Synthetic oligonucleotide
ucccaaaucucuuacaucu

SEQ ID NO: 1862491 - RNA, 19 nt, Artificial Sequence
  Description of Artificial Sequence: Synthetic oligonucleotide
aaaccaggcacagaacugc

SEQ ID NO: 1862492 - RNA, 19 nt, Artificial Sequence
  Description of Artificial Sequence: Synthetic oligonucleotide
ucuuacaucuuuaacaauu

SEQ ID NO: 1862493 - RNA, 19 nt, Artificial Sequence
  Description of Artificial Sequence: Synthetic oligonucleotide
uuuccuaaauccaaaggcu

SEQ ID NO: 1862494 - RNA, 19 nt, Artificial Sequence
  Description of Artificial Sequence: Synthetic oligonucleotide
ucuuuucuguauuugaaac

SEQ ID NO: 1862495 - RNA, 19 nt, Artificial Sequence
  Description of Artificial Sequence: Synthetic oligonucleotide
ugguauucaagccucaacu

SEQ ID NO: 1862496 - RNA, 19 nt, Artificial Sequence
  Description of Artificial Sequence: Synthetic oligonucleotide
cauuauuuguggcagagac

SEQ ID NO: 1862497 - RNA, 19 nt, Artificial Sequence
  Description of Artificial Sequence: Synthetic oligonucleotide
gaaaacauccauugccccg

SEQ ID NO: 1862498 - RNA, 19 nt, Artificial Sequence
  Description of Artificial Sequence: Synthetic oligonucleotide
aaaccugaaauguuaggcu

SEQ ID NO: 1862499 - RNA, 19 nt, Artificial Sequence
  Description of Artificial Sequence: Synthetic oligonucleotide
ugaaacugcccuuuuauac

SEQ ID NO: 1862500 - RNA, 19 nt, Artificial Sequence
  Description of Artificial Sequence: Synthetic oligonucleotide
acaggcacgcaccacaagc

SEQ ID NO: 1862501 - RNA, 19 nt, Artificial Sequence
  Description of Artificial Sequence: Synthetic oligonucleotide
gaaaccugaaauguuaggc

SEQ ID NO: 1862502 - RNA, 19 nt, Artificial Sequence
  Description of Artificial Sequence: Synthetic oligonucleotide
ugaacaguacauuauuugu

SEQ ID NO: 1862503 - RNA, 19 nt, Artificial Sequence
  Description of Artificial Sequence: Synthetic oligonucleotide
ugcccuuuuauacagucag

SEQ ID NO: 1862504 - RNA, 19 nt, Artificial Sequence
  Description of Artificial Sequence: Synthetic oligonucleotide
uaaaacuaaaguucugaac

SEQ ID NO: 1862505 - RNA, 19 nt, Artificial Sequence
  Description of Artificial Sequence: Synthetic oligonucleotide
ucuuuaacaauuccuucca

SEQ ID NO: 1862506 - RNA, 19 nt, Artificial Sequence
  Description of Artificial Sequence: Synthetic oligonucleotide
uccuaaauccaaaggcugg

SEQ ID NO: 1862507 - RNA, 19 nt, Artificial Sequence
  Description of Artificial Sequence: Synthetic oligonucleotide
auagguguagacuuggaga

SEQ ID NO: 1862508 - RNA, 19 nt, Artificial Sequence
  Description of Artificial Sequence: Synthetic oligonucleotide
uucuguauuugaaacugcc

SEQ ID NO: 1862509 - RNA, 19 nt, Artificial Sequence
  Description of Artificial Sequence: Synthetic oligonucleotide
aaacugcccuuuuauacag

SEQ ID NO: 1862510 - RNA, 19 nt, Artificial Sequence
  Description of Artificial Sequence: Synthetic oligonucleotide
uucugaacauuauugcugc

SEQ ID NO: 1862511 - RNA, 19 nt, Artificial Sequence
  Description of Artificial Sequence: Synthetic oligonucleotide
ucucuuacaucuuuaacaa

SEQ ID NO: 1862512 - RNA, 19 nt, Artificial Sequence
  Description of Artificial Sequence: Synthetic oligonucleotide
uuugaaacugcccuuuuau

SEQ ID NO: 1862513 - RNA, 19 nt, Artificial Sequence
  Description of Artificial Sequence: Synthetic oligonucleotide
aguuaugguauucaagccu

SEQ ID NO: 1862514 - RNA, 19 nt, Artificial Sequence
  Description of Artificial Sequence: Synthetic oligonucleotide
auuucugggacugaaacug

SEQ ID NO: 1862515 - RNA, 19 nt, Artificial Sequence
  Description of Artificial Sequence: Synthetic oligonucleotide
uauacagucagaagcucca

SEQ ID NO: 1862516 - RNA, 19 nt, Artificial Sequence
  Description of Artificial Sequence: Synthetic oligonucleotide
aguacauuauuuguggcag

SEQ ID NO: 1862517 - RNA, 19 nt, Artificial Sequence
  Description of Artificial Sequence: Synthetic oligonucleotide
aaacuggaagugucagggc

SEQ ID NO: 1862518 - RNA, 19 nt, Artificial Sequence
  Description of Artificial Sequence: Synthetic oligonucleotide
agcucuguaaguuauugcu

SEQ ID NO: 1862519 - RNA, 19 nt, Artificial Sequence
  Description of Artificial Sequence: Synthetic oligonucleotide
uguuauucacuggaaaacc

SEQ ID NO: 1862520 - RNA, 19 nt, Artificial Sequence
  Description of Artificial Sequence: Synthetic oligonucleotide
ugugaaaccugaaauguua

SEQ ID NO: 1862521 - RNA, 19 nt, Artificial Sequence
  Description of Artificial Sequence: Synthetic oligonucleotide
auccuauucuuccacuuac

SEQ ID NO: 1862522 - RNA, 19 nt, Artificial Sequence
  Description of Artificial Sequence: Synthetic oligonucleotide
ucuguauuugaaacugccc

SEQ ID NO: 1862523 - RNA, 19 nt, Artificial Sequence
  Description of Artificial Sequence: Synthetic oligonucleotide
caagccucaacucuucugg

SEQ ID NO: 1862524 - RNA, 19 nt, Artificial Sequence
  Description of Artificial Sequence: Synthetic oligonucleotide
acgaaaacgaagcagcaga

SEQ ID NO: 1862525 - RNA, 19 nt, Artificial Sequence
  Description of Artificial Sequence: Synthetic oligonucleotide
cauugcauggccaaaagga

SEQ ID NO: 1862526 - RNA, 19 nt, Artificial Sequence
  Description of Artificial Sequence: Synthetic oligonucleotide
aaaaggauuuugaggcggc

SEQ ID NO: 1862527 - RNA, 19 nt, Artificial Sequence
  Description of Artificial Sequence: Synthetic oligonucleotide
uguaaguuauugcugguua

SEQ ID NO: 1862528 - RNA, 19 nt, Artificial Sequence
  Description of Artificial Sequence: Synthetic oligonucleotide
ucuuuagucagcugauccc

SEQ ID NO: 1862529 - RNA, 19 nt, Artificial Sequence
  Description of Artificial Sequence: Synthetic oligonucleotide
uuuagauagcucuguaagu

SEQ ID NO: 1862530 - RNA, 19 nt, Artificial Sequence
  Description of Artificial Sequence: Synthetic oligonucleotide
ucccagaguaaauuucugg

SEQ ID NO: 1862531 - RNA, 19 nt, Artificial Sequence
  Description of Artificial Sequence: Synthetic oligonucleotide
aaacuaaaguucugaacau

SEQ ID NO: 1862532 - RNA, 19 nt, Artificial Sequence
  Description of Artificial Sequence: Synthetic oligonucleotide
cucuugaacgaaaacgaag

SEQ ID NO: 1862533 - RNA, 19 nt, Artificial Sequence
  Description of Artificial Sequence: Synthetic oligonucleotide
acuuacuagcuguugaaca

SEQ ID NO: 1862534 - RNA, 19 nt, Artificial Sequence
  Description of Artificial Sequence: Synthetic oligonucleotide
acauccauugccccgauga

SEQ ID NO: 1862535 - RNA, 19 nt, Artificial Sequence
  Description of Artificial Sequence: Synthetic oligonucleotide
gaggcggcgauccaaagcc

SEQ ID NO: 1862536 - RNA, 19 nt, Artificial Sequence
  Description of Artificial Sequence: Synthetic oligonucleotide
aaaucucuuacaucuuuaa

SEQ ID NO: 1862537 - RNA, 19 nt, Artificial Sequence
  Description of Artificial Sequence: Synthetic oligonucleotide
ugguuaagaaguuauggua

SEQ ID NO: 1862538 - RNA, 19 nt, Artificial Sequence
  Description of Artificial Sequence: Synthetic oligonucleotide
caugucauuagaagguuug

SEQ ID NO: 1862539 - RNA, 19 nt, Artificial Sequence
  Description of Artificial Sequence: Synthetic oligonucleotide
aaaaggacucacugccaag

SEQ ID NO: 1862540 - RNA, 19 nt, Artificial Sequence
  Description of Artificial Sequence: Synthetic oligonucleotide
uccauugccccgaugauuc

SEQ ID NO: 1862541 - RNA, 19 nt, Artificial Sequence
  Description of Artificial Sequence: Synthetic oligonucleotide
cagaguaaauuucugggac

SEQ ID NO: 1862542 - RNA, 19 nt, Artificial Sequence
  Description of Artificial Sequence: Synthetic oligonucleotide
gauuuugaggcggcgaucc

SEQ ID NO: 1862543 - RNA, 19 nt, Artificial Sequence
  Description of Artificial Sequence: Synthetic oligonucleotide
augguauucaagccucaac

SEQ ID NO: 1862544 - RNA, 19 nt, Artificial Sequence
  Description of Artificial Sequence: Synthetic oligonucleotide
auuagaagguuuggcaaac

SEQ ID NO: 1862545 - RNA, 19 nt, Artificial Sequence
  Description of Artificial Sequence: Synthetic oligonucleotide
uccacuuacuagcuguuga

SEQ ID NO: 1862546 - RNA, 19 nt, Artificial Sequence
  Description of Artificial Sequence: Synthetic oligonucleotide
aaugucccugauugcuuac

SEQ ID NO: 1862547 - RNA, 19 nt, Artificial Sequence
  Description of Artificial Sequence: Synthetic oligonucleotide
cagacgugcuuccagacgg

SEQ ID NO: 1862548 - RNA, 19 nt, Artificial Sequence
  Description of Artificial Sequence: Synthetic oligonucleotide
uagguguagacuuggagaa

SEQ ID NO: 1862549 - RNA, 19 nt, Artificial Sequence
  Description of Artificial Sequence: Synthetic oligonucleotide
acugcccuuuuauacaguc

SEQ ID NO: 1862550 - RNA, 19 nt, Artificial Sequence
  Description of Artificial Sequence: Synthetic oligonucleotide
cugaugacccaaauguccc

SEQ ID NO: 1862551 - RNA, 19 nt, Artificial Sequence
  Description of Artificial Sequence: Synthetic oligonucleotide
gaacaguacauuauuugug

SEQ ID NO: 1862552 - RNA, 19 nt, Artificial Sequence
  Description of Artificial Sequence: Synthetic oligonucleotide
uggccaaaaggacucacug

SEQ ID NO: 1862553 - RNA, 19 nt, Artificial Sequence
  Description of Artificial Sequence: Synthetic oligonucleotide
uaagaaguuaugguauuca

SEQ ID NO: 1862554 - RNA, 19 nt, Artificial Sequence
  Description of Artificial Sequence: Synthetic oligonucleotide
ucagguuuccuaaauccaa

SEQ ID NO: 1862555 - RNA, 19 nt, Artificial Sequence
  Description of Artificial Sequence: Synthetic oligonucleotide
aaaacauccauugccccga

SEQ ID NO: 1862556 - RNA, 19 nt, Artificial Sequence
  Description of Artificial Sequence: Synthetic oligonucleotide
uucugcucaucagagacag

SEQ ID NO: 1862557 - RNA, 19 nt, Artificial Sequence
  Description of Artificial Sequence: Synthetic oligonucleotide
ugaacagaauuuagauagc

SEQ ID NO: 1862558 - RNA, 19 nt, Artificial Sequence
  Description of Artificial Sequence: Synthetic oligonucleotide
ucuggugaaaugucuguga

SEQ ID NO: 1862559 - RNA, 19 nt, Artificial Sequence
  Description of Artificial Sequence: Synthetic oligonucleotide
aaccugaaauguuaggcuu

SEQ ID NO: 1862560 - RNA, 19 nt, Artificial Sequence
  Description of Artificial Sequence: Synthetic oligonucleotide
auugcauggccaaaaggac

SEQ ID NO: 1862561 - RNA, 19 nt, Artificial Sequence
  Description of Artificial Sequence: Synthetic oligonucleotide
uugcuuacuuccaaaucca

SEQ ID NO: 1862562 - RNA, 19 nt, Artificial Sequence
  Description of Artificial Sequence: Synthetic oligonucleotide
aacgaaaacgaagcagcag

SEQ ID NO: 1862563 - RNA, 19 nt, Artificial Sequence
  Description of Artificial Sequence: Synthetic oligonucleotide
agccucccagacuacaggc

SEQ ID NO: 1862564 - RNA, 19 nt, Artificial Sequence
  Description of Artificial Sequence: Synthetic oligonucleotide
ggugaaaugucugugaaac

SEQ ID NO: 1862565 - RNA, 19 nt, Artificial Sequence
  Description of Artificial Sequence: Synthetic oligonucleotide
gacuaccaaaaccaggcac

SEQ ID NO: 1862566 - RNA, 19 nt, Artificial Sequence
  Description of Artificial Sequence: Synthetic oligonucleotide
gucugugaaaccugaaaug

SEQ ID NO: 1862567 - RNA, 19 nt, Artificial Sequence
  Description of Artificial Sequence: Synthetic oligonucleotide
cagacuacaggcacgcacc

SEQ ID NO: 1862568 - RNA, 19 nt, Artificial Sequence
  Description of Artificial Sequence: Synthetic oligonucleotide
gaguuuguggcauuccuuc

SEQ ID NO: 1862569 - RNA, 19 nt, Artificial Sequence
  Description of Artificial Sequence: Synthetic oligonucleotide
aacgcagacgugcuuccag

SEQ ID NO: 1862570 - RNA, 19 nt, Artificial Sequence
  Description of Artificial Sequence: Synthetic oligonucleotide
ugucauuagaagguuuggc

SEQ ID NO: 1862571 - RNA, 19 nt, Artificial Sequence
  Description of Artificial Sequence: Synthetic oligonucleotide
aaaaccugaugacccaaau

SEQ ID NO: 1862572 - RNA, 19 nt, Artificial Sequence
  Description of Artificial Sequence: Synthetic oligonucleotide
aggccgacaugcuacuacc

SEQ ID NO: 1862573 - RNA, 19 nt, Artificial Sequence
  Description of Artificial Sequence: Synthetic oligonucleotide
uuaauccuauucuuccacu

SEQ ID NO: 1862574 - RNA, 19 nt, Artificial Sequence
  Description of Artificial Sequence: Synthetic oligonucleotide
acauuauugcugcugcugu

SEQ ID NO: 1862575 - RNA, 19 nt, Artificial Sequence
  Description of Artificial Sequence: Synthetic oligonucleotide
aacugccacuuccgaaggc

SEQ ID NO: 1862576 - RNA, 19 nt, Artificial Sequence
  Description of Artificial Sequence: Synthetic oligonucleotide
uauucaagccucaacucuu

SEQ ID NO: 1862577 - RNA, 19 nt, Artificial Sequence
  Description of Artificial Sequence: Synthetic oligonucleotide
ugugaacaguacauuauuu

SEQ ID NO: 1862578 - RNA, 19 nt, Artificial Sequence
  Description of Artificial Sequence: Synthetic oligonucleotide
agcagagcuccuuugguug

SEQ ID NO: 1862579 - RNA, 19 nt, Artificial Sequence
  Description of Artificial Sequence: Synthetic oligonucleotide
gacaggugaagcaaaagga

SEQ ID NO: 1862580 - RNA, 19 nt, Artificial Sequence
  Description of Artificial Sequence: Synthetic oligonucleotide
acaggugguggcuucaaug

SEQ ID NO: 1862581 - RNA, 19 nt, Artificial Sequence
  Description of Artificial Sequence: Synthetic oligonucleotide
cauuccuucucucagccuc

SEQ ID NO: 1862582 - RNA, 19 nt, Artificial Sequence
  Description of Artificial Sequence: Synthetic oligonucleotide
gauugcuuacuuccaaauc

SEQ ID NO: 1862583 - RNA, 19 nt, Artificial Sequence
  Description of Artificial Sequence: Synthetic oligonucleotide
cugggugacucccaaacgc

SEQ ID NO: 1862584 - RNA, 19 nt, Artificial Sequence
  Description of Artificial Sequence: Synthetic oligonucleotide
ugcuacuaccuccaaacau

SEQ ID NO: 1862585 - RNA, 19 nt, Artificial Sequence
  Description of Artificial Sequence: Synthetic oligonucleotide
cagaauuuagauagcucug

SEQ ID NO: 1862586 - RNA, 19 nt, Artificial Sequence
  Description of Artificial Sequence: Synthetic oligonucleotide
uugcauggccaaaaggacu

SEQ ID NO: 1862587 - RNA, 19 nt, Artificial Sequence
  Description of Artificial Sequence: Synthetic oligonucleotide
gccaaaaggacucacugcc

SEQ ID NO: 1862588 - RNA, 19 nt, Artificial Sequence
  Description of Artificial Sequence: Synthetic oligonucleotide
auuauuuguggcagagacg

SEQ ID NO: 1862589 - RNA, 19 nt, Artificial Sequence
  Description of Artificial Sequence: Synthetic oligonucleotide
aaaggauuuugaggcggcg

SEQ ID NO: 1862590 - RNA, 19 nt, Artificial Sequence
  Description of Artificial Sequence: Synthetic oligonucleotide
aauccuauucuuccacuua

SEQ ID NO: 1862591 - RNA, 19 nt, Artificial Sequence
  Description of Artificial Sequence: Synthetic oligonucleotide
gcugguuaagaaguuaugg

SEQ ID NO: 1862592 - RNA, 19 nt, Artificial Sequence
  Description of Artificial Sequence: Synthetic oligonucleotide
agguuuccuaaauccaaag

SEQ ID NO: 1862593 - RNA, 19 nt, Artificial Sequence
  Description of Artificial Sequence: Synthetic oligonucleotide
ccaaacaugucauuagaag

SEQ ID NO: 1862594 - RNA, 19 nt, Artificial Sequence
  Description of Artificial Sequence: Synthetic oligonucleotide
agaauuuagauagcucugu

SEQ ID NO: 1862595 - RNA, 19 nt, Artificial Sequence
  Description of Artificial Sequence: Synthetic oligonucleotide
uguggcauuccuucucuca

SEQ ID NO: 1862596 - RNA, 19 nt, Artificial Sequence
  Description of Artificial Sequence: Synthetic oligonucleotide
uugcugguuaagaaguuau

SEQ ID NO: 1862597 - RNA, 19 nt, Artificial Sequence
  Description of Artificial Sequence: Synthetic oligonucleotide
aaagccucuugcucgugga

SEQ ID NO: 1862598 - RNA, 19 nt, Artificial Sequence
  Description of Artificial Sequence: Synthetic oligonucleotide
auagcucuguaaguuauug

SEQ ID NO: 1862599 - RNA, 19 nt, Artificial Sequence
  Description of Artificial Sequence: Synthetic oligonucleotide
ugcuguuauucacuggaaa

SEQ ID NO: 1862600 - RNA, 19 nt, Artificial Sequence
  Description of Artificial Sequence: Synthetic oligonucleotide
aaagccguucuuuucugua

SEQ ID NO: 1862601 - RNA, 19 nt, Artificial Sequence
  Description of Artificial Sequence: Synthetic oligonucleotide
uccagagcuuguuuuaaaa

SEQ ID NO: 1862602 - RNA, 19 nt, Artificial Sequence
  Description of Artificial Sequence: Synthetic oligonucleotide
ggcuccauccuuuauauca

SEQ ID NO: 1862603 - RNA, 19 nt, Artificial Sequence
  Description of Artificial Sequence: Synthetic oligonucleotide
acuaccaaaaccaggcaca

SEQ ID NO: 1862604 - RNA, 19 nt, Artificial Sequence
  Description of Artificial Sequence: Synthetic oligonucleotide
ugaucccugggugugaaca

SEQ ID NO: 1862605 - RNA, 19 nt, Artificial Sequence
  Description of Artificial Sequence: Synthetic oligonucleotide
ugaggcggcgauccaaagc

SEQ ID NO: 1862606 - RNA, 19 nt, Artificial Sequence
  Description of Artificial Sequence: Synthetic oligonucleotide
aaaugucugugaaaccuga

SEQ ID NO: 1862607 - RNA, 19 nt, Artificial Sequence
  Description of Artificial Sequence: Synthetic oligonucleotide
uuccagacggggcagugga

SEQ ID NO: 1862608 - RNA, 19 nt, Artificial Sequence
  Description of Artificial Sequence: Synthetic oligonucleotide
ugcugguuaagaaguuaug

SEQ ID NO: 1862609 - RNA, 19 nt, Artificial Sequence
  Description of Artificial Sequence: Synthetic oligonucleotide
gaacugccacuuccgaagg

SEQ ID NO: 1862610 - RNA, 19 nt, Artificial Sequence
  Description of Artificial Sequence: Synthetic oligonucleotide
ccugaugacccaaaugucc

SEQ ID NO: 1862611 - RNA, 19 nt, Artificial Sequence
  Description of Artificial Sequence: Synthetic oligonucleotide
cuuuaacaauuccuuccag

SEQ ID NO: 1862612 - RNA, 19 nt, Artificial Sequence
  Description of Artificial Sequence: Synthetic oligonucleotide
uauuuguggcagagacggg

SEQ ID NO: 1862613 - RNA, 19 nt, Artificial Sequence
  Description of Artificial Sequence: Synthetic oligonucleotide
uagcucuguaaguuauugc

SEQ ID NO: 1862614 - RNA, 19 nt, Artificial Sequence
  Description of Artificial Sequence: Synthetic oligonucleotide
cuguugaacagaauuuaga

SEQ ID NO: 1862615 - RNA, 19 nt, Artificial Sequence
  Description of Artificial Sequence: Synthetic oligonucleotide
uguggcuucagguuuccua

SEQ ID NO: 1862616 - RNA, 19 nt, Artificial Sequence
  Description of Artificial Sequence: Synthetic oligonucleotide
uacuagcuguugaacagaa

SEQ ID NO: 1862617 - RNA, 19 nt, Artificial Sequence
  Description of Artificial Sequence: Synthetic oligonucleotide
uuugaggcggcgauccaaa

SEQ ID NO: 1862618 - RNA, 19 nt, Artificial Sequence
  Description of Artificial Sequence: Synthetic oligonucleotide
gaaaacgaagcagcagaug

SEQ ID NO: 1862619 - RNA, 19 nt, Artificial Sequence
  Description of Artificial Sequence: Synthetic oligonucleotide
acuaaaguucugaacauua

SEQ ID NO: 1862620 - RNA, 19 nt, Artificial Sequence
  Description of Artificial Sequence: Synthetic oligonucleotide
uuuauacagucagaagcuc

SEQ ID NO: 1862621 - RNA, 19 nt, Artificial Sequence
  Description of Artificial Sequence: Synthetic oligonucleotide
gaaggcaggggccauugca

SEQ ID NO: 1862622 - RNA, 19 nt, Artificial Sequence
  Description of Artificial Sequence: Synthetic oligonucleotide
uaauccuauucuuccacuu

SEQ ID NO: 1862623 - RNA, 19 nt, Artificial Sequence
  Description of Artificial Sequence: Synthetic oligonucleotide
gaucccugggugugaacag

SEQ ID NO: 1862624 - RNA, 19 nt, Artificial Sequence
  Description of Artificial Sequence: Synthetic oligonucleotide
ugaaaacccaggugaucca

SEQ ID NO: 1862625 - RNA, 19 nt, Artificial Sequence
  Description of Artificial Sequence: Synthetic oligonucleotide
cacuggaaaaccugaugac

SEQ ID NO: 1862626 - RNA, 19 nt, Artificial Sequence
  Description of Artificial Sequence: Synthetic oligonucleotide
ugcucaucagagacaggug

SEQ ID NO: 1862627 - RNA, 19 nt, Artificial Sequence
  Description of Artificial Sequence: Synthetic oligonucleotide
uccuauucuuccacuuacu

SEQ ID NO: 1862628 - RNA, 19 nt, Artificial Sequence
  Description of Artificial Sequence: Synthetic oligonucleotide
cuaaagccguucuuuucug

SEQ ID NO: 1862629 - RNA, 19 nt, Artificial Sequence
  Description of Artificial Sequence: Synthetic oligonucleotide
agggaggccgacaugcuac

SEQ ID NO: 1862630 - RNA, 19 nt, Artificial Sequence
  Description of Artificial Sequence: Synthetic oligonucleotide
aacuaaaguucugaacauu

SEQ ID NO: 1862631 - RNA, 19 nt, Artificial Sequence
  Description of Artificial Sequence: Synthetic oligonucleotide
gcuacuaccuccaaacaug

SEQ ID NO: 1862632 - RNA, 19 nt, Artificial Sequence
  Description of Artificial Sequence: Synthetic oligonucleotide
aacaugucauuagaagguu

SEQ ID NO: 1862633 - RNA, 19 nt, Artificial Sequence
  Description of Artificial Sequence: Synthetic oligonucleotide
gaugacccaaaugucccug

SEQ ID NO: 1862634 - RNA, 19 nt, Artificial Sequence
  Description of Artificial Sequence: Synthetic oligonucleotide
gcaaaaggauuuugaggcg

SEQ ID NO: 1862635 - RNA, 19 nt, Artificial Sequence
  Description of Artificial Sequence: Synthetic oligonucleotide
cauuaauccuauucuucca

SEQ ID NO: 1862636 - RNA, 19 nt, Artificial Sequence
  Description of Artificial Sequence: Synthetic oligonucleotide
uccagaaguuucuuuucau

SEQ ID NO: 1862637 - RNA, 19 nt, Artificial Sequence
  Description of Artificial Sequence: Synthetic oligonucleotide
gguguagacuuggagaagc

SEQ ID NO: 1862638 - RNA, 19 nt, Artificial Sequence
  Description of Artificial Sequence: Synthetic oligonucleotide
caggcacgcaccacaagcc

SEQ ID NO: 1862639 - RNA, 19 nt, Artificial Sequence
  Description of Artificial Sequence: Synthetic oligonucleotide
uucccaaaucucuuacauc

SEQ ID NO: 1862640 - RNA, 19 nt, Artificial Sequence
  Description of Artificial Sequence: Synthetic oligonucleotide
caaacgcagacgugcuucc

SEQ ID NO: 1862641 - RNA, 19 nt, Artificial Sequence
  Description of Artificial Sequence: Synthetic oligonucleotide
guauucaagccucaacucu

SEQ ID NO: 1862642 - RNA, 19 nt, Artificial Sequence
  Description of Artificial Sequence: Synthetic oligonucleotide
gaggccgacaugcuacuac

SEQ ID NO: 1862643 - RNA, 19 nt, Artificial Sequence
  Description of Artificial Sequence: Synthetic oligonucleotide
cagagcuuguuuuaaaacu

SEQ ID NO: 1862644 - RNA, 19 nt, Artificial Sequence
  Description of Artificial Sequence: Synthetic oligonucleotide
cauuagaagguuuggcaaa

SEQ ID NO: 1862645 - RNA, 19 nt, Artificial Sequence
  Description of Artificial Sequence: Synthetic oligonucleotide
ugucagggcucuugaacga

SEQ ID NO: 1862646 - RNA, 19 nt, Artificial Sequence
  Description of Artificial Sequence: Synthetic oligonucleotide
acuggcuccauccuuuaua

SEQ ID NO: 1862647 - RNA, 19 nt, Artificial Sequence
  Description of Artificial Sequence: Synthetic oligonucleotide
gcugcuguuauucacugga

SEQ ID NO: 1862648 - RNA, 19 nt, Artificial Sequence
  Description of Artificial Sequence: Synthetic oligonucleotide
ucaacucuucuggugaaau

SEQ ID NO: 1862649 - RNA, 19 nt, Artificial Sequence
  Description of Artificial Sequence: Synthetic oligonucleotide
caaaaccaggcacagaacu

SEQ ID NO: 1862650 - RNA, 19 nt, Artificial Sequence
  Description of Artificial Sequence: Synthetic oligonucleotide
ggacucacugccaaggaag

SEQ ID NO: 1862651 - RNA, 19 nt, Artificial Sequence
  Description of Artificial Sequence: Synthetic oligonucleotide
aagccucaacucuucuggu

SEQ ID NO: 1862652 - RNA, 19 nt, Artificial Sequence
  Description of Artificial Sequence: Synthetic oligonucleotide
gguauucaagccucaacuc

SEQ ID NO: 1862653 - RNA, 19 nt, Artificial Sequence
  Description of Artificial Sequence: Synthetic oligonucleotide
cuagcuguugaacagaauu

SEQ ID NO: 1862654 - RNA, 19 nt, Artificial Sequence
  Description of Artificial Sequence: Synthetic oligonucleotide
guuuguggcauuccuucuc

SEQ ID NO: 1862655 - RNA, 19 nt, Artificial Sequence
  Description of Artificial Sequence: Synthetic oligonucleotide
cuugaacgaaaacgaagca

SEQ ID NO: 1862656 - RNA, 19 nt, Artificial Sequence
  Description of Artificial Sequence: Synthetic oligonucleotide
acaggugaagcaaaaggau

SEQ ID NO: 1862657 - RNA, 19 nt, Artificial Sequence
  Description of Artificial Sequence: Synthetic oligonucleotide
gaacagaauuuagauagcu

SEQ ID NO: 1862658 - RNA, 19 nt, Artificial Sequence
  Description of Artificial Sequence: Synthetic oligonucleotide
cuaccaaaaccaggcacag

SEQ ID NO: 1862659 - RNA, 19 nt, Artificial Sequence
  Description of Artificial Sequence: Synthetic oligonucleotide
gacucacugccaaggaagc

SEQ ID NO: 1862660 - RNA, 19 nt, Artificial Sequence
  Description of Artificial Sequence: Synthetic oligonucleotide
ugcuuacuuccaaauccaa

SEQ ID NO: 1862661 - RNA, 19 nt, Artificial Sequence
  Description of Artificial Sequence: Synthetic oligonucleotide
agccucaacucuucuggug

SEQ ID NO: 1862662 - RNA, 19 nt, Artificial Sequence
  Description of Artificial Sequence: Synthetic oligonucleotide
acagaacugccacuuccga

SEQ ID NO: 1862663 - RNA, 19 nt, Artificial Sequence
  Description of Artificial Sequence: Synthetic oligonucleotide
gcuguuauucacuggaaaa

SEQ ID NO: 1862664 - RNA, 19 nt, Artificial Sequence
  Description of Artificial Sequence: Synthetic oligonucleotide
uuuugaggcggcgauccaa

SEQ ID NO: 1862665 - RNA, 19 nt, Artificial Sequence
  Description of Artificial Sequence: Synthetic oligonucleotide
gacucccaaacgcagacgu

SEQ ID NO: 1862666 - RNA, 19 nt, Artificial Sequence
  Description of Artificial Sequence: Synthetic oligonucleotide
aggugaagcaaaaggauuu

SEQ ID NO: 1862667 - RNA, 19 nt, Artificial Sequence
  Description of Artificial Sequence: Synthetic oligonucleotide
ccaggugauccaaaacugg

SEQ ID NO: 1862668 - RNA, 19 nt, Artificial Sequence
  Description of Artificial Sequence: Synthetic oligonucleotide
ucccagacuacaggcacgc

SEQ ID NO: 1862669 - RNA, 19 nt, Artificial Sequence
  Description of Artificial Sequence: Synthetic oligonucleotide
cucccagacuacaggcacg

SEQ ID NO: 1862670 - RNA, 19 nt, Artificial Sequence
  Description of Artificial Sequence: Synthetic oligonucleotide
accugaugacccaaauguc

SEQ ID NO: 1862671 - RNA, 19 nt, Artificial Sequence
  Description of Artificial Sequence: Synthetic oligonucleotide
uaugguauucaagccucaa

SEQ ID NO: 1862672 - RNA, 19 nt, Artificial Sequence
  Description of Artificial Sequence: Synthetic oligonucleotide
cacuuccgaaggcaggggc

SEQ ID NO: 1862673 - RNA, 19 nt, Artificial Sequence
  Description of Artificial Sequence: Synthetic oligonucleotide
ugacucccaaacgcagacg

SEQ ID NO: 1862674 - RNA, 19 nt, Artificial Sequence
  Description of Artificial Sequence: Synthetic oligonucleotide
ucccaaacgcagacgugcu

SEQ ID NO: 1862675 - RNA, 19 nt, Artificial Sequence
  Description of Artificial Sequence: Synthetic oligonucleotide
caaaaggacucacugccaa

SEQ ID NO: 1862676 - RNA, 19 nt, Artificial Sequence
  Description of Artificial Sequence: Synthetic oligonucleotide
agucagcugaucccugggu

SEQ ID NO: 1862677 - RNA, 19 nt, Artificial Sequence
  Description of Artificial Sequence: Synthetic oligonucleotide
agauagcucuguaaguuau

SEQ ID NO: 1862678 - RNA, 19 nt, Artificial Sequence
  Description of Artificial Sequence: Synthetic oligonucleotide
agcuguugaacagaauuua

SEQ ID NO: 1862679 - RNA, 19 nt, Artificial Sequence
  Description of Artificial Sequence: Synthetic oligonucleotide
ggcucuugaacgaaaacga

SEQ ID NO: 1862680 - RNA, 19 nt, Artificial Sequence
  Description of Artificial Sequence: Synthetic oligonucleotide
ggccaggacuaccaaaacc

SEQ ID NO: 1862681 - RNA, 19 nt, Artificial Sequence
  Description of Artificial Sequence: Synthetic oligonucleotide
augcuacuaccuccaaaca

SEQ ID NO: 1862682 - RNA, 19 nt, Artificial Sequence
  Description of Artificial Sequence: Synthetic oligonucleotide
ugucccugauugcuuacuu

SEQ ID NO: 1862683 - RNA, 19 nt, Artificial Sequence
  Description of Artificial Sequence: Synthetic oligonucleotide
ccagagcuuguuuuaaaac

SEQ ID NO: 1862684 - RNA, 19 nt, Artificial Sequence
  Description of Artificial Sequence: Synthetic oligonucleotide
ccgacaugcuacuaccucc

SEQ ID NO: 1862685 - RNA, 19 nt, Artificial Sequence
  Description of Artificial Sequence: Synthetic oligonucleotide
cacuuacuagcuguugaac

SEQ ID NO: 1862686 - RNA, 19 nt, Artificial Sequence
  Description of Artificial Sequence: Synthetic oligonucleotide
caaaucucuuacaucuuua

SEQ ID NO: 1862687 - RNA, 19 nt, Artificial Sequence
  Description of Artificial Sequence: Synthetic oligonucleotide
gcuguugaacagaauuuag

SEQ ID NO: 1862688 - RNA, 19 nt, Artificial Sequence
  Description of Artificial Sequence: Synthetic oligonucleotide
ggccaaaaggacucacugc

SEQ ID NO: 1862689 - RNA, 19 nt, Artificial Sequence
  Description of Artificial Sequence: Synthetic oligonucleotide
acggggcaguggaaaaucc

SEQ ID NO: 1862690 - RNA, 19 nt, Artificial Sequence
  Description of Artificial Sequence: Synthetic oligonucleotide
cagccucccagacuacagg

SEQ ID NO: 1862691 - RNA, 19 nt, Artificial Sequence
  Description of Artificial Sequence: Synthetic oligonucleotide
accacaagccuggcuaaag

SEQ ID NO: 1862692 - RNA, 19 nt, Artificial Sequence
  Description of Artificial Sequence: Synthetic oligonucleotide
aggacucacugccaaggaa

SEQ ID NO: 1862693 - RNA, 19 nt, Artificial Sequence
  Description of Artificial Sequence: Synthetic oligonucleotide
gacgugcuuccagacgggg

SEQ ID NO: 1862694 - RNA, 19 nt, Artificial Sequence
  Description of Artificial Sequence: Synthetic oligonucleotide
uuccacuuacuagcuguug

SEQ ID NO: 1862695 - RNA, 19 nt, Artificial Sequence
  Description of Artificial Sequence: Synthetic oligonucleotide
aguaaauuucugggacuga

SEQ ID NO: 1862696 - RNA, 19 nt, Artificial Sequence
  Description of Artificial Sequence: Synthetic oligonucleotide
cauugccccgaugauuccc

SEQ ID NO: 1862697 - RNA, 19 nt, Artificial Sequence
  Description of Artificial Sequence: Synthetic oligonucleotide
ugacccaaaugucccugau

SEQ ID NO: 1862698 - RNA, 19 nt, Artificial Sequence
  Description of Artificial Sequence: Synthetic oligonucleotide
ccauugcauggccaaaagg

SEQ ID NO: 1862699 - RNA, 19 nt, Artificial Sequence
  Description of Artificial Sequence: Synthetic oligonucleotide
accuccaaacaugucauua

SEQ ID NO: 1862700 - RNA, 19 nt, Artificial Sequence
  Description of Artificial Sequence: Synthetic oligonucleotide
acgugcuuccagacggggc

SEQ ID NO: 1862701 - RNA, 19 nt, Artificial Sequence
  Description of Artificial Sequence: Synthetic oligonucleotide
agucugagacugugggcca

SEQ ID NO: 1862702 - RNA, 19 nt, Artificial Sequence
  Description of Artificial Sequence: Synthetic oligonucleotide
acauuauuuguggcagaga

SEQ ID NO: 1862703 - RNA, 19 nt, Artificial Sequence
  Description of Artificial Sequence: Synthetic oligonucleotide
gauccaaaacuggaagugu

SEQ ID NO: 1862704 - RNA, 19 nt, Artificial Sequence
  Description of Artificial Sequence: Synthetic oligonucleotide
gagcuuguuuuaaaacuaa

SEQ ID NO: 1862705 - RNA, 19 nt, Artificial Sequence
  Description of Artificial Sequence: Synthetic oligonucleotide
gguugacauauuuaaauuu

SEQ ID NO: 1862706 - RNA, 19 nt, Artificial Sequence
  Description of Artificial Sequence: Synthetic oligonucleotide
ggcugggugacucccaaac

SEQ ID NO: 1862707 - RNA, 19 nt, Artificial Sequence
  Description of Artificial Sequence: Synthetic oligonucleotide
cucaucagagacaggugaa

SEQ ID NO: 1862708 - RNA, 19 nt, Artificial Sequence
  Description of Artificial Sequence: Synthetic oligonucleotide
uggagcggaggaagcgaug

SEQ ID NO: 1862709 - RNA, 19 nt, Artificial Sequence
  Description of Artificial Sequence: Synthetic oligonucleotide
acgcagacgugcuuccaga

SEQ ID NO: 1862710 - RNA, 19 nt, Artificial Sequence
  Description of Artificial Sequence: Synthetic oligonucleotide
aggcacgcaccacaagccu

SEQ ID NO: 1862711 - RNA, 19 nt, Artificial Sequence
  Description of Artificial Sequence: Synthetic oligonucleotide
auccagagcuuguuuuaaa

SEQ ID NO: 1862712 - RNA, 19 nt, Artificial Sequence
  Description of Artificial Sequence: Synthetic oligonucleotide
gacggggcaguggaaaauc

SEQ ID NO: 1862713 - RNA, 19 nt, Artificial Sequence
  Description of Artificial Sequence: Synthetic oligonucleotide
cuuccagacggggcagugg

SEQ ID NO: 1862714 - RNA, 19 nt, Artificial Sequence
  Description of Artificial Sequence: Synthetic oligonucleotide
auuuugaggcggcgaucca

SEQ ID NO: 1862715 - RNA, 19 nt, Artificial Sequence
  Description of Artificial Sequence: Synthetic oligonucleotide
gguuaagaaguuaugguau

SEQ ID NO: 1862716 - RNA, 19 nt, Artificial Sequence
  Description of Artificial Sequence: Synthetic oligonucleotide
uacuaccuccaaacauguc

SEQ ID NO: 1862717 - RNA, 19 nt, Artificial Sequence
  Description of Artificial Sequence: Synthetic oligonucleotide
cagguuuccuaaauccaaa

SEQ ID NO: 1862718 - RNA, 19 nt, Artificial Sequence
  Description of Artificial Sequence: Synthetic oligonucleotide
gggacugaaacugcuccag

SEQ ID NO: 1862719 - RNA, 19 nt, Artificial Sequence
  Description of Artificial Sequence: Synthetic oligonucleotide
cugcucaucagagacaggu

SEQ ID NO: 1862720 - RNA, 19 nt, Artificial Sequence
  Description of Artificial Sequence: Synthetic oligonucleotide
gucccugauugcuuacuuc

SEQ ID NO: 1862721 - RNA, 19 nt, Artificial Sequence
  Description of Artificial Sequence: Synthetic oligonucleotide
agccguucuuuucuguauu

SEQ ID NO: 1862722 - RNA, 19 nt, Artificial Sequence
  Description of Artificial Sequence: Synthetic oligonucleotide
agcuuguuuuaaaacuaaa

SEQ ID NO: 1862723 - RNA, 19 nt, Artificial Sequence
  Description of Artificial Sequence: Synthetic oligonucleotide
aaacgcagacgugcuucca

SEQ ID NO: 1862724 - RNA, 19 nt, Artificial Sequence
  Description of Artificial Sequence: Synthetic oligonucleotide
gaugauucccaaaucucuu

SEQ ID NO: 1862725 - RNA, 19 nt, Artificial Sequence
  Description of Artificial Sequence: Synthetic oligonucleotide
gagcggaggaagcgauggc

SEQ ID NO: 1862726 - RNA, 19 nt, Artificial Sequence
  Description of Artificial Sequence: Synthetic oligonucleotide
gccauugcauggccaaaag

SEQ ID NO: 1862727 - RNA, 19 nt, Artificial Sequence
  Description of Artificial Sequence: Synthetic oligonucleotide
cagcaccaaaggcugggug

SEQ ID NO: 1862728 - RNA, 19 nt, Artificial Sequence
  Description of Artificial Sequence: Synthetic oligonucleotide
gcgauccaaagccucuugc

SEQ ID NO: 1862729 - RNA, 19 nt, Artificial Sequence
  Description of Artificial Sequence: Synthetic oligonucleotide
cuacuaccuccaaacaugu

SEQ ID NO: 1862730 - RNA, 19 nt, Artificial Sequence
  Description of Artificial Sequence: Synthetic oligonucleotide
ugggugugaacaguacauu

SEQ ID NO: 1862731 - RNA, 19 nt, Artificial Sequence
  Description of Artificial Sequence: Synthetic oligonucleotide
auggccaaaaggacucacu

SEQ ID NO: 1862732 - RNA, 19 nt, Artificial Sequence
  Description of Artificial Sequence: Synthetic oligonucleotide
auugccccgaugauuccca

SEQ ID NO: 1862733 - RNA, 19 nt, Artificial Sequence
  Description of Artificial Sequence: Synthetic oligonucleotide
ccaggacuaccaaaaccag

SEQ ID NO: 1862734 - RNA, 19 nt, Artificial Sequence
  Description of Artificial Sequence: Synthetic oligonucleotide
cagaacugccacuuccgaa

SEQ ID NO: 1862735 - RNA, 19 nt, Artificial Sequence
  Description of Artificial Sequence: Synthetic oligonucleotide
cuaccuccaaacaugucau

SEQ ID NO: 1862736 - RNA, 19 nt, Artificial Sequence
  Description of Artificial Sequence: Synthetic oligonucleotide
agccuggcuaaagccguuc

SEQ ID NO: 1862737 - RNA, 19 nt, Artificial Sequence
  Description of Artificial Sequence: Synthetic oligonucleotide
gggugugaacaguacauua

SEQ ID NO: 1862738 - RNA, 19 nt, Artificial Sequence
  Description of Artificial Sequence: Synthetic oligonucleotide
ggcuaaagccguucuuuuc

SEQ ID NO: 1862739 - RNA, 19 nt, Artificial Sequence
  Description of Artificial Sequence: Synthetic oligonucleotide
gcagagacggggagggagg

SEQ ID NO: 1862740 - RNA, 19 nt, Artificial Sequence
  Description of Artificial Sequence: Synthetic oligonucleotide
acaugucauuagaagguuu

SEQ ID NO: 1862741 - RNA, 19 nt, Artificial Sequence
  Description of Artificial Sequence: Synthetic oligonucleotide
cuccauccuuuauaucaga

SEQ ID NO: 1862742 - RNA, 19 nt, Artificial Sequence
  Description of Artificial Sequence: Synthetic oligonucleotide
auccauugccccgaugauu

SEQ ID NO: 1862743 - RNA, 19 nt, Artificial Sequence
  Description of Artificial Sequence: Synthetic oligonucleotide
caaggaagcuggaaacccu

SEQ ID NO: 1862744 - RNA, 19 nt, Artificial Sequence
  Description of Artificial Sequence: Synthetic oligonucleotide
agacgugcuuccagacggg

SEQ ID NO: 1862745 - RNA, 19 nt, Artificial Sequence
  Description of Artificial Sequence: Synthetic oligonucleotide
ugccaccccauagguguag

SEQ ID NO: 1862746 - RNA, 19 nt, Artificial Sequence
  Description of Artificial Sequence: Synthetic oligonucleotide
ccaaacgcagacgugcuuc

SEQ ID NO: 1862747 - RNA, 19 nt, Artificial Sequence
  Description of Artificial Sequence: Synthetic oligonucleotide
uugcucguggaaggcccag

SEQ ID NO: 1862748 - RNA, 19 nt, Artificial Sequence
  Description of Artificial Sequence: Synthetic oligonucleotide
caggugaagcaaaaggauu

SEQ ID NO: 1862749 - RNA, 19 nt, Artificial Sequence
  Description of Artificial Sequence: Synthetic oligonucleotide
ucucagccucccagacuac

SEQ ID NO: 1862750 - RNA, 19 nt, Artificial Sequence
  Description of Artificial Sequence: Synthetic oligonucleotide
ccagagucaaaagagccga

SEQ ID NO: 1862751 - RNA, 19 nt, Artificial Sequence
  Description of Artificial Sequence: Synthetic oligonucleotide
ugacuggcuccauccuuua

SEQ ID NO: 1862752 - RNA, 19 nt, Artificial Sequence
  Description of Artificial Sequence: Synthetic oligonucleotide
acaauuccuuccagaaguu

SEQ ID NO: 1862753 - RNA, 19 nt, Artificial Sequence
  Description of Artificial Sequence: Synthetic oligonucleotide
ggcgauccaaagccucuug

SEQ ID NO: 1862754 - RNA, 19 nt, Artificial Sequence
  Description of Artificial Sequence: Synthetic oligonucleotide
cagcugaucccugggugug

SEQ ID NO: 1862755 - RNA, 19 nt, Artificial Sequence
  Description of Artificial Sequence: Synthetic oligonucleotide
uaccuccaaacaugucauu

SEQ ID NO: 1862756 - RNA, 19 nt, Artificial Sequence
  Description of Artificial Sequence: Synthetic oligonucleotide
cuugcucguggaaggccca

SEQ ID NO: 1862757 - RNA, 19 nt, Artificial Sequence
  Description of Artificial Sequence: Synthetic oligonucleotide
uggcuccauccuuuauauc

SEQ ID NO: 1862758 - RNA, 19 nt, Artificial Sequence
  Description of Artificial Sequence: Synthetic oligonucleotide
ggacuaccaaaaccaggca

SEQ ID NO: 1862759 - RNA, 19 nt, Artificial Sequence
  Description of Artificial Sequence: Synthetic oligonucleotide
cugcuguuauucacuggaa

SEQ ID NO: 1862760 - RNA, 19 nt, Artificial Sequence
  Description of Artificial Sequence: Synthetic oligonucleotide
ugcucguggaaggcccaga

SEQ ID NO: 1862761 - RNA, 19 nt, Artificial Sequence
  Description of Artificial Sequence: Synthetic oligonucleotide
acucccaaacgcagacgug

SEQ ID NO: 1862762 - RNA, 19 nt, Artificial Sequence
  Description of Artificial Sequence: Synthetic oligonucleotide
gcuuacuuccaaauccaaa

SEQ ID NO: 1862763 - RNA, 19 nt, Artificial Sequence
  Description of Artificial Sequence: Synthetic oligonucleotide
agacggggcaguggaaaau

SEQ ID NO: 1862764 - RNA, 19 nt, Artificial Sequence
  Description of Artificial Sequence: Synthetic oligonucleotide
gguggcuucaaugggauuu

SEQ ID NO: 1862765 - RNA, 19 nt, Artificial Sequence
  Description of Artificial Sequence: Synthetic oligonucleotide
cugaucccugggugugaac

SEQ ID NO: 1862766 - RNA, 19 nt, Artificial Sequence
  Description of Artificial Sequence: Synthetic oligonucleotide
ggaaggcccagagucaaaa

SEQ ID NO: 1862767 - RNA, 19 nt, Artificial Sequence
  Description of Artificial Sequence: Synthetic oligonucleotide
acgcaccacaagccuggcu

SEQ ID NO: 1862768 - RNA, 19 nt, Artificial Sequence
  Description of Artificial Sequence: Synthetic oligonucleotide
ggugugaacaguacauuau

SEQ ID NO: 1862769 - RNA, 19 nt, Artificial Sequence
  Description of Artificial Sequence: Synthetic oligonucleotide
ccuauucuuccacuuacua

SEQ ID NO: 1862770 - RNA, 19 nt, Artificial Sequence
  Description of Artificial Sequence: Synthetic oligonucleotide
acuagcuguugaacagaau

SEQ ID NO: 1862771 - RNA, 19 nt, Artificial Sequence
  Description of Artificial Sequence: Synthetic oligonucleotide
cagagcuccuuugguugac

SEQ ID NO: 1862772 - RNA, 19 nt, Artificial Sequence
  Description of Artificial Sequence: Synthetic oligonucleotide
ccuuugguugacauauuua

SEQ ID NO: 1862773 - RNA, 19 nt, Artificial Sequence
  Description of Artificial Sequence: Synthetic oligonucleotide
cugugaaaccugaaauguu

SEQ ID NO: 1862774 - RNA, 19 nt, Artificial Sequence
  Description of Artificial Sequence: Synthetic oligonucleotide
ggcacgcaccacaagccug

SEQ ID NO: 1862775 - RNA, 19 nt, Artificial Sequence
  Description of Artificial Sequence: Synthetic oligonucleotide
ggugacucccaaacgcaga

SEQ ID NO: 1862776 - RNA, 19 nt, Artificial Sequence
  Description of Artificial Sequence: Synthetic oligonucleotide
ccaaaaggacucacugcca

SEQ ID NO: 1862777 - RNA, 19 nt, Artificial Sequence
  Description of Artificial Sequence: Synthetic oligonucleotide
gcagagcuccuuugguuga

SEQ ID NO: 1862778 - RNA, 19 nt, Artificial Sequence
  Description of Artificial Sequence: Synthetic oligonucleotide
cccgaugauucccaaaucu

SEQ ID NO: 1862779 - RNA, 19 nt, Artificial Sequence
  Description of Artificial Sequence: Synthetic oligonucleotide
ggauuuugaggcggcgauc

SEQ ID NO: 1862780 - RNA, 19 nt, Artificial Sequence
  Description of Artificial Sequence: Synthetic oligonucleotide
ugguggcuucaaugggauu

SEQ ID NO: 1862781 - RNA, 19 nt, Artificial Sequence
  Description of Artificial Sequence: Synthetic oligonucleotide
ccguucuuuucuguauuug

SEQ ID NO: 1862782 - RNA, 19 nt, Artificial Sequence
  Description of Artificial Sequence: Synthetic oligonucleotide
cuugacuggcuccauccuu

SEQ ID NO: 1862783 - RNA, 19 nt, Artificial Sequence
  Description of Artificial Sequence: Synthetic oligonucleotide
cauuauugcugcugcuguu

SEQ ID NO: 1862784 - RNA, 19 nt, Artificial Sequence
  Description of Artificial Sequence: Synthetic oligonucleotide
ccugaaaacccaggugauc

SEQ ID NO: 1862785 - RNA, 19 nt, Artificial Sequence
  Description of Artificial Sequence: Synthetic oligonucleotide
ccugauugcuuacuuccaa

SEQ ID NO: 1862786 - RNA, 19 nt, Artificial Sequence
  Description of Artificial Sequence: Synthetic oligonucleotide
aagcuggcccugaguuugu

SEQ ID NO: 1862787 - RNA, 19 nt, Artificial Sequence
  Description of Artificial Sequence: Synthetic oligonucleotide
agcugaucccuggguguga

SEQ ID NO: 1862788 - RNA, 19 nt, Artificial Sequence
  Description of Artificial Sequence: Synthetic oligonucleotide
cgaugauucccaaaucucu

SEQ ID NO: 1862789 - RNA, 19 nt, Artificial Sequence
  Description of Artificial Sequence: Synthetic oligonucleotide
caccccauagguguagacu

SEQ ID NO: 1862790 - RNA, 19 nt, Artificial Sequence
  Description of Artificial Sequence: Synthetic oligonucleotide
gucagggcucuugaacgaa

SEQ ID NO: 1862791 - RNA, 19 nt, Artificial Sequence
  Description of Artificial Sequence: Synthetic oligonucleotide
gccccgaugauucccaaau

SEQ ID NO: 1862792 - RNA, 19 nt, Artificial Sequence
  Description of Artificial Sequence: Synthetic oligonucleotide
cuguaaguuauugcugguu

SEQ ID NO: 1862793 - RNA, 19 nt, Artificial Sequence
  Description of Artificial Sequence: Synthetic oligonucleotide
guguagacuuggagaagcu

SEQ ID NO: 1862794 - RNA, 19 nt, Artificial Sequence
  Description of Artificial Sequence: Synthetic oligonucleotide
gcuggagcggaggaagcga

SEQ ID NO: 1862795 - RNA, 19 nt, Artificial Sequence
  Description of Artificial Sequence: Synthetic oligonucleotide
ccauugccccgaugauucc

SEQ ID NO: 1862796 - RNA, 19 nt, Artificial Sequence
  Description of Artificial Sequence: Synthetic oligonucleotide
cgcaccacaagccuggcua

SEQ ID NO: 1862797 - RNA, 19 nt, Artificial Sequence
  Description of Artificial Sequence: Synthetic oligonucleotide
cuggaagugucagggcucu

SEQ ID NO: 1862798 - RNA, 19 nt, Artificial Sequence
  Description of Artificial Sequence: Synthetic oligonucleotide
cagcagagcuccuuugguu

SEQ ID NO: 1862799 - RNA, 19 nt, Artificial Sequence
  Description of Artificial Sequence: Synthetic oligonucleotide
gacggggagggaggccgac

SEQ ID NO: 1862800 - RNA, 19 nt, Artificial Sequence
  Description of Artificial Sequence: Synthetic oligonucleotide
cugcugccaccccauaggu

SEQ ID NO: 1862801 - RNA, 19 nt, Artificial Sequence
  Description of Artificial Sequence: Synthetic oligonucleotide
ggcggcgauccaaagccuc

SEQ ID NO: 1862802 - RNA, 19 nt, Artificial Sequence
  Description of Artificial Sequence: Synthetic oligonucleotide
cauccauugccccgaugau

SEQ ID NO: 1862803 - RNA, 19 nt, Artificial Sequence
  Description of Artificial Sequence: Synthetic oligonucleotide
gacuggcuccauccuuuau

SEQ ID NO: 1862804 - RNA, 19 nt, Artificial Sequence
  Description of Artificial Sequence: Synthetic oligonucleotide
ccaaaucucuuacaucuuu

SEQ ID NO: 1862805 - RNA, 19 nt, Artificial Sequence
  Description of Artificial Sequence: Synthetic oligonucleotide
cucguggaaggcccagagu

SEQ ID NO: 1862806 - RNA, 19 nt, Artificial Sequence
  Description of Artificial Sequence: Synthetic oligonucleotide
aggcggcgauccaaagccu

SEQ ID NO: 1862807 - RNA, 19 nt, Artificial Sequence
  Description of Artificial Sequence: Synthetic oligonucleotide
ggugaagcaaaaggauuuu

SEQ ID NO: 1862808 - RNA, 19 nt, Artificial Sequence
  Description of Artificial Sequence: Synthetic oligonucleotide
ccccgaugauucccaaauc

SEQ ID NO: 1862809 - RNA, 19 nt, Artificial Sequence
  Description of Artificial Sequence: Synthetic oligonucleotide
ccgaaggcaggggccauug

SEQ ID NO: 1862810 - RNA, 19 nt, Artificial Sequence
  Description of Artificial Sequence: Synthetic oligonucleotide
agacggggagggaggccga

SEQ ID NO: 1862811 - RNA, 19 nt, Artificial Sequence
  Description of Artificial Sequence: Synthetic oligonucleotide
uggaagugucagggcucuu

SEQ ID NO: 1862812 - RNA, 19 nt, Artificial Sequence
  Description of Artificial Sequence: Synthetic oligonucleotide
ccugaaauguuaggcuucu

SEQ ID NO: 1862813 - RNA, 19 nt, Artificial Sequence
  Description of Artificial Sequence: Synthetic oligonucleotide
gcugaucccugggugugaa

SEQ ID NO: 1862814 - RNA, 19 nt, Artificial Sequence
  Description of Artificial Sequence: Synthetic oligonucleotide
cgaaaacgaagcagcagau

SEQ ID NO: 1862815 - RNA, 19 nt, Artificial Sequence
  Description of Artificial Sequence: Synthetic oligonucleotide
gggaggccgacaugcuacu

SEQ ID NO: 1862816 - RNA, 19 nt, Artificial Sequence
  Description of Artificial Sequence: Synthetic oligonucleotide
gcggcgauccaaagccucu

SEQ ID NO: 1862817 - RNA, 19 nt, Artificial Sequence
  Description of Artificial Sequence: Synthetic oligonucleotide
ggccgacaugcuacuaccu

SEQ ID NO: 1862818 - RNA, 19 nt, Artificial Sequence
  Description of Artificial Sequence: Synthetic oligonucleotide
gggccauugcauggccaaa

SEQ ID NO: 1862819 - RNA, 19 nt, Artificial Sequence
  Description of Artificial Sequence: Synthetic oligonucleotide
ggagggaggccgacaugcu

SEQ ID NO: 1862820 - RNA, 19 nt, Artificial Sequence
  Description of Artificial Sequence: Synthetic oligonucleotide
ccuggcuaaagccguucuu

SEQ ID NO: 1862821 - RNA, 19 nt, Artificial Sequence
  Description of Artificial Sequence: Synthetic oligonucleotide
cccagacuacaggcacgca

SEQ ID NO: 1862822 - RNA, 19 nt, Artificial Sequence
  Description of Artificial Sequence: Synthetic oligonucleotide
cccaaacgcagacgugcuu

SEQ ID NO: 1862823 - RNA, 19 nt, Artificial Sequence
  Description of Artificial Sequence: Synthetic oligonucleotide
cggcgauccaaagccucuu

SEQ ID NO: 1862824 - RNA, 19 nt, Artificial Sequence
  Description of Artificial Sequence: Synthetic oligonucleotide
aaugggagauuucaggacc

SEQ ID NO: 1862825 - RNA, 19 nt, Artificial Sequence
  Description of Artificial Sequence: Synthetic oligonucleotide
aauuccuguggccacagac

SEQ ID NO: 1862826 - RNA, 19 nt, Artificial Sequence
  Description of Artificial Sequence: Synthetic oligonucleotide
aacucauuccgauuccuac

SEQ ID NO: 1862827 - RNA, 19 nt, Artificial Sequence
  Description of Artificial Sequence: Synthetic oligonucleotide
cauucaaggacucaagacc

SEQ ID NO: 1862828 - RNA, 19 nt, Artificial Sequence
  Description of Artificial Sequence: Synthetic oligonucleotide
ucuuaauccauccuggaaa

SEQ ID NO: 1862829 - RNA, 19 nt, Artificial Sequence
  Description of Artificial Sequence: Synthetic oligonucleotide
agaccgucugucuuaaucc

SEQ ID NO: 1862830 - RNA, 19 nt, Artificial Sequence
  Description of Artificial Sequence: Synthetic oligonucleotide
acauucaaggacucaagac

SEQ ID NO: 1862831 - RNA, 19 nt, Artificial Sequence
  Description of Artificial Sequence: Synthetic oligonucleotide
gaugacucugucuacuccg

SEQ ID NO: 1862832 - RNA, 19 nt, Artificial Sequence
  Description of Artificial Sequence: Synthetic oligonucleotide
uuuuccaaccacaaugaca

SEQ ID NO: 1862833 - RNA, 19 nt, Artificial Sequence
  Description of Artificial Sequence: Synthetic oligonucleotide
aucaucgcaaagccgaggc

SEQ ID NO: 1862834 - RNA, 19 nt, Artificial Sequence
  Description of Artificial Sequence: Synthetic oligonucleotide
ucuacuccgaggaagugag

SEQ ID NO: 1862835 - RNA, 19 nt, Artificial Sequence
  Description of Artificial Sequence: Synthetic oligonucleotide
aggaaaugaccccaccucc

SEQ ID NO: 1862836 - RNA, 19 nt, Artificial Sequence
  Description of Artificial Sequence: Synthetic oligonucleotide
gauuucaggaccugggcag

SEQ ID NO: 1862837 - RNA, 19 nt, Artificial Sequence
  Description of Artificial Sequence: Synthetic oligonucleotide
aagcaacucaagucugugc

SEQ ID NO: 1862838 - RNA, 19 nt, Artificial Sequence
  Description of Artificial Sequence: Synthetic oligonucleotide
auuccggggauccuggagc

SEQ ID NO: 1862839 - RNA, 19 nt, Artificial Sequence
  Description of Artificial Sequence: Synthetic oligonucleotide
ucgaggacgagccacagcu

SEQ ID NO: 1862840 - RNA, 19 nt, Artificial Sequence
  Description of Artificial Sequence: Synthetic oligonucleotide
agccuuaccggccuggagc

SEQ ID NO: 1862841 - RNA, 19 nt, Artificial Sequence
  Description of Artificial Sequence: Synthetic oligonucleotide
auuccuacauacaagcaac

SEQ ID NO: 1862842 - RNA, 19 nt, Artificial Sequence
  Description of Artificial Sequence: Synthetic oligonucleotide
ucuaguuucugccgccugg

SEQ ID NO: 1862843 - RNA, 19 nt, Artificial Sequence
  Description of Artificial Sequence: Synthetic oligonucleotide
agacguggcgaacacgucc

SEQ ID NO: 1862844 - RNA, 19 nt, Artificial Sequence
  Description of Artificial Sequence: Synthetic oligonucleotide
ucccagaugaacucuaggc

SEQ ID NO: 1862845 - RNA, 19 nt, Artificial Sequence
  Description of Artificial Sequence: Synthetic oligonucleotide
ugagggucgauguacaacu

SEQ ID NO: 1862846 - RNA, 19 nt, Artificial Sequence
  Description of Artificial Sequence: Synthetic oligonucleotide
aggacucaagaccaggagg

SEQ ID NO: 1862847 - RNA, 19 nt, Artificial Sequence
  Description of Artificial Sequence: Synthetic oligonucleotide
ucagacguggcgaacacgu

SEQ ID NO: 1862848 - RNA, 19 nt, Artificial Sequence
  Description of Artificial Sequence: Synthetic oligonucleotide
aaauccggcuaagucagac

SEQ ID NO: 1862849 - RNA, 19 nt, Artificial Sequence
  Description of Artificial Sequence: Synthetic oligonucleotide
uggaaaugagcaaacuaac

SEQ ID NO: 1862850 - RNA, 19 nt, Artificial Sequence
  Description of Artificial Sequence: Synthetic oligonucleotide
ucuggcugcaaauggagug

SEQ ID NO: 1862851 - RNA, 19 nt, Artificial Sequence
  Description of Artificial Sequence: Synthetic oligonucleotide
cuaacccuuuuccaaaagg

SEQ ID NO: 1862852 - RNA, 19 nt, Artificial Sequence
  Description of Artificial Sequence: Synthetic oligonucleotide
uaauccauccuggaaauga

SEQ ID NO: 1862853 - RNA, 19 nt, Artificial Sequence
  Description of Artificial Sequence: Synthetic oligonucleotide
aauccggcuaagucagacg

SEQ ID NO: 1862854 - RNA, 19 nt, Artificial Sequence
  Description of Artificial Sequence: Synthetic oligonucleotide
cauuccgauuccuacauac

SEQ ID NO: 1862855 - RNA, 19 nt, Artificial Sequence
  Description of Artificial Sequence: Synthetic oligonucleotide
aaguuguccuuucuccguc

SEQ ID NO: 1862856 - RNA, 19 nt, Artificial Sequence
  Description of Artificial Sequence: Synthetic oligonucleotide
guaaggagcagcuggcagg

SEQ ID NO: 1862857 - RNA, 19 nt, Artificial Sequence
  Description of Artificial Sequence: Synthetic oligonucleotide
ucgauguacaacucauucc

SEQ ID NO: 1862858 - RNA, 19 nt, Artificial Sequence
  Description of Artificial Sequence: Synthetic oligonucleotide
uacuccgaggaagugagcg

SEQ ID NO: 1862859 - RNA, 19 nt, Artificial Sequence
  Description of Artificial Sequence: Synthetic oligonucleotide
acauacaagcaacucaagu

SEQ ID NO: 1862860 - RNA, 19 nt, Artificial Sequence
  Description of Artificial Sequence: Synthetic oligonucleotide
ucugaguccuuccgcauag

SEQ ID NO: 1862861 - RNA, 19 nt, Artificial Sequence
  Description of Artificial Sequence: Synthetic oligonucleotide
uccgauuccuacauacaag

SEQ ID NO: 1862862 - RNA, 19 nt, Artificial Sequence
  Description of Artificial Sequence: Synthetic oligonucleotide
cuaaagguucucaaguguc

SEQ ID NO: 1862863 - RNA, 19 nt, Artificial Sequence
  Description of Artificial Sequence: Synthetic oligonucleotide
gaacagacguuccagccgc

SEQ ID NO: 1862864 - RNA, 19 nt, Artificial Sequence
  Description of Artificial Sequence: Synthetic oligonucleotide
agcgggcucaccuccaugc

SEQ ID NO: 1862865 - RNA, 19 nt, Artificial Sequence
  Description of Artificial Sequence: Synthetic oligonucleotide
ucugucuacuccgaggaag

SEQ ID NO: 1862866 - RNA, 19 nt, Artificial Sequence
  Description of Artificial Sequence: Synthetic oligonucleotide
acauucaagccugaggguc

SEQ ID NO: 1862867 - RNA, 19 nt, Artificial Sequence
  Description of Artificial Sequence: Synthetic oligonucleotide
aguccuuccgcauagcuaa

SEQ ID NO: 1862868 - RNA, 19 nt, Artificial Sequence
  Description of Artificial Sequence: Synthetic oligonucleotide
uggaguguagaagaauucc

SEQ ID NO: 1862869 - RNA, 19 nt, Artificial Sequence
  Description of Artificial Sequence: Synthetic oligonucleotide
cuccacuacaaacaucucc

SEQ ID NO: 1862870 - RNA, 19 nt, Artificial Sequence
  Description of Artificial Sequence: Synthetic oligonucleotide
cucaucaucgcaaagccga

SEQ ID NO: 1862871 - RNA, 19 nt, Artificial Sequence
  Description of Artificial Sequence: Synthetic oligonucleotide
aacucuaggcagcuaguga

SEQ ID NO: 1862872 - RNA, 19 nt, Artificial Sequence
  Description of Artificial Sequence: Synthetic oligonucleotide
uccgcauagcuaaagguuc

SEQ ID NO: 1862873 - RNA, 19 nt, Artificial Sequence
  Description of Artificial Sequence: Synthetic oligonucleotide
aggagaguaggccgguccc

SEQ ID NO: 1862874 - RNA, 19 nt, Artificial Sequence
  Description of Artificial Sequence: Synthetic oligonucleotide
uuccgauuccuacauacaa

SEQ ID NO: 1862875 - RNA, 19 nt, Artificial Sequence
  Description of Artificial Sequence: Synthetic oligonucleotide
acaaugacaguccugggua

SEQ ID NO: 1862876 - RNA, 19 nt, Artificial Sequence
  Description of Artificial Sequence: Synthetic oligonucleotide
agaaccuccugggauagac

SEQ ID NO: 1862877 - RNA, 19 nt, Artificial Sequence
  Description of Artificial Sequence: Synthetic oligonucleotide
agcuaaagguucucaagug

SEQ ID NO: 1862878 - RNA, 19 nt, Artificial Sequence
  Description of Artificial Sequence: Synthetic oligonucleotide
cuagugauggggaccuugg

SEQ ID NO: 1862879 - RNA, 19 nt, Artificial Sequence
  Description of Artificial Sequence: Synthetic oligonucleotide
gaaugggagauuucaggac

SEQ ID NO: 1862880 - RNA, 19 nt, Artificial Sequence
  Description of Artificial Sequence: Synthetic oligonucleotide
ugaugacucugucuacucc

SEQ ID NO: 1862881 - RNA, 19 nt, Artificial Sequence
  Description of Artificial Sequence: Synthetic oligonucleotide
cuacauacaagcaacucaa

SEQ ID NO: 1862882 - RNA, 19 nt, Artificial Sequence
  Description of Artificial Sequence: Synthetic oligonucleotide
agauuucaggaccugggca

SEQ ID NO: 1862883 - RNA, 19 nt, Artificial Sequence
  Description of Artificial Sequence: Synthetic oligonucleotide
gagauuucaggaccugggc

SEQ ID NO: 1862884 - RNA, 19 nt, Artificial Sequence
  Description of Artificial Sequence: Synthetic oligonucleotide
ucaaggacucaagaccagg

SEQ ID NO: 1862885 - RNA, 19 nt, Artificial Sequence
  Description of Artificial Sequence: Synthetic oligonucleotide
caucgcaaagccgaggccg

SEQ ID NO: 1862886 - RNA, 19 nt, Artificial Sequence
  Description of Artificial Sequence: Synthetic oligonucleotide
acuggaguaagcgggcagc

SEQ ID NO: 1862887 - RNA, 19 nt, Artificial Sequence
  Description of Artificial Sequence: Synthetic oligonucleotide
cacaaggagaguaggccgg

SEQ ID NO: 1862888 - RNA, 19 nt, Artificial Sequence
  Description of Artificial Sequence: Synthetic oligonucleotide
aaaugaccccaccucccag

SEQ ID NO: 1862889 - RNA, 19 nt, Artificial Sequence
  Description of Artificial Sequence: Synthetic oligonucleotide
guucucaagugucuuggag

SEQ ID NO: 1862890 - RNA, 19 nt, Artificial Sequence
  Description of Artificial Sequence: Synthetic oligonucleotide
uacaacucauuccgauucc

SEQ ID NO: 1862891 - RNA, 19 nt, Artificial Sequence
  Description of Artificial Sequence: Synthetic oligonucleotide
gagaccgucugucuuaauc

SEQ ID NO: 1862892 - RNA, 19 nt, Artificial Sequence
  Description of Artificial Sequence: Synthetic oligonucleotide
uacauacaagcaacucaag

SEQ ID NO: 1862893 - RNA, 19 nt, Artificial Sequence
  Description of Artificial Sequence: Synthetic oligonucleotide
uuccgcauagcuaaagguu

SEQ ID NO: 1862894 - RNA, 19 nt, Artificial Sequence
  Description of Artificial Sequence: Synthetic oligonucleotide
gcaacauucaagccugagg

SEQ ID NO: 1862895 - RNA, 19 nt, Artificial Sequence
  Description of Artificial Sequence: Synthetic oligonucleotide
ucauugcccagcacaagga

SEQ ID NO: 1862896 - RNA, 19 nt, Artificial Sequence
  Description of Artificial Sequence: Synthetic oligonucleotide
gaggacgagccacagcugc

SEQ ID NO: 1862897 - RNA, 19 nt, Artificial Sequence
  Description of Artificial Sequence: Synthetic oligonucleotide
auccggcuaagucagacgu

SEQ ID NO: 1862898 - RNA, 19 nt, Artificial Sequence
  Description of Artificial Sequence: Synthetic oligonucleotide
uacugggccucucugaguc

SEQ ID NO: 1862899 - RNA, 19 nt, Artificial Sequence
  Description of Artificial Sequence: Synthetic oligonucleotide
cgauguacaacucauuccg

SEQ ID NO: 1862900 - RNA, 19 nt, Artificial Sequence
  Description of Artificial Sequence: Synthetic oligonucleotide
uuucuccgucuguacaggg

SEQ ID NO: 1862901 - RNA, 19 nt, Artificial Sequence
  Description of Artificial Sequence: Synthetic oligonucleotide
ucuccgucuguacagggaa

SEQ ID NO: 1862902 - RNA, 19 nt, Artificial Sequence
  Description of Artificial Sequence: Synthetic oligonucleotide
acccggagcagcucggccc

SEQ ID NO: 1862903 - RNA, 19 nt, Artificial Sequence
  Description of Artificial Sequence: Synthetic oligonucleotide
aacuaacccuuuuccaaaa

SEQ ID NO: 1862904 - RNA, 19 nt, Artificial Sequence
  Description of Artificial Sequence: Synthetic oligonucleotide
uccaaccacaaugacaguc

SEQ ID NO: 1862905 - RNA, 19 nt, Artificial Sequence
  Description of Artificial Sequence: Synthetic oligonucleotide
ucaucaucgcaaagccgag

SEQ ID NO: 1862906 - RNA, 19 nt, Artificial Sequence
  Description of Artificial Sequence: Synthetic oligonucleotide
uucaaggacucaagaccag

SEQ ID NO: 1862907 - RNA, 19 nt, Artificial Sequence
  Description of Artificial Sequence: Synthetic oligonucleotide
ucugugccagcccacauuu

SEQ ID NO: 1862908 - RNA, 19 nt, Artificial Sequence
  Description of Artificial Sequence: Synthetic oligonucleotide
uccuuucuccgucuguaca

SEQ ID NO: 1862909 - RNA, 19 nt, Artificial Sequence
  Description of Artificial Sequence: Synthetic oligonucleotide
aggacagagaccgucuguc

SEQ ID NO: 1862910 - RNA, 19 nt, Artificial Sequence
  Description of Artificial Sequence: Synthetic oligonucleotide
acuaacccuuuuccaaaag

SEQ ID NO: 1862911 - RNA, 19 nt, Artificial Sequence
  Description of Artificial Sequence: Synthetic oligonucleotide
ugaguccuuccgcauagcu

SEQ ID NO: 1862912 - RNA, 19 nt, Artificial Sequence
  Description of Artificial Sequence: Synthetic oligonucleotide
agucagacguggcgaacac

SEQ ID NO: 1862913 - RNA, 19 nt, Artificial Sequence
  Description of Artificial Sequence: Synthetic oligonucleotide
aaagccgaggccgcagcgg

SEQ ID NO: 1862914 - RNA, 19 nt, Artificial Sequence
  Description of Artificial Sequence: Synthetic oligonucleotide
gaggcacggggacaggccg

SEQ ID NO: 1862915 - RNA, 19 nt, Artificial Sequence
  Description of Artificial Sequence: Synthetic oligonucleotide
gauuccggggauccuggag

SEQ ID NO: 1862916 - RNA, 19 nt, Artificial Sequence
  Description of Artificial Sequence: Synthetic oligonucleotide
acuccgaggaagugagcgg

SEQ ID NO: 1862917 - RNA, 19 nt, Artificial Sequence
  Description of Artificial Sequence: Synthetic oligonucleotide
gagcccagcaacauucaag

SEQ ID NO: 1862918 - RNA, 19 nt, Artificial Sequence
  Description of Artificial Sequence: Synthetic oligonucleotide
uuccuacauacaagcaacu

SEQ ID NO: 1862919 - RNA, 19 nt, Artificial Sequence
  Description of Artificial Sequence: Synthetic oligonucleotide
gcacaaggagaguaggccg

SEQ ID NO: 1862920 - RNA, 19 nt, Artificial Sequence
  Description of Artificial Sequence: Synthetic oligonucleotide
ggaaaugagcaaacuaacc

SEQ ID NO: 1862921 - RNA, 19 nt, Artificial Sequence
  Description of Artificial Sequence: Synthetic oligonucleotide
ucggcggcaggucauccag

SEQ ID NO: 1862922 - RNA, 19 nt, Artificial Sequence
  Description of Artificial Sequence: Synthetic oligonucleotide
uaagcgggcagcuguuucu

SEQ ID NO: 1862923 - RNA, 19 nt, Artificial Sequence
  Description of Artificial Sequence: Synthetic oligonucleotide
auggaguguagaagaauuc

SEQ ID NO: 1862924 - RNA, 19 nt, Artificial Sequence
  Description of Artificial Sequence: Synthetic oligonucleotide
aagugagcggagcgcagca

SEQ ID NO: 1862925 - RNA, 19 nt, Artificial Sequence
  Description of Artificial Sequence: Synthetic oligonucleotide
gaaaugaccccaccuccca

SEQ ID NO: 1862926 - RNA, 19 nt, Artificial Sequence
  Description of Artificial Sequence: Synthetic oligonucleotide
ugccagcccacauuuggcc

SEQ ID NO: 1862927 - RNA, 19 nt, Artificial Sequence
  Description of Artificial Sequence: Synthetic oligonucleotide
ugacgccugggcagaauag

SEQ ID NO: 1862928 - RNA, 19 nt, Artificial Sequence
  Description of Artificial Sequence: Synthetic oligonucleotide
ggcuaagucagacguggcg

SEQ ID NO: 1862929 - RNA, 19 nt, Artificial Sequence
  Description of Artificial Sequence: Synthetic oligonucleotide
ucaucgcaaagccgaggcc

SEQ ID NO: 1862930 - RNA, 19 nt, Artificial Sequence
  Description of Artificial Sequence: Synthetic oligonucleotide
agccugagggucgauguac

SEQ ID NO: 1862931 - RNA, 19 nt, Artificial Sequence
  Description of Artificial Sequence: Synthetic oligonucleotide
ggacucaagaccaggaggc

SEQ ID NO: 1862932 - RNA, 19 nt, Artificial Sequence
  Description of Artificial Sequence: Synthetic oligonucleotide
gaacucuaggcagcuagug

SEQ ID NO: 1862933 - RNA, 19 nt, Artificial Sequence
  Description of Artificial Sequence: Synthetic oligonucleotide
uucuccgucuguacaggga

SEQ ID NO: 1862934 - RNA, 19 nt, Artificial Sequence
  Description of Artificial Sequence: Synthetic oligonucleotide
gaauaguaaggagcagcug

SEQ ID NO: 1862935 - RNA, 19 nt, Artificial Sequence
  Description of Artificial Sequence: Synthetic oligonucleotide
agcacagccccuagauucc

SEQ ID NO: 1862936 - RNA, 19 nt, Artificial Sequence
  Description of Artificial Sequence: Synthetic oligonucleotide
aggacagggaugccccgcg

SEQ ID NO: 1862937 - RNA, 19 nt, Artificial Sequence
  Description of Artificial Sequence: Synthetic oligonucleotide
agccccucgaggacgagcc

SEQ ID NO: 1862938 - RNA, 19 nt, Artificial Sequence
  Description of Artificial Sequence: Synthetic oligonucleotide
cauagcuaaagguucucaa

SEQ ID NO: 1862939 - RNA, 19 nt, Artificial Sequence
  Description of Artificial Sequence: Synthetic oligonucleotide
gucccagaugaacucuagg

SEQ ID NO: 1862940 - RNA, 19 nt, Artificial Sequence
  Description of Artificial Sequence: Synthetic oligonucleotide
cuagauuccggggauccug

SEQ ID NO: 1862941 - RNA, 19 nt, Artificial Sequence
  Description of Artificial Sequence: Synthetic oligonucleotide
cagcacaaggagaguaggc

SEQ ID NO: 1862942 - RNA, 19 nt, Artificial Sequence
  Description of Artificial Sequence: Synthetic oligonucleotide
agggucgauguacaacuca

SEQ ID NO: 1862943 - RNA, 19 nt, Artificial Sequence
  Description of Artificial Sequence: Synthetic oligonucleotide
cuuaccggccuggagcagg

SEQ ID NO: 1862944 - RNA, 19 nt, Artificial Sequence
  Description of Artificial Sequence: Synthetic oligonucleotide
ucuccugaaugcagccagc

SEQ ID NO: 1862945 - RNA, 19 nt, Artificial Sequence
  Description of Artificial Sequence: Synthetic oligonucleotide
cacgagccagcccugcugg

SEQ ID NO: 1862946 - RNA, 19 nt, Artificial Sequence
  Description of Artificial Sequence: Synthetic oligonucleotide
agggucgucgcccgggcuc

SEQ ID NO: 1862947 - RNA, 19 nt, Artificial Sequence
  Description of Artificial Sequence: Synthetic oligonucleotide
cagacguuccagccgcugg

SEQ ID NO: 1862948 - RNA, 19 nt, Artificial Sequence
  Description of Artificial Sequence: Synthetic oligonucleotide
accacuggaguaagcgggc

SEQ ID NO: 1862949 - RNA, 19 nt, Artificial Sequence
  Description of Artificial Sequence: Synthetic oligonucleotide
gacagggaugccccgcgcc

SEQ ID NO: 1862950 - RNA, 19 nt, Artificial Sequence
  Description of Artificial Sequence: Synthetic oligonucleotide
cacauucaaggacucaaga

SEQ ID NO: 1862951 - RNA, 19 nt, Artificial Sequence
  Description of Artificial Sequence: Synthetic oligonucleotide
acaggccgaacagacguuc

SEQ ID NO: 1862952 - RNA, 19 nt, Artificial Sequence
  Description of Artificial Sequence: Synthetic oligonucleotide
gaccccaccucccagucuc

SEQ ID NO: 1862953 - RNA, 19 nt, Artificial Sequence
  Description of Artificial Sequence: Synthetic oligonucleotide
ucaggacagggaugccccg

SEQ ID NO: 1862954 - RNA, 19 nt, Artificial Sequence
  Description of Artificial Sequence: Synthetic oligonucleotide
caaugacaguccuggguac

SEQ ID NO: 1862955 - RNA, 19 nt, Artificial Sequence
  Description of Artificial Sequence: Synthetic oligonucleotide
uuaauccauccuggaaaug

SEQ ID NO: 1862956 - RNA, 19 nt, Artificial Sequence
  Description of Artificial Sequence: Synthetic oligonucleotide
auccuggaaaugagcaaac

SEQ ID NO: 1862957 - RNA, 19 nt, Artificial Sequence
  Description of Artificial Sequence: Synthetic oligonucleotide
aucgcaaagccgaggccgc

SEQ ID NO: 1862958 - RNA, 19 nt, Artificial Sequence
  Description of Artificial Sequence: Synthetic oligonucleotide
uuccggggauccuggagcc

SEQ ID NO: 1862959 - RNA, 19 nt, Artificial Sequence
  Description of Artificial Sequence: Synthetic oligonucleotide
agccccuagauuccgggga

SEQ ID NO: 1862960 - RNA, 19 nt, Artificial Sequence
  Description of Artificial Sequence: Synthetic oligonucleotide
cuugcugaccacuggagua

SEQ ID NO: 1862961 - RNA, 19 nt, Artificial Sequence
  Description of Artificial Sequence: Synthetic oligonucleotide
caaggacucaagaccagga

SEQ ID NO: 1862962 - RNA, 19 nt, Artificial Sequence
  Description of Artificial Sequence: Synthetic oligonucleotide
guaggccggucccagauga

SEQ ID NO: 1862963 - RNA, 19 nt, Artificial Sequence
  Description of Artificial Sequence: Synthetic oligonucleotide
uccgaggaagugagcggag

SEQ ID NO: 1862964 - RNA, 19 nt, Artificial Sequence
  Description of Artificial Sequence: Synthetic oligonucleotide
ccuacauacaagcaacuca

SEQ ID NO: 1862965 - RNA, 19 nt, Artificial Sequence
  Description of Artificial Sequence: Synthetic oligonucleotide
uccgucuguacagggaaac

SEQ ID NO: 1862966 - RNA, 19 nt, Artificial Sequence
  Description of Artificial Sequence: Synthetic oligonucleotide
acagagaccgucugucuua

SEQ ID NO: 1862967 - RNA, 19 nt, Artificial Sequence
  Description of Artificial Sequence: Synthetic oligonucleotide
cucuaggcagcuagugaug

SEQ ID NO: 1862968 - RNA, 19 nt, Artificial Sequence
  Description of Artificial Sequence: Synthetic oligonucleotide
gaaguuguccuuucuccgu

SEQ ID NO: 1862969 - RNA, 19 nt, Artificial Sequence
  Description of Artificial Sequence: Synthetic oligonucleotide
uggcaggaggcaagaaccu

SEQ ID NO: 1862970 - RNA, 19 nt, Artificial Sequence
  Description of Artificial Sequence: Synthetic oligonucleotide
cucaagucugugccagccc

SEQ ID NO: 1862971 - RNA, 19 nt, Artificial Sequence
  Description of Artificial Sequence: Synthetic oligonucleotide
uccggcuaagucagacgug

SEQ ID NO: 1862972 - RNA, 19 nt, Artificial Sequence
  Description of Artificial Sequence: Synthetic oligonucleotide
gcaaacuaacccuuuucca

SEQ ID NO: 1862973 - RNA, 19 nt, Artificial Sequence
  Description of Artificial Sequence: Synthetic oligonucleotide
caagaaccuccugggauag

SEQ ID NO: 1862974 - RNA, 19 nt, Artificial Sequence
  Description of Artificial Sequence: Synthetic oligonucleotide
uggguucggcggcagguca

SEQ ID NO: 1862975 - RNA, 19 nt, Artificial Sequence
  Description of Artificial Sequence: Synthetic oligonucleotide
ggagaaguuguccuuucuc

SEQ ID NO: 1862976 - RNA, 19 nt, Artificial Sequence
  Description of Artificial Sequence: Synthetic oligonucleotide
aucuaguuucugccgccug

SEQ ID NO: 1862977 - RNA, 19 nt, Artificial Sequence
  Description of Artificial Sequence: Synthetic oligonucleotide
ugaaugcagccagcaaaca

SEQ ID NO: 1862978 - RNA, 19 nt, Artificial Sequence
  Description of Artificial Sequence: Synthetic oligonucleotide
caaauggaguguagaagaa

SEQ ID NO: 1862979 - RNA, 19 nt, Artificial Sequence
  Description of Artificial Sequence: Synthetic oligonucleotide
uccuuccgcauagcuaaag

SEQ ID NO: 1862980 - RNA, 19 nt, Artificial Sequence
  Description of Artificial Sequence: Synthetic oligonucleotide
cugagggucgauguacaac

SEQ ID NO: 1862981 - RNA, 19 nt, Artificial Sequence
  Description of Artificial Sequence: Synthetic oligonucleotide
gccugggcagaauaguaag

SEQ ID NO: 1862982 - RNA, 19 nt, Artificial Sequence
  Description of Artificial Sequence: Synthetic oligonucleotide
uaguaaggagcagcuggca

SEQ ID NO: 1862983 - RNA, 19 nt, Artificial Sequence
  Description of Artificial Sequence: Synthetic oligonucleotide
caucaucgcaaagccgagg

SEQ ID NO: 1862984 - RNA, 19 nt, Artificial Sequence
  Description of Artificial Sequence: Synthetic oligonucleotide
acaacucauuccgauuccu

SEQ ID NO: 1862985 - RNA, 19 nt, Artificial Sequence
  Description of Artificial Sequence: Synthetic oligonucleotide
uuaccggccuggagcagga

SEQ ID NO: 1862986 - RNA, 19 nt, Artificial Sequence
  Description of Artificial Sequence: Synthetic oligonucleotide
cuuaauccauccuggaaau

SEQ ID NO: 1862987 - RNA, 19 nt, Artificial Sequence
  Description of Artificial Sequence: Synthetic oligonucleotide
ugccgccucaucaucgcaa

SEQ ID NO: 1862988 - RNA, 19 nt, Artificial Sequence
  Description of Artificial Sequence: Synthetic oligonucleotide
ugagggucgucgcccgggc

SEQ ID NO: 1862989 - RNA, 19 nt, Artificial Sequence
  Description of Artificial Sequence: Synthetic oligonucleotide
acagggaugccccgcgccu

SEQ ID NO: 1862990 - RNA, 19 nt, Artificial Sequence
  Description of Artificial Sequence: Synthetic oligonucleotide
aguaggccggucccagaug

SEQ ID NO: 1862991 - RNA, 19 nt, Artificial Sequence
  Description of Artificial Sequence: Synthetic oligonucleotide
augcagacgcccuggugca

SEQ ID NO: 1862992 - RNA, 19 nt, Artificial Sequence
  Description of Artificial Sequence: Synthetic oligonucleotide
agcgcuggccuugcugacc

SEQ ID NO: 1862993 - RNA, 19 nt, Artificial Sequence
  Description of Artificial Sequence: Synthetic oligonucleotide
guaagcgggcagcuguuuc

SEQ ID NO: 1862994 - RNA, 19 nt, Artificial Sequence
  Description of Artificial Sequence: Synthetic oligonucleotide
cacuggaguaagcgggcag

SEQ ID NO: 1862995 - RNA, 19 nt, Artificial Sequence
  Description of Artificial Sequence: Synthetic oligonucleotide
agggaugccccgcgccucg

SEQ ID NO: 1862996 - RNA, 19 nt, Artificial Sequence
  Description of Artificial Sequence: Synthetic oligonucleotide
ccuuccgcauagcuaaagg

SEQ ID NO: 1862997 - RNA, 19 nt, Artificial Sequence
  Description of Artificial Sequence: Synthetic oligonucleotide
agucuccacuacaaacauc

SEQ ID NO: 1862998 - RNA, 19 nt, Artificial Sequence
  Description of Artificial Sequence: Synthetic oligonucleotide
ucuccggcuggugaugacu

SEQ ID NO: 1862999 - RNA, 19 nt, Artificial Sequence
  Description of Artificial Sequence: Synthetic oligonucleotide
gggaccuugguggaauggg

SEQ ID NO: 1863000 - RNA, 19 nt, Artificial Sequence
  Description of Artificial Sequence: Synthetic oligonucleotide
cuaagucagacguggcgaa

SEQ ID NO: 1863001 - RNA, 19 nt, Artificial Sequence
  Description of Artificial Sequence: Synthetic oligonucleotide
ggccgcacaaggcaucuag

SEQ ID NO: 1863002 - RNA, 19 nt, Artificial Sequence
  Description of Artificial Sequence: Synthetic oligonucleotide
ccgaacagacguuccagcc

SEQ ID NO: 1863003 - RNA, 19 nt, Artificial Sequence
  Description of Artificial Sequence: Synthetic oligonucleotide
gacguggcgaacacgucca

SEQ ID NO: 1863004 - RNA, 19 nt, Artificial Sequence
  Description of Artificial Sequence: Synthetic oligonucleotide
auuccgauuccuacauaca

SEQ ID NO: 1863005 - RNA, 19 nt, Artificial Sequence
  Description of Artificial Sequence: Synthetic oligonucleotide
cuuccgcauagcuaaaggu

SEQ ID NO: 1863006 - RNA, 19 nt, Artificial Sequence
  Description of Artificial Sequence: Synthetic oligonucleotide
caggccgaacagacguucc

SEQ ID NO: 1863007 - RNA, 19 nt, Artificial Sequence
  Description of Artificial Sequence: Synthetic oligonucleotide
gggagauuucaggaccugg

SEQ ID NO: 1863008 - RNA, 19 nt, Artificial Sequence
  Description of Artificial Sequence: Synthetic oligonucleotide
uaagucagacguggcgaac

SEQ ID NO: 1863009 - RNA, 19 nt, Artificial Sequence
  Description of Artificial Sequence: Synthetic oligonucleotide
ggcgaacacguccaucacc

SEQ ID NO: 1863010 - RNA, 19 nt, Artificial Sequence
  Description of Artificial Sequence: Synthetic oligonucleotide
agugagcggagcgcagcac

SEQ ID NO: 1863011 - RNA, 19 nt, Artificial Sequence
  Description of Artificial Sequence: Synthetic oligonucleotide
ugucuacuccgaggaagug

SEQ ID NO: 1863012 - RNA, 19 nt, Artificial Sequence
  Description of Artificial Sequence: Synthetic oligonucleotide
cuccggcuggugaugacuc

SEQ ID NO: 1863013 - RNA, 19 nt, Artificial Sequence
  Description of Artificial Sequence: Synthetic oligonucleotide
cuccaugcagacgcccugg

SEQ ID NO: 1863014 - RNA, 19 nt, Artificial Sequence
  Description of Artificial Sequence: Synthetic oligonucleotide
gcuaagucagacguggcga

SEQ ID NO: 1863015 - RNA, 19 nt, Artificial Sequence
  Description of Artificial Sequence: Synthetic oligonucleotide
uccaugcagacgcccuggu

SEQ ID NO: 1863016 - RNA, 19 nt, Artificial Sequence
  Description of Artificial Sequence: Synthetic oligonucleotide
gcaggaggcaagaaccucc

SEQ ID NO: 1863017 - RNA, 19 nt, Artificial Sequence
  Description of Artificial Sequence: Synthetic oligonucleotide
gucuacuccgaggaaguga

SEQ ID NO: 1863018 - RNA, 19 nt, Artificial Sequence
  Description of Artificial Sequence: Synthetic oligonucleotide
cagccccuagauuccgggg

SEQ ID NO: 1863019 - RNA, 19 nt, Artificial Sequence
  Description of Artificial Sequence: Synthetic oligonucleotide
cugguggccgcacaaggca

SEQ ID NO: 1863020 - RNA, 19 nt, Artificial Sequence
  Description of Artificial Sequence: Synthetic oligonucleotide
gugagcggagcgcagcaca

SEQ ID NO: 1863021 - RNA, 19 nt, Artificial Sequence
  Description of Artificial Sequence: Synthetic oligonucleotide
aggccgaacagacguucca

SEQ ID NO: 1863022 - RNA, 19 nt, Artificial Sequence
  Description of Artificial Sequence: Synthetic oligonucleotide
cacaaugacaguccugggu

SEQ ID NO: 1863023 - RNA, 19 nt, Artificial Sequence
  Description of Artificial Sequence: Synthetic oligonucleotide
gucagacguggcgaacacg

SEQ ID NO: 1863024 - RNA, 19 nt, Artificial Sequence
  Description of Artificial Sequence: Synthetic oligonucleotide
ccggcuaagucagacgugg

SEQ ID NO: 1863025 - RNA, 19 nt, Artificial Sequence
  Description of Artificial Sequence: Synthetic oligonucleotide
ucauuccgauuccuacaua

SEQ ID NO: 1863026 - RNA, 19 nt, Artificial Sequence
  Description of Artificial Sequence: Synthetic oligonucleotide
cacagccccuagauuccgg

SEQ ID NO: 1863027 - RNA, 19 nt, Artificial Sequence
  Description of Artificial Sequence: Synthetic oligonucleotide
uggaguaagcgggcagcug

SEQ ID NO: 1863028 - RNA, 19 nt, Artificial Sequence
  Description of Artificial Sequence: Synthetic oligonucleotide
augggagauuucaggaccu

SEQ ID NO: 1863029 - RNA, 19 nt, Artificial Sequence
  Description of Artificial Sequence: Synthetic oligonucleotide
cgaacagacguuccagccg

SEQ ID NO: 1863030 - RNA, 19 nt, Artificial Sequence
  Description of Artificial Sequence: Synthetic oligonucleotide
ugguggccgcacaaggcau

SEQ ID NO: 1863031 - RNA, 19 nt, Artificial Sequence
  Description of Artificial Sequence: Synthetic oligonucleotide
ugggagauuucaggaccug

SEQ ID NO: 1863032 - RNA, 19 nt, Artificial Sequence
  Description of Artificial Sequence: Synthetic oligonucleotide
agagcccagcaacauucaa

SEQ ID NO: 1863033 - RNA, 19 nt, Artificial Sequence
  Description of Artificial Sequence: Synthetic oligonucleotide
gcuaaagguucucaagugu

SEQ ID NO: 1863034 - RNA, 19 nt, Artificial Sequence
  Description of Artificial Sequence: Synthetic oligonucleotide
cucgaggacgagccacagc

SEQ ID NO: 1863035 - RNA, 19 nt, Artificial Sequence
  Description of Artificial Sequence: Synthetic oligonucleotide
cugagggucgucgcccggg

SEQ ID NO: 1863036 - RNA, 19 nt, Artificial Sequence
  Description of Artificial Sequence: Synthetic oligonucleotide
ggacaggccgaacagacgu

SEQ ID NO: 1863037 - RNA, 19 nt, Artificial Sequence
  Description of Artificial Sequence: Synthetic oligonucleotide
gaggcaggugacgccuggg

SEQ ID NO: 1863038 - RNA, 19 nt, Artificial Sequence
  Description of Artificial Sequence: Synthetic oligonucleotide
cccagaugaacucuaggca

SEQ ID NO: 1863039 - RNA, 19 nt, Artificial Sequence
  Description of Artificial Sequence: Synthetic oligonucleotide
cacggggacaggccgaaca

SEQ ID NO: 1863040 - RNA, 19 nt, Artificial Sequence
  Description of Artificial Sequence: Synthetic oligonucleotide
cuacuccgaggaagugagc

SEQ ID NO: 1863041 - RNA, 19 nt, Artificial Sequence
  Description of Artificial Sequence: Synthetic oligonucleotide
aaaauccggcuaagucaga

SEQ ID NO: 1863042 - RNA, 19 nt, Artificial Sequence
  Description of Artificial Sequence: Synthetic oligonucleotide
gcagcuagugauggggacc

SEQ ID NO: 1863043 - RNA, 19 nt, Artificial Sequence
  Description of Artificial Sequence: Synthetic oligonucleotide
gcugcaaauggaguguaga

SEQ ID NO: 1863044 - RNA, 19 nt, Artificial Sequence
  Description of Artificial Sequence: Synthetic oligonucleotide
gccgaacagacguuccagc

SEQ ID NO: 1863045 - RNA, 19 nt, Artificial Sequence
  Description of Artificial Sequence: Synthetic oligonucleotide
ugaccccaccucccagucu

SEQ ID NO: 1863046 - RNA, 19 nt, Artificial Sequence
  Description of Artificial Sequence: Synthetic oligonucleotide
gacucaagaccaggaggca

SEQ ID NO: 1863047 - RNA, 19 nt, Artificial Sequence
  Description of Artificial Sequence: Synthetic oligonucleotide
ggauagaccagagcccuca

SEQ ID NO: 1863048 - RNA, 19 nt, Artificial Sequence
  Description of Artificial Sequence: Synthetic oligonucleotide
gcuagugauggggaccuug

SEQ ID NO: 1863049 - RNA, 19 nt, Artificial Sequence
  Description of Artificial Sequence: Synthetic oligonucleotide
cgaggaagugagcggagcg

SEQ ID NO: 1863050 - RNA, 19 nt, Artificial Sequence
  Description of Artificial Sequence: Synthetic oligonucleotide
agauuccggggauccugga

SEQ ID NO: 1863051 - RNA, 19 nt, Artificial Sequence
  Description of Artificial Sequence: Synthetic oligonucleotide
acgagccagcccugcuggg

SEQ ID NO: 1863052 - RNA, 19 nt, Artificial Sequence
  Description of Artificial Sequence: Synthetic oligonucleotide
cccgcgagggccaggaggc

SEQ ID NO: 1863053 - RNA, 19 nt, Artificial Sequence
  Description of Artificial Sequence: Synthetic oligonucleotide
cugucuacuccgaggaagu

SEQ ID NO: 1863054 - RNA, 19 nt, Artificial Sequence
  Description of Artificial Sequence: Synthetic oligonucleotide
cucauuccgauuccuacau

SEQ ID NO: 1863055 - RNA, 19 nt, Artificial Sequence
  Description of Artificial Sequence: Synthetic oligonucleotide
acagacguuccagccgcug

SEQ ID NO: 1863056 - RNA, 19 nt, Artificial Sequence
  Description of Artificial Sequence: Synthetic oligonucleotide
cuccgaggaagugagcgga

SEQ ID NO: 1863057 - RNA, 19 nt, Artificial Sequence
  Description of Artificial Sequence: Synthetic oligonucleotide
ggaggcaggugacgccugg

SEQ ID NO: 1863058 - RNA, 19 nt, Artificial Sequence
  Description of Artificial Sequence: Synthetic oligonucleotide
cgucugucuuaauccaucc

SEQ ID NO: 1863059 - RNA, 19 nt, Artificial Sequence
  Description of Artificial Sequence: Synthetic oligonucleotide
ggcagcuagugauggggac

SEQ ID NO: 1863060 - RNA, 19 nt, Artificial Sequence
  Description of Artificial Sequence: Synthetic oligonucleotide
gugacgccugggcagaaua

SEQ ID NO: 1863061 - RNA, 19 nt, Artificial Sequence
  Description of Artificial Sequence: Synthetic oligonucleotide
cagccuacugugcccacca

SEQ ID NO: 1863062 - RNA, 19 nt, Artificial Sequence
  Description of Artificial Sequence: Synthetic oligonucleotide
gaauuccuguggccacaga

SEQ ID NO: 1863063 - RNA, 19 nt, Artificial Sequence
  Description of Artificial Sequence: Synthetic oligonucleotide
gaguaggccggucccagau

SEQ ID NO: 1863064 - RNA, 19 nt, Artificial Sequence
  Description of Artificial Sequence: Synthetic oligonucleotide
ggaguguagaagaauuccu

SEQ ID NO: 1863065 - RNA, 19 nt, Artificial Sequence
  Description of Artificial Sequence: Synthetic oligonucleotide
ggcaagaaccuccugggau

SEQ ID NO: 1863066 - RNA, 19 nt, Artificial Sequence
  Description of Artificial Sequence: Synthetic oligonucleotide
cuggugcaccugguggccg

SEQ ID NO: 1863067 - RNA, 19 nt, Artificial Sequence
  Description of Artificial Sequence: Synthetic oligonucleotide
ggccgaacagacguuccag

SEQ ID NO: 1863068 - RNA, 19 nt, Artificial Sequence
  Description of Artificial Sequence: Synthetic oligonucleotide
cagccuuaccggccuggag

SEQ ID NO: 1863069 - RNA, 19 nt, Artificial Sequence
  Description of Artificial Sequence: Synthetic oligonucleotide
ccgucugucuuaauccauc

SEQ ID NO: 1863070 - RNA, 19 nt, Artificial Sequence
  Description of Artificial Sequence: Synthetic oligonucleotide
cacccggagcagcucggcc

SEQ ID NO: 1863071 - RNA, 19 nt, Artificial Sequence
  Description of Artificial Sequence: Synthetic oligonucleotide
gagggucgauguacaacuc

SEQ ID NO: 1863072 - RNA, 19 nt, Artificial Sequence
  Description of Artificial Sequence: Synthetic oligonucleotide
cagacguggcgaacacguc

SEQ ID NO: 1863073 - RNA, 19 nt, Artificial Sequence
  Description of Artificial Sequence: Synthetic oligonucleotide
ucgucgcccgggcucgccu

SEQ ID NO: 1863074 - RNA, 19 nt, Artificial Sequence
  Description of Artificial Sequence: Synthetic oligonucleotide
cacagccccagcgcuggcc

SEQ ID NO: 1863075 - RNA, 19 nt, Artificial Sequence
  Description of Artificial Sequence: Synthetic oligonucleotide
ccacaaugacaguccuggg

SEQ ID NO: 1863076 - RNA, 19 nt, Artificial Sequence
  Description of Artificial Sequence: Synthetic oligonucleotide
aggcagcuagugaugggga

SEQ ID NO: 1863077 - RNA, 19 nt, Artificial Sequence
  Description of Artificial Sequence: Synthetic oligonucleotide
ccacuacaaacaucuccug

SEQ ID NO: 1863078 - RNA, 19 nt, Artificial Sequence
  Description of Artificial Sequence: Synthetic oligonucleotide
cugugccagcccacauuug

SEQ ID NO: 1863079 - RNA, 19 nt, Artificial Sequence
  Description of Artificial Sequence: Synthetic oligonucleotide
gcauagcuaaagguucuca

SEQ ID NO: 1863080 - RNA, 19 nt, Artificial Sequence
  Description of Artificial Sequence: Synthetic oligonucleotide
gccuuaccggccuggagca

SEQ ID NO: 1863081 - RNA, 19 nt, Artificial Sequence
  Description of Artificial Sequence: Synthetic oligonucleotide
cgccucaucaucgcaaagc

SEQ ID NO: 1863082 - RNA, 19 nt, Artificial Sequence
  Description of Artificial Sequence: Synthetic oligonucleotide
cucugaguccuuccgcaua

SEQ ID NO: 1863083 - RNA, 19 nt, Artificial Sequence
  Description of Artificial Sequence: Synthetic oligonucleotide
aggaccugggcagccuacu

SEQ ID NO: 1863084 - RNA, 19 nt, Artificial Sequence
  Description of Artificial Sequence: Synthetic oligonucleotide
ggugaugacucugucuacu

SEQ ID NO: 1863085 - RNA, 19 nt, Artificial Sequence
  Description of Artificial Sequence: Synthetic oligonucleotide
cugaguccuuccgcauagc

SEQ ID NO: 1863086 - RNA, 19 nt, Artificial Sequence
  Description of Artificial Sequence: Synthetic oligonucleotide
ggaagugagcggagcgcag

SEQ ID NO: 1863087 - RNA, 19 nt, Artificial Sequence
  Description of Artificial Sequence: Synthetic oligonucleotide
cggagcgcagcacagcccc

SEQ ID NO: 1863088 - RNA, 19 nt, Artificial Sequence
  Description of Artificial Sequence: Synthetic oligonucleotide
accgucugucuuaauccau

SEQ ID NO: 1863089 - RNA, 19 nt, Artificial Sequence
  Description of Artificial Sequence: Synthetic oligonucleotide
aggacgagccacagcugcu

SEQ ID NO: 1863090 - RNA, 19 nt, Artificial Sequence
  Description of Artificial Sequence: Synthetic oligonucleotide
aguaagcgggcagcuguuu

SEQ ID NO: 1863091 - RNA, 19 nt, Artificial Sequence
  Description of Artificial Sequence: Synthetic oligonucleotide
ggaggcacggggacaggcc

SEQ ID NO: 1863092 - RNA, 19 nt, Artificial Sequence
  Description of Artificial Sequence: Synthetic oligonucleotide
ccagcgcuggccuugcuga

SEQ ID NO: 1863093 - RNA, 19 nt, Artificial Sequence
  Description of Artificial Sequence: Synthetic oligonucleotide
ugcccaccacgagccagcc

SEQ ID NO: 1863094 - RNA, 19 nt, Artificial Sequence
  Description of Artificial Sequence: Synthetic oligonucleotide
caaggagaguaggccgguc

SEQ ID NO: 1863095 - RNA, 19 nt, Artificial Sequence
  Description of Artificial Sequence: Synthetic oligonucleotide
guacagggaaacucuucuu

SEQ ID NO: 1863096 - RNA, 19 nt, Artificial Sequence
  Description of Artificial Sequence: Synthetic oligonucleotide
acguuccagccgcuggguu

SEQ ID NO: 1863097 - RNA, 19 nt, Artificial Sequence
  Description of Artificial Sequence: Synthetic oligonucleotide
gccggucccagaugaacuc

SEQ ID NO: 1863098 - RNA, 19 nt, Artificial Sequence
  Description of Artificial Sequence: Synthetic oligonucleotide
ggcggcaggucauccagaa

SEQ ID NO: 1863099 - RNA, 19 nt, Artificial Sequence
  Description of Artificial Sequence: Synthetic oligonucleotide
cccaccacgagccagcccu

SEQ ID NO: 1863100 - RNA, 19 nt, Artificial Sequence
  Description of Artificial Sequence: Synthetic oligonucleotide
ugcccagcacaaggagagu

SEQ ID NO: 1863101 - RNA, 19 nt, Artificial Sequence
  Description of Artificial Sequence: Synthetic oligonucleotide
cuccgucuguacagggaaa

SEQ ID NO: 1863102 - RNA, 19 nt, Artificial Sequence
  Description of Artificial Sequence: Synthetic oligonucleotide
agagaccgucugucuuaau

SEQ ID NO: 1863103 - RNA, 19 nt, Artificial Sequence
  Description of Artificial Sequence: Synthetic oligonucleotide
gggucgucgcccgggcucg

SEQ ID NO: 1863104 - RNA, 19 nt, Artificial Sequence
  Description of Artificial Sequence: Synthetic oligonucleotide
cagcuagugauggggaccu

SEQ ID NO: 1863105 - RNA, 19 nt, Artificial Sequence
  Description of Artificial Sequence: Synthetic oligonucleotide
cagcgggcucaccuccaug

SEQ ID NO: 1863106 - RNA, 19 nt, Artificial Sequence
  Description of Artificial Sequence: Synthetic oligonucleotide
ugcagacgcccuggugcac

SEQ ID NO: 1863107 - RNA, 19 nt, Artificial Sequence
  Description of Artificial Sequence: Synthetic oligonucleotide
ggacagggaugccccgcgc

SEQ ID NO: 1863108 - RNA, 19 nt, Artificial Sequence
  Description of Artificial Sequence: Synthetic oligonucleotide
cguuccagccgcuggguuc

SEQ ID NO: 1863109 - RNA, 19 nt, Artificial Sequence
  Description of Artificial Sequence: Synthetic oligonucleotide
uccuggguacugggccucu

SEQ ID NO: 1863110 - RNA, 19 nt, Artificial Sequence
  Description of Artificial Sequence: Synthetic oligonucleotide
ccggggauccuggagcccc

SEQ ID NO: 1863111 - RNA, 19 nt, Artificial Sequence
  Description of Artificial Sequence: Synthetic oligonucleotide
uuucugccgccugggccuc

SEQ ID NO: 1863112 - RNA, 19 nt, Artificial Sequence
  Description of Artificial Sequence: Synthetic oligonucleotide
cucugucuacuccgaggaa

SEQ ID NO: 1863113 - RNA, 19 nt, Artificial Sequence
  Description of Artificial Sequence: Synthetic oligonucleotide
ccauccuggaaaugagcaa

SEQ ID NO: 1863114 - RNA, 19 nt, Artificial Sequence
  Description of Artificial Sequence: Synthetic oligonucleotide
guacugggccucucugagu

SEQ ID NO: 1863115 - RNA, 19 nt, Artificial Sequence
  Description of Artificial Sequence: Synthetic oligonucleotide
ccgaggaagugagcggagc

SEQ ID NO: 1863116 - RNA, 19 nt, Artificial Sequence
  Description of Artificial Sequence: Synthetic oligonucleotide
gcgcuggccuugcugacca

SEQ ID NO: 1863117 - RNA, 19 nt, Artificial Sequence
  Description of Artificial Sequence: Synthetic oligonucleotide
ccaugcagacgcccuggug

SEQ ID NO: 1863118 - RNA, 19 nt, Artificial Sequence
  Description of Artificial Sequence: Synthetic oligonucleotide
cgauuccuacauacaagca

SEQ ID NO: 1863119 - RNA, 19 nt, Artificial Sequence
  Description of Artificial Sequence: Synthetic oligonucleotide
acguggcgaacacguccau

SEQ ID NO: 1863120 - RNA, 19 nt, Artificial Sequence
  Description of Artificial Sequence: Synthetic oligonucleotide
caggugacgccugggcaga

SEQ ID NO: 1863121 - RNA, 19 nt, Artificial Sequence
  Description of Artificial Sequence: Synthetic oligonucleotide
ggacagagaccgucugucu

SEQ ID NO: 1863122 - RNA, 19 nt, Artificial Sequence
  Description of Artificial Sequence: Synthetic oligonucleotide
cagggaugccccgcgccuc

SEQ ID NO: 1863123 - RNA, 19 nt, Artificial Sequence
  Description of Artificial Sequence: Synthetic oligonucleotide
gacguuccagccgcugggu

SEQ ID NO: 1863124 - RNA, 19 nt, Artificial Sequence
  Description of Artificial Sequence: Synthetic oligonucleotide
gggucgauguacaacucau

SEQ ID NO: 1863125 - RNA, 19 nt, Artificial Sequence
  Description of Artificial Sequence: Synthetic oligonucleotide
gaggccgcagcgggcucac

SEQ ID NO: 1863126 - RNA, 19 nt, Artificial Sequence
  Description of Artificial Sequence: Synthetic oligonucleotide
cuggaguaagcgggcagcu

SEQ ID NO: 1863127 - RNA, 19 nt, Artificial Sequence
  Description of Artificial Sequence: Synthetic oligonucleotide
gccgccucaucaucgcaaa

SEQ ID NO: 1863128 - RNA, 19 nt, Artificial Sequence
  Description of Artificial Sequence: Synthetic oligonucleotide
ccggcuggugaugacucug

SEQ ID NO: 1863129 - RNA, 19 nt, Artificial Sequence
  Description of Artificial Sequence: Synthetic oligonucleotide
gguggccgcacaaggcauc

SEQ ID NO: 1863130 - RNA, 19 nt, Artificial Sequence
  Description of Artificial Sequence: Synthetic oligonucleotide
ggaugccccgcgccucggc

SEQ ID NO: 1863131 - RNA, 19 nt, Artificial Sequence
  Description of Artificial Sequence: Synthetic oligonucleotide
gggccucaggacagggaug

SEQ ID NO: 1863132 - RNA, 19 nt, Artificial Sequence
  Description of Artificial Sequence: Synthetic oligonucleotide
agcuggcaggaggcaagaa

SEQ ID NO: 1863133 - RNA, 19 nt, Artificial Sequence
  Description of Artificial Sequence: Synthetic oligonucleotide
ccccucgaggacgagccac

SEQ ID NO: 1863134 - RNA, 19 nt, Artificial Sequence
  Description of Artificial Sequence: Synthetic oligonucleotide
gccugagggucgauguaca

SEQ ID NO: 1863135 - RNA, 19 nt, Artificial Sequence
  Description of Artificial Sequence: Synthetic oligonucleotide
gcccagcacaaggagagua

SEQ ID NO: 1863136 - RNA, 19 nt, Artificial Sequence
  Description of Artificial Sequence: Synthetic oligonucleotide
gagggucgucgcccgggcu

SEQ ID NO: 1863137 - RNA, 19 nt, Artificial Sequence
  Description of Artificial Sequence: Synthetic oligonucleotide
ccuugcugaccacuggagu

SEQ ID NO: 1863138 - RNA, 19 nt, Artificial Sequence
  Description of Artificial Sequence: Synthetic oligonucleotide
guggccgcacaaggcaucu

SEQ ID NO: 1863139 - RNA, 19 nt, Artificial Sequence
  Description of Artificial Sequence: Synthetic oligonucleotide
cggcuaagucagacguggc

SEQ ID NO: 1863140 - RNA, 19 nt, Artificial Sequence
  Description of Artificial Sequence: Synthetic oligonucleotide
agacgcccuggugcaccug

SEQ ID NO: 1863141 - RNA, 19 nt, Artificial Sequence
  Description of Artificial Sequence: Synthetic oligonucleotide
cgaggacgagccacagcug

SEQ ID NO: 1863142 - RNA, 19 nt, Artificial Sequence
  Description of Artificial Sequence: Synthetic oligonucleotide
ccgccucaucaucgcaaag

SEQ ID NO: 1863143 - RNA, 19 nt, Artificial Sequence
  Description of Artificial Sequence: Synthetic oligonucleotide
cuugguggaaugggagauu

SEQ ID NO: 1863144 - RNA, 19 nt, Artificial Sequence
  Description of Artificial Sequence: Synthetic oligonucleotide
gcgggcucaccuccaugca

SEQ ID NO: 1863145 - RNA, 19 nt, Artificial Sequence
  Description of Artificial Sequence: Synthetic oligonucleotide
ccugagggucgauguacaa

SEQ ID NO: 1863146 - RNA, 19 nt, Artificial Sequence
  Description of Artificial Sequence: Synthetic oligonucleotide
ggccacgcgccggcgggcg

SEQ ID NO: 1863147 - RNA, 19 nt, Artificial Sequence
  Description of Artificial Sequence: Synthetic oligonucleotide
ucgcccgggcucgccucug

SEQ ID NO: 1863148 - RNA, 19 nt, Artificial Sequence
  Description of Artificial Sequence: Synthetic oligonucleotide
gacaggccgaacagacguu

SEQ ID NO: 1863149 - RNA, 19 nt, Artificial Sequence
  Description of Artificial Sequence: Synthetic oligonucleotide
ccgcauagcuaaagguucu

SEQ ID NO: 1863150 - RNA, 19 nt, Artificial Sequence
  Description of Artificial Sequence: Synthetic oligonucleotide
uggccgcacaaggcaucua

SEQ ID NO: 1863151 - RNA, 19 nt, Artificial Sequence
  Description of Artificial Sequence: Synthetic oligonucleotide
acgcccuggugcaccuggu

SEQ ID NO: 1863152 - RNA, 19 nt, Artificial Sequence
  Description of Artificial Sequence: Synthetic oligonucleotide
ccaccacgagccagcccug

SEQ ID NO: 1863153 - RNA, 19 nt, Artificial Sequence
  Description of Artificial Sequence: Synthetic oligonucleotide
gggaugccccgcgccucgg

SEQ ID NO: 1863154 - RNA, 19 nt, Artificial Sequence
  Description of Artificial Sequence: Synthetic oligonucleotide
cgccugggcagaauaguaa

SEQ ID NO: 1863155 - RNA, 19 nt, Artificial Sequence
  Description of Artificial Sequence: Synthetic oligonucleotide
cacgcgccggcgggcgggc

SEQ ID NO: 1863156 - RNA, 19 nt, Artificial Sequence
  Description of Artificial Sequence: Synthetic oligonucleotide
ggucgauguacaacucauu

SEQ ID NO: 1863157 - RNA, 19 nt, Artificial Sequence
  Description of Artificial Sequence: Synthetic oligonucleotide
gccacgcgccggcgggcgg

SEQ ID NO: 1863158 - RNA, 19 nt, Artificial Sequence
  Description of Artificial Sequence: Synthetic oligonucleotide
ccuuaccggccuggagcag

SEQ ID NO: 1863159 - RNA, 19 nt, Artificial Sequence
  Description of Artificial Sequence: Synthetic oligonucleotide
gccccuagauuccggggau

SEQ ID NO: 1863160 - RNA, 19 nt, Artificial Sequence
  Description of Artificial Sequence: Synthetic oligonucleotide
gucgcccgggcucgccucu

SEQ ID NO: 1863161 - RNA, 19 nt, Artificial Sequence
  Description of Artificial Sequence: Synthetic oligonucleotide
cguggcgaacacguccauc

SEQ ID NO: 1863162 - RNA, 19 nt, Artificial Sequence
  Description of Artificial Sequence: Synthetic oligonucleotide
ccacgcgccggcgggcggg

SEQ ID NO: 1863163 - RNA, 19 nt, Artificial Sequence
  Description of Artificial Sequence: Synthetic oligonucleotide
gccucaggacagggaugcc

SEQ ID NO: 1863164 - RNA, 19 nt, Artificial Sequence
  Description of Artificial Sequence: Synthetic oligonucleotide
gcucgccucugccgccuca

SEQ ID NO: 1863165 - RNA, 19 nt, Artificial Sequence
  Description of Artificial Sequence: Synthetic oligonucleotide
ggcccgcgagggccaggag

SEQ ID NO: 1863166 - RNA, 19 nt, Artificial Sequence
  Description of Artificial Sequence: Synthetic oligonucleotide
cagcccacauuuggccugu

SEQ ID NO: 1863167 - RNA, 19 nt, Artificial Sequence
  Description of Artificial Sequence: Synthetic oligonucleotide
gccgcacaaggcaucuagu

SEQ ID NO: 1863168 - RNA, 19 nt, Artificial Sequence
  Description of Artificial Sequence: Synthetic oligonucleotide
ccccuagauuccggggauc

SEQ ID NO: 1863169 - RNA, 19 nt, Artificial Sequence
  Description of Artificial Sequence: Synthetic oligonucleotide
gcccagccuuaccggccug

SEQ ID NO: 1863170 - RNA, 19 nt, Artificial Sequence
  Description of Artificial Sequence: Synthetic oligonucleotide
ccagccuuaccggccugga

SEQ ID NO: 1863171 - RNA, 19 nt, Artificial Sequence
  Description of Artificial Sequence: Synthetic oligonucleotide
gccccucgaggacgagcca

SEQ ID NO: 1863172 - RNA, 19 nt, Artificial Sequence
  Description of Artificial Sequence: Synthetic oligonucleotide
ccacagccccagcgcuggc

SEQ ID NO: 1863173 - RNA, 19 nt, Artificial Sequence
  Description of Artificial Sequence: Synthetic oligonucleotide
cucgccucugccgccucau

SEQ ID NO: 1863174 - RNA, 19 nt, Artificial Sequence
  Description of Artificial Sequence: Synthetic oligonucleotide
gccccagcgcuggccuugc

SEQ ID NO: 1863175 - RNA, 19 nt, Artificial Sequence
  Description of Artificial Sequence: Synthetic oligonucleotide
gcccacauuuggccuguuu

SEQ ID NO: 1863176 - RNA, 19 nt, Artificial Sequence
  Description of Artificial Sequence: Synthetic oligonucleotide
ccuagauuccggggauccu

SEQ ID NO: 1863177 - RNA, 19 nt, Artificial Sequence
  Description of Artificial Sequence: Synthetic oligonucleotide
ccgucuguacagggaaacu

SEQ ID NO: 1863178 - RNA, 19 nt, Artificial Sequence
  Description of Artificial Sequence: Synthetic oligonucleotide
cgucgcccgggcucgccuc

SEQ ID NO: 1863179 - RNA, 19 nt, Artificial Sequence
  Description of Artificial Sequence: Synthetic oligonucleotide
ggucgucgcccgggcucgc

SEQ ID NO: 1863180 - RNA, 19 nt, Artificial Sequence
  Description of Artificial Sequence: Synthetic oligonucleotide
ggugacgccugggcagaau

SEQ ID NO: 1863181 - RNA, 19 nt, Artificial Sequence
  Description of Artificial Sequence: Synthetic oligonucleotide
gcacggggacaggccgaac

SEQ ID NO: 1863182 - RNA, 19 nt, Artificial Sequence
  Description of Artificial Sequence: Synthetic oligonucleotide
ccggucccagaugaacucu

SEQ ID NO: 1863183 - RNA, 19 nt, Artificial Sequence
  Description of Artificial Sequence: Synthetic oligonucleotide
ggguucggcggcaggucau

SEQ ID NO: 1863184 - RNA, 19 nt, Artificial Sequence
  Description of Artificial Sequence: Synthetic oligonucleotide
ccgaggccgcagcgggcuc

SEQ ID NO: 1863185 - RNA, 19 nt, Artificial Sequence
  Description of Artificial Sequence: Synthetic oligonucleotide
ccgcuggguucggcggcag

SEQ ID NO: 1863186 - RNA, 19 nt, Artificial Sequence
  Description of Artificial Sequence: Synthetic oligonucleotide
gcgggcccgcgagggccag

SEQ ID NO: 1863187 - RNA, 19 nt, Artificial Sequence
  Description of Artificial Sequence: Synthetic oligonucleotide
gccccgcgccucggccacc

SEQ ID NO: 1863188 - RNA, 19 nt, Artificial Sequence
  Description of Artificial Sequence: Synthetic oligonucleotide
aacacugaaggugucagcc

SEQ ID NO: 1863189 - RNA, 19 nt, Artificial Sequence
  Description of Artificial Sequence: Synthetic oligonucleotide
aucaacuccggcuuccggc

SEQ ID NO: 1863190 - RNA, 19 nt, Artificial Sequence
  Description of Artificial Sequence: Synthetic oligonucleotide
gucaccugaacucaggaag

SEQ ID NO: 1863191 - RNA, 19 nt, Artificial Sequence
  Description of Artificial Sequence: Synthetic oligonucleotide
aaacacugaaggugucagc

SEQ ID NO: 1863192 - RNA, 19 nt, Artificial Sequence
  Description of Artificial Sequence: Synthetic oligonucleotide
ggaccuuuuacuaugagag

SEQ ID NO: 1863193 - RNA, 19 nt, Artificial Sequence
  Description of Artificial Sequence: Synthetic oligonucleotide
accuuuuacuaugagagag

SEQ ID NO: 1863194 - RNA, 19 nt, Artificial Sequence
  Description of Artificial Sequence: Synthetic oligonucleotide
uuugucaccugaacucagg

SEQ ID NO: 1863195 - RNA, 19 nt, Artificial Sequence
  Description of Artificial Sequence: Synthetic oligonucleotide
acucaggaagagcccaucc

SEQ ID NO: 1863196 - RNA, 19 nt, Artificial Sequence
  Description of Artificial Sequence: Synthetic oligonucleotide
ucaacuccggcuuccggcg

SEQ ID NO: 1863197 - RNA, 19 nt, Artificial Sequence
  Description of Artificial Sequence: Synthetic oligonucleotide
uucuggaccuuuuacuaug

SEQ ID NO: 1863198 - RNA, 19 nt, Artificial Sequence
  Description of Artificial Sequence: Synthetic oligonucleotide
uggaccuuuuacuaugaga

SEQ ID NO: 1863199 - RNA, 19 nt, Artificial Sequence
  Description of Artificial Sequence: Synthetic oligonucleotide
ccugaacucaggaagagcc

SEQ ID NO: 1863200 - RNA, 19 nt, Artificial Sequence
  Description of Artificial Sequence: Synthetic oligonucleotide
ucaccugaacucaggaaga

SEQ ID NO: 1863201 - RNA, 19 nt, Artificial Sequence
  Description of Artificial Sequence: Synthetic oligonucleotide
agcuucuggaccuuuuacu

SEQ ID NO: 1863202 - RNA, 19 nt, Artificial Sequence
  Description of Artificial Sequence: Synthetic oligonucleotide
uugucaccugaacucagga

SEQ ID NO: 1863203 - RNA, 19 nt, Artificial Sequence
  Description of Artificial Sequence: Synthetic oligonucleotide
caaacacugaaggugucag

SEQ ID NO: 1863204 - RNA, 19 nt, Artificial Sequence
  Description of Artificial Sequence: Synthetic oligonucleotide
ucuggaccuuuuacuauga

SEQ ID NO: 1863205 - RNA, 19 nt, Artificial Sequence
  Description of Artificial Sequence: Synthetic oligonucleotide
cucaggaagagcccauccc

SEQ ID NO: 1863206 - RNA, 19 nt, Artificial Sequence
  Description of Artificial Sequence: Synthetic oligonucleotide
cugaacucaggaagagccc

SEQ ID NO: 1863207 - RNA, 19 nt, Artificial Sequence
  Description of Artificial Sequence: Synthetic oligonucleotide
aggaucaacuccggcuucc

SEQ ID NO: 1863208 - RNA, 19 nt, Artificial Sequence
  Description of Artificial Sequence: Synthetic oligonucleotide
aacuccggcuuccggcggg

SEQ ID NO: 1863209 - RNA, 19 nt, Artificial Sequence
  Description of Artificial Sequence: Synthetic oligonucleotide
gaucaacuccggcuuccgg

SEQ ID NO: 1863210 - RNA, 19 nt, Artificial Sequence
  Description of Artificial Sequence: Synthetic oligonucleotide
aacucaggaagagcccauc

SEQ ID NO: 1863211 - RNA, 19 nt, Artificial Sequence
  Description of Artificial Sequence: Synthetic oligonucleotide
accugaacucaggaagagc

SEQ ID NO: 1863212 - RNA, 19 nt, Artificial Sequence
  Description of Artificial Sequence: Synthetic oligonucleotide
ggccuccaaacacugaagg

SEQ ID NO: 1863213 - RNA, 19 nt, Artificial Sequence
  Description of Artificial Sequence: Synthetic oligonucleotide
uggccuccaaacacugaag

SEQ ID NO: 1863214 - RNA, 19 nt, Artificial Sequence
  Description of Artificial Sequence: Synthetic oligonucleotide
cuucaggaagccuaagaaa

SEQ ID NO: 1863215 - RNA, 19 nt, Artificial Sequence
  Description of Artificial Sequence: Synthetic oligonucleotide
gagcuucuggaccuuuuac

SEQ ID NO: 1863216 - RNA, 19 nt, Artificial Sequence
  Description of Artificial Sequence: Synthetic oligonucleotide
ugucaccugaacucaggaa

SEQ ID NO: 1863217 - RNA, 19 nt, Artificial Sequence
  Description of Artificial Sequence: Synthetic oligonucleotide
ccuuuuacuaugagagagc

SEQ ID NO: 1863218 - RNA, 19 nt, Artificial Sequence
  Description of Artificial Sequence: Synthetic oligonucleotide
cacugaaggugucagccuc

SEQ ID NO: 1863219 - RNA, 19 nt, Artificial Sequence
  Description of Artificial Sequence: Synthetic oligonucleotide
gaccuuuuacuaugagaga

SEQ ID NO: 1863220 - RNA, 19 nt, Artificial Sequence
  Description of Artificial Sequence: Synthetic oligonucleotide
cuccauuugucaccugaac

SEQ ID NO: 1863221 - RNA, 19 nt, Artificial Sequence
  Description of Artificial Sequence: Synthetic oligonucleotide
caggaagccuaagaaaguc

SEQ ID NO: 1863222 - RNA, 19 nt, Artificial Sequence
  Description of Artificial Sequence: Synthetic oligonucleotide
acacugaaggugucagccu

SEQ ID NO: 1863223 - RNA, 19 nt, Artificial Sequence
  Description of Artificial Sequence: Synthetic oligonucleotide
auuugucaccugaacucag

SEQ ID NO: 1863224 - RNA, 19 nt, Artificial Sequence
  Description of Artificial Sequence: Synthetic oligonucleotide
cauuugucaccugaacuca

SEQ ID NO: 1863225 - RNA, 19 nt, Artificial Sequence
  Description of Artificial Sequence: Synthetic oligonucleotide
uccaaacacugaagguguc

SEQ ID NO: 1863226 - RNA, 19 nt, Artificial Sequence
  Description of Artificial Sequence: Synthetic oligonucleotide
agagcuucuggaccuuuua

SEQ ID NO: 1863227 - RNA, 19 nt, Artificial Sequence
  Description of Artificial Sequence: Synthetic oligonucleotide
aggaagccuaagaaaguca

SEQ ID NO: 1863228 - RNA, 19 nt, Artificial Sequence
  Description of Artificial Sequence: Synthetic oligonucleotide
cuccaaacacugaaggugu

SEQ ID NO: 1863229 - RNA, 19 nt, Artificial Sequence
  Description of Artificial Sequence: Synthetic oligonucleotide
cuggaccuuuuacuaugag

SEQ ID NO: 1863230 - RNA, 19 nt, Artificial Sequence
  Description of Artificial Sequence: Synthetic oligonucleotide
cagggcuucaggaagccua

SEQ ID NO: 1863231 - RNA, 19 nt, Artificial Sequence
  Description of Artificial Sequence: Synthetic oligonucleotide
gcuucuggaccuuuuacua

SEQ ID NO: 1863232 - RNA, 19 nt, Artificial Sequence
  Description of Artificial Sequence: Synthetic oligonucleotide
caccugaacucaggaagag

SEQ ID NO: 1863233 - RNA, 19 nt, Artificial Sequence
  Description of Artificial Sequence: Synthetic oligonucleotide
caacuccggcuuccggcgg

SEQ ID NO: 1863234 - RNA, 19 nt, Artificial Sequence
  Description of Artificial Sequence: Synthetic oligonucleotide
ggaucaacuccggcuuccg

SEQ ID NO: 1863235 - RNA, 19 nt, Artificial Sequence
  Description of Artificial Sequence: Synthetic oligonucleotide
cuucuggaccuuuuacuau

SEQ ID NO: 1863236 - RNA, 19 nt, Artificial Sequence
  Description of Artificial Sequence: Synthetic oligonucleotide
cauggccuccaaacacuga

SEQ ID NO: 1863237 - RNA, 19 nt, Artificial Sequence
  Description of Artificial Sequence: Synthetic oligonucleotide
ggaagccuaagaaagucau

SEQ ID NO: 1863238 - RNA, 19 nt, Artificial Sequence
  Description of Artificial Sequence: Synthetic oligonucleotide
agggcuucaggaagccuaa

SEQ ID NO: 1863239 - RNA, 19 nt, Artificial Sequence
  Description of Artificial Sequence: Synthetic oligonucleotide
uccggcggggcuccuuguu

SEQ ID NO: 1863240 - RNA, 19 nt, Artificial Sequence
  Description of Artificial Sequence: Synthetic oligonucleotide
uuccggcggggcuccuugu

SEQ ID NO: 1863241 - RNA, 19 nt, Artificial Sequence
  Description of Artificial Sequence: Synthetic oligonucleotide
ccaaacacugaagguguca

SEQ ID NO: 1863242 - RNA, 19 nt, Artificial Sequence
  Description of Artificial Sequence: Synthetic oligonucleotide
gccuccaaacacugaaggu

SEQ ID NO: 1863243 - RNA, 19 nt, Artificial Sequence
  Description of Artificial Sequence: Synthetic oligonucleotide
gaacucaggaagagcccau

SEQ ID NO: 1863244 - RNA, 19 nt, Artificial Sequence
  Description of Artificial Sequence: Synthetic oligonucleotide
cccagccagggcuucagga

SEQ ID NO: 1863245 - RNA, 19 nt, Artificial Sequence
  Description of Artificial Sequence: Synthetic oligonucleotide
gaagagcuucuggaccuuu

SEQ ID NO: 1863246 - RNA, 19 nt, Artificial Sequence
  Description of Artificial Sequence: Synthetic oligonucleotide
ccggcggggcuccuuguug

SEQ ID NO: 1863247 - RNA, 19 nt, Artificial Sequence
  Description of Artificial Sequence: Synthetic oligonucleotide
gggcuucaggaagccuaag

SEQ ID NO: 1863248 - RNA, 19 nt, Artificial Sequence
  Description of Artificial Sequence: Synthetic oligonucleotide
cggcggggcuccuuguugu

SEQ ID NO: 1863249 - RNA, 19 nt, Artificial Sequence
  Description of Artificial Sequence: Synthetic oligonucleotide
ccagggcuucaggaagccu

SEQ ID NO: 1863250 - RNA, 19 nt, Artificial Sequence
  Description of Artificial Sequence: Synthetic oligonucleotide
gcuuccggcggggcuccuu

SEQ ID NO: 1863251 - RNA, 19 nt, Artificial Sequence
  Description of Artificial Sequence: Synthetic oligonucleotide
ggcuuccggcggggcuccu

SEQ ID NO: 1863252 - RNA, 19 nt, Artificial Sequence
  Description of Artificial Sequence: Synthetic oligonucleotide
ucaucuauaacauagccgg

SEQ ID NO: 1863253 - RNA, 19 nt, Artificial Sequence
  Description of Artificial Sequence: Synthetic oligonucleotide
ugaaucaucuauaacauag

SEQ ID NO: 1863254 - RNA, 19 nt, Artificial Sequence
  Description of Artificial Sequence: Synthetic oligonucleotide
ugagcuauaaaauaaauaa

SEQ ID NO: 1863255 - RNA, 19 nt, Artificial Sequence
  Description of Artificial Sequence: Synthetic oligonucleotide
aaauugacagcugaaagac

SEQ ID NO: 1863256 - RNA, 19 nt, Artificial Sequence
  Description of Artificial Sequence: Synthetic oligonucleotide
ugaaguaucguuuucgaag

SEQ ID NO: 1863257 - RNA, 19 nt, Artificial Sequence
  Description of Artificial Sequence: Synthetic oligonucleotide
ugaauugucuucaacuagg

SEQ ID NO: 1863258 - RNA, 19 nt, Artificial Sequence
  Description of Artificial Sequence: Synthetic oligonucleotide
uuuaucuccacacaucuca

SEQ ID NO: 1863259 - RNA, 19 nt, Artificial Sequence
  Description of Artificial Sequence: Synthetic oligonucleotide
aaugcuggaauuuucccag

SEQ ID NO: 1863260 - RNA, 19 nt, Artificial Sequence
  Description of Artificial Sequence: Synthetic oligonucleotide
uuaaugagcuauaaaauaa

SEQ ID NO: 1863261 - RNA, 19 nt, Artificial Sequence
  Description of Artificial Sequence: Synthetic oligonucleotide
auucguaucacauggguuc

SEQ ID NO: 1863262 - RNA, 19 nt, Artificial Sequence
  Description of Artificial Sequence: Synthetic oligonucleotide
agaaauaagaccaucauga

SEQ ID NO: 1863263 - RNA, 19 nt, Artificial Sequence
  Description of Artificial Sequence: Synthetic oligonucleotide
aaaccacaaguccaguggc

SEQ ID NO: 1863264 - RNA, 19 nt, Artificial Sequence
  Description of Artificial Sequence: Synthetic oligonucleotide
ggaaauucguaucacaugg

SEQ ID NO: 1863265 - RNA, 19 nt, Artificial Sequence
  Description of Artificial Sequence: Synthetic oligonucleotide
aauggccugagccuaaaag

SEQ ID NO: 1863266 - RNA, 19 nt, Artificial Sequence
  Description of Artificial Sequence: Synthetic oligonucleotide
agugacgcgacuguuaacc

SEQ ID NO: 1863267 - RNA, 19 nt, Artificial Sequence
  Description of Artificial Sequence: Synthetic oligonucleotide
gaaguaucguuuucgaagc

SEQ ID NO: 1863268 - RNA, 19 nt, Artificial Sequence
  Description of Artificial Sequence: Synthetic oligonucleotide
aaagacuggaaccaucaga

SEQ ID NO: 1863269 - RNA, 19 nt, Artificial Sequence
  Description of Artificial Sequence: Synthetic oligonucleotide
uguauacacauucaccaug

SEQ ID NO: 1863270 - RNA, 19 nt, Artificial Sequence
  Description of Artificial Sequence: Synthetic oligonucleotide
agguucucgauguauacac

SEQ ID NO: 1863271 - RNA, 19 nt, Artificial Sequence
  Description of Artificial Sequence: Synthetic oligonucleotide
ugagccuaaaagaagcagc

SEQ ID NO: 1863272 - RNA, 19 nt, Artificial Sequence
  Description of Artificial Sequence: Synthetic oligonucleotide
ucucauuauguacagaaau

SEQ ID NO: 1863273 - RNA, 19 nt, Artificial Sequence
  Description of Artificial Sequence: Synthetic oligonucleotide
accuguucaacucugacug

SEQ ID NO: 1863274 - RNA, 19 nt, Artificial Sequence
  Description of Artificial Sequence: Synthetic oligonucleotide
aaugcaaucuuggauaggu

SEQ ID NO: 1863275 - RNA, 19 nt, Artificial Sequence
  Description of Artificial Sequence: Synthetic oligonucleotide
aacauagccggauauuugu

SEQ ID NO: 1863276 - RNA, 19 nt, Artificial Sequence
  Description of Artificial Sequence: Synthetic oligonucleotide
uuucacuuaugguagagac

SEQ ID NO: 1863277 - RNA, 19 nt, Artificial Sequence
  Description of Artificial Sequence: Synthetic oligonucleotide
aaauucguaucacaugggu

SEQ ID NO: 1863278 - RNA, 19 nt, Artificial Sequence
  Description of Artificial Sequence: Synthetic oligonucleotide
agcuauaaaauaaauaaca

SEQ ID NO: 1863279 - RNA, 19 nt, Artificial Sequence
  Description of Artificial Sequence: Synthetic oligonucleotide
acacauucaccaugaaugc

SEQ ID NO: 1863280 - RNA, 19 nt, Artificial Sequence
  Description of Artificial Sequence: Synthetic oligonucleotide
uuaauuaccuguucaacuc

SEQ ID NO: 1863281 - RNA, 19 nt, Artificial Sequence
  Description of Artificial Sequence: Synthetic oligonucleotide
ucacuuaugguagagaccu

SEQ ID NO: 1863282 - RNA, 19 nt, Artificial Sequence
  Description of Artificial Sequence: Synthetic oligonucleotide
aaaugcuggaauuuuccca

SEQ ID NO: 1863283 - RNA, 19 nt, Artificial Sequence
  Description of Artificial Sequence: Synthetic oligonucleotide
ugaggguuaccacagagac

SEQ ID NO: 1863284 - RNA, 19 nt, Artificial Sequence
  Description of Artificial Sequence: Synthetic oligonucleotide
aguucuggaaauucguauc

SEQ ID NO: 1863285 - RNA, 19 nt, Artificial Sequence
  Description of Artificial Sequence: Synthetic oligonucleotide
gagggcauuucacuuaugg

SEQ ID NO: 1863286 - RNA, 19 nt, Artificial Sequence
  Description of Artificial Sequence: Synthetic oligonucleotide
uaucauucagguccaaccc

SEQ ID NO: 1863287 - RNA, 19 nt, Artificial Sequence
  Description of Artificial Sequence: Synthetic oligonucleotide
auagccggauauuuguggc

SEQ ID NO: 1863288 - RNA, 19 nt, Artificial Sequence
  Description of Artificial Sequence: Synthetic oligonucleotide
uaaaagaagcagcagcgac

SEQ ID NO: 1863289 - RNA, 19 nt, Artificial Sequence
  Description of Artificial Sequence: Synthetic oligonucleotide
uaugaggguuaccacagag

SEQ ID NO: 1863290 - RNA, 19 nt, Artificial Sequence
  Description of Artificial Sequence: Synthetic oligonucleotide
uguggugcccagaaaaugc

SEQ ID NO: 1863291 - RNA, 19 nt, Artificial Sequence
  Description of Artificial Sequence: Synthetic oligonucleotide
ucugacuuggcagugacgc

SEQ ID NO: 1863292 - RNA, 19 nt, Artificial Sequence
  Description of Artificial Sequence: Synthetic oligonucleotide
guaucauucagguccaacc

SEQ ID NO: 1863293 - RNA, 19 nt, Artificial Sequence
  Description of Artificial Sequence: Synthetic oligonucleotide
ugcaaucuuggauagguca

SEQ ID NO: 1863294 - RNA, 19 nt, Artificial Sequence
  Description of Artificial Sequence: Synthetic oligonucleotide
acuuuaucuccacacaucu

SEQ ID NO: 1863295 - RNA, 19 nt, Artificial Sequence
  Description of Artificial Sequence: Synthetic oligonucleotide
uggcucauuaucauauucc

SEQ ID NO: 1863296 - RNA, 19 nt, Artificial Sequence
  Description of Artificial Sequence: Synthetic oligonucleotide
acuaggcuaugacagguac

SEQ ID NO: 1863297 - RNA, 19 nt, Artificial Sequence
  Description of Artificial Sequence: Synthetic oligonucleotide
ucauuauguacagaaauaa

SEQ ID NO: 1863298 - RNA, 19 nt, Artificial Sequence
  Description of Artificial Sequence: Synthetic oligonucleotide
cugcauaauggccugagcc

SEQ ID NO: 1863299 - RNA, 19 nt, Artificial Sequence
  Description of Artificial Sequence: Synthetic oligonucleotide
gaaaaugcuggaauuuucc

SEQ ID NO: 1863300 - RNA, 19 nt, Artificial Sequence
  Description of Artificial Sequence: Synthetic oligonucleotide
ggaauuuucccagaggugg

SEQ ID NO: 1863301 - RNA, 19 nt, Artificial Sequence
  Description of Artificial Sequence: Synthetic oligonucleotide
ugugacaacaaugccaaca

SEQ ID NO: 1863302 - RNA, 19 nt, Artificial Sequence
  Description of Artificial Sequence: Synthetic oligonucleotide
accugaauugucuucaacu

SEQ ID NO: 1863303 - RNA, 19 nt, Artificial Sequence
  Description of Artificial Sequence: Synthetic oligonucleotide
uaggucauugucaucuuug

SEQ ID NO: 1863304 - RNA, 19 nt, Artificial Sequence
  Description of Artificial Sequence: Synthetic oligonucleotide
ucauauuccuugaaguauc

SEQ ID NO: 1863305 - RNA, 19 nt, Artificial Sequence
  Description of Artificial Sequence: Synthetic oligonucleotide
aaguucuggaaauucguau

SEQ ID NO: 1863306 - RNA, 19 nt, Artificial Sequence
  Description of Artificial Sequence: Synthetic oligonucleotide
cucugaguagucauagucc

SEQ ID NO: 1863307 - RNA, 19 nt, Artificial Sequence
  Description of Artificial Sequence: Synthetic oligonucleotide
aaccugaauugucuucaac

SEQ ID NO: 1863308 - RNA, 19 nt, Artificial Sequence
  Description of Artificial Sequence: Synthetic oligonucleotide
ucguuuucgaagcuggacu

SEQ ID NO: 1863309 - RNA, 19 nt, Artificial Sequence
  Description of Artificial Sequence: Synthetic oligonucleotide
aucaucuauaacauagccg

SEQ ID NO: 1863310 - RNA, 19 nt, Artificial Sequence
  Description of Artificial Sequence: Synthetic oligonucleotide
ucaacuaggcuaugacagg

SEQ ID NO: 1863311 - RNA, 19 nt, Artificial Sequence
  Description of Artificial Sequence: Synthetic oligonucleotide
aucauauuccucugaguag

SEQ ID NO: 1863312 - RNA, 19 nt, Artificial Sequence
  Description of Artificial Sequence: Synthetic oligonucleotide
auugacagcugaaagacug

SEQ ID NO: 1863313 - RNA, 19 nt, Artificial Sequence
  Description of Artificial Sequence: Synthetic oligonucleotide
acaaagacaguuauggcug

SEQ ID NO: 1863314 - RNA, 19 nt, Artificial Sequence
  Description of Artificial Sequence: Synthetic oligonucleotide
acugcaagguucucgaugu

SEQ ID NO: 1863315 - RNA, 19 nt, Artificial Sequence
  Description of Artificial Sequence: Synthetic oligonucleotide
cuugucgaagcuucuuucg

SEQ ID NO: 1863316 - RNA, 19 nt, Artificial Sequence
  Description of Artificial Sequence: Synthetic oligonucleotide
cauagccggauauuugugg

SEQ ID NO: 1863317 - RNA, 19 nt, Artificial Sequence
  Description of Artificial Sequence: Synthetic oligonucleotide
ccaucaugaaaauugacag

SEQ ID NO: 1863318 - RNA, 19 nt, Artificial Sequence
  Description of Artificial Sequence: Synthetic oligonucleotide
ccuaaaagaagcagcagcg

SEQ ID NO: 1863319 - RNA, 19 nt, Artificial Sequence
  Description of Artificial Sequence: Synthetic oligonucleotide
aucagcgggaacgaggagc

SEQ ID NO: 1863320 - RNA, 19 nt, Artificial Sequence
  Description of Artificial Sequence: Synthetic oligonucleotide
uucacuuaugguagagacc

SEQ ID NO: 1863321 - RNA, 19 nt, Artificial Sequence
  Description of Artificial Sequence: Synthetic oligonucleotide
uauuccuugaaguaucguu

SEQ ID NO: 1863322 - RNA, 19 nt, Artificial Sequence
  Description of Artificial Sequence: Synthetic oligonucleotide
uggaaauucguaucacaug

SEQ ID NO: 1863323 - RNA, 19 nt, Artificial Sequence
  Description of Artificial Sequence: Synthetic oligonucleotide
ugcuaaugcaaucuuggau

SEQ ID NO: 1863324 - RNA, 19 nt, Artificial Sequence
  Description of Artificial Sequence: Synthetic oligonucleotide
aggguuaccacagagacaa

SEQ ID NO: 1863325 - RNA, 19 nt, Artificial Sequence
  Description of Artificial Sequence: Synthetic oligonucleotide
ucuggaaauucguaucaca

SEQ ID NO: 1863326 - RNA, 19 nt, Artificial Sequence
  Description of Artificial Sequence: Synthetic oligonucleotide
ugcgggaucagcgggaacg

SEQ ID NO: 1863327 - RNA, 19 nt, Artificial Sequence
  Description of Artificial Sequence: Synthetic oligonucleotide
aagaggaccaauguggcau

SEQ ID NO: 1863328 - RNA, 19 nt, Artificial Sequence
  Description of Artificial Sequence: Synthetic oligonucleotide
uaauuaccuguucaacucu

SEQ ID NO: 1863329 - RNA, 19 nt, Artificial Sequence
  Description of Artificial Sequence: Synthetic oligonucleotide
ugcauaauggccugagccu

SEQ ID NO: 1863330 - RNA, 19 nt, Artificial Sequence
  Description of Artificial Sequence: Synthetic oligonucleotide
cagaaauaagaccaucaug

SEQ ID NO: 1863331 - RNA, 19 nt, Artificial Sequence
  Description of Artificial Sequence: Synthetic oligonucleotide
agaagaggaccaauguggc

SEQ ID NO: 1863332 - RNA, 19 nt, Artificial Sequence
  Description of Artificial Sequence: Synthetic oligonucleotide
uuguggcucauuaucauau

SEQ ID NO: 1863333 - RNA, 19 nt, Artificial Sequence
  Description of Artificial Sequence: Synthetic oligonucleotide
aacucugacugaaucaucu

SEQ ID NO: 1863334 - RNA, 19 nt, Artificial Sequence
  Description of Artificial Sequence: Synthetic oligonucleotide
aguuauggcugcuaaugca

SEQ ID NO: 1863335 - RNA, 19 nt, Artificial Sequence
  Description of Artificial Sequence: Synthetic oligonucleotide
cuaccuuucccacuuuugc

SEQ ID NO: 1863336 - RNA, 19 nt, Artificial Sequence
  Description of Artificial Sequence: Synthetic oligonucleotide
guaucguuuucgaagcugg

SEQ ID NO: 1863337 - RNA, 19 nt, Artificial Sequence
  Description of Artificial Sequence: Synthetic oligonucleotide
auggccugagccuaaaaga

SEQ ID NO: 1863338 - RNA, 19 nt, Artificial Sequence
  Description of Artificial Sequence: Synthetic oligonucleotide
gagcuauaaaauaaauaac

SEQ ID NO: 1863339 - RNA, 19 nt, Artificial Sequence
  Description of Artificial Sequence: Synthetic oligonucleotide
uucauauuccuugaaguau

SEQ ID NO: 1863340 - RNA, 19 nt, Artificial Sequence
  Description of Artificial Sequence: Synthetic oligonucleotide
acagaaauaagaccaucau

SEQ ID NO: 1863341 - RNA, 19 nt, Artificial Sequence
  Description of Artificial Sequence: Synthetic oligonucleotide
auacuuuaucuccacacau

SEQ ID NO: 1863342 - RNA, 19 nt, Artificial Sequence
  Description of Artificial Sequence: Synthetic oligonucleotide
uggaauuuucccagaggug

SEQ ID NO: 1863343 - RNA, 19 nt, Artificial Sequence
  Description of Artificial Sequence: Synthetic oligonucleotide
uuggauaggucauugucau

SEQ ID NO: 1863344 - RNA, 19 nt, Artificial Sequence
  Description of Artificial Sequence: Synthetic oligonucleotide
cuugcaugucacugcaagg

SEQ ID NO: 1863345 - RNA, 19 nt, Artificial Sequence
  Description of Artificial Sequence: Synthetic oligonucleotide
uugucgaagcuucuuucgc

SEQ ID NO: 1863346 - RNA, 19 nt, Artificial Sequence
  Description of Artificial Sequence: Synthetic oligonucleotide
gaaauucguaucacauggg

SEQ ID NO: 1863347 - RNA, 19 nt, Artificial Sequence
  Description of Artificial Sequence: Synthetic oligonucleotide
uuuggguuugucugaaguc

SEQ ID NO: 1863348 - RNA, 19 nt, Artificial Sequence
  Description of Artificial Sequence: Synthetic oligonucleotide
agaaaaugcuggaauuuuc

SEQ ID NO: 1863349 - RNA, 19 nt, Artificial Sequence
  Description of Artificial Sequence: Synthetic oligonucleotide
ucuauaacauagccggaua

SEQ ID NO: 1863350 - RNA, 19 nt, Artificial Sequence
  Description of Artificial Sequence: Synthetic oligonucleotide
cuuggauaggucauuguca

SEQ ID NO: 1863351 - RNA, 19 nt, Artificial Sequence
  Description of Artificial Sequence: Synthetic oligonucleotide
uacuuuaucuccacacauc

SEQ ID NO: 1863352 - RNA, 19 nt, Artificial Sequence
  Description of Artificial Sequence: Synthetic oligonucleotide
caugaaaauugacagcuga

SEQ ID NO: 1863353 - RNA, 19 nt, Artificial Sequence
  Description of Artificial Sequence: Synthetic oligonucleotide
uuaucauauuccucugagu

SEQ ID NO: 1863354 - RNA, 19 nt, Artificial Sequence
  Description of Artificial Sequence: Synthetic oligonucleotide
cuaugacagguacauuucc

SEQ ID NO: 1863355 - RNA, 19 nt, Artificial Sequence
  Description of Artificial Sequence: Synthetic oligonucleotide
ugcuggaauuuucccagag

SEQ ID NO: 1863356 - RNA, 19 nt, Artificial Sequence
  Description of Artificial Sequence: Synthetic oligonucleotide
uucuugggcuuaauuaccu

SEQ ID NO: 1863357 - RNA, 19 nt, Artificial Sequence
  Description of Artificial Sequence: Synthetic oligonucleotide
uauuccucugaguagucau

SEQ ID NO: 1863358 - RNA, 19 nt, Artificial Sequence
  Description of Artificial Sequence: Synthetic oligonucleotide
uguucgcgugucaggaggg

SEQ ID NO: 1863359 - RNA, 19 nt, Artificial Sequence
  Description of Artificial Sequence: Synthetic oligonucleotide
uuucugacuuggcagugac

SEQ ID NO: 1863360 - RNA, 19 nt, Artificial Sequence
  Description of Artificial Sequence: Synthetic oligonucleotide
aauuaccuguucaacucug

SEQ ID NO: 1863361 - RNA, 19 nt, Artificial Sequence
  Description of Artificial Sequence: Synthetic oligonucleotide
cuuaauuaccuguucaacu

SEQ ID NO: 1863362 - RNA, 19 nt, Artificial Sequence
  Description of Artificial Sequence: Synthetic oligonucleotide
cacacuugcaugucacugc

SEQ ID NO: 1863363 - RNA, 19 nt, Artificial Sequence
  Description of Artificial Sequence: Synthetic oligonucleotide
cuucaucaagaagaggacc

SEQ ID NO: 1863364 - RNA, 19 nt, Artificial Sequence
  Description of Artificial Sequence: Synthetic oligonucleotide
auacacauucaccaugaau

SEQ ID NO: 1863365 - RNA, 19 nt, Artificial Sequence
  Description of Artificial Sequence: Synthetic oligonucleotide
uccacacaucucauuaugu

SEQ ID NO: 1863366 - RNA, 19 nt, Artificial Sequence
  Description of Artificial Sequence: Synthetic oligonucleotide
uuaccuguucaacucugac

SEQ ID NO: 1863367 - RNA, 19 nt, Artificial Sequence
  Description of Artificial Sequence: Synthetic oligonucleotide
agucauaguccccugugga

SEQ ID NO: 1863368 - RNA, 19 nt, Artificial Sequence
  Description of Artificial Sequence: Synthetic oligonucleotide
gaaagacuggaaccaucag

SEQ ID NO: 1863369 - RNA, 19 nt, Artificial Sequence
  Description of Artificial Sequence: Synthetic oligonucleotide
acagcguucaccaaaguau

SEQ ID NO: 1863370 - RNA, 19 nt, Artificial Sequence
  Description of Artificial Sequence: Synthetic oligonucleotide
ucauuggucccgcgggccg

SEQ ID NO: 1863371 - RNA, 19 nt, Artificial Sequence
  Description of Artificial Sequence: Synthetic oligonucleotide
uaccuguucaacucugacu

SEQ ID NO: 1863372 - RNA, 19 nt, Artificial Sequence
  Description of Artificial Sequence: Synthetic oligonucleotide
gaauugucuucaacuaggc

SEQ ID NO: 1863373 - RNA, 19 nt, Artificial Sequence
  Description of Artificial Sequence: Synthetic oligonucleotide
guguucgcgugucaggagg

SEQ ID NO: 1863374 - RNA, 19 nt, Artificial Sequence
  Description of Artificial Sequence: Synthetic oligonucleotide
guucucauuggucccgcgg

SEQ ID NO: 1863375 - RNA, 19 nt, Artificial Sequence
  Description of Artificial Sequence: Synthetic oligonucleotide
aucaagaagaggaccaaug

SEQ ID NO: 1863376 - RNA, 19 nt, Artificial Sequence
  Description of Artificial Sequence: Synthetic oligonucleotide
uaggcuaugacagguacau

SEQ ID NO: 1863377 - RNA, 19 nt, Artificial Sequence
  Description of Artificial Sequence: Synthetic oligonucleotide
guagucauaguccccugug

SEQ ID NO: 1863378 - RNA, 19 nt, Artificial Sequence
  Description of Artificial Sequence: Synthetic oligonucleotide
ugacugaaucaucuauaac

SEQ ID NO: 1863379 - RNA, 19 nt, Artificial Sequence
  Description of Artificial Sequence: Synthetic oligonucleotide
gaugucggggcgguguucg

SEQ ID NO: 1863380 - RNA, 19 nt, Artificial Sequence
  Description of Artificial Sequence: Synthetic oligonucleotide
ucuuucgcucuucugcuuc

SEQ ID NO: 1863381 - RNA, 19 nt, Artificial Sequence
  Description of Artificial Sequence: Synthetic oligonucleotide
guuaaccugaauugucuuc

SEQ ID NO: 1863382 - RNA, 19 nt, Artificial Sequence
  Description of Artificial Sequence: Synthetic oligonucleotide
ggcauuucacuuaugguag

SEQ ID NO: 1863383 - RNA, 19 nt, Artificial Sequence
  Description of Artificial Sequence: Synthetic oligonucleotide
auaacauagccggauauuu

SEQ ID NO: 1863384 - RNA, 19 nt, Artificial Sequence
  Description of Artificial Sequence: Synthetic oligonucleotide
gcuaaugcaaucuuggaua

SEQ ID NO: 1863385 - RNA, 19 nt, Artificial Sequence
  Description of Artificial Sequence: Synthetic oligonucleotide
gcugcuaaugcaaucuugg

SEQ ID NO: 1863386 - RNA, 19 nt, Artificial Sequence
  Description of Artificial Sequence: Synthetic oligonucleotide
gagaguucacugccagagg

SEQ ID NO: 1863387 - RNA, 19 nt, Artificial Sequence
  Description of Artificial Sequence: Synthetic oligonucleotide
acacaucucauuauguaca

SEQ ID NO: 1863388 - RNA, 19 nt, Artificial Sequence
  Description of Artificial Sequence: Synthetic oligonucleotide
uugaaguaucguuuucgaa

SEQ ID NO: 1863389 - RNA, 19 nt, Artificial Sequence
  Description of Artificial Sequence: Synthetic oligonucleotide
aguaucguuuucgaagcug

SEQ ID NO: 1863390 - RNA, 19 nt, Artificial Sequence
  Description of Artificial Sequence: Synthetic oligonucleotide
uuuucgaagcuggacugug

SEQ ID NO: 1863391 - RNA, 19 nt, Artificial Sequence
  Description of Artificial Sequence: Synthetic oligonucleotide
agcgggcaagcacuggcgc

SEQ ID NO: 1863392 - RNA, 19 nt, Artificial Sequence
  Description of Artificial Sequence: Synthetic oligonucleotide
ugacuuggcagugacgcga

SEQ ID NO: 1863393 - RNA, 19 nt, Artificial Sequence
  Description of Artificial Sequence: Synthetic oligonucleotide
cuuaugguagagaccucac

SEQ ID NO: 1863394 - RNA, 19 nt, Artificial Sequence
  Description of Artificial Sequence: Synthetic oligonucleotide
cuucaacuaggcuaugaca

SEQ ID NO: 1863395 - RNA, 19 nt, Artificial Sequence
  Description of Artificial Sequence: Synthetic oligonucleotide
aauucguaucacauggguu

SEQ ID NO: 1863396 - RNA, 19 nt, Artificial Sequence
  Description of Artificial Sequence: Synthetic oligonucleotide
uuuguggcucauuaucaua

SEQ ID NO: 1863397 - RNA, 19 nt, Artificial Sequence
  Description of Artificial Sequence: Synthetic oligonucleotide
cucugcggcgacacgacgg

SEQ ID NO: 1863398 - RNA, 19 nt, Artificial Sequence
  Description of Artificial Sequence: Synthetic oligonucleotide
aaguaucguuuucgaagcu

SEQ ID NO: 1863399 - RNA, 19 nt, Artificial Sequence
  Description of Artificial Sequence: Synthetic oligonucleotide
agagaccucacuucccgca

SEQ ID NO: 1863400 - RNA, 19 nt, Artificial Sequence
  Description of Artificial Sequence: Synthetic oligonucleotide
agaaguucuggaaauucgu

SEQ ID NO: 1863401 - RNA, 19 nt, Artificial Sequence
  Description of Artificial Sequence: Synthetic oligonucleotide
uggguuugucugaaguccu

SEQ ID NO: 1863402 - RNA, 19 nt, Artificial Sequence
  Description of Artificial Sequence: Synthetic oligonucleotide
gagccuaaaagaagcagca

SEQ ID NO: 1863403 - RNA, 19 nt, Artificial Sequence
  Description of Artificial Sequence: Synthetic oligonucleotide
acacuugcaugucacugca

SEQ ID NO: 1863404 - RNA, 19 nt, Artificial Sequence
  Description of Artificial Sequence: Synthetic oligonucleotide
uauaacauagccggauauu

SEQ ID NO: 1863405 - RNA, 19 nt, Artificial Sequence
  Description of Artificial Sequence: Synthetic oligonucleotide
uguuaaccugaauugucuu

SEQ ID NO: 1863406 - RNA, 19 nt, Artificial Sequence
  Description of Artificial Sequence: Synthetic oligonucleotide
uuucgaagcuggacuguga

SEQ ID NO: 1863407 - RNA, 19 nt, Artificial Sequence
  Description of Artificial Sequence: Synthetic oligonucleotide
agggcauuucacuuauggu

SEQ ID NO: 1863408 - RNA, 19 nt, Artificial Sequence
  Description of Artificial Sequence: Synthetic oligonucleotide
ugggcugcgggaucagcgg

SEQ ID NO: 1863409 - RNA, 19 nt, Artificial Sequence
  Description of Artificial Sequence: Synthetic oligonucleotide
aaguccuguccccuucugu

SEQ ID NO: 1863410 - RNA, 19 nt, Artificial Sequence
  Description of Artificial Sequence: Synthetic oligonucleotide
uaaugcaaucuuggauagg

SEQ ID NO: 1863411 - RNA, 19 nt, Artificial Sequence
  Description of Artificial Sequence: Synthetic oligonucleotide
cuccacacaucucauuaug

SEQ ID NO: 1863412 - RNA, 19 nt, Artificial Sequence
  Description of Artificial Sequence: Synthetic oligonucleotide
cauuucacuuaugguagag

SEQ ID NO: 1863413 - RNA, 19 nt, Artificial Sequence
  Description of Artificial Sequence: Synthetic oligonucleotide
ugacgcgacuguuaaccug

SEQ ID NO: 1863414 - RNA, 19 nt, Artificial Sequence
  Description of Artificial Sequence: Synthetic oligonucleotide
uuguggugcccagaaaaug

SEQ ID NO: 1863415 - RNA, 19 nt, Artificial Sequence
  Description of Artificial Sequence: Synthetic oligonucleotide
uuaucuccacacaucucau

SEQ ID NO: 1863416 - RNA, 19 nt, Artificial Sequence
  Description of Artificial Sequence: Synthetic oligonucleotide
uuggcagugacgcgacugu

SEQ ID NO: 1863417 - RNA, 19 nt, Artificial Sequence
  Description of Artificial Sequence: Synthetic oligonucleotide
aucuauaacauagccggau

SEQ ID NO: 1863418 - RNA, 19 nt, Artificial Sequence
  Description of Artificial Sequence: Synthetic oligonucleotide
gcggaguucucauuggucc

SEQ ID NO: 1863419 - RNA, 19 nt, Artificial Sequence
  Description of Artificial Sequence: Synthetic oligonucleotide
cuggaauuuucccagaggu

SEQ ID NO: 1863420 - RNA, 19 nt, Artificial Sequence
  Description of Artificial Sequence: Synthetic oligonucleotide
uauggcugcuaaugcaauc

SEQ ID NO: 1863421 - RNA, 19 nt, Artificial Sequence
  Description of Artificial Sequence: Synthetic oligonucleotide
uuauggcugcuaaugcaau

SEQ ID NO: 1863422 - RNA, 19 nt, Artificial Sequence
  Description of Artificial Sequence: Synthetic oligonucleotide
uaucguuuucgaagcugga

SEQ ID NO: 1863423 - RNA, 19 nt, Artificial Sequence
  Description of Artificial Sequence: Synthetic oligonucleotide
augagcuauaaaauaaaua

SEQ ID NO: 1863424 - RNA, 19 nt, Artificial Sequence
  Description of Artificial Sequence: Synthetic oligonucleotide
cugaaagacuggaaccauc

SEQ ID NO: 1863425 - RNA, 19 nt, Artificial Sequence
  Description of Artificial Sequence: Synthetic oligonucleotide
cugagccuaaaagaagcag

SEQ ID NO: 1863426 - RNA, 19 nt, Artificial Sequence
  Description of Artificial Sequence: Synthetic oligonucleotide
gagaccucacuucccgcag

SEQ ID NO: 1863427 - RNA, 19 nt, Artificial Sequence
  Description of Artificial Sequence: Synthetic oligonucleotide
ugggcuuaauuaccuguuc

SEQ ID NO: 1863428 - RNA, 19 nt, Artificial Sequence
  Description of Artificial Sequence: Synthetic oligonucleotide
ugcucugagucuucaugga

SEQ ID NO: 1863429 - RNA, 19 nt, Artificial Sequence
  Description of Artificial Sequence: Synthetic oligonucleotide
agccggauauuuguggcuc

SEQ ID NO: 1863430 - RNA, 19 nt, Artificial Sequence
  Description of Artificial Sequence: Synthetic oligonucleotide
gaggugguaucauucaggu

SEQ ID NO: 1863431 - RNA, 19 nt, Artificial Sequence
  Description of Artificial Sequence: Synthetic oligonucleotide
acggcuggggcucugggcu

SEQ ID NO: 1863432 - RNA, 19 nt, Artificial Sequence
  Description of Artificial Sequence: Synthetic oligonucleotide
ugacagcugaaagacugga

SEQ ID NO: 1863433 - RNA, 19 nt, Artificial Sequence
  Description of Artificial Sequence: Synthetic oligonucleotide
gggaacgaggagcagcggg

SEQ ID NO: 1863434 - RNA, 19 nt, Artificial Sequence
  Description of Artificial Sequence: Synthetic oligonucleotide
ucucugcggcgacacgacg

SEQ ID NO: 1863435 - RNA, 19 nt, Artificial Sequence
  Description of Artificial Sequence: Synthetic oligonucleotide
agacaguuauggcugcuaa

SEQ ID NO: 1863436 - RNA, 19 nt, Artificial Sequence
  Description of Artificial Sequence: Synthetic oligonucleotide
acagguacauuuccaguuu

SEQ ID NO: 1863437 - RNA, 19 nt, Artificial Sequence
  Description of Artificial Sequence: Synthetic oligonucleotide
auuucacuuaugguagaga

SEQ ID NO: 1863438 - RNA, 19 nt, Artificial Sequence
  Description of Artificial Sequence: Synthetic oligonucleotide
uguuucugacuuggcagug

SEQ ID NO: 1863439 - RNA, 19 nt, Artificial Sequence
  Description of Artificial Sequence: Synthetic oligonucleotide
ugcggcgacacgacggcug

SEQ ID NO: 1863440 - RNA, 19 nt, Artificial Sequence
  Description of Artificial Sequence: Synthetic oligonucleotide
gacgcgacuguuaaccuga

SEQ ID NO: 1863441 - RNA, 19 nt, Artificial Sequence
  Description of Artificial Sequence: Synthetic oligonucleotide
caucagaaggcuccacuuc

SEQ ID NO: 1863442 - RNA, 19 nt, Artificial Sequence
  Description of Artificial Sequence: Synthetic oligonucleotide
ccuugaaguaucguuuucg

SEQ ID NO: 1863443 - RNA, 19 nt, Artificial Sequence
  Description of Artificial Sequence: Synthetic oligonucleotide
uccuugaaguaucguuuuc

SEQ ID NO: 1863444 - RNA, 19 nt, Artificial Sequence
  Description of Artificial Sequence: Synthetic oligonucleotide
cucgauguauacacauuca

SEQ ID NO: 1863445 - RNA, 19 nt, Artificial Sequence
  Description of Artificial Sequence: Synthetic oligonucleotide
gacagguacauuuccaguu

SEQ ID NO: 1863446 - RNA, 19 nt, Artificial Sequence
  Description of Artificial Sequence: Synthetic oligonucleotide
ucuccacacaucucauuau

SEQ ID NO: 1863447 - RNA, 19 nt, Artificial Sequence
  Description of Artificial Sequence: Synthetic oligonucleotide
cugacuuggcagugacgcg

SEQ ID NO: 1863448 - RNA, 19 nt, Artificial Sequence
  Description of Artificial Sequence: Synthetic oligonucleotide
cuuggcagugacgcgacug

SEQ ID NO: 1863449 - RNA, 19 nt, Artificial Sequence
  Description of Artificial Sequence: Synthetic oligonucleotide
ucgaagcuggacugugaca

SEQ ID NO: 1863450 - RNA, 19 nt, Artificial Sequence
  Description of Artificial Sequence: Synthetic oligonucleotide
ugcaugucacugcaagguu

SEQ ID NO: 1863451 - RNA, 19 nt, Artificial Sequence
  Description of Artificial Sequence: Synthetic oligonucleotide
ugcaagguucucgauguau

SEQ ID NO: 1863452 - RNA, 19 nt, Artificial Sequence
  Description of Artificial Sequence: Synthetic oligonucleotide
aguucucauuggucccgcg

SEQ ID NO: 1863453 - RNA, 19 nt, Artificial Sequence
  Description of Artificial Sequence: Synthetic oligonucleotide
uucguaucacauggguucu

SEQ ID NO: 1863454 - RNA, 19 nt, Artificial Sequence
  Description of Artificial Sequence: Synthetic oligonucleotide
acccagcugcauaauggcc

SEQ ID NO: 1863455 - RNA, 19 nt, Artificial Sequence
  Description of Artificial Sequence: Synthetic oligonucleotide
guuugucugaaguccuguc

SEQ ID NO: 1863456 - RNA, 19 nt, Artificial Sequence
  Description of Artificial Sequence: Synthetic oligonucleotide
agaccaucaugaaaauuga

SEQ ID NO: 1863457 - RNA, 19 nt, Artificial Sequence
  Description of Artificial Sequence: Synthetic oligonucleotide
aucuuggauaggucauugu

SEQ ID NO: 1863458 - RNA, 19 nt, Artificial Sequence
  Description of Artificial Sequence: Synthetic oligonucleotide
cacuuccuucaucaagaag

SEQ ID NO: 1863459 - RNA, 19 nt, Artificial Sequence
  Description of Artificial Sequence: Synthetic oligonucleotide
uucuaccuuucccacuuuu

SEQ ID NO: 1863460 - RNA, 19 nt, Artificial Sequence
  Description of Artificial Sequence: Synthetic oligonucleotide
aucacacuugcaugucacu

SEQ ID NO: 1863461 - RNA, 19 nt, Artificial Sequence
  Description of Artificial Sequence: Synthetic oligonucleotide
cauucagguccaacccagc

SEQ ID NO: 1863462 - RNA, 19 nt, Artificial Sequence
  Description of Artificial Sequence: Synthetic oligonucleotide
uggaaccaucagaaggcuc

SEQ ID NO: 1863463 - RNA, 19 nt, Artificial Sequence
  Description of Artificial Sequence: Synthetic oligonucleotide
uccccuucugucuuauuuu

SEQ ID NO: 1863464 - RNA, 19 nt, Artificial Sequence
  Description of Artificial Sequence: Synthetic oligonucleotide
ccucugaguagucauaguc

SEQ ID NO: 1863465 - RNA, 19 nt, Artificial Sequence
  Description of Artificial Sequence: Synthetic oligonucleotide
ggauaggucauugucaucu

SEQ ID NO: 1863466 - RNA, 19 nt, Artificial Sequence
  Description of Artificial Sequence: Synthetic oligonucleotide
agcggaguucucauugguc

SEQ ID NO: 1863467 - RNA, 19 nt, Artificial Sequence
  Description of Artificial Sequence: Synthetic oligonucleotide
aauuuucccagagguggua

SEQ ID NO: 1863468 - RNA, 19 nt, Artificial Sequence
  Description of Artificial Sequence: Synthetic oligonucleotide
cauauuccucugaguaguc

SEQ ID NO: 1863469 - RNA, 19 nt, Artificial Sequence
  Description of Artificial Sequence: Synthetic oligonucleotide
uagccggauauuuguggcu

SEQ ID NO: 1863470 - RNA, 19 nt, Artificial Sequence
  Description of Artificial Sequence: Synthetic oligonucleotide
ccucacuucccgcagaaac

SEQ ID NO: 1863471 - RNA, 19 nt, Artificial Sequence
  Description of Artificial Sequence: Synthetic oligonucleotide
uucgcgugucaggagggag

SEQ ID NO: 1863472 - RNA, 19 nt, Artificial Sequence
  Description of Artificial Sequence: Synthetic oligonucleotide
gaccaucaugaaaauugac

SEQ ID NO: 1863473 - RNA, 19 nt, Artificial Sequence
  Description of Artificial Sequence: Synthetic oligonucleotide
uucccgcagaaaccacaag

SEQ ID NO: 1863474 - RNA, 19 nt, Artificial Sequence
  Description of Artificial Sequence: Synthetic oligonucleotide
agccuaaaagaagcagcag

SEQ ID NO: 1863475 - RNA, 19 nt, Artificial Sequence
  Description of Artificial Sequence: Synthetic oligonucleotide
cuguuaaccugaauugucu

SEQ ID NO: 1863476 - RNA, 19 nt, Artificial Sequence
  Description of Artificial Sequence: Synthetic oligonucleotide
cuaaaagaagcagcagcga

SEQ ID NO: 1863477 - RNA, 19 nt, Artificial Sequence
  Description of Artificial Sequence: Synthetic oligonucleotide
gaaguucuggaaauucgua

SEQ ID NO: 1863478 - RNA, 19 nt, Artificial Sequence
  Description of Artificial Sequence: Synthetic oligonucleotide
gccugagccuaaaagaagc

SEQ ID NO: 1863479 - RNA, 19 nt, Artificial Sequence
  Description of Artificial Sequence: Synthetic oligonucleotide
cuugggcuuaauuaccugu

SEQ ID NO: 1863480 - RNA, 19 nt, Artificial Sequence
  Description of Artificial Sequence: Synthetic oligonucleotide
agggaugcccagcccgccg

SEQ ID NO: 1863481 - RNA, 19 nt, Artificial Sequence
  Description of Artificial Sequence: Synthetic oligonucleotide
gggaucagcgggaacgagg

SEQ ID NO: 1863482 - RNA, 19 nt, Artificial Sequence
  Description of Artificial Sequence: Synthetic oligonucleotide
cgacuguuaaccugaauug

SEQ ID NO: 1863483 - RNA, 19 nt, Artificial Sequence
  Description of Artificial Sequence: Synthetic oligonucleotide
gaagcuggacugugacaac

SEQ ID NO: 1863484 - RNA, 19 nt, Artificial Sequence
  Description of Artificial Sequence: Synthetic oligonucleotide
augaggguuaccacagaga

SEQ ID NO: 1863485 - RNA, 19 nt, Artificial Sequence
  Description of Artificial Sequence: Synthetic oligonucleotide
gcuuaauuaccuguucaac

SEQ ID NO: 1863486 - RNA, 19 nt, Artificial Sequence
  Description of Artificial Sequence: Synthetic oligonucleotide
cuaggcuaugacagguaca

SEQ ID NO: 1863487 - RNA, 19 nt, Artificial Sequence
  Description of Artificial Sequence: Synthetic oligonucleotide
agcguucaccaaaguauuc

SEQ ID NO: 1863488 - RNA, 19 nt, Artificial Sequence
  Description of Artificial Sequence: Synthetic oligonucleotide
gacugcaccaggagcgccc

SEQ ID NO: 1863489 - RNA, 19 nt, Artificial Sequence
  Description of Artificial Sequence: Synthetic oligonucleotide
ggaguucucauuggucccg

SEQ ID NO: 1863490 - RNA, 19 nt, Artificial Sequence
  Description of Artificial Sequence: Synthetic oligonucleotide
caacucugacugaaucauc

SEQ ID NO: 1863491 - RNA, 19 nt, Artificial Sequence
  Description of Artificial Sequence: Synthetic oligonucleotide
acauagccggauauuugug

SEQ ID NO: 1863492 - RNA, 19 nt, Artificial Sequence
  Description of Artificial Sequence: Synthetic oligonucleotide
gacuguuaaccugaauugu

SEQ ID NO: 1863493 - RNA, 19 nt, Artificial Sequence
  Description of Artificial Sequence: Synthetic oligonucleotide
auuguggugcccagaaaau

SEQ ID NO: 1863494 - RNA, 19 nt, Artificial Sequence
  Description of Artificial Sequence: Synthetic oligonucleotide
uaauggccugagccuaaaa

SEQ ID NO: 1863495 - RNA, 19 nt, Artificial Sequence
  Description of Artificial Sequence: Synthetic oligonucleotide
gggcuuaauuaccuguuca

SEQ ID NO: 1863496 - RNA, 19 nt, Artificial Sequence
  Description of Artificial Sequence: Synthetic oligonucleotide
gacacgacggcuggggcuc

SEQ ID NO: 1863497 - RNA, 19 nt, Artificial Sequence
  Description of Artificial Sequence: Synthetic oligonucleotide
augcaaucuuggauagguc

SEQ ID NO: 1863498 - RNA, 19 nt, Artificial Sequence
  Description of Artificial Sequence: Synthetic oligonucleotide
ggcuuaauuaccuguucaa

SEQ ID NO: 1863499 - RNA, 19 nt, Artificial Sequence
  Description of Artificial Sequence: Synthetic oligonucleotide
ggacugugacaacaaugcc

SEQ ID NO: 1863500 - RNA, 19 nt, Artificial Sequence
  Description of Artificial Sequence: Synthetic oligonucleotide
auauuccuugaaguaucgu

SEQ ID NO: 1863501 - RNA, 19 nt, Artificial Sequence
  Description of Artificial Sequence: Synthetic oligonucleotide
auuaccuguucaacucuga

SEQ ID NO: 1863502 - RNA, 19 nt, Artificial Sequence
  Description of Artificial Sequence: Synthetic oligonucleotide
cucauuggucccgcgggcc

SEQ ID NO: 1863503 - RNA, 19 nt, Artificial Sequence
  Description of Artificial Sequence: Synthetic oligonucleotide
uguggcucauuaucauauu

SEQ ID NO: 1863504 - RNA, 19 nt, Artificial Sequence
  Description of Artificial Sequence: Synthetic oligonucleotide
aacgaggagcagcgggcaa

SEQ ID NO: 1863505 - RNA, 19 nt, Artificial Sequence
  Description of Artificial Sequence: Synthetic oligonucleotide
gaucagcgggaacgaggag

SEQ ID NO: 1863506 - RNA, 19 nt, Artificial Sequence
  Description of Artificial Sequence: Synthetic oligonucleotide
cugcuaaugcaaucuugga

SEQ ID NO: 1863507 - RNA, 19 nt, Artificial Sequence
  Description of Artificial Sequence: Synthetic oligonucleotide
accacaaguccaguggcau

SEQ ID NO: 1863508 - RNA, 19 nt, Artificial Sequence
  Description of Artificial Sequence: Synthetic oligonucleotide
ggaacgaggagcagcgggc

SEQ ID NO: 1863509 - RNA, 19 nt, Artificial Sequence
  Description of Artificial Sequence: Synthetic oligonucleotide
aucucauuauguacagaaa

SEQ ID NO: 1863510 - RNA, 19 nt, Artificial Sequence
  Description of Artificial Sequence: Synthetic oligonucleotide
cacagcguucaccaaagua

SEQ ID NO: 1863511 - RNA, 19 nt, Artificial Sequence
  Description of Artificial Sequence: Synthetic oligonucleotide
agguacauuuccaguuucu

SEQ ID NO: 1863512 - RNA, 19 nt, Artificial Sequence
  Description of Artificial Sequence: Synthetic oligonucleotide
uggauaggucauugucauc

SEQ ID NO: 1863513 - RNA, 19 nt, Artificial Sequence
  Description of Artificial Sequence: Synthetic oligonucleotide
gcgacuguuaaccugaauu

SEQ ID NO: 1863514 - RNA, 19 nt, Artificial Sequence
  Description of Artificial Sequence: Synthetic oligonucleotide
accaggagcgcccgcggca

SEQ ID NO: 1863515 - RNA, 19 nt, Artificial Sequence
  Description of Artificial Sequence: Synthetic oligonucleotide
gaguucucauuggucccgc

SEQ ID NO: 1863516 - RNA, 19 nt, Artificial Sequence
  Description of Artificial Sequence: Synthetic oligonucleotide
ccgcagaaaccacaagucc

SEQ ID NO: 1863517 - RNA, 19 nt, Artificial Sequence
  Description of Artificial Sequence: Synthetic oligonucleotide
cccgcagaaaccacaaguc

SEQ ID NO: 1863518 - RNA, 19 nt, Artificial Sequence
  Description of Artificial Sequence: Synthetic oligonucleotide
ugcagaaguucuggaaauu

SEQ ID NO: 1863519 - RNA, 19 nt, Artificial Sequence
  Description of Artificial Sequence: Synthetic oligonucleotide
augucggggcgguguucgc

SEQ ID NO: 1863520 - RNA, 19 nt, Artificial Sequence
  Description of Artificial Sequence: Synthetic oligonucleotide
uccuguccccuucugucuu

SEQ ID NO: 1863521 - RNA, 19 nt, Artificial Sequence
  Description of Artificial Sequence: Synthetic oligonucleotide
cuucccgcagaaaccacaa

SEQ ID NO: 1863522 - RNA, 19 nt, Artificial Sequence
  Description of Artificial Sequence: Synthetic oligonucleotide
cugaaucaucuauaacaua

SEQ ID NO: 1863523 - RNA, 19 nt, Artificial Sequence
  Description of Artificial Sequence: Synthetic oligonucleotide
gucuucaacuaggcuauga

SEQ ID NO: 1863524 - RNA, 19 nt, Artificial Sequence
  Description of Artificial Sequence: Synthetic oligonucleotide
acaucucauuauguacaga

SEQ ID NO: 1863525 - RNA, 19 nt, Artificial Sequence
  Description of Artificial Sequence: Synthetic oligonucleotide
agaggaccaauguggcauu

SEQ ID NO: 1863526 - RNA, 19 nt, Artificial Sequence
  Description of Artificial Sequence: Synthetic oligonucleotide
gaggguuaccacagagaca

SEQ ID NO: 1863527 - RNA, 19 nt, Artificial Sequence
  Description of Artificial Sequence: Synthetic oligonucleotide
ggaucagcgggaacgagga

SEQ ID NO: 1863528 - RNA, 19 nt, Artificial Sequence
  Description of Artificial Sequence: Synthetic oligonucleotide
cguuuucgaagcuggacug

SEQ ID NO: 1863529 - RNA, 19 nt, Artificial Sequence
  Description of Artificial Sequence: Synthetic oligonucleotide
gcuaugacagguacauuuc

SEQ ID NO: 1863530 - RNA, 19 nt, Artificial Sequence
  Description of Artificial Sequence: Synthetic oligonucleotide
uucuuucgcucuucugcuu

SEQ ID NO: 1863531 - RNA, 19 nt, Artificial Sequence
  Description of Artificial Sequence: Synthetic oligonucleotide
gacagcugaaagacuggaa

SEQ ID NO: 1863532 - RNA, 19 nt, Artificial Sequence
  Description of Artificial Sequence: Synthetic oligonucleotide
gugcccagaaaaugcugga

SEQ ID NO: 1863533 - RNA, 19 nt, Artificial Sequence
  Description of Artificial Sequence: Synthetic oligonucleotide
gacuuggcagugacgcgac

SEQ ID NO: 1863534 - RNA, 19 nt, Artificial Sequence
  Description of Artificial Sequence: Synthetic oligonucleotide
ggcgcagggaugcccagcc

SEQ ID NO: 1863535 - RNA, 19 nt, Artificial Sequence
  Description of Artificial Sequence: Synthetic oligonucleotide
ccugaauugucuucaacua

SEQ ID NO: 1863536 - RNA, 19 nt, Artificial Sequence
  Description of Artificial Sequence: Synthetic oligonucleotide
gaacgaggagcagcgggca

SEQ ID NO: 1863537 - RNA, 19 nt, Artificial Sequence
  Description of Artificial Sequence: Synthetic oligonucleotide
cauaauggccugagccuaa

SEQ ID NO: 1863538 - RNA, 19 nt, Artificial Sequence
  Description of Artificial Sequence: Synthetic oligonucleotide
gguguucgcgugucaggag

SEQ ID NO: 1863539 - RNA, 19 nt, Artificial Sequence
  Description of Artificial Sequence: Synthetic oligonucleotide
gaauuuucccagagguggu

SEQ ID NO: 1863540 - RNA, 19 nt, Artificial Sequence
  Description of Artificial Sequence: Synthetic oligonucleotide
gacaguuauggcugcuaau

SEQ ID NO: 1863541 - RNA, 19 nt, Artificial Sequence
  Description of Artificial Sequence: Synthetic oligonucleotide
cauuggucccgcgggccgg

SEQ ID NO: 1863542 - RNA, 19 nt, Artificial Sequence
  Description of Artificial Sequence: Synthetic oligonucleotide
ggcgacacgacggcugggg

SEQ ID NO: 1863543 - RNA, 19 nt, Artificial Sequence
  Description of Artificial Sequence: Synthetic oligonucleotide
cccuguggagaguucacug

SEQ ID NO: 1863544 - RNA, 19 nt, Artificial Sequence
  Description of Artificial Sequence: Synthetic oligonucleotide
acuggcgcagggaugccca

SEQ ID NO: 1863545 - RNA, 19 nt, Artificial Sequence
  Description of Artificial Sequence: Synthetic oligonucleotide
gcugcauaauggccugagc

SEQ ID NO: 1863546 - RNA, 19 nt, Artificial Sequence
  Description of Artificial Sequence: Synthetic oligonucleotide
gcguucaccaaaguauuca

SEQ ID NO: 1863547 - RNA, 19 nt, Artificial Sequence
  Description of Artificial Sequence: Synthetic oligonucleotide
ucacugcaagguucucgau

SEQ ID NO: 1863548 - RNA, 19 nt, Artificial Sequence
  Description of Artificial Sequence: Synthetic oligonucleotide
gcagugacgcgacuguuaa

SEQ ID NO: 1863549 - RNA, 19 nt, Artificial Sequence
  Description of Artificial Sequence: Synthetic oligonucleotide
gcgguguucgcgugucagg

SEQ ID NO: 1863550 - RNA, 19 nt, Artificial Sequence
  Description of Artificial Sequence: Synthetic oligonucleotide
ugucuucaacuaggcuaug

SEQ ID NO: 1863551 - RNA, 19 nt, Artificial Sequence
  Description of Artificial Sequence: Synthetic oligonucleotide
cacuuaugguagagaccuc

SEQ ID NO: 1863552 - RNA, 19 nt, Artificial Sequence
  Description of Artificial Sequence: Synthetic oligonucleotide
guccccuucugucuuauuu

SEQ ID NO: 1863553 - RNA, 19 nt, Artificial Sequence
  Description of Artificial Sequence: Synthetic oligonucleotide
cugugacaacaaugccaac

SEQ ID NO: 1863554 - RNA, 19 nt, Artificial Sequence
  Description of Artificial Sequence: Synthetic oligonucleotide
auaauggccugagccuaaa

SEQ ID NO: 1863555 - RNA, 19 nt, Artificial Sequence
  Description of Artificial Sequence: Synthetic oligonucleotide
caacuaggcuaugacaggu

SEQ ID NO: 1863556 - RNA, 19 nt, Artificial Sequence
  Description of Artificial Sequence: Synthetic oligonucleotide
augucacugcaagguucuc

SEQ ID NO: 1863557 - RNA, 19 nt, Artificial Sequence
  Description of Artificial Sequence: Synthetic oligonucleotide
cagugacgcgacuguuaac

SEQ ID NO: 1863558 - RNA, 19 nt, Artificial Sequence
  Description of Artificial Sequence: Synthetic oligonucleotide
gauaggucauugucaucuu

SEQ ID NO: 1863559 - RNA, 19 nt, Artificial Sequence
  Description of Artificial Sequence: Synthetic oligonucleotide
cgcagggaugcccagcccg

SEQ ID NO: 1863560 - RNA, 19 nt, Artificial Sequence
  Description of Artificial Sequence: Synthetic oligonucleotide
caagcacuggcgcagggau

SEQ ID NO: 1863561 - RNA, 19 nt, Artificial Sequence
  Description of Artificial Sequence: Synthetic oligonucleotide
uggcauuguggugcccaga

SEQ ID NO: 1863562 - RNA, 19 nt, Artificial Sequence
  Description of Artificial Sequence: Synthetic oligonucleotide
ggcgguguucgcgugucag

SEQ ID NO: 1863563 - RNA, 19 nt, Artificial Sequence
  Description of Artificial Sequence: Synthetic oligonucleotide
cacuggcgcagggaugccc

SEQ ID NO: 1863564 - RNA, 19 nt, Artificial Sequence
  Description of Artificial Sequence: Synthetic oligonucleotide
uccaacccagcugcauaau

SEQ ID NO: 1863565 - RNA, 19 nt, Artificial Sequence
  Description of Artificial Sequence: Synthetic oligonucleotide
gguccaacccagcugcaua

SEQ ID NO: 1863566 - RNA, 19 nt, Artificial Sequence
  Description of Artificial Sequence: Synthetic oligonucleotide
uccgggucucugcggcgac

SEQ ID NO: 1863567 - RNA, 19 nt, Artificial Sequence
  Description of Artificial Sequence: Synthetic oligonucleotide
ccaguggcauuguggugcc

SEQ ID NO: 1863568 - RNA, 19 nt, Artificial Sequence
  Description of Artificial Sequence: Synthetic oligonucleotide
acgacggcuggggcucugg

SEQ ID NO: 1863569 - RNA, 19 nt, Artificial Sequence
  Description of Artificial Sequence: Synthetic oligonucleotide
ccacacaucucauuaugua

SEQ ID NO: 1863570 - RNA, 19 nt, Artificial Sequence
  Description of Artificial Sequence: Synthetic oligonucleotide
guuuucgaagcuggacugu

SEQ ID NO: 1863571 - RNA, 19 nt, Artificial Sequence
  Description of Artificial Sequence: Synthetic oligonucleotide
ucggggcgguguucgcgug

SEQ ID NO: 1863572 - RNA, 19 nt, Artificial Sequence
  Description of Artificial Sequence: Synthetic oligonucleotide
gguucucgauguauacaca

SEQ ID NO: 1863573 - RNA, 19 nt, Artificial Sequence
  Description of Artificial Sequence: Synthetic oligonucleotide
gcguccgggucucugcggc

SEQ ID NO: 1863574 - RNA, 19 nt, Artificial Sequence
  Description of Artificial Sequence: Synthetic oligonucleotide
gugacgcgacuguuaaccu

SEQ ID NO: 1863575 - RNA, 19 nt, Artificial Sequence
  Description of Artificial Sequence: Synthetic oligonucleotide
gcauaauggccugagccua

SEQ ID NO: 1863576 - RNA, 19 nt, Artificial Sequence
  Description of Artificial Sequence: Synthetic oligonucleotide
ccaacagcuaugaggguua

SEQ ID NO: 1863577 - RNA, 19 nt, Artificial Sequence
  Description of Artificial Sequence: Synthetic oligonucleotide
aggaccaauguggcauuuu

SEQ ID NO: 1863578 - RNA, 19 nt, Artificial Sequence
  Description of Artificial Sequence: Synthetic oligonucleotide
cagcguucaccaaaguauu

SEQ ID NO: 1863579 - RNA, 19 nt, Artificial Sequence
  Description of Artificial Sequence: Synthetic oligonucleotide
ggcguccgggucucugcgg

SEQ ID NO: 1863580 - RNA, 19 nt, Artificial Sequence
  Description of Artificial Sequence: Synthetic oligonucleotide
gcaccaggagcgcccgcgg

SEQ ID NO: 1863581 - RNA, 19 nt, Artificial Sequence
  Description of Artificial Sequence: Synthetic oligonucleotide
cagagggcauuucacuuau

SEQ ID NO: 1863582 - RNA, 19 nt, Artificial Sequence
  Description of Artificial Sequence: Synthetic oligonucleotide
guaucacauggguucuuuu

SEQ ID NO: 1863583 - RNA, 19 nt, Artificial Sequence
  Description of Artificial Sequence: Synthetic oligonucleotide
ucguaucacauggguucuu

SEQ ID NO: 1863584 - RNA, 19 nt, Artificial Sequence
  Description of Artificial Sequence: Synthetic oligonucleotide
agagggcauuucacuuaug

SEQ ID NO: 1863585 - RNA, 19 nt, Artificial Sequence
  Description of Artificial Sequence: Synthetic oligonucleotide
aggagcgcccgcggcagca

SEQ ID NO: 1863586 - RNA, 19 nt, Artificial Sequence
  Description of Artificial Sequence: Synthetic oligonucleotide
uggcagugacgcgacuguu

SEQ ID NO: 1863587 - RNA, 19 nt, Artificial Sequence
  Description of Artificial Sequence: Synthetic oligonucleotide
uuggucccgcgggccggcg

SEQ ID NO: 1863588 - RNA, 19 nt, Artificial Sequence
  Description of Artificial Sequence: Synthetic oligonucleotide
gcgacacgacggcuggggc

SEQ ID NO: 1863589 - RNA, 19 nt, Artificial Sequence
  Description of Artificial Sequence: Synthetic oligonucleotide
guucgcgugucaggaggga

SEQ ID NO: 1863590 - RNA, 19 nt, Artificial Sequence
  Description of Artificial Sequence: Synthetic oligonucleotide
uguccccuucugucuuauu

SEQ ID NO: 1863591 - RNA, 19 nt, Artificial Sequence
  Description of Artificial Sequence: Synthetic oligonucleotide
cacuugcaugucacugcaa

SEQ ID NO: 1863592 - RNA, 19 nt, Artificial Sequence
  Description of Artificial Sequence: Synthetic oligonucleotide
gucggggcgguguucgcgu

SEQ ID NO: 1863593 - RNA, 19 nt, Artificial Sequence
  Description of Artificial Sequence: Synthetic oligonucleotide
ccagagggcauuucacuua

SEQ ID NO: 1863594 - RNA, 19 nt, Artificial Sequence
  Description of Artificial Sequence: Synthetic oligonucleotide
ucacugccagagggcauuu

SEQ ID NO: 1863595 - RNA, 19 nt, Artificial Sequence
  Description of Artificial Sequence: Synthetic oligonucleotide
gccggauauuuguggcuca

SEQ ID NO: 1863596 - RNA, 19 nt, Artificial Sequence
  Description of Artificial Sequence: Synthetic oligonucleotide
caccaugaaugcagaaguu

SEQ ID NO: 1863597 - RNA, 19 nt, Artificial Sequence
  Description of Artificial Sequence: Synthetic oligonucleotide
cuggaaccaucagaaggcu

SEQ ID NO: 1863598 - RNA, 19 nt, Artificial Sequence
  Description of Artificial Sequence: Synthetic oligonucleotide
gcggcguccgggucucugc

SEQ ID NO: 1863599 - RNA, 19 nt, Artificial Sequence
  Description of Artificial Sequence: Synthetic oligonucleotide
cugcgggaucagcgggaac

SEQ ID NO: 1863600 - RNA, 19 nt, Artificial Sequence
  Description of Artificial Sequence: Synthetic oligonucleotide
gcgggcaagcacuggcgca

SEQ ID NO: 1863601 - RNA, 19 nt, Artificial Sequence
  Description of Artificial Sequence: Synthetic oligonucleotide
cagcggaguucucauuggu

SEQ ID NO: 1863602 - RNA, 19 nt, Artificial Sequence
  Description of Artificial Sequence: Synthetic oligonucleotide
ggcagugacgcgacuguua

SEQ ID NO: 1863603 - RNA, 19 nt, Artificial Sequence
  Description of Artificial Sequence: Synthetic oligonucleotide
cagguccaacccagcugca

SEQ ID NO: 1863604 - RNA, 19 nt, Artificial Sequence
  Description of Artificial Sequence: Synthetic oligonucleotide
ucgggaugucggggcggug

SEQ ID NO: 1863605 - RNA, 19 nt, Artificial Sequence
  Description of Artificial Sequence: Synthetic oligonucleotide
gcgacugcaccaggagcgc

SEQ ID NO: 1863606 - RNA, 19 nt, Artificial Sequence
  Description of Artificial Sequence: Synthetic oligonucleotide
cagaaaccacaaguccagu

SEQ ID NO: 1863607 - RNA, 19 nt, Artificial Sequence
  Description of Artificial Sequence: Synthetic oligonucleotide
gggagcggccagcgccucc

SEQ ID NO: 1863608 - RNA, 19 nt, Artificial Sequence
  Description of Artificial Sequence: Synthetic oligonucleotide
cugcucagcucgggauguc

SEQ ID NO: 1863609 - RNA, 19 nt, Artificial Sequence
  Description of Artificial Sequence: Synthetic oligonucleotide
cugcaagguucucgaugua

SEQ ID NO: 1863610 - RNA, 19 nt, Artificial Sequence
  Description of Artificial Sequence: Synthetic oligonucleotide
gcggcagcagcggaguucu

SEQ ID NO: 1863611 - RNA, 19 nt, Artificial Sequence
  Description of Artificial Sequence: Synthetic oligonucleotide
gaggaccaauguggcauuu

SEQ ID NO: 1863612 - RNA, 19 nt, Artificial Sequence
  Description of Artificial Sequence: Synthetic oligonucleotide
ggaugucggggcgguguuc

SEQ ID NO: 1863613 - RNA, 19 nt, Artificial Sequence
  Description of Artificial Sequence: Synthetic oligonucleotide
gcgggaucagcgggaacga

SEQ ID NO: 1863614 - RNA, 19 nt, Artificial Sequence
  Description of Artificial Sequence: Synthetic oligonucleotide
ggggcgguguucgcguguc

SEQ ID NO: 1863615 - RNA, 19 nt, Artificial Sequence
  Description of Artificial Sequence: Synthetic oligonucleotide
cggcguccgggucucugcg

SEQ ID NO: 1863616 - RNA, 19 nt, Artificial Sequence
  Description of Artificial Sequence: Synthetic oligonucleotide
acacgacggcuggggcucu

SEQ ID NO: 1863617 - RNA, 19 nt, Artificial Sequence
  Description of Artificial Sequence: Synthetic oligonucleotide
acgcgacuguuaaccugaa

SEQ ID NO: 1863618 - RNA, 19 nt, Artificial Sequence
  Description of Artificial Sequence: Synthetic oligonucleotide
cgguguucgcgugucagga

SEQ ID NO: 1863619 - RNA, 19 nt, Artificial Sequence
  Description of Artificial Sequence: Synthetic oligonucleotide
cacgacggcuggggcucug

SEQ ID NO: 1863620 - RNA, 19 nt, Artificial Sequence
  Description of Artificial Sequence: Synthetic oligonucleotide
gcugcgggaucagcgggaa

SEQ ID NO: 1863621 - RNA, 19 nt, Artificial Sequence
  Description of Artificial Sequence: Synthetic oligonucleotide
cucgggaugucggggcggu

SEQ ID NO: 1863622 - RNA, 19 nt, Artificial Sequence
  Description of Artificial Sequence: Synthetic oligonucleotide
gcgcccgcggcagcagcgg

SEQ ID NO: 1863623 - RNA, 19 nt, Artificial Sequence
  Description of Artificial Sequence: Synthetic oligonucleotide
gcacuggcgcagggaugcc

SEQ ID NO: 1863624 - RNA, 19 nt, Artificial Sequence
  Description of Artificial Sequence: Synthetic oligonucleotide
gggaugucggggcgguguu

SEQ ID NO: 1863625 - RNA, 19 nt, Artificial Sequence
  Description of Artificial Sequence: Synthetic oligonucleotide
cgcggcagcagcggaguuc

SEQ ID NO: 1863626 - RNA, 19 nt, Artificial Sequence
  Description of Artificial Sequence: Synthetic oligonucleotide
ccugcucagcucgggaugu

SEQ ID NO: 1863627 - RNA, 19 nt, Artificial Sequence
  Description of Artificial Sequence: Synthetic oligonucleotide
cgggaucagcgggaacgag

SEQ ID NO: 1863628 - RNA, 19 nt, Artificial Sequence
  Description of Artificial Sequence: Synthetic oligonucleotide
gggcgguguucgcguguca

SEQ ID NO: 1863629 - RNA, 19 nt, Artificial Sequence
  Description of Artificial Sequence: Synthetic oligonucleotide
cagcagcggaguucucauu

SEQ ID NO: 1863630 - RNA, 19 nt, Artificial Sequence
  Description of Artificial Sequence: Synthetic oligonucleotide
cuguccccuucugucuuau

SEQ ID NO: 1863631 - RNA, 19 nt, Artificial Sequence
  Description of Artificial Sequence: Synthetic oligonucleotide
ccuguccccuucugucuua

SEQ ID NO: 1863632 - RNA, 19 nt, Artificial Sequence
  Description of Artificial Sequence: Synthetic oligonucleotide
cgacacgacggcuggggcu

SEQ ID NO: 1863633 - RNA, 19 nt, Artificial Sequence
  Description of Artificial Sequence: Synthetic oligonucleotide
cguaucacauggguucuuu

SEQ ID NO: 1863634 - RNA, 19 nt, Artificial Sequence
  Description of Artificial Sequence: Synthetic oligonucleotide
cugcggcgacacgacggcu

SEQ ID NO: 1863635 - RNA, 19 nt, Artificial Sequence
  Description of Artificial Sequence: Synthetic oligonucleotide
ccccuguggagaguucacu

SEQ ID NO: 1863636 - RNA, 19 nt, Artificial Sequence
  Description of Artificial Sequence: Synthetic oligonucleotide
ccggauauuuguggcucau

SEQ ID NO: 1863637 - RNA, 19 nt, Artificial Sequence
  Description of Artificial Sequence: Synthetic oligonucleotide
ccacagcguucaccaaagu

SEQ ID NO: 1863638 - RNA, 19 nt, Artificial Sequence
  Description of Artificial Sequence: Synthetic oligonucleotide
cgggaugucggggcggugu

SEQ ID NO: 1863639 - RNA, 19 nt, Artificial Sequence
  Description of Artificial Sequence: Synthetic oligonucleotide
cggcgacacgacggcuggg

SEQ ID NO: 1863640 - RNA, 19 nt, Artificial Sequence
  Description of Artificial Sequence: Synthetic oligonucleotide
ccagcccgccgggcuccgg

SEQ ID NO: 1863641 - RNA, 19 nt, Artificial Sequence
  Description of Artificial Sequence: Synthetic oligonucleotide
cccagcccgccgggcuccg

SEQ ID NO: 1863642 - RNA, 19 nt, Artificial Sequence
  Description of Artificial Sequence: Synthetic oligonucleotide
ccgggucucugcggcgaca

SEQ ID NO: 1863643 - RNA, 19 nt, Artificial Sequence
  Description of Artificial Sequence: Synthetic oligonucleotide
cgcgacuguuaaccugaau

SEQ ID NO: 1863644 - RNA, 19 nt, Artificial Sequence
  Description of Artificial Sequence: Synthetic oligonucleotide
cgcccgcggcagcagcgga

SEQ ID NO: 1863645 - RNA, 19 nt, Artificial Sequence
  Description of Artificial Sequence: Synthetic oligonucleotide
cgggagcggccagcgccuc

SEQ ID NO: 1863646 - RNA, 19 nt, Artificial Sequence
  Description of Artificial Sequence: Synthetic oligonucleotide
cggggcgguguucgcgugu

SEQ ID NO: 1863647 - RNA, 19 nt, Artificial Sequence
  Description of Artificial Sequence: Synthetic oligonucleotide
aaauaugucauaaauaggg

SEQ ID NO: 1863648 - RNA, 19 nt, Artificial Sequence
  Description of Artificial Sequence: Synthetic oligonucleotide
ucaaaugauaggaagagag

SEQ ID NO: 1863649 - RNA, 19 nt, Artificial Sequence
  Description of Artificial Sequence: Synthetic oligonucleotide
aaaugauaggaagagaggg

SEQ ID NO: 1863650 - RNA, 19 nt, Artificial Sequence
  Description of Artificial Sequence: Synthetic oligonucleotide
aaaaguuucauuccaccag

SEQ ID NO: 1863651 - RNA, 19 nt, Artificial Sequence
  Description of Artificial Sequence: Synthetic oligonucleotide
auaaauuaguccauuaggc

SEQ ID NO: 1863652 - RNA, 19 nt, Artificial Sequence
  Description of Artificial Sequence: Synthetic oligonucleotide
aagacaggcacagauaugg

SEQ ID NO: 1863653 - RNA, 19 nt, Artificial Sequence
  Description of Artificial Sequence: Synthetic oligonucleotide
agucuuaagucccaagacc

SEQ ID NO: 1863654 - RNA, 19 nt, Artificial Sequence
  Description of Artificial Sequence: Synthetic oligonucleotide
ugauaaauuaguccauuag

SEQ ID NO: 1863655 - RNA, 19 nt, Artificial Sequence
  Description of Artificial Sequence: Synthetic oligonucleotide
aauaccugccauucuuugc

SEQ ID NO: 1863656 - RNA, 19 nt, Artificial Sequence
  Description of Artificial Sequence: Synthetic oligonucleotide
agaacuuaaauacucccuc

SEQ ID NO: 1863657 - RNA, 19 nt, Artificial Sequence
  Description of Artificial Sequence: Synthetic oligonucleotide
uaugucauaaauagggagu

SEQ ID NO: 1863658 - RNA, 19 nt, Artificial Sequence
  Description of Artificial Sequence: Synthetic oligonucleotide
agucuguagagacagcccc

SEQ ID NO: 1863659 - RNA, 19 nt, Artificial Sequence
  Description of Artificial Sequence: Synthetic oligonucleotide
acuuaaauacucccucacc

SEQ ID NO: 1863660 - RNA, 19 nt, Artificial Sequence
  Description of Artificial Sequence: Synthetic oligonucleotide
aauggugagacacccacca

SEQ ID NO: 1863661 - RNA, 19 nt, Artificial Sequence
  Description of Artificial Sequence: Synthetic oligonucleotide
uuucauuccaccaggugcc

SEQ ID NO: 1863662 - RNA, 19 nt, Artificial Sequence
  Description of Artificial Sequence: Synthetic oligonucleotide
guuucauuccaccaggugc

SEQ ID NO: 1863663 - RNA, 19 nt, Artificial Sequence
  Description of Artificial Sequence: Synthetic oligonucleotide
ugagggguucaaaugauag

SEQ ID NO: 1863664 - RNA, 19 nt, Artificial Sequence
  Description of Artificial Sequence: Synthetic oligonucleotide
aagccaaccccagugaggc

SEQ ID NO: 1863665 - RNA, 19 nt, Artificial Sequence
  Description of Artificial Sequence: Synthetic oligonucleotide
ugggacacaguaaauagca

SEQ ID NO: 1863666 - RNA, 19 nt, Artificial Sequence
  Description of Artificial Sequence: Synthetic oligonucleotide
accccagugaggcacaucc

SEQ ID NO: 1863667 - RNA, 19 nt, Artificial Sequence
  Description of Artificial Sequence: Synthetic oligonucleotide
cuuguuuccguucuucugg

SEQ ID NO: 1863668 - RNA, 19 nt, Artificial Sequence
  Description of Artificial Sequence: Synthetic oligonucleotide
auuucgaaacuucugauaa

SEQ ID NO: 1863669 - RNA, 19 nt, Artificial Sequence
  Description of Artificial Sequence: Synthetic oligonucleotide
ucauaaauagggaguuggg

SEQ ID NO: 1863670 - RNA, 19 nt, Artificial Sequence
  Description of Artificial Sequence: Synthetic oligonucleotide
augcuaaaaguuucauucc

SEQ ID NO: 1863671 - RNA, 19 nt, Artificial Sequence
  Description of Artificial Sequence: Synthetic oligonucleotide
aaugauaggaagagagggg

SEQ ID NO: 1863672 - RNA, 19 nt, Artificial Sequence
  Description of Artificial Sequence: Synthetic oligonucleotide
cugguaauaguacuguagg

SEQ ID NO: 1863673 - RNA, 19 nt, Artificial Sequence
  Description of Artificial Sequence: Synthetic oligonucleotide
ugagaacuuaaauacuccc

SEQ ID NO: 1863674 - RNA, 19 nt, Artificial Sequence
  Description of Artificial Sequence: Synthetic oligonucleotide
agggccuuagcccuguucc

SEQ ID NO: 1863675 - RNA, 19 nt, Artificial Sequence
  Description of Artificial Sequence: Synthetic oligonucleotide
uucuuugcauuccucgugg

SEQ ID NO: 1863676 - RNA, 19 nt, Artificial Sequence
  Description of Artificial Sequence: Synthetic oligonucleotide
caaguaauaccacacgagc

SEQ ID NO: 1863677 - RNA, 19 nt, Artificial Sequence
  Description of Artificial Sequence: Synthetic oligonucleotide
agacguaauggugagacac

SEQ ID NO: 1863678 - RNA, 19 nt, Artificial Sequence
  Description of Artificial Sequence: Synthetic oligonucleotide
ugcaaguaauaccacacga

SEQ ID NO: 1863679 - RNA, 19 nt, Artificial Sequence
  Description of Artificial Sequence: Synthetic oligonucleotide
ugagugccaacacaaauac

SEQ ID NO: 1863680 - RNA, 19 nt, Artificial Sequence
  Description of Artificial Sequence: Synthetic oligonucleotide
aacgugacggcauuguaga

SEQ ID NO: 1863681 - RNA, 19 nt, Artificial Sequence
  Description of Artificial Sequence: Synthetic oligonucleotide
auggcuaccagugacuggc

SEQ ID NO: 1863682 - RNA, 19 nt, Artificial Sequence
  Description of Artificial Sequence: Synthetic oligonucleotide
caggaaauugcccaggaag

SEQ ID NO: 1863683 - RNA, 19 nt, Artificial Sequence
  Description of Artificial Sequence: Synthetic oligonucleotide
gucauaaauagggaguugg

SEQ ID NO: 1863684 - RNA, 19 nt, Artificial Sequence
  Description of Artificial Sequence: Synthetic oligonucleotide
ucaaggugcaaguaauacc

SEQ ID NO: 1863685 - RNA, 19 nt, Artificial Sequence
  Description of Artificial Sequence: Synthetic oligonucleotide
caaaugauaggaagagagg

SEQ ID NO: 1863686 - RNA, 19 nt, Artificial Sequence
  Description of Artificial Sequence: Synthetic oligonucleotide
aauaguacuguaggaacug

SEQ ID NO: 1863687 - RNA, 19 nt, Artificial Sequence
  Description of Artificial Sequence: Synthetic oligonucleotide
guaauaguacuguaggaac

SEQ ID NO: 1863688 - RNA, 19 nt, Artificial Sequence
  Description of Artificial Sequence: Synthetic oligonucleotide
agugaggcacauccaaacc

SEQ ID NO: 1863689 - RNA, 19 nt, Artificial Sequence
  Description of Artificial Sequence: Synthetic oligonucleotide
aauacugugcgcacaggcg

SEQ ID NO: 1863690 - RNA, 19 nt, Artificial Sequence
  Description of Artificial Sequence: Synthetic oligonucleotide
aaauaccugccauucuuug

SEQ ID NO: 1863691 - RNA, 19 nt, Artificial Sequence
  Description of Artificial Sequence: Synthetic oligonucleotide
aaagcaagacacaggacag

SEQ ID NO: 1863692 - RNA, 19 nt, Artificial Sequence
  Description of Artificial Sequence: Synthetic oligonucleotide
auacugugcgcacaggcgg

SEQ ID NO: 1863693 - RNA, 19 nt, Artificial Sequence
  Description of Artificial Sequence: Synthetic oligonucleotide
guuaauacugugcgcacag

SEQ ID NO: 1863694 - RNA, 19 nt, Artificial Sequence
  Description of Artificial Sequence: Synthetic oligonucleotide
uagcaggucggcuaaagcc

SEQ ID NO: 1863695 - RNA, 19 nt, Artificial Sequence
  Description of Artificial Sequence: Synthetic oligonucleotide
caaggugcaaguaauacca

SEQ ID NO: 1863696 - RNA, 19 nt, Artificial Sequence
  Description of Artificial Sequence: Synthetic oligonucleotide
cauaaauagggaguugggg

SEQ ID NO: 1863697 - RNA, 19 nt, Artificial Sequence
  Description of Artificial Sequence: Synthetic oligonucleotide
gaaauggccacagaaagga

SEQ ID NO: 1863698 - RNA, 19 nt, Artificial Sequence
  Description of Artificial Sequence: Synthetic oligonucleotide
ucggcuaaagccaacccca

SEQ ID NO: 1863699 - RNA, 19 nt, Artificial Sequence
  Description of Artificial Sequence: Synthetic oligonucleotide
guucaaaugauaggaagag

SEQ ID NO: 1863700 - RNA, 19 nt, Artificial Sequence
  Description of Artificial Sequence: Synthetic oligonucleotide
aacuucugauaaauuaguc

SEQ ID NO: 1863701 - RNA, 19 nt, Artificial Sequence
  Description of Artificial Sequence: Synthetic oligonucleotide
aagacccaguauuaaauau

SEQ ID NO: 1863702 - RNA, 19 nt, Artificial Sequence
  Description of Artificial Sequence: Synthetic oligonucleotide
aguccauuaggccaaguca

SEQ ID NO: 1863703 - RNA, 19 nt, Artificial Sequence
  Description of Artificial Sequence: Synthetic oligonucleotide
aaacugauuucgaaacuuc

SEQ ID NO: 1863704 - RNA, 19 nt, Artificial Sequence
  Description of Artificial Sequence: Synthetic oligonucleotide
ugaggcacauccaaacccc

SEQ ID NO: 1863705 - RNA, 19 nt, Artificial Sequence
  Description of Artificial Sequence: Synthetic oligonucleotide
aacguggagacguaauggu

SEQ ID NO: 1863706 - RNA, 19 nt, Artificial Sequence
  Description of Artificial Sequence: Synthetic oligonucleotide
uacuguaggaacugaacac

SEQ ID NO: 1863707 - RNA, 19 nt, Artificial Sequence
  Description of Artificial Sequence: Synthetic oligonucleotide
agcaagacacaggacaggc

SEQ ID NO: 1863708 - RNA, 19 nt, Artificial Sequence
  Description of Artificial Sequence: Synthetic oligonucleotide
aauaugucauaaauaggga

SEQ ID NO: 1863709 - RNA, 19 nt, Artificial Sequence
  Description of Artificial Sequence: Synthetic oligonucleotide
aucucugagaacuuaaaua

SEQ ID NO: 1863710 - RNA, 19 nt, Artificial Sequence
  Description of Artificial Sequence: Synthetic oligonucleotide
auagcaggucggcuaaagc

SEQ ID NO: 1863711 - RNA, 19 nt, Artificial Sequence
  Description of Artificial Sequence: Synthetic oligonucleotide
uucuucuggaguuuggcgu

SEQ ID NO: 1863712 - RNA, 19 nt, Artificial Sequence
  Description of Artificial Sequence: Synthetic oligonucleotide
gacuggaacccuuccacgg

SEQ ID NO: 1863713 - RNA, 19 nt, Artificial Sequence
  Description of Artificial Sequence: Synthetic oligonucleotide
uuugcauuccucguggcug

SEQ ID NO: 1863714 - RNA, 19 nt, Artificial Sequence
  Description of Artificial Sequence: Synthetic oligonucleotide
auaccacacgagcagaaag

SEQ ID NO: 1863715 - RNA, 19 nt, Artificial Sequence
  Description of Artificial Sequence: Synthetic oligonucleotide
aaauugcccaggaagagga

SEQ ID NO: 1863716 - RNA, 19 nt, Artificial Sequence
  Description of Artificial Sequence: Synthetic oligonucleotide
ggcagguuaauacugugcg

SEQ ID NO: 1863717 - RNA, 19 nt, Artificial Sequence
  Description of Artificial Sequence: Synthetic oligonucleotide
acgacuuugagugugguca

SEQ ID NO: 1863718 - RNA, 19 nt, Artificial Sequence
  Description of Artificial Sequence: Synthetic oligonucleotide
guaauggugagacacccac

SEQ ID NO: 1863719 - RNA, 19 nt, Artificial Sequence
  Description of Artificial Sequence: Synthetic oligonucleotide
auccaaaccccagugaggg

SEQ ID NO: 1863720 - RNA, 19 nt, Artificial Sequence
  Description of Artificial Sequence: Synthetic oligonucleotide
acgagcagaaaguuaaaga

SEQ ID NO: 1863721 - RNA, 19 nt, Artificial Sequence
  Description of Artificial Sequence: Synthetic oligonucleotide
cacggugagguccaggugg

SEQ ID NO: 1863722 - RNA, 19 nt, Artificial Sequence
  Description of Artificial Sequence: Synthetic oligonucleotide
uccagcagucuuaaguccc

SEQ ID NO: 1863723 - RNA, 19 nt, Artificial Sequence
  Description of Artificial Sequence: Synthetic oligonucleotide
gagggguucaaaugauagg

SEQ ID NO: 1863724 - RNA, 19 nt, Artificial Sequence
  Description of Artificial Sequence: Synthetic oligonucleotide
auaccugccauucuuugca

SEQ ID NO: 1863725 - RNA, 19 nt, Artificial Sequence
  Description of Artificial Sequence: Synthetic oligonucleotide
gucuuaagucccaagaccc

SEQ ID NO: 1863726 - RNA, 19 nt, Artificial Sequence
  Description of Artificial Sequence: Synthetic oligonucleotide
uccacaggaugcuaaaagu

SEQ ID NO: 1863727 - RNA, 19 nt, Artificial Sequence
  Description of Artificial Sequence: Synthetic oligonucleotide
uaaauagcaggucggcuaa

SEQ ID NO: 1863728 - RNA, 19 nt, Artificial Sequence
  Description of Artificial Sequence: Synthetic oligonucleotide
uguggucaggaaauugccc

SEQ ID NO: 1863729 - RNA, 19 nt, Artificial Sequence
  Description of Artificial Sequence: Synthetic oligonucleotide
acaggcggccuucacauuc

SEQ ID NO: 1863730 - RNA, 19 nt, Artificial Sequence
  Description of Artificial Sequence: Synthetic oligonucleotide
acguaauggugagacaccc

SEQ ID NO: 1863731 - RNA, 19 nt, Artificial Sequence
  Description of Artificial Sequence: Synthetic oligonucleotide
auuacccagggcugcaggg

SEQ ID NO: 1863732 - RNA, 19 nt, Artificial Sequence
  Description of Artificial Sequence: Synthetic oligonucleotide
aauagcaggucggcuaaag

SEQ ID NO: 1863733 - RNA, 19 nt, Artificial Sequence
  Description of Artificial Sequence: Synthetic oligonucleotide
cuacggggagcuuacacag

SEQ ID NO: 1863734 - RNA, 19 nt, Artificial Sequence
  Description of Artificial Sequence: Synthetic oligonucleotide
acaaauaccugccauucuu

SEQ ID NO: 1863735 - RNA, 19 nt, Artificial Sequence
  Description of Artificial Sequence: Synthetic oligonucleotide
agggguucaaaugauagga

SEQ ID NO: 1863736 - RNA, 19 nt, Artificial Sequence
  Description of Artificial Sequence: Synthetic oligonucleotide
uucgaaacuucugauaaau

SEQ ID NO: 1863737 - RNA, 19 nt, Artificial Sequence
  Description of Artificial Sequence: Synthetic oligonucleotide
gugaggcacauccaaaccc

SEQ ID NO: 1863738 - RNA, 19 nt, Artificial Sequence
  Description of Artificial Sequence: Synthetic oligonucleotide
ucuucuggaguuuggcgug

SEQ ID NO: 1863739 - RNA, 19 nt, Artificial Sequence
  Description of Artificial Sequence: Synthetic oligonucleotide
ugguaauaguacuguagga

SEQ ID NO: 1863740 - RNA, 19 nt, Artificial Sequence
  Description of Artificial Sequence: Synthetic oligonucleotide
aggaugaggaaggugagug

SEQ ID NO: 1863741 - RNA, 19 nt, Artificial Sequence
  Description of Artificial Sequence: Synthetic oligonucleotide
aauuaguccauuaggccaa

SEQ ID NO: 1863742 - RNA, 19 nt, Artificial Sequence
  Description of Artificial Sequence: Synthetic oligonucleotide
cauuccaccaggugccugg

SEQ ID NO: 1863743 - RNA, 19 nt, Artificial Sequence
  Description of Artificial Sequence: Synthetic oligonucleotide
caacgugacggcauuguag

SEQ ID NO: 1863744 - RNA, 19 nt, Artificial Sequence
  Description of Artificial Sequence: Synthetic oligonucleotide
uaccacacgagcagaaagu

SEQ ID NO: 1863745 - RNA, 19 nt, Artificial Sequence
  Description of Artificial Sequence: Synthetic oligonucleotide
agaaauggccacagaaagg

SEQ ID NO: 1863746 - RNA, 19 nt, Artificial Sequence
  Description of Artificial Sequence: Synthetic oligonucleotide
aggaaacacaaagcaagac

SEQ ID NO: 1863747 - RNA, 19 nt, Artificial Sequence
  Description of Artificial Sequence: Synthetic oligonucleotide
agguuaauacugugcgcac

SEQ ID NO: 1863748 - RNA, 19 nt, Artificial Sequence
  Description of Artificial Sequence: Synthetic oligonucleotide
cuccacaggaugcuaaaag

SEQ ID NO: 1863749 - RNA, 19 nt, Artificial Sequence
  Description of Artificial Sequence: Synthetic oligonucleotide
cugauuucgaaacuucuga

SEQ ID NO: 1863750 - RNA, 19 nt, Artificial Sequence
  Description of Artificial Sequence: Synthetic oligonucleotide
uggaguuuggcgugcacga

SEQ ID NO: 1863751 - RNA, 19 nt, Artificial Sequence
  Description of Artificial Sequence: Synthetic oligonucleotide
agugcggaggcucauggcu

SEQ ID NO: 1863752 - RNA, 19 nt, Artificial Sequence
  Description of Artificial Sequence: Synthetic oligonucleotide
ucacauuccucgugucugg

SEQ ID NO: 1863753 - RNA, 19 nt, Artificial Sequence
  Description of Artificial Sequence: Synthetic oligonucleotide
guccauuaggccaagucag

SEQ ID NO: 1863754 - RNA, 19 nt, Artificial Sequence
  Description of Artificial Sequence: Synthetic oligonucleotide
gugcaaguaauaccacacg

SEQ ID NO: 1863755 - RNA, 19 nt, Artificial Sequence
  Description of Artificial Sequence: Synthetic oligonucleotide
gcgugcacgacuuugagug

SEQ ID NO: 1863756 - RNA, 19 nt, Artificial Sequence
  Description of Artificial Sequence: Synthetic oligonucleotide
uaguccauuaggccaaguc

SEQ ID NO: 1863757 - RNA, 19 nt, Artificial Sequence
  Description of Artificial Sequence: Synthetic oligonucleotide
uacucccucaccacagaag

SEQ ID NO: 1863758 - RNA, 19 nt, Artificial Sequence
  Description of Artificial Sequence: Synthetic oligonucleotide
ugauuucgaaacuucugau

SEQ ID NO: 1863759 - RNA, 19 nt, Artificial Sequence
  Description of Artificial Sequence: Synthetic oligonucleotide
uugcauuccucguggcugg

SEQ ID NO: 1863760 - RNA, 19 nt, Artificial Sequence
  Description of Artificial Sequence: Synthetic oligonucleotide
cuuacacagaggugguggc

SEQ ID NO: 1863761 - RNA, 19 nt, Artificial Sequence
  Description of Artificial Sequence: Synthetic oligonucleotide
guaggcugcgccuuucucc

SEQ ID NO: 1863762 - RNA, 19 nt, Artificial Sequence
  Description of Artificial Sequence: Synthetic oligonucleotide
aauacucccucaccacaga

SEQ ID NO: 1863763 - RNA, 19 nt, Artificial Sequence
  Description of Artificial Sequence: Synthetic oligonucleotide
aacugauuucgaaacuucu

SEQ ID NO: 1863764 - RNA, 19 nt, Artificial Sequence
  Description of Artificial Sequence: Synthetic oligonucleotide
gcuaaagccaaccccagug

SEQ ID NO: 1863765 - RNA, 19 nt, Artificial Sequence
  Description of Artificial Sequence: Synthetic oligonucleotide
uaauggugagacacccacc

SEQ ID NO: 1863766 - RNA, 19 nt, Artificial Sequence
  Description of Artificial Sequence: Synthetic oligonucleotide
gugcaggaaacacaaagca

SEQ ID NO: 1863767 - RNA, 19 nt, Artificial Sequence
  Description of Artificial Sequence: Synthetic oligonucleotide
cuaccagugacuggcagcc

SEQ ID NO: 1863768 - RNA, 19 nt, Artificial Sequence
  Description of Artificial Sequence: Synthetic oligonucleotide
gauuucgaaacuucugaua

SEQ ID NO: 1863769 - RNA, 19 nt, Artificial Sequence
  Description of Artificial Sequence: Synthetic oligonucleotide
ugcacgacuuugagugugg

SEQ ID NO: 1863770 - RNA, 19 nt, Artificial Sequence
  Description of Artificial Sequence: Synthetic oligonucleotide
uggucaaggugcaaguaau

SEQ ID NO: 1863771 - RNA, 19 nt, Artificial Sequence
  Description of Artificial Sequence: Synthetic oligonucleotide
uccauuaggccaagucagc

SEQ ID NO: 1863772 - RNA, 19 nt, Artificial Sequence
  Description of Artificial Sequence: Synthetic oligonucleotide
acuguaggaacugaacaca

SEQ ID NO: 1863773 - RNA, 19 nt, Artificial Sequence
  Description of Artificial Sequence: Synthetic oligonucleotide
uucaaaugauaggaagaga

SEQ ID NO: 1863774 - RNA, 19 nt, Artificial Sequence
  Description of Artificial Sequence: Synthetic oligonucleotide
aagcaagacacaggacagg

SEQ ID NO: 1863775 - RNA, 19 nt, Artificial Sequence
  Description of Artificial Sequence: Synthetic oligonucleotide
agcagaaaguuaaagacuu

SEQ ID NO: 1863776 - RNA, 19 nt, Artificial Sequence
  Description of Artificial Sequence: Synthetic oligonucleotide
uaggcugcgccuuucuccc

SEQ ID NO: 1863777 - RNA, 19 nt, Artificial Sequence
  Description of Artificial Sequence: Synthetic oligonucleotide
cccaguauuaaauauguca

SEQ ID NO: 1863778 - RNA, 19 nt, Artificial Sequence
  Description of Artificial Sequence: Synthetic oligonucleotide
ugacuggcagccagggugc

SEQ ID NO: 1863779 - RNA, 19 nt, Artificial Sequence
  Description of Artificial Sequence: Synthetic oligonucleotide
gaagagagggguucucuga

SEQ ID NO: 1863780 - RNA, 19 nt, Artificial Sequence
  Description of Artificial Sequence: Synthetic oligonucleotide
gcggccuucacauuccucg

SEQ ID NO: 1863781 - RNA, 19 nt, Artificial Sequence
  Description of Artificial Sequence: Synthetic oligonucleotide
cgagcagaaaguuaaagac

SEQ ID NO: 1863782 - RNA, 19 nt, Artificial Sequence
  Description of Artificial Sequence: Synthetic oligonucleotide
ucccucaccacagaaggug

SEQ ID NO: 1863783 - RNA, 19 nt, Artificial Sequence
  Description of Artificial Sequence: Synthetic oligonucleotide
aacaacgugacggcauugu

SEQ ID NO: 1863784 - RNA, 19 nt, Artificial Sequence
  Description of Artificial Sequence: Synthetic oligonucleotide
acugauuucgaaacuucug

SEQ ID NO: 1863785 - RNA, 19 nt, Artificial Sequence
  Description of Artificial Sequence: Synthetic oligonucleotide
uaguacuguaggaacugaa

SEQ ID NO: 1863786 - RNA, 19 nt, Artificial Sequence
  Description of Artificial Sequence: Synthetic oligonucleotide
auggucaaggugcaaguaa

SEQ ID NO: 1863787 - RNA, 19 nt, Artificial Sequence
  Description of Artificial Sequence: Synthetic oligonucleotide
gagacagccccucugguaa

SEQ ID NO: 1863788 - RNA, 19 nt, Artificial Sequence
  Description of Artificial Sequence: Synthetic oligonucleotide
aggugcaaguaauaccaca

SEQ ID NO: 1863789 - RNA, 19 nt, Artificial Sequence
  Description of Artificial Sequence: Synthetic oligonucleotide
ggcauuguagagcugccag

SEQ ID NO: 1863790 - RNA, 19 nt, Artificial Sequence
  Description of Artificial Sequence: Synthetic oligonucleotide
uaggaacugaacacagcuc

SEQ ID NO: 1863791 - RNA, 19 nt, Artificial Sequence
  Description of Artificial Sequence: Synthetic oligonucleotide
gauauggccacugccauua

SEQ ID NO: 1863792 - RNA, 19 nt, Artificial Sequence
  Description of Artificial Sequence: Synthetic oligonucleotide
aaggugcaaguaauaccac

SEQ ID NO: 1863793 - RNA, 19 nt, Artificial Sequence
  Description of Artificial Sequence: Synthetic oligonucleotide
aggaaauugcccaggaaga

SEQ ID NO: 1863794 - RNA, 19 nt, Artificial Sequence
  Description of Artificial Sequence: Synthetic oligonucleotide
agacccaguauuaaauaug

SEQ ID NO: 1863795 - RNA, 19 nt, Artificial Sequence
  Description of Artificial Sequence: Synthetic oligonucleotide
aggucggcuaaagccaacc

SEQ ID NO: 1863796 - RNA, 19 nt, Artificial Sequence
  Description of Artificial Sequence: Synthetic oligonucleotide
gaagacccaguauuaaaua

SEQ ID NO: 1863797 - RNA, 19 nt, Artificial Sequence
  Description of Artificial Sequence: Synthetic oligonucleotide
acgggaaggggcuccacag

SEQ ID NO: 1863798 - RNA, 19 nt, Artificial Sequence
  Description of Artificial Sequence: Synthetic oligonucleotide
uggcuggagagcucaaaca

SEQ ID NO: 1863799 - RNA, 19 nt, Artificial Sequence
  Description of Artificial Sequence: Synthetic oligonucleotide
aguaaauagcaggucggcu

SEQ ID NO: 1863800 - RNA, 19 nt, Artificial Sequence
  Description of Artificial Sequence: Synthetic oligonucleotide
uuucgaaacuucugauaaa

SEQ ID NO: 1863801 - RNA, 19 nt, Artificial Sequence
  Description of Artificial Sequence: Synthetic oligonucleotide
ggagacguaauggugagac

SEQ ID NO: 1863802 - RNA, 19 nt, Artificial Sequence
  Description of Artificial Sequence: Synthetic oligonucleotide
gcuuacacagagguggugg

SEQ ID NO: 1863803 - RNA, 19 nt, Artificial Sequence
  Description of Artificial Sequence: Synthetic oligonucleotide
uuacccagggcugcagggg

SEQ ID NO: 1863804 - RNA, 19 nt, Artificial Sequence
  Description of Artificial Sequence: Synthetic oligonucleotide
cagucuguagagacagccc

SEQ ID NO: 1863805 - RNA, 19 nt, Artificial Sequence
  Description of Artificial Sequence: Synthetic oligonucleotide
aguaggcugcgccuuucuc

SEQ ID NO: 1863806 - RNA, 19 nt, Artificial Sequence
  Description of Artificial Sequence: Synthetic oligonucleotide
cagguuaauacugugcgca

SEQ ID NO: 1863807 - RNA, 19 nt, Artificial Sequence
  Description of Artificial Sequence: Synthetic oligonucleotide
ccugggacacaguaaauag

SEQ ID NO: 1863808 - RNA, 19 nt, Artificial Sequence
  Description of Artificial Sequence: Synthetic oligonucleotide
ugcacauggcuaccaguga

SEQ ID NO: 1863809 - RNA, 19 nt, Artificial Sequence
  Description of Artificial Sequence: Synthetic oligonucleotide
agcaucacuccagacagga

SEQ ID NO: 1863810 - RNA, 19 nt, Artificial Sequence
  Description of Artificial Sequence: Synthetic oligonucleotide
cucgugucuggccagggac

SEQ ID NO: 1863811 - RNA, 19 nt, Artificial Sequence
  Description of Artificial Sequence: Synthetic oligonucleotide
gguaauaguacuguaggaa

SEQ ID NO: 1863812 - RNA, 19 nt, Artificial Sequence
  Description of Artificial Sequence: Synthetic oligonucleotide
ugucauaaauagggaguug

SEQ ID NO: 1863813 - RNA, 19 nt, Artificial Sequence
  Description of Artificial Sequence: Synthetic oligonucleotide
agcagucuuaagucccaag

SEQ ID NO: 1863814 - RNA, 19 nt, Artificial Sequence
  Description of Artificial Sequence: Synthetic oligonucleotide
cauuacccagggcugcagg

SEQ ID NO: 1863815 - RNA, 19 nt, Artificial Sequence
  Description of Artificial Sequence: Synthetic oligonucleotide
gcaaguaauaccacacgag

SEQ ID NO: 1863816 - RNA, 19 nt, Artificial Sequence
  Description of Artificial Sequence: Synthetic oligonucleotide
uggagagcucaaacaacgu

SEQ ID NO: 1863817 - RNA, 19 nt, Artificial Sequence
  Description of Artificial Sequence: Synthetic oligonucleotide
uuggcgugcacgacuuuga

SEQ ID NO: 1863818 - RNA, 19 nt, Artificial Sequence
  Description of Artificial Sequence: Synthetic oligonucleotide
ggagagcucaaacaacgug

SEQ ID NO: 1863819 - RNA, 19 nt, Artificial Sequence
  Description of Artificial Sequence: Synthetic oligonucleotide
acugaacacagcucugaaa

SEQ ID NO: 1863820 - RNA, 19 nt, Artificial Sequence
  Description of Artificial Sequence: Synthetic oligonucleotide
uuagcccuguucccaguga

SEQ ID NO: 1863821 - RNA, 19 nt, Artificial Sequence
  Description of Artificial Sequence: Synthetic oligonucleotide
gccauugcugaugagaaug

SEQ ID NO: 1863822 - RNA, 19 nt, Artificial Sequence
  Description of Artificial Sequence: Synthetic oligonucleotide
cacgagcagaaaguuaaag

SEQ ID NO: 1863823 - RNA, 19 nt, Artificial Sequence
  Description of Artificial Sequence: Synthetic oligonucleotide
caguaaauagcaggucggc

SEQ ID NO: 1863824 - RNA, 19 nt, Artificial Sequence
  Description of Artificial Sequence: Synthetic oligonucleotide
ucgaaacuucugauaaauu

SEQ ID NO: 1863825 - RNA, 19 nt, Artificial Sequence
  Description of Artificial Sequence: Synthetic oligonucleotide
ggugcaggaaacacaaagc

SEQ ID NO: 1863826 - RNA, 19 nt, Artificial Sequence
  Description of Artificial Sequence: Synthetic oligonucleotide
ugccauucuuugcauuccu

SEQ ID NO: 1863827 - RNA, 19 nt, Artificial Sequence
  Description of Artificial Sequence: Synthetic oligonucleotide
augucauaaauagggaguu

SEQ ID NO: 1863828 - RNA, 19 nt, Artificial Sequence
  Description of Artificial Sequence: Synthetic oligonucleotide
agaaaguuaaagacuucau

SEQ ID NO: 1863829 - RNA, 19 nt, Artificial Sequence
  Description of Artificial Sequence: Synthetic oligonucleotide
acuuugaguguggucagga

SEQ ID NO: 1863830 - RNA, 19 nt, Artificial Sequence
  Description of Artificial Sequence: Synthetic oligonucleotide
aguccggggaagcagggaa

SEQ ID NO: 1863831 - RNA, 19 nt, Artificial Sequence
  Description of Artificial Sequence: Synthetic oligonucleotide
aaacaacgugacggcauug

SEQ ID NO: 1863832 - RNA, 19 nt, Artificial Sequence
  Description of Artificial Sequence: Synthetic oligonucleotide
cuguucccagugaugcugc

SEQ ID NO: 1863833 - RNA, 19 nt, Artificial Sequence
  Description of Artificial Sequence: Synthetic oligonucleotide
ugauaggaagagagggguu

SEQ ID NO: 1863834 - RNA, 19 nt, Artificial Sequence
  Description of Artificial Sequence: Synthetic oligonucleotide
gagaacuuaaauacucccu

SEQ ID NO: 1863835 - RNA, 19 nt, Artificial Sequence
  Description of Artificial Sequence: Synthetic oligonucleotide
gacccaguauuaaauaugu

SEQ ID NO: 1863836 - RNA, 19 nt, Artificial Sequence
  Description of Artificial Sequence: Synthetic oligonucleotide
aauggucaaggugcaagua

SEQ ID NO: 1863837 - RNA, 19 nt, Artificial Sequence
  Description of Artificial Sequence: Synthetic oligonucleotide
gcagucuuaagucccaaga

SEQ ID NO: 1863838 - RNA, 19 nt, Artificial Sequence
  Description of Artificial Sequence: Synthetic oligonucleotide
cauuccucgugucuggcca

SEQ ID NO: 1863839 - RNA, 19 nt, Artificial Sequence
  Description of Artificial Sequence: Synthetic oligonucleotide
cagggugcugacuggaauc

SEQ ID NO: 1863840 - RNA, 19 nt, Artificial Sequence
  Description of Artificial Sequence: Synthetic oligonucleotide
gcgccuuucucccauagug

SEQ ID NO: 1863841 - RNA, 19 nt, Artificial Sequence
  Description of Artificial Sequence: Synthetic oligonucleotide
uggcgugcacgacuuugag

SEQ ID NO: 1863842 - RNA, 19 nt, Artificial Sequence
  Description of Artificial Sequence: Synthetic oligonucleotide
ggaaauugcccaggaagag

SEQ ID NO: 1863843 - RNA, 19 nt, Artificial Sequence
  Description of Artificial Sequence: Synthetic oligonucleotide
cuuagcccuguucccagug

SEQ ID NO: 1863844 - RNA, 19 nt, Artificial Sequence
  Description of Artificial Sequence: Synthetic oligonucleotide
cccgccacauccaagacug

SEQ ID NO: 1863845 - RNA, 19 nt, Artificial Sequence
  Description of Artificial Sequence: Synthetic oligonucleotide
uacccagggcugcagggga

SEQ ID NO: 1863846 - RNA, 19 nt, Artificial Sequence
  Description of Artificial Sequence: Synthetic oligonucleotide
guguggucaggaaauugcc

SEQ ID NO: 1863847 - RNA, 19 nt, Artificial Sequence
  Description of Artificial Sequence: Synthetic oligonucleotide
gaacccuuccacggugagg

SEQ ID NO: 1863848 - RNA, 19 nt, Artificial Sequence
  Description of Artificial Sequence: Synthetic oligonucleotide
aaguuucauuccaccaggu

SEQ ID NO: 1863849 - RNA, 19 nt, Artificial Sequence
  Description of Artificial Sequence: Synthetic oligonucleotide
uccugaguaggcugcgccu

SEQ ID NO: 1863850 - RNA, 19 nt, Artificial Sequence
  Description of Artificial Sequence: Synthetic oligonucleotide
gugacggcauuguagagcu

SEQ ID NO: 1863851 - RNA, 19 nt, Artificial Sequence
  Description of Artificial Sequence: Synthetic oligonucleotide
ugaggaaggugagugccaa

SEQ ID NO: 1863852 - RNA, 19 nt, Artificial Sequence
  Description of Artificial Sequence: Synthetic oligonucleotide
gagcagaaaguuaaagacu

SEQ ID NO: 1863853 - RNA, 19 nt, Artificial Sequence
  Description of Artificial Sequence: Synthetic oligonucleotide
cugccauuacccagggcug

SEQ ID NO: 1863854 - RNA, 19 nt, Artificial Sequence
  Description of Artificial Sequence: Synthetic oligonucleotide
ggaagagagggguucucug

SEQ ID NO: 1863855 - RNA, 19 nt, Artificial Sequence
  Description of Artificial Sequence: Synthetic oligonucleotide
gagccauugcugaugagaa

SEQ ID NO: 1863856 - RNA, 19 nt, Artificial Sequence
  Description of Artificial Sequence: Synthetic oligonucleotide
ugcggaggcucauggcugc

SEQ ID NO: 1863857 - RNA, 19 nt, Artificial Sequence
  Description of Artificial Sequence: Synthetic oligonucleotide
gccuuucucccauaguggc

SEQ ID NO: 1863858 - RNA, 19 nt, Artificial Sequence
  Description of Artificial Sequence: Synthetic oligonucleotide
auaggaagagagggguucu

SEQ ID NO: 1863859 - RNA, 19 nt, Artificial Sequence
  Description of Artificial Sequence: Synthetic oligonucleotide
caggaugcuaaaaguuuca

SEQ ID NO: 1863860 - RNA, 19 nt, Artificial Sequence
  Description of Artificial Sequence: Synthetic oligonucleotide
uccucguggcuggagagcu

SEQ ID NO: 1863861 - RNA, 19 nt, Artificial Sequence
  Description of Artificial Sequence: Synthetic oligonucleotide
ucucccgaauggucaaggu

SEQ ID NO: 1863862 - RNA, 19 nt, Artificial Sequence
  Description of Artificial Sequence: Synthetic oligonucleotide
uccguucuucuggaguuug

SEQ ID NO: 1863863 - RNA, 19 nt, Artificial Sequence
  Description of Artificial Sequence: Synthetic oligonucleotide
gugccugggacacaguaaa

SEQ ID NO: 1863864 - RNA, 19 nt, Artificial Sequence
  Description of Artificial Sequence: Synthetic oligonucleotide
gccaacacaaauaccugcc

SEQ ID NO: 1863865 - RNA, 19 nt, Artificial Sequence
  Description of Artificial Sequence: Synthetic oligonucleotide
auauggccacugccauuac

SEQ ID NO: 1863866 - RNA, 19 nt, Artificial Sequence
  Description of Artificial Sequence: Synthetic oligonucleotide
cauuguagagcugccagaa

SEQ ID NO: 1863867 - RNA, 19 nt, Artificial Sequence
  Description of Artificial Sequence: Synthetic oligonucleotide
gucaggaaauugcccagga

SEQ ID NO: 1863868 - RNA, 19 nt, Artificial Sequence
  Description of Artificial Sequence: Synthetic oligonucleotide
auacucccucaccacagaa

SEQ ID NO: 1863869 - RNA, 19 nt, Artificial Sequence
  Description of Artificial Sequence: Synthetic oligonucleotide
gcuaccagugacuggcagc

SEQ ID NO: 1863870 - RNA, 19 nt, Artificial Sequence
  Description of Artificial Sequence: Synthetic oligonucleotide
auuguagagcugccagaaa

SEQ ID NO: 1863871 - RNA, 19 nt, Artificial Sequence
  Description of Artificial Sequence: Synthetic oligonucleotide
guuggggcagguuaauacu

SEQ ID NO: 1863872 - RNA, 19 nt, Artificial Sequence
  Description of Artificial Sequence: Synthetic oligonucleotide
uagcccuguucccagugau

SEQ ID NO: 1863873 - RNA, 19 nt, Artificial Sequence
  Description of Artificial Sequence: Synthetic oligonucleotide
ggugcugacuggaaucucc

SEQ ID NO: 1863874 - RNA, 19 nt, Artificial Sequence
  Description of Artificial Sequence: Synthetic oligonucleotide
gccaagucagcaucacucc

SEQ ID NO: 1863875 - RNA, 19 nt, Artificial Sequence
  Description of Artificial Sequence: Synthetic oligonucleotide
ugccauuacccagggcugc

SEQ ID NO: 1863876 - RNA, 19 nt, Artificial Sequence
  Description of Artificial Sequence: Synthetic oligonucleotide
gugagugccaacacaaaua

SEQ ID NO: 1863877 - RNA, 19 nt, Artificial Sequence
  Description of Artificial Sequence: Synthetic oligonucleotide
cacaggacaggcaggaucu

SEQ ID NO: 1863878 - RNA, 19 nt, Artificial Sequence
  Description of Artificial Sequence: Synthetic oligonucleotide
aaaccccagugagggguuc

SEQ ID NO: 1863879 - RNA, 19 nt, Artificial Sequence
  Description of Artificial Sequence: Synthetic oligonucleotide
ggccaagucagcaucacuc

SEQ ID NO: 1863880 - RNA, 19 nt, Artificial Sequence
  Description of Artificial Sequence: Synthetic oligonucleotide
cugcuuugucuuguuuccg

SEQ ID NO: 1863881 - RNA, 19 nt, Artificial Sequence
  Description of Artificial Sequence: Synthetic oligonucleotide
gaaucuccagcagucuuaa

SEQ ID NO: 1863882 - RNA, 19 nt, Artificial Sequence
  Description of Artificial Sequence: Synthetic oligonucleotide
gagacguaauggugagaca

SEQ ID NO: 1863883 - RNA, 19 nt, Artificial Sequence
  Description of Artificial Sequence: Synthetic oligonucleotide
gcagguuaauacugugcgc

SEQ ID NO: 1863884 - RNA, 19 nt, Artificial Sequence
  Description of Artificial Sequence: Synthetic oligonucleotide
ggcuggagagcucaaacaa

SEQ ID NO: 1863885 - RNA, 19 nt, Artificial Sequence
  Description of Artificial Sequence: Synthetic oligonucleotide
gagugcggaggcucauggc

SEQ ID NO: 1863886 - RNA, 19 nt, Artificial Sequence
  Description of Artificial Sequence: Synthetic oligonucleotide
uacggggagcuuacacaga

SEQ ID NO: 1863887 - RNA, 19 nt, Artificial Sequence
  Description of Artificial Sequence: Synthetic oligonucleotide
acgugacggcauuguagag

SEQ ID NO: 1863888 - RNA, 19 nt, Artificial Sequence
  Description of Artificial Sequence: Synthetic oligonucleotide
ugcgccuuucucccauagu

SEQ ID NO: 1863889 - RNA, 19 nt, Artificial Sequence
  Description of Artificial Sequence: Synthetic oligonucleotide
gaguuuggcgugcacgacu

SEQ ID NO: 1863890 - RNA, 19 nt, Artificial Sequence
  Description of Artificial Sequence: Synthetic oligonucleotide
cagugacuggcagccaggg

SEQ ID NO: 1863891 - RNA, 19 nt, Artificial Sequence
  Description of Artificial Sequence: Synthetic oligonucleotide
gcuacggggagcuuacaca

SEQ ID NO: 1863892 - RNA, 19 nt, Artificial Sequence
  Description of Artificial Sequence: Synthetic oligonucleotide
cauuccucguggcuggaga

SEQ ID NO: 1863893 - RNA, 19 nt, Artificial Sequence
  Description of Artificial Sequence: Synthetic oligonucleotide
acaacgugacggcauugua

SEQ ID NO: 1863894 - RNA, 19 nt, Artificial Sequence
  Description of Artificial Sequence: Synthetic oligonucleotide
cgaaacuucugauaaauua

SEQ ID NO: 1863895 - RNA, 19 nt, Artificial Sequence
  Description of Artificial Sequence: Synthetic oligonucleotide
acccaguauuaaauauguc

SEQ ID NO: 1863896 - RNA, 19 nt, Artificial Sequence
  Description of Artificial Sequence: Synthetic oligonucleotide
caggcggccuucacauucc

SEQ ID NO: 1863897 - RNA, 19 nt, Artificial Sequence
  Description of Artificial Sequence: Synthetic oligonucleotide
cacgacuuugagugugguc

SEQ ID NO: 1863898 - RNA, 19 nt, Artificial Sequence
  Description of Artificial Sequence: Synthetic oligonucleotide
acguggagacguaauggug

SEQ ID NO: 1863899 - RNA, 19 nt, Artificial Sequence
  Description of Artificial Sequence: Synthetic oligonucleotide
caggugguucccucucccc

SEQ ID NO: 1863900 - RNA, 19 nt, Artificial Sequence
  Description of Artificial Sequence: Synthetic oligonucleotide
gugcacgacuuugagugug

SEQ ID NO: 1863901 - RNA, 19 nt, Artificial Sequence
  Description of Artificial Sequence: Synthetic oligonucleotide
ccaguauuaaauaugucau

SEQ ID NO: 1863902 - RNA, 19 nt, Artificial Sequence
  Description of Artificial Sequence: Synthetic oligonucleotide
aaauggccacagaaaggaa

SEQ ID NO: 1863903 - RNA, 19 nt, Artificial Sequence
  Description of Artificial Sequence: Synthetic oligonucleotide
aggugccugggacacagua

SEQ ID NO: 1863904 - RNA, 19 nt, Artificial Sequence
  Description of Artificial Sequence: Synthetic oligonucleotide
aggccaagucagcaucacu

SEQ ID NO: 1863905 - RNA, 19 nt, Artificial Sequence
  Description of Artificial Sequence: Synthetic oligonucleotide
ucacuccagacaggaacgu

SEQ ID NO: 1863906 - RNA, 19 nt, Artificial Sequence
  Description of Artificial Sequence: Synthetic oligonucleotide
cacauccaaaccccaguga

SEQ ID NO: 1863907 - RNA, 19 nt, Artificial Sequence
  Description of Artificial Sequence: Synthetic oligonucleotide
cucugagaacuuaaauacu

SEQ ID NO: 1863908 - RNA, 19 nt, Artificial Sequence
  Description of Artificial Sequence: Synthetic oligonucleotide
cucgcagucuguagagaca

SEQ ID NO: 1863909 - RNA, 19 nt, Artificial Sequence
  Description of Artificial Sequence: Synthetic oligonucleotide
accacacgagcagaaaguu

SEQ ID NO: 1863910 - RNA, 19 nt, Artificial Sequence
  Description of Artificial Sequence: Synthetic oligonucleotide
ggucggcuaaagccaaccc

SEQ ID NO: 1863911 - RNA, 19 nt, Artificial Sequence
  Description of Artificial Sequence: Synthetic oligonucleotide
gcccuguucccagugaugc

SEQ ID NO: 1863912 - RNA, 19 nt, Artificial Sequence
  Description of Artificial Sequence: Synthetic oligonucleotide
ccuuucucccauaguggcc

SEQ ID NO: 1863913 - RNA, 19 nt, Artificial Sequence
  Description of Artificial Sequence: Synthetic oligonucleotide
ggugguggcccacgggaag

SEQ ID NO: 1863914 - RNA, 19 nt, Artificial Sequence
  Description of Artificial Sequence: Synthetic oligonucleotide
aaauagcaggucggcuaaa

SEQ ID NO: 1863915 - RNA, 19 nt, Artificial Sequence
  Description of Artificial Sequence: Synthetic oligonucleotide
gggaagacccaguauuaaa

SEQ ID NO: 1863916 - RNA, 19 nt, Artificial Sequence
  Description of Artificial Sequence: Synthetic oligonucleotide
cagggcucgcagucuguag

SEQ ID NO: 1863917 - RNA, 19 nt, Artificial Sequence
  Description of Artificial Sequence: Synthetic oligonucleotide
cgaauggucaaggugcaag

SEQ ID NO: 1863918 - RNA, 19 nt, Artificial Sequence
  Description of Artificial Sequence: Synthetic oligonucleotide
cccucaccacagaaggugg

SEQ ID NO: 1863919 - RNA, 19 nt, Artificial Sequence
  Description of Artificial Sequence: Synthetic oligonucleotide
agggaagacccaguauuaa

SEQ ID NO: 1863920 - RNA, 19 nt, Artificial Sequence
  Description of Artificial Sequence: Synthetic oligonucleotide
uaggccaagucagcaucac

SEQ ID NO: 1863921 - RNA, 19 nt, Artificial Sequence
  Description of Artificial Sequence: Synthetic oligonucleotide
aggcucauggcugcuuugu

SEQ ID NO: 1863922 - RNA, 19 nt, Artificial Sequence
  Description of Artificial Sequence: Synthetic oligonucleotide
aguuuggcgugcacgacuu

SEQ ID NO: 1863923 - RNA, 19 nt, Artificial Sequence
  Description of Artificial Sequence: Synthetic oligonucleotide
agccauugcugaugagaau

SEQ ID NO: 1863924 - RNA, 19 nt, Artificial Sequence
  Description of Artificial Sequence: Synthetic oligonucleotide
gguuaauacugugcgcaca

SEQ ID NO: 1863925 - RNA, 19 nt, Artificial Sequence
  Description of Artificial Sequence: Synthetic oligonucleotide
ggcuacggggagcuuacac

SEQ ID NO: 1863926 - RNA, 19 nt, Artificial Sequence
  Description of Artificial Sequence: Synthetic oligonucleotide
gggcucgcagucuguagag

SEQ ID NO: 1863927 - RNA, 19 nt, Artificial Sequence
  Description of Artificial Sequence: Synthetic oligonucleotide
uggcuaccagugacuggca

SEQ ID NO: 1863928 - RNA, 19 nt, Artificial Sequence
  Description of Artificial Sequence: Synthetic oligonucleotide
cugcgccuuucucccauag

SEQ ID NO: 1863929 - RNA, 19 nt, Artificial Sequence
  Description of Artificial Sequence: Synthetic oligonucleotide
cagggaagacccaguauua

SEQ ID NO: 1863930 - RNA, 19 nt, Artificial Sequence
  Description of Artificial Sequence: Synthetic oligonucleotide
ggcacagauauggccacug

SEQ ID NO: 1863931 - RNA, 19 nt, Artificial Sequence
  Description of Artificial Sequence: Synthetic oligonucleotide
ugccugggacacaguaaau

SEQ ID NO: 1863932 - RNA, 19 nt, Artificial Sequence
  Description of Artificial Sequence: Synthetic oligonucleotide
ggcuaccagugacuggcag

SEQ ID NO: 1863933 - RNA, 19 nt, Artificial Sequence
  Description of Artificial Sequence: Synthetic oligonucleotide
uggagacguaauggugaga

SEQ ID NO: 1863934 - RNA, 19 nt, Artificial Sequence
  Description of Artificial Sequence: Synthetic oligonucleotide
agcuuacacagagguggug

SEQ ID NO: 1863935 - RNA, 19 nt, Artificial Sequence
  Description of Artificial Sequence: Synthetic oligonucleotide
aauugcccaggaagaggau

SEQ ID NO: 1863936 - RNA, 19 nt, Artificial Sequence
  Description of Artificial Sequence: Synthetic oligonucleotide
gcauuguagagcugccaga

SEQ ID NO: 1863937 - RNA, 19 nt, Artificial Sequence
  Description of Artificial Sequence: Synthetic oligonucleotide
caacacaaauaccugccau

SEQ ID NO: 1863938 - RNA, 19 nt, Artificial Sequence
  Description of Artificial Sequence: Synthetic oligonucleotide
caccaggugccugggacac

SEQ ID NO: 1863939 - RNA, 19 nt, Artificial Sequence
  Description of Artificial Sequence: Synthetic oligonucleotide
cguggagacguaaugguga

SEQ ID NO: 1863940 - RNA, 19 nt, Artificial Sequence
  Description of Artificial Sequence: Synthetic oligonucleotide
ugaguaggcugcgccuuuc

SEQ ID NO: 1863941 - RNA, 19 nt, Artificial Sequence
  Description of Artificial Sequence: Synthetic oligonucleotide
ggugagguccaggugguuc

SEQ ID NO: 1863942 - RNA, 19 nt, Artificial Sequence
  Description of Artificial Sequence: Synthetic oligonucleotide
gcacagauauggccacugc

SEQ ID NO: 1863943 - RNA, 19 nt, Artificial Sequence
  Description of Artificial Sequence: Synthetic oligonucleotide
ugacggcauuguagagcug

SEQ ID NO: 1863944 - RNA, 19 nt, Artificial Sequence
  Description of Artificial Sequence: Synthetic oligonucleotide
ggaagacccaguauuaaau

SEQ ID NO: 1863945 - RNA, 19 nt, Artificial Sequence
  Description of Artificial Sequence: Synthetic oligonucleotide
cgccuuucucccauagugg

SEQ ID NO: 1863946 - RNA, 19 nt, Artificial Sequence
  Description of Artificial Sequence: Synthetic oligonucleotide
cuuugcauuccucguggcu

SEQ ID NO: 1863947 - RNA, 19 nt, Artificial Sequence
  Description of Artificial Sequence: Synthetic oligonucleotide
gcuggagagcucaaacaac

SEQ ID NO: 1863948 - RNA, 19 nt, Artificial Sequence
  Description of Artificial Sequence: Synthetic oligonucleotide
cucguggcuggagagcuca

SEQ ID NO: 1863949 - RNA, 19 nt, Artificial Sequence
  Description of Artificial Sequence: Synthetic oligonucleotide
gaggcacauccaaacccca

SEQ ID NO: 1863950 - RNA, 19 nt, Artificial Sequence
  Description of Artificial Sequence: Synthetic oligonucleotide
ugugcgcacaggcggccuu

SEQ ID NO: 1863951 - RNA, 19 nt, Artificial Sequence
  Description of Artificial Sequence: Synthetic oligonucleotide
uggcugcuuugucuuguuu

SEQ ID NO: 1863952 - RNA, 19 nt, Artificial Sequence
  Description of Artificial Sequence: Synthetic oligonucleotide
caaauaccugccauucuuu

SEQ ID NO: 1863953 - RNA, 19 nt, Artificial Sequence
  Description of Artificial Sequence: Synthetic oligonucleotide
acccugagaugcugcugca

SEQ ID NO: 1863954 - RNA, 19 nt, Artificial Sequence
  Description of Artificial Sequence: Synthetic oligonucleotide
gccuuagcccuguucccag

SEQ ID NO: 1863955 - RNA, 19 nt, Artificial Sequence
  Description of Artificial Sequence: Synthetic oligonucleotide
gccaaccccagugaggcac

SEQ ID NO: 1863956 - RNA, 19 nt, Artificial Sequence
  Description of Artificial Sequence: Synthetic oligonucleotide
cgugacggcauuguagagc

SEQ ID NO: 1863957 - RNA, 19 nt, Artificial Sequence
  Description of Artificial Sequence: Synthetic oligonucleotide
acaggagugcggaggcuca

SEQ ID NO: 1863958 - RNA, 19 nt, Artificial Sequence
  Description of Artificial Sequence: Synthetic oligonucleotide
auagggaguuggggcaggu

SEQ ID NO: 1863959 - RNA, 19 nt, Artificial Sequence
  Description of Artificial Sequence: Synthetic oligonucleotide
ggccccgccacauccaaga

SEQ ID NO: 1863960 - RNA, 19 nt, Artificial Sequence
  Description of Artificial Sequence: Synthetic oligonucleotide
ggccuucacauuccucgug

SEQ ID NO: 1863961 - RNA, 19 nt, Artificial Sequence
  Description of Artificial Sequence: Synthetic oligonucleotide
gaagcagggaagacccagu

SEQ ID NO: 1863962 - RNA, 19 nt, Artificial Sequence
  Description of Artificial Sequence: Synthetic oligonucleotide
cacgggaaggggcuccaca

SEQ ID NO: 1863963 - RNA, 19 nt, Artificial Sequence
  Description of Artificial Sequence: Synthetic oligonucleotide
gagggguucucugaggcuu

SEQ ID NO: 1863964 - RNA, 19 nt, Artificial Sequence
  Description of Artificial Sequence: Synthetic oligonucleotide
aggagugcggaggcucaug

SEQ ID NO: 1863965 - RNA, 19 nt, Artificial Sequence
  Description of Artificial Sequence: Synthetic oligonucleotide
caggucggcuaaagccaac

SEQ ID NO: 1863966 - RNA, 19 nt, Artificial Sequence
  Description of Artificial Sequence: Synthetic oligonucleotide
ggaaucuccagcagucuua

SEQ ID NO: 1863967 - RNA, 19 nt, Artificial Sequence
  Description of Artificial Sequence: Synthetic oligonucleotide
ggaugcuaaaaguuucauu

SEQ ID NO: 1863968 - RNA, 19 nt, Artificial Sequence
  Description of Artificial Sequence: Synthetic oligonucleotide
cacaaauaccugccauucu

SEQ ID NO: 1863969 - RNA, 19 nt, Artificial Sequence
  Description of Artificial Sequence: Synthetic oligonucleotide
gggagcuuacacagaggug

SEQ ID NO: 1863970 - RNA, 19 nt, Artificial Sequence
  Description of Artificial Sequence: Synthetic oligonucleotide
ggcacauccaaaccccagu

SEQ ID NO: 1863971 - RNA, 19 nt, Artificial Sequence
  Description of Artificial Sequence: Synthetic oligonucleotide
cagauauggccacugccau

SEQ ID NO: 1863972 - RNA, 19 nt, Artificial Sequence
  Description of Artificial Sequence: Synthetic oligonucleotide
gcucauggcugcuuugucu

SEQ ID NO: 1863973 - RNA, 19 nt, Artificial Sequence
  Description of Artificial Sequence: Synthetic oligonucleotide
uugccccucccuggaagac

SEQ ID NO: 1863974 - RNA, 19 nt, Artificial Sequence
  Description of Artificial Sequence: Synthetic oligonucleotide
cccucccuggaagacaggc

SEQ ID NO: 1863975 - RNA, 19 nt, Artificial Sequence
  Description of Artificial Sequence: Synthetic oligonucleotide
caaacaacgugacggcauu

SEQ ID NO: 1863976 - RNA, 19 nt, Artificial Sequence
  Description of Artificial Sequence: Synthetic oligonucleotide
gaguaggcugcgccuuucu

SEQ ID NO: 1863977 - RNA, 19 nt, Artificial Sequence
  Description of Artificial Sequence: Synthetic oligonucleotide
ugcauuccucguggcugga

SEQ ID NO: 1863978 - RNA, 19 nt, Artificial Sequence
  Description of Artificial Sequence: Synthetic oligonucleotide
gaguuggggcagguuaaua

SEQ ID NO: 1863979 - RNA, 19 nt, Artificial Sequence
  Description of Artificial Sequence: Synthetic oligonucleotide
gugagggguucaaaugaua

SEQ ID NO: 1863980 - RNA, 19 nt, Artificial Sequence
  Description of Artificial Sequence: Synthetic oligonucleotide
cgacuuugaguguggucag

SEQ ID NO: 1863981 - RNA, 19 nt, Artificial Sequence
  Description of Artificial Sequence: Synthetic oligonucleotide
ccaagucagcaucacucca

SEQ ID NO: 1863982 - RNA, 19 nt, Artificial Sequence
  Description of Artificial Sequence: Synthetic oligonucleotide
aggcggccuucacauuccu

SEQ ID NO: 1863983 - RNA, 19 nt, Artificial Sequence
  Description of Artificial Sequence: Synthetic oligonucleotide
gccccucccuggaagacag

SEQ ID NO: 1863984 - RNA, 19 nt, Artificial Sequence
  Description of Artificial Sequence: Synthetic oligonucleotide
acacgagcagaaaguuaaa

SEQ ID NO: 1863985 - RNA, 19 nt, Artificial Sequence
  Description of Artificial Sequence: Synthetic oligonucleotide
agccaaccccagugaggca

SEQ ID NO: 1863986 - RNA, 19 nt, Artificial Sequence
  Description of Artificial Sequence: Synthetic oligonucleotide
gagcuuacacagagguggu

SEQ ID NO: 1863987 - RNA, 19 nt, Artificial Sequence
  Description of Artificial Sequence: Synthetic oligonucleotide
gucuguagagacagccccu

SEQ ID NO: 1863988 - RNA, 19 nt, Artificial Sequence
  Description of Artificial Sequence: Synthetic oligonucleotide
ggaguuuggcgugcacgac

SEQ ID NO: 1863989 - RNA, 19 nt, Artificial Sequence
  Description of Artificial Sequence: Synthetic oligonucleotide
gccugggacacaguaaaua

SEQ ID NO: 1863990 - RNA, 19 nt, Artificial Sequence
  Description of Artificial Sequence: Synthetic oligonucleotide
ccagcagucuuaaguccca

SEQ ID NO: 1863991 - RNA, 19 nt, Artificial Sequence
  Description of Artificial Sequence: Synthetic oligonucleotide
ggggcuacggggagcuuac

SEQ ID NO: 1863992 - RNA, 19 nt, Artificial Sequence
  Description of Artificial Sequence: Synthetic oligonucleotide
ggucaaggugcaaguaaua

SEQ ID NO: 1863993 - RNA, 19 nt, Artificial Sequence
  Description of Artificial Sequence: Synthetic oligonucleotide
gguccugaguaggcugcgc

SEQ ID NO: 1863994 - RNA, 19 nt, Artificial Sequence
  Description of Artificial Sequence: Synthetic oligonucleotide
aggcugcgccuuucuccca

SEQ ID NO: 1863995 - RNA, 19 nt, Artificial Sequence
  Description of Artificial Sequence: Synthetic oligonucleotide
ggccucagaguccggggaa

SEQ ID NO: 1863996 - RNA, 19 nt, Artificial Sequence
  Description of Artificial Sequence: Synthetic oligonucleotide
ggcgugcacgacuuugagu

SEQ ID NO: 1863997 - RNA, 19 nt, Artificial Sequence
  Description of Artificial Sequence: Synthetic oligonucleotide
cucccucaccacagaaggu

SEQ ID NO: 1863998 - RNA, 19 nt, Artificial Sequence
  Description of Artificial Sequence: Synthetic oligonucleotide
cggggagcuuacacagagg

SEQ ID NO: 1863999 - RNA, 19 nt, Artificial Sequence
  Description of Artificial Sequence: Synthetic oligonucleotide
cguaauggugagacaccca

SEQ ID NO: 1864000 - RNA, 19 nt, Artificial Sequence
  Description of Artificial Sequence: Synthetic oligonucleotide
ccauuacccagggcugcag

SEQ ID NO: 1864001 - RNA, 19 nt, Artificial Sequence
  Description of Artificial Sequence: Synthetic oligonucleotide
cggcuaaagccaaccccag

SEQ ID NO: 1864002 - RNA, 19 nt, Artificial Sequence
  Description of Artificial Sequence: Synthetic oligonucleotide
gcucucccgaauggucaag

SEQ ID NO: 1864003 - RNA, 19 nt, Artificial Sequence
  Description of Artificial Sequence: Synthetic oligonucleotide
cugcaggggaggccucaga

SEQ ID NO: 1864004 - RNA, 19 nt, Artificial Sequence
  Description of Artificial Sequence: Synthetic oligonucleotide
ccaccaggugccugggaca

SEQ ID NO: 1864005 - RNA, 19 nt, Artificial Sequence
  Description of Artificial Sequence: Synthetic oligonucleotide
cccuggcacaggagugcgg

SEQ ID NO: 1864006 - RNA, 19 nt, Artificial Sequence
  Description of Artificial Sequence: Synthetic oligonucleotide
aggccccgccacauccaag

SEQ ID NO: 1864007 - RNA, 19 nt, Artificial Sequence
  Description of Artificial Sequence: Synthetic oligonucleotide
ccacacgagcagaaaguua

SEQ ID NO: 1864008 - RNA, 19 nt, Artificial Sequence
  Description of Artificial Sequence: Synthetic oligonucleotide
gcaggucggcuaaagccaa

SEQ ID NO: 1864009 - RNA, 19 nt, Artificial Sequence
  Description of Artificial Sequence: Synthetic oligonucleotide
accaggugccugggacaca

SEQ ID NO: 1864010 - RNA, 19 nt, Artificial Sequence
  Description of Artificial Sequence: Synthetic oligonucleotide
gccauuacccagggcugca

SEQ ID NO: 1864011 - RNA, 19 nt, Artificial Sequence
  Description of Artificial Sequence: Synthetic oligonucleotide
guggugcaggaaacacaaa

SEQ ID NO: 1864012 - RNA, 19 nt, Artificial Sequence
  Description of Artificial Sequence: Synthetic oligonucleotide
cagcagucuuaagucccaa

SEQ ID NO: 1864013 - RNA, 19 nt, Artificial Sequence
  Description of Artificial Sequence: Synthetic oligonucleotide
ggcucgcagucuguagaga

SEQ ID NO: 1864014 - RNA, 19 nt, Artificial Sequence
  Description of Artificial Sequence: Synthetic oligonucleotide
ccaaccccagugaggcaca

SEQ ID NO: 1864015 - RNA, 19 nt, Artificial Sequence
  Description of Artificial Sequence: Synthetic oligonucleotide
ccgccacauccaagacugg

SEQ ID NO: 1864016 - RNA, 19 nt, Artificial Sequence
  Description of Artificial Sequence: Synthetic oligonucleotide
gccccgccacauccaagac

SEQ ID NO: 1864017 - RNA, 19 nt, Artificial Sequence
  Description of Artificial Sequence: Synthetic oligonucleotide
ccuuugauucuggagccau

SEQ ID NO: 1864018 - RNA, 19 nt, Artificial Sequence
  Description of Artificial Sequence: Synthetic oligonucleotide
ccucguggcuggagagcuc

SEQ ID NO: 1864019 - RNA, 19 nt, Artificial Sequence
  Description of Artificial Sequence: Synthetic oligonucleotide
guuuggcgugcacgacuuu

SEQ ID NO: 1864020 - RNA, 19 nt, Artificial Sequence
  Description of Artificial Sequence: Synthetic oligonucleotide
ccccagugaggcacaucca

SEQ ID NO: 1864021 - RNA, 19 nt, Artificial Sequence
  Description of Artificial Sequence: Synthetic oligonucleotide
ggcugcgccuuucucccau

SEQ ID NO: 1864022 - RNA, 19 nt, Artificial Sequence
  Description of Artificial Sequence: Synthetic oligonucleotide
ggaguuggggcagguuaau

SEQ ID NO: 1864023 - RNA, 19 nt, Artificial Sequence
  Description of Artificial Sequence: Synthetic oligonucleotide
ccagggugcugacuggaau

SEQ ID NO: 1864024 - RNA, 19 nt, Artificial Sequence
  Description of Artificial Sequence: Synthetic oligonucleotide
gcgcacaggcggccuucac

SEQ ID NO: 1864025 - RNA, 19 nt, Artificial Sequence
  Description of Artificial Sequence: Synthetic oligonucleotide
ccuggaagacaggcacaga

SEQ ID NO: 1864026 - RNA, 19 nt, Artificial Sequence
  Description of Artificial Sequence: Synthetic oligonucleotide
gcugcgccuuucucccaua

SEQ ID NO: 1864027 - RNA, 19 nt, Artificial Sequence
  Description of Artificial Sequence: Synthetic oligonucleotide
cugugcgcacaggcggccu

SEQ ID NO: 1864028 - RNA, 19 nt, Artificial Sequence
  Description of Artificial Sequence: Synthetic oligonucleotide
ccuuagcccuguucccagu

SEQ ID NO: 1864029 - RNA, 19 nt, Artificial Sequence
  Description of Artificial Sequence: Synthetic oligonucleotide
cacaggcggccuucacauu

SEQ ID NO: 1864030 - RNA, 19 nt, Artificial Sequence
  Description of Artificial Sequence: Synthetic oligonucleotide
cggcauuguagagcugcca

SEQ ID NO: 1864031 - RNA, 19 nt, Artificial Sequence
  Description of Artificial Sequence: Synthetic oligonucleotide
cccuguucccagugaugcu

SEQ ID NO: 1864032 - RNA, 19 nt, Artificial Sequence
  Description of Artificial Sequence: Synthetic oligonucleotide
ccacgggaaggggcuccac

SEQ ID NO: 1864033 - RNA, 19 nt, Artificial Sequence
  Description of Artificial Sequence: Synthetic oligonucleotide
caggagugcggaggcucau

SEQ ID NO: 1864034 - RNA, 19 nt, Artificial Sequence
  Description of Artificial Sequence: Synthetic oligonucleotide
ccgaauggucaaggugcaa

SEQ ID NO: 1864035 - RNA, 19 nt, Artificial Sequence
  Description of Artificial Sequence: Synthetic oligonucleotide
gggcuacggggagcuuaca

SEQ ID NO: 1864036 - RNA, 19 nt, Artificial Sequence
  Description of Artificial Sequence: Synthetic oligonucleotide
cgugcacgacuuugagugu

SEQ ID NO: 1864037 - RNA, 19 nt, Artificial Sequence
  Description of Artificial Sequence: Synthetic oligonucleotide
cccacgggaaggggcucca

SEQ ID NO: 1864038 - RNA, 19 nt, Artificial Sequence
  Description of Artificial Sequence: Synthetic oligonucleotide
cggccuucacauuccucgu

SEQ ID NO: 1864039 - RNA, 19 nt, Artificial Sequence
  Description of Artificial Sequence: Synthetic oligonucleotide
cccagggcucgcagucugu

SEQ ID NO: 1864040 - RNA, 19 nt, Artificial Sequence
  Description of Artificial Sequence: Synthetic oligonucleotide
aauuuucuugcacaggagc

SEQ ID NO: 1864041 - RNA, 19 nt, Artificial Sequence
  Description of Artificial Sequence: Synthetic oligonucleotide
gauuacauccaccagaggg

SEQ ID NO: 1864042 - RNA, 19 nt, Artificial Sequence
  Description of Artificial Sequence: Synthetic oligonucleotide
uuuguguucaccaaagagg

SEQ ID NO: 1864043 - RNA, 19 nt, Artificial Sequence
  Description of Artificial Sequence: Synthetic oligonucleotide
aaaggcagggagcagaugc

SEQ ID NO: 1864044 - RNA, 19 nt, Artificial Sequence
  Description of Artificial Sequence: Synthetic oligonucleotide
uaaaauaugugaaggaacc

SEQ ID NO: 1864045 - RNA, 19 nt, Artificial Sequence
  Description of Artificial Sequence: Synthetic oligonucleotide
aaacucggauuccagaacc

SEQ ID NO: 1864046 - RNA, 19 nt, Artificial Sequence
  Description of Artificial Sequence: Synthetic oligonucleotide
ugacacgcuacccacaugg

SEQ ID NO: 1864047 - RNA, 19 nt, Artificial Sequence
  Description of Artificial Sequence: Synthetic oligonucleotide
uaauuuauuuccaagcgau

SEQ ID NO: 1864048 - RNA, 19 nt, Artificial Sequence
  Description of Artificial Sequence: Synthetic oligonucleotide
aaaauaauagccaccauaa

SEQ ID NO: 1864049 - RNA, 19 nt, Artificial Sequence
  Description of Artificial Sequence: Synthetic oligonucleotide
aaauaugugaaggaaccag

SEQ ID NO: 1864050 - RNA, 19 nt, Artificial Sequence
  Description of Artificial Sequence: Synthetic oligonucleotide
aaaacucggauuccagaac

SEQ ID NO: 1864051 - RNA, 19 nt, Artificial Sequence
  Description of Artificial Sequence: Synthetic oligonucleotide
ucugcauaaaauaugugaa

SEQ ID NO: 1864052 - RNA, 19 nt, Artificial Sequence
  Description of Artificial Sequence: Synthetic oligonucleotide
uaagaaaauaauagccacc

SEQ ID NO: 1864053 - RNA, 19 nt, Artificial Sequence
  Description of Artificial Sequence: Synthetic oligonucleotide
gacaggaaaagcuugggug

SEQ ID NO: 1864054 - RNA, 19 nt, Artificial Sequence
  Description of Artificial Sequence: Synthetic oligonucleotide
gaagcaacgggcuuggagc

SEQ ID NO: 1864055 - RNA, 19 nt, Artificial Sequence
  Description of Artificial Sequence: Synthetic oligonucleotide
uguugugagcuccaaagcc

SEQ ID NO: 1864056 - RNA, 19 nt, Artificial Sequence
  Description of Artificial Sequence: Synthetic oligonucleotide
aggagaacaaccucacggc

SEQ ID NO: 1864057 - RNA, 19 nt, Artificial Sequence
  Description of Artificial Sequence: Synthetic oligonucleotide
uggccaagaagaaauaccc

SEQ ID NO: 1864058 - RNA, 19 nt, Artificial Sequence
  Description of Artificial Sequence: Synthetic oligonucleotide
guaagaaaauaauagccac

SEQ ID NO: 1864059 - RNA, 19 nt, Artificial Sequence
  Description of Artificial Sequence: Synthetic oligonucleotide
guuggcaaaagccaggccc

SEQ ID NO: 1864060 - RNA, 19 nt, Artificial Sequence
  Description of Artificial Sequence: Synthetic oligonucleotide
ucuaauugcuugcucacca

SEQ ID NO: 1864061 - RNA, 19 nt, Artificial Sequence
  Description of Artificial Sequence: Synthetic oligonucleotide
aaauacccaggucuugagg

SEQ ID NO: 1864062 - RNA, 19 nt, Artificial Sequence
  Description of Artificial Sequence: Synthetic oligonucleotide
agauuaauuuucuugcaca

SEQ ID NO: 1864063 - RNA, 19 nt, Artificial Sequence
  Description of Artificial Sequence: Synthetic oligonucleotide
aaugccggcagauuaauuu

SEQ ID NO: 1864064 - RNA, 19 nt, Artificial Sequence
  Description of Artificial Sequence: Synthetic oligonucleotide
uuuauuuccaagcgauuac

SEQ ID NO: 1864065 - RNA, 19 nt, Artificial Sequence
  Description of Artificial Sequence: Synthetic oligonucleotide
gaaaauaauagccaccaua

SEQ ID NO: 1864066 - RNA, 19 nt, Artificial Sequence
  Description of Artificial Sequence: Synthetic oligonucleotide
auagcagacucuccgaguc

SEQ ID NO: 1864067 - RNA, 19 nt, Artificial Sequence
  Description of Artificial Sequence: Synthetic oligonucleotide
acaugcaaggagaacaacc

SEQ ID NO: 1864068 - RNA, 19 nt, Artificial Sequence
  Description of Artificial Sequence: Synthetic oligonucleotide
aacacgggcuucucagucc

SEQ ID NO: 1864069 - RNA, 19 nt, Artificial Sequence
  Description of Artificial Sequence: Synthetic oligonucleotide
aauugcuugcucaccagac

SEQ ID NO: 1864070 - RNA, 19 nt, Artificial Sequence
  Description of Artificial Sequence: Synthetic oligonucleotide
uugcucaccagacuguaag

SEQ ID NO: 1864071 - RNA, 19 nt, Artificial Sequence
  Description of Artificial Sequence: Synthetic oligonucleotide
aauccucuccccuggggac

SEQ ID NO: 1864072 - RNA, 19 nt, Artificial Sequence
  Description of Artificial Sequence: Synthetic oligonucleotide
agaacaaccucacggccac

SEQ ID NO: 1864073 - RNA, 19 nt, Artificial Sequence
  Description of Artificial Sequence: Synthetic oligonucleotide
ucaggaaugcugcacugcc

SEQ ID NO: 1864074 - RNA, 19 nt, Artificial Sequence
  Description of Artificial Sequence: Synthetic oligonucleotide
uaagaaggcacugugcucu

SEQ ID NO: 1864075 - RNA, 19 nt, Artificial Sequence
  Description of Artificial Sequence: Synthetic oligonucleotide
cucugcauaaaauauguga

SEQ ID NO: 1864076 - RNA, 19 nt, Artificial Sequence
  Description of Artificial Sequence: Synthetic oligonucleotide
ggugacaaaaggcagggag

SEQ ID NO: 1864077 - RNA, 19 nt, Artificial Sequence
  Description of Artificial Sequence: Synthetic oligonucleotide
acuagggugguaccagggc

SEQ ID NO: 1864078 - RNA, 19 nt, Artificial Sequence
  Description of Artificial Sequence: Synthetic oligonucleotide
ugaauccggaagcaacggg

SEQ ID NO: 1864079 - RNA, 19 nt, Artificial Sequence
  Description of Artificial Sequence: Synthetic oligonucleotide
aacuuguacaccauugaca

SEQ ID NO: 1864080 - RNA, 19 nt, Artificial Sequence
  Description of Artificial Sequence: Synthetic oligonucleotide
auuaauuuucuugcacagg

SEQ ID NO: 1864081 - RNA, 19 nt, Artificial Sequence
  Description of Artificial Sequence: Synthetic oligonucleotide
auccaucgagccuucaaac

SEQ ID NO: 1864082 - RNA, 19 nt, Artificial Sequence
  Description of Artificial Sequence: Synthetic oligonucleotide
cuggccaagaagaaauacc

SEQ ID NO: 1864083 - RNA, 19 nt, Artificial Sequence
  Description of Artificial Sequence: Synthetic oligonucleotide
uccagacacucauacaccc

SEQ ID NO: 1864084 - RNA, 19 nt, Artificial Sequence
  Description of Artificial Sequence: Synthetic oligonucleotide
uuaaaugccggcagauuaa

SEQ ID NO: 1864085 - RNA, 19 nt, Artificial Sequence
  Description of Artificial Sequence: Synthetic oligonucleotide
aaaagcuuggguggcacug

SEQ ID NO: 1864086 - RNA, 19 nt, Artificial Sequence
  Description of Artificial Sequence: Synthetic oligonucleotide
uguggguaggaaacgcucc

SEQ ID NO: 1864087 - RNA, 19 nt, Artificial Sequence
  Description of Artificial Sequence: Synthetic oligonucleotide
cuucucugcauaaaauaug

SEQ ID NO: 1864088 - RNA, 19 nt, Artificial Sequence
  Description of Artificial Sequence: Synthetic oligonucleotide
gaggcuuaaaugccggcag

SEQ ID NO: 1864089 - RNA, 19 nt, Artificial Sequence
  Description of Artificial Sequence: Synthetic oligonucleotide
gagguaagaaggcacugug

SEQ ID NO: 1864090 - RNA, 19 nt, Artificial Sequence
  Description of Artificial Sequence: Synthetic oligonucleotide
ggauuccagaaccacaagg

SEQ ID NO: 1864091 - RNA, 19 nt, Artificial Sequence
  Description of Artificial Sequence: Synthetic oligonucleotide
aaacgcuccagcagucucc

SEQ ID NO: 1864092 - RNA, 19 nt, Artificial Sequence
  Description of Artificial Sequence: Synthetic oligonucleotide
caggucuugagguaagaag

SEQ ID NO: 1864093 - RNA, 19 nt, Artificial Sequence
  Description of Artificial Sequence: Synthetic oligonucleotide
agaaccacaagggaagcag

SEQ ID NO: 1864094 - RNA, 19 nt, Artificial Sequence
  Description of Artificial Sequence: Synthetic oligonucleotide
accgucuccagccaguuug

SEQ ID NO: 1864095 - RNA, 19 nt, Artificial Sequence
  Description of Artificial Sequence: Synthetic oligonucleotide
cuccacacgaccauccugc

SEQ ID NO: 1864096 - RNA, 19 nt, Artificial Sequence
  Description of Artificial Sequence: Synthetic oligonucleotide
aggaacacgggcuucucag

SEQ ID NO: 1864097 - RNA, 19 nt, Artificial Sequence
  Description of Artificial Sequence: Synthetic oligonucleotide
cacgcuacccacauggcag

SEQ ID NO: 1864098 - RNA, 19 nt, Artificial Sequence
  Description of Artificial Sequence: Synthetic oligonucleotide
auugacaggaaaagcuugg

SEQ ID NO: 1864099 - RNA, 19 nt, Artificial Sequence
  Description of Artificial Sequence: Synthetic oligonucleotide
caagcgauuacauccacca

SEQ ID NO: 1864100 - RNA, 19 nt, Artificial Sequence
  Description of Artificial Sequence: Synthetic oligonucleotide
cagauuaauuuucuugcac

SEQ ID NO: 1864101 - RNA, 19 nt, Artificial Sequence
  Description of Artificial Sequence: Synthetic oligonucleotide
agugaauccggaagcaacg

SEQ ID NO: 1864102 - RNA, 19 nt, Artificial Sequence
  Description of Artificial Sequence: Synthetic oligonucleotide
guaggaaacgcuccagcag

SEQ ID NO: 1864103 - RNA, 19 nt, Artificial Sequence
  Description of Artificial Sequence: Synthetic oligonucleotide
uaauugcuugcucaccaga

SEQ ID NO: 1864104 - RNA, 19 nt, Artificial Sequence
  Description of Artificial Sequence: Synthetic oligonucleotide
gaauccggaagcaacgggc

SEQ ID NO: 1864105 - RNA, 19 nt, Artificial Sequence
  Description of Artificial Sequence: Synthetic oligonucleotide
guguucaccaaagaggggc

SEQ ID NO: 1864106 - RNA, 19 nt, Artificial Sequence
  Description of Artificial Sequence: Synthetic oligonucleotide
ucuucacccaacccgcacc

SEQ ID NO: 1864107 - RNA, 19 nt, Artificial Sequence
  Description of Artificial Sequence: Synthetic oligonucleotide
accauugacaggaaaagcu

SEQ ID NO: 1864108 - RNA, 19 nt, Artificial Sequence
  Description of Artificial Sequence: Synthetic oligonucleotide
gccaagaagaaauacccag

SEQ ID NO: 1864109 - RNA, 19 nt, Artificial Sequence
  Description of Artificial Sequence: Synthetic oligonucleotide
ucuccgaguccccaggccc

SEQ ID NO: 1864110 - RNA, 19 nt, Artificial Sequence
  Description of Artificial Sequence: Synthetic oligonucleotide
guacagguuggcaaaagcc

SEQ ID NO: 1864111 - RNA, 19 nt, Artificial Sequence
  Description of Artificial Sequence: Synthetic oligonucleotide
cagaaagaggugacaaaag

SEQ ID NO: 1864112 - RNA, 19 nt, Artificial Sequence
  Description of Artificial Sequence: Synthetic oligonucleotide
cuucuaauugcuugcucac

SEQ ID NO: 1864113 - RNA, 19 nt, Artificial Sequence
  Description of Artificial Sequence: Synthetic oligonucleotide
cuagggugguaccagggcc

SEQ ID NO: 1864114 - RNA, 19 nt, Artificial Sequence
  Description of Artificial Sequence: Synthetic oligonucleotide
uccucaguugcagagcugc

SEQ ID NO: 1864115 - RNA, 19 nt, Artificial Sequence
  Description of Artificial Sequence: Synthetic oligonucleotide
aaagcuuggguggcacugg

SEQ ID NO: 1864116 - RNA, 19 nt, Artificial Sequence
  Description of Artificial Sequence: Synthetic oligonucleotide
ucaaccucgggugggauca

SEQ ID NO: 1864117 - RNA, 19 nt, Artificial Sequence
  Description of Artificial Sequence: Synthetic oligonucleotide
acguugucaaccucgggug

SEQ ID NO: 1864118 - RNA, 19 nt, Artificial Sequence
  Description of Artificial Sequence: Synthetic oligonucleotide
gaaggagccgggaacacug

SEQ ID NO: 1864119 - RNA, 19 nt, Artificial Sequence
  Description of Artificial Sequence: Synthetic oligonucleotide
aggaaugcugcacugcccu

SEQ ID NO: 1864120 - RNA, 19 nt, Artificial Sequence
  Description of Artificial Sequence: Synthetic oligonucleotide
gaugcuguguguggguagg

SEQ ID NO: 1864121 - RNA, 19 nt, Artificial Sequence
  Description of Artificial Sequence: Synthetic oligonucleotide
cuuaaaugccggcagauua

SEQ ID NO: 1864122 - RNA, 19 nt, Artificial Sequence
  Description of Artificial Sequence: Synthetic oligonucleotide
aagcgauuacauccaccag

SEQ ID NO: 1864123 - RNA, 19 nt, Artificial Sequence
  Description of Artificial Sequence: Synthetic oligonucleotide
gagccgggaacacugacac

SEQ ID NO: 1864124 - RNA, 19 nt, Artificial Sequence
  Description of Artificial Sequence: Synthetic oligonucleotide
uguguggguaggaaacgcu

SEQ ID NO: 1864125 - RNA, 19 nt, Artificial Sequence
  Description of Artificial Sequence: Synthetic oligonucleotide
caccacacgguacagguug

SEQ ID NO: 1864126 - RNA, 19 nt, Artificial Sequence
  Description of Artificial Sequence: Synthetic oligonucleotide
uucucagucccagagggcu

SEQ ID NO: 1864127 - RNA, 19 nt, Artificial Sequence
  Description of Artificial Sequence: Synthetic oligonucleotide
ccuguugugagcuccaaag

SEQ ID NO: 1864128 - RNA, 19 nt, Artificial Sequence
  Description of Artificial Sequence: Synthetic oligonucleotide
ucuccagaacuuguccugg

SEQ ID NO: 1864129 - RNA, 19 nt, Artificial Sequence
  Description of Artificial Sequence: Synthetic oligonucleotide
aaggaaccagcacuuuuaa

SEQ ID NO: 1864130 - RNA, 19 nt, Artificial Sequence
  Description of Artificial Sequence: Synthetic oligonucleotide
cuaauugcuugcucaccag

SEQ ID NO: 1864131 - RNA, 19 nt, Artificial Sequence
  Description of Artificial Sequence: Synthetic oligonucleotide
agguaagaaggcacugugc

SEQ ID NO: 1864132 - RNA, 19 nt, Artificial Sequence
  Description of Artificial Sequence: Synthetic oligonucleotide
uguucaccaaagaggggcu

SEQ ID NO: 1864133 - RNA, 19 nt, Artificial Sequence
  Description of Artificial Sequence: Synthetic oligonucleotide
uccaucgagccuucaaacu

SEQ ID NO: 1864134 - RNA, 19 nt, Artificial Sequence
  Description of Artificial Sequence: Synthetic oligonucleotide
cuacccacauggcagcugc

SEQ ID NO: 1864135 - RNA, 19 nt, Artificial Sequence
  Description of Artificial Sequence: Synthetic oligonucleotide
gccaccuggacauccaucg

SEQ ID NO: 1864136 - RNA, 19 nt, Artificial Sequence
  Description of Artificial Sequence: Synthetic oligonucleotide
uuacauccaccagaggggc

SEQ ID NO: 1864137 - RNA, 19 nt, Artificial Sequence
  Description of Artificial Sequence: Synthetic oligonucleotide
acaaaaggcagggagcaga

SEQ ID NO: 1864138 - RNA, 19 nt, Artificial Sequence
  Description of Artificial Sequence: Synthetic oligonucleotide
uucaaacuuguacaccauu

SEQ ID NO: 1864139 - RNA, 19 nt, Artificial Sequence
  Description of Artificial Sequence: Synthetic oligonucleotide
accacaagggaagcagggc

SEQ ID NO: 1864140 - RNA, 19 nt, Artificial Sequence
  Description of Artificial Sequence: Synthetic oligonucleotide
cuguugugagcuccaaagc

SEQ ID NO: 1864141 - RNA, 19 nt, Artificial Sequence
  Description of Artificial Sequence: Synthetic oligonucleotide
cauccugcccaaaucuagc

SEQ ID NO: 1864142 - RNA, 19 nt, Artificial Sequence
  Description of Artificial Sequence: Synthetic oligonucleotide
cucgggugggaucaggccc

SEQ ID NO: 1864143 - RNA, 19 nt, Artificial Sequence
  Description of Artificial Sequence: Synthetic oligonucleotide
auugcuugcucaccagacu

SEQ ID NO: 1864144 - RNA, 19 nt, Artificial Sequence
  Description of Artificial Sequence: Synthetic oligonucleotide
ggggccgaggcuuaaaugc

SEQ ID NO: 1864145 - RNA, 19 nt, Artificial Sequence
  Description of Artificial Sequence: Synthetic oligonucleotide
gaaagaagucacucuucuc

SEQ ID NO: 1864146 - RNA, 19 nt, Artificial Sequence
  Description of Artificial Sequence: Synthetic oligonucleotide
gaauccucuccccugggga

SEQ ID NO: 1864147 - RNA, 19 nt, Artificial Sequence
  Description of Artificial Sequence: Synthetic oligonucleotide
agccaguuuguguucacca

SEQ ID NO: 1864148 - RNA, 19 nt, Artificial Sequence
  Description of Artificial Sequence: Synthetic oligonucleotide
cugagaaggagccgggaac

SEQ ID NO: 1864149 - RNA, 19 nt, Artificial Sequence
  Description of Artificial Sequence: Synthetic oligonucleotide
caucgagccuucaaacuug

SEQ ID NO: 1864150 - RNA, 19 nt, Artificial Sequence
  Description of Artificial Sequence: Synthetic oligonucleotide
accuggacauccaucgagc

SEQ ID NO: 1864151 - RNA, 19 nt, Artificial Sequence
  Description of Artificial Sequence: Synthetic oligonucleotide
cuucacccaacccgcaccg

SEQ ID NO: 1864152 - RNA, 19 nt, Artificial Sequence
  Description of Artificial Sequence: Synthetic oligonucleotide
cacacgaccauccugccca

SEQ ID NO: 1864153 - RNA, 19 nt, Artificial Sequence
  Description of Artificial Sequence: Synthetic oligonucleotide
uggacauccaucgagccuu

SEQ ID NO: 1864154 - RNA, 19 nt, Artificial Sequence
  Description of Artificial Sequence: Synthetic oligonucleotide
cugcccaaaucuagcagcc

SEQ ID NO: 1864155 - RNA, 19 nt, Artificial Sequence
  Description of Artificial Sequence: Synthetic oligonucleotide
ugagguaagaaggcacugu

SEQ ID NO: 1864156 - RNA, 19 nt, Artificial Sequence
  Description of Artificial Sequence: Synthetic oligonucleotide
auaugugaaggaaccagca

SEQ ID NO: 1864157 - RNA, 19 nt, Artificial Sequence
  Description of Artificial Sequence: Synthetic oligonucleotide
gacaggcuccaccaggaac

SEQ ID NO: 1864158 - RNA, 19 nt, Artificial Sequence
  Description of Artificial Sequence: Synthetic oligonucleotide
gacucuccgaguccccagg

SEQ ID NO: 1864159 - RNA, 19 nt, Artificial Sequence
  Description of Artificial Sequence: Synthetic oligonucleotide
aacaaccucacggccacgu

SEQ ID NO: 1864160 - RNA, 19 nt, Artificial Sequence
  Description of Artificial Sequence: Synthetic oligonucleotide
guucugaaagaagucacuc

SEQ ID NO: 1864161 - RNA, 19 nt, Artificial Sequence
  Description of Artificial Sequence: Synthetic oligonucleotide
cagagggcuccucaguugc

SEQ ID NO: 1864162 - RNA, 19 nt, Artificial Sequence
  Description of Artificial Sequence: Synthetic oligonucleotide
cacuagggugguaccaggg

SEQ ID NO: 1864163 - RNA, 19 nt, Artificial Sequence
  Description of Artificial Sequence: Synthetic oligonucleotide
gguacagguuggcaaaagc

SEQ ID NO: 1864164 - RNA, 19 nt, Artificial Sequence
  Description of Artificial Sequence: Synthetic oligonucleotide
acucggauuccagaaccac

SEQ ID NO: 1864165 - RNA, 19 nt, Artificial Sequence
  Description of Artificial Sequence: Synthetic oligonucleotide
aauccggaagcaacgggcu

SEQ ID NO: 1864166 - RNA, 19 nt, Artificial Sequence
  Description of Artificial Sequence: Synthetic oligonucleotide
caccuggacauccaucgag

SEQ ID NO: 1864167 - RNA, 19 nt, Artificial Sequence
  Description of Artificial Sequence: Synthetic oligonucleotide
gaacacgggcuucucaguc

SEQ ID NO: 1864168 - RNA, 19 nt, Artificial Sequence
  Description of Artificial Sequence: Synthetic oligonucleotide
gaaacgcuccagcagucuc

SEQ ID NO: 1864169 - RNA, 19 nt, Artificial Sequence
  Description of Artificial Sequence: Synthetic oligonucleotide
caagcgucggccaggcagc

SEQ ID NO: 1864170 - RNA, 19 nt, Artificial Sequence
  Description of Artificial Sequence: Synthetic oligonucleotide
caggaauccucuccccugg

SEQ ID NO: 1864171 - RNA, 19 nt, Artificial Sequence
  Description of Artificial Sequence: Synthetic oligonucleotide
uugagguaagaaggcacug

SEQ ID NO: 1864172 - RNA, 19 nt, Artificial Sequence
  Description of Artificial Sequence: Synthetic oligonucleotide
acacgguacagguuggcaa

SEQ ID NO: 1864173 - RNA, 19 nt, Artificial Sequence
  Description of Artificial Sequence: Synthetic oligonucleotide
caaggagaacaaccucacg

SEQ ID NO: 1864174 - RNA, 19 nt, Artificial Sequence
  Description of Artificial Sequence: Synthetic oligonucleotide
ucgagccuugcucugcuaa

SEQ ID NO: 1864175 - RNA, 19 nt, Artificial Sequence
  Description of Artificial Sequence: Synthetic oligonucleotide
ugcuaagccccuuccuucu

SEQ ID NO: 1864176 - RNA, 19 nt, Artificial Sequence
  Description of Artificial Sequence: Synthetic oligonucleotide
gugaauccggaagcaacgg

SEQ ID NO: 1864177 - RNA, 19 nt, Artificial Sequence
  Description of Artificial Sequence: Synthetic oligonucleotide
ugcucaccagacuguaaga

SEQ ID NO: 1864178 - RNA, 19 nt, Artificial Sequence
  Description of Artificial Sequence: Synthetic oligonucleotide
uccggaagcaacgggcuug

SEQ ID NO: 1864179 - RNA, 19 nt, Artificial Sequence
  Description of Artificial Sequence: Synthetic oligonucleotide
acacgcuacccacauggca

SEQ ID NO: 1864180 - RNA, 19 nt, Artificial Sequence
  Description of Artificial Sequence: Synthetic oligonucleotide
acugccugcuccuugccau

SEQ ID NO: 1864181 - RNA, 19 nt, Artificial Sequence
  Description of Artificial Sequence: Synthetic oligonucleotide
guaagaaggcacugugcuc

SEQ ID NO: 1864182 - RNA, 19 nt, Artificial Sequence
  Description of Artificial Sequence: Synthetic oligonucleotide
gguaagaaggcacugugcu

SEQ ID NO: 1864183 - RNA, 19 nt, Artificial Sequence
  Description of Artificial Sequence: Synthetic oligonucleotide
uguucguucccagcaguga

SEQ ID NO: 1864184 - RNA, 19 nt, Artificial Sequence
  Description of Artificial Sequence: Synthetic oligonucleotide
aaccucacggccacguugu

SEQ ID NO: 1864185 - RNA, 19 nt, Artificial Sequence
  Description of Artificial Sequence: Synthetic oligonucleotide
ggagaacaaccucacggcc

SEQ ID NO: 1864186 - RNA, 19 nt, Artificial Sequence
  Description of Artificial Sequence: Synthetic oligonucleotide
ugcccugccccacucggcc

SEQ ID NO: 1864187 - RNA, 19 nt, Artificial Sequence
  Description of Artificial Sequence: Synthetic oligonucleotide
caccauugacaggaaaagc

SEQ ID NO: 1864188 - RNA, 19 nt, Artificial Sequence
  Description of Artificial Sequence: Synthetic oligonucleotide
gugucuucacccaacccgc

SEQ ID NO: 1864189 - RNA, 19 nt, Artificial Sequence
  Description of Artificial Sequence: Synthetic oligonucleotide
ucggccugaggcaccagga

SEQ ID NO: 1864190 - RNA, 19 nt, Artificial Sequence
  Description of Artificial Sequence: Synthetic oligonucleotide
uccuucuaauugcuugcuc

SEQ ID NO: 1864191 - RNA, 19 nt, Artificial Sequence
  Description of Artificial Sequence: Synthetic oligonucleotide
ugccggcagauuaauuuuc

SEQ ID NO: 1864192 - RNA, 19 nt, Artificial Sequence
  Description of Artificial Sequence: Synthetic oligonucleotide
aagggaagcagggcauuca

SEQ ID NO: 1864193 - RNA, 19 nt, Artificial Sequence
  Description of Artificial Sequence: Synthetic oligonucleotide
gguaggaaacgcuccagca

SEQ ID NO: 1864194 - RNA, 19 nt, Artificial Sequence
  Description of Artificial Sequence: Synthetic oligonucleotide
caugccaagcgucggccag

SEQ ID NO: 1864195 - RNA, 19 nt, Artificial Sequence
  Description of Artificial Sequence: Synthetic oligonucleotide
cugcuaagccccuuccuuc

SEQ ID NO: 1864196 - RNA, 19 nt, Artificial Sequence
  Description of Artificial Sequence: Synthetic oligonucleotide
ucacccaacccgcaccguc

SEQ ID NO: 1864197 - RNA, 19 nt, Artificial Sequence
  Description of Artificial Sequence: Synthetic oligonucleotide
uccaagcgauuacauccac

SEQ ID NO: 1864198 - RNA, 19 nt, Artificial Sequence
  Description of Artificial Sequence: Synthetic oligonucleotide
ggaacacugacacgcuacc

SEQ ID NO: 1864199 - RNA, 19 nt, Artificial Sequence
  Description of Artificial Sequence: Synthetic oligonucleotide
cuucucagucccagagggc

SEQ ID NO: 1864200 - RNA, 19 nt, Artificial Sequence
  Description of Artificial Sequence: Synthetic oligonucleotide
gccgggaacacugacacgc

SEQ ID NO: 1864201 - RNA, 19 nt, Artificial Sequence
  Description of Artificial Sequence: Synthetic oligonucleotide
uucguucccagcagugaau

SEQ ID NO: 1864202 - RNA, 19 nt, Artificial Sequence
  Description of Artificial Sequence: Synthetic oligonucleotide
ccaagcgucggccaggcag

SEQ ID NO: 1864203 - RNA, 19 nt, Artificial Sequence
  Description of Artificial Sequence: Synthetic oligonucleotide
cuguucguucccagcagug

SEQ ID NO: 1864204 - RNA, 19 nt, Artificial Sequence
  Description of Artificial Sequence: Synthetic oligonucleotide
uguacaccauugacaggaa

SEQ ID NO: 1864205 - RNA, 19 nt, Artificial Sequence
  Description of Artificial Sequence: Synthetic oligonucleotide
agucccagagggcuccuca

SEQ ID NO: 1864206 - RNA, 19 nt, Artificial Sequence
  Description of Artificial Sequence: Synthetic oligonucleotide
uaaaugccggcagauuaau

SEQ ID NO: 1864207 - RNA, 19 nt, Artificial Sequence
  Description of Artificial Sequence: Synthetic oligonucleotide
gaccauccugcccaaaucu

SEQ ID NO: 1864208 - RNA, 19 nt, Artificial Sequence
  Description of Artificial Sequence: Synthetic oligonucleotide
ucggccaggcagcacugug

SEQ ID NO: 1864209 - RNA, 19 nt, Artificial Sequence
  Description of Artificial Sequence: Synthetic oligonucleotide
aggaacuccacacgaccau

SEQ ID NO: 1864210 - RNA, 19 nt, Artificial Sequence
  Description of Artificial Sequence: Synthetic oligonucleotide
ccuucuaauugcuugcuca

SEQ ID NO: 1864211 - RNA, 19 nt, Artificial Sequence
  Description of Artificial Sequence: Synthetic oligonucleotide
acgaccauccugcccaaau

SEQ ID NO: 1864212 - RNA, 19 nt, Artificial Sequence
  Description of Artificial Sequence: Synthetic oligonucleotide
cucacggccacguugucaa

SEQ ID NO: 1864213 - RNA, 19 nt, Artificial Sequence
  Description of Artificial Sequence: Synthetic oligonucleotide
acccacauggcagcugccg

SEQ ID NO: 1864214 - RNA, 19 nt, Artificial Sequence
  Description of Artificial Sequence: Synthetic oligonucleotide
cacugugucuucacccaac

SEQ ID NO: 1864215 - RNA, 19 nt, Artificial Sequence
  Description of Artificial Sequence: Synthetic oligonucleotide
cuugagguaagaaggcacu

SEQ ID NO: 1864216 - RNA, 19 nt, Artificial Sequence
  Description of Artificial Sequence: Synthetic oligonucleotide
cagagggaaggaccagugc

SEQ ID NO: 1864217 - RNA, 19 nt, Artificial Sequence
  Description of Artificial Sequence: Synthetic oligonucleotide
uggguaggaaacgcuccag

SEQ ID NO: 1864218 - RNA, 19 nt, Artificial Sequence
  Description of Artificial Sequence: Synthetic oligonucleotide
aggaauccucuccccuggg

SEQ ID NO: 1864219 - RNA, 19 nt, Artificial Sequence
  Description of Artificial Sequence: Synthetic oligonucleotide
gacaaaaggcagggagcag

SEQ ID NO: 1864220 - RNA, 19 nt, Artificial Sequence
  Description of Artificial Sequence: Synthetic oligonucleotide
aacucggauuccagaacca

SEQ ID NO: 1864221 - RNA, 19 nt, Artificial Sequence
  Description of Artificial Sequence: Synthetic oligonucleotide
aacgcuccagcagucucca

SEQ ID NO: 1864222 - RNA, 19 nt, Artificial Sequence
  Description of Artificial Sequence: Synthetic oligonucleotide
augccggcagauuaauuuu

SEQ ID NO: 1864223 - RNA, 19 nt, Artificial Sequence
  Description of Artificial Sequence: Synthetic oligonucleotide
ugucuucacccaacccgca

SEQ ID NO: 1864224 - RNA, 19 nt, Artificial Sequence
  Description of Artificial Sequence: Synthetic oligonucleotide
cucggauuccagaaccaca

SEQ ID NO: 1864225 - RNA, 19 nt, Artificial Sequence
  Description of Artificial Sequence: Synthetic oligonucleotide
uuccuucuaauugcuugcu

SEQ ID NO: 1864226 - RNA, 19 nt, Artificial Sequence
  Description of Artificial Sequence: Synthetic oligonucleotide
aggggccgaggcuuaaaug

SEQ ID NO: 1864227 - RNA, 19 nt, Artificial Sequence
  Description of Artificial Sequence: Synthetic oligonucleotide
cgagccuucaaacuuguac

SEQ ID NO: 1864228 - RNA, 19 nt, Artificial Sequence
  Description of Artificial Sequence: Synthetic oligonucleotide
aggcuuaaaugccggcaga

SEQ ID NO: 1864229 - RNA, 19 nt, Artificial Sequence
  Description of Artificial Sequence: Synthetic oligonucleotide
cauccaucgagccuucaaa

SEQ ID NO: 1864230 - RNA, 19 nt, Artificial Sequence
  Description of Artificial Sequence: Synthetic oligonucleotide
ggaauccucuccccugggg

SEQ ID NO: 1864231 - RNA, 19 nt, Artificial Sequence
  Description of Artificial Sequence: Synthetic oligonucleotide
guucguucccagcagugaa

SEQ ID NO: 1864232 - RNA, 19 nt, Artificial Sequence
  Description of Artificial Sequence: Synthetic oligonucleotide
cacguugucaaccucgggu

SEQ ID NO: 1864233 - RNA, 19 nt, Artificial Sequence
  Description of Artificial Sequence: Synthetic oligonucleotide
cucaccagacuguaagaaa

SEQ ID NO: 1864234 - RNA, 19 nt, Artificial Sequence
  Description of Artificial Sequence: Synthetic oligonucleotide
ugggcacuagggugguacc

SEQ ID NO: 1864235 - RNA, 19 nt, Artificial Sequence
  Description of Artificial Sequence: Synthetic oligonucleotide
ucguucccagcagugaauc

SEQ ID NO: 1864236 - RNA, 19 nt, Artificial Sequence
  Description of Artificial Sequence: Synthetic oligonucleotide
caaaucuagcagccuccac

SEQ ID NO: 1864237 - RNA, 19 nt, Artificial Sequence
  Description of Artificial Sequence: Synthetic oligonucleotide
guguguggguaggaaacgc

SEQ ID NO: 1864238 - RNA, 19 nt, Artificial Sequence
  Description of Artificial Sequence: Synthetic oligonucleotide
gacaugcaaggagaacaac

SEQ ID NO: 1864239 - RNA, 19 nt, Artificial Sequence
  Description of Artificial Sequence: Synthetic oligonucleotide
gggcuucucagucccagag

SEQ ID NO: 1864240 - RNA, 19 nt, Artificial Sequence
  Description of Artificial Sequence: Synthetic oligonucleotide
ggcuucucagucccagagg

SEQ ID NO: 1864241 - RNA, 19 nt, Artificial Sequence
  Description of Artificial Sequence: Synthetic oligonucleotide
cucagucccagagggcucc

SEQ ID NO: 1864242 - RNA, 19 nt, Artificial Sequence
  Description of Artificial Sequence: Synthetic oligonucleotide
cauucaggaaugcugcacu

SEQ ID NO: 1864243 - RNA, 19 nt, Artificial Sequence
  Description of Artificial Sequence: Synthetic oligonucleotide
ggccacguugucaaccucg

SEQ ID NO: 1864244 - RNA, 19 nt, Artificial Sequence
  Description of Artificial Sequence: Synthetic oligonucleotide
uccacacgaccauccugcc

SEQ ID NO: 1864245 - RNA, 19 nt, Artificial Sequence
  Description of Artificial Sequence: Synthetic oligonucleotide
ucucagucccagagggcuc

SEQ ID NO: 1864246 - RNA, 19 nt, Artificial Sequence
  Description of Artificial Sequence: Synthetic oligonucleotide
aaccucgggugggaucagg

SEQ ID NO: 1864247 - RNA, 19 nt, Artificial Sequence
  Description of Artificial Sequence: Synthetic oligonucleotide
ggguaggaaacgcuccagc

SEQ ID NO: 1864248 - RNA, 19 nt, Artificial Sequence
  Description of Artificial Sequence: Synthetic oligonucleotide
ccagacuguaagaaaauaa

SEQ ID NO: 1864249 - RNA, 19 nt, Artificial Sequence
  Description of Artificial Sequence: Synthetic oligonucleotide
gcaccaggaauccucuccc

SEQ ID NO: 1864250 - RNA, 19 nt, Artificial Sequence
  Description of Artificial Sequence: Synthetic oligonucleotide
aggaaacgcuccagcaguc

SEQ ID NO: 1864251 - RNA, 19 nt, Artificial Sequence
  Description of Artificial Sequence: Synthetic oligonucleotide
gaagaaauacccaggucuu

SEQ ID NO: 1864252 - RNA, 19 nt, Artificial Sequence
  Description of Artificial Sequence: Synthetic oligonucleotide
cucuccgaguccccaggcc

SEQ ID NO: 1864253 - RNA, 19 nt, Artificial Sequence
  Description of Artificial Sequence: Synthetic oligonucleotide
aagccccuuccuucuaauu

SEQ ID NO: 1864254 - RNA, 19 nt, Artificial Sequence
  Description of Artificial Sequence: Synthetic oligonucleotide
caccaggaauccucucccc

SEQ ID NO: 1864255 - RNA, 19 nt, Artificial Sequence
  Description of Artificial Sequence: Synthetic oligonucleotide
cggcagauuaauuuucuug

SEQ ID NO: 1864256 - RNA, 19 nt, Artificial Sequence
  Description of Artificial Sequence: Synthetic oligonucleotide
cacgguacagguuggcaaa

SEQ ID NO: 1864257 - RNA, 19 nt, Artificial Sequence
  Description of Artificial Sequence: Synthetic oligonucleotide
gucuucacccaacccgcac

SEQ ID NO: 1864258 - RNA, 19 nt, Artificial Sequence
  Description of Artificial Sequence: Synthetic oligonucleotide
accagacuguaagaaaaua

SEQ ID NO: 1864259 - RNA, 19 nt, Artificial Sequence
  Description of Artificial Sequence: Synthetic oligonucleotide
ccaagcgauuacauccacc

SEQ ID NO: 1864260 - RNA, 19 nt, Artificial Sequence
  Description of Artificial Sequence: Synthetic oligonucleotide
uugucaaccucggguggga

SEQ ID NO: 1864261 - RNA, 19 nt, Artificial Sequence
  Description of Artificial Sequence: Synthetic oligonucleotide
guguggguaggaaacgcuc

SEQ ID NO: 1864262 - RNA, 19 nt, Artificial Sequence
  Description of Artificial Sequence: Synthetic oligonucleotide
ccauagcagacucuccgag

SEQ ID NO: 1864263 - RNA, 19 nt, Artificial Sequence
  Description of Artificial Sequence: Synthetic oligonucleotide
gacacgcuacccacauggc

SEQ ID NO: 1864264 - RNA, 19 nt, Artificial Sequence
  Description of Artificial Sequence: Synthetic oligonucleotide
agccgggaacacugacacg

SEQ ID NO: 1864265 - RNA, 19 nt, Artificial Sequence
  Description of Artificial Sequence: Synthetic oligonucleotide
agcagucuccagaacuugu

SEQ ID NO: 1864266 - RNA, 19 nt, Artificial Sequence
  Description of Artificial Sequence: Synthetic oligonucleotide
acgggcuucucagucccag

SEQ ID NO: 1864267 - RNA, 19 nt, Artificial Sequence
  Description of Artificial Sequence: Synthetic oligonucleotide
gggaacacugacacgcuac

SEQ ID NO: 1864268 - RNA, 19 nt, Artificial Sequence
  Description of Artificial Sequence: Synthetic oligonucleotide
gaaaagcuuggguggcacu

SEQ ID NO: 1864269 - RNA, 19 nt, Artificial Sequence
  Description of Artificial Sequence: Synthetic oligonucleotide
ggcacuagggugguaccag

SEQ ID NO: 1864270 - RNA, 19 nt, Artificial Sequence
  Description of Artificial Sequence: Synthetic oligonucleotide
ugcuguguguggguaggaa

SEQ ID NO: 1864271 - RNA, 19 nt, Artificial Sequence
  Description of Artificial Sequence: Synthetic oligonucleotide
cuggggagcgggguugugc

SEQ ID NO: 1864272 - RNA, 19 nt, Artificial Sequence
  Description of Artificial Sequence: Synthetic oligonucleotide
augccaagcgucggccagg

SEQ ID NO: 1864273 - RNA, 19 nt, Artificial Sequence
  Description of Artificial Sequence: Synthetic oligonucleotide
gcccaaaucuagcagccuc

SEQ ID NO: 1864274 - RNA, 19 nt, Artificial Sequence
  Description of Artificial Sequence: Synthetic oligonucleotide
aaaugccggcagauuaauu

SEQ ID NO: 1864275 - RNA, 19 nt, Artificial Sequence
  Description of Artificial Sequence: Synthetic oligonucleotide
aggcaccaggaauccucuc

SEQ ID NO: 1864276 - RNA, 19 nt, Artificial Sequence
  Description of Artificial Sequence: Synthetic oligonucleotide
gagaaggagccgggaacac

SEQ ID NO: 1864277 - RNA, 19 nt, Artificial Sequence
  Description of Artificial Sequence: Synthetic oligonucleotide
guacaccauugacaggaaa

SEQ ID NO: 1864278 - RNA, 19 nt, Artificial Sequence
  Description of Artificial Sequence: Synthetic oligonucleotide
agccaccuggacauccauc

SEQ ID NO: 1864279 - RNA, 19 nt, Artificial Sequence
  Description of Artificial Sequence: Synthetic oligonucleotide
caagggaagcagggcauuc

SEQ ID NO: 1864280 - RNA, 19 nt, Artificial Sequence
  Description of Artificial Sequence: Synthetic oligonucleotide
gggaccgugcuccugggga

SEQ ID NO: 1864281 - RNA, 19 nt, Artificial Sequence
  Description of Artificial Sequence: Synthetic oligonucleotide
ggaccgugcuccuggggag

SEQ ID NO: 1864282 - RNA, 19 nt, Artificial Sequence
  Description of Artificial Sequence: Synthetic oligonucleotide
ugccaagcgucggccaggc

SEQ ID NO: 1864283 - RNA, 19 nt, Artificial Sequence
  Description of Artificial Sequence: Synthetic oligonucleotide
gcuuccuguucguucccag

SEQ ID NO: 1864284 - RNA, 19 nt, Artificial Sequence
  Description of Artificial Sequence: Synthetic oligonucleotide
ugccucgagccuugcucug

SEQ ID NO: 1864285 - RNA, 19 nt, Artificial Sequence
  Description of Artificial Sequence: Synthetic oligonucleotide
gaacaaccucacggccacg

SEQ ID NO: 1864286 - RNA, 19 nt, Artificial Sequence
  Description of Artificial Sequence: Synthetic oligonucleotide
caacgggcuuggagcagag

SEQ ID NO: 1864287 - RNA, 19 nt, Artificial Sequence
  Description of Artificial Sequence: Synthetic oligonucleotide
agccaguguugcuggggcu

SEQ ID NO: 1864288 - RNA, 19 nt, Artificial Sequence
  Description of Artificial Sequence: Synthetic oligonucleotide
ggccgaggcuuaaaugccg

SEQ ID NO: 1864289 - RNA, 19 nt, Artificial Sequence
  Description of Artificial Sequence: Synthetic oligonucleotide
gccuucaaacuuguacacc

SEQ ID NO: 1864290 - RNA, 19 nt, Artificial Sequence
  Description of Artificial Sequence: Synthetic oligonucleotide
accgugcuccuggggagcg

SEQ ID NO: 1864291 - RNA, 19 nt, Artificial Sequence
  Description of Artificial Sequence: Synthetic oligonucleotide
ugcccaaaucuagcagccu

SEQ ID NO: 1864292 - RNA, 19 nt, Artificial Sequence
  Description of Artificial Sequence: Synthetic oligonucleotide
gccccggagcagcagagag

SEQ ID NO: 1864293 - RNA, 19 nt, Artificial Sequence
  Description of Artificial Sequence: Synthetic oligonucleotide
cuuggagcagagggaagga

SEQ ID NO: 1864294 - RNA, 19 nt, Artificial Sequence
  Description of Artificial Sequence: Synthetic oligonucleotide
cuaagccccuuccuucuaa

SEQ ID NO: 1864295 - RNA, 19 nt, Artificial Sequence
  Description of Artificial Sequence: Synthetic oligonucleotide
caacccgcaccgucuccag

SEQ ID NO: 1864296 - RNA, 19 nt, Artificial Sequence
  Description of Artificial Sequence: Synthetic oligonucleotide
gggucuccugggcacuagg

SEQ ID NO: 1864297 - RNA, 19 nt, Artificial Sequence
  Description of Artificial Sequence: Synthetic oligonucleotide
cuccucaguugcagagcug

SEQ ID NO: 1864298 - RNA, 19 nt, Artificial Sequence
  Description of Artificial Sequence: Synthetic oligonucleotide
gcagagggaaggaccagug

SEQ ID NO: 1864299 - RNA, 19 nt, Artificial Sequence
  Description of Artificial Sequence: Synthetic oligonucleotide
cuugcucaccagacuguaa

SEQ ID NO: 1864300 - RNA, 19 nt, Artificial Sequence
  Description of Artificial Sequence: Synthetic oligonucleotide
agcaacgggcuuggagcag

SEQ ID NO: 1864301 - RNA, 19 nt, Artificial Sequence
  Description of Artificial Sequence: Synthetic oligonucleotide
gccgaggcuuaaaugccgg

SEQ ID NO: 1864302 - RNA, 19 nt, Artificial Sequence
  Description of Artificial Sequence: Synthetic oligonucleotide
gaccgugcuccuggggagc

SEQ ID NO: 1864303 - RNA, 19 nt, Artificial Sequence
  Description of Artificial Sequence: Synthetic oligonucleotide
ugccggccuccccuguugu

SEQ ID NO: 1864304 - RNA, 19 nt, Artificial Sequence
  Description of Artificial Sequence: Synthetic oligonucleotide
ggcaaaagccaggcccagg

SEQ ID NO: 1864305 - RNA, 19 nt, Artificial Sequence
  Description of Artificial Sequence: Synthetic oligonucleotide
ggaaugcugcacugcccug

SEQ ID NO: 1864306 - RNA, 19 nt, Artificial Sequence
  Description of Artificial Sequence: Synthetic oligonucleotide
cugacacgcuacccacaug

SEQ ID NO: 1864307 - RNA, 19 nt, Artificial Sequence
  Description of Artificial Sequence: Synthetic oligonucleotide
accucacggccacguuguc

SEQ ID NO: 1864308 - RNA, 19 nt, Artificial Sequence
  Description of Artificial Sequence: Synthetic oligonucleotide
acaaccucacggccacguu

SEQ ID NO: 1864309 - RNA, 19 nt, Artificial Sequence
  Description of Artificial Sequence: Synthetic oligonucleotide
gccauagcagacucuccga

SEQ ID NO: 1864310 - RNA, 19 nt, Artificial Sequence
  Description of Artificial Sequence: Synthetic oligonucleotide
cacacgguacagguuggca

SEQ ID NO: 1864311 - RNA, 19 nt, Artificial Sequence
  Description of Artificial Sequence: Synthetic oligonucleotide
ggugguaccagggccccac

SEQ ID NO: 1864312 - RNA, 19 nt, Artificial Sequence
  Description of Artificial Sequence: Synthetic oligonucleotide
cguugucaaccucgggugg

SEQ ID NO: 1864313 - RNA, 19 nt, Artificial Sequence
  Description of Artificial Sequence: Synthetic oligonucleotide
gggccgaggcuuaaaugcc

SEQ ID NO: 1864314 - RNA, 19 nt, Artificial Sequence
  Description of Artificial Sequence: Synthetic oligonucleotide
cuccgaguccccaggccca

SEQ ID NO: 1864315 - RNA, 19 nt, Artificial Sequence
  Description of Artificial Sequence: Synthetic oligonucleotide
ggccaagaagaaauaccca

SEQ ID NO: 1864316 - RNA, 19 nt, Artificial Sequence
  Description of Artificial Sequence: Synthetic oligonucleotide
cuccuggggagcgggguug

SEQ ID NO: 1864317 - RNA, 19 nt, Artificial Sequence
  Description of Artificial Sequence: Synthetic oligonucleotide
cacaagggaagcagggcau

SEQ ID NO: 1864318 - RNA, 19 nt, Artificial Sequence
  Description of Artificial Sequence: Synthetic oligonucleotide
ugucaaccucgggugggau

SEQ ID NO: 1864319 - RNA, 19 nt, Artificial Sequence
  Description of Artificial Sequence: Synthetic oligonucleotide
agggcugcccugccccacu

SEQ ID NO: 1864320 - RNA, 19 nt, Artificial Sequence
  Description of Artificial Sequence: Synthetic oligonucleotide
cugccggccuccccuguug

SEQ ID NO: 1864321 - RNA, 19 nt, Artificial Sequence
  Description of Artificial Sequence: Synthetic oligonucleotide
cuggacauccaucgagccu

SEQ ID NO: 1864322 - RNA, 19 nt, Artificial Sequence
  Description of Artificial Sequence: Synthetic oligonucleotide
cacggccaaguccaccaca

SEQ ID NO: 1864323 - RNA, 19 nt, Artificial Sequence
  Description of Artificial Sequence: Synthetic oligonucleotide
gcagucuccagaacuuguc

SEQ ID NO: 1864324 - RNA, 19 nt, Artificial Sequence
  Description of Artificial Sequence: Synthetic oligonucleotide
aagcgucggccaggcagca

SEQ ID NO: 1864325 - RNA, 19 nt, Artificial Sequence
  Description of Artificial Sequence: Synthetic oligonucleotide
gaggggccgaggcuuaaau

SEQ ID NO: 1864326 - RNA, 19 nt, Artificial Sequence
  Description of Artificial Sequence: Synthetic oligonucleotide
ccagaaccacaagggaagc

SEQ ID NO: 1864327 - RNA, 19 nt, Artificial Sequence
  Description of Artificial Sequence: Synthetic oligonucleotide
cugccucgagccuugcucu

SEQ ID NO: 1864328 - RNA, 19 nt, Artificial Sequence
  Description of Artificial Sequence: Synthetic oligonucleotide
uucacccaacccgcaccgu

SEQ ID NO: 1864329 - RNA, 19 nt, Artificial Sequence
  Description of Artificial Sequence: Synthetic oligonucleotide
acgguacagguuggcaaaa

SEQ ID NO: 1864330 - RNA, 19 nt, Artificial Sequence
  Description of Artificial Sequence: Synthetic oligonucleotide
ucacggccacguugucaac

SEQ ID NO: 1864331 - RNA, 19 nt, Artificial Sequence
  Description of Artificial Sequence: Synthetic oligonucleotide
ggaaggaccagugcagggu

SEQ ID NO: 1864332 - RNA, 19 nt, Artificial Sequence
  Description of Artificial Sequence: Synthetic oligonucleotide
cacugccugcuccuugcca

SEQ ID NO: 1864333 - RNA, 19 nt, Artificial Sequence
  Description of Artificial Sequence: Synthetic oligonucleotide
agcgucggccaggcagcac

SEQ ID NO: 1864334 - RNA, 19 nt, Artificial Sequence
  Description of Artificial Sequence: Synthetic oligonucleotide
ccacacgaccauccugccc

SEQ ID NO: 1864335 - RNA, 19 nt, Artificial Sequence
  Description of Artificial Sequence: Synthetic oligonucleotide
ccgaggcuuaaaugccggc

SEQ ID NO: 1864336 - RNA, 19 nt, Artificial Sequence
  Description of Artificial Sequence: Synthetic oligonucleotide
ggggaccgugcuccugggg

SEQ ID NO: 1864337 - RNA, 19 nt, Artificial Sequence
  Description of Artificial Sequence: Synthetic oligonucleotide
cccaugccaagcgucggcc

SEQ ID NO: 1864338 - RNA, 19 nt, Artificial Sequence
  Description of Artificial Sequence: Synthetic oligonucleotide
acacgaccauccugcccaa

SEQ ID NO: 1864339 - RNA, 19 nt, Artificial Sequence
  Description of Artificial Sequence: Synthetic oligonucleotide
cuugcucugcuaagccccu

SEQ ID NO: 1864340 - RNA, 19 nt, Artificial Sequence
  Description of Artificial Sequence: Synthetic oligonucleotide
ggaucaggccccggagcag

SEQ ID NO: 1864341 - RNA, 19 nt, Artificial Sequence
  Description of Artificial Sequence: Synthetic oligonucleotide
ccagacacucauacaccca

SEQ ID NO: 1864342 - RNA, 19 nt, Artificial Sequence
  Description of Artificial Sequence: Synthetic oligonucleotide
ggcugcccugccccacucg

SEQ ID NO: 1864343 - RNA, 19 nt, Artificial Sequence
  Description of Artificial Sequence: Synthetic oligonucleotide
gggcuuggagcagagggaa

SEQ ID NO: 1864344 - RNA, 19 nt, Artificial Sequence
  Description of Artificial Sequence: Synthetic oligonucleotide
agagggcuccucaguugca

SEQ ID NO: 1864345 - RNA, 19 nt, Artificial Sequence
  Description of Artificial Sequence: Synthetic oligonucleotide
agcuggccaagaagaaaua

SEQ ID NO: 1864346 - RNA, 19 nt, Artificial Sequence
  Description of Artificial Sequence: Synthetic oligonucleotide
cagaugcugugugugggua

SEQ ID NO: 1864347 - RNA, 19 nt, Artificial Sequence
  Description of Artificial Sequence: Synthetic oligonucleotide
ccggaagcaacgggcuugg

SEQ ID NO: 1864348 - RNA, 19 nt, Artificial Sequence
  Description of Artificial Sequence: Synthetic oligonucleotide
cucugcuaagccccuuccu

SEQ ID NO: 1864349 - RNA, 19 nt, Artificial Sequence
  Description of Artificial Sequence: Synthetic oligonucleotide
cacccaacccgcaccgucu

SEQ ID NO: 1864350 - RNA, 19 nt, Artificial Sequence
  Description of Artificial Sequence: Synthetic oligonucleotide
ggcuuggagcagagggaag

SEQ ID NO: 1864351 - RNA, 19 nt, Artificial Sequence
  Description of Artificial Sequence: Synthetic oligonucleotide
cgauuacauccaccagagg

SEQ ID NO: 1864352 - RNA, 19 nt, Artificial Sequence
  Description of Artificial Sequence: Synthetic oligonucleotide
ggguggcacugggacaugc

SEQ ID NO: 1864353 - RNA, 19 nt, Artificial Sequence
  Description of Artificial Sequence: Synthetic oligonucleotide
ggaacacgggcuucucagu

SEQ ID NO: 1864354 - RNA, 19 nt, Artificial Sequence
  Description of Artificial Sequence: Synthetic oligonucleotide
gcaacgggcuuggagcaga

SEQ ID NO: 1864355 - RNA, 19 nt, Artificial Sequence
  Description of Artificial Sequence: Synthetic oligonucleotide
ccccaugccaagcgucggc

SEQ ID NO: 1864356 - RNA, 19 nt, Artificial Sequence
  Description of Artificial Sequence: Synthetic oligonucleotide
agaggggccgaggcuuaaa

SEQ ID NO: 1864357 - RNA, 19 nt, Artificial Sequence
  Description of Artificial Sequence: Synthetic oligonucleotide
ccaaaucuagcagccucca

SEQ ID NO: 1864358 - RNA, 19 nt, Artificial Sequence
  Description of Artificial Sequence: Synthetic oligonucleotide
cgaccauccugcccaaauc

SEQ ID NO: 1864359 - RNA, 19 nt, Artificial Sequence
  Description of Artificial Sequence: Synthetic oligonucleotide
gcacugugucuucacccaa

SEQ ID NO: 1864360 - RNA, 19 nt, Artificial Sequence
  Description of Artificial Sequence: Synthetic oligonucleotide
caaccucgggugggaucag

SEQ ID NO: 1864361 - RNA, 19 nt, Artificial Sequence
  Description of Artificial Sequence: Synthetic oligonucleotide
ggcuuaaaugccggcagau

SEQ ID NO: 1864362 - RNA, 19 nt, Artificial Sequence
  Description of Artificial Sequence: Synthetic oligonucleotide
ggcucacugaggggcugag

SEQ ID NO: 1864363 - RNA, 19 nt, Artificial Sequence
  Description of Artificial Sequence: Synthetic oligonucleotide
gggcacuagggugguacca

SEQ ID NO: 1864364 - RNA, 19 nt, Artificial Sequence
  Description of Artificial Sequence: Synthetic oligonucleotide
gccaaguccaccacacggu

SEQ ID NO: 1864365 - RNA, 19 nt, Artificial Sequence
  Description of Artificial Sequence: Synthetic oligonucleotide
gcgucggccaggcagcacu

SEQ ID NO: 1864366 - RNA, 19 nt, Artificial Sequence
  Description of Artificial Sequence: Synthetic oligonucleotide
ccaaguccaccacacggua

SEQ ID NO: 1864367 - RNA, 19 nt, Artificial Sequence
  Description of Artificial Sequence: Synthetic oligonucleotide
cacucggccugaggcacca

SEQ ID NO: 1864368 - RNA, 19 nt, Artificial Sequence
  Description of Artificial Sequence: Synthetic oligonucleotide
gccucgagccuugcucugc

SEQ ID NO: 1864369 - RNA, 19 nt, Artificial Sequence
  Description of Artificial Sequence: Synthetic oligonucleotide
cgaggcuuaaaugccggca

SEQ ID NO: 1864370 - RNA, 19 nt, Artificial Sequence
  Description of Artificial Sequence: Synthetic oligonucleotide
uugcucugcuaagccccuu

SEQ ID NO: 1864371 - RNA, 19 nt, Artificial Sequence
  Description of Artificial Sequence: Synthetic oligonucleotide
ccacucggccugaggcacc

SEQ ID NO: 1864372 - RNA, 19 nt, Artificial Sequence
  Description of Artificial Sequence: Synthetic oligonucleotide
cugccugcuccuugccaua

SEQ ID NO: 1864373 - RNA, 19 nt, Artificial Sequence
  Description of Artificial Sequence: Synthetic oligonucleotide
cccaacccgcaccgucucc

SEQ ID NO: 1864374 - RNA, 19 nt, Artificial Sequence
  Description of Artificial Sequence: Synthetic oligonucleotide
ccaggucuugagguaagaa

SEQ ID NO: 1864375 - RNA, 19 nt, Artificial Sequence
  Description of Artificial Sequence: Synthetic oligonucleotide
cacgggcuucucaguccca

SEQ ID NO: 1864376 - RNA, 19 nt, Artificial Sequence
  Description of Artificial Sequence: Synthetic oligonucleotide
ccaugccaagcgucggcca

SEQ ID NO: 1864377 - RNA, 19 nt, Artificial Sequence
  Description of Artificial Sequence: Synthetic oligonucleotide
acucggccugaggcaccag

SEQ ID NO: 1864378 - RNA, 19 nt, Artificial Sequence
  Description of Artificial Sequence: Synthetic oligonucleotide
ccaacccgcaccgucucca

SEQ ID NO: 1864379 - RNA, 19 nt, Artificial Sequence
  Description of Artificial Sequence: Synthetic oligonucleotide
gccggcagauuaauuuucu

SEQ ID NO: 1864380 - RNA, 19 nt, Artificial Sequence
  Description of Artificial Sequence: Synthetic oligonucleotide
cgguacagguuggcaaaag

SEQ ID NO: 1864381 - RNA, 19 nt, Artificial Sequence
  Description of Artificial Sequence: Synthetic oligonucleotide
gcuaagccccuuccuucua

SEQ ID NO: 1864382 - RNA, 19 nt, Artificial Sequence
  Description of Artificial Sequence: Synthetic oligonucleotide
gccggccuccccuguugug

SEQ ID NO: 1864383 - RNA, 19 nt, Artificial Sequence
  Description of Artificial Sequence: Synthetic oligonucleotide
gcuuaaaugccggcagauu

SEQ ID NO: 1864384 - RNA, 19 nt, Artificial Sequence
  Description of Artificial Sequence: Synthetic oligonucleotide
ccuguucguucccagcagu

SEQ ID NO: 1864385 - RNA, 19 nt, Artificial Sequence
  Description of Artificial Sequence: Synthetic oligonucleotide
ccacggccaaguccaccac

SEQ ID NO: 1864386 - RNA, 19 nt, Artificial Sequence
  Description of Artificial Sequence: Synthetic oligonucleotide
ggacauccaucgagccuuc

SEQ ID NO: 1864387 - RNA, 19 nt, Artificial Sequence
  Description of Artificial Sequence: Synthetic oligonucleotide
cggccuccccuguugugag

SEQ ID NO: 1864388 - RNA, 19 nt, Artificial Sequence
  Description of Artificial Sequence: Synthetic oligonucleotide
gcgggguugugcagcucug

SEQ ID NO: 1864389 - RNA, 19 nt, Artificial Sequence
  Description of Artificial Sequence: Synthetic oligonucleotide
ccucacggccacguuguca

SEQ ID NO: 1864390 - RNA, 19 nt, Artificial Sequence
  Description of Artificial Sequence: Synthetic oligonucleotide
gagcgggguugugcagcuc

SEQ ID NO: 1864391 - RNA, 19 nt, Artificial Sequence
  Description of Artificial Sequence: Synthetic oligonucleotide
gccuccccuguugugagcu

SEQ ID NO: 1864392 - RNA, 19 nt, Artificial Sequence
  Description of Artificial Sequence: Synthetic oligonucleotide
gcccugggcagcuggccaa

SEQ ID NO: 1864393 - RNA, 19 nt, Artificial Sequence
  Description of Artificial Sequence: Synthetic oligonucleotide
cccuguugugagcuccaaa

SEQ ID NO: 1864394 - RNA, 19 nt, Artificial Sequence
  Description of Artificial Sequence: Synthetic oligonucleotide
cacgaccauccugcccaaa

SEQ ID NO: 1864395 - RNA, 19 nt, Artificial Sequence
  Description of Artificial Sequence: Synthetic oligonucleotide
gucggccaggcagcacugu

SEQ ID NO: 1864396 - RNA, 19 nt, Artificial Sequence
  Description of Artificial Sequence: Synthetic oligonucleotide
ccgugcuccuggggagcgg

SEQ ID NO: 1864397 - RNA, 19 nt, Artificial Sequence
  Description of Artificial Sequence: Synthetic oligonucleotide
ccucgagccuugcucugcu

SEQ ID NO: 1864398 - RNA, 19 nt, Artificial Sequence
  Description of Artificial Sequence: Synthetic oligonucleotide
ccgucuccagccaguuugu

SEQ ID NO: 1864399 - RNA, 19 nt, Artificial Sequence
  Description of Artificial Sequence: Synthetic oligonucleotide
gcuccuggggagcgggguu

SEQ ID NO: 1864400 - RNA, 19 nt, Artificial Sequence
  Description of Artificial Sequence: Synthetic oligonucleotide
ccgggaacacugacacgcu

SEQ ID NO: 1864401 - RNA, 19 nt, Artificial Sequence
  Description of Artificial Sequence: Synthetic oligonucleotide
gccaagcgucggccaggca

SEQ ID NO: 1864402 - RNA, 19 nt, Artificial Sequence
  Description of Artificial Sequence: Synthetic oligonucleotide
cgggaacacugacacgcua

SEQ ID NO: 1864403 - RNA, 19 nt, Artificial Sequence
  Description of Artificial Sequence: Synthetic oligonucleotide
gggugguaccagggcccca

SEQ ID NO: 1864404 - RNA, 19 nt, Artificial Sequence
  Description of Artificial Sequence: Synthetic oligonucleotide
caccgucuccagccaguuu

SEQ ID NO: 1864405 - RNA, 19 nt, Artificial Sequence
  Description of Artificial Sequence: Synthetic oligonucleotide
ccuggggagcgggguugug

SEQ ID NO: 1864406 - RNA, 19 nt, Artificial Sequence
  Description of Artificial Sequence: Synthetic oligonucleotide
cggccacguugucaaccuc

SEQ ID NO: 1864407 - RNA, 19 nt, Artificial Sequence
  Description of Artificial Sequence: Synthetic oligonucleotide
cgcaccgucuccagccagu

SEQ ID NO: 1864408 - RNA, 19 nt, Artificial Sequence
  Description of Artificial Sequence: Synthetic oligonucleotide
gcugccggccuccccuguu

SEQ ID NO: 1864409 - RNA, 19 nt, Artificial Sequence
  Description of Artificial Sequence: Synthetic oligonucleotide
gcaccgucuccagccaguu

SEQ ID NO: 1864410 - RNA, 19 nt, Artificial Sequence
  Description of Artificial Sequence: Synthetic oligonucleotide
cccuggggacaggcuccac

SEQ ID NO: 1864411 - RNA, 19 nt, Artificial Sequence
  Description of Artificial Sequence: Synthetic oligonucleotide
aaauugaaucuuuagaagg

SEQ ID NO: 1864412 - RNA, 19 nt, Artificial Sequence
  Description of Artificial Sequence: Synthetic oligonucleotide
gaacucauaacuuucaugg

SEQ ID NO: 1864413 - RNA, 19 nt, Artificial Sequence
  Description of Artificial Sequence: Synthetic oligonucleotide
ucuugagagacucauagcc

SEQ ID NO: 1864414 - RNA, 19 nt, Artificial Sequence
  Description of Artificial Sequence: Synthetic oligonucleotide
aaaacauccagcaagguca

SEQ ID NO: 1864415 - RNA, 19 nt, Artificial Sequence
  Description of Artificial Sequence: Synthetic oligonucleotide
aguuacucagucuggaacc

SEQ ID NO: 1864416 - RNA, 19 nt, Artificial Sequence
  Description of Artificial Sequence: Synthetic oligonucleotide
uagaagguaucgcauaugg

SEQ ID NO: 1864417 - RNA, 19 nt, Artificial Sequence
  Description of Artificial Sequence: Synthetic oligonucleotide
gaagguaucgcauauggac

SEQ ID NO: 1864418 - RNA, 19 nt, Artificial Sequence
  Description of Artificial Sequence: Synthetic oligonucleotide
uguacucccauucagggug

SEQ ID NO: 1864419 - RNA, 19 nt, Artificial Sequence
  Description of Artificial Sequence: Synthetic oligonucleotide
uuauuauggguuuuguuug

SEQ ID NO: 1864420 - RNA, 19 nt, Artificial Sequence
  Description of Artificial Sequence: Synthetic oligonucleotide
aaucuuuagaagguaucgc

SEQ ID NO: 1864421 - RNA, 19 nt, Artificial Sequence
  Description of Artificial Sequence: Synthetic oligonucleotide
uauaguguugguccagugg

SEQ ID NO: 1864422 - RNA, 19 nt, Artificial Sequence
  Description of Artificial Sequence: Synthetic oligonucleotide
uguagaauucauugcaugc

SEQ ID NO: 1864423 - RNA, 19 nt, Artificial Sequence
  Description of Artificial Sequence: Synthetic oligonucleotide
ucaacauuuaccacagcug

SEQ ID NO: 1864424 - RNA, 19 nt, Artificial Sequence
  Description of Artificial Sequence: Synthetic oligonucleotide
aagguaucgcauauggacc

SEQ ID NO: 1864425 - RNA, 19 nt, Artificial Sequence
  Description of Artificial Sequence: Synthetic oligonucleotide
auauuauuuuauuaugggu

SEQ ID NO: 1864426 - RNA, 19 nt, Artificial Sequence
  Description of Artificial Sequence: Synthetic oligonucleotide
uuaagggcaauuucaaugu

SEQ ID NO: 1864427 - RNA, 19 nt, Artificial Sequence
  Description of Artificial Sequence: Synthetic oligonucleotide
gacaauaaacucauuguag

SEQ ID NO: 1864428 - RNA, 19 nt, Artificial Sequence
  Description of Artificial Sequence: Synthetic oligonucleotide
auauggaccugguuggggc

SEQ ID NO: 1864429 - RNA, 19 nt, Artificial Sequence
  Description of Artificial Sequence: Synthetic oligonucleotide
aggauuccuacccaguuac

SEQ ID NO: 1864430 - RNA, 19 nt, Artificial Sequence
  Description of Artificial Sequence: Synthetic oligonucleotide
cauccuguuaggaaggucc

SEQ ID NO: 1864431 - RNA, 19 nt, Artificial Sequence
  Description of Artificial Sequence: Synthetic oligonucleotide
auaacuuucaugguccagg

SEQ ID NO: 1864432 - RNA, 19 nt, Artificial Sequence
  Description of Artificial Sequence: Synthetic oligonucleotide
uuaggggagacgcaaagca

SEQ ID NO: 1864433 - RNA, 19 nt, Artificial Sequence
  Description of Artificial Sequence: Synthetic oligonucleotide
ucagauuuauauuauuuua

SEQ ID NO: 1864434 - RNA, 19 nt, Artificial Sequence
  Description of Artificial Sequence: Synthetic oligonucleotide
uagguuucuauaguguugg

SEQ ID NO: 1864435 - RNA, 19 nt, Artificial Sequence
  Description of Artificial Sequence: Synthetic oligonucleotide
caacauuuaccacagcugc

SEQ ID NO: 1864436 - RNA, 19 nt, Artificial Sequence
  Description of Artificial Sequence: Synthetic oligonucleotide
uucaccaguuuuaagggca

SEQ ID NO: 1864437 - RNA, 19 nt, Artificial Sequence
  Description of Artificial Sequence: Synthetic oligonucleotide
ucaugugggauccuggugu

SEQ ID NO: 1864438 - RNA, 19 nt, Artificial Sequence
  Description of Artificial Sequence: Synthetic oligonucleotide
aauugaaucuuuagaaggu

SEQ ID NO: 1864439 - RNA, 19 nt, Artificial Sequence
  Description of Artificial Sequence: Synthetic oligonucleotide
aaaguagauuccuuuccca

SEQ ID NO: 1864440 - RNA, 19 nt, Artificial Sequence
  Description of Artificial Sequence: Synthetic oligonucleotide
aagauugaauccucucuug

SEQ ID NO: 1864441 - RNA, 19 nt, Artificial Sequence
  Description of Artificial Sequence: Synthetic oligonucleotide
ugaacucauaacuuucaug

SEQ ID NO: 1864442 - RNA, 19 nt, Artificial Sequence
  Description of Artificial Sequence: Synthetic oligonucleotide
ucucuguccggauuuauug

SEQ ID NO: 1864443 - RNA, 19 nt, Artificial Sequence
  Description of Artificial Sequence: Synthetic oligonucleotide
aguguagguuucuauagug

SEQ ID NO: 1864444 - RNA, 19 nt, Artificial Sequence
  Description of Artificial Sequence: Synthetic oligonucleotide
ucuugcuuauuuaaucaac

SEQ ID NO: 1864445 - RNA, 19 nt, Artificial Sequence
  Description of Artificial Sequence: Synthetic oligonucleotide
aucuuuagaagguaucgca

SEQ ID NO: 1864446 - RNA, 19 nt, Artificial Sequence
  Description of Artificial Sequence: Synthetic oligonucleotide
auucauugcaugcuucaag

SEQ ID NO: 1864447 - RNA, 19 nt, Artificial Sequence
  Description of Artificial Sequence: Synthetic oligonucleotide
cuagagcuaccucugauag

SEQ ID NO: 1864448 - RNA, 19 nt, Artificial Sequence
  Description of Artificial Sequence: Synthetic oligonucleotide
uuuagaagguaucgcauau

SEQ ID NO: 1864449 - RNA, 19 nt, Artificial Sequence
  Description of Artificial Sequence: Synthetic oligonucleotide
aaccacuuugaacucauaa

SEQ ID NO: 1864450 - RNA, 19 nt, Artificial Sequence
  Description of Artificial Sequence: Synthetic oligonucleotide
uaacuuucaugguccaggg

SEQ ID NO: 1864451 - RNA, 19 nt, Artificial Sequence
  Description of Artificial Sequence: Synthetic oligonucleotide
ugaggguauaccccucugg

SEQ ID NO: 1864452 - RNA, 19 nt, Artificial Sequence
  Description of Artificial Sequence: Synthetic oligonucleotide
ggaagguccuuucugaagg

SEQ ID NO: 1864453 - RNA, 19 nt, Artificial Sequence
  Description of Artificial Sequence: Synthetic oligonucleotide
acauauauccugugacggg

SEQ ID NO: 1864454 - RNA, 19 nt, Artificial Sequence
  Description of Artificial Sequence: Synthetic oligonucleotide
caaaguagauuccuuuccc

SEQ ID NO: 1864455 - RNA, 19 nt, Artificial Sequence
  Description of Artificial Sequence: Synthetic oligonucleotide
ugugacgggagccucaggu

SEQ ID NO: 1864456 - RNA, 19 nt, Artificial Sequence
  Description of Artificial Sequence: Synthetic oligonucleotide
ugcucuuuaggggagacgc

SEQ ID NO: 1864457 - RNA, 19 nt, Artificial Sequence
  Description of Artificial Sequence: Synthetic oligonucleotide
aauuucaaugucccucagu

SEQ ID NO: 1864458 - RNA, 19 nt, Artificial Sequence
  Description of Artificial Sequence: Synthetic oligonucleotide
gauagagaguccgaaauca

SEQ ID NO: 1864459 - RNA, 19 nt, Artificial Sequence
  Description of Artificial Sequence: Synthetic oligonucleotide
gaguccgaaaucauguggg

SEQ ID NO: 1864460 - RNA, 19 nt, Artificial Sequence
  Description of Artificial Sequence: Synthetic oligonucleotide
aaucaugugggauccuggu

SEQ ID NO: 1864461 - RNA, 19 nt, Artificial Sequence
  Description of Artificial Sequence: Synthetic oligonucleotide
aguuuuaagggcaauuuca

SEQ ID NO: 1864462 - RNA, 19 nt, Artificial Sequence
  Description of Artificial Sequence: Synthetic oligonucleotide
acgcaaagcaguaauuggc

SEQ ID NO: 1864463 - RNA, 19 nt, Artificial Sequence
  Description of Artificial Sequence: Synthetic oligonucleotide
uguccggauuuauuggagg

SEQ ID NO: 1864464 - RNA, 19 nt, Artificial Sequence
  Description of Artificial Sequence: Synthetic oligonucleotide
cauuucuaucaucaucucc

SEQ ID NO: 1864465 - RNA, 19 nt, Artificial Sequence
  Description of Artificial Sequence: Synthetic oligonucleotide
uagagaguccgaaaucaug

SEQ ID NO: 1864466 - RNA, 19 nt, Artificial Sequence
  Description of Artificial Sequence: Synthetic oligonucleotide
ucggguagaguguagguac

SEQ ID NO: 1864467 - RNA, 19 nt, Artificial Sequence
  Description of Artificial Sequence: Synthetic oligonucleotide
agaaauuaaauugaaucuu

SEQ ID NO: 1864468 - RNA, 19 nt, Artificial Sequence
  Description of Artificial Sequence: Synthetic oligonucleotide
ugcacguuacagaucaacu

SEQ ID NO: 1864469 - RNA, 19 nt, Artificial Sequence
  Description of Artificial Sequence: Synthetic oligonucleotide
ucuuuagaagguaucgcau

SEQ ID NO: 1864470 - RNA, 19 nt, Artificial Sequence
  Description of Artificial Sequence: Synthetic oligonucleotide
aguguagguacugcaaaac

SEQ ID NO: 1864471 - RNA, 19 nt, Artificial Sequence
  Description of Artificial Sequence: Synthetic oligonucleotide
uguaagauugaauccucuc

SEQ ID NO: 1864472 - RNA, 19 nt, Artificial Sequence
  Description of Artificial Sequence: Synthetic oligonucleotide
uccgaaaucaugugggauc

SEQ ID NO: 1864473 - RNA, 19 nt, Artificial Sequence
  Description of Artificial Sequence: Synthetic oligonucleotide
guaauuggcacucuuggaa

SEQ ID NO: 1864474 - RNA, 19 nt, Artificial Sequence
  Description of Artificial Sequence: Synthetic oligonucleotide
auagccugccuugauuugc

SEQ ID NO: 1864475 - RNA, 19 nt, Artificial Sequence
  Description of Artificial Sequence: Synthetic oligonucleotide
auuguaguugaggguauac

SEQ ID NO: 1864476 - RNA, 19 nt, Artificial Sequence
  Description of Artificial Sequence: Synthetic oligonucleotide
aacucauaacuuucauggu

SEQ ID NO: 1864477 - RNA, 19 nt, Artificial Sequence
  Description of Artificial Sequence: Synthetic oligonucleotide
uguagguuucuauaguguu

SEQ ID NO: 1864478 - RNA, 19 nt, Artificial Sequence
  Description of Artificial Sequence: Synthetic oligonucleotide
guagauuccuuucccaaac

SEQ ID NO: 1864479 - RNA, 19 nt, Artificial Sequence
  Description of Artificial Sequence: Synthetic oligonucleotide
uggagggauagagaguccg

SEQ ID NO: 1864480 - RNA, 19 nt, Artificial Sequence
  Description of Artificial Sequence: Synthetic oligonucleotide
uggcucaggauuccuaccc

SEQ ID NO: 1864481 - RNA, 19 nt, Artificial Sequence
  Description of Artificial Sequence: Synthetic oligonucleotide
uuccuacccaguuacucag

SEQ ID NO: 1864482 - RNA, 19 nt, Artificial Sequence
  Description of Artificial Sequence: Synthetic oligonucleotide
ggagcuaucuuucccagcc

SEQ ID NO: 1864483 - RNA, 19 nt, Artificial Sequence
  Description of Artificial Sequence: Synthetic oligonucleotide
auggguuuuguuuguaaga

SEQ ID NO: 1864484 - RNA, 19 nt, Artificial Sequence
  Description of Artificial Sequence: Synthetic oligonucleotide
ucuguccggauuuauugga

SEQ ID NO: 1864485 - RNA, 19 nt, Artificial Sequence
  Description of Artificial Sequence: Synthetic oligonucleotide
auuccuacccaguuacuca

SEQ ID NO: 1864486 - RNA, 19 nt, Artificial Sequence
  Description of Artificial Sequence: Synthetic oligonucleotide
guccggauuuauuggaggg

SEQ ID NO: 1864487 - RNA, 19 nt, Artificial Sequence
  Description of Artificial Sequence: Synthetic oligonucleotide
ugaccuagagcuaccucug

SEQ ID NO: 1864488 - RNA, 19 nt, Artificial Sequence
  Description of Artificial Sequence: Synthetic oligonucleotide
aguagcauccuguuaggaa

SEQ ID NO: 1864489 - RNA, 19 nt, Artificial Sequence
  Description of Artificial Sequence: Synthetic oligonucleotide
auugaauccucucuugcuu

SEQ ID NO: 1864490 - RNA, 19 nt, Artificial Sequence
  Description of Artificial Sequence: Synthetic oligonucleotide
agagaguccgaaaucaugu

SEQ ID NO: 1864491 - RNA, 19 nt, Artificial Sequence
  Description of Artificial Sequence: Synthetic oligonucleotide
uacucagucuggaaccaug

SEQ ID NO: 1864492 - RNA, 19 nt, Artificial Sequence
  Description of Artificial Sequence: Synthetic oligonucleotide
aguuguacuuucucugaca

SEQ ID NO: 1864493 - RNA, 19 nt, Artificial Sequence
  Description of Artificial Sequence: Synthetic oligonucleotide
gacaugucagcaaaguaga

SEQ ID NO: 1864494 - RNA, 19 nt, Artificial Sequence
  Description of Artificial Sequence: Synthetic oligonucleotide
caguuacucagucuggaac

SEQ ID NO: 1864495 - RNA, 19 nt, Artificial Sequence
  Description of Artificial Sequence: Synthetic oligonucleotide
uugcaugcuucaagaagag

SEQ ID NO: 1864496 - RNA, 19 nt, Artificial Sequence
  Description of Artificial Sequence: Synthetic oligonucleotide
cuuuaggggagacgcaaag

SEQ ID NO: 1864497 - RNA, 19 nt, Artificial Sequence
  Description of Artificial Sequence: Synthetic oligonucleotide
agacgcaaagcaguaauug

SEQ ID NO: 1864498 - RNA, 19 nt, Artificial Sequence
  Description of Artificial Sequence: Synthetic oligonucleotide
uuguaguugaggguauacc

SEQ ID NO: 1864499 - RNA, 19 nt, Artificial Sequence
  Description of Artificial Sequence: Synthetic oligonucleotide
aggagccucggguagagug

SEQ ID NO: 1864500 - RNA, 19 nt, Artificial Sequence
  Description of Artificial Sequence: Synthetic oligonucleotide
agugcgaauacaauccuca

SEQ ID NO: 1864501 - RNA, 19 nt, Artificial Sequence
  Description of Artificial Sequence: Synthetic oligonucleotide
agacucauagccugccuug

SEQ ID NO: 1864502 - RNA, 19 nt, Artificial Sequence
  Description of Artificial Sequence: Synthetic oligonucleotide
ugcgaauacaauccucaau

SEQ ID NO: 1864503 - RNA, 19 nt, Artificial Sequence
  Description of Artificial Sequence: Synthetic oligonucleotide
cuaagggcacuguacuccc

SEQ ID NO: 1864504 - RNA, 19 nt, Artificial Sequence
  Description of Artificial Sequence: Synthetic oligonucleotide
uuuaggggagacgcaaagc

SEQ ID NO: 1864505 - RNA, 19 nt, Artificial Sequence
  Description of Artificial Sequence: Synthetic oligonucleotide
agaauucauugcaugcuuc

SEQ ID NO: 1864506 - RNA, 19 nt, Artificial Sequence
  Description of Artificial Sequence: Synthetic oligonucleotide
cuggacucgaagauccagc

SEQ ID NO: 1864507 - RNA, 19 nt, Artificial Sequence
  Description of Artificial Sequence: Synthetic oligonucleotide
guaguugaggguauacccc

SEQ ID NO: 1864508 - RNA, 19 nt, Artificial Sequence
  Description of Artificial Sequence: Synthetic oligonucleotide
agguaucgcauauggaccu

SEQ ID NO: 1864509 - RNA, 19 nt, Artificial Sequence
  Description of Artificial Sequence: Synthetic oligonucleotide
guaagauugaauccucucu

SEQ ID NO: 1864510 - RNA, 19 nt, Artificial Sequence
  Description of Artificial Sequence: Synthetic oligonucleotide
acgcaaugcacaguguagg

SEQ ID NO: 1864511 - RNA, 19 nt, Artificial Sequence
  Description of Artificial Sequence: Synthetic oligonucleotide
aaugcacaguguagguuuc

SEQ ID NO: 1864512 - RNA, 19 nt, Artificial Sequence
  Description of Artificial Sequence: Synthetic oligonucleotide
gacgcaaugcacaguguag

SEQ ID NO: 1864513 - RNA, 19 nt, Artificial Sequence
  Description of Artificial Sequence: Synthetic oligonucleotide
gaggguauaccccucugga

SEQ ID NO: 1864514 - RNA, 19 nt, Artificial Sequence
  Description of Artificial Sequence: Synthetic oligonucleotide
auuggcacucuuggaagac

SEQ ID NO: 1864515 - RNA, 19 nt, Artificial Sequence
  Description of Artificial Sequence: Synthetic oligonucleotide
caacuuuaucagcuccugg

SEQ ID NO: 1864516 - RNA, 19 nt, Artificial Sequence
  Description of Artificial Sequence: Synthetic oligonucleotide
gauuccuacccaguuacuc

SEQ ID NO: 1864517 - RNA, 19 nt, Artificial Sequence
  Description of Artificial Sequence: Synthetic oligonucleotide
augcuucaagaagagcucg

SEQ ID NO: 1864518 - RNA, 19 nt, Artificial Sequence
  Description of Artificial Sequence: Synthetic oligonucleotide
gagaguccgaaaucaugug

SEQ ID NO: 1864519 - RNA, 19 nt, Artificial Sequence
  Description of Artificial Sequence: Synthetic oligonucleotide
cuagcaguuguacuuucuc

SEQ ID NO: 1864520 - RNA, 19 nt, Artificial Sequence
  Description of Artificial Sequence: Synthetic oligonucleotide
gaagguccuuucugaaggc

SEQ ID NO: 1864521 - RNA, 19 nt, Artificial Sequence
  Description of Artificial Sequence: Synthetic oligonucleotide
uuagaagguaucgcauaug

SEQ ID NO: 1864522 - RNA, 19 nt, Artificial Sequence
  Description of Artificial Sequence: Synthetic oligonucleotide
uauuguguguaggagccuc

SEQ ID NO: 1864523 - RNA, 19 nt, Artificial Sequence
  Description of Artificial Sequence: Synthetic oligonucleotide
acugaccuagagcuaccuc

SEQ ID NO: 1864524 - RNA, 19 nt, Artificial Sequence
  Description of Artificial Sequence: Synthetic oligonucleotide
guagguuucuauaguguug

SEQ ID NO: 1864525 - RNA, 19 nt, Artificial Sequence
  Description of Artificial Sequence: Synthetic oligonucleotide
ugacucuggcuucaaaguu

SEQ ID NO: 1864526 - RNA, 19 nt, Artificial Sequence
  Description of Artificial Sequence: Synthetic oligonucleotide
guagaguguagguacugca

SEQ ID NO: 1864527 - RNA, 19 nt, Artificial Sequence
  Description of Artificial Sequence: Synthetic oligonucleotide
ggaaccaugccagaguagc

SEQ ID NO: 1864528 - RNA, 19 nt, Artificial Sequence
  Description of Artificial Sequence: Synthetic oligonucleotide
ccaaguggggcuuucuugg

SEQ ID NO: 1864529 - RNA, 19 nt, Artificial Sequence
  Description of Artificial Sequence: Synthetic oligonucleotide
guuacagaucaacuuuauc

SEQ ID NO: 1864530 - RNA, 19 nt, Artificial Sequence
  Description of Artificial Sequence: Synthetic oligonucleotide
uucuauaguguugguccag

SEQ ID NO: 1864531 - RNA, 19 nt, Artificial Sequence
  Description of Artificial Sequence: Synthetic oligonucleotide
ucuauaguguugguccagu

SEQ ID NO: 1864532 - RNA, 19 nt, Artificial Sequence
  Description of Artificial Sequence: Synthetic oligonucleotide
aggguugggagcuaucuuu

SEQ ID NO: 1864533 - RNA, 19 nt, Artificial Sequence
  Description of Artificial Sequence: Synthetic oligonucleotide
gacucgaagauccagcuuu

SEQ ID NO: 1864534 - RNA, 19 nt, Artificial Sequence
  Description of Artificial Sequence: Synthetic oligonucleotide
auacaauccucaaucuucu

SEQ ID NO: 1864535 - RNA, 19 nt, Artificial Sequence
  Description of Artificial Sequence: Synthetic oligonucleotide
cucagguggggccacucgg

SEQ ID NO: 1864536 - RNA, 19 nt, Artificial Sequence
  Description of Artificial Sequence: Synthetic oligonucleotide
guguaguuauuguguguag

SEQ ID NO: 1864537 - RNA, 19 nt, Artificial Sequence
  Description of Artificial Sequence: Synthetic oligonucleotide
agcaaggucaugguguagu

SEQ ID NO: 1864538 - RNA, 19 nt, Artificial Sequence
  Description of Artificial Sequence: Synthetic oligonucleotide
gguauaccccucuggauug

SEQ ID NO: 1864539 - RNA, 19 nt, Artificial Sequence
  Description of Artificial Sequence: Synthetic oligonucleotide
uggaaccaugccagaguag

SEQ ID NO: 1864540 - RNA, 19 nt, Artificial Sequence
  Description of Artificial Sequence: Synthetic oligonucleotide
ggcuguagacaauaaacuc

SEQ ID NO: 1864541 - RNA, 19 nt, Artificial Sequence
  Description of Artificial Sequence: Synthetic oligonucleotide
cauauggaccugguugggg

SEQ ID NO: 1864542 - RNA, 19 nt, Artificial Sequence
  Description of Artificial Sequence: Synthetic oligonucleotide
ugguccaggggacgcaaug

SEQ ID NO: 1864543 - RNA, 19 nt, Artificial Sequence
  Description of Artificial Sequence: Synthetic oligonucleotide
agaauuccugugucacuug

SEQ ID NO: 1864544 - RNA, 19 nt, Artificial Sequence
  Description of Artificial Sequence: Synthetic oligonucleotide
cuuggugcccugauuucac

SEQ ID NO: 1864545 - RNA, 19 nt, Artificial Sequence
  Description of Artificial Sequence: Synthetic oligonucleotide
cauauauccugugacggga

SEQ ID NO: 1864546 - RNA, 19 nt, Artificial Sequence
  Description of Artificial Sequence: Synthetic oligonucleotide
cuguccggauuuauuggag

SEQ ID NO: 1864547 - RNA, 19 nt, Artificial Sequence
  Description of Artificial Sequence: Synthetic oligonucleotide
caguccugugcucuuuagg

SEQ ID NO: 1864548 - RNA, 19 nt, Artificial Sequence
  Description of Artificial Sequence: Synthetic oligonucleotide
cuaugcuugcccugaagca

SEQ ID NO: 1864549 - RNA, 19 nt, Artificial Sequence
  Description of Artificial Sequence: Synthetic oligonucleotide
ucauuucuaucaucaucuc

SEQ ID NO: 1864550 - RNA, 19 nt, Artificial Sequence
  Description of Artificial Sequence: Synthetic oligonucleotide
ugguguaguuauugugugu

SEQ ID NO: 1864551 - RNA, 19 nt, Artificial Sequence
  Description of Artificial Sequence: Synthetic oligonucleotide
cucauuguaguugagggua

SEQ ID NO: 1864552 - RNA, 19 nt, Artificial Sequence
  Description of Artificial Sequence: Synthetic oligonucleotide
cuuuagaagguaucgcaua

SEQ ID NO: 1864553 - RNA, 19 nt, Artificial Sequence
  Description of Artificial Sequence: Synthetic oligonucleotide
agagcucgcccaugcuggc

SEQ ID NO: 1864554 - RNA, 19 nt, Artificial Sequence
  Description of Artificial Sequence: Synthetic oligonucleotide
uuggugcuaugcuugcccu

SEQ ID NO: 1864555 - RNA, 19 nt, Artificial Sequence
  Description of Artificial Sequence: Synthetic oligonucleotide
aguccgaaaucauguggga

SEQ ID NO: 1864556 - RNA, 19 nt, Artificial Sequence
  Description of Artificial Sequence: Synthetic oligonucleotide
guaucgcauauggaccugg

SEQ ID NO: 1864557 - RNA, 19 nt, Artificial Sequence
  Description of Artificial Sequence: Synthetic oligonucleotide
gaguguagguacugcaaaa

SEQ ID NO: 1864558 - RNA, 19 nt, Artificial Sequence
  Description of Artificial Sequence: Synthetic oligonucleotide
uauggaccugguuggggcu

SEQ ID NO: 1864559 - RNA, 19 nt, Artificial Sequence
  Description of Artificial Sequence: Synthetic oligonucleotide
gccagugcgaauacaaucc

SEQ ID NO: 1864560 - RNA, 19 nt, Artificial Sequence
  Description of Artificial Sequence: Synthetic oligonucleotide
ggggacgcaaugcacagug

SEQ ID NO: 1864561 - RNA, 19 nt, Artificial Sequence
  Description of Artificial Sequence: Synthetic oligonucleotide
uaucgcauauggaccuggu

SEQ ID NO: 1864562 - RNA, 19 nt, Artificial Sequence
  Description of Artificial Sequence: Synthetic oligonucleotide
cugaccuagagcuaccucu

SEQ ID NO: 1864563 - RNA, 19 nt, Artificial Sequence
  Description of Artificial Sequence: Synthetic oligonucleotide
caguuguacuuucucugac

SEQ ID NO: 1864564 - RNA, 19 nt, Artificial Sequence
  Description of Artificial Sequence: Synthetic oligonucleotide
uccggauuuauuggaggga

SEQ ID NO: 1864565 - RNA, 19 nt, Artificial Sequence
  Description of Artificial Sequence: Synthetic oligonucleotide
agcuccuggacucgaagau

SEQ ID NO: 1864566 - RNA, 19 nt, Artificial Sequence
  Description of Artificial Sequence: Synthetic oligonucleotide
uucucuguccggauuuauu

SEQ ID NO: 1864567 - RNA, 19 nt, Artificial Sequence
  Description of Artificial Sequence: Synthetic oligonucleotide
cauaacuuucaugguccag

SEQ ID NO: 1864568 - RNA, 19 nt, Artificial Sequence
  Description of Artificial Sequence: Synthetic oligonucleotide
gaauacaauccucaaucuu

SEQ ID NO: 1864569 - RNA, 19 nt, Artificial Sequence
  Description of Artificial Sequence: Synthetic oligonucleotide
auauauccugugacgggag

SEQ ID NO: 1864570 - RNA, 19 nt, Artificial Sequence
  Description of Artificial Sequence: Synthetic oligonucleotide
aguccguggcucaggauuc

SEQ ID NO: 1864571 - RNA, 19 nt, Artificial Sequence
  Description of Artificial Sequence: Synthetic oligonucleotide
agggauagagaguccgaaa

SEQ ID NO: 1864572 - RNA, 19 nt, Artificial Sequence
  Description of Artificial Sequence: Synthetic oligonucleotide
uccuaagggcacuguacuc

SEQ ID NO: 1864573 - RNA, 19 nt, Artificial Sequence
  Description of Artificial Sequence: Synthetic oligonucleotide
caggggacgcaaugcacag

SEQ ID NO: 1864574 - RNA, 19 nt, Artificial Sequence
  Description of Artificial Sequence: Synthetic oligonucleotide
cugcacguuacagaucaac

SEQ ID NO: 1864575 - RNA, 19 nt, Artificial Sequence
  Description of Artificial Sequence: Synthetic oligonucleotide
uauaccccucuggauugag

SEQ ID NO: 1864576 - RNA, 19 nt, Artificial Sequence
  Description of Artificial Sequence: Synthetic oligonucleotide
ggauagagaguccgaaauc

SEQ ID NO: 1864577 - RNA, 19 nt, Artificial Sequence
  Description of Artificial Sequence: Synthetic oligonucleotide
ccuaagggcacuguacucc

SEQ ID NO: 1864578 - RNA, 19 nt, Artificial Sequence
  Description of Artificial Sequence: Synthetic oligonucleotide
cuguuaggaagguccuuuc

SEQ ID NO: 1864579 - RNA, 19 nt, Artificial Sequence
  Description of Artificial Sequence: Synthetic oligonucleotide
accuagagcuaccucugau

SEQ ID NO: 1864580 - RNA, 19 nt, Artificial Sequence
  Description of Artificial Sequence: Synthetic oligonucleotide
uguagacaauaaacucauu

SEQ ID NO: 1864581 - RNA, 19 nt, Artificial Sequence
  Description of Artificial Sequence: Synthetic oligonucleotide
cagugcgaauacaauccuc

SEQ ID NO: 1864582 - RNA, 19 nt, Artificial Sequence
  Description of Artificial Sequence: Synthetic oligonucleotide
gugacgggagccucaggug

SEQ ID NO: 1864583 - RNA, 19 nt, Artificial Sequence
  Description of Artificial Sequence: Synthetic oligonucleotide
gcaaagcaguaauuggcac

SEQ ID NO: 1864584 - RNA, 19 nt, Artificial Sequence
  Description of Artificial Sequence: Synthetic oligonucleotide
ugugcucuuuaggggagac

SEQ ID NO: 1864585 - RNA, 19 nt, Artificial Sequence
  Description of Artificial Sequence: Synthetic oligonucleotide
uggugcuaugcuugcccug

SEQ ID NO: 1864586 - RNA, 19 nt, Artificial Sequence
  Description of Artificial Sequence: Synthetic oligonucleotide
uccugugacgggagccuca

SEQ ID NO: 1864587 - RNA, 19 nt, Artificial Sequence
  Description of Artificial Sequence: Synthetic oligonucleotide
acacugaccuagagcuacc

SEQ ID NO: 1864588 - RNA, 19 nt, Artificial Sequence
  Description of Artificial Sequence: Synthetic oligonucleotide
ggccagugcgaauacaauc

SEQ ID NO: 1864589 - RNA, 19 nt, Artificial Sequence
  Description of Artificial Sequence: Synthetic oligonucleotide
uuauuguguguaggagccu

SEQ ID NO: 1864590 - RNA, 19 nt, Artificial Sequence
  Description of Artificial Sequence: Synthetic oligonucleotide
agaagguaucgcauaugga

SEQ ID NO: 1864591 - RNA, 19 nt, Artificial Sequence
  Description of Artificial Sequence: Synthetic oligonucleotide
gaguccguggcucaggauu

SEQ ID NO: 1864592 - RNA, 19 nt, Artificial Sequence
  Description of Artificial Sequence: Synthetic oligonucleotide
guuacucagucuggaacca

SEQ ID NO: 1864593 - RNA, 19 nt, Artificial Sequence
  Description of Artificial Sequence: Synthetic oligonucleotide
caguagcucauuacacuga

SEQ ID NO: 1864594 - RNA, 19 nt, Artificial Sequence
  Description of Artificial Sequence: Synthetic oligonucleotide
agguccuuucugaaggccu

SEQ ID NO: 1864595 - RNA, 19 nt, Artificial Sequence
  Description of Artificial Sequence: Synthetic oligonucleotide
ccgaaaucaugugggaucc

SEQ ID NO: 1864596 - RNA, 19 nt, Artificial Sequence
  Description of Artificial Sequence: Synthetic oligonucleotide
auagagaguccgaaaucau

SEQ ID NO: 1864597 - RNA, 19 nt, Artificial Sequence
  Description of Artificial Sequence: Synthetic oligonucleotide
guccuaagggcacuguacu

SEQ ID NO: 1864598 - RNA, 19 nt, Artificial Sequence
  Description of Artificial Sequence: Synthetic oligonucleotide
gguugggagcuaucuuucc

SEQ ID NO: 1864599 - RNA, 19 nt, Artificial Sequence
  Description of Artificial Sequence: Synthetic oligonucleotide
guaggagccucggguagag

SEQ ID NO: 1864600 - RNA, 19 nt, Artificial Sequence
  Description of Artificial Sequence: Synthetic oligonucleotide
ccacuuugaacucauaacu

SEQ ID NO: 1864601 - RNA, 19 nt, Artificial Sequence
  Description of Artificial Sequence: Synthetic oligonucleotide
cacguuacagaucaacuuu

SEQ ID NO: 1864602 - RNA, 19 nt, Artificial Sequence
  Description of Artificial Sequence: Synthetic oligonucleotide
cagcuuugacucuggcuuc

SEQ ID NO: 1864603 - RNA, 19 nt, Artificial Sequence
  Description of Artificial Sequence: Synthetic oligonucleotide
gguccuaagggcacuguac

SEQ ID NO: 1864604 - RNA, 19 nt, Artificial Sequence
  Description of Artificial Sequence: Synthetic oligonucleotide
aucgcauauggaccugguu

SEQ ID NO: 1864605 - RNA, 19 nt, Artificial Sequence
  Description of Artificial Sequence: Synthetic oligonucleotide
gaaccaugccagaguagca

SEQ ID NO: 1864606 - RNA, 19 nt, Artificial Sequence
  Description of Artificial Sequence: Synthetic oligonucleotide
acccaguuacucagucugg

SEQ ID NO: 1864607 - RNA, 19 nt, Artificial Sequence
  Description of Artificial Sequence: Synthetic oligonucleotide
acguuacagaucaacuuua

SEQ ID NO: 1864608 - RNA, 19 nt, Artificial Sequence
  Description of Artificial Sequence: Synthetic oligonucleotide
auuauggguuuuguuugua

SEQ ID NO: 1864609 - RNA, 19 nt, Artificial Sequence
  Description of Artificial Sequence: Synthetic oligonucleotide
cucuggauugagaauuccu

SEQ ID NO: 1864610 - RNA, 19 nt, Artificial Sequence
  Description of Artificial Sequence: Synthetic oligonucleotide
gggauagagaguccgaaau

SEQ ID NO: 1864611 - RNA, 19 nt, Artificial Sequence
  Description of Artificial Sequence: Synthetic oligonucleotide
acucgaagauccagcuuug

SEQ ID NO: 1864612 - RNA, 19 nt, Artificial Sequence
  Description of Artificial Sequence: Synthetic oligonucleotide
aagcaguaauuggcacucu

SEQ ID NO: 1864613 - RNA, 19 nt, Artificial Sequence
  Description of Artificial Sequence: Synthetic oligonucleotide
gaccuagagcuaccucuga

SEQ ID NO: 1864614 - RNA, 19 nt, Artificial Sequence
  Description of Artificial Sequence: Synthetic oligonucleotide
acucggaguccguggcuca

SEQ ID NO: 1864615 - RNA, 19 nt, Artificial Sequence
  Description of Artificial Sequence: Synthetic oligonucleotide
auccugugacgggagccuc

SEQ ID NO: 1864616 - RNA, 19 nt, Artificial Sequence
  Description of Artificial Sequence: Synthetic oligonucleotide
aagcaacccuucugccuua

SEQ ID NO: 1864617 - RNA, 19 nt, Artificial Sequence
  Description of Artificial Sequence: Synthetic oligonucleotide
ggacgcaaugcacagugua

SEQ ID NO: 1864618 - RNA, 19 nt, Artificial Sequence
  Description of Artificial Sequence: Synthetic oligonucleotide
gugcgaauacaauccucaa

SEQ ID NO: 1864619 - RNA, 19 nt, Artificial Sequence
  Description of Artificial Sequence: Synthetic oligonucleotide
guguagguuucuauagugu

SEQ ID NO: 1864620 - RNA, 19 nt, Artificial Sequence
  Description of Artificial Sequence: Synthetic oligonucleotide
cacucggaguccguggcuc

SEQ ID NO: 1864621 - RNA, 19 nt, Artificial Sequence
  Description of Artificial Sequence: Synthetic oligonucleotide
agcauccuguuaggaaggu

SEQ ID NO: 1864622 - RNA, 19 nt, Artificial Sequence
  Description of Artificial Sequence: Synthetic oligonucleotide
gcauauggaccugguuggg

SEQ ID NO: 1864623 - RNA, 19 nt, Artificial Sequence
  Description of Artificial Sequence: Synthetic oligonucleotide
gccacucggaguccguggc

SEQ ID NO: 1864624 - RNA, 19 nt, Artificial Sequence
  Description of Artificial Sequence: Synthetic oligonucleotide
gcaguccugugcucuuuag

SEQ ID NO: 1864625 - RNA, 19 nt, Artificial Sequence
  Description of Artificial Sequence: Synthetic oligonucleotide
caguguagguuucuauagu

SEQ ID NO: 1864626 - RNA, 19 nt, Artificial Sequence
  Description of Artificial Sequence: Synthetic oligonucleotide
gccucggguagaguguagg

SEQ ID NO: 1864627 - RNA, 19 nt, Artificial Sequence
  Description of Artificial Sequence: Synthetic oligonucleotide
ggguauaccccucuggauu

SEQ ID NO: 1864628 - RNA, 19 nt, Artificial Sequence
  Description of Artificial Sequence: Synthetic oligonucleotide
cuuugacucuggcuucaaa

SEQ ID NO: 1864629 - RNA, 19 nt, Artificial Sequence
  Description of Artificial Sequence: Synthetic oligonucleotide
agcaacccuucugccuuag

SEQ ID NO: 1864630 - RNA, 19 nt, Artificial Sequence
  Description of Artificial Sequence: Synthetic oligonucleotide
gugaugaaguggucagggu

SEQ ID NO: 1864631 - RNA, 19 nt, Artificial Sequence
  Description of Artificial Sequence: Synthetic oligonucleotide
gggcuguagacaauaaacu

SEQ ID NO: 1864632 - RNA, 19 nt, Artificial Sequence
  Description of Artificial Sequence: Synthetic oligonucleotide
agugccucuagcaguugua

SEQ ID NO: 1864633 - RNA, 19 nt, Artificial Sequence
  Description of Artificial Sequence: Synthetic oligonucleotide
caugugggauccuggugua

SEQ ID NO: 1864634 - RNA, 19 nt, Artificial Sequence
  Description of Artificial Sequence: Synthetic oligonucleotide
gccugccuugauuugcuuc

SEQ ID NO: 1864635 - RNA, 19 nt, Artificial Sequence
  Description of Artificial Sequence: Synthetic oligonucleotide
cucggguagaguguaggua

SEQ ID NO: 1864636 - RNA, 19 nt, Artificial Sequence
  Description of Artificial Sequence: Synthetic oligonucleotide
uccguggcucaggauuccu

SEQ ID NO: 1864637 - RNA, 19 nt, Artificial Sequence
  Description of Artificial Sequence: Synthetic oligonucleotide
cugugacgggagccucagg

SEQ ID NO: 1864638 - RNA, 19 nt, Artificial Sequence
  Description of Artificial Sequence: Synthetic oligonucleotide
aaaccacuuugaacucaua

SEQ ID NO: 1864639 - RNA, 19 nt, Artificial Sequence
  Description of Artificial Sequence: Synthetic oligonucleotide
auaccccucuggauugaga

SEQ ID NO: 1864640 - RNA, 19 nt, Artificial Sequence
  Description of Artificial Sequence: Synthetic oligonucleotide
uccuguuaggaagguccuu

SEQ ID NO: 1864641 - RNA, 19 nt, Artificial Sequence
  Description of Artificial Sequence: Synthetic oligonucleotide
gguaucgcauauggaccug

SEQ ID NO: 1864642 - RNA, 19 nt, Artificial Sequence
  Description of Artificial Sequence: Synthetic oligonucleotide
cucggaguccguggcucag

SEQ ID NO: 1864643 - RNA, 19 nt, Artificial Sequence
  Description of Artificial Sequence: Synthetic oligonucleotide
ggcucaggauuccuaccca

SEQ ID NO: 1864644 - RNA, 19 nt, Artificial Sequence
  Description of Artificial Sequence: Synthetic oligonucleotide
ccuagagcuaccucugaua

SEQ ID NO: 1864645 - RNA, 19 nt, Artificial Sequence
  Description of Artificial Sequence: Synthetic oligonucleotide
agggcacuguacucccauu

SEQ ID NO: 1864646 - RNA, 19 nt, Artificial Sequence
  Description of Artificial Sequence: Synthetic oligonucleotide
ggguugggagcuaucuuuc

SEQ ID NO: 1864647 - RNA, 19 nt, Artificial Sequence
  Description of Artificial Sequence: Synthetic oligonucleotide
gcacguuacagaucaacuu

SEQ ID NO: 1864648 - RNA, 19 nt, Artificial Sequence
  Description of Artificial Sequence: Synthetic oligonucleotide
gccucuagcaguuguacuu

SEQ ID NO: 1864649 - RNA, 19 nt, Artificial Sequence
  Description of Artificial Sequence: Synthetic oligonucleotide
gagacgcaaagcaguaauu

SEQ ID NO: 1864650 - RNA, 19 nt, Artificial Sequence
  Description of Artificial Sequence: Synthetic oligonucleotide
gguguagaauucauugcau

SEQ ID NO: 1864651 - RNA, 19 nt, Artificial Sequence
  Description of Artificial Sequence: Synthetic oligonucleotide
guacucccauucaggguga

SEQ ID NO: 1864652 - RNA, 19 nt, Artificial Sequence
  Description of Artificial Sequence: Synthetic oligonucleotide
guauaccccucuggauuga

SEQ ID NO: 1864653 - RNA, 19 nt, Artificial Sequence
  Description of Artificial Sequence: Synthetic oligonucleotide
ggagggauagagaguccga

SEQ ID NO: 1864654 - RNA, 19 nt, Artificial Sequence
  Description of Artificial Sequence: Synthetic oligonucleotide
gugcccugauuucaccagu

SEQ ID NO: 1864655 - RNA, 19 nt, Artificial Sequence
  Description of Artificial Sequence: Synthetic oligonucleotide
aggggacgcaaugcacagu

SEQ ID NO: 1864656 - RNA, 19 nt, Artificial Sequence
  Description of Artificial Sequence: Synthetic oligonucleotide
uaggagccucggguagagu

SEQ ID NO: 1864657 - RNA, 19 nt, Artificial Sequence
  Description of Artificial Sequence: Synthetic oligonucleotide
guggguguucugggccuug

SEQ ID NO: 1864658 - RNA, 19 nt, Artificial Sequence
  Description of Artificial Sequence: Synthetic oligonucleotide
ccugugacgggagccucag

SEQ ID NO: 1864659 - RNA, 19 nt, Artificial Sequence
  Description of Artificial Sequence: Synthetic oligonucleotide
ccaguuacucagucuggaa

SEQ ID NO: 1864660 - RNA, 19 nt, Artificial Sequence
  Description of Artificial Sequence: Synthetic oligonucleotide
cgaauacaauccucaaucu

SEQ ID NO: 1864661 - RNA, 19 nt, Artificial Sequence
  Description of Artificial Sequence: Synthetic oligonucleotide
uacucccauucagggugau

SEQ ID NO: 1864662 - RNA, 19 nt, Artificial Sequence
  Description of Artificial Sequence: Synthetic oligonucleotide
ggauuggccuccaguagcu

SEQ ID NO: 1864663 - RNA, 19 nt, Artificial Sequence
  Description of Artificial Sequence: Synthetic oligonucleotide
ccuuggugcccugauuuca

SEQ ID NO: 1864664 - RNA, 19 nt, Artificial Sequence
  Description of Artificial Sequence: Synthetic oligonucleotide
gcauccuguuaggaagguc

SEQ ID NO: 1864665 - RNA, 19 nt, Artificial Sequence
  Description of Artificial Sequence: Synthetic oligonucleotide
cccaguuacucagucugga

SEQ ID NO: 1864666 - RNA, 19 nt, Artificial Sequence
  Description of Artificial Sequence: Synthetic oligonucleotide
gugcuaugcuugcccugaa

SEQ ID NO: 1864667 - RNA, 19 nt, Artificial Sequence
  Description of Artificial Sequence: Synthetic oligonucleotide
ggggagacgcaaagcagua

SEQ ID NO: 1864668 - RNA, 19 nt, Artificial Sequence
  Description of Artificial Sequence: Synthetic oligonucleotide
cacugaccuagagcuaccu

SEQ ID NO: 1864669 - RNA, 19 nt, Artificial Sequence
  Description of Artificial Sequence: Synthetic oligonucleotide
ccucucuugcuuauuuaau

SEQ ID NO: 1864670 - RNA, 19 nt, Artificial Sequence
  Description of Artificial Sequence: Synthetic oligonucleotide
ccagugcgaauacaauccu

SEQ ID NO: 1864671 - RNA, 19 nt, Artificial Sequence
  Description of Artificial Sequence: Synthetic oligonucleotide
caggguugggagcuaucuu

SEQ ID NO: 1864672 - RNA, 19 nt, Artificial Sequence
  Description of Artificial Sequence: Synthetic oligonucleotide
ccggauuuauuggagggau

SEQ ID NO: 1864673 - RNA, 19 nt, Artificial Sequence
  Description of Artificial Sequence: Synthetic oligonucleotide
ggacucgaagauccagcuu

SEQ ID NO: 1864674 - RNA, 19 nt, Artificial Sequence
  Description of Artificial Sequence: Synthetic oligonucleotide
ccucggguagaguguaggu

SEQ ID NO: 1864675 - RNA, 19 nt, Artificial Sequence
  Description of Artificial Sequence: Synthetic oligonucleotide
gccccuuggugcuaugcuu

SEQ ID NO: 1864676 - RNA, 19 nt, Artificial Sequence
  Description of Artificial Sequence: Synthetic oligonucleotide
cguuacagaucaacuuuau

SEQ ID NO: 1864677 - RNA, 19 nt, Artificial Sequence
  Description of Artificial Sequence: Synthetic oligonucleotide
ggauuccuacccaguuacu

SEQ ID NO: 1864678 - RNA, 19 nt, Artificial Sequence
  Description of Artificial Sequence: Synthetic oligonucleotide
ccaugcuggccagugcgaa

SEQ ID NO: 1864679 - RNA, 19 nt, Artificial Sequence
  Description of Artificial Sequence: Synthetic oligonucleotide
ggaguccguggcucaggau

SEQ ID NO: 1864680 - RNA, 19 nt, Artificial Sequence
  Description of Artificial Sequence: Synthetic oligonucleotide
gggacgcaaugcacagugu

SEQ ID NO: 1864681 - RNA, 19 nt, Artificial Sequence
  Description of Artificial Sequence: Synthetic oligonucleotide
gccuuaggauuggccucca

SEQ ID NO: 1864682 - RNA, 19 nt, Artificial Sequence
  Description of Artificial Sequence: Synthetic oligonucleotide
cgggagccucagguggggc

SEQ ID NO: 1864683 - RNA, 19 nt, Artificial Sequence
  Description of Artificial Sequence: Synthetic oligonucleotide
ggggccacucggaguccgu

SEQ ID NO: 1864684 - RNA, 19 nt, Artificial Sequence
  Description of Artificial Sequence: Synthetic oligonucleotide
aaaucuggaauccaaacac

SEQ ID NO: 1864685 - RNA, 19 nt, Artificial Sequence
  Description of Artificial Sequence: Synthetic oligonucleotide
aauuugaugaauccugccc

SEQ ID NO: 1864686 - RNA, 19 nt, Artificial Sequence
  Description of Artificial Sequence: Synthetic oligonucleotide
aauugcacuccauaaauuc

SEQ ID NO: 1864687 - RNA, 19 nt, Artificial Sequence
  Description of Artificial Sequence: Synthetic oligonucleotide
aguguaugcuccuacaucc

SEQ ID NO: 1864688 - RNA, 19 nt, Artificial Sequence
  Description of Artificial Sequence: Synthetic oligonucleotide
aucauaaccagcaauaagc

SEQ ID NO: 1864689 - RNA, 19 nt, Artificial Sequence
  Description of Artificial Sequence: Synthetic oligonucleotide
aaugugagggcccauauca

SEQ ID NO: 1864690 - RNA, 19 nt, Artificial Sequence
  Description of Artificial Sequence: Synthetic oligonucleotide
uucaauuugaugaauccug

SEQ ID NO: 1864691 - RNA, 19 nt, Artificial Sequence
  Description of Artificial Sequence: Synthetic oligonucleotide
uauguagacccuuucaaag

SEQ ID NO: 1864692 - RNA, 19 nt, Artificial Sequence
  Description of Artificial Sequence: Synthetic oligonucleotide
caaaguaguuagcagaugg

SEQ ID NO: 1864693 - RNA, 19 nt, Artificial Sequence
  Description of Artificial Sequence: Synthetic oligonucleotide
auaacagucuagcaucagc

SEQ ID NO: 1864694 - RNA, 19 nt, Artificial Sequence
  Description of Artificial Sequence: Synthetic oligonucleotide
aaccagcucaucuaaauug

SEQ ID NO: 1864695 - RNA, 19 nt, Artificial Sequence
  Description of Artificial Sequence: Synthetic oligonucleotide
cugucaaauacaaaucugg

SEQ ID NO: 1864696 - RNA, 19 nt, Artificial Sequence
  Description of Artificial Sequence: Synthetic oligonucleotide
ugucuuuaaaacuguaaag

SEQ ID NO: 1864697 - RNA, 19 nt, Artificial Sequence
  Description of Artificial Sequence: Synthetic oligonucleotide
uauucaauuugaugaaucc

SEQ ID NO: 1864698 - RNA, 19 nt, Artificial Sequence
  Description of Artificial Sequence: Synthetic oligonucleotide
uucaagaccauccaggaau

SEQ ID NO: 1864699 - RNA, 19 nt, Artificial Sequence
  Description of Artificial Sequence: Synthetic oligonucleotide
aaguacagauuacugucac

SEQ ID NO: 1864700 - RNA, 19 nt, Artificial Sequence
  Description of Artificial Sequence: Synthetic oligonucleotide
agauuguaaacuccaaguc

SEQ ID NO: 1864701 - RNA, 19 nt, Artificial Sequence
  Description of Artificial Sequence: Synthetic oligonucleotide
guaguuagcagauggacag

SEQ ID NO: 1864702 - RNA, 19 nt, Artificial Sequence
  Description of Artificial Sequence: Synthetic oligonucleotide
aacauaccaccccauacuc

SEQ ID NO: 1864703 - RNA, 19 nt, Artificial Sequence
  Description of Artificial Sequence: Synthetic oligonucleotide
aauuagagacacaagacga

SEQ ID NO: 1864704 - RNA, 19 nt, Artificial Sequence
  Description of Artificial Sequence: Synthetic oligonucleotide
acgcagaccauguuuaacc

SEQ ID NO: 1864705 - RNA, 19 nt, Artificial Sequence
  Description of Artificial Sequence: Synthetic oligonucleotide
ucuaaguacagauuacugu

SEQ ID NO: 1864706 - RNA, 19 nt, Artificial Sequence
  Description of Artificial Sequence: Synthetic oligonucleotide
uacgagcugauugagaacg

SEQ ID NO: 1864707 - RNA, 19 nt, Artificial Sequence
  Description of Artificial Sequence: Synthetic oligonucleotide
aaacauaccaccccauacu

SEQ ID NO: 1864708 - RNA, 19 nt, Artificial Sequence
  Description of Artificial Sequence: Synthetic oligonucleotide
cuaaguacagauuacuguc

SEQ ID NO: 1864709 - RNA, 19 nt, Artificial Sequence
  Description of Artificial Sequence: Synthetic oligonucleotide
aauucagacauaugucucu

SEQ ID NO: 1864710 - RNA, 19 nt, Artificial Sequence
  Description of Artificial Sequence: Synthetic oligonucleotide
aaagaaaaugcacccauua

SEQ ID NO: 1864711 - RNA, 19 nt, Artificial Sequence
  Description of Artificial Sequence: Synthetic oligonucleotide
auagauuguaaacuccaag

SEQ ID NO: 1864712 - RNA, 19 nt, Artificial Sequence
  Description of Artificial Sequence: Synthetic oligonucleotide
uaacagucuagcaucagca

SEQ ID NO: 1864713 - RNA, 19 nt, Artificial Sequence
  Description of Artificial Sequence: Synthetic oligonucleotide
uuuggaaaaugugagggcc

SEQ ID NO: 1864714 - RNA, 19 nt, Artificial Sequence
  Description of Artificial Sequence: Synthetic oligonucleotide
aacauugguauagauaccu

SEQ ID NO: 1864715 - RNA, 19 nt, Artificial Sequence
  Description of Artificial Sequence: Synthetic oligonucleotide
uucuaaaacauaccacccc

SEQ ID NO: 1864716 - RNA, 19 nt, Artificial Sequence
  Description of Artificial Sequence: Synthetic oligonucleotide
agacccgcaauugagauac

SEQ ID NO: 1864717 - RNA, 19 nt, Artificial Sequence
  Description of Artificial Sequence: Synthetic oligonucleotide
auccaaacacuccuggcgc

SEQ ID NO: 1864718 - RNA, 19 nt, Artificial Sequence
  Description of Artificial Sequence: Synthetic oligonucleotide
cauaucaucauaaccagca

SEQ ID NO: 1864719 - RNA, 19 nt, Artificial Sequence
  Description of Artificial Sequence: Synthetic oligonucleotide
acccuuucaaagaaaaugc

SEQ ID NO: 1864720 - RNA, 19 nt, Artificial Sequence
  Description of Artificial Sequence: Synthetic oligonucleotide
gaaguggucugucaaauac

SEQ ID NO: 1864721 - RNA, 19 nt, Artificial Sequence
  Description of Artificial Sequence: Synthetic oligonucleotide
uugguauagauaccuauac

SEQ ID NO: 1864722 - RNA, 19 nt, Artificial Sequence
  Description of Artificial Sequence: Synthetic oligonucleotide
ucacuuaauguuccauugg

SEQ ID NO: 1864723 - RNA, 19 nt, Artificial Sequence
  Description of Artificial Sequence: Synthetic oligonucleotide
uuugacuuuaggccaacug

SEQ ID NO: 1864724 - RNA, 19 nt, Artificial Sequence
  Description of Artificial Sequence: Synthetic oligonucleotide
aaauucagacauaugucuc

SEQ ID NO: 1864725 - RNA, 19 nt, Artificial Sequence
  Description of Artificial Sequence: Synthetic oligonucleotide
gauaccuauacuuucuaga

SEQ ID NO: 1864726 - RNA, 19 nt, Artificial Sequence
  Description of Artificial Sequence: Synthetic oligonucleotide
ucauaaccagcaauaagca

SEQ ID NO: 1864727 - RNA, 19 nt, Artificial Sequence
  Description of Artificial Sequence: Synthetic oligonucleotide
uuaauguuccauugguuca

SEQ ID NO: 1864728 - RNA, 19 nt, Artificial Sequence
  Description of Artificial Sequence: Synthetic oligonucleotide
uucuaaguacagauuacug

SEQ ID NO: 1864729 - RNA, 19 nt, Artificial Sequence
  Description of Artificial Sequence: Synthetic oligonucleotide
uauagauaccuauacuuuc

SEQ ID NO: 1864730 - RNA, 19 nt, Artificial Sequence
  Description of Artificial Sequence: Synthetic oligonucleotide
aggugaaacaauuuuauuu

SEQ ID NO: 1864731 - RNA, 19 nt, Artificial Sequence
  Description of Artificial Sequence: Synthetic oligonucleotide
aacaccauagggucuccgg

SEQ ID NO: 1864732 - RNA, 19 nt, Artificial Sequence
  Description of Artificial Sequence: Synthetic oligonucleotide
acuuuaggccaacuguggc

SEQ ID NO: 1864733 - RNA, 19 nt, Artificial Sequence
  Description of Artificial Sequence: Synthetic oligonucleotide
ugacuuuaggccaacugug

SEQ ID NO: 1864734 - RNA, 19 nt, Artificial Sequence
  Description of Artificial Sequence: Synthetic oligonucleotide
uggacugauuucuaaaaca

SEQ ID NO: 1864735 - RNA, 19 nt, Artificial Sequence
  Description of Artificial Sequence: Synthetic oligonucleotide
accuauacuuucuagaaaa

SEQ ID NO: 1864736 - RNA, 19 nt, Artificial Sequence
  Description of Artificial Sequence: Synthetic oligonucleotide
uaugguugucaacauggag

SEQ ID NO: 1864737 - RNA, 19 nt, Artificial Sequence
  Description of Artificial Sequence: Synthetic oligonucleotide
uugcacuccauaaauucag

SEQ ID NO: 1864738 - RNA, 19 nt, Artificial Sequence
  Description of Artificial Sequence: Synthetic oligonucleotide
ugugaaguugcuuggagaa

SEQ ID NO: 1864739 - RNA, 19 nt, Artificial Sequence
  Description of Artificial Sequence: Synthetic oligonucleotide
uagacauagcucuacaguc

SEQ ID NO: 1864740 - RNA, 19 nt, Artificial Sequence
  Description of Artificial Sequence: Synthetic oligonucleotide
aguacgagcugauugagaa

SEQ ID NO: 1864741 - RNA, 19 nt, Artificial Sequence
  Description of Artificial Sequence: Synthetic oligonucleotide
auuauguagacccuuucaa

SEQ ID NO: 1864742 - RNA, 19 nt, Artificial Sequence
  Description of Artificial Sequence: Synthetic oligonucleotide
aacagucuagcaucagcag

SEQ ID NO: 1864743 - RNA, 19 nt, Artificial Sequence
  Description of Artificial Sequence: Synthetic oligonucleotide
auauucaauuugaugaauc

SEQ ID NO: 1864744 - RNA, 19 nt, Artificial Sequence
  Description of Artificial Sequence: Synthetic oligonucleotide
auuacauaacagucuagca

SEQ ID NO: 1864745 - RNA, 19 nt, Artificial Sequence
  Description of Artificial Sequence: Synthetic oligonucleotide
aucauagauuguaaacucc

SEQ ID NO: 1864746 - RNA, 19 nt, Artificial Sequence
  Description of Artificial Sequence: Synthetic oligonucleotide
aaaaugcacccauuauaug

SEQ ID NO: 1864747 - RNA, 19 nt, Artificial Sequence
  Description of Artificial Sequence: Synthetic oligonucleotide
ugcaaguuccgacugugcc

SEQ ID NO: 1864748 - RNA, 19 nt, Artificial Sequence
  Description of Artificial Sequence: Synthetic oligonucleotide
caauaagcagcccaacacc

SEQ ID NO: 1864749 - RNA, 19 nt, Artificial Sequence
  Description of Artificial Sequence: Synthetic oligonucleotide
aagaaaaugcacccauuau

SEQ ID NO: 1864750 - RNA, 19 nt, Artificial Sequence
  Description of Artificial Sequence: Synthetic oligonucleotide
ggugaaacaauuuuauuuc

SEQ ID NO: 1864751 - RNA, 19 nt, Artificial Sequence
  Description of Artificial Sequence: Synthetic oligonucleotide
auguuuaaccagcucaucu

SEQ ID NO: 1864752 - RNA, 19 nt, Artificial Sequence
  Description of Artificial Sequence: Synthetic oligonucleotide
gguaaguacgagcugauug

SEQ ID NO: 1864753 - RNA, 19 nt, Artificial Sequence
  Description of Artificial Sequence: Synthetic oligonucleotide
ugcuccuacauccucauau

SEQ ID NO: 1864754 - RNA, 19 nt, Artificial Sequence
  Description of Artificial Sequence: Synthetic oligonucleotide
uccuacauccucauauccc

SEQ ID NO: 1864755 - RNA, 19 nt, Artificial Sequence
  Description of Artificial Sequence: Synthetic oligonucleotide
agcccaacaccauaggguc

SEQ ID NO: 1864756 - RNA, 19 nt, Artificial Sequence
  Description of Artificial Sequence: Synthetic oligonucleotide
cugauuucuaaaacauacc

SEQ ID NO: 1864757 - RNA, 19 nt, Artificial Sequence
  Description of Artificial Sequence: Synthetic oligonucleotide
aaacauugguauagauacc

SEQ ID NO: 1864758 - RNA, 19 nt, Artificial Sequence
  Description of Artificial Sequence: Synthetic oligonucleotide
uucggugaucgucagggag

SEQ ID NO: 1864759 - RNA, 19 nt, Artificial Sequence
  Description of Artificial Sequence: Synthetic oligonucleotide
gauuauguagacccuuuca

SEQ ID NO: 1864760 - RNA, 19 nt, Artificial Sequence
  Description of Artificial Sequence: Synthetic oligonucleotide
uguagacccuuucaaagaa

SEQ ID NO: 1864761 - RNA, 19 nt, Artificial Sequence
  Description of Artificial Sequence: Synthetic oligonucleotide
auaccuauacuuucuagaa

SEQ ID NO: 1864762 - RNA, 19 nt, Artificial Sequence
  Description of Artificial Sequence: Synthetic oligonucleotide
ugagaacgggcuccaauag

SEQ ID NO: 1864763 - RNA, 19 nt, Artificial Sequence
  Description of Artificial Sequence: Synthetic oligonucleotide
aacuacgguucggugaucg

SEQ ID NO: 1864764 - RNA, 19 nt, Artificial Sequence
  Description of Artificial Sequence: Synthetic oligonucleotide
cauaccaccccauacucug

SEQ ID NO: 1864765 - RNA, 19 nt, Artificial Sequence
  Description of Artificial Sequence: Synthetic oligonucleotide
aagacacuauuuuauucau

SEQ ID NO: 1864766 - RNA, 19 nt, Artificial Sequence
  Description of Artificial Sequence: Synthetic oligonucleotide
uuauguagacccuuucaaa

SEQ ID NO: 1864767 - RNA, 19 nt, Artificial Sequence
  Description of Artificial Sequence: Synthetic oligonucleotide
gaaacguucuuugugguca

SEQ ID NO: 1864768 - RNA, 19 nt, Artificial Sequence
  Description of Artificial Sequence: Synthetic oligonucleotide
cagauuacugucaccagug

SEQ ID NO: 1864769 - RNA, 19 nt, Artificial Sequence
  Description of Artificial Sequence: Synthetic oligonucleotide
uagcucuacagucaaagua

SEQ ID NO: 1864770 - RNA, 19 nt, Artificial Sequence
  Description of Artificial Sequence: Synthetic oligonucleotide
uguggcugaaccuuguuua

SEQ ID NO: 1864771 - RNA, 19 nt, Artificial Sequence
  Description of Artificial Sequence: Synthetic oligonucleotide
gacacuauuuuauucauau

SEQ ID NO: 1864772 - RNA, 19 nt, Artificial Sequence
  Description of Artificial Sequence: Synthetic oligonucleotide
gacugugcccucuucaaug

SEQ ID NO: 1864773 - RNA, 19 nt, Artificial Sequence
  Description of Artificial Sequence: Synthetic oligonucleotide
agauaccuauacuuucuag

SEQ ID NO: 1864774 - RNA, 19 nt, Artificial Sequence
  Description of Artificial Sequence: Synthetic oligonucleotide
uccauaaauucagacauau

SEQ ID NO: 1864775 - RNA, 19 nt, Artificial Sequence
  Description of Artificial Sequence: Synthetic oligonucleotide
gauaccaauaugguuguca

SEQ ID NO: 1864776 - RNA, 19 nt, Artificial Sequence
  Description of Artificial Sequence: Synthetic oligonucleotide
acagauuacugucaccagu

SEQ ID NO: 1864777 - RNA, 19 nt, Artificial Sequence
  Description of Artificial Sequence: Synthetic oligonucleotide
ugguauagauaccuauacu

SEQ ID NO: 1864778 - RNA, 19 nt, Artificial Sequence
  Description of Artificial Sequence: Synthetic oligonucleotide
uuuaggccaacuguggcug

SEQ ID NO: 1864779 - RNA, 19 nt, Artificial Sequence
  Description of Artificial Sequence: Synthetic oligonucleotide
guaaguacgagcugauuga

SEQ ID NO: 1864780 - RNA, 19 nt, Artificial Sequence
  Description of Artificial Sequence: Synthetic oligonucleotide
ucaagaccauccaggaaug

SEQ ID NO: 1864781 - RNA, 19 nt, Artificial Sequence
  Description of Artificial Sequence: Synthetic oligonucleotide
uguuuaaccagcucaucua

SEQ ID NO: 1864782 - RNA, 19 nt, Artificial Sequence
  Description of Artificial Sequence: Synthetic oligonucleotide
augguugucaacauggaga

SEQ ID NO: 1864783 - RNA, 19 nt, Artificial Sequence
  Description of Artificial Sequence: Synthetic oligonucleotide
aacgggcuccaauagacau

SEQ ID NO: 1864784 - RNA, 19 nt, Artificial Sequence
  Description of Artificial Sequence: Synthetic oligonucleotide
cauugcauauucaauuuga

SEQ ID NO: 1864785 - RNA, 19 nt, Artificial Sequence
  Description of Artificial Sequence: Synthetic oligonucleotide
cauaaccagcaauaagcag

SEQ ID NO: 1864786 - RNA, 19 nt, Artificial Sequence
  Description of Artificial Sequence: Synthetic oligonucleotide
uuugaugaauccugcccug

SEQ ID NO: 1864787 - RNA, 19 nt, Artificial Sequence
  Description of Artificial Sequence: Synthetic oligonucleotide
gucauacugguuucgaaac

SEQ ID NO: 1864788 - RNA, 19 nt, Artificial Sequence
  Description of Artificial Sequence: Synthetic oligonucleotide
uuagagacacaagacgaga

SEQ ID NO: 1864789 - RNA, 19 nt, Artificial Sequence
  Description of Artificial Sequence: Synthetic oligonucleotide
uacgguucggugaucguca

SEQ ID NO: 1864790 - RNA, 19 nt, Artificial Sequence
  Description of Artificial Sequence: Synthetic oligonucleotide
uucgaaacauggcuccggc

SEQ ID NO: 1864791 - RNA, 19 nt, Artificial Sequence
  Description of Artificial Sequence: Synthetic oligonucleotide
uaaaacauaccaccccaua

SEQ ID NO: 1864792 - RNA, 19 nt, Artificial Sequence
  Description of Artificial Sequence: Synthetic oligonucleotide
aaauuacauaacagucuag

SEQ ID NO: 1864793 - RNA, 19 nt, Artificial Sequence
  Description of Artificial Sequence: Synthetic oligonucleotide
ggcgcauaaaauuacauaa

SEQ ID NO: 1864794 - RNA, 19 nt, Artificial Sequence
  Description of Artificial Sequence: Synthetic oligonucleotide
aacacggacccaacuacgg

SEQ ID NO: 1864795 - RNA, 19 nt, Artificial Sequence
  Description of Artificial Sequence: Synthetic oligonucleotide
aaacguucuuuguggucag

SEQ ID NO: 1864796 - RNA, 19 nt, Artificial Sequence
  Description of Artificial Sequence: Synthetic oligonucleotide
agcaauaagcagcccaaca

SEQ ID NO: 1864797 - RNA, 19 nt, Artificial Sequence
  Description of Artificial Sequence: Synthetic oligonucleotide
auucaauuugaugaauccu

SEQ ID NO: 1864798 - RNA, 19 nt, Artificial Sequence
  Description of Artificial Sequence: Synthetic oligonucleotide
auuacugucaccaguguau

SEQ ID NO: 1864799 - RNA, 19 nt, Artificial Sequence
  Description of Artificial Sequence: Synthetic oligonucleotide
acagucuagcaucagcagu

SEQ ID NO: 1864800 - RNA, 19 nt, Artificial Sequence
  Description of Artificial Sequence: Synthetic oligonucleotide
gguucggugaucgucaggg

SEQ ID NO: 1864801 - RNA, 19 nt, Artificial Sequence
  Description of Artificial Sequence: Synthetic oligonucleotide
auguagacccuuucaaaga

SEQ ID NO: 1864802 - RNA, 19 nt, Artificial Sequence
  Description of Artificial Sequence: Synthetic oligonucleotide
uugagauaccaauaugguu

SEQ ID NO: 1864803 - RNA, 19 nt, Artificial Sequence
  Description of Artificial Sequence: Synthetic oligonucleotide
auaccaauaugguugucaa

SEQ ID NO: 1864804 - RNA, 19 nt, Artificial Sequence
  Description of Artificial Sequence: Synthetic oligonucleotide
caauugagauaccaauaug

SEQ ID NO: 1864805 - RNA, 19 nt, Artificial Sequence
  Description of Artificial Sequence: Synthetic oligonucleotide
cagucuagcaucagcaguc

SEQ ID NO: 1864806 - RNA, 19 nt, Artificial Sequence
  Description of Artificial Sequence: Synthetic oligonucleotide
uugagaacgggcuccaaua

SEQ ID NO: 1864807 - RNA, 19 nt, Artificial Sequence
  Description of Artificial Sequence: Synthetic oligonucleotide
ugguuucgaaacauggcuc

SEQ ID NO: 1864808 - RNA, 19 nt, Artificial Sequence
  Description of Artificial Sequence: Synthetic oligonucleotide
auuguaaacuccaagucuu

SEQ ID NO: 1864809 - RNA, 19 nt, Artificial Sequence
  Description of Artificial Sequence: Synthetic oligonucleotide
ugucaccaguguaugcucc

SEQ ID NO: 1864810 - RNA, 19 nt, Artificial Sequence
  Description of Artificial Sequence: Synthetic oligonucleotide
uacagauuacugucaccag

SEQ ID NO: 1864811 - RNA, 19 nt, Artificial Sequence
  Description of Artificial Sequence: Synthetic oligonucleotide
uaaguacgagcugauugag

SEQ ID NO: 1864812 - RNA, 19 nt, Artificial Sequence
  Description of Artificial Sequence: Synthetic oligonucleotide
acuccuggcgcauaaaauu

SEQ ID NO: 1864813 - RNA, 19 nt, Artificial Sequence
  Description of Artificial Sequence: Synthetic oligonucleotide
auagauaccuauacuuucu

SEQ ID NO: 1864814 - RNA, 19 nt, Artificial Sequence
  Description of Artificial Sequence: Synthetic oligonucleotide
gguuucgaaacauggcucc

SEQ ID NO: 1864815 - RNA, 19 nt, Artificial Sequence
  Description of Artificial Sequence: Synthetic oligonucleotide
uaccuauacuuucuagaaa

SEQ ID NO: 1864816 - RNA, 19 nt, Artificial Sequence
  Description of Artificial Sequence: Synthetic oligonucleotide
gaacacggacccaacuacg

SEQ ID NO: 1864817 - RNA, 19 nt, Artificial Sequence
  Description of Artificial Sequence: Synthetic oligonucleotide
aguaguuagcagauggaca

SEQ ID NO: 1864818 - RNA, 19 nt, Artificial Sequence
  Description of Artificial Sequence: Synthetic oligonucleotide
gugaaacaauuuuauuuca

SEQ ID NO: 1864819 - RNA, 19 nt, Artificial Sequence
  Description of Artificial Sequence: Synthetic oligonucleotide
gcaauaagcagcccaacac

SEQ ID NO: 1864820 - RNA, 19 nt, Artificial Sequence
  Description of Artificial Sequence: Synthetic oligonucleotide
ucgaaacauggcuccggcg

SEQ ID NO: 1864821 - RNA, 19 nt, Artificial Sequence
  Description of Artificial Sequence: Synthetic oligonucleotide
uuugacggcggcagcgcag

SEQ ID NO: 1864822 - RNA, 19 nt, Artificial Sequence
  Description of Artificial Sequence: Synthetic oligonucleotide
uguaugcuccuacauccuc

SEQ ID NO: 1864823 - RNA, 19 nt, Artificial Sequence
  Description of Artificial Sequence: Synthetic oligonucleotide
aaaugauuauguagacccu

SEQ ID NO: 1864824 - RNA, 19 nt, Artificial Sequence
  Description of Artificial Sequence: Synthetic oligonucleotide
caauaugguugucaacaug

SEQ ID NO: 1864825 - RNA, 19 nt, Artificial Sequence
  Description of Artificial Sequence: Synthetic oligonucleotide
aucaucauaaccagcaaua

SEQ ID NO: 1864826 - RNA, 19 nt, Artificial Sequence
  Description of Artificial Sequence: Synthetic oligonucleotide
uguguccuuuaucacuuaa

SEQ ID NO: 1864827 - RNA, 19 nt, Artificial Sequence
  Description of Artificial Sequence: Synthetic oligonucleotide
ucagacccgcaauugagau

SEQ ID NO: 1864828 - RNA, 19 nt, Artificial Sequence
  Description of Artificial Sequence: Synthetic oligonucleotide
cuccaauagacauagcucu

SEQ ID NO: 1864829 - RNA, 19 nt, Artificial Sequence
  Description of Artificial Sequence: Synthetic oligonucleotide
auugagaacgggcuccaau

SEQ ID NO: 1864830 - RNA, 19 nt, Artificial Sequence
  Description of Artificial Sequence: Synthetic oligonucleotide
uggcgcauaaaauuacaua

SEQ ID NO: 1864831 - RNA, 19 nt, Artificial Sequence
  Description of Artificial Sequence: Synthetic oligonucleotide
auagcucuacagucaaagu

SEQ ID NO: 1864832 - RNA, 19 nt, Artificial Sequence
  Description of Artificial Sequence: Synthetic oligonucleotide
ugugcccucuucaaugcaa

SEQ ID NO: 1864833 - RNA, 19 nt, Artificial Sequence
  Description of Artificial Sequence: Synthetic oligonucleotide
ucaaugcaaccaacacugc

SEQ ID NO: 1864834 - RNA, 19 nt, Artificial Sequence
  Description of Artificial Sequence: Synthetic oligonucleotide
uccucauaucccugugucc

SEQ ID NO: 1864835 - RNA, 19 nt, Artificial Sequence
  Description of Artificial Sequence: Synthetic oligonucleotide
ugcacuccauaaauucaga

SEQ ID NO: 1864836 - RNA, 19 nt, Artificial Sequence
  Description of Artificial Sequence: Synthetic oligonucleotide
aggccugccgaguuuugac

SEQ ID NO: 1864837 - RNA, 19 nt, Artificial Sequence
  Description of Artificial Sequence: Synthetic oligonucleotide
uccgacugugcccucuuca

SEQ ID NO: 1864838 - RNA, 19 nt, Artificial Sequence
  Description of Artificial Sequence: Synthetic oligonucleotide
gguauagauaccuauacuu

SEQ ID NO: 1864839 - RNA, 19 nt, Artificial Sequence
  Description of Artificial Sequence: Synthetic oligonucleotide
ggaauggagacacaucauc

SEQ ID NO: 1864840 - RNA, 19 nt, Artificial Sequence
  Description of Artificial Sequence: Synthetic oligonucleotide
ugugagggcccauaucauc

SEQ ID NO: 1864841 - RNA, 19 nt, Artificial Sequence
  Description of Artificial Sequence: Synthetic oligonucleotide
gcgacaaucagacacagua

SEQ ID NO: 1864842 - RNA, 19 nt, Artificial Sequence
  Description of Artificial Sequence: Synthetic oligonucleotide
uuacugucaccaguguaug

SEQ ID NO: 1864843 - RNA, 19 nt, Artificial Sequence
  Description of Artificial Sequence: Synthetic oligonucleotide
gagcugauugagaacgggc

SEQ ID NO: 1864844 - RNA, 19 nt, Artificial Sequence
  Description of Artificial Sequence: Synthetic oligonucleotide
uagauaccuauacuuucua

SEQ ID NO: 1864845 - RNA, 19 nt, Artificial Sequence
  Description of Artificial Sequence: Synthetic oligonucleotide
caguagccgacccaggaac

SEQ ID NO: 1864846 - RNA, 19 nt, Artificial Sequence
  Description of Artificial Sequence: Synthetic oligonucleotide
aaguggucugucaaauaca

SEQ ID NO: 1864847 - RNA, 19 nt, Artificial Sequence
  Description of Artificial Sequence: Synthetic oligonucleotide
ggccauaccgcuguguugg

SEQ ID NO: 1864848 - RNA, 19 nt, Artificial Sequence
  Description of Artificial Sequence: Synthetic oligonucleotide
uccggcguggcgacaauca

SEQ ID NO: 1864849 - RNA, 19 nt, Artificial Sequence
  Description of Artificial Sequence: Synthetic oligonucleotide
uccuggcgcauaaaauuac

SEQ ID NO: 1864850 - RNA, 19 nt, Artificial Sequence
  Description of Artificial Sequence: Synthetic oligonucleotide
gacauagcucuacagucaa

SEQ ID NO: 1864851 - RNA, 19 nt, Artificial Sequence
  Description of Artificial Sequence: Synthetic oligonucleotide
uugguucuaaguacagauu

SEQ ID NO: 1864852 - RNA, 19 nt, Artificial Sequence
  Description of Artificial Sequence: Synthetic oligonucleotide
uaccaacaauuccaaugga

SEQ ID NO: 1864853 - RNA, 19 nt, Artificial Sequence
  Description of Artificial Sequence: Synthetic oligonucleotide
uggaaaaugugagggccca

SEQ ID NO: 1864854 - RNA, 19 nt, Artificial Sequence
  Description of Artificial Sequence: Synthetic oligonucleotide
acauaugucucuccaggua

SEQ ID NO: 1864855 - RNA, 19 nt, Artificial Sequence
  Description of Artificial Sequence: Synthetic oligonucleotide
uccaauagacauagcucua

SEQ ID NO: 1864856 - RNA, 19 nt, Artificial Sequence
  Description of Artificial Sequence: Synthetic oligonucleotide
uuuugacggcggcagcgca

SEQ ID NO: 1864857 - RNA, 19 nt, Artificial Sequence
  Description of Artificial Sequence: Synthetic oligonucleotide
aggaacacggacccaacua

SEQ ID NO: 1864858 - RNA, 19 nt, Artificial Sequence
  Description of Artificial Sequence: Synthetic oligonucleotide
ugaucgucagggaggccug

SEQ ID NO: 1864859 - RNA, 19 nt, Artificial Sequence
  Description of Artificial Sequence: Synthetic oligonucleotide
uggacagguuuggaaaaug

SEQ ID NO: 1864860 - RNA, 19 nt, Artificial Sequence
  Description of Artificial Sequence: Synthetic oligonucleotide
cuguugguucuaaguacag

SEQ ID NO: 1864861 - RNA, 19 nt, Artificial Sequence
  Description of Artificial Sequence: Synthetic oligonucleotide
agcugauugagaacgggcu

SEQ ID NO: 1864862 - RNA, 19 nt, Artificial Sequence
  Description of Artificial Sequence: Synthetic oligonucleotide
ugccgaguuuugacggcgg

SEQ ID NO: 1864863 - RNA, 19 nt, Artificial Sequence
  Description of Artificial Sequence: Synthetic oligonucleotide
auugguauagauaccuaua

SEQ ID NO: 1864864 - RNA, 19 nt, Artificial Sequence
  Description of Artificial Sequence: Synthetic oligonucleotide
ggcccauaucaucauaacc

SEQ ID NO: 1864865 - RNA, 19 nt, Artificial Sequence
  Description of Artificial Sequence: Synthetic oligonucleotide
ggaacacggacccaacuac

SEQ ID NO: 1864866 - RNA, 19 nt, Artificial Sequence
  Description of Artificial Sequence: Synthetic oligonucleotide
uaccaccccauacucugca

SEQ ID NO: 1864867 - RNA, 19 nt, Artificial Sequence
  Description of Artificial Sequence: Synthetic oligonucleotide
guuucgaaacauggcuccg

SEQ ID NO: 1864868 - RNA, 19 nt, Artificial Sequence
  Description of Artificial Sequence: Synthetic oligonucleotide
cuguaaagacacuauuuua

SEQ ID NO: 1864869 - RNA, 19 nt, Artificial Sequence
  Description of Artificial Sequence: Synthetic oligonucleotide
guugucaacauggagaauu

SEQ ID NO: 1864870 - RNA, 19 nt, Artificial Sequence
  Description of Artificial Sequence: Synthetic oligonucleotide
uguaaacuccaagucuuua

SEQ ID NO: 1864871 - RNA, 19 nt, Artificial Sequence
  Description of Artificial Sequence: Synthetic oligonucleotide
gugagcugcaaguuccgac

SEQ ID NO: 1864872 - RNA, 19 nt, Artificial Sequence
  Description of Artificial Sequence: Synthetic oligonucleotide
auaccgcuguguugggauc

SEQ ID NO: 1864873 - RNA, 19 nt, Artificial Sequence
  Description of Artificial Sequence: Synthetic oligonucleotide
agacauagcucuacaguca

SEQ ID NO: 1864874 - RNA, 19 nt, Artificial Sequence
  Description of Artificial Sequence: Synthetic oligonucleotide
cguggcgacaaucagacac

SEQ ID NO: 1864875 - RNA, 19 nt, Artificial Sequence
  Description of Artificial Sequence: Synthetic oligonucleotide
uuguaaacuccaagucuuu

SEQ ID NO: 1864876 - RNA, 19 nt, Artificial Sequence
  Description of Artificial Sequence: Synthetic oligonucleotide
uguuucucucaaggcacgc

SEQ ID NO: 1864877 - RNA, 19 nt, Artificial Sequence
  Description of Artificial Sequence: Synthetic oligonucleotide
gcaaguuccgacugugccc

SEQ ID NO: 1864878 - RNA, 19 nt, Artificial Sequence
  Description of Artificial Sequence: Synthetic oligonucleotide
cugugaaguugcuuggaga

SEQ ID NO: 1864879 - RNA, 19 nt, Artificial Sequence
  Description of Artificial Sequence: Synthetic oligonucleotide
cauagauuguaaacuccaa

SEQ ID NO: 1864880 - RNA, 19 nt, Artificial Sequence
  Description of Artificial Sequence: Synthetic oligonucleotide
caauagacauagcucuaca

SEQ ID NO: 1864881 - RNA, 19 nt, Artificial Sequence
  Description of Artificial Sequence: Synthetic oligonucleotide
uugaugaauccugcccuga

SEQ ID NO: 1864882 - RNA, 19 nt, Artificial Sequence
  Description of Artificial Sequence: Synthetic oligonucleotide
ugauugagaacgggcucca

SEQ ID NO: 1864883 - RNA, 19 nt, Artificial Sequence
  Description of Artificial Sequence: Synthetic oligonucleotide
gacauaugucucuccaggu

SEQ ID NO: 1864884 - RNA, 19 nt, Artificial Sequence
  Description of Artificial Sequence: Synthetic oligonucleotide
aaguacgagcugauugaga

SEQ ID NO: 1864885 - RNA, 19 nt, Artificial Sequence
  Description of Artificial Sequence: Synthetic oligonucleotide
guguuucucucaaggcacg

SEQ ID NO: 1864886 - RNA, 19 nt, Artificial Sequence
  Description of Artificial Sequence: Synthetic oligonucleotide
acggacccaacuacgguuc

SEQ ID NO: 1864887 - RNA, 19 nt, Artificial Sequence
  Description of Artificial Sequence: Synthetic oligonucleotide
gcucaucuaaauugcacuc

SEQ ID NO: 1864888 - RNA, 19 nt, Artificial Sequence
  Description of Artificial Sequence: Synthetic oligonucleotide
gcauauucaauuugaugaa

SEQ ID NO: 1864889 - RNA, 19 nt, Artificial Sequence
  Description of Artificial Sequence: Synthetic oligonucleotide
cauaacagucuagcaucag

SEQ ID NO: 1864890 - RNA, 19 nt, Artificial Sequence
  Description of Artificial Sequence: Synthetic oligonucleotide
cugcaaguuccgacugugc

SEQ ID NO: 1864891 - RNA, 19 nt, Artificial Sequence
  Description of Artificial Sequence: Synthetic oligonucleotide
agcagucagacccgcaauu

SEQ ID NO: 1864892 - RNA, 19 nt, Artificial Sequence
  Description of Artificial Sequence: Synthetic oligonucleotide
aggaggugaaacaauuuua

SEQ ID NO: 1864893 - RNA, 19 nt, Artificial Sequence
  Description of Artificial Sequence: Synthetic oligonucleotide
ggcuccaauagacauagcu

SEQ ID NO: 1864894 - RNA, 19 nt, Artificial Sequence
  Description of Artificial Sequence: Synthetic oligonucleotide
gccugccgaguuuugacgg

SEQ ID NO: 1864895 - RNA, 19 nt, Artificial Sequence
  Description of Artificial Sequence: Synthetic oligonucleotide
cauugguauagauaccuau

SEQ ID NO: 1864896 - RNA, 19 nt, Artificial Sequence
  Description of Artificial Sequence: Synthetic oligonucleotide
acacggacccaacuacggu

SEQ ID NO: 1864897 - RNA, 19 nt, Artificial Sequence
  Description of Artificial Sequence: Synthetic oligonucleotide
agccgacccaggaacacgg

SEQ ID NO: 1864898 - RNA, 19 nt, Artificial Sequence
  Description of Artificial Sequence: Synthetic oligonucleotide
cacuuaauguuccauuggu

SEQ ID NO: 1864899 - RNA, 19 nt, Artificial Sequence
  Description of Artificial Sequence: Synthetic oligonucleotide
cugucaccaguguaugcuc

SEQ ID NO: 1864900 - RNA, 19 nt, Artificial Sequence
  Description of Artificial Sequence: Synthetic oligonucleotide
uuuugacuuuaggccaacu

SEQ ID NO: 1864901 - RNA, 19 nt, Artificial Sequence
  Description of Artificial Sequence: Synthetic oligonucleotide
acacaagacgagacacagg

SEQ ID NO: 1864902 - RNA, 19 nt, Artificial Sequence
  Description of Artificial Sequence: Synthetic oligonucleotide
ccauaucaucauaaccagc

SEQ ID NO: 1864903 - RNA, 19 nt, Artificial Sequence
  Description of Artificial Sequence: Synthetic oligonucleotide
cuacgguucggugaucguc

SEQ ID NO: 1864904 - RNA, 19 nt, Artificial Sequence
  Description of Artificial Sequence: Synthetic oligonucleotide
guacgagcugauugagaac

SEQ ID NO: 1864905 - RNA, 19 nt, Artificial Sequence
  Description of Artificial Sequence: Synthetic oligonucleotide
ggucugucaaauacaaauc

SEQ ID NO: 1864906 - RNA, 19 nt, Artificial Sequence
  Description of Artificial Sequence: Synthetic oligonucleotide
cugccgaguuuugacggcg

SEQ ID NO: 1864907 - RNA, 19 nt, Artificial Sequence
  Description of Artificial Sequence: Synthetic oligonucleotide
guuuugacggcggcagcgc

SEQ ID NO: 1864908 - RNA, 19 nt, Artificial Sequence
  Description of Artificial Sequence: Synthetic oligonucleotide
cuuuaggccaacuguggcu

SEQ ID NO: 1864909 - RNA, 19 nt, Artificial Sequence
  Description of Artificial Sequence: Synthetic oligonucleotide
cgcauaaaauuacauaaca

SEQ ID NO: 1864910 - RNA, 19 nt, Artificial Sequence
  Description of Artificial Sequence: Synthetic oligonucleotide
cauguuuaaccagcucauc

SEQ ID NO: 1864911 - RNA, 19 nt, Artificial Sequence
  Description of Artificial Sequence: Synthetic oligonucleotide
ggccugccgaguuuugacg

SEQ ID NO: 1864912 - RNA, 19 nt, Artificial Sequence
  Description of Artificial Sequence: Synthetic oligonucleotide
aggcacgcagaccauguuu

SEQ ID NO: 1864913 - RNA, 19 nt, Artificial Sequence
  Description of Artificial Sequence: Synthetic oligonucleotide
caagaccauccaggaaugg

SEQ ID NO: 1864914 - RNA, 19 nt, Artificial Sequence
  Description of Artificial Sequence: Synthetic oligonucleotide
caccaguguaugcuccuac

SEQ ID NO: 1864915 - RNA, 19 nt, Artificial Sequence
  Description of Artificial Sequence: Synthetic oligonucleotide
ggcguggcgacaaucagac

SEQ ID NO: 1864916 - RNA, 19 nt, Artificial Sequence
  Description of Artificial Sequence: Synthetic oligonucleotide
uggcugaaccuuguuuaac

SEQ ID NO: 1864917 - RNA, 19 nt, Artificial Sequence
  Description of Artificial Sequence: Synthetic oligonucleotide
augauuauguagacccuuu

SEQ ID NO: 1864918 - RNA, 19 nt, Artificial Sequence
  Description of Artificial Sequence: Synthetic oligonucleotide
cuccuggcgcauaaaauua

SEQ ID NO: 1864919 - RNA, 19 nt, Artificial Sequence
  Description of Artificial Sequence: Synthetic oligonucleotide
uaccgcuguguugggaucu

SEQ ID NO: 1864920 - RNA, 19 nt, Artificial Sequence
  Description of Artificial Sequence: Synthetic oligonucleotide
auaucccuguguccuuuau

SEQ ID NO: 1864921 - RNA, 19 nt, Artificial Sequence
  Description of Artificial Sequence: Synthetic oligonucleotide
acccaacuacgguucggug

SEQ ID NO: 1864922 - RNA, 19 nt, Artificial Sequence
  Description of Artificial Sequence: Synthetic oligonucleotide
acuacgguucggugaucgu

SEQ ID NO: 1864923 - RNA, 19 nt, Artificial Sequence
  Description of Artificial Sequence: Synthetic oligonucleotide
acccgcaauugagauacca

SEQ ID NO: 1864924 - RNA, 19 nt, Artificial Sequence
  Description of Artificial Sequence: Synthetic oligonucleotide
gcugauugagaacgggcuc

SEQ ID NO: 1864925 - RNA, 19 nt, Artificial Sequence
  Description of Artificial Sequence: Synthetic oligonucleotide
agucuagcaucagcaguca

SEQ ID NO: 1864926 - RNA, 19 nt, Artificial Sequence
  Description of Artificial Sequence: Synthetic oligonucleotide
cagcccaacaccauagggu

SEQ ID NO: 1864927 - RNA, 19 nt, Artificial Sequence
  Description of Artificial Sequence: Synthetic oligonucleotide
acauaccaccccauacucu

SEQ ID NO: 1864928 - RNA, 19 nt, Artificial Sequence
  Description of Artificial Sequence: Synthetic oligonucleotide
gugaucgucagggaggccu

SEQ ID NO: 1864929 - RNA, 19 nt, Artificial Sequence
  Description of Artificial Sequence: Synthetic oligonucleotide
acgguucggugaucgucag

SEQ ID NO: 1864930 - RNA, 19 nt, Artificial Sequence
  Description of Artificial Sequence: Synthetic oligonucleotide
gaggugaaacaauuuuauu

SEQ ID NO: 1864931 - RNA, 19 nt, Artificial Sequence
  Description of Artificial Sequence: Synthetic oligonucleotide
ucauaucccuguguccuuu

SEQ ID NO: 1864932 - RNA, 19 nt, Artificial Sequence
  Description of Artificial Sequence: Synthetic oligonucleotide
caacaccauagggucuccg

SEQ ID NO: 1864933 - RNA, 19 nt, Artificial Sequence
  Description of Artificial Sequence: Synthetic oligonucleotide
aggccaacuguggcugaac

SEQ ID NO: 1864934 - RNA, 19 nt, Artificial Sequence
  Description of Artificial Sequence: Synthetic oligonucleotide
cgacaaucagacacaguag

SEQ ID NO: 1864935 - RNA, 19 nt, Artificial Sequence
  Description of Artificial Sequence: Synthetic oligonucleotide
aguagccgacccaggaaca

SEQ ID NO: 1864936 - RNA, 19 nt, Artificial Sequence
  Description of Artificial Sequence: Synthetic oligonucleotide
acauggcuccggcguggcg

SEQ ID NO: 1864937 - RNA, 19 nt, Artificial Sequence
  Description of Artificial Sequence: Synthetic oligonucleotide
gaacgggcuccaauagaca

SEQ ID NO: 1864938 - RNA, 19 nt, Artificial Sequence
  Description of Artificial Sequence: Synthetic oligonucleotide
cauaccgcuguguugggau

SEQ ID NO: 1864939 - RNA, 19 nt, Artificial Sequence
  Description of Artificial Sequence: Synthetic oligonucleotide
cauggcuccggcguggcga

SEQ ID NO: 1864940 - RNA, 19 nt, Artificial Sequence
  Description of Artificial Sequence: Synthetic oligonucleotide
caauggaaacguucuuugu

SEQ ID NO: 1864941 - RNA, 19 nt, Artificial Sequence
  Description of Artificial Sequence: Synthetic oligonucleotide
cauacugguuucgaaacau

SEQ ID NO: 1864942 - RNA, 19 nt, Artificial Sequence
  Description of Artificial Sequence: Synthetic oligonucleotide
aggaauggagacacaucau

SEQ ID NO: 1864943 - RNA, 19 nt, Artificial Sequence
  Description of Artificial Sequence: Synthetic oligonucleotide
guagccgacccaggaacac

SEQ ID NO: 1864944 - RNA, 19 nt, Artificial Sequence
  Description of Artificial Sequence: Synthetic oligonucleotide
aacacuccuggcgcauaaa

SEQ ID NO: 1864945 - RNA, 19 nt, Artificial Sequence
  Description of Artificial Sequence: Synthetic oligonucleotide
aguuccgacugugcccucu

SEQ ID NO: 1864946 - RNA, 19 nt, Artificial Sequence
  Description of Artificial Sequence: Synthetic oligonucleotide
ggacugauuucuaaaacau

SEQ ID NO: 1864947 - RNA, 19 nt, Artificial Sequence
  Description of Artificial Sequence: Synthetic oligonucleotide
ggaggugaaacaauuuuau

SEQ ID NO: 1864948 - RNA, 19 nt, Artificial Sequence
  Description of Artificial Sequence: Synthetic oligonucleotide
caaguuccgacugugcccu

SEQ ID NO: 1864949 - RNA, 19 nt, Artificial Sequence
  Description of Artificial Sequence: Synthetic oligonucleotide
cuuguuuaacagcuuccau

SEQ ID NO: 1864950 - RNA, 19 nt, Artificial Sequence
  Description of Artificial Sequence: Synthetic oligonucleotide
ccagguaaguacgagcuga

SEQ ID NO: 1864951 - RNA, 19 nt, Artificial Sequence
  Description of Artificial Sequence: Synthetic oligonucleotide
augucucuccagguaagua

SEQ ID NO: 1864952 - RNA, 19 nt, Artificial Sequence
  Description of Artificial Sequence: Synthetic oligonucleotide
cauauucaauuugaugaau

SEQ ID NO: 1864953 - RNA, 19 nt, Artificial Sequence
  Description of Artificial Sequence: Synthetic oligonucleotide
acauugguauagauaccua

SEQ ID NO: 1864954 - RNA, 19 nt, Artificial Sequence
  Description of Artificial Sequence: Synthetic oligonucleotide
guagacccuuucaaagaaa

SEQ ID NO: 1864955 - RNA, 19 nt, Artificial Sequence
  Description of Artificial Sequence: Synthetic oligonucleotide
caaggcacgcagaccaugu

SEQ ID NO: 1864956 - RNA, 19 nt, Artificial Sequence
  Description of Artificial Sequence: Synthetic oligonucleotide
uuccgacugugcccucuuc

SEQ ID NO: 1864957 - RNA, 19 nt, Artificial Sequence
  Description of Artificial Sequence: Synthetic oligonucleotide
gacccaacuacgguucggu

SEQ ID NO: 1864958 - RNA, 19 nt, Artificial Sequence
  Description of Artificial Sequence: Synthetic oligonucleotide
uaggccaacuguggcugaa

SEQ ID NO: 1864959 - RNA, 19 nt, Artificial Sequence
  Description of Artificial Sequence: Synthetic oligonucleotide
gaggccugccgaguuuuga

SEQ ID NO: 1864960 - RNA, 19 nt, Artificial Sequence
  Description of Artificial Sequence: Synthetic oligonucleotide
caccccauacucugcagcu

SEQ ID NO: 1864961 - RNA, 19 nt, Artificial Sequence
  Description of Artificial Sequence: Synthetic oligonucleotide
ggacccaacuacgguucgg

SEQ ID NO: 1864962 - RNA, 19 nt, Artificial Sequence
  Description of Artificial Sequence: Synthetic oligonucleotide
ccugccgaguuuugacggc

SEQ ID NO: 1864963 - RNA, 19 nt, Artificial Sequence
  Description of Artificial Sequence: Synthetic oligonucleotide
uccggccauaccgcugugu

SEQ ID NO: 1864964 - RNA, 19 nt, Artificial Sequence
  Description of Artificial Sequence: Synthetic oligonucleotide
augugagggcccauaucau

SEQ ID NO: 1864965 - RNA, 19 nt, Artificial Sequence
  Description of Artificial Sequence: Synthetic oligonucleotide
agguaaguacgagcugauu

SEQ ID NO: 1864966 - RNA, 19 nt, Artificial Sequence
  Description of Artificial Sequence: Synthetic oligonucleotide
cacuccuggcgcauaaaau

SEQ ID NO: 1864967 - RNA, 19 nt, Artificial Sequence
  Description of Artificial Sequence: Synthetic oligonucleotide
gccgaguuuugacggcggc

SEQ ID NO: 1864968 - RNA, 19 nt, Artificial Sequence
  Description of Artificial Sequence: Synthetic oligonucleotide
cccaacaccauagggucuc

SEQ ID NO: 1864969 - RNA, 19 nt, Artificial Sequence
  Description of Artificial Sequence: Synthetic oligonucleotide
ggcacgcagaccauguuua

SEQ ID NO: 1864970 - RNA, 19 nt, Artificial Sequence
  Description of Artificial Sequence: Synthetic oligonucleotide
cgagcugauugagaacggg

SEQ ID NO: 1864971 - RNA, 19 nt, Artificial Sequence
  Description of Artificial Sequence: Synthetic oligonucleotide
cacggacccaacuacgguu

SEQ ID NO: 1864972 - RNA, 19 nt, Artificial Sequence
  Description of Artificial Sequence: Synthetic oligonucleotide
cgagacacaggaagugguc

SEQ ID NO: 1864973 - RNA, 19 nt, Artificial Sequence
  Description of Artificial Sequence: Synthetic oligonucleotide
gauugagaacgggcuccaa

SEQ ID NO: 1864974 - RNA, 19 nt, Artificial Sequence
  Description of Artificial Sequence: Synthetic oligonucleotide
accgcuguguugggaucug

SEQ ID NO: 1864975 - RNA, 19 nt, Artificial Sequence
  Description of Artificial Sequence: Synthetic oligonucleotide
cagacccgcaauugagaua

SEQ ID NO: 1864976 - RNA, 19 nt, Artificial Sequence
  Description of Artificial Sequence: Synthetic oligonucleotide
acauagcucuacagucaaa

SEQ ID NO: 1864977 - RNA, 19 nt, Artificial Sequence
  Description of Artificial Sequence: Synthetic oligonucleotide
cgcaauugagauaccaaua

SEQ ID NO: 1864978 - RNA, 19 nt, Artificial Sequence
  Description of Artificial Sequence: Synthetic oligonucleotide
guguccuuuaucacuuaau

SEQ ID NO: 1864979 - RNA, 19 nt, Artificial Sequence
  Description of Artificial Sequence: Synthetic oligonucleotide
gccauaccgcuguguuggg

SEQ ID NO: 1864980 - RNA, 19 nt, Artificial Sequence
  Description of Artificial Sequence: Synthetic oligonucleotide
ccgacccaggaacacggac

SEQ ID NO: 1864981 - RNA, 19 nt, Artificial Sequence
  Description of Artificial Sequence: Synthetic oligonucleotide
ccaggaacacggacccaac

SEQ ID NO: 1864982 - RNA, 19 nt, Artificial Sequence
  Description of Artificial Sequence: Synthetic oligonucleotide
cucuacagucaaaguaguu

SEQ ID NO: 1864983 - RNA, 19 nt, Artificial Sequence
  Description of Artificial Sequence: Synthetic oligonucleotide
cccgcaauugagauaccaa

SEQ ID NO: 1864984 - RNA, 19 nt, Artificial Sequence
  Description of Artificial Sequence: Synthetic oligonucleotide
cugggucuugcuuccaauu

SEQ ID NO: 1864985 - RNA, 19 nt, Artificial Sequence
  Description of Artificial Sequence: Synthetic oligonucleotide
caggaacacggacccaacu

SEQ ID NO: 1864986 - RNA, 19 nt, Artificial Sequence
  Description of Artificial Sequence: Synthetic oligonucleotide
cagguaaguacgagcugau

SEQ ID NO: 1864987 - RNA, 19 nt, Artificial Sequence
  Description of Artificial Sequence: Synthetic oligonucleotide
augcuccuacauccucaua

SEQ ID NO: 1864988 - RNA, 19 nt, Artificial Sequence
  Description of Artificial Sequence: Synthetic oligonucleotide
ccgcaauugagauaccaau

SEQ ID NO: 1864989 - RNA, 19 nt, Artificial Sequence
  Description of Artificial Sequence: Synthetic oligonucleotide
ccaacuacgguucggugau

SEQ ID NO: 1864990 - RNA, 19 nt, Artificial Sequence
  Description of Artificial Sequence: Synthetic oligonucleotide
gacccgcaauugagauacc

SEQ ID NO: 1864991 - RNA, 19 nt, Artificial Sequence
  Description of Artificial Sequence: Synthetic oligonucleotide
cuccggcguggcgacaauc

SEQ ID NO: 1864992 - RNA, 19 nt, Artificial Sequence
  Description of Artificial Sequence: Synthetic oligonucleotide
ggugagcugcaaguuccga

SEQ ID NO: 1864993 - RNA, 19 nt, Artificial Sequence
  Description of Artificial Sequence: Synthetic oligonucleotide
cauagggucuccggccaua

SEQ ID NO: 1864994 - RNA, 19 nt, Artificial Sequence
  Description of Artificial Sequence: Synthetic oligonucleotide
cuguguccuuuaucacuua

SEQ ID NO: 1864995 - RNA, 19 nt, Artificial Sequence
  Description of Artificial Sequence: Synthetic oligonucleotide
guuagcagauggacagguu

SEQ ID NO: 1864996 - RNA, 19 nt, Artificial Sequence
  Description of Artificial Sequence: Synthetic oligonucleotide
caacuacgguucggugauc

SEQ ID NO: 1864997 - RNA, 19 nt, Artificial Sequence
  Description of Artificial Sequence: Synthetic oligonucleotide
ccgacugugcccucuucaa

SEQ ID NO: 1864998 - RNA, 19 nt, Artificial Sequence
  Description of Artificial Sequence: Synthetic oligonucleotide
gcacgcagaccauguuuaa

SEQ ID NO: 1864999 - RNA, 19 nt, Artificial Sequence
  Description of Artificial Sequence: Synthetic oligonucleotide
cggacccaacuacgguucg

SEQ ID NO: 1865000 - RNA, 19 nt, Artificial Sequence
  Description of Artificial Sequence: Synthetic oligonucleotide
cucaaggcacgcagaccau

SEQ ID NO: 1865001 - RNA, 19 nt, Artificial Sequence
  Description of Artificial Sequence: Synthetic oligonucleotide
cagcagucagacccgcaau

SEQ ID NO: 1865002 - RNA, 19 nt, Artificial Sequence
  Description of Artificial Sequence: Synthetic oligonucleotide
ggugaucgucagggaggcc

SEQ ID NO: 1865003 - RNA, 19 nt, Artificial Sequence
  Description of Artificial Sequence: Synthetic oligonucleotide
ggaggccugccgaguuuug

SEQ ID NO: 1865004 - RNA, 19 nt, Artificial Sequence
  Description of Artificial Sequence: Synthetic oligonucleotide
guuccgacugugcccucuu

SEQ ID NO: 1865005 - RNA, 19 nt, Artificial Sequence
  Description of Artificial Sequence: Synthetic oligonucleotide
cggccauaccgcuguguug

SEQ ID NO: 1865006 - RNA, 19 nt, Artificial Sequence
  Description of Artificial Sequence: Synthetic oligonucleotide
cgguucggugaucgucagg

SEQ ID NO: 1865007 - RNA, 19 nt, Artificial Sequence
  Description of Artificial Sequence: Synthetic oligonucleotide
ccgcuguguugggaucugg

SEQ ID NO: 1865008 - RNA, 19 nt, Artificial Sequence
  Description of Artificial Sequence: Synthetic oligonucleotide
ggcuccggcguggcgacaa

SEQ ID NO: 1865009 - RNA, 19 nt, Artificial Sequence
  Description of Artificial Sequence: Synthetic oligonucleotide
ccauaccgcuguguuggga

SEQ ID NO: 1865010 - RNA, 19 nt, Artificial Sequence
  Description of Artificial Sequence: Synthetic oligonucleotide
gcguggcgacaaucagaca

SEQ ID NO: 1865011 - RNA, 19 nt, Artificial Sequence
  Description of Artificial Sequence: Synthetic oligonucleotide
gggcuccaauagacauagc

SEQ ID NO: 1865012 - RNA, 19 nt, Artificial Sequence
  Description of Artificial Sequence: Synthetic oligonucleotide
ggcgacaaucagacacagu

SEQ ID NO: 1865013 - RNA, 19 nt, Artificial Sequence
  Description of Artificial Sequence: Synthetic oligonucleotide
ccggccauaccgcuguguu

SEQ ID NO: 1865014 - RNA, 19 nt, Artificial Sequence
  Description of Artificial Sequence: Synthetic oligonucleotide
gccgacccaggaacacgga

SEQ ID NO: 1865015 - RNA, 19 nt, Artificial Sequence
  Description of Artificial Sequence: Synthetic oligonucleotide
gcuccggcguggcgacaau

SEQ ID NO: 1865016 - RNA, 19 nt, Artificial Sequence
  Description of Artificial Sequence: Synthetic oligonucleotide
aguugaauucauuagggcc

SEQ ID NO: 1865017 - RNA, 19 nt, Artificial Sequence
  Description of Artificial Sequence: Synthetic oligonucleotide
agaggaaauggauaggagc

SEQ ID NO: 1865018 - RNA, 19 nt, Artificial Sequence
  Description of Artificial Sequence: Synthetic oligonucleotide
uauaauucaggccauagaa

SEQ ID NO: 1865019 - RNA, 19 nt, Artificial Sequence
  Description of Artificial Sequence: Synthetic oligonucleotide
uuaacagccagguacauca

SEQ ID NO: 1865020 - RNA, 19 nt, Artificial Sequence
  Description of Artificial Sequence: Synthetic oligonucleotide
cugaucaucuccuaaaagg

SEQ ID NO: 1865021 - RNA, 19 nt, Artificial Sequence
  Description of Artificial Sequence: Synthetic oligonucleotide
ucgaacauaagugucaacg

SEQ ID NO: 1865022 - RNA, 19 nt, Artificial Sequence
  Description of Artificial Sequence: Synthetic oligonucleotide
ucuccuaaaaggucgaagg

SEQ ID NO: 1865023 - RNA, 19 nt, Artificial Sequence
  Description of Artificial Sequence: Synthetic oligonucleotide
gaaguaaccagccacggag

SEQ ID NO: 1865024 - RNA, 19 nt, Artificial Sequence
  Description of Artificial Sequence: Synthetic oligonucleotide
auauuuggcuaccugcucc

SEQ ID NO: 1865025 - RNA, 19 nt, Artificial Sequence
  Description of Artificial Sequence: Synthetic oligonucleotide
aacauaagugucaacgugg

SEQ ID NO: 1865026 - RNA, 19 nt, Artificial Sequence
  Description of Artificial Sequence: Synthetic oligonucleotide
gaggcuauaauucaggcca

SEQ ID NO: 1865027 - RNA, 19 nt, Artificial Sequence
  Description of Artificial Sequence: Synthetic oligonucleotide
uaauucaggccauagaacu

SEQ ID NO: 1865028 - RNA, 19 nt, Artificial Sequence
  Description of Artificial Sequence: Synthetic oligonucleotide
aacuagcuagugcuggugc

SEQ ID NO: 1865029 - RNA, 19 nt, Artificial Sequence
  Description of Artificial Sequence: Synthetic oligonucleotide
auaagugucaacguggaag

SEQ ID NO: 1865030 - RNA, 19 nt, Artificial Sequence
  Description of Artificial Sequence: Synthetic oligonucleotide
uccaaguaccaacugauca

SEQ ID NO: 1865031 - RNA, 19 nt, Artificial Sequence
  Description of Artificial Sequence: Synthetic oligonucleotide
ugaucaucuccuaaaaggu

SEQ ID NO: 1865032 - RNA, 19 nt, Artificial Sequence
  Description of Artificial Sequence: Synthetic oligonucleotide
gguguuaacagccagguac

SEQ ID NO: 1865033 - RNA, 19 nt, Artificial Sequence
  Description of Artificial Sequence: Synthetic oligonucleotide
aacguggaagcgaagggcc

SEQ ID NO: 1865034 - RNA, 19 nt, Artificial Sequence
  Description of Artificial Sequence: Synthetic oligonucleotide
caggcugagaacuagcuag

SEQ ID NO: 1865035 - RNA, 19 nt, Artificial Sequence
  Description of Artificial Sequence: Synthetic oligonucleotide
ucaacguggaagcgaaggg

SEQ ID NO: 1865036 - RNA, 19 nt, Artificial Sequence
  Description of Artificial Sequence: Synthetic oligonucleotide
ugugguguuaacagccagg

SEQ ID NO: 1865037 - RNA, 19 nt, Artificial Sequence
  Description of Artificial Sequence: Synthetic oligonucleotide
cagauauuuggcuaccugc

SEQ ID NO: 1865038 - RNA, 19 nt, Artificial Sequence
  Description of Artificial Sequence: Synthetic oligonucleotide
cauagaacuguguugucag

SEQ ID NO: 1865039 - RNA, 19 nt, Artificial Sequence
  Description of Artificial Sequence: Synthetic oligonucleotide
gaacauaagugucaacgug

SEQ ID NO: 1865040 - RNA, 19 nt, Artificial Sequence
  Description of Artificial Sequence: Synthetic oligonucleotide
uccagaauguccaugcgcu

SEQ ID NO: 1865041 - RNA, 19 nt, Artificial Sequence
  Description of Artificial Sequence: Synthetic oligonucleotide
gaagaaguaaccagccacg

SEQ ID NO: 1865042 - RNA, 19 nt, Artificial Sequence
  Description of Artificial Sequence: Synthetic oligonucleotide
ucuuccaaguaccaacuga

SEQ ID NO: 1865043 - RNA, 19 nt, Artificial Sequence
  Description of Artificial Sequence: Synthetic oligonucleotide
uuuugauccgcucuuccac

SEQ ID NO: 1865044 - RNA, 19 nt, Artificial Sequence
  Description of Artificial Sequence: Synthetic oligonucleotide
aucaucuccuaaaaggucg

SEQ ID NO: 1865045 - RNA, 19 nt, Artificial Sequence
  Description of Artificial Sequence: Synthetic oligonucleotide
caaggugccagaaccaggg

SEQ ID NO: 1865046 - RNA, 19 nt, Artificial Sequence
  Description of Artificial Sequence: Synthetic oligonucleotide
gaacucaucaucacugucc

SEQ ID NO: 1865047 - RNA, 19 nt, Artificial Sequence
  Description of Artificial Sequence: Synthetic oligonucleotide
gaugaaacagcggacagca

SEQ ID NO: 1865048 - RNA, 19 nt, Artificial Sequence
  Description of Artificial Sequence: Synthetic oligonucleotide
ugacauaucauaggggaug

SEQ ID NO: 1865049 - RNA, 19 nt, Artificial Sequence
  Description of Artificial Sequence: Synthetic oligonucleotide
uauuuggcuaccugcuccg

SEQ ID NO: 1865050 - RNA, 19 nt, Artificial Sequence
  Description of Artificial Sequence: Synthetic oligonucleotide
auaauucaggccauagaac

SEQ ID NO: 1865051 - RNA, 19 nt, Artificial Sequence
  Description of Artificial Sequence: Synthetic oligonucleotide
uguugucagauauuuggcu

SEQ ID NO: 1865052 - RNA, 19 nt, Artificial Sequence
  Description of Artificial Sequence: Synthetic oligonucleotide
gucaaaguguugaaggagg

SEQ ID NO: 1865053 - RNA, 19 nt, Artificial Sequence
  Description of Artificial Sequence: Synthetic oligonucleotide
acagcggacagcaagcccc

SEQ ID NO: 1865054 - RNA, 19 nt, Artificial Sequence
  Description of Artificial Sequence: Synthetic oligonucleotide
guaccaacugaucaucucc

SEQ ID NO: 1865055 - RNA, 19 nt, Artificial Sequence
  Description of Artificial Sequence: Synthetic oligonucleotide
aauguccaugcgcugccgg

SEQ ID NO: 1865056 - RNA, 19 nt, Artificial Sequence
  Description of Artificial Sequence: Synthetic oligonucleotide
aagaaguaaccagccacgg

SEQ ID NO: 1865057 - RNA, 19 nt, Artificial Sequence
  Description of Artificial Sequence: Synthetic oligonucleotide
cacugugguguuaacagcc

SEQ ID NO: 1865058 - RNA, 19 nt, Artificial Sequence
  Description of Artificial Sequence: Synthetic oligonucleotide
ucgaaggucaccagaggcc

SEQ ID NO: 1865059 - RNA, 19 nt, Artificial Sequence
  Description of Artificial Sequence: Synthetic oligonucleotide
acggaguugaauucauuag

SEQ ID NO: 1865060 - RNA, 19 nt, Artificial Sequence
  Description of Artificial Sequence: Synthetic oligonucleotide
gaguugaauucauuagggc

SEQ ID NO: 1865061 - RNA, 19 nt, Artificial Sequence
  Description of Artificial Sequence: Synthetic oligonucleotide
aagcgaagggcccauacaa

SEQ ID NO: 1865062 - RNA, 19 nt, Artificial Sequence
  Description of Artificial Sequence: Synthetic oligonucleotide
cuuacccauaggcacagcc

SEQ ID NO: 1865063 - RNA, 19 nt, Artificial Sequence
  Description of Artificial Sequence: Synthetic oligonucleotide
aaacagcggacagcaagcc

SEQ ID NO: 1865064 - RNA, 19 nt, Artificial Sequence
  Description of Artificial Sequence: Synthetic oligonucleotide
ccugucaaaguguugaagg

SEQ ID NO: 1865065 - RNA, 19 nt, Artificial Sequence
  Description of Artificial Sequence: Synthetic oligonucleotide
uauaccggggcucuuugcu

SEQ ID NO: 1865066 - RNA, 19 nt, Artificial Sequence
  Description of Artificial Sequence: Synthetic oligonucleotide
auaggggaugaacucauca

SEQ ID NO: 1865067 - RNA, 19 nt, Artificial Sequence
  Description of Artificial Sequence: Synthetic oligonucleotide
ugcuggugcacacaaggug

SEQ ID NO: 1865068 - RNA, 19 nt, Artificial Sequence
  Description of Artificial Sequence: Synthetic oligonucleotide
agaugaaacagcggacagc

SEQ ID NO: 1865069 - RNA, 19 nt, Artificial Sequence
  Description of Artificial Sequence: Synthetic oligonucleotide
auaucauaggggaugaacu

SEQ ID NO: 1865070 - RNA, 19 nt, Artificial Sequence
  Description of Artificial Sequence: Synthetic oligonucleotide
gagaacuagcuagugcugg

SEQ ID NO: 1865071 - RNA, 19 nt, Artificial Sequence
  Description of Artificial Sequence: Synthetic oligonucleotide
uauaaaccaggcccucaag

SEQ ID NO: 1865072 - RNA, 19 nt, Artificial Sequence
  Description of Artificial Sequence: Synthetic oligonucleotide
ugggaaagccucuggaggc

SEQ ID NO: 1865073 - RNA, 19 nt, Artificial Sequence
  Description of Artificial Sequence: Synthetic oligonucleotide
guugaauucauuagggcca

SEQ ID NO: 1865074 - RNA, 19 nt, Artificial Sequence
  Description of Artificial Sequence: Synthetic oligonucleotide
uuuggcuaccugcuccggg

SEQ ID NO: 1865075 - RNA, 19 nt, Artificial Sequence
  Description of Artificial Sequence: Synthetic oligonucleotide
uaucauaggggaugaacuc

SEQ ID NO: 1865076 - RNA, 19 nt, Artificial Sequence
  Description of Artificial Sequence: Synthetic oligonucleotide
uuacccauaggcacagcca

SEQ ID NO: 1865077 - RNA, 19 nt, Artificial Sequence
  Description of Artificial Sequence: Synthetic oligonucleotide
ucucuggcgaaguugcuca

SEQ ID NO: 1865078 - RNA, 19 nt, Artificial Sequence
  Description of Artificial Sequence: Synthetic oligonucleotide
uuagggcugccucccagcg

SEQ ID NO: 1865079 - RNA, 19 nt, Artificial Sequence
  Description of Artificial Sequence: Synthetic oligonucleotide
cauaucauaggggaugaac

SEQ ID NO: 1865080 - RNA, 19 nt, Artificial Sequence
  Description of Artificial Sequence: Synthetic oligonucleotide
ggaguugaauucauuaggg

SEQ ID NO: 1865081 - RNA, 19 nt, Artificial Sequence
  Description of Artificial Sequence: Synthetic oligonucleotide
cagucuuccaaguaccaac

SEQ ID NO: 1865082 - RNA, 19 nt, Artificial Sequence
  Description of Artificial Sequence: Synthetic oligonucleotide
uacccauaggcacagccac

SEQ ID NO: 1865083 - RNA, 19 nt, Artificial Sequence
  Description of Artificial Sequence: Synthetic oligonucleotide
uccccugacauaucauagg

SEQ ID NO: 1865084 - RNA, 19 nt, Artificial Sequence
  Description of Artificial Sequence: Synthetic oligonucleotide
gucaacguggaagcgaagg

SEQ ID NO: 1865085 - RNA, 19 nt, Artificial Sequence
  Description of Artificial Sequence: Synthetic oligonucleotide
cucagggcuccuauaaacc

SEQ ID NO: 1865086 - RNA, 19 nt, Artificial Sequence
  Description of Artificial Sequence: Synthetic oligonucleotide
ugagaacuagcuagugcug

SEQ ID NO: 1865087 - RNA, 19 nt, Artificial Sequence
  Description of Artificial Sequence: Synthetic oligonucleotide
uucauuagggccaccuguc

SEQ ID NO: 1865088 - RNA, 19 nt, Artificial Sequence
  Description of Artificial Sequence: Synthetic oligonucleotide
uaaccagccacggaguuga

SEQ ID NO: 1865089 - RNA, 19 nt, Artificial Sequence
  Description of Artificial Sequence: Synthetic oligonucleotide
auauaccggggcucuuugc

SEQ ID NO: 1865090 - RNA, 19 nt, Artificial Sequence
  Description of Artificial Sequence: Synthetic oligonucleotide
cacauuuagggcugccucc

SEQ ID NO: 1865091 - RNA, 19 nt, Artificial Sequence
  Description of Artificial Sequence: Synthetic oligonucleotide
uuugauccgcucuuccaca

SEQ ID NO: 1865092 - RNA, 19 nt, Artificial Sequence
  Description of Artificial Sequence: Synthetic oligonucleotide
aauucaggccauagaacug

SEQ ID NO: 1865093 - RNA, 19 nt, Artificial Sequence
  Description of Artificial Sequence: Synthetic oligonucleotide
uaccaacugaucaucuccu

SEQ ID NO: 1865094 - RNA, 19 nt, Artificial Sequence
  Description of Artificial Sequence: Synthetic oligonucleotide
caagcagucucggauauac

SEQ ID NO: 1865095 - RNA, 19 nt, Artificial Sequence
  Description of Artificial Sequence: Synthetic oligonucleotide
cuagcagcucaucuggcag

SEQ ID NO: 1865096 - RNA, 19 nt, Artificial Sequence
  Description of Artificial Sequence: Synthetic oligonucleotide
cagucucggauauaccggg

SEQ ID NO: 1865097 - RNA, 19 nt, Artificial Sequence
  Description of Artificial Sequence: Synthetic oligonucleotide
agccacuagagcucucugg

SEQ ID NO: 1865098 - RNA, 19 nt, Artificial Sequence
  Description of Artificial Sequence: Synthetic oligonucleotide
uccuaaaaggucgaagguc

SEQ ID NO: 1865099 - RNA, 19 nt, Artificial Sequence
  Description of Artificial Sequence: Synthetic oligonucleotide
gauauaccggggcucuuug

SEQ ID NO: 1865100 - RNA, 19 nt, Artificial Sequence
  Description of Artificial Sequence: Synthetic oligonucleotide
acagaugaaacagcggaca

SEQ ID NO: 1865101 - RNA, 19 nt, Artificial Sequence
  Description of Artificial Sequence: Synthetic oligonucleotide
ucauaggggaugaacucau

SEQ ID NO: 1865102 - RNA, 19 nt, Artificial Sequence
  Description of Artificial Sequence: Synthetic oligonucleotide
ucugugaccgugacagcca

SEQ ID NO: 1865103 - RNA, 19 nt, Artificial Sequence
  Description of Artificial Sequence: Synthetic oligonucleotide
uccucagauguggucaagg

SEQ ID NO: 1865104 - RNA, 19 nt, Artificial Sequence
  Description of Artificial Sequence: Synthetic oligonucleotide
uaaaaggucgaaggucacc

SEQ ID NO: 1865105 - RNA, 19 nt, Artificial Sequence
  Description of Artificial Sequence: Synthetic oligonucleotide
ucaucuccuaaaaggucga

SEQ ID NO: 1865106 - RNA, 19 nt, Artificial Sequence
  Description of Artificial Sequence: Synthetic oligonucleotide
uuuagggcugccucccagc

SEQ ID NO: 1865107 - RNA, 19 nt, Artificial Sequence
  Description of Artificial Sequence: Synthetic oligonucleotide
gauauuuggcuaccugcuc

SEQ ID NO: 1865108 - RNA, 19 nt, Artificial Sequence
  Description of Artificial Sequence: Synthetic oligonucleotide
gaggaggacagaugaaaca

SEQ ID NO: 1865109 - RNA, 19 nt, Artificial Sequence
  Description of Artificial Sequence: Synthetic oligonucleotide
acagcaagccccgucgaac

SEQ ID NO: 1865110 - RNA, 19 nt, Artificial Sequence
  Description of Artificial Sequence: Synthetic oligonucleotide
agauauuuggcuaccugcu

SEQ ID NO: 1865111 - RNA, 19 nt, Artificial Sequence
  Description of Artificial Sequence: Synthetic oligonucleotide
ucucggauauaccggggcu

SEQ ID NO: 1865112 - RNA, 19 nt, Artificial Sequence
  Description of Artificial Sequence: Synthetic oligonucleotide
agggaugcuaagguguggg

SEQ ID NO: 1865113 - RNA, 19 nt, Artificial Sequence
  Description of Artificial Sequence: Synthetic oligonucleotide
ccaauagccgcucuguggg

SEQ ID NO: 1865114 - RNA, 19 nt, Artificial Sequence
  Description of Artificial Sequence: Synthetic oligonucleotide
cugagaacuagcuagugcu

SEQ ID NO: 1865115 - RNA, 19 nt, Artificial Sequence
  Description of Artificial Sequence: Synthetic oligonucleotide
gaggaaauggauaggagcu

SEQ ID NO: 1865116 - RNA, 19 nt, Artificial Sequence
  Description of Artificial Sequence: Synthetic oligonucleotide
agccccgucgaacauaagu

SEQ ID NO: 1865117 - RNA, 19 nt, Artificial Sequence
  Description of Artificial Sequence: Synthetic oligonucleotide
ggaucuggcuucuagcagc

SEQ ID NO: 1865118 - RNA, 19 nt, Artificial Sequence
  Description of Artificial Sequence: Synthetic oligonucleotide
aggaucuggcuucuagcag

SEQ ID NO: 1865119 - RNA, 19 nt, Artificial Sequence
  Description of Artificial Sequence: Synthetic oligonucleotide
aaggugccagaaccagggg

SEQ ID NO: 1865120 - RNA, 19 nt, Artificial Sequence
  Description of Artificial Sequence: Synthetic oligonucleotide
acacucaccucccgagugg

SEQ ID NO: 1865121 - RNA, 19 nt, Artificial Sequence
  Description of Artificial Sequence: Synthetic oligonucleotide
gagaggaaauggauaggag

SEQ ID NO: 1865122 - RNA, 19 nt, Artificial Sequence
  Description of Artificial Sequence: Synthetic oligonucleotide
auagccgcucuguggguac

SEQ ID NO: 1865123 - RNA, 19 nt, Artificial Sequence
  Description of Artificial Sequence: Synthetic oligonucleotide
guugucagauauuuggcua

SEQ ID NO: 1865124 - RNA, 19 nt, Artificial Sequence
  Description of Artificial Sequence: Synthetic oligonucleotide
acuguguugucagauauuu

SEQ ID NO: 1865125 - RNA, 19 nt, Artificial Sequence
  Description of Artificial Sequence: Synthetic oligonucleotide
aucuccuaaaaggucgaag

SEQ ID NO: 1865126 - RNA, 19 nt, Artificial Sequence
  Description of Artificial Sequence: Synthetic oligonucleotide
aucauaggggaugaacuca

SEQ ID NO: 1865127 - RNA, 19 nt, Artificial Sequence
  Description of Artificial Sequence: Synthetic oligonucleotide
cugccggaggcuauaauuc

SEQ ID NO: 1865128 - RNA, 19 nt, Artificial Sequence
  Description of Artificial Sequence: Synthetic oligonucleotide
ggcuauggagaggaaaugg

SEQ ID NO: 1865129 - RNA, 19 nt, Artificial Sequence
  Description of Artificial Sequence: Synthetic oligonucleotide
ggagucgcagcauugccag

SEQ ID NO: 1865130 - RNA, 19 nt, Artificial Sequence
  Description of Artificial Sequence: Synthetic oligonucleotide
uguccccugacauaucaua

SEQ ID NO: 1865131 - RNA, 19 nt, Artificial Sequence
  Description of Artificial Sequence: Synthetic oligonucleotide
caacguggaagcgaagggc

SEQ ID NO: 1865132 - RNA, 19 nt, Artificial Sequence
  Description of Artificial Sequence: Synthetic oligonucleotide
acuagcuagugcuggugca

SEQ ID NO: 1865133 - RNA, 19 nt, Artificial Sequence
  Description of Artificial Sequence: Synthetic oligonucleotide
aagcagucucggauauacc

SEQ ID NO: 1865134 - RNA, 19 nt, Artificial Sequence
  Description of Artificial Sequence: Synthetic oligonucleotide
gaccgugacagccacuaga

SEQ ID NO: 1865135 - RNA, 19 nt, Artificial Sequence
  Description of Artificial Sequence: Synthetic oligonucleotide
ggaggcuauaauucaggcc

SEQ ID NO: 1865136 - RNA, 19 nt, Artificial Sequence
  Description of Artificial Sequence: Synthetic oligonucleotide
cucaagcacauuuagggcu

SEQ ID NO: 1865137 - RNA, 19 nt, Artificial Sequence
  Description of Artificial Sequence: Synthetic oligonucleotide
agugucaacguggaagcga

SEQ ID NO: 1865138 - RNA, 19 nt, Artificial Sequence
  Description of Artificial Sequence: Synthetic oligonucleotide
cuaaaaggucgaaggucac

SEQ ID NO: 1865139 - RNA, 19 nt, Artificial Sequence
  Description of Artificial Sequence: Synthetic oligonucleotide
ugucagauauuuggcuacc

SEQ ID NO: 1865140 - RNA, 19 nt, Artificial Sequence
  Description of Artificial Sequence: Synthetic oligonucleotide
cuggcgaaguugcucaaac

SEQ ID NO: 1865141 - RNA, 19 nt, Artificial Sequence
  Description of Artificial Sequence: Synthetic oligonucleotide
uccuccuuccaguggggag

SEQ ID NO: 1865142 - RNA, 19 nt, Artificial Sequence
  Description of Artificial Sequence: Synthetic oligonucleotide
gaaguugcucaaacucugc

SEQ ID NO: 1865143 - RNA, 19 nt, Artificial Sequence
  Description of Artificial Sequence: Synthetic oligonucleotide
cagggcuccuauaaaccag

SEQ ID NO: 1865144 - RNA, 19 nt, Artificial Sequence
  Description of Artificial Sequence: Synthetic oligonucleotide
ucuuuucaggugucucuac

SEQ ID NO: 1865145 - RNA, 19 nt, Artificial Sequence
  Description of Artificial Sequence: Synthetic oligonucleotide
uugaauucauuagggccac

SEQ ID NO: 1865146 - RNA, 19 nt, Artificial Sequence
  Description of Artificial Sequence: Synthetic oligonucleotide
uccaagcagucucggauau

SEQ ID NO: 1865147 - RNA, 19 nt, Artificial Sequence
  Description of Artificial Sequence: Synthetic oligonucleotide
uaccggggcucuuugcugc

SEQ ID NO: 1865148 - RNA, 19 nt, Artificial Sequence
  Description of Artificial Sequence: Synthetic oligonucleotide
accgugacagccacuagag

SEQ ID NO: 1865149 - RNA, 19 nt, Artificial Sequence
  Description of Artificial Sequence: Synthetic oligonucleotide
gucucggauauaccggggc

SEQ ID NO: 1865150 - RNA, 19 nt, Artificial Sequence
  Description of Artificial Sequence: Synthetic oligonucleotide
ugccggaggcuauaauuca

SEQ ID NO: 1865151 - RNA, 19 nt, Artificial Sequence
  Description of Artificial Sequence: Synthetic oligonucleotide
uccgaggacagcccuugga

SEQ ID NO: 1865152 - RNA, 19 nt, Artificial Sequence
  Description of Artificial Sequence: Synthetic oligonucleotide
gaacuguguugucagauau

SEQ ID NO: 1865153 - RNA, 19 nt, Artificial Sequence
  Description of Artificial Sequence: Synthetic oligonucleotide
gcugagaacuagcuagugc

SEQ ID NO: 1865154 - RNA, 19 nt, Artificial Sequence
  Description of Artificial Sequence: Synthetic oligonucleotide
gcuauaauucaggccauag

SEQ ID NO: 1865155 - RNA, 19 nt, Artificial Sequence
  Description of Artificial Sequence: Synthetic oligonucleotide
ggggaaagaagaaguaacc

SEQ ID NO: 1865156 - RNA, 19 nt, Artificial Sequence
  Description of Artificial Sequence: Synthetic oligonucleotide
auagaacuguguugucaga

SEQ ID NO: 1865157 - RNA, 19 nt, Artificial Sequence
  Description of Artificial Sequence: Synthetic oligonucleotide
agggcuccuauaaaccagg

SEQ ID NO: 1865158 - RNA, 19 nt, Artificial Sequence
  Description of Artificial Sequence: Synthetic oligonucleotide
accgaggggccaucugggc

SEQ ID NO: 1865159 - RNA, 19 nt, Artificial Sequence
  Description of Artificial Sequence: Synthetic oligonucleotide
cgggucuugcuuuugaucc

SEQ ID NO: 1865160 - RNA, 19 nt, Artificial Sequence
  Description of Artificial Sequence: Synthetic oligonucleotide
uuccaagcagucucggaua

SEQ ID NO: 1865161 - RNA, 19 nt, Artificial Sequence
  Description of Artificial Sequence: Synthetic oligonucleotide
caacugaucaucuccuaaa

SEQ ID NO: 1865162 - RNA, 19 nt, Artificial Sequence
  Description of Artificial Sequence: Synthetic oligonucleotide
aggugugggccagucuucc

SEQ ID NO: 1865163 - RNA, 19 nt, Artificial Sequence
  Description of Artificial Sequence: Synthetic oligonucleotide
gaacuagcuagugcuggug

SEQ ID NO: 1865164 - RNA, 19 nt, Artificial Sequence
  Description of Artificial Sequence: Synthetic oligonucleotide
acauaagugucaacgugga

SEQ ID NO: 1865165 - RNA, 19 nt, Artificial Sequence
  Description of Artificial Sequence: Synthetic oligonucleotide
accaugcugggaaagccuc

SEQ ID NO: 1865166 - RNA, 19 nt, Artificial Sequence
  Description of Artificial Sequence: Synthetic oligonucleotide
ggaccgaggggccaucugg

SEQ ID NO: 1865167 - RNA, 19 nt, Artificial Sequence
  Description of Artificial Sequence: Synthetic oligonucleotide
cuggugcacacaaggugcc

SEQ ID NO: 1865168 - RNA, 19 nt, Artificial Sequence
  Description of Artificial Sequence: Synthetic oligonucleotide
aaguaaccagccacggagu

SEQ ID NO: 1865169 - RNA, 19 nt, Artificial Sequence
  Description of Artificial Sequence: Synthetic oligonucleotide
guguugaaggaggggaaag

SEQ ID NO: 1865170 - RNA, 19 nt, Artificial Sequence
  Description of Artificial Sequence: Synthetic oligonucleotide
cacggaguugaauucauua

SEQ ID NO: 1865171 - RNA, 19 nt, Artificial Sequence
  Description of Artificial Sequence: Synthetic oligonucleotide
acaaggugccagaaccagg

SEQ ID NO: 1865172 - RNA, 19 nt, Artificial Sequence
  Description of Artificial Sequence: Synthetic oligonucleotide
ggaaauggauaggagcuug

SEQ ID NO: 1865173 - RNA, 19 nt, Artificial Sequence
  Description of Artificial Sequence: Synthetic oligonucleotide
gcccauacaaacuccagca

SEQ ID NO: 1865174 - RNA, 19 nt, Artificial Sequence
  Description of Artificial Sequence: Synthetic oligonucleotide
cggaguugaauucauuagg

SEQ ID NO: 1865175 - RNA, 19 nt, Artificial Sequence
  Description of Artificial Sequence: Synthetic oligonucleotide
cacacucaccucccgagug

SEQ ID NO: 1865176 - RNA, 19 nt, Artificial Sequence
  Description of Artificial Sequence: Synthetic oligonucleotide
agucagacgcccuguggcu

SEQ ID NO: 1865177 - RNA, 19 nt, Artificial Sequence
  Description of Artificial Sequence: Synthetic oligonucleotide
auaccggggcucuuugcug

SEQ ID NO: 1865178 - RNA, 19 nt, Artificial Sequence
  Description of Artificial Sequence: Synthetic oligonucleotide
ucuugcuuuugauccgcuc

SEQ ID NO: 1865179 - RNA, 19 nt, Artificial Sequence
  Description of Artificial Sequence: Synthetic oligonucleotide
cacaaggugccagaaccag

SEQ ID NO: 1865180 - RNA, 19 nt, Artificial Sequence
  Description of Artificial Sequence: Synthetic oligonucleotide
cugugguguuaacagccag

SEQ ID NO: 1865181 - RNA, 19 nt, Artificial Sequence
  Description of Artificial Sequence: Synthetic oligonucleotide
uguccaugcgcugccggag

SEQ ID NO: 1865182 - RNA, 19 nt, Artificial Sequence
  Description of Artificial Sequence: Synthetic oligonucleotide
ggcuccguggccgagacag

SEQ ID NO: 1865183 - RNA, 19 nt, Artificial Sequence
  Description of Artificial Sequence: Synthetic oligonucleotide
gcuggugcacacaaggugc

SEQ ID NO: 1865184 - RNA, 19 nt, Artificial Sequence
  Description of Artificial Sequence: Synthetic oligonucleotide
gaggggaaagaagaaguaa

SEQ ID NO: 1865185 - RNA, 19 nt, Artificial Sequence
  Description of Artificial Sequence: Synthetic oligonucleotide
cacuagagcucucuggcga

SEQ ID NO: 1865186 - RNA, 19 nt, Artificial Sequence
  Description of Artificial Sequence: Synthetic oligonucleotide
ucggauauaccggggcucu

SEQ ID NO: 1865187 - RNA, 19 nt, Artificial Sequence
  Description of Artificial Sequence: Synthetic oligonucleotide
uccguggccgagacagugc

SEQ ID NO: 1865188 - RNA, 19 nt, Artificial Sequence
  Description of Artificial Sequence: Synthetic oligonucleotide
agauguggucaaggcuucc

SEQ ID NO: 1865189 - RNA, 19 nt, Artificial Sequence
  Description of Artificial Sequence: Synthetic oligonucleotide
caggagucgcagcauugcc

SEQ ID NO: 1865190 - RNA, 19 nt, Artificial Sequence
  Description of Artificial Sequence: Synthetic oligonucleotide
ggaugcuaaggugugggcc

SEQ ID NO: 1865191 - RNA, 19 nt, Artificial Sequence
  Description of Artificial Sequence: Synthetic oligonucleotide
ggagaggaaauggauagga

SEQ ID NO: 1865192 - RNA, 19 nt, Artificial Sequence
  Description of Artificial Sequence: Synthetic oligonucleotide
agggcuauggagaggaaau

SEQ ID NO: 1865193 - RNA, 19 nt, Artificial Sequence
  Description of Artificial Sequence: Synthetic oligonucleotide
gaccgaggggccaucuggg

SEQ ID NO: 1865194 - RNA, 19 nt, Artificial Sequence
  Description of Artificial Sequence: Synthetic oligonucleotide
ugucaacguggaagcgaag

SEQ ID NO: 1865195 - RNA, 19 nt, Artificial Sequence
  Description of Artificial Sequence: Synthetic oligonucleotide
agguacaucagggaugcua

SEQ ID NO: 1865196 - RNA, 19 nt, Artificial Sequence
  Description of Artificial Sequence: Synthetic oligonucleotide
aauagccgcucugugggua

SEQ ID NO: 1865197 - RNA, 19 nt, Artificial Sequence
  Description of Artificial Sequence: Synthetic oligonucleotide
uccaugcgcugccggaggc

SEQ ID NO: 1865198 - RNA, 19 nt, Artificial Sequence
  Description of Artificial Sequence: Synthetic oligonucleotide
guacaucagggaugcuaag

SEQ ID NO: 1865199 - RNA, 19 nt, Artificial Sequence
  Description of Artificial Sequence: Synthetic oligonucleotide
ccucaagcacauuuagggc

SEQ ID NO: 1865200 - RNA, 19 nt, Artificial Sequence
  Description of Artificial Sequence: Synthetic oligonucleotide
uugauccgcucuuccacaa

SEQ ID NO: 1865201 - RNA, 19 nt, Artificial Sequence
  Description of Artificial Sequence: Synthetic oligonucleotide
cuagcuagugcuggugcac

SEQ ID NO: 1865202 - RNA, 19 nt, Artificial Sequence
  Description of Artificial Sequence: Synthetic oligonucleotide
gaauguccaugcgcugccg

SEQ ID NO: 1865203 - RNA, 19 nt, Artificial Sequence
  Description of Artificial Sequence: Synthetic oligonucleotide
aaccaccugccagucagga

SEQ ID NO: 1865204 - RNA, 19 nt, Artificial Sequence
  Description of Artificial Sequence: Synthetic oligonucleotide
guguuaacagccagguaca

SEQ ID NO: 1865205 - RNA, 19 nt, Artificial Sequence
  Description of Artificial Sequence: Synthetic oligonucleotide
gggccuuacccauaggcac

SEQ ID NO: 1865206 - RNA, 19 nt, Artificial Sequence
  Description of Artificial Sequence: Synthetic oligonucleotide
ugccagucaggagucgcag

SEQ ID NO: 1865207 - RNA, 19 nt, Artificial Sequence
  Description of Artificial Sequence: Synthetic oligonucleotide
cuguggguacacugaggag

SEQ ID NO: 1865208 - RNA, 19 nt, Artificial Sequence
  Description of Artificial Sequence: Synthetic oligonucleotide
cugagucucuccagaagca

SEQ ID NO: 1865209 - RNA, 19 nt, Artificial Sequence
  Description of Artificial Sequence: Synthetic oligonucleotide
agacagugccugggcagcc

SEQ ID NO: 1865210 - RNA, 19 nt, Artificial Sequence
  Description of Artificial Sequence: Synthetic oligonucleotide
ugauccgcucuuccacaac

SEQ ID NO: 1865211 - RNA, 19 nt, Artificial Sequence
  Description of Artificial Sequence: Synthetic oligonucleotide
ugaccgugacagccacuag

SEQ ID NO: 1865212 - RNA, 19 nt, Artificial Sequence
  Description of Artificial Sequence: Synthetic oligonucleotide
agcacauuuagggcugccu

SEQ ID NO: 1865213 - RNA, 19 nt, Artificial Sequence
  Description of Artificial Sequence: Synthetic oligonucleotide
ggucgaaggucaccagagg

SEQ ID NO: 1865214 - RNA, 19 nt, Artificial Sequence
  Description of Artificial Sequence: Synthetic oligonucleotide
gcgaagggcccauacaaac

SEQ ID NO: 1865215 - RNA, 19 nt, Artificial Sequence
  Description of Artificial Sequence: Synthetic oligonucleotide
ucgcagcauugccaggcug

SEQ ID NO: 1865216 - RNA, 19 nt, Artificial Sequence
  Description of Artificial Sequence: Synthetic oligonucleotide
gggucuugcuuuugauccg

SEQ ID NO: 1865217 - RNA, 19 nt, Artificial Sequence
  Description of Artificial Sequence: Synthetic oligonucleotide
acagccacuagagcucucu

SEQ ID NO: 1865218 - RNA, 19 nt, Artificial Sequence
  Description of Artificial Sequence: Synthetic oligonucleotide
guccaugcgcugccggagg

SEQ ID NO: 1865219 - RNA, 19 nt, Artificial Sequence
  Description of Artificial Sequence: Synthetic oligonucleotide
caccugucagcucccuccg

SEQ ID NO: 1865220 - RNA, 19 nt, Artificial Sequence
  Description of Artificial Sequence: Synthetic oligonucleotide
ccucagggcuccuauaaac

SEQ ID NO: 1865221 - RNA, 19 nt, Artificial Sequence
  Description of Artificial Sequence: Synthetic oligonucleotide
gugacagccacuagagcuc

SEQ ID NO: 1865222 - RNA, 19 nt, Artificial Sequence
  Description of Artificial Sequence: Synthetic oligonucleotide
ggcuccuauaaaccaggcc

SEQ ID NO: 1865223 - RNA, 19 nt, Artificial Sequence
  Description of Artificial Sequence: Synthetic oligonucleotide
uagcuagugcuggugcaca

SEQ ID NO: 1865224 - RNA, 19 nt, Artificial Sequence
  Description of Artificial Sequence: Synthetic oligonucleotide
ugacagccacuagagcucu

SEQ ID NO: 1865225 - RNA, 19 nt, Artificial Sequence
  Description of Artificial Sequence: Synthetic oligonucleotide
agggccuuacccauaggca

SEQ ID NO: 1865226 - RNA, 19 nt, Artificial Sequence
  Description of Artificial Sequence: Synthetic oligonucleotide
ccggaggcuauaauucagg

SEQ ID NO: 1865227 - RNA, 19 nt, Artificial Sequence
  Description of Artificial Sequence: Synthetic oligonucleotide
cagcggacagcaagccccg

SEQ ID NO: 1865228 - RNA, 19 nt, Artificial Sequence
  Description of Artificial Sequence: Synthetic oligonucleotide
gcacauuuagggcugccuc

SEQ ID NO: 1865229 - RNA, 19 nt, Artificial Sequence
  Description of Artificial Sequence: Synthetic oligonucleotide
ugcacacaaggugccagaa

SEQ ID NO: 1865230 - RNA, 19 nt, Artificial Sequence
  Description of Artificial Sequence: Synthetic oligonucleotide
cuuccaggugcaguagcac

SEQ ID NO: 1865231 - RNA, 19 nt, Artificial Sequence
  Description of Artificial Sequence: Synthetic oligonucleotide
ggaagcgaagggcccauac

SEQ ID NO: 1865232 - RNA, 19 nt, Artificial Sequence
  Description of Artificial Sequence: Synthetic oligonucleotide
uccgggucugugaccguga

SEQ ID NO: 1865233 - RNA, 19 nt, Artificial Sequence
  Description of Artificial Sequence: Synthetic oligonucleotide
uuguccccugacauaucau

SEQ ID NO: 1865234 - RNA, 19 nt, Artificial Sequence
  Description of Artificial Sequence: Synthetic oligonucleotide
aggagucgcagcauugcca

SEQ ID NO: 1865235 - RNA, 19 nt, Artificial Sequence
  Description of Artificial Sequence: Synthetic oligonucleotide
gggccagucuuccaaguac

SEQ ID NO: 1865236 - RNA, 19 nt, Artificial Sequence
  Description of Artificial Sequence: Synthetic oligonucleotide
cucggauauaccggggcuc

SEQ ID NO: 1865237 - RNA, 19 nt, Artificial Sequence
  Description of Artificial Sequence: Synthetic oligonucleotide
uagagcucucuggcgaagu

SEQ ID NO: 1865238 - RNA, 19 nt, Artificial Sequence
  Description of Artificial Sequence: Synthetic oligonucleotide
ggugcacacaaggugccag

SEQ ID NO: 1865239 - RNA, 19 nt, Artificial Sequence
  Description of Artificial Sequence: Synthetic oligonucleotide
cagccacggaguugaauuc

SEQ ID NO: 1865240 - RNA, 19 nt, Artificial Sequence
  Description of Artificial Sequence: Synthetic oligonucleotide
uccuauaaaccaggcccuc

SEQ ID NO: 1865241 - RNA, 19 nt, Artificial Sequence
  Description of Artificial Sequence: Synthetic oligonucleotide
cugugaccgugacagccac

SEQ ID NO: 1865242 - RNA, 19 nt, Artificial Sequence
  Description of Artificial Sequence: Synthetic oligonucleotide
cucucuggcgaaguugcuc

SEQ ID NO: 1865243 - RNA, 19 nt, Artificial Sequence
  Description of Artificial Sequence: Synthetic oligonucleotide
caagccccgucgaacauaa

SEQ ID NO: 1865244 - RNA, 19 nt, Artificial Sequence
  Description of Artificial Sequence: Synthetic oligonucleotide
uccgggucuugcuuuugau

SEQ ID NO: 1865245 - RNA, 19 nt, Artificial Sequence
  Description of Artificial Sequence: Synthetic oligonucleotide
ccgaggacagcccuuggag

SEQ ID NO: 1865246 - RNA, 19 nt, Artificial Sequence
  Description of Artificial Sequence: Synthetic oligonucleotide
gcuauggagaggaaaugga

SEQ ID NO: 1865247 - RNA, 19 nt, Artificial Sequence
  Description of Artificial Sequence: Synthetic oligonucleotide
agccacggaguugaauuca

SEQ ID NO: 1865248 - RNA, 19 nt, Artificial Sequence
  Description of Artificial Sequence: Synthetic oligonucleotide
ugaauucauuagggccacc

SEQ ID NO: 1865249 - RNA, 19 nt, Artificial Sequence
  Description of Artificial Sequence: Synthetic oligonucleotide
aggcuuccaagcagucucg

SEQ ID NO: 1865250 - RNA, 19 nt, Artificial Sequence
  Description of Artificial Sequence: Synthetic oligonucleotide
gugucaacguggaagcgaa

SEQ ID NO: 1865251 - RNA, 19 nt, Artificial Sequence
  Description of Artificial Sequence: Synthetic oligonucleotide
ggaccaugcugggaaagcc

SEQ ID NO: 1865252 - RNA, 19 nt, Artificial Sequence
  Description of Artificial Sequence: Synthetic oligonucleotide
gccccgucgaacauaagug

SEQ ID NO: 1865253 - RNA, 19 nt, Artificial Sequence
  Description of Artificial Sequence: Synthetic oligonucleotide
cucccuccgaggacagccc

SEQ ID NO: 1865254 - RNA, 19 nt, Artificial Sequence
  Description of Artificial Sequence: Synthetic oligonucleotide
ucuggcgaaguugcucaaa

SEQ ID NO: 1865255 - RNA, 19 nt, Artificial Sequence
  Description of Artificial Sequence: Synthetic oligonucleotide
cagcaagccccgucgaaca

SEQ ID NO: 1865256 - RNA, 19 nt, Artificial Sequence
  Description of Artificial Sequence: Synthetic oligonucleotide
cuagagcucucuggcgaag

SEQ ID NO: 1865257 - RNA, 19 nt, Artificial Sequence
  Description of Artificial Sequence: Synthetic oligonucleotide
cacucaccucccgaguggc

SEQ ID NO: 1865258 - RNA, 19 nt, Artificial Sequence
  Description of Artificial Sequence: Synthetic oligonucleotide
gugguguuaacagccaggu

SEQ ID NO: 1865259 - RNA, 19 nt, Artificial Sequence
  Description of Artificial Sequence: Synthetic oligonucleotide
ggucuugcuuuugauccgc

SEQ ID NO: 1865260 - RNA, 19 nt, Artificial Sequence
  Description of Artificial Sequence: Synthetic oligonucleotide
gacagcaagccccgucgaa

SEQ ID NO: 1865261 - RNA, 19 nt, Artificial Sequence
  Description of Artificial Sequence: Synthetic oligonucleotide
ccacugugguguuaacagc

SEQ ID NO: 1865262 - RNA, 19 nt, Artificial Sequence
  Description of Artificial Sequence: Synthetic oligonucleotide
cccauacaaacuccagcag

SEQ ID NO: 1865263 - RNA, 19 nt, Artificial Sequence
  Description of Artificial Sequence: Synthetic oligonucleotide
ccacuagagcucucuggcg

SEQ ID NO: 1865264 - RNA, 19 nt, Artificial Sequence
  Description of Artificial Sequence: Synthetic oligonucleotide
agagcucucuggcgaaguu

SEQ ID NO: 1865265 - RNA, 19 nt, Artificial Sequence
  Description of Artificial Sequence: Synthetic oligonucleotide
cuccguggccgagacagug

SEQ ID NO: 1865266 - RNA, 19 nt, Artificial Sequence
  Description of Artificial Sequence: Synthetic oligonucleotide
augcuaaggugugggccag

SEQ ID NO: 1865267 - RNA, 19 nt, Artificial Sequence
  Description of Artificial Sequence: Synthetic oligonucleotide
gaaauggauaggagcuugu

SEQ ID NO: 1865268 - RNA, 19 nt, Artificial Sequence
  Description of Artificial Sequence: Synthetic oligonucleotide
cuccuaaaaggucgaaggu

SEQ ID NO: 1865269 - RNA, 19 nt, Artificial Sequence
  Description of Artificial Sequence: Synthetic oligonucleotide
ggccauagaacuguguugu

SEQ ID NO: 1865270 - RNA, 19 nt, Artificial Sequence
  Description of Artificial Sequence: Synthetic oligonucleotide
gacgcccuguggcugaacu

SEQ ID NO: 1865271 - RNA, 19 nt, Artificial Sequence
  Description of Artificial Sequence: Synthetic oligonucleotide
uggagaaccuccgggucuu

SEQ ID NO: 1865272 - RNA, 19 nt, Artificial Sequence
  Description of Artificial Sequence: Synthetic oligonucleotide
ccgcucuuccacaaccacc

SEQ ID NO: 1865273 - RNA, 19 nt, Artificial Sequence
  Description of Artificial Sequence: Synthetic oligonucleotide
gcccucaagcacauuuagg

SEQ ID NO: 1865274 - RNA, 19 nt, Artificial Sequence
  Description of Artificial Sequence: Synthetic oligonucleotide
cccgucgaacauaaguguc

SEQ ID NO: 1865275 - RNA, 19 nt, Artificial Sequence
  Description of Artificial Sequence: Synthetic oligonucleotide
cauaagugucaacguggaa

SEQ ID NO: 1865276 - RNA, 19 nt, Artificial Sequence
  Description of Artificial Sequence: Synthetic oligonucleotide
cggacagcaagccccgucg

SEQ ID NO: 1865277 - RNA, 19 nt, Artificial Sequence
  Description of Artificial Sequence: Synthetic oligonucleotide
uggugcacacaaggugcca

SEQ ID NO: 1865278 - RNA, 19 nt, Artificial Sequence
  Description of Artificial Sequence: Synthetic oligonucleotide
agcaagccccgucgaacau

SEQ ID NO: 1865279 - RNA, 19 nt, Artificial Sequence
  Description of Artificial Sequence: Synthetic oligonucleotide
cucuuuguccccugacaua

SEQ ID NO: 1865280 - RNA, 19 nt, Artificial Sequence
  Description of Artificial Sequence: Synthetic oligonucleotide
cagccacuagagcucucug

SEQ ID NO: 1865281 - RNA, 19 nt, Artificial Sequence
  Description of Artificial Sequence: Synthetic oligonucleotide
cgugacagccacuagagcu

SEQ ID NO: 1865282 - RNA, 19 nt, Artificial Sequence
  Description of Artificial Sequence: Synthetic oligonucleotide
ccugcuccgggucugugac

SEQ ID NO: 1865283 - RNA, 19 nt, Artificial Sequence
  Description of Artificial Sequence: Synthetic oligonucleotide
caggccauagaacuguguu

SEQ ID NO: 1865284 - RNA, 19 nt, Artificial Sequence
  Description of Artificial Sequence: Synthetic oligonucleotide
cugccagucaggagucgca

SEQ ID NO: 1865285 - RNA, 19 nt, Artificial Sequence
  Description of Artificial Sequence: Synthetic oligonucleotide
gaacaaggacauccagaau

SEQ ID NO: 1865286 - RNA, 19 nt, Artificial Sequence
  Description of Artificial Sequence: Synthetic oligonucleotide
gggaccaugcugggaaagc

SEQ ID NO: 1865287 - RNA, 19 nt, Artificial Sequence
  Description of Artificial Sequence: Synthetic oligonucleotide
cugacauaucauaggggau

SEQ ID NO: 1865288 - RNA, 19 nt, Artificial Sequence
  Description of Artificial Sequence: Synthetic oligonucleotide
agccgcucuguggguacac

SEQ ID NO: 1865289 - RNA, 19 nt, Artificial Sequence
  Description of Artificial Sequence: Synthetic oligonucleotide
auugccaggcugagaacua

SEQ ID NO: 1865290 - RNA, 19 nt, Artificial Sequence
  Description of Artificial Sequence: Synthetic oligonucleotide
ccgucgaacauaaguguca

SEQ ID NO: 1865291 - RNA, 19 nt, Artificial Sequence
  Description of Artificial Sequence: Synthetic oligonucleotide
auccgcucuuccacaacca

SEQ ID NO: 1865292 - RNA, 19 nt, Artificial Sequence
  Description of Artificial Sequence: Synthetic oligonucleotide
gccggaggcuauaauucag

SEQ ID NO: 1865293 - RNA, 19 nt, Artificial Sequence
  Description of Artificial Sequence: Synthetic oligonucleotide
cccauaggcacagccacug

SEQ ID NO: 1865294 - RNA, 19 nt, Artificial Sequence
  Description of Artificial Sequence: Synthetic oligonucleotide
gcacacaaggugccagaac

SEQ ID NO: 1865295 - RNA, 19 nt, Artificial Sequence
  Description of Artificial Sequence: Synthetic oligonucleotide
cugcuccgggucugugacc

SEQ ID NO: 1865296 - RNA, 19 nt, Artificial Sequence
  Description of Artificial Sequence: Synthetic oligonucleotide
gggcuauggagaggaaaug

SEQ ID NO: 1865297 - RNA, 19 nt, Artificial Sequence
  Description of Artificial Sequence: Synthetic oligonucleotide
ggccucagggcuccuauaa

SEQ ID NO: 1865298 - RNA, 19 nt, Artificial Sequence
  Description of Artificial Sequence: Synthetic oligonucleotide
ccgaggggccaucugggcc

SEQ ID NO: 1865299 - RNA, 19 nt, Artificial Sequence
  Description of Artificial Sequence: Synthetic oligonucleotide
ggcuuccaagcagucucgg

SEQ ID NO: 1865300 - RNA, 19 nt, Artificial Sequence
  Description of Artificial Sequence: Synthetic oligonucleotide
cagggcuauggagaggaaa

SEQ ID NO: 1865301 - RNA, 19 nt, Artificial Sequence
  Description of Artificial Sequence: Synthetic oligonucleotide
ccguggccgagacagugcc

SEQ ID NO: 1865302 - RNA, 19 nt, Artificial Sequence
  Description of Artificial Sequence: Synthetic oligonucleotide
gccagucaggagucgcagc

SEQ ID NO: 1865303 - RNA, 19 nt, Artificial Sequence
  Description of Artificial Sequence: Synthetic oligonucleotide
cauuuagggcugccuccca

SEQ ID NO: 1865304 - RNA, 19 nt, Artificial Sequence
  Description of Artificial Sequence: Synthetic oligonucleotide
acauaucauaggggaugaa

SEQ ID NO: 1865305 - RNA, 19 nt, Artificial Sequence
  Description of Artificial Sequence: Synthetic oligonucleotide
cuuccacaaccaccugcca

SEQ ID NO: 1865306 - RNA, 19 nt, Artificial Sequence
  Description of Artificial Sequence: Synthetic oligonucleotide
gccuuacccauaggcacag

SEQ ID NO: 1865307 - RNA, 19 nt, Artificial Sequence
  Description of Artificial Sequence: Synthetic oligonucleotide
gaaccuccgggucuugcuu

SEQ ID NO: 1865308 - RNA, 19 nt, Artificial Sequence
  Description of Artificial Sequence: Synthetic oligonucleotide
cuccgggucuugcuuuuga

SEQ ID NO: 1865309 - RNA, 19 nt, Artificial Sequence
  Description of Artificial Sequence: Synthetic oligonucleotide
caggcccucaagcacauuu

SEQ ID NO: 1865310 - RNA, 19 nt, Artificial Sequence
  Description of Artificial Sequence: Synthetic oligonucleotide
uggcuucuagcagcucauc

SEQ ID NO: 1865311 - RNA, 19 nt, Artificial Sequence
  Description of Artificial Sequence: Synthetic oligonucleotide
accggggcucuuugcugcu

SEQ ID NO: 1865312 - RNA, 19 nt, Artificial Sequence
  Description of Artificial Sequence: Synthetic oligonucleotide
aggcuauaauucaggccau

SEQ ID NO: 1865313 - RNA, 19 nt, Artificial Sequence
  Description of Artificial Sequence: Synthetic oligonucleotide
gcugccggaggcuauaauu

SEQ ID NO: 1865314 - RNA, 19 nt, Artificial Sequence
  Description of Artificial Sequence: Synthetic oligonucleotide
accuccgggucuugcuuuu

SEQ ID NO: 1865315 - RNA, 19 nt, Artificial Sequence
  Description of Artificial Sequence: Synthetic oligonucleotide
gggcccauacaaacuccag

SEQ ID NO: 1865316 - RNA, 19 nt, Artificial Sequence
  Description of Artificial Sequence: Synthetic oligonucleotide
uggccucagggcuccuaua

SEQ ID NO: 1865317 - RNA, 19 nt, Artificial Sequence
  Description of Artificial Sequence: Synthetic oligonucleotide
ccgcucuguggguacacug

SEQ ID NO: 1865318 - RNA, 19 nt, Artificial Sequence
  Description of Artificial Sequence: Synthetic oligonucleotide
gcuaaggugugggccaguc

SEQ ID NO: 1865319 - RNA, 19 nt, Artificial Sequence
  Description of Artificial Sequence: Synthetic oligonucleotide
ggccuuacccauaggcaca

SEQ ID NO: 1865320 - RNA, 19 nt, Artificial Sequence
  Description of Artificial Sequence: Synthetic oligonucleotide
cuaaggugugggccagucu

SEQ ID NO: 1865321 - RNA, 19 nt, Artificial Sequence
  Description of Artificial Sequence: Synthetic oligonucleotide
uagccgcucuguggguaca

SEQ ID NO: 1865322 - RNA, 19 nt, Artificial Sequence
  Description of Artificial Sequence: Synthetic oligonucleotide
gccauagaacuguguuguc

SEQ ID NO: 1865323 - RNA, 19 nt, Artificial Sequence
  Description of Artificial Sequence: Synthetic oligonucleotide
agacgcccuguggcugaac

SEQ ID NO: 1865324 - RNA, 19 nt, Artificial Sequence
  Description of Artificial Sequence: Synthetic oligonucleotide
ugcgcugccggaggcuaua

SEQ ID NO: 1865325 - RNA, 19 nt, Artificial Sequence
  Description of Artificial Sequence: Synthetic oligonucleotide
cagccacugugguguuaac

SEQ ID NO: 1865326 - RNA, 19 nt, Artificial Sequence
  Description of Artificial Sequence: Synthetic oligonucleotide
agcuugucucugagucucu

SEQ ID NO: 1865327 - RNA, 19 nt, Artificial Sequence
  Description of Artificial Sequence: Synthetic oligonucleotide
gggcuccuauaaaccaggc

SEQ ID NO: 1865328 - RNA, 19 nt, Artificial Sequence
  Description of Artificial Sequence: Synthetic oligonucleotide
ggacagcaagccccgucga

SEQ ID NO: 1865329 - RNA, 19 nt, Artificial Sequence
  Description of Artificial Sequence: Synthetic oligonucleotide
ccgugacagccacuagagc

SEQ ID NO: 1865330 - RNA, 19 nt, Artificial Sequence
  Description of Artificial Sequence: Synthetic oligonucleotide
ccuuggagaaccuccgggu

SEQ ID NO: 1865331 - RNA, 19 nt, Artificial Sequence
  Description of Artificial Sequence: Synthetic oligonucleotide
ccuauaaaccaggcccuca

SEQ ID NO: 1865332 - RNA, 19 nt, Artificial Sequence
  Description of Artificial Sequence: Synthetic oligonucleotide
aagccccgucgaacauaag

SEQ ID NO: 1865333 - RNA, 19 nt, Artificial Sequence
  Description of Artificial Sequence: Synthetic oligonucleotide
caucuccuaaaaggucgaa

SEQ ID NO: 1865334 - RNA, 19 nt, Artificial Sequence
  Description of Artificial Sequence: Synthetic oligonucleotide
gcggacagcaagccccguc

SEQ ID NO: 1865335 - RNA, 19 nt, Artificial Sequence
  Description of Artificial Sequence: Synthetic oligonucleotide
ccccaauagccgcucugug

SEQ ID NO: 1865336 - RNA, 19 nt, Artificial Sequence
  Description of Artificial Sequence: Synthetic oligonucleotide
gucgcagcauugccaggcu

SEQ ID NO: 1865337 - RNA, 19 nt, Artificial Sequence
  Description of Artificial Sequence: Synthetic oligonucleotide
uggaagcgaagggcccaua

SEQ ID NO: 1865338 - RNA, 19 nt, Artificial Sequence
  Description of Artificial Sequence: Synthetic oligonucleotide
caauagccgcucugugggu

SEQ ID NO: 1865339 - RNA, 19 nt, Artificial Sequence
  Description of Artificial Sequence: Synthetic oligonucleotide
gccucagggcuccuauaaa

SEQ ID NO: 1865340 - RNA, 19 nt, Artificial Sequence
  Description of Artificial Sequence: Synthetic oligonucleotide
cagccagaacaaggacauc

SEQ ID NO: 1865341 - RNA, 19 nt, Artificial Sequence
  Description of Artificial Sequence: Synthetic oligonucleotide
aggcuccguggccgagaca

SEQ ID NO: 1865342 - RNA, 19 nt, Artificial Sequence
  Description of Artificial Sequence: Synthetic oligonucleotide
ggcuauaauucaggccaua

SEQ ID NO: 1865343 - RNA, 19 nt, Artificial Sequence
  Description of Artificial Sequence: Synthetic oligonucleotide
ccccgucgaacauaagugu

SEQ ID NO: 1865344 - RNA, 19 nt, Artificial Sequence
  Description of Artificial Sequence: Synthetic oligonucleotide
ggauauaccggggcucuuu

SEQ ID NO: 1865345 - RNA, 19 nt, Artificial Sequence
  Description of Artificial Sequence: Synthetic oligonucleotide
cgaguggccucagggcucc

SEQ ID NO: 1865346 - RNA, 19 nt, Artificial Sequence
  Description of Artificial Sequence: Synthetic oligonucleotide
ccgggucugugaccgugac

SEQ ID NO: 1865347 - RNA, 19 nt, Artificial Sequence
  Description of Artificial Sequence: Synthetic oligonucleotide
guggaguccucagggcuau

SEQ ID NO: 1865348 - RNA, 19 nt, Artificial Sequence
  Description of Artificial Sequence: Synthetic oligonucleotide
agcggacagcaagccccgu

SEQ ID NO: 1865349 - RNA, 19 nt, Artificial Sequence
  Description of Artificial Sequence: Synthetic oligonucleotide
aaccagccacggaguugaa

SEQ ID NO: 1865350 - RNA, 19 nt, Artificial Sequence
  Description of Artificial Sequence: Synthetic oligonucleotide
cccgaguggccucagggcu

SEQ ID NO: 1865351 - RNA, 19 nt, Artificial Sequence
  Description of Artificial Sequence: Synthetic oligonucleotide
ggcuaccugcuccgggucu

SEQ ID NO: 1865352 - RNA, 19 nt, Artificial Sequence
  Description of Artificial Sequence: Synthetic oligonucleotide
gacagcccuuggagaaccu

SEQ ID NO: 1865353 - RNA, 19 nt, Artificial Sequence
  Description of Artificial Sequence: Synthetic oligonucleotide
cgaagggcccauacaaacu

SEQ ID NO: 1865354 - RNA, 19 nt, Artificial Sequence
  Description of Artificial Sequence: Synthetic oligonucleotide
gcaagccccgucgaacaua

SEQ ID NO: 1865355 - RNA, 19 nt, Artificial Sequence
  Description of Artificial Sequence: Synthetic oligonucleotide
cgucgaacauaagugucaa

SEQ ID NO: 1865356 - RNA, 19 nt, Artificial Sequence
  Description of Artificial Sequence: Synthetic oligonucleotide
ccuuacccauaggcacagc

SEQ ID NO: 1865357 - RNA, 19 nt, Artificial Sequence
  Description of Artificial Sequence: Synthetic oligonucleotide
cgaaggucaccagaggccu

SEQ ID NO: 1865358 - RNA, 19 nt, Artificial Sequence
  Description of Artificial Sequence: Synthetic oligonucleotide
augcgcugccggaggcuau

SEQ ID NO: 1865359 - RNA, 19 nt, Artificial Sequence
  Description of Artificial Sequence: Synthetic oligonucleotide
cguggaagcgaagggccca

SEQ ID NO: 1865360 - RNA, 19 nt, Artificial Sequence
  Description of Artificial Sequence: Synthetic oligonucleotide
gccacggaguugaauucau

SEQ ID NO: 1865361 - RNA, 19 nt, Artificial Sequence
  Description of Artificial Sequence: Synthetic oligonucleotide
ccuccgggucuugcuuuug

SEQ ID NO: 1865362 - RNA, 19 nt, Artificial Sequence
  Description of Artificial Sequence: Synthetic oligonucleotide
ccacacucaccucccgagu

SEQ ID NO: 1865363 - RNA, 19 nt, Artificial Sequence
  Description of Artificial Sequence: Synthetic oligonucleotide
aggggccaucugggccccu

SEQ ID NO: 1865364 - RNA, 19 nt, Artificial Sequence
  Description of Artificial Sequence: Synthetic oligonucleotide
ccacggaguugaauucauu

SEQ ID NO: 1865365 - RNA, 19 nt, Artificial Sequence
  Description of Artificial Sequence: Synthetic oligonucleotide
gccgcucuguggguacacu

SEQ ID NO: 1865366 - RNA, 19 nt, Artificial Sequence
  Description of Artificial Sequence: Synthetic oligonucleotide
ccggggcucuuugcugcuc

SEQ ID NO: 1865367 - RNA, 19 nt, Artificial Sequence
  Description of Artificial Sequence: Synthetic oligonucleotide
gcgcugccggaggcuauaa

SEQ ID NO: 1865368 - RNA, 19 nt, Artificial Sequence
  Description of Artificial Sequence: Synthetic oligonucleotide
cagguacaucagggaugcu

SEQ ID NO: 1865369 - RNA, 19 nt, Artificial Sequence
  Description of Artificial Sequence: Synthetic oligonucleotide
gcacagccacugugguguu

SEQ ID NO: 1865370 - RNA, 19 nt, Artificial Sequence
  Description of Artificial Sequence: Synthetic oligonucleotide
ccaugcgcugccggaggcu

SEQ ID NO: 1865371 - RNA, 19 nt, Artificial Sequence
  Description of Artificial Sequence: Synthetic oligonucleotide
gcuccguggccgagacagu

SEQ ID NO: 1865372 - RNA, 19 nt, Artificial Sequence
  Description of Artificial Sequence: Synthetic oligonucleotide
cccuccgaggacagcccuu

SEQ ID NO: 1865373 - RNA, 19 nt, Artificial Sequence
  Description of Artificial Sequence: Synthetic oligonucleotide
cgcugccggaggcuauaau

SEQ ID NO: 1865374 - RNA, 19 nt, Artificial Sequence
  Description of Artificial Sequence: Synthetic oligonucleotide
uguuaauuaaguuauaugu

SEQ ID NO: 1865375 - RNA, 19 nt, Artificial Sequence
  Description of Artificial Sequence: Synthetic oligonucleotide
uguguguacacucuuaucg

SEQ ID NO: 1865376 - RNA, 19 nt, Artificial Sequence
  Description of Artificial Sequence: Synthetic oligonucleotide
aacagguuacgacagaccc

SEQ ID NO: 1865377 - RNA, 19 nt, Artificial Sequence
  Description of Artificial Sequence: Synthetic oligonucleotide
aaauauggugccuauacuc

SEQ ID NO: 1865378 - RNA, 19 nt, Artificial Sequence
  Description of Artificial Sequence: Synthetic oligonucleotide
gaucaauagauuuugaggc

SEQ ID NO: 1865379 - RNA, 19 nt, Artificial Sequence
  Description of Artificial Sequence: Synthetic oligonucleotide
guauaaguaacucuuaacg

SEQ ID NO: 1865380 - RNA, 19 nt, Artificial Sequence
  Description of Artificial Sequence: Synthetic oligonucleotide
uuagauacaaccucgaguc

SEQ ID NO: 1865381 - RNA, 19 nt, Artificial Sequence
  Description of Artificial Sequence: Synthetic oligonucleotide
uuaauagggaaauuucccg

SEQ ID NO: 1865382 - RNA, 19 nt, Artificial Sequence
  Description of Artificial Sequence: Synthetic oligonucleotide
auaaguaacucuuaacgag

SEQ ID NO: 1865383 - RNA, 19 nt, Artificial Sequence
  Description of Artificial Sequence: Synthetic oligonucleotide
uccauaguuacucaacagg

SEQ ID NO: 1865384 - RNA, 19 nt, Artificial Sequence
  Description of Artificial Sequence: Synthetic oligonucleotide
acugacuauauuuggaugg

SEQ ID NO: 1865385 - RNA, 19 nt, Artificial Sequence
  Description of Artificial Sequence: Synthetic oligonucleotide
agggauagaauccaaguac

SEQ ID NO: 1865386 - RNA, 19 nt, Artificial Sequence
  Description of Artificial Sequence: Synthetic oligonucleotide
aauauggugccuauacucc

SEQ ID NO: 1865387 - RNA, 19 nt, Artificial Sequence
  Description of Artificial Sequence: Synthetic oligonucleotide
uggaguaacgagcugaucc

SEQ ID NO: 1865388 - RNA, 19 nt, Artificial Sequence
  Description of Artificial Sequence: Synthetic oligonucleotide
uauauguaugaaauuaaga

SEQ ID NO: 1865389 - RNA, 19 nt, Artificial Sequence
  Description of Artificial Sequence: Synthetic oligonucleotide
uacauguuaauuaaguuau

SEQ ID NO: 1865390 - RNA, 19 nt, Artificial Sequence
  Description of Artificial Sequence: Synthetic oligonucleotide
aguaaaugccacuaucugg

SEQ ID NO: 1865391 - RNA, 19 nt, Artificial Sequence
  Description of Artificial Sequence: Synthetic oligonucleotide
aaacacaauccccuggagg

SEQ ID NO: 1865392 - RNA, 19 nt, Artificial Sequence
  Description of Artificial Sequence: Synthetic oligonucleotide
uuaucgguaucccaaaagc

SEQ ID NO: 1865393 - RNA, 19 nt, Artificial Sequence
  Description of Artificial Sequence: Synthetic oligonucleotide
aaucugauuguccaaguca

SEQ ID NO: 1865394 - RNA, 19 nt, Artificial Sequence
  Description of Artificial Sequence: Synthetic oligonucleotide
uauaaguaacucuuaacga

SEQ ID NO: 1865395 - RNA, 19 nt, Artificial Sequence
  Description of Artificial Sequence: Synthetic oligonucleotide
uuugguauaaguaacucuu

SEQ ID NO: 1865396 - RNA, 19 nt, Artificial Sequence
  Description of Artificial Sequence: Synthetic oligonucleotide
uccaagucaucaaaguacg

SEQ ID NO: 1865397 - RNA, 19 nt, Artificial Sequence
  Description of Artificial Sequence: Synthetic oligonucleotide
uaauagggaaauuucccgg

SEQ ID NO: 1865398 - RNA, 19 nt, Artificial Sequence
  Description of Artificial Sequence: Synthetic oligonucleotide
uagauuuugaggcuucaag

SEQ ID NO: 1865399 - RNA, 19 nt, Artificial Sequence
  Description of Artificial Sequence: Synthetic oligonucleotide
uuacauguuaauuaaguua

SEQ ID NO: 1865400 - RNA, 19 nt, Artificial Sequence
  Description of Artificial Sequence: Synthetic oligonucleotide
aauuagauacaaccucgag

SEQ ID NO: 1865401 - RNA, 19 nt, Artificial Sequence
  Description of Artificial Sequence: Synthetic oligonucleotide
auuagauacaaccucgagu

SEQ ID NO: 1865402 - RNA, 19 nt, Artificial Sequence
  Description of Artificial Sequence: Synthetic oligonucleotide
uaugucuacccuuauacac

SEQ ID NO: 1865403 - RNA, 19 nt, Artificial Sequence
  Description of Artificial Sequence: Synthetic oligonucleotide
uugucaucgaucaauagau

SEQ ID NO: 1865404 - RNA, 19 nt, Artificial Sequence
  Description of Artificial Sequence: Synthetic oligonucleotide
caugaacugaccaggaggg

SEQ ID NO: 1865405 - RNA, 19 nt, Artificial Sequence
  Description of Artificial Sequence: Synthetic oligonucleotide
aagucaucaaaguacgggu

SEQ ID NO: 1865406 - RNA, 19 nt, Artificial Sequence
  Description of Artificial Sequence: Synthetic oligonucleotide
aguaguccuaugucuaccc

SEQ ID NO: 1865407 - RNA, 19 nt, Artificial Sequence
  Description of Artificial Sequence: Synthetic oligonucleotide
ucgaucaauagauuuugag

SEQ ID NO: 1865408 - RNA, 19 nt, Artificial Sequence
  Description of Artificial Sequence: Synthetic oligonucleotide
uaaguaacucuuaacgagu

SEQ ID NO: 1865409 - RNA, 19 nt, Artificial Sequence
  Description of Artificial Sequence: Synthetic oligonucleotide
aauagggaaauuucccgga

SEQ ID NO: 1865410 - RNA, 19 nt, Artificial Sequence
  Description of Artificial Sequence: Synthetic oligonucleotide
uacucaacagguuacgaca

SEQ ID NO: 1865411 - RNA, 19 nt, Artificial Sequence
  Description of Artificial Sequence: Synthetic oligonucleotide
auguuaauuaaguuauaug

SEQ ID NO: 1865412 - RNA, 19 nt, Artificial Sequence
  Description of Artificial Sequence: Synthetic oligonucleotide
agaucgguaccauaguguc

SEQ ID NO: 1865413 - RNA, 19 nt, Artificial Sequence
  Description of Artificial Sequence: Synthetic oligonucleotide
uauagucuuccauaguuac

SEQ ID NO: 1865414 - RNA, 19 nt, Artificial Sequence
  Description of Artificial Sequence: Synthetic oligonucleotide
gaaauuucccggauggcgg

SEQ ID NO: 1865415 - RNA, 19 nt, Artificial Sequence
  Description of Artificial Sequence: Synthetic oligonucleotide
aucgccauggaaaagcggc

SEQ ID NO: 1865416 - RNA, 19 nt, Artificial Sequence
  Description of Artificial Sequence: Synthetic oligonucleotide
aguuauauguaugaaauua

SEQ ID NO: 1865417 - RNA, 19 nt, Artificial Sequence
  Description of Artificial Sequence: Synthetic oligonucleotide
ugaaucgccauggaaaagc

SEQ ID NO: 1865418 - RNA, 19 nt, Artificial Sequence
  Description of Artificial Sequence: Synthetic oligonucleotide
ugaagaauccaugaacuga

SEQ ID NO: 1865419 - RNA, 19 nt, Artificial Sequence
  Description of Artificial Sequence: Synthetic oligonucleotide
gagugaagaauccaugaac

SEQ ID NO: 1865420 - RNA, 19 nt, Artificial Sequence
  Description of Artificial Sequence: Synthetic oligonucleotide
uacaccacaccauaaguac

SEQ ID NO: 1865421 - RNA, 19 nt, Artificial Sequence
  Description of Artificial Sequence: Synthetic oligonucleotide
uauauuuggauggcgaagu

SEQ ID NO: 1865422 - RNA, 19 nt, Artificial Sequence
  Description of Artificial Sequence: Synthetic oligonucleotide
auuugguauaaguaacucu

SEQ ID NO: 1865423 - RNA, 19 nt, Artificial Sequence
  Description of Artificial Sequence: Synthetic oligonucleotide
uucuugagauccauggaca

SEQ ID NO: 1865424 - RNA, 19 nt, Artificial Sequence
  Description of Artificial Sequence: Synthetic oligonucleotide
uuuugauauagucuuccau

SEQ ID NO: 1865425 - RNA, 19 nt, Artificial Sequence
  Description of Artificial Sequence: Synthetic oligonucleotide
cuuaacgagugaagaaucc

SEQ ID NO: 1865426 - RNA, 19 nt, Artificial Sequence
  Description of Artificial Sequence: Synthetic oligonucleotide
cugugaagaacucuucggg

SEQ ID NO: 1865427 - RNA, 19 nt, Artificial Sequence
  Description of Artificial Sequence: Synthetic oligonucleotide
cuggagaucgguaccauag

SEQ ID NO: 1865428 - RNA, 19 nt, Artificial Sequence
  Description of Artificial Sequence: Synthetic oligonucleotide
ucuuaacgagugaagaauc

SEQ ID NO: 1865429 - RNA, 19 nt, Artificial Sequence
  Description of Artificial Sequence: Synthetic oligonucleotide
uaacucuuaacgagugaag

SEQ ID NO: 1865430 - RNA, 19 nt, Artificial Sequence
  Description of Artificial Sequence: Synthetic oligonucleotide
uacuucuggccacacuucg

SEQ ID NO: 1865431 - RNA, 19 nt, Artificial Sequence
  Description of Artificial Sequence: Synthetic oligonucleotide
aacucuuaacgagugaaga

SEQ ID NO: 1865432 - RNA, 19 nt, Artificial Sequence
  Description of Artificial Sequence: Synthetic oligonucleotide
uauacaagacaggaggaga

SEQ ID NO: 1865433 - RNA, 19 nt, Artificial Sequence
  Description of Artificial Sequence: Synthetic oligonucleotide
uucgggagugacaaaacac

SEQ ID NO: 1865434 - RNA, 19 nt, Artificial Sequence
  Description of Artificial Sequence: Synthetic oligonucleotide
uaucgguaucccaaaagcu

SEQ ID NO: 1865435 - RNA, 19 nt, Artificial Sequence
  Description of Artificial Sequence: Synthetic oligonucleotide
augucuacccuuauacacc

SEQ ID NO: 1865436 - RNA, 19 nt, Artificial Sequence
  Description of Artificial Sequence: Synthetic oligonucleotide
cuuaucgguaucccaaaag

SEQ ID NO: 1865437 - RNA, 19 nt, Artificial Sequence
  Description of Artificial Sequence: Synthetic oligonucleotide
uuacucaacagguuacgac

SEQ ID NO: 1865438 - RNA, 19 nt, Artificial Sequence
  Description of Artificial Sequence: Synthetic oligonucleotide
ugucacuaccucaugugug

SEQ ID NO: 1865439 - RNA, 19 nt, Artificial Sequence
  Description of Artificial Sequence: Synthetic oligonucleotide
uuuugaggcuucaagucuc

SEQ ID NO: 1865440 - RNA, 19 nt, Artificial Sequence
  Description of Artificial Sequence: Synthetic oligonucleotide
uugauuguuccuuugucau

SEQ ID NO: 1865441 - RNA, 19 nt, Artificial Sequence
  Description of Artificial Sequence: Synthetic oligonucleotide
accucauguguguacacuc

SEQ ID NO: 1865442 - RNA, 19 nt, Artificial Sequence
  Description of Artificial Sequence: Synthetic oligonucleotide
ugaaaauccugaagagcug

SEQ ID NO: 1865443 - RNA, 19 nt, Artificial Sequence
  Description of Artificial Sequence: Synthetic oligonucleotide
ucgguaucccaaaagcucu

SEQ ID NO: 1865444 - RNA, 19 nt, Artificial Sequence
  Description of Artificial Sequence: Synthetic oligonucleotide
ucugaaucgccauggaaaa

SEQ ID NO: 1865445 - RNA, 19 nt, Artificial Sequence
  Description of Artificial Sequence: Synthetic oligonucleotide
agauucguuuggcaggauc

SEQ ID NO: 1865446 - RNA, 19 nt, Artificial Sequence
  Description of Artificial Sequence: Synthetic oligonucleotide
uaagaaaaguccaggugau

SEQ ID NO: 1865447 - RNA, 19 nt, Artificial Sequence
  Description of Artificial Sequence: Synthetic oligonucleotide
ugguauaaguaacucuuaa

SEQ ID NO: 1865448 - RNA, 19 nt, Artificial Sequence
  Description of Artificial Sequence: Synthetic oligonucleotide
uggaggauuugguauaagu

SEQ ID NO: 1865449 - RNA, 19 nt, Artificial Sequence
  Description of Artificial Sequence: Synthetic oligonucleotide
uucucuauuuugauauagu

SEQ ID NO: 1865450 - RNA, 19 nt, Artificial Sequence
  Description of Artificial Sequence: Synthetic oligonucleotide
agugucacuaccucaugug

SEQ ID NO: 1865451 - RNA, 19 nt, Artificial Sequence
  Description of Artificial Sequence: Synthetic oligonucleotide
ucaucgaucaauagauuuu

SEQ ID NO: 1865452 - RNA, 19 nt, Artificial Sequence
  Description of Artificial Sequence: Synthetic oligonucleotide
ggagugacaaaacacaauc

SEQ ID NO: 1865453 - RNA, 19 nt, Artificial Sequence
  Description of Artificial Sequence: Synthetic oligonucleotide
uugccagagauucguuugg

SEQ ID NO: 1865454 - RNA, 19 nt, Artificial Sequence
  Description of Artificial Sequence: Synthetic oligonucleotide
aucaauagauuuugaggcu

SEQ ID NO: 1865455 - RNA, 19 nt, Artificial Sequence
  Description of Artificial Sequence: Synthetic oligonucleotide
aucgguaucccaaaagcuc

SEQ ID NO: 1865456 - RNA, 19 nt, Artificial Sequence
  Description of Artificial Sequence: Synthetic oligonucleotide
ugggaugcgaggcuccccg

SEQ ID NO: 1865457 - RNA, 19 nt, Artificial Sequence
  Description of Artificial Sequence: Synthetic oligonucleotide
accauagugucacuaccuc

SEQ ID NO: 1865458 - RNA, 19 nt, Artificial Sequence
  Description of Artificial Sequence: Synthetic oligonucleotide
aacucuucgggagugacaa

SEQ ID NO: 1865459 - RNA, 19 nt, Artificial Sequence
  Description of Artificial Sequence: Synthetic oligonucleotide
uugacaugggaugcgaggc

SEQ ID NO: 1865460 - RNA, 19 nt, Artificial Sequence
  Description of Artificial Sequence: Synthetic oligonucleotide
uuaacgagugaagaaucca

SEQ ID NO: 1865461 - RNA, 19 nt, Artificial Sequence
  Description of Artificial Sequence: Synthetic oligonucleotide
ugucuacccuuauacacca

SEQ ID NO: 1865462 - RNA, 19 nt, Artificial Sequence
  Description of Artificial Sequence: Synthetic oligonucleotide
aguuugauuguuccuuugu

SEQ ID NO: 1865463 - RNA, 19 nt, Artificial Sequence
  Description of Artificial Sequence: Synthetic oligonucleotide
acgagcugaucccagcaac

SEQ ID NO: 1865464 - RNA, 19 nt, Artificial Sequence
  Description of Artificial Sequence: Synthetic oligonucleotide
uaacgagugaagaauccau

SEQ ID NO: 1865465 - RNA, 19 nt, Artificial Sequence
  Description of Artificial Sequence: Synthetic oligonucleotide
gaccaggagggauagaauc

SEQ ID NO: 1865466 - RNA, 19 nt, Artificial Sequence
  Description of Artificial Sequence: Synthetic oligonucleotide
uaccauagugucacuaccu

SEQ ID NO: 1865467 - RNA, 19 nt, Artificial Sequence
  Description of Artificial Sequence: Synthetic oligonucleotide
uacacucuuaucgguaucc

SEQ ID NO: 1865468 - RNA, 19 nt, Artificial Sequence
  Description of Artificial Sequence: Synthetic oligonucleotide
ggcgaaguucuuuuaauag

SEQ ID NO: 1865469 - RNA, 19 nt, Artificial Sequence
  Description of Artificial Sequence: Synthetic oligonucleotide
cgaucaauagauuuugagg

SEQ ID NO: 1865470 - RNA, 19 nt, Artificial Sequence
  Description of Artificial Sequence: Synthetic oligonucleotide
uaaucugauuguccaaguc

SEQ ID NO: 1865471 - RNA, 19 nt, Artificial Sequence
  Description of Artificial Sequence: Synthetic oligonucleotide
ggaaauuucccggauggcg

SEQ ID NO: 1865472 - RNA, 19 nt, Artificial Sequence
  Description of Artificial Sequence: Synthetic oligonucleotide
acgagugaagaauccauga

SEQ ID NO: 1865473 - RNA, 19 nt, Artificial Sequence
  Description of Artificial Sequence: Synthetic oligonucleotide
gaaauguguucuuguaguc

SEQ ID NO: 1865474 - RNA, 19 nt, Artificial Sequence
  Description of Artificial Sequence: Synthetic oligonucleotide
uguguacacucuuaucggu

SEQ ID NO: 1865475 - RNA, 19 nt, Artificial Sequence
  Description of Artificial Sequence: Synthetic oligonucleotide
agacugacuauauuuggau

SEQ ID NO: 1865476 - RNA, 19 nt, Artificial Sequence
  Description of Artificial Sequence: Synthetic oligonucleotide
aagacugacuauauuugga

SEQ ID NO: 1865477 - RNA, 19 nt, Artificial Sequence
  Description of Artificial Sequence: Synthetic oligonucleotide
gcgaaguucuuuuaauagg

SEQ ID NO: 1865478 - RNA, 19 nt, Artificial Sequence
  Description of Artificial Sequence: Synthetic oligonucleotide
acuauauuuggauggcgaa

SEQ ID NO: 1865479 - RNA, 19 nt, Artificial Sequence
  Description of Artificial Sequence: Synthetic oligonucleotide
aacacuucuggagaucggu

SEQ ID NO: 1865480 - RNA, 19 nt, Artificial Sequence
  Description of Artificial Sequence: Synthetic oligonucleotide
ugacuauauuuggauggcg

SEQ ID NO: 1865481 - RNA, 19 nt, Artificial Sequence
  Description of Artificial Sequence: Synthetic oligonucleotide
uacccuuauacaccacacc

SEQ ID NO: 1865482 - RNA, 19 nt, Artificial Sequence
  Description of Artificial Sequence: Synthetic oligonucleotide
aguuacucaacagguuacg

SEQ ID NO: 1865483 - RNA, 19 nt, Artificial Sequence
  Description of Artificial Sequence: Synthetic oligonucleotide
cacacuucguuguuaggag

SEQ ID NO: 1865484 - RNA, 19 nt, Artificial Sequence
  Description of Artificial Sequence: Synthetic oligonucleotide
acaguaaaugccacuaucu

SEQ ID NO: 1865485 - RNA, 19 nt, Artificial Sequence
  Description of Artificial Sequence: Synthetic oligonucleotide
ucaacagguuacgacagac

SEQ ID NO: 1865486 - RNA, 19 nt, Artificial Sequence
  Description of Artificial Sequence: Synthetic oligonucleotide
cuauauuuggauggcgaag

SEQ ID NO: 1865487 - RNA, 19 nt, Artificial Sequence
  Description of Artificial Sequence: Synthetic oligonucleotide
ugauauagucuuccauagu

SEQ ID NO: 1865488 - RNA, 19 nt, Artificial Sequence
  Description of Artificial Sequence: Synthetic oligonucleotide
ccuaugucuacccuuauac

SEQ ID NO: 1865489 - RNA, 19 nt, Artificial Sequence
  Description of Artificial Sequence: Synthetic oligonucleotide
auacaagacaggaggagag

SEQ ID NO: 1865490 - RNA, 19 nt, Artificial Sequence
  Description of Artificial Sequence: Synthetic oligonucleotide
gaaucgccauggaaaagcg

SEQ ID NO: 1865491 - RNA, 19 nt, Artificial Sequence
  Description of Artificial Sequence: Synthetic oligonucleotide
aacgagugaagaauccaug

SEQ ID NO: 1865492 - RNA, 19 nt, Artificial Sequence
  Description of Artificial Sequence: Synthetic oligonucleotide
uagugucacuaccucaugu

SEQ ID NO: 1865493 - RNA, 19 nt, Artificial Sequence
  Description of Artificial Sequence: Synthetic oligonucleotide
uguacacucuuaucgguau

SEQ ID NO: 1865494 - RNA, 19 nt, Artificial Sequence
  Description of Artificial Sequence: Synthetic oligonucleotide
caugagcacauccugaaga

SEQ ID NO: 1865495 - RNA, 19 nt, Artificial Sequence
  Description of Artificial Sequence: Synthetic oligonucleotide
uaacgagcugaucccagca

SEQ ID NO: 1865496 - RNA, 19 nt, Artificial Sequence
  Description of Artificial Sequence: Synthetic oligonucleotide
guaccauagugucacuacc

SEQ ID NO: 1865497 - RNA, 19 nt, Artificial Sequence
  Description of Artificial Sequence: Synthetic oligonucleotide
aucaaaguacgggugcuuc

SEQ ID NO: 1865498 - RNA, 19 nt, Artificial Sequence
  Description of Artificial Sequence: Synthetic oligonucleotide
auggccacuaucuggccag

SEQ ID NO: 1865499 - RNA, 19 nt, Artificial Sequence
  Description of Artificial Sequence: Synthetic oligonucleotide
uucguuguuaggagucccc

SEQ ID NO: 1865500 - RNA, 19 nt, Artificial Sequence
  Description of Artificial Sequence: Synthetic oligonucleotide
uguuaggaguccccagagc

SEQ ID NO: 1865501 - RNA, 19 nt, Artificial Sequence
  Description of Artificial Sequence: Synthetic oligonucleotide
caguaaaugccacuaucug

SEQ ID NO: 1865502 - RNA, 19 nt, Artificial Sequence
  Description of Artificial Sequence: Synthetic oligonucleotide
aauccccuggaggauuugg

SEQ ID NO: 1865503 - RNA, 19 nt, Artificial Sequence
  Description of Artificial Sequence: Synthetic oligonucleotide
aauagauuuugaggcuuca

SEQ ID NO: 1865504 - RNA, 19 nt, Artificial Sequence
  Description of Artificial Sequence: Synthetic oligonucleotide
caucgaucaauagauuuug

SEQ ID NO: 1865505 - RNA, 19 nt, Artificial Sequence
  Description of Artificial Sequence: Synthetic oligonucleotide
acuucguuguuaggagucc

SEQ ID NO: 1865506 - RNA, 19 nt, Artificial Sequence
  Description of Artificial Sequence: Synthetic oligonucleotide
gugaagaauccaugaacug

SEQ ID NO: 1865507 - RNA, 19 nt, Artificial Sequence
  Description of Artificial Sequence: Synthetic oligonucleotide
cagggguggaguaacgagc

SEQ ID NO: 1865508 - RNA, 19 nt, Artificial Sequence
  Description of Artificial Sequence: Synthetic oligonucleotide
agauacaaccucgaguccu

SEQ ID NO: 1865509 - RNA, 19 nt, Artificial Sequence
  Description of Artificial Sequence: Synthetic oligonucleotide
acucuuaacgagugaagaa

SEQ ID NO: 1865510 - RNA, 19 nt, Artificial Sequence
  Description of Artificial Sequence: Synthetic oligonucleotide
gagacucuacuucuggcca

SEQ ID NO: 1865511 - RNA, 19 nt, Artificial Sequence
  Description of Artificial Sequence: Synthetic oligonucleotide
acaccacaccauaaguacc

SEQ ID NO: 1865512 - RNA, 19 nt, Artificial Sequence
  Description of Artificial Sequence: Synthetic oligonucleotide
cuacccuuauacaccacac

SEQ ID NO: 1865513 - RNA, 19 nt, Artificial Sequence
  Description of Artificial Sequence: Synthetic oligonucleotide
gugccuauacuccagaugu

SEQ ID NO: 1865514 - RNA, 19 nt, Artificial Sequence
  Description of Artificial Sequence: Synthetic oligonucleotide
gaggcagcgacucccggag

SEQ ID NO: 1865515 - RNA, 19 nt, Artificial Sequence
  Description of Artificial Sequence: Synthetic oligonucleotide
auauggugccuauacucca

SEQ ID NO: 1865516 - RNA, 19 nt, Artificial Sequence
  Description of Artificial Sequence: Synthetic oligonucleotide
ucucugaaucgccauggaa

SEQ ID NO: 1865517 - RNA, 19 nt, Artificial Sequence
  Description of Artificial Sequence: Synthetic oligonucleotide
uagauacaaccucgagucc

SEQ ID NO: 1865518 - RNA, 19 nt, Artificial Sequence
  Description of Artificial Sequence: Synthetic oligonucleotide
ucaauagauuuugaggcuu

SEQ ID NO: 1865519 - RNA, 19 nt, Artificial Sequence
  Description of Artificial Sequence: Synthetic oligonucleotide
guuaggaguccccagagcu

SEQ ID NO: 1865520 - RNA, 19 nt, Artificial Sequence
  Description of Artificial Sequence: Synthetic oligonucleotide
caacagguuacgacagacc

SEQ ID NO: 1865521 - RNA, 19 nt, Artificial Sequence
  Description of Artificial Sequence: Synthetic oligonucleotide
guuguuaggaguccccaga

SEQ ID NO: 1865522 - RNA, 19 nt, Artificial Sequence
  Description of Artificial Sequence: Synthetic oligonucleotide
agaacucuucgggagugac

SEQ ID NO: 1865523 - RNA, 19 nt, Artificial Sequence
  Description of Artificial Sequence: Synthetic oligonucleotide
cuuccauaguuacucaaca

SEQ ID NO: 1865524 - RNA, 19 nt, Artificial Sequence
  Description of Artificial Sequence: Synthetic oligonucleotide
acugcgcggaggcagcgac

SEQ ID NO: 1865525 - RNA, 19 nt, Artificial Sequence
  Description of Artificial Sequence: Synthetic oligonucleotide
ucuucgggagugacaaaac

SEQ ID NO: 1865526 - RNA, 19 nt, Artificial Sequence
  Description of Artificial Sequence: Synthetic oligonucleotide
uugguauaaguaacucuua

SEQ ID NO: 1865527 - RNA, 19 nt, Artificial Sequence
  Description of Artificial Sequence: Synthetic oligonucleotide
uaguugcuaguucugcaaa

SEQ ID NO: 1865528 - RNA, 19 nt, Artificial Sequence
  Description of Artificial Sequence: Synthetic oligonucleotide
ucaacagggguggaguaac

SEQ ID NO: 1865529 - RNA, 19 nt, Artificial Sequence
  Description of Artificial Sequence: Synthetic oligonucleotide
aaucgccauggaaaagcgg

SEQ ID NO: 1865530 - RNA, 19 nt, Artificial Sequence
  Description of Artificial Sequence: Synthetic oligonucleotide
ucuuaucgguaucccaaaa

SEQ ID NO: 1865531 - RNA, 19 nt, Artificial Sequence
  Description of Artificial Sequence: Synthetic oligonucleotide
ggaguaacgagcugauccc

SEQ ID NO: 1865532 - RNA, 19 nt, Artificial Sequence
  Description of Artificial Sequence: Synthetic oligonucleotide
gauggcgaaguucuuuuaa

SEQ ID NO: 1865533 - RNA, 19 nt, Artificial Sequence
  Description of Artificial Sequence: Synthetic oligonucleotide
ugaacugaccaggagggau

SEQ ID NO: 1865534 - RNA, 19 nt, Artificial Sequence
  Description of Artificial Sequence: Synthetic oligonucleotide
acacucuuaucgguauccc

SEQ ID NO: 1865535 - RNA, 19 nt, Artificial Sequence
  Description of Artificial Sequence: Synthetic oligonucleotide
aacugaccaggagggauag

SEQ ID NO: 1865536 - RNA, 19 nt, Artificial Sequence
  Description of Artificial Sequence: Synthetic oligonucleotide
ugauuguccaagucaucaa

SEQ ID NO: 1865537 - RNA, 19 nt, Artificial Sequence
  Description of Artificial Sequence: Synthetic oligonucleotide
cacuucguuguuaggaguc

SEQ ID NO: 1865538 - RNA, 19 nt, Artificial Sequence
  Description of Artificial Sequence: Synthetic oligonucleotide
cugacuauauuuggauggc

SEQ ID NO: 1865539 - RNA, 19 nt, Artificial Sequence
  Description of Artificial Sequence: Synthetic oligonucleotide
caauagauuuugaggcuuc

SEQ ID NO: 1865540 - RNA, 19 nt, Artificial Sequence
  Description of Artificial Sequence: Synthetic oligonucleotide
uuacgacagacccucucuc

SEQ ID NO: 1865541 - RNA, 19 nt, Artificial Sequence
  Description of Artificial Sequence: Synthetic oligonucleotide
gauacaaccucgaguccug

SEQ ID NO: 1865542 - RNA, 19 nt, Artificial Sequence
  Description of Artificial Sequence: Synthetic oligonucleotide
caaaguacgggugcuucag

SEQ ID NO: 1865543 - RNA, 19 nt, Artificial Sequence
  Description of Artificial Sequence: Synthetic oligonucleotide
guaacgagcugaucccagc

SEQ ID NO: 1865544 - RNA, 19 nt, Artificial Sequence
  Description of Artificial Sequence: Synthetic oligonucleotide
acaaccucgaguccugcau

SEQ ID NO: 1865545 - RNA, 19 nt, Artificial Sequence
  Description of Artificial Sequence: Synthetic oligonucleotide
cacuaucuggcccugccac

SEQ ID NO: 1865546 - RNA, 19 nt, Artificial Sequence
  Description of Artificial Sequence: Synthetic oligonucleotide
aacgagcugaucccagcaa

SEQ ID NO: 1865547 - RNA, 19 nt, Artificial Sequence
  Description of Artificial Sequence: Synthetic oligonucleotide
cagguuacgacagacccuc

SEQ ID NO: 1865548 - RNA, 19 nt, Artificial Sequence
  Description of Artificial Sequence: Synthetic oligonucleotide
acuaccucauguguguaca

SEQ ID NO: 1865549 - RNA, 19 nt, Artificial Sequence
  Description of Artificial Sequence: Synthetic oligonucleotide
gcaacacuucuggagaucg

SEQ ID NO: 1865550 - RNA, 19 nt, Artificial Sequence
  Description of Artificial Sequence: Synthetic oligonucleotide
ucaucaaaguacgggugcu

SEQ ID NO: 1865551 - RNA, 19 nt, Artificial Sequence
  Description of Artificial Sequence: Synthetic oligonucleotide
gccauuuugccagagauuc

SEQ ID NO: 1865552 - RNA, 19 nt, Artificial Sequence
  Description of Artificial Sequence: Synthetic oligonucleotide
uggcgaaguucuuuuaaua

SEQ ID NO: 1865553 - RNA, 19 nt, Artificial Sequence
  Description of Artificial Sequence: Synthetic oligonucleotide
aguugcuaguucugcaaau

SEQ ID NO: 1865554 - RNA, 19 nt, Artificial Sequence
  Description of Artificial Sequence: Synthetic oligonucleotide
uggagaucgguaccauagu

SEQ ID NO: 1865555 - RNA, 19 nt, Artificial Sequence
  Description of Artificial Sequence: Synthetic oligonucleotide
cugaagacugacuauauuu

SEQ ID NO: 1865556 - RNA, 19 nt, Artificial Sequence
  Description of Artificial Sequence: Synthetic oligonucleotide
ugacaugggaugcgaggcu

SEQ ID NO: 1865557 - RNA, 19 nt, Artificial Sequence
  Description of Artificial Sequence: Synthetic oligonucleotide
auggcgaaguucuuuuaau

SEQ ID NO: 1865558 - RNA, 19 nt, Artificial Sequence
  Description of Artificial Sequence: Synthetic oligonucleotide
auagugucacuaccucaug

SEQ ID NO: 1865559 - RNA, 19 nt, Artificial Sequence
  Description of Artificial Sequence: Synthetic oligonucleotide
ggagaucgguaccauagug

SEQ ID NO: 1865560 - RNA, 19 nt, Artificial Sequence
  Description of Artificial Sequence: Synthetic oligonucleotide
uggauggcgaaguucuuuu

SEQ ID NO: 1865561 - RNA, 19 nt, Artificial Sequence
  Description of Artificial Sequence: Synthetic oligonucleotide
uccaggugaugguuuacaa

SEQ ID NO: 1865562 - RNA, 19 nt, Artificial Sequence
  Description of Artificial Sequence: Synthetic oligonucleotide
uggccaguaguccuauguc

SEQ ID NO: 1865563 - RNA, 19 nt, Artificial Sequence
  Description of Artificial Sequence: Synthetic oligonucleotide
agagauucguuuggcagga

SEQ ID NO: 1865564 - RNA, 19 nt, Artificial Sequence
  Description of Artificial Sequence: Synthetic oligonucleotide
ucugauuguccaagucauc

SEQ ID NO: 1865565 - RNA, 19 nt, Artificial Sequence
  Description of Artificial Sequence: Synthetic oligonucleotide
uccuaugucuacccuuaua

SEQ ID NO: 1865566 - RNA, 19 nt, Artificial Sequence
  Description of Artificial Sequence: Synthetic oligonucleotide
auuucccggauggcgguac

SEQ ID NO: 1865567 - RNA, 19 nt, Artificial Sequence
  Description of Artificial Sequence: Synthetic oligonucleotide
aguaacgagcugaucccag

SEQ ID NO: 1865568 - RNA, 19 nt, Artificial Sequence
  Description of Artificial Sequence: Synthetic oligonucleotide
caacacuucuggagaucgg

SEQ ID NO: 1865569 - RNA, 19 nt, Artificial Sequence
  Description of Artificial Sequence: Synthetic oligonucleotide
ucgccauggaaaagcggcu

SEQ ID NO: 1865570 - RNA, 19 nt, Artificial Sequence
  Description of Artificial Sequence: Synthetic oligonucleotide
ucguuguuaggagucccca

SEQ ID NO: 1865571 - RNA, 19 nt, Artificial Sequence
  Description of Artificial Sequence: Synthetic oligonucleotide
gcggacacagcgcaguucc

SEQ ID NO: 1865572 - RNA, 19 nt, Artificial Sequence
  Description of Artificial Sequence: Synthetic oligonucleotide
acaugggaugcgaggcucc

SEQ ID NO: 1865573 - RNA, 19 nt, Artificial Sequence
  Description of Artificial Sequence: Synthetic oligonucleotide
caguuugauuguuccuuug

SEQ ID NO: 1865574 - RNA, 19 nt, Artificial Sequence
  Description of Artificial Sequence: Synthetic oligonucleotide
ugucaucgaucaauagauu

SEQ ID NO: 1865575 - RNA, 19 nt, Artificial Sequence
  Description of Artificial Sequence: Synthetic oligonucleotide
ugaccaggagggauagaau

SEQ ID NO: 1865576 - RNA, 19 nt, Artificial Sequence
  Description of Artificial Sequence: Synthetic oligonucleotide
cauagugucacuaccucau

SEQ ID NO: 1865577 - RNA, 19 nt, Artificial Sequence
  Description of Artificial Sequence: Synthetic oligonucleotide
gagagcaaauccaagccgu

SEQ ID NO: 1865578 - RNA, 19 nt, Artificial Sequence
  Description of Artificial Sequence: Synthetic oligonucleotide
cuucgggagugacaaaaca

SEQ ID NO: 1865579 - RNA, 19 nt, Artificial Sequence
  Description of Artificial Sequence: Synthetic oligonucleotide
uaccucauguguguacacu

SEQ ID NO: 1865580 - RNA, 19 nt, Artificial Sequence
  Description of Artificial Sequence: Synthetic oligonucleotide
auauagucuuccauaguua

SEQ ID NO: 1865581 - RNA, 19 nt, Artificial Sequence
  Description of Artificial Sequence: Synthetic oligonucleotide
caguaguccuaugucuacc

SEQ ID NO: 1865582 - RNA, 19 nt, Artificial Sequence
  Description of Artificial Sequence: Synthetic oligonucleotide
ggagagccaacaguaaaug

SEQ ID NO: 1865583 - RNA, 19 nt, Artificial Sequence
  Description of Artificial Sequence: Synthetic oligonucleotide
guucccgcggcggacacag

SEQ ID NO: 1865584 - RNA, 19 nt, Artificial Sequence
  Description of Artificial Sequence: Synthetic oligonucleotide
guuacucaacagguuacga

SEQ ID NO: 1865585 - RNA, 19 nt, Artificial Sequence
  Description of Artificial Sequence: Synthetic oligonucleotide
caaccucgaguccugcaug

SEQ ID NO: 1865586 - RNA, 19 nt, Artificial Sequence
  Description of Artificial Sequence: Synthetic oligonucleotide
ugucaacagggguggagua

SEQ ID NO: 1865587 - RNA, 19 nt, Artificial Sequence
  Description of Artificial Sequence: Synthetic oligonucleotide
agcgcaguuccggacugcg

SEQ ID NO: 1865588 - RNA, 19 nt, Artificial Sequence
  Description of Artificial Sequence: Synthetic oligonucleotide
cauguuaauuaaguuauau

SEQ ID NO: 1865589 - RNA, 19 nt, Artificial Sequence
  Description of Artificial Sequence: Synthetic oligonucleotide
aggagagccaacaguaaau

SEQ ID NO: 1865590 - RNA, 19 nt, Artificial Sequence
  Description of Artificial Sequence: Synthetic oligonucleotide
gucacuaccucaugugugu

SEQ ID NO: 1865591 - RNA, 19 nt, Artificial Sequence
  Description of Artificial Sequence: Synthetic oligonucleotide
cuaccucauguguguacac

SEQ ID NO: 1865592 - RNA, 19 nt, Artificial Sequence
  Description of Artificial Sequence: Synthetic oligonucleotide
ugccagagauucguuuggc

SEQ ID NO: 1865593 - RNA, 19 nt, Artificial Sequence
  Description of Artificial Sequence: Synthetic oligonucleotide
gagaucgguaccauagugu

SEQ ID NO: 1865594 - RNA, 19 nt, Artificial Sequence
  Description of Artificial Sequence: Synthetic oligonucleotide
auagauuuugaggcuucaa

SEQ ID NO: 1865595 - RNA, 19 nt, Artificial Sequence
  Description of Artificial Sequence: Synthetic oligonucleotide
uuggauggcgaaguucuuu

SEQ ID NO: 1865596 - RNA, 19 nt, Artificial Sequence
  Description of Artificial Sequence: Synthetic oligonucleotide
ugccuauacuccagauguc

SEQ ID NO: 1865597 - RNA, 19 nt, Artificial Sequence
  Description of Artificial Sequence: Synthetic oligonucleotide
agggguggaguaacgagcu

SEQ ID NO: 1865598 - RNA, 19 nt, Artificial Sequence
  Description of Artificial Sequence: Synthetic oligonucleotide
gcggcuucuuaguugcuag

SEQ ID NO: 1865599 - RNA, 19 nt, Artificial Sequence
  Description of Artificial Sequence: Synthetic oligonucleotide
caagcagggacuccacaga

SEQ ID NO: 1865600 - RNA, 19 nt, Artificial Sequence
  Description of Artificial Sequence: Synthetic oligonucleotide
cacucuuaucgguauccca

SEQ ID NO: 1865601 - RNA, 19 nt, Artificial Sequence
  Description of Artificial Sequence: Synthetic oligonucleotide
uuuggauggcgaaguucuu

SEQ ID NO: 1865602 - RNA, 19 nt, Artificial Sequence
  Description of Artificial Sequence: Synthetic oligonucleotide
augggaugcgaggcucccc

SEQ ID NO: 1865603 - RNA, 19 nt, Artificial Sequence
  Description of Artificial Sequence: Synthetic oligonucleotide
cugaaucgccauggaaaag

SEQ ID NO: 1865604 - RNA, 19 nt, Artificial Sequence
  Description of Artificial Sequence: Synthetic oligonucleotide
aguccuaugucuacccuua

SEQ ID NO: 1865605 - RNA, 19 nt, Artificial Sequence
  Description of Artificial Sequence: Synthetic oligonucleotide
cauuuugccagagauucgu

SEQ ID NO: 1865606 - RNA, 19 nt, Artificial Sequence
  Description of Artificial Sequence: Synthetic oligonucleotide
acagguuacgacagacccu

SEQ ID NO: 1865607 - RNA, 19 nt, Artificial Sequence
  Description of Artificial Sequence: Synthetic oligonucleotide
gaguaacgagcugauccca

SEQ ID NO: 1865608 - RNA, 19 nt, Artificial Sequence
  Description of Artificial Sequence: Synthetic oligonucleotide
ugcaaauauggugccuaua

SEQ ID NO: 1865609 - RNA, 19 nt, Artificial Sequence
  Description of Artificial Sequence: Synthetic oligonucleotide
caaauccaagccguuuuca

SEQ ID NO: 1865610 - RNA, 19 nt, Artificial Sequence
  Description of Artificial Sequence: Synthetic oligonucleotide
gaucgguaccauaguguca

SEQ ID NO: 1865611 - RNA, 19 nt, Artificial Sequence
  Description of Artificial Sequence: Synthetic oligonucleotide
guugcuaguucugcaaaua

SEQ ID NO: 1865612 - RNA, 19 nt, Artificial Sequence
  Description of Artificial Sequence: Synthetic oligonucleotide
gaaaagcggcuucuuaguu

SEQ ID NO: 1865613 - RNA, 19 nt, Artificial Sequence
  Description of Artificial Sequence: Synthetic oligonucleotide
cucuuaacgagugaagaau

SEQ ID NO: 1865614 - RNA, 19 nt, Artificial Sequence
  Description of Artificial Sequence: Synthetic oligonucleotide
guacacucuuaucgguauc

SEQ ID NO: 1865615 - RNA, 19 nt, Artificial Sequence
  Description of Artificial Sequence: Synthetic oligonucleotide
caccacaccauaaguaccu

SEQ ID NO: 1865616 - RNA, 19 nt, Artificial Sequence
  Description of Artificial Sequence: Synthetic oligonucleotide
aucgaucaauagauuuuga

SEQ ID NO: 1865617 - RNA, 19 nt, Artificial Sequence
  Description of Artificial Sequence: Synthetic oligonucleotide
cgcaguuccggacugcgcg

SEQ ID NO: 1865618 - RNA, 19 nt, Artificial Sequence
  Description of Artificial Sequence: Synthetic oligonucleotide
gaacugaccaggagggaua

SEQ ID NO: 1865619 - RNA, 19 nt, Artificial Sequence
  Description of Artificial Sequence: Synthetic oligonucleotide
gaacucuucgggagugaca

SEQ ID NO: 1865620 - RNA, 19 nt, Artificial Sequence
  Description of Artificial Sequence: Synthetic oligonucleotide
aguuccggacugcgcggag

SEQ ID NO: 1865621 - RNA, 19 nt, Artificial Sequence
  Description of Artificial Sequence: Synthetic oligonucleotide
ccauaguuacucaacaggu

SEQ ID NO: 1865622 - RNA, 19 nt, Artificial Sequence
  Description of Artificial Sequence: Synthetic oligonucleotide
uucguuuggcaggaucaua

SEQ ID NO: 1865623 - RNA, 19 nt, Artificial Sequence
  Description of Artificial Sequence: Synthetic oligonucleotide
cauaaguaccuucuccaau

SEQ ID NO: 1865624 - RNA, 19 nt, Artificial Sequence
  Description of Artificial Sequence: Synthetic oligonucleotide
auucguuuggcaggaucau

SEQ ID NO: 1865625 - RNA, 19 nt, Artificial Sequence
  Description of Artificial Sequence: Synthetic oligonucleotide
uuucccggauggcgguacu

SEQ ID NO: 1865626 - RNA, 19 nt, Artificial Sequence
  Description of Artificial Sequence: Synthetic oligonucleotide
gguuacgacagacccucuc

SEQ ID NO: 1865627 - RNA, 19 nt, Artificial Sequence
  Description of Artificial Sequence: Synthetic oligonucleotide
ugcgcggaggcagcgacuc

SEQ ID NO: 1865628 - RNA, 19 nt, Artificial Sequence
  Description of Artificial Sequence: Synthetic oligonucleotide
gccacuaucuggcccugcc

SEQ ID NO: 1865629 - RNA, 19 nt, Artificial Sequence
  Description of Artificial Sequence: Synthetic oligonucleotide
gcaguuccggacugcgcgg

SEQ ID NO: 1865630 - RNA, 19 nt, Artificial Sequence
  Description of Artificial Sequence: Synthetic oligonucleotide
auccauggacaggaacuca

SEQ ID NO: 1865631 - RNA, 19 nt, Artificial Sequence
  Description of Artificial Sequence: Synthetic oligonucleotide
cauaguuacucaacagguu

SEQ ID NO: 1865632 - RNA, 19 nt, Artificial Sequence
  Description of Artificial Sequence: Synthetic oligonucleotide
ccaguaguccuaugucuac

SEQ ID NO: 1865633 - RNA, 19 nt, Artificial Sequence
  Description of Artificial Sequence: Synthetic oligonucleotide
ggguggaguaacgagcuga

SEQ ID NO: 1865634 - RNA, 19 nt, Artificial Sequence
  Description of Artificial Sequence: Synthetic oligonucleotide
cucaacagguuacgacaga

SEQ ID NO: 1865635 - RNA, 19 nt, Artificial Sequence
  Description of Artificial Sequence: Synthetic oligonucleotide
guaccuucuccaauuuucu

SEQ ID NO: 1865636 - RNA, 19 nt, Artificial Sequence
  Description of Artificial Sequence: Synthetic oligonucleotide
ggaucauagacuagcauuu

SEQ ID NO: 1865637 - RNA, 19 nt, Artificial Sequence
  Description of Artificial Sequence: Synthetic oligonucleotide
gggauagaauccaaguacu

SEQ ID NO: 1865638 - RNA, 19 nt, Artificial Sequence
  Description of Artificial Sequence: Synthetic oligonucleotide
acuucuggccacacuucgu

SEQ ID NO: 1865639 - RNA, 19 nt, Artificial Sequence
  Description of Artificial Sequence: Synthetic oligonucleotide
augaacugaccaggaggga

SEQ ID NO: 1865640 - RNA, 19 nt, Artificial Sequence
  Description of Artificial Sequence: Synthetic oligonucleotide
ccuuauacaccacaccaua

SEQ ID NO: 1865641 - RNA, 19 nt, Artificial Sequence
  Description of Artificial Sequence: Synthetic oligonucleotide
guguacacucuuaucggua

SEQ ID NO: 1865642 - RNA, 19 nt, Artificial Sequence
  Description of Artificial Sequence: Synthetic oligonucleotide
acauguuaauuaaguuaua

SEQ ID NO: 1865643 - RNA, 19 nt, Artificial Sequence
  Description of Artificial Sequence: Synthetic oligonucleotide
guaguccuaugucuacccu

SEQ ID NO: 1865644 - RNA, 19 nt, Artificial Sequence
  Description of Artificial Sequence: Synthetic oligonucleotide
ccauagugucacuaccuca

SEQ ID NO: 1865645 - RNA, 19 nt, Artificial Sequence
  Description of Artificial Sequence: Synthetic oligonucleotide
gccacacuucguuguuagg

SEQ ID NO: 1865646 - RNA, 19 nt, Artificial Sequence
  Description of Artificial Sequence: Synthetic oligonucleotide
gucaacagggguggaguaa

SEQ ID NO: 1865647 - RNA, 19 nt, Artificial Sequence
  Description of Artificial Sequence: Synthetic oligonucleotide
ucucguucccgcggcggac

SEQ ID NO: 1865648 - RNA, 19 nt, Artificial Sequence
  Description of Artificial Sequence: Synthetic oligonucleotide
ggccaguaguccuaugucu

SEQ ID NO: 1865649 - RNA, 19 nt, Artificial Sequence
  Description of Artificial Sequence: Synthetic oligonucleotide
ccaacaguaaaugccacua

SEQ ID NO: 1865650 - RNA, 19 nt, Artificial Sequence
  Description of Artificial Sequence: Synthetic oligonucleotide
ucguucccgcggcggacac

SEQ ID NO: 1865651 - RNA, 19 nt, Artificial Sequence
  Description of Artificial Sequence: Synthetic oligonucleotide
acacuucuggagaucggua

SEQ ID NO: 1865652 - RNA, 19 nt, Artificial Sequence
  Description of Artificial Sequence: Synthetic oligonucleotide
acaauccccuggaggauuu

SEQ ID NO: 1865653 - RNA, 19 nt, Artificial Sequence
  Description of Artificial Sequence: Synthetic oligonucleotide
cuucuggccacacuucguu

SEQ ID NO: 1865654 - RNA, 19 nt, Artificial Sequence
  Description of Artificial Sequence: Synthetic oligonucleotide
ccauaaguaccuucuccaa

SEQ ID NO: 1865655 - RNA, 19 nt, Artificial Sequence
  Description of Artificial Sequence: Synthetic oligonucleotide
acucuucgggagugacaaa

SEQ ID NO: 1865656 - RNA, 19 nt, Artificial Sequence
  Description of Artificial Sequence: Synthetic oligonucleotide
cacagcgcaguuccggacu

SEQ ID NO: 1865657 - RNA, 19 nt, Artificial Sequence
  Description of Artificial Sequence: Synthetic oligonucleotide
gcugaucccagcaacacuu

SEQ ID NO: 1865658 - RNA, 19 nt, Artificial Sequence
  Description of Artificial Sequence: Synthetic oligonucleotide
agaugucaacaggggugga

SEQ ID NO: 1865659 - RNA, 19 nt, Artificial Sequence
  Description of Artificial Sequence: Synthetic oligonucleotide
ugccacuaucuggcccugc

SEQ ID NO: 1865660 - RNA, 19 nt, Artificial Sequence
  Description of Artificial Sequence: Synthetic oligonucleotide
guggaguaacgagcugauc

SEQ ID NO: 1865661 - RNA, 19 nt, Artificial Sequence
  Description of Artificial Sequence: Synthetic oligonucleotide
aucuggccaguaguccuau

SEQ ID NO: 1865662 - RNA, 19 nt, Artificial Sequence
  Description of Artificial Sequence: Synthetic oligonucleotide
gcacauccugaagacugac

SEQ ID NO: 1865663 - RNA, 19 nt, Artificial Sequence
  Description of Artificial Sequence: Synthetic oligonucleotide
gggguggaguaacgagcug

SEQ ID NO: 1865664 - RNA, 19 nt, Artificial Sequence
  Description of Artificial Sequence: Synthetic oligonucleotide
caauccccuggaggauuug

SEQ ID NO: 1865665 - RNA, 19 nt, Artificial Sequence
  Description of Artificial Sequence: Synthetic oligonucleotide
cccggcuuccacuugggaa

SEQ ID NO: 1865666 - RNA, 19 nt, Artificial Sequence
  Description of Artificial Sequence: Synthetic oligonucleotide
agcgacucccggagcucag

SEQ ID NO: 1865667 - RNA, 19 nt, Artificial Sequence
  Description of Artificial Sequence: Synthetic oligonucleotide
ggauggcgaaguucuuuua

SEQ ID NO: 1865668 - RNA, 19 nt, Artificial Sequence
  Description of Artificial Sequence: Synthetic oligonucleotide
ggaggagagccaacaguaa

SEQ ID NO: 1865669 - RNA, 19 nt, Artificial Sequence
  Description of Artificial Sequence: Synthetic oligonucleotide
uggccacuaucuggccagu

SEQ ID NO: 1865670 - RNA, 19 nt, Artificial Sequence
  Description of Artificial Sequence: Synthetic oligonucleotide
cagcgcaguuccggacugc

SEQ ID NO: 1865671 - RNA, 19 nt, Artificial Sequence
  Description of Artificial Sequence: Synthetic oligonucleotide
cucguucccgcggcggaca

SEQ ID NO: 1865672 - RNA, 19 nt, Artificial Sequence
  Description of Artificial Sequence: Synthetic oligonucleotide
cagcgacucccggagcuca

SEQ ID NO: 1865673 - RNA, 19 nt, Artificial Sequence
  Description of Artificial Sequence: Synthetic oligonucleotide
ggauagaauccaaguacuu

SEQ ID NO: 1865674 - RNA, 19 nt, Artificial Sequence
  Description of Artificial Sequence: Synthetic oligonucleotide
cgggagugacaaaacacaa

SEQ ID NO: 1865675 - RNA, 19 nt, Artificial Sequence
  Description of Artificial Sequence: Synthetic oligonucleotide
caguuccggacugcgcgga

SEQ ID NO: 1865676 - RNA, 19 nt, Artificial Sequence
  Description of Artificial Sequence: Synthetic oligonucleotide
agguuacgacagacccucu

SEQ ID NO: 1865677 - RNA, 19 nt, Artificial Sequence
  Description of Artificial Sequence: Synthetic oligonucleotide
gguggaguaacgagcugau

SEQ ID NO: 1865678 - RNA, 19 nt, Artificial Sequence
  Description of Artificial Sequence: Synthetic oligonucleotide
cacaauccccuggaggauu

SEQ ID NO: 1865679 - RNA, 19 nt, Artificial Sequence
  Description of Artificial Sequence: Synthetic oligonucleotide
caucaaaguacgggugcuu

SEQ ID NO: 1865680 - RNA, 19 nt, Artificial Sequence
  Description of Artificial Sequence: Synthetic oligonucleotide
guccuaugucuacccuuau

SEQ ID NO: 1865681 - RNA, 19 nt, Artificial Sequence
  Description of Artificial Sequence: Synthetic oligonucleotide
guaguccugcagagacucu

SEQ ID NO: 1865682 - RNA, 19 nt, Artificial Sequence
  Description of Artificial Sequence: Synthetic oligonucleotide
gcgcaguuccggacugcgc

SEQ ID NO: 1865683 - RNA, 19 nt, Artificial Sequence
  Description of Artificial Sequence: Synthetic oligonucleotide
gagauucguuuggcaggau

SEQ ID NO: 1865684 - RNA, 19 nt, Artificial Sequence
  Description of Artificial Sequence: Synthetic oligonucleotide
gcgcggaggcagcgacucc

SEQ ID NO: 1865685 - RNA, 19 nt, Artificial Sequence
  Description of Artificial Sequence: Synthetic oligonucleotide
ccgcggcggacacagcgca

SEQ ID NO: 1865686 - RNA, 19 nt, Artificial Sequence
  Description of Artificial Sequence: Synthetic oligonucleotide
cugcgcggaggcagcgacu

SEQ ID NO: 1865687 - RNA, 19 nt, Artificial Sequence
  Description of Artificial Sequence: Synthetic oligonucleotide
gcggcggacacagcgcagu

SEQ ID NO: 1865688 - RNA, 19 nt, Artificial Sequence
  Description of Artificial Sequence: Synthetic oligonucleotide
ggccacuaucuggccagua

SEQ ID NO: 1865689 - RNA, 19 nt, Artificial Sequence
  Description of Artificial Sequence: Synthetic oligonucleotide
cgguaccauagugucacua

SEQ ID NO: 1865690 - RNA, 19 nt, Artificial Sequence
  Description of Artificial Sequence: Synthetic oligonucleotide
ccccggcuuccacuuggga

SEQ ID NO: 1865691 - RNA, 19 nt, Artificial Sequence
  Description of Artificial Sequence: Synthetic oligonucleotide
cggcuucuuaguugcuagu

SEQ ID NO: 1865692 - RNA, 19 nt, Artificial Sequence
  Description of Artificial Sequence: Synthetic oligonucleotide
cguucccgcggcggacaca

SEQ ID NO: 1865693 - RNA, 19 nt, Artificial Sequence
  Description of Artificial Sequence: Synthetic oligonucleotide
cggcggacacagcgcaguu

SEQ ID NO: 1865694 - RNA, 19 nt, Artificial Sequence
  Description of Artificial Sequence: Synthetic oligonucleotide
auaaugacgacuuugaaag

SEQ ID NO: 1865695 - RNA, 19 nt, Artificial Sequence
  Description of Artificial Sequence: Synthetic oligonucleotide
aaagcuaacaauguugacc

SEQ ID NO: 1865696 - RNA, 19 nt, Artificial Sequence
  Description of Artificial Sequence: Synthetic oligonucleotide
aaugcgaugcacucggucc

SEQ ID NO: 1865697 - RNA, 19 nt, Artificial Sequence
  Description of Artificial Sequence: Synthetic oligonucleotide
aguaggaucacccucuugg

SEQ ID NO: 1865698 - RNA, 19 nt, Artificial Sequence
  Description of Artificial Sequence: Synthetic oligonucleotide
gaagguaaggcccauauug

SEQ ID NO: 1865699 - RNA, 19 nt, Artificial Sequence
  Description of Artificial Sequence: Synthetic oligonucleotide
aaauugguuucagaaagcc

SEQ ID NO: 1865700 - RNA, 19 nt, Artificial Sequence
  Description of Artificial Sequence: Synthetic oligonucleotide
aaggacgucagacuugagc

SEQ ID NO: 1865701 - RNA, 19 nt, Artificial Sequence
  Description of Artificial Sequence: Synthetic oligonucleotide
aaacaguucagcaaacacc

SEQ ID NO: 1865702 - RNA, 19 nt, Artificial Sequence
  Description of Artificial Sequence: Synthetic oligonucleotide
uguagagauaaucaguagc

SEQ ID NO: 1865703 - RNA, 19 nt, Artificial Sequence
  Description of Artificial Sequence: Synthetic oligonucleotide
cuucucuugaaucagaggc

SEQ ID NO: 1865704 - RNA, 19 nt, Artificial Sequence
  Description of Artificial Sequence: Synthetic oligonucleotide
aggacgucagacuugagcc

SEQ ID NO: 1865705 - RNA, 19 nt, Artificial Sequence
  Description of Artificial Sequence: Synthetic oligonucleotide
cuugcuaagaagaucaaag

SEQ ID NO: 1865706 - RNA, 19 nt, Artificial Sequence
  Description of Artificial Sequence: Synthetic oligonucleotide
uacaacugcauccagaacu

SEQ ID NO: 1865707 - RNA, 19 nt, Artificial Sequence
  Description of Artificial Sequence: Synthetic oligonucleotide
aagcuaacaauguugacca

SEQ ID NO: 1865708 - RNA, 19 nt, Artificial Sequence
  Description of Artificial Sequence: Synthetic oligonucleotide
aaugagggcuucuuucugc

SEQ ID NO: 1865709 - RNA, 19 nt, Artificial Sequence
  Description of Artificial Sequence: Synthetic oligonucleotide
uguauucaaugacacaggg

SEQ ID NO: 1865710 - RNA, 19 nt, Artificial Sequence
  Description of Artificial Sequence: Synthetic oligonucleotide
aauucggauguucugaacu

SEQ ID NO: 1865711 - RNA, 19 nt, Artificial Sequence
  Description of Artificial Sequence: Synthetic oligonucleotide
aaugacgacuuugaaaggg

SEQ ID NO: 1865712 - RNA, 19 nt, Artificial Sequence
  Description of Artificial Sequence: Synthetic oligonucleotide
uuaggauaggcacagcugc

SEQ ID NO: 1865713 - RNA, 19 nt, Artificial Sequence
  Description of Artificial Sequence: Synthetic oligonucleotide
ugugcaaacacuagaaacu

SEQ ID NO: 1865714 - RNA, 19 nt, Artificial Sequence
  Description of Artificial Sequence: Synthetic oligonucleotide
agagauaaucaguagcuuc

SEQ ID NO: 1865715 - RNA, 19 nt, Artificial Sequence
  Description of Artificial Sequence: Synthetic oligonucleotide
auaaucaguagcuucuguc

SEQ ID NO: 1865716 - RNA, 19 nt, Artificial Sequence
  Description of Artificial Sequence: Synthetic oligonucleotide
ucaaagcuaacaauguuga

SEQ ID NO: 1865717 - RNA, 19 nt, Artificial Sequence
  Description of Artificial Sequence: Synthetic oligonucleotide
uuaaucuucucuugaauca

SEQ ID NO: 1865718 - RNA, 19 nt, Artificial Sequence
  Description of Artificial Sequence: Synthetic oligonucleotide
uuuaaucuucucuugaauc

SEQ ID NO: 1865719 - RNA, 19 nt, Artificial Sequence
  Description of Artificial Sequence: Synthetic oligonucleotide
aauuccaugucauuuccgu

SEQ ID NO: 1865720 - RNA, 19 nt, Artificial Sequence
  Description of Artificial Sequence: Synthetic oligonucleotide
aaacacuagaaacuucucu

SEQ ID NO: 1865721 - RNA, 19 nt, Artificial Sequence
  Description of Artificial Sequence: Synthetic oligonucleotide
uuuaguuuuguccuugguc

SEQ ID NO: 1865722 - RNA, 19 nt, Artificial Sequence
  Description of Artificial Sequence: Synthetic oligonucleotide
uccaaugcgaugcacucgg

SEQ ID NO: 1865723 - RNA, 19 nt, Artificial Sequence
  Description of Artificial Sequence: Synthetic oligonucleotide
guagugaaugcccacagag

SEQ ID NO: 1865724 - RNA, 19 nt, Artificial Sequence
  Description of Artificial Sequence: Synthetic oligonucleotide
aagaugucucccacgaucc

SEQ ID NO: 1865725 - RNA, 19 nt, Artificial Sequence
  Description of Artificial Sequence: Synthetic oligonucleotide
uuuacaacugcauccagaa

SEQ ID NO: 1865726 - RNA, 19 nt, Artificial Sequence
  Description of Artificial Sequence: Synthetic oligonucleotide
aaagguagucaucugcugu

SEQ ID NO: 1865727 - RNA, 19 nt, Artificial Sequence
  Description of Artificial Sequence: Synthetic oligonucleotide
aauugguuucagaaagccc

SEQ ID NO: 1865728 - RNA, 19 nt, Artificial Sequence
  Description of Artificial Sequence: Synthetic oligonucleotide
cuaacaauguugaccaagc

SEQ ID NO: 1865729 - RNA, 19 nt, Artificial Sequence
  Description of Artificial Sequence: Synthetic oligonucleotide
acaauguugaccaagccag

SEQ ID NO: 1865730 - RNA, 19 nt, Artificial Sequence
  Description of Artificial Sequence: Synthetic oligonucleotide
agugaaugcccacagagcu

SEQ ID NO: 1865731 - RNA, 19 nt, Artificial Sequence
  Description of Artificial Sequence: Synthetic oligonucleotide
uuuaggauaggcacagcug

SEQ ID NO: 1865732 - RNA, 19 nt, Artificial Sequence
  Description of Artificial Sequence: Synthetic oligonucleotide
ugcgauucgucaauaauga

SEQ ID NO: 1865733 - RNA, 19 nt, Artificial Sequence
  Description of Artificial Sequence: Synthetic oligonucleotide
uuuccaacuugcuaagaag

SEQ ID NO: 1865734 - RNA, 19 nt, Artificial Sequence
  Description of Artificial Sequence: Synthetic oligonucleotide
ugucauuucugagaaauug

SEQ ID NO: 1865735 - RNA, 19 nt, Artificial Sequence
  Description of Artificial Sequence: Synthetic oligonucleotide
aacuuuaaucuucucuuga

SEQ ID NO: 1865736 - RNA, 19 nt, Artificial Sequence
  Description of Artificial Sequence: Synthetic oligonucleotide
uaaucaguagcuucuguca

SEQ ID NO: 1865737 - RNA, 19 nt, Artificial Sequence
  Description of Artificial Sequence: Synthetic oligonucleotide
uuccaacuugcuaagaaga

SEQ ID NO: 1865738 - RNA, 19 nt, Artificial Sequence
  Description of Artificial Sequence: Synthetic oligonucleotide
cuagaaacuucucucgucc

SEQ ID NO: 1865739 - RNA, 19 nt, Artificial Sequence
  Description of Artificial Sequence: Synthetic oligonucleotide
aaucagaggccaaagguag

SEQ ID NO: 1865740 - RNA, 19 nt, Artificial Sequence
  Description of Artificial Sequence: Synthetic oligonucleotide
gauucgucaauaaugacga

SEQ ID NO: 1865741 - RNA, 19 nt, Artificial Sequence
  Description of Artificial Sequence: Synthetic oligonucleotide
uccacucuccaaaaggucc

SEQ ID NO: 1865742 - RNA, 19 nt, Artificial Sequence
  Description of Artificial Sequence: Synthetic oligonucleotide
uugaaucagaggccaaagg

SEQ ID NO: 1865743 - RNA, 19 nt, Artificial Sequence
  Description of Artificial Sequence: Synthetic oligonucleotide
ucuguugaagaagacaaug

SEQ ID NO: 1865744 - RNA, 19 nt, Artificial Sequence
  Description of Artificial Sequence: Synthetic oligonucleotide
ucguccacucuccaaaagg

SEQ ID NO: 1865745 - RNA, 19 nt, Artificial Sequence
  Description of Artificial Sequence: Synthetic oligonucleotide
acacuagaaacuucucucg

SEQ ID NO: 1865746 - RNA, 19 nt, Artificial Sequence
  Description of Artificial Sequence: Synthetic oligonucleotide
ucauuucugagaaauuggu

SEQ ID NO: 1865747 - RNA, 19 nt, Artificial Sequence
  Description of Artificial Sequence: Synthetic oligonucleotide
ucugcuguucuguugaaga

SEQ ID NO: 1865748 - RNA, 19 nt, Artificial Sequence
  Description of Artificial Sequence: Synthetic oligonucleotide
accaggguugaccagcacc

SEQ ID NO: 1865749 - RNA, 19 nt, Artificial Sequence
  Description of Artificial Sequence: Synthetic oligonucleotide
augcacucgguccucagcc

SEQ ID NO: 1865750 - RNA, 19 nt, Artificial Sequence
  Description of Artificial Sequence: Synthetic oligonucleotide
aaagguccaugauguauuc

SEQ ID NO: 1865751 - RNA, 19 nt, Artificial Sequence
  Description of Artificial Sequence: Synthetic oligonucleotide
ugcuguuuaguuuuguccu

SEQ ID NO: 1865752 - RNA, 19 nt, Artificial Sequence
  Description of Artificial Sequence: Synthetic oligonucleotide
auugguuucagaaagccca

SEQ ID NO: 1865753 - RNA, 19 nt, Artificial Sequence
  Description of Artificial Sequence: Synthetic oligonucleotide
agaagaucaaagcuaacaa

SEQ ID NO: 1865754 - RNA, 19 nt, Artificial Sequence
  Description of Artificial Sequence: Synthetic oligonucleotide
caagccagcuguuaggcgg

SEQ ID NO: 1865755 - RNA, 19 nt, Artificial Sequence
  Description of Artificial Sequence: Synthetic oligonucleotide
aacugcauccagaacuacc

SEQ ID NO: 1865756 - RNA, 19 nt, Artificial Sequence
  Description of Artificial Sequence: Synthetic oligonucleotide
aaguagugaaugcccacag

SEQ ID NO: 1865757 - RNA, 19 nt, Artificial Sequence
  Description of Artificial Sequence: Synthetic oligonucleotide
guaaggcccauauuggcgg

SEQ ID NO: 1865758 - RNA, 19 nt, Artificial Sequence
  Description of Artificial Sequence: Synthetic oligonucleotide
agguuccugaaguacuucc

SEQ ID NO: 1865759 - RNA, 19 nt, Artificial Sequence
  Description of Artificial Sequence: Synthetic oligonucleotide
uugcuaagaagaucaaagc

SEQ ID NO: 1865760 - RNA, 19 nt, Artificial Sequence
  Description of Artificial Sequence: Synthetic oligonucleotide
agguaaggcccauauuggc

SEQ ID NO: 1865761 - RNA, 19 nt, Artificial Sequence
  Description of Artificial Sequence: Synthetic oligonucleotide
agaacuaccuuauggugug

SEQ ID NO: 1865762 - RNA, 19 nt, Artificial Sequence
  Description of Artificial Sequence: Synthetic oligonucleotide
cugcuguuuaguuuugucc

SEQ ID NO: 1865763 - RNA, 19 nt, Artificial Sequence
  Description of Artificial Sequence: Synthetic oligonucleotide
aagguaaggcccauauugg

SEQ ID NO: 1865764 - RNA, 19 nt, Artificial Sequence
  Description of Artificial Sequence: Synthetic oligonucleotide
ucaagcuccuuuacaacug

SEQ ID NO: 1865765 - RNA, 19 nt, Artificial Sequence
  Description of Artificial Sequence: Synthetic oligonucleotide
cugaggagaagguaaggcc

SEQ ID NO: 1865766 - RNA, 19 nt, Artificial Sequence
  Description of Artificial Sequence: Synthetic oligonucleotide
uccugaaguacuuccuggg

SEQ ID NO: 1865767 - RNA, 19 nt, Artificial Sequence
  Description of Artificial Sequence: Synthetic oligonucleotide
ucgucaauaaugacgacuu

SEQ ID NO: 1865768 - RNA, 19 nt, Artificial Sequence
  Description of Artificial Sequence: Synthetic oligonucleotide
ucucccacgauccugggaa

SEQ ID NO: 1865769 - RNA, 19 nt, Artificial Sequence
  Description of Artificial Sequence: Synthetic oligonucleotide
uggucuauuuucuuuggcu

SEQ ID NO: 1865770 - RNA, 19 nt, Artificial Sequence
  Description of Artificial Sequence: Synthetic oligonucleotide
ugaagcgcacagaggaagg

SEQ ID NO: 1865771 - RNA, 19 nt, Artificial Sequence
  Description of Artificial Sequence: Synthetic oligonucleotide
ugugccuuuugccaccaag

SEQ ID NO: 1865772 - RNA, 19 nt, Artificial Sequence
  Description of Artificial Sequence: Synthetic oligonucleotide
uguuuaguuuuguccuugg

SEQ ID NO: 1865773 - RNA, 19 nt, Artificial Sequence
  Description of Artificial Sequence: Synthetic oligonucleotide
ugccuuuccaacuugcuaa

SEQ ID NO: 1865774 - RNA, 19 nt, Artificial Sequence
  Description of Artificial Sequence: Synthetic oligonucleotide
aacuacuuccagagguucc

SEQ ID NO: 1865775 - RNA, 19 nt, Artificial Sequence
  Description of Artificial Sequence: Synthetic oligonucleotide
gaacuuuaaucuucucuug

SEQ ID NO: 1865776 - RNA, 19 nt, Artificial Sequence
  Description of Artificial Sequence: Synthetic oligonucleotide
uguucuguugaagaagaca

SEQ ID NO: 1865777 - RNA, 19 nt, Artificial Sequence
  Description of Artificial Sequence: Synthetic oligonucleotide
uuauggugugcaaacacua

SEQ ID NO: 1865778 - RNA, 19 nt, Artificial Sequence
  Description of Artificial Sequence: Synthetic oligonucleotide
gucauuucugagaaauugg

SEQ ID NO: 1865779 - RNA, 19 nt, Artificial Sequence
  Description of Artificial Sequence: Synthetic oligonucleotide
aaucaguagcuucugucau

SEQ ID NO: 1865780 - RNA, 19 nt, Artificial Sequence
  Description of Artificial Sequence: Synthetic oligonucleotide
uuguccuuggucuauuuuc

SEQ ID NO: 1865781 - RNA, 19 nt, Artificial Sequence
  Description of Artificial Sequence: Synthetic oligonucleotide
aaggccugcucccagguga

SEQ ID NO: 1865782 - RNA, 19 nt, Artificial Sequence
  Description of Artificial Sequence: Synthetic oligonucleotide
gucaauaaugacgacuuug

SEQ ID NO: 1865783 - RNA, 19 nt, Artificial Sequence
  Description of Artificial Sequence: Synthetic oligonucleotide
uucgucaauaaugacgacu

SEQ ID NO: 1865784 - RNA, 19 nt, Artificial Sequence
  Description of Artificial Sequence: Synthetic oligonucleotide
uguuaggcggcccuucccc

SEQ ID NO: 1865785 - RNA, 19 nt, Artificial Sequence
  Description of Artificial Sequence: Synthetic oligonucleotide
ggagccaucaauucggaug

SEQ ID NO: 1865786 - RNA, 19 nt, Artificial Sequence
  Description of Artificial Sequence: Synthetic oligonucleotide
agcuugucuguccaaugcg

SEQ ID NO: 1865787 - RNA, 19 nt, Artificial Sequence
  Description of Artificial Sequence: Synthetic oligonucleotide
caguucagcaaacaccacc

SEQ ID NO: 1865788 - RNA, 19 nt, Artificial Sequence
  Description of Artificial Sequence: Synthetic oligonucleotide
uuggcccuggugcugaucc

SEQ ID NO: 1865789 - RNA, 19 nt, Artificial Sequence
  Description of Artificial Sequence: Synthetic oligonucleotide
gauccuaccaggguugacc

SEQ ID NO: 1865790 - RNA, 19 nt, Artificial Sequence
  Description of Artificial Sequence: Synthetic oligonucleotide
uaaugacgacuuugaaagg

SEQ ID NO: 1865791 - RNA, 19 nt, Artificial Sequence
  Description of Artificial Sequence: Synthetic oligonucleotide
uggaucagcaccccggggu

SEQ ID NO: 1865792 - RNA, 19 nt, Artificial Sequence
  Description of Artificial Sequence: Synthetic oligonucleotide
uucaaugacacaggggacu

SEQ ID NO: 1865793 - RNA, 19 nt, Artificial Sequence
  Description of Artificial Sequence: Synthetic oligonucleotide
aauguugaccaagccagcu

SEQ ID NO: 1865794 - RNA, 19 nt, Artificial Sequence
  Description of Artificial Sequence: Synthetic oligonucleotide
aguacuuccugggucaaag

SEQ ID NO: 1865795 - RNA, 19 nt, Artificial Sequence
  Description of Artificial Sequence: Synthetic oligonucleotide
uggugugcaaacacuagaa

SEQ ID NO: 1865796 - RNA, 19 nt, Artificial Sequence
  Description of Artificial Sequence: Synthetic oligonucleotide
aagaaaggccugcucccag

SEQ ID NO: 1865797 - RNA, 19 nt, Artificial Sequence
  Description of Artificial Sequence: Synthetic oligonucleotide
gucuauuuucuuuggcugc

SEQ ID NO: 1865798 - RNA, 19 nt, Artificial Sequence
  Description of Artificial Sequence: Synthetic oligonucleotide
uaccuuauggugugcaaac

SEQ ID NO: 1865799 - RNA, 19 nt, Artificial Sequence
  Description of Artificial Sequence: Synthetic oligonucleotide
ugacacaggggacuuuagc

SEQ ID NO: 1865800 - RNA, 19 nt, Artificial Sequence
  Description of Artificial Sequence: Synthetic oligonucleotide
aaaagguccaugauguauu

SEQ ID NO: 1865801 - RNA, 19 nt, Artificial Sequence
  Description of Artificial Sequence: Synthetic oligonucleotide
accaagccagcuguuaggc

SEQ ID NO: 1865802 - RNA, 19 nt, Artificial Sequence
  Description of Artificial Sequence: Synthetic oligonucleotide
gauaggcacagcugcucgg

SEQ ID NO: 1865803 - RNA, 19 nt, Artificial Sequence
  Description of Artificial Sequence: Synthetic oligonucleotide
uuggucuauuuucuuuggc

SEQ ID NO: 1865804 - RNA, 19 nt, Artificial Sequence
  Description of Artificial Sequence: Synthetic oligonucleotide
gagcuugucuguccaaugc

SEQ ID NO: 1865805 - RNA, 19 nt, Artificial Sequence
  Description of Artificial Sequence: Synthetic oligonucleotide
cgauucgucaauaaugacg

SEQ ID NO: 1865806 - RNA, 19 nt, Artificial Sequence
  Description of Artificial Sequence: Synthetic oligonucleotide
cucacggucugcugaaggg

SEQ ID NO: 1865807 - RNA, 19 nt, Artificial Sequence
  Description of Artificial Sequence: Synthetic oligonucleotide
guuggagacaguaggauca

SEQ ID NO: 1865808 - RNA, 19 nt, Artificial Sequence
  Description of Artificial Sequence: Synthetic oligonucleotide
agguccaugauguauucaa

SEQ ID NO: 1865809 - RNA, 19 nt, Artificial Sequence
  Description of Artificial Sequence: Synthetic oligonucleotide
ggucuauuuucuuuggcug

SEQ ID NO: 1865810 - RNA, 19 nt, Artificial Sequence
  Description of Artificial Sequence: Synthetic oligonucleotide
aucaauucggauguucuga

SEQ ID NO: 1865811 - RNA, 19 nt, Artificial Sequence
  Description of Artificial Sequence: Synthetic oligonucleotide
gugcgauucgucaauaaug

SEQ ID NO: 1865812 - RNA, 19 nt, Artificial Sequence
  Description of Artificial Sequence: Synthetic oligonucleotide
uuccccgucaccaccacgu

SEQ ID NO: 1865813 - RNA, 19 nt, Artificial Sequence
  Description of Artificial Sequence: Synthetic oligonucleotide
ucaauucggauguucugaa

SEQ ID NO: 1865814 - RNA, 19 nt, Artificial Sequence
  Description of Artificial Sequence: Synthetic oligonucleotide
gaaggcacgaccaccagga

SEQ ID NO: 1865815 - RNA, 19 nt, Artificial Sequence
  Description of Artificial Sequence: Synthetic oligonucleotide
gaauuccaugucauuuccg

SEQ ID NO: 1865816 - RNA, 19 nt, Artificial Sequence
  Description of Artificial Sequence: Synthetic oligonucleotide
cacagaggaaggcacgacc

SEQ ID NO: 1865817 - RNA, 19 nt, Artificial Sequence
  Description of Artificial Sequence: Synthetic oligonucleotide
gguggagccaucaauucgg

SEQ ID NO: 1865818 - RNA, 19 nt, Artificial Sequence
  Description of Artificial Sequence: Synthetic oligonucleotide
caccagaucagcugaggag

SEQ ID NO: 1865819 - RNA, 19 nt, Artificial Sequence
  Description of Artificial Sequence: Synthetic oligonucleotide
cuugaaucagaggccaaag

SEQ ID NO: 1865820 - RNA, 19 nt, Artificial Sequence
  Description of Artificial Sequence: Synthetic oligonucleotide
agugcgauucgucaauaau

SEQ ID NO: 1865821 - RNA, 19 nt, Artificial Sequence
  Description of Artificial Sequence: Synthetic oligonucleotide
ucacggucugcugaagggg

SEQ ID NO: 1865822 - RNA, 19 nt, Artificial Sequence
  Description of Artificial Sequence: Synthetic oligonucleotide
accuuuaggauaggcacag

SEQ ID NO: 1865823 - RNA, 19 nt, Artificial Sequence
  Description of Artificial Sequence: Synthetic oligonucleotide
cuuuacaacugcauccaga

SEQ ID NO: 1865824 - RNA, 19 nt, Artificial Sequence
  Description of Artificial Sequence: Synthetic oligonucleotide
accagaucagcugaggaga

SEQ ID NO: 1865825 - RNA, 19 nt, Artificial Sequence
  Description of Artificial Sequence: Synthetic oligonucleotide
augucauuuccgucucuuc

SEQ ID NO: 1865826 - RNA, 19 nt, Artificial Sequence
  Description of Artificial Sequence: Synthetic oligonucleotide
caucaauucggauguucug

SEQ ID NO: 1865827 - RNA, 19 nt, Artificial Sequence
  Description of Artificial Sequence: Synthetic oligonucleotide
agagcacugccacugugug

SEQ ID NO: 1865828 - RNA, 19 nt, Artificial Sequence
  Description of Artificial Sequence: Synthetic oligonucleotide
ugcauccagaacuaccuua

SEQ ID NO: 1865829 - RNA, 19 nt, Artificial Sequence
  Description of Artificial Sequence: Synthetic oligonucleotide
ucccaggugaagcgcacag

SEQ ID NO: 1865830 - RNA, 19 nt, Artificial Sequence
  Description of Artificial Sequence: Synthetic oligonucleotide
cuuggcaaccuuuaggaua

SEQ ID NO: 1865831 - RNA, 19 nt, Artificial Sequence
  Description of Artificial Sequence: Synthetic oligonucleotide
ugacgacuuugaaaggggu

SEQ ID NO: 1865832 - RNA, 19 nt, Artificial Sequence
  Description of Artificial Sequence: Synthetic oligonucleotide
accaucuuucgcugcuugg

SEQ ID NO: 1865833 - RNA, 19 nt, Artificial Sequence
  Description of Artificial Sequence: Synthetic oligonucleotide
caugauugccucuccagca

SEQ ID NO: 1865834 - RNA, 19 nt, Artificial Sequence
  Description of Artificial Sequence: Synthetic oligonucleotide
guagagauaaucaguagcu

SEQ ID NO: 1865835 - RNA, 19 nt, Artificial Sequence
  Description of Artificial Sequence: Synthetic oligonucleotide
uaagaagaucaaagcuaac

SEQ ID NO: 1865836 - RNA, 19 nt, Artificial Sequence
  Description of Artificial Sequence: Synthetic oligonucleotide
cauuuccgucucuucaaag

SEQ ID NO: 1865837 - RNA, 19 nt, Artificial Sequence
  Description of Artificial Sequence: Synthetic oligonucleotide
ucagcaugauugccucucc

SEQ ID NO: 1865838 - RNA, 19 nt, Artificial Sequence
  Description of Artificial Sequence: Synthetic oligonucleotide
guugauguucucugggcuc

SEQ ID NO: 1865839 - RNA, 19 nt, Artificial Sequence
  Description of Artificial Sequence: Synthetic oligonucleotide
agagcuugucuguccaaug

SEQ ID NO: 1865840 - RNA, 19 nt, Artificial Sequence
  Description of Artificial Sequence: Synthetic oligonucleotide
gaugcacucgguccucagc

SEQ ID NO: 1865841 - RNA, 19 nt, Artificial Sequence
  Description of Artificial Sequence: Synthetic oligonucleotide
aaugcccacagagcuuguc

SEQ ID NO: 1865842 - RNA, 19 nt, Artificial Sequence
  Description of Artificial Sequence: Synthetic oligonucleotide
aggguugaccagcaccauc

SEQ ID NO: 1865843 - RNA, 19 nt, Artificial Sequence
  Description of Artificial Sequence: Synthetic oligonucleotide
gagauaaucaguagcuucu

SEQ ID NO: 1865844 - RNA, 19 nt, Artificial Sequence
  Description of Artificial Sequence: Synthetic oligonucleotide
aacuaccuuauggugugca

SEQ ID NO: 1865845 - RNA, 19 nt, Artificial Sequence
  Description of Artificial Sequence: Synthetic oligonucleotide
ucauuuccgucucuucaaa

SEQ ID NO: 1865846 - RNA, 19 nt, Artificial Sequence
  Description of Artificial Sequence: Synthetic oligonucleotide
uuggcggcggugauggaga

SEQ ID NO: 1865847 - RNA, 19 nt, Artificial Sequence
  Description of Artificial Sequence: Synthetic oligonucleotide
aucuuucgcugcuuggcug

SEQ ID NO: 1865848 - RNA, 19 nt, Artificial Sequence
  Description of Artificial Sequence: Synthetic oligonucleotide
agcuucugucauuucugag

SEQ ID NO: 1865849 - RNA, 19 nt, Artificial Sequence
  Description of Artificial Sequence: Synthetic oligonucleotide
gacgucagacuugagccgc

SEQ ID NO: 1865850 - RNA, 19 nt, Artificial Sequence
  Description of Artificial Sequence: Synthetic oligonucleotide
agguagucaucugcugugc

SEQ ID NO: 1865851 - RNA, 19 nt, Artificial Sequence
  Description of Artificial Sequence: Synthetic oligonucleotide
auucgucaauaaugacgac

SEQ ID NO: 1865852 - RNA, 19 nt, Artificial Sequence
  Description of Artificial Sequence: Synthetic oligonucleotide
guaggaucacccucuuggc

SEQ ID NO: 1865853 - RNA, 19 nt, Artificial Sequence
  Description of Artificial Sequence: Synthetic oligonucleotide
aggacucugcgccuccagg

SEQ ID NO: 1865854 - RNA, 19 nt, Artificial Sequence
  Description of Artificial Sequence: Synthetic oligonucleotide
gcuaacaauguugaccaag

SEQ ID NO: 1865855 - RNA, 19 nt, Artificial Sequence
  Description of Artificial Sequence: Synthetic oligonucleotide
gugaagcgcacagaggaag

SEQ ID NO: 1865856 - RNA, 19 nt, Artificial Sequence
  Description of Artificial Sequence: Synthetic oligonucleotide
uuacaacugcauccagaac

SEQ ID NO: 1865857 - RNA, 19 nt, Artificial Sequence
  Description of Artificial Sequence: Synthetic oligonucleotide
aguagugaaugcccacaga

SEQ ID NO: 1865858 - RNA, 19 nt, Artificial Sequence
  Description of Artificial Sequence: Synthetic oligonucleotide
ggagacaguaggaucaccc

SEQ ID NO: 1865859 - RNA, 19 nt, Artificial Sequence
  Description of Artificial Sequence: Synthetic oligonucleotide
ggauaggcacagcugcucg

SEQ ID NO: 1865860 - RNA, 19 nt, Artificial Sequence
  Description of Artificial Sequence: Synthetic oligonucleotide
auccuaccaggguugacca

SEQ ID NO: 1865861 - RNA, 19 nt, Artificial Sequence
  Description of Artificial Sequence: Synthetic oligonucleotide
ucugcuucggguccuugua

SEQ ID NO: 1865862 - RNA, 19 nt, Artificial Sequence
  Description of Artificial Sequence: Synthetic oligonucleotide
ucaguagcuucugucauuu

SEQ ID NO: 1865863 - RNA, 19 nt, Artificial Sequence
  Description of Artificial Sequence: Synthetic oligonucleotide
auucggauguucugaacuu

SEQ ID NO: 1865864 - RNA, 19 nt, Artificial Sequence
  Description of Artificial Sequence: Synthetic oligonucleotide
aagugcgauucgucaauaa

SEQ ID NO: 1865865 - RNA, 19 nt, Artificial Sequence
  Description of Artificial Sequence: Synthetic oligonucleotide
aaaggccugcucccaggug

SEQ ID NO: 1865866 - RNA, 19 nt, Artificial Sequence
  Description of Artificial Sequence: Synthetic oligonucleotide
ggugauggagagcacugcc

SEQ ID NO: 1865867 - RNA, 19 nt, Artificial Sequence
  Description of Artificial Sequence: Synthetic oligonucleotide
aagacaaugagggcuucuu

SEQ ID NO: 1865868 - RNA, 19 nt, Artificial Sequence
  Description of Artificial Sequence: Synthetic oligonucleotide
caauguugaccaagccagc

SEQ ID NO: 1865869 - RNA, 19 nt, Artificial Sequence
  Description of Artificial Sequence: Synthetic oligonucleotide
auuggcggcggugauggag

SEQ ID NO: 1865870 - RNA, 19 nt, Artificial Sequence
  Description of Artificial Sequence: Synthetic oligonucleotide
agauaaucaguagcuucug

SEQ ID NO: 1865871 - RNA, 19 nt, Artificial Sequence
  Description of Artificial Sequence: Synthetic oligonucleotide
cuuuaggauaggcacagcu

SEQ ID NO: 1865872 - RNA, 19 nt, Artificial Sequence
  Description of Artificial Sequence: Synthetic oligonucleotide
aggauaggcacagcugcuc

SEQ ID NO: 1865873 - RNA, 19 nt, Artificial Sequence
  Description of Artificial Sequence: Synthetic oligonucleotide
guuaggcggcccuuccccg

SEQ ID NO: 1865874 - RNA, 19 nt, Artificial Sequence
  Description of Artificial Sequence: Synthetic oligonucleotide
ggguggagccaucaauucg

SEQ ID NO: 1865875 - RNA, 19 nt, Artificial Sequence
  Description of Artificial Sequence: Synthetic oligonucleotide
aggaagugcgauucgucaa

SEQ ID NO: 1865876 - RNA, 19 nt, Artificial Sequence
  Description of Artificial Sequence: Synthetic oligonucleotide
uccucucaagcuccuuuac

SEQ ID NO: 1865877 - RNA, 19 nt, Artificial Sequence
  Description of Artificial Sequence: Synthetic oligonucleotide
cuggugcugauccuaccag

SEQ ID NO: 1865878 - RNA, 19 nt, Artificial Sequence
  Description of Artificial Sequence: Synthetic oligonucleotide
cagccaccgaagaaaggcc

SEQ ID NO: 1865879 - RNA, 19 nt, Artificial Sequence
  Description of Artificial Sequence: Synthetic oligonucleotide
gcagcgggcagucuuaaug

SEQ ID NO: 1865880 - RNA, 19 nt, Artificial Sequence
  Description of Artificial Sequence: Synthetic oligonucleotide
ucgcccagguuggagacag

SEQ ID NO: 1865881 - RNA, 19 nt, Artificial Sequence
  Description of Artificial Sequence: Synthetic oligonucleotide
acgacuuugaaagggguuu

SEQ ID NO: 1865882 - RNA, 19 nt, Artificial Sequence
  Description of Artificial Sequence: Synthetic oligonucleotide
guucucugggcucagagau

SEQ ID NO: 1865883 - RNA, 19 nt, Artificial Sequence
  Description of Artificial Sequence: Synthetic oligonucleotide
cuuauggugugcaaacacu

SEQ ID NO: 1865884 - RNA, 19 nt, Artificial Sequence
  Description of Artificial Sequence: Synthetic oligonucleotide
gauaaucaguagcuucugu

SEQ ID NO: 1865885 - RNA, 19 nt, Artificial Sequence
  Description of Artificial Sequence: Synthetic oligonucleotide
aagcgcacagaggaaggca

SEQ ID NO: 1865886 - RNA, 19 nt, Artificial Sequence
  Description of Artificial Sequence: Synthetic oligonucleotide
ggaaggcacgaccaccagg

SEQ ID NO: 1865887 - RNA, 19 nt, Artificial Sequence
  Description of Artificial Sequence: Synthetic oligonucleotide
cuguuuaguuuuguccuug

SEQ ID NO: 1865888 - RNA, 19 nt, Artificial Sequence
  Description of Artificial Sequence: Synthetic oligonucleotide
caauucggauguucugaac

SEQ ID NO: 1865889 - RNA, 19 nt, Artificial Sequence
  Description of Artificial Sequence: Synthetic oligonucleotide
gaagcgcacagaggaaggc

SEQ ID NO: 1865890 - RNA, 19 nt, Artificial Sequence
  Description of Artificial Sequence: Synthetic oligonucleotide
agccgccucagcaugauug

SEQ ID NO: 1865891 - RNA, 19 nt, Artificial Sequence
  Description of Artificial Sequence: Synthetic oligonucleotide
aaggcccauauuggcggcg

SEQ ID NO: 1865892 - RNA, 19 nt, Artificial Sequence
  Description of Artificial Sequence: Synthetic oligonucleotide
uaaggcccauauuggcggc

SEQ ID NO: 1865893 - RNA, 19 nt, Artificial Sequence
  Description of Artificial Sequence: Synthetic oligonucleotide
cagaacuaccuuauggugu

SEQ ID NO: 1865894 - RNA, 19 nt, Artificial Sequence
  Description of Artificial Sequence: Synthetic oligonucleotide
augcgaugcacucgguccu

SEQ ID NO: 1865895 - RNA, 19 nt, Artificial Sequence
  Description of Artificial Sequence: Synthetic oligonucleotide
gggucaaaggacucugcgc

SEQ ID NO: 1865896 - RNA, 19 nt, Artificial Sequence
  Description of Artificial Sequence: Synthetic oligonucleotide
caaugcgaugcacucgguc

SEQ ID NO: 1865897 - RNA, 19 nt, Artificial Sequence
  Description of Artificial Sequence: Synthetic oligonucleotide
acuaccuuauggugugcaa

SEQ ID NO: 1865898 - RNA, 19 nt, Artificial Sequence
  Description of Artificial Sequence: Synthetic oligonucleotide
ggacgucagacuugagccg

SEQ ID NO: 1865899 - RNA, 19 nt, Artificial Sequence
  Description of Artificial Sequence: Synthetic oligonucleotide
gauggcagccaccgaagaa

SEQ ID NO: 1865900 - RNA, 19 nt, Artificial Sequence
  Description of Artificial Sequence: Synthetic oligonucleotide
gguuggagacaguaggauc

SEQ ID NO: 1865901 - RNA, 19 nt, Artificial Sequence
  Description of Artificial Sequence: Synthetic oligonucleotide
uagagauaaucaguagcuu

SEQ ID NO: 1865902 - RNA, 19 nt, Artificial Sequence
  Description of Artificial Sequence: Synthetic oligonucleotide
ccuuauggugugcaaacac

SEQ ID NO: 1865903 - RNA, 19 nt, Artificial Sequence
  Description of Artificial Sequence: Synthetic oligonucleotide
gaucaaagcuaacaauguu

SEQ ID NO: 1865904 - RNA, 19 nt, Artificial Sequence
  Description of Artificial Sequence: Synthetic oligonucleotide
accaaguagugaaugccca

SEQ ID NO: 1865905 - RNA, 19 nt, Artificial Sequence
  Description of Artificial Sequence: Synthetic oligonucleotide
cugagaaauugguuucaga

SEQ ID NO: 1865906 - RNA, 19 nt, Artificial Sequence
  Description of Artificial Sequence: Synthetic oligonucleotide
ucaaaggacucugcgccuc

SEQ ID NO: 1865907 - RNA, 19 nt, Artificial Sequence
  Description of Artificial Sequence: Synthetic oligonucleotide
gguccuuguagagauaauc

SEQ ID NO: 1865908 - RNA, 19 nt, Artificial Sequence
  Description of Artificial Sequence: Synthetic oligonucleotide
gggaacuacuuccagaggu

SEQ ID NO: 1865909 - RNA, 19 nt, Artificial Sequence
  Description of Artificial Sequence: Synthetic oligonucleotide
agauggcagccaccgaaga

SEQ ID NO: 1865910 - RNA, 19 nt, Artificial Sequence
  Description of Artificial Sequence: Synthetic oligonucleotide
caaaacaguucagcaaaca

SEQ ID NO: 1865911 - RNA, 19 nt, Artificial Sequence
  Description of Artificial Sequence: Synthetic oligonucleotide
cacagauccucacggucug

SEQ ID NO: 1865912 - RNA, 19 nt, Artificial Sequence
  Description of Artificial Sequence: Synthetic oligonucleotide
guccaaugcgaugcacucg

SEQ ID NO: 1865913 - RNA, 19 nt, Artificial Sequence
  Description of Artificial Sequence: Synthetic oligonucleotide
caaaggacucugcgccucc

SEQ ID NO: 1865914 - RNA, 19 nt, Artificial Sequence
  Description of Artificial Sequence: Synthetic oligonucleotide
caaguagugaaugcccaca

SEQ ID NO: 1865915 - RNA, 19 nt, Artificial Sequence
  Description of Artificial Sequence: Synthetic oligonucleotide
agaagguaaggcccauauu

SEQ ID NO: 1865916 - RNA, 19 nt, Artificial Sequence
  Description of Artificial Sequence: Synthetic oligonucleotide
cuuuggcugcugcauccag

SEQ ID NO: 1865917 - RNA, 19 nt, Artificial Sequence
  Description of Artificial Sequence: Synthetic oligonucleotide
agaagacaaugagggcuuc

SEQ ID NO: 1865918 - RNA, 19 nt, Artificial Sequence
  Description of Artificial Sequence: Synthetic oligonucleotide
ucucguccacucuccaaaa

SEQ ID NO: 1865919 - RNA, 19 nt, Artificial Sequence
  Description of Artificial Sequence: Synthetic oligonucleotide
cucguccacucuccaaaag

SEQ ID NO: 1865920 - RNA, 19 nt, Artificial Sequence
  Description of Artificial Sequence: Synthetic oligonucleotide
cagguuggagacaguagga

SEQ ID NO: 1865921 - RNA, 19 nt, Artificial Sequence
  Description of Artificial Sequence: Synthetic oligonucleotide
ccgccuuuggcccuggugc

SEQ ID NO: 1865922 - RNA, 19 nt, Artificial Sequence
  Description of Artificial Sequence: Synthetic oligonucleotide
ugucucccacgauccuggg

SEQ ID NO: 1865923 - RNA, 19 nt, Artificial Sequence
  Description of Artificial Sequence: Synthetic oligonucleotide
ucucucguccacucuccaa

SEQ ID NO: 1865924 - RNA, 19 nt, Artificial Sequence
  Description of Artificial Sequence: Synthetic oligonucleotide
gaaacuucucucguccacu

SEQ ID NO: 1865925 - RNA, 19 nt, Artificial Sequence
  Description of Artificial Sequence: Synthetic oligonucleotide
agccuggaucagcaccccg

SEQ ID NO: 1865926 - RNA, 19 nt, Artificial Sequence
  Description of Artificial Sequence: Synthetic oligonucleotide
uccuaccaggguugaccag

SEQ ID NO: 1865927 - RNA, 19 nt, Artificial Sequence
  Description of Artificial Sequence: Synthetic oligonucleotide
gaccagcaccaucuuucgc

SEQ ID NO: 1865928 - RNA, 19 nt, Artificial Sequence
  Description of Artificial Sequence: Synthetic oligonucleotide
ccuuuugccaccaaguagu

SEQ ID NO: 1865929 - RNA, 19 nt, Artificial Sequence
  Description of Artificial Sequence: Synthetic oligonucleotide
aguuuuguccuuggucuau

SEQ ID NO: 1865930 - RNA, 19 nt, Artificial Sequence
  Description of Artificial Sequence: Synthetic oligonucleotide
guagucaucugcugugccu

SEQ ID NO: 1865931 - RNA, 19 nt, Artificial Sequence
  Description of Artificial Sequence: Synthetic oligonucleotide
uuaggcggcccuuccccgu

SEQ ID NO: 1865932 - RNA, 19 nt, Artificial Sequence
  Description of Artificial Sequence: Synthetic oligonucleotide
uggagagcacugccacugu

SEQ ID NO: 1865933 - RNA, 19 nt, Artificial Sequence
  Description of Artificial Sequence: Synthetic oligonucleotide
cacagagcuugucugucca

SEQ ID NO: 1865934 - RNA, 19 nt, Artificial Sequence
  Description of Artificial Sequence: Synthetic oligonucleotide
ccuaccaggguugaccagc

SEQ ID NO: 1865935 - RNA, 19 nt, Artificial Sequence
  Description of Artificial Sequence: Synthetic oligonucleotide
gcaaccuuuaggauaggca

SEQ ID NO: 1865936 - RNA, 19 nt, Artificial Sequence
  Description of Artificial Sequence: Synthetic oligonucleotide
cgaagaaaggccugcuccc

SEQ ID NO: 1865937 - RNA, 19 nt, Artificial Sequence
  Description of Artificial Sequence: Synthetic oligonucleotide
ucgcugcuuggcuggagcu

SEQ ID NO: 1865938 - RNA, 19 nt, Artificial Sequence
  Description of Artificial Sequence: Synthetic oligonucleotide
aaaggacucugcgccucca

SEQ ID NO: 1865939 - RNA, 19 nt, Artificial Sequence
  Description of Artificial Sequence: Synthetic oligonucleotide
uggcacagauccucacggu

SEQ ID NO: 1865940 - RNA, 19 nt, Artificial Sequence
  Description of Artificial Sequence: Synthetic oligonucleotide
agcuguuaggcggcccuuc

SEQ ID NO: 1865941 - RNA, 19 nt, Artificial Sequence
  Description of Artificial Sequence: Synthetic oligonucleotide
uucggauguucugaacuuu

SEQ ID NO: 1865942 - RNA, 19 nt, Artificial Sequence
  Description of Artificial Sequence: Synthetic oligonucleotide
cuuccccgucaccaccacg

SEQ ID NO: 1865943 - RNA, 19 nt, Artificial Sequence
  Description of Artificial Sequence: Synthetic oligonucleotide
ggcacagauccucacgguc

SEQ ID NO: 1865944 - RNA, 19 nt, Artificial Sequence
  Description of Artificial Sequence: Synthetic oligonucleotide
gugauggagagcacugcca

SEQ ID NO: 1865945 - RNA, 19 nt, Artificial Sequence
  Description of Artificial Sequence: Synthetic oligonucleotide
ugccccguggacagcugga

SEQ ID NO: 1865946 - RNA, 19 nt, Artificial Sequence
  Description of Artificial Sequence: Synthetic oligonucleotide
cuaccuuauggugugcaaa

SEQ ID NO: 1865947 - RNA, 19 nt, Artificial Sequence
  Description of Artificial Sequence: Synthetic oligonucleotide
gaggccaaagguagucauc

SEQ ID NO: 1865948 - RNA, 19 nt, Artificial Sequence
  Description of Artificial Sequence: Synthetic oligonucleotide
ggugugcaaacacuagaaa

SEQ ID NO: 1865949 - RNA, 19 nt, Artificial Sequence
  Description of Artificial Sequence: Synthetic oligonucleotide
gacucugcgccuccaggaa

SEQ ID NO: 1865950 - RNA, 19 nt, Artificial Sequence
  Description of Artificial Sequence: Synthetic oligonucleotide
gaaaggccugcucccaggu

SEQ ID NO: 1865951 - RNA, 19 nt, Artificial Sequence
  Description of Artificial Sequence: Synthetic oligonucleotide
acgucagacuugagccgcc

SEQ ID NO: 1865952 - RNA, 19 nt, Artificial Sequence
  Description of Artificial Sequence: Synthetic oligonucleotide
ccaaguagugaaugcccac

SEQ ID NO: 1865953 - RNA, 19 nt, Artificial Sequence
  Description of Artificial Sequence: Synthetic oligonucleotide
ggacuuuagcuucugcugu

SEQ ID NO: 1865954 - RNA, 19 nt, Artificial Sequence
  Description of Artificial Sequence: Synthetic oligonucleotide
gaacuaccuuauggugugc

SEQ ID NO: 1865955 - RNA, 19 nt, Artificial Sequence
  Description of Artificial Sequence: Synthetic oligonucleotide
uggagccaucaauucggau

SEQ ID NO: 1865956 - RNA, 19 nt, Artificial Sequence
  Description of Artificial Sequence: Synthetic oligonucleotide
cauuucugagaaauugguu

SEQ ID NO: 1865957 - RNA, 19 nt, Artificial Sequence
  Description of Artificial Sequence: Synthetic oligonucleotide
uuucgcugcuuggcuggag

SEQ ID NO: 1865958 - RNA, 19 nt, Artificial Sequence
  Description of Artificial Sequence: Synthetic oligonucleotide
cuaccaggguugaccagca

SEQ ID NO: 1865959 - RNA, 19 nt, Artificial Sequence
  Description of Artificial Sequence: Synthetic oligonucleotide
gagguuccugaaguacuuc

SEQ ID NO: 1865960 - RNA, 19 nt, Artificial Sequence
  Description of Artificial Sequence: Synthetic oligonucleotide
aaaggacgucagacuugag

SEQ ID NO: 1865961 - RNA, 19 nt, Artificial Sequence
  Description of Artificial Sequence: Synthetic oligonucleotide
ggcaaccuuuaggauaggc

SEQ ID NO: 1865962 - RNA, 19 nt, Artificial Sequence
  Description of Artificial Sequence: Synthetic oligonucleotide
agagguuccugaaguacuu

SEQ ID NO: 1865963 - RNA, 19 nt, Artificial Sequence
  Description of Artificial Sequence: Synthetic oligonucleotide
ggagagcacugccacugug

SEQ ID NO: 1865964 - RNA, 19 nt, Artificial Sequence
  Description of Artificial Sequence: Synthetic oligonucleotide
ucccacgauccugggaacu

SEQ ID NO: 1865965 - RNA, 19 nt, Artificial Sequence
  Description of Artificial Sequence: Synthetic oligonucleotide
ggacucugcgccuccagga

SEQ ID NO: 1865966 - RNA, 19 nt, Artificial Sequence
  Description of Artificial Sequence: Synthetic oligonucleotide
caccccgggguuccaaaac

SEQ ID NO: 1865967 - RNA, 19 nt, Artificial Sequence
  Description of Artificial Sequence: Synthetic oligonucleotide
ucggcagcgggcagucuua

SEQ ID NO: 1865968 - RNA, 19 nt, Artificial Sequence
  Description of Artificial Sequence: Synthetic oligonucleotide
ugugccccguggacagcug

SEQ ID NO: 1865969 - RNA, 19 nt, Artificial Sequence
  Description of Artificial Sequence: Synthetic oligonucleotide
caguaggaucacccucuug

SEQ ID NO: 1865970 - RNA, 19 nt, Artificial Sequence
  Description of Artificial Sequence: Synthetic oligonucleotide
gcggcggugauggagagca

SEQ ID NO: 1865971 - RNA, 19 nt, Artificial Sequence
  Description of Artificial Sequence: Synthetic oligonucleotide
cacuagaaacuucucucgu

SEQ ID NO: 1865972 - RNA, 19 nt, Artificial Sequence
  Description of Artificial Sequence: Synthetic oligonucleotide
ccaagccagcuguuaggcg

SEQ ID NO: 1865973 - RNA, 19 nt, Artificial Sequence
  Description of Artificial Sequence: Synthetic oligonucleotide
aucagaggccaaagguagu

SEQ ID NO: 1865974 - RNA, 19 nt, Artificial Sequence
  Description of Artificial Sequence: Synthetic oligonucleotide
agcuaacaauguugaccaa

SEQ ID NO: 1865975 - RNA, 19 nt, Artificial Sequence
  Description of Artificial Sequence: Synthetic oligonucleotide
agcgggcagucuuaauguu

SEQ ID NO: 1865976 - RNA, 19 nt, Artificial Sequence
  Description of Artificial Sequence: Synthetic oligonucleotide
ggaucacccucuuggcaac

SEQ ID NO: 1865977 - RNA, 19 nt, Artificial Sequence
  Description of Artificial Sequence: Synthetic oligonucleotide
uggcggcggugauggagag

SEQ ID NO: 1865978 - RNA, 19 nt, Artificial Sequence
  Description of Artificial Sequence: Synthetic oligonucleotide
ugauccuaccaggguugac

SEQ ID NO: 1865979 - RNA, 19 nt, Artificial Sequence
  Description of Artificial Sequence: Synthetic oligonucleotide
gaagugcgauucgucaaua

SEQ ID NO: 1865980 - RNA, 19 nt, Artificial Sequence
  Description of Artificial Sequence: Synthetic oligonucleotide
ccacagagcuugucugucc

SEQ ID NO: 1865981 - RNA, 19 nt, Artificial Sequence
  Description of Artificial Sequence: Synthetic oligonucleotide
gggguggagccaucaauuc

SEQ ID NO: 1865982 - RNA, 19 nt, Artificial Sequence
  Description of Artificial Sequence: Synthetic oligonucleotide
uaccaggguugaccagcac

SEQ ID NO: 1865983 - RNA, 19 nt, Artificial Sequence
  Description of Artificial Sequence: Synthetic oligonucleotide
cccgucaccaccacguuga

SEQ ID NO: 1865984 - RNA, 19 nt, Artificial Sequence
  Description of Artificial Sequence: Synthetic oligonucleotide
cuucggguccuuguagaga

SEQ ID NO: 1865985 - RNA, 19 nt, Artificial Sequence
  Description of Artificial Sequence: Synthetic oligonucleotide
cagcgggcagucuuaaugu

SEQ ID NO: 1865986 - RNA, 19 nt, Artificial Sequence
  Description of Artificial Sequence: Synthetic oligonucleotide
gggaaaggacgucagacuu

SEQ ID NO: 1865987 - RNA, 19 nt, Artificial Sequence
  Description of Artificial Sequence: Synthetic oligonucleotide
cucccacgauccugggaac

SEQ ID NO: 1865988 - RNA, 19 nt, Artificial Sequence
  Description of Artificial Sequence: Synthetic oligonucleotide
uaggcggcccuuccccguc

SEQ ID NO: 1865989 - RNA, 19 nt, Artificial Sequence
  Description of Artificial Sequence: Synthetic oligonucleotide
gcuugucuguccaaugcga

SEQ ID NO: 1865990 - RNA, 19 nt, Artificial Sequence
  Description of Artificial Sequence: Synthetic oligonucleotide
gcgauucgucaauaaugac

SEQ ID NO: 1865991 - RNA, 19 nt, Artificial Sequence
  Description of Artificial Sequence: Synthetic oligonucleotide
caacugcauccagaacuac

SEQ ID NO: 1865992 - RNA, 19 nt, Artificial Sequence
  Description of Artificial Sequence: Synthetic oligonucleotide
gaaguacuuccugggucaa

SEQ ID NO: 1865993 - RNA, 19 nt, Artificial Sequence
  Description of Artificial Sequence: Synthetic oligonucleotide
caucuuucgcugcuuggcu

SEQ ID NO: 1865994 - RNA, 19 nt, Artificial Sequence
  Description of Artificial Sequence: Synthetic oligonucleotide
gccgccucagcaugauugc

SEQ ID NO: 1865995 - RNA, 19 nt, Artificial Sequence
  Description of Artificial Sequence: Synthetic oligonucleotide
gucaaaggacucugcgccu

SEQ ID NO: 1865996 - RNA, 19 nt, Artificial Sequence
  Description of Artificial Sequence: Synthetic oligonucleotide
ugcuuggcuggagcuggga

SEQ ID NO: 1865997 - RNA, 19 nt, Artificial Sequence
  Description of Artificial Sequence: Synthetic oligonucleotide
ccagggccgccuuuggccc

SEQ ID NO: 1865998 - RNA, 19 nt, Artificial Sequence
  Description of Artificial Sequence: Synthetic oligonucleotide
agcaccccgggguuccaaa

SEQ ID NO: 1865999 - RNA, 19 nt, Artificial Sequence
  Description of Artificial Sequence: Synthetic oligonucleotide
gccaucaauucggauguuc

SEQ ID NO: 1866000 - RNA, 19 nt, Artificial Sequence
  Description of Artificial Sequence: Synthetic oligonucleotide
ccaucaauucggauguucu

SEQ ID NO: 1866001 - RNA, 19 nt, Artificial Sequence
  Description of Artificial Sequence: Synthetic oligonucleotide
ccugggucaaaggacucug

SEQ ID NO: 1866002 - RNA, 19 nt, Artificial Sequence
  Description of Artificial Sequence: Synthetic oligonucleotide
ggccaaagguagucaucug

SEQ ID NO: 1866003 - RNA, 19 nt, Artificial Sequence
  Description of Artificial Sequence: Synthetic oligonucleotide
gucucccacgauccuggga

SEQ ID NO: 1866004 - RNA, 19 nt, Artificial Sequence
  Description of Artificial Sequence: Synthetic oligonucleotide
gcggugauggagagcacug

SEQ ID NO: 1866005 - RNA, 19 nt, Artificial Sequence
  Description of Artificial Sequence: Synthetic oligonucleotide
cgggguuccaaaacaguuc

SEQ ID NO: 1866006 - RNA, 19 nt, Artificial Sequence
  Description of Artificial Sequence: Synthetic oligonucleotide
uggcaaccuuuaggauagg

SEQ ID NO: 1866007 - RNA, 19 nt, Artificial Sequence
  Description of Artificial Sequence: Synthetic oligonucleotide
gacgacuuugaaagggguu

SEQ ID NO: 1866008 - RNA, 19 nt, Artificial Sequence
  Description of Artificial Sequence: Synthetic oligonucleotide
ggaagugcgauucgucaau

SEQ ID NO: 1866009 - RNA, 19 nt, Artificial Sequence
  Description of Artificial Sequence: Synthetic oligonucleotide
uuuggcccuggugcugauc

SEQ ID NO: 1866010 - RNA, 19 nt, Artificial Sequence
  Description of Artificial Sequence: Synthetic oligonucleotide
acggucugcugaaggggug

SEQ ID NO: 1866011 - RNA, 19 nt, Artificial Sequence
  Description of Artificial Sequence: Synthetic oligonucleotide
cacggucugcugaaggggu

SEQ ID NO: 1866012 - RNA, 19 nt, Artificial Sequence
  Description of Artificial Sequence: Synthetic oligonucleotide
ugcucggcagcgggcaguc

SEQ ID NO: 1866013 - RNA, 19 nt, Artificial Sequence
  Description of Artificial Sequence: Synthetic oligonucleotide
guugaccagcaccaucuuu

SEQ ID NO: 1866014 - RNA, 19 nt, Artificial Sequence
  Description of Artificial Sequence: Synthetic oligonucleotide
ugugugccccguggacagc

SEQ ID NO: 1866015 - RNA, 19 nt, Artificial Sequence
  Description of Artificial Sequence: Synthetic oligonucleotide
ccccgggguuccaaaacag

SEQ ID NO: 1866016 - RNA, 19 nt, Artificial Sequence
  Description of Artificial Sequence: Synthetic oligonucleotide
ccaccgaagaaaggccugc

SEQ ID NO: 1866017 - RNA, 19 nt, Artificial Sequence
  Description of Artificial Sequence: Synthetic oligonucleotide
acgauccugggaacuacuu

SEQ ID NO: 1866018 - RNA, 19 nt, Artificial Sequence
  Description of Artificial Sequence: Synthetic oligonucleotide
cugcgccuccaggaauucc

SEQ ID NO: 1866019 - RNA, 19 nt, Artificial Sequence
  Description of Artificial Sequence: Synthetic oligonucleotide
ggcagccaccgaagaaagg

SEQ ID NO: 1866020 - RNA, 19 nt, Artificial Sequence
  Description of Artificial Sequence: Synthetic oligonucleotide
ucggguccuuguagagaua

SEQ ID NO: 1866021 - RNA, 19 nt, Artificial Sequence
  Description of Artificial Sequence: Synthetic oligonucleotide
gcgcacagaggaaggcacg

SEQ ID NO: 1866022 - RNA, 19 nt, Artificial Sequence
  Description of Artificial Sequence: Synthetic oligonucleotide
gugcugauccuaccagggu

SEQ ID NO: 1866023 - RNA, 19 nt, Artificial Sequence
  Description of Artificial Sequence: Synthetic oligonucleotide
guggagccaucaauucgga

SEQ ID NO: 1866024 - RNA, 19 nt, Artificial Sequence
  Description of Artificial Sequence: Synthetic oligonucleotide
gccgccuuuggcccuggug

SEQ ID NO: 1866025 - RNA, 19 nt, Artificial Sequence
  Description of Artificial Sequence: Synthetic oligonucleotide
ccucucaagcuccuuuaca

SEQ ID NO: 1866026 - RNA, 19 nt, Artificial Sequence
  Description of Artificial Sequence: Synthetic oligonucleotide
uccccgucaccaccacguu

SEQ ID NO: 1866027 - RNA, 19 nt, Artificial Sequence
  Description of Artificial Sequence: Synthetic oligonucleotide
ccaccagaucagcugagga

SEQ ID NO: 1866028 - RNA, 19 nt, Artificial Sequence
  Description of Artificial Sequence: Synthetic oligonucleotide
cacgauccugggaacuacu

SEQ ID NO: 1866029 - RNA, 19 nt, Artificial Sequence
  Description of Artificial Sequence: Synthetic oligonucleotide
cugauccuaccaggguuga

SEQ ID NO: 1866030 - RNA, 19 nt, Artificial Sequence
  Description of Artificial Sequence: Synthetic oligonucleotide
acucgguccucagccugga

SEQ ID NO: 1866031 - RNA, 19 nt, Artificial Sequence
  Description of Artificial Sequence: Synthetic oligonucleotide
gcacagauccucacggucu

SEQ ID NO: 1866032 - RNA, 19 nt, Artificial Sequence
  Description of Artificial Sequence: Synthetic oligonucleotide
gcccauauuggcggcggug

SEQ ID NO: 1866033 - RNA, 19 nt, Artificial Sequence
  Description of Artificial Sequence: Synthetic oligonucleotide
cccauauuggcggcgguga

SEQ ID NO: 1866034 - RNA, 19 nt, Artificial Sequence
  Description of Artificial Sequence: Synthetic oligonucleotide
ggugaagcgcacagaggaa

SEQ ID NO: 1866035 - RNA, 19 nt, Artificial Sequence
  Description of Artificial Sequence: Synthetic oligonucleotide
cccguggacagcuggaacu

SEQ ID NO: 1866036 - RNA, 19 nt, Artificial Sequence
  Description of Artificial Sequence: Synthetic oligonucleotide
ggaacuacuuccagagguu

SEQ ID NO: 1866037 - RNA, 19 nt, Artificial Sequence
  Description of Artificial Sequence: Synthetic oligonucleotide
cccacagagcuugucuguc

SEQ ID NO: 1866038 - RNA, 19 nt, Artificial Sequence
  Description of Artificial Sequence: Synthetic oligonucleotide
cuuucgcugcuuggcugga

SEQ ID NO: 1866039 - RNA, 19 nt, Artificial Sequence
  Description of Artificial Sequence: Synthetic oligonucleotide
gcuguuuaguuuuguccuu

SEQ ID NO: 1866040 - RNA, 19 nt, Artificial Sequence
  Description of Artificial Sequence: Synthetic oligonucleotide
guuuuguccuuggucuauu

SEQ ID NO: 1866041 - RNA, 19 nt, Artificial Sequence
  Description of Artificial Sequence: Synthetic oligonucleotide
ccccgucaccaccacguug

SEQ ID NO: 1866042 - RNA, 19 nt, Artificial Sequence
  Description of Artificial Sequence: Synthetic oligonucleotide
cggucugcugaaggggugg

SEQ ID NO: 1866043 - RNA, 19 nt, Artificial Sequence
  Description of Artificial Sequence: Synthetic oligonucleotide
ggcggugauggagagcacu

SEQ ID NO: 1866044 - RNA, 19 nt, Artificial Sequence
  Description of Artificial Sequence: Synthetic oligonucleotide
gguccucagccuggaucag

SEQ ID NO: 1866045 - RNA, 19 nt, Artificial Sequence
  Description of Artificial Sequence: Synthetic oligonucleotide
cucggcagcgggcagucuu

SEQ ID NO: 1866046 - RNA, 19 nt, Artificial Sequence
  Description of Artificial Sequence: Synthetic oligonucleotide
cucccaggugaagcgcaca

SEQ ID NO: 1866047 - RNA, 19 nt, Artificial Sequence
  Description of Artificial Sequence: Synthetic oligonucleotide
gugaaugcccacagagcuu

SEQ ID NO: 1866048 - RNA, 19 nt, Artificial Sequence
  Description of Artificial Sequence: Synthetic oligonucleotide
gguccaugauguauucaau

SEQ ID NO: 1866049 - RNA, 19 nt, Artificial Sequence
  Description of Artificial Sequence: Synthetic oligonucleotide
ccgccucagcaugauugcc

SEQ ID NO: 1866050 - RNA, 19 nt, Artificial Sequence
  Description of Artificial Sequence: Synthetic oligonucleotide
ggaacaggucauagauggu

SEQ ID NO: 1866051 - RNA, 19 nt, Artificial Sequence
  Description of Artificial Sequence: Synthetic oligonucleotide
ccgggguuccaaaacaguu

SEQ ID NO: 1866052 - RNA, 19 nt, Artificial Sequence
  Description of Artificial Sequence: Synthetic oligonucleotide
gaaugcccacagagcuugu

SEQ ID NO: 1866053 - RNA, 19 nt, Artificial Sequence
  Description of Artificial Sequence: Synthetic oligonucleotide
gcaccccgggguuccaaaa

SEQ ID NO: 1866054 - RNA, 19 nt, Artificial Sequence
  Description of Artificial Sequence: Synthetic oligonucleotide
guugaccaagccagcuguu

SEQ ID NO: 1866055 - RNA, 19 nt, Artificial Sequence
  Description of Artificial Sequence: Synthetic oligonucleotide
caccgaagaaaggccugcu

SEQ ID NO: 1866056 - RNA, 19 nt, Artificial Sequence
  Description of Artificial Sequence: Synthetic oligonucleotide
ggcggcggugauggagagc

SEQ ID NO: 1866057 - RNA, 19 nt, Artificial Sequence
  Description of Artificial Sequence: Synthetic oligonucleotide
ccuuccccgucaccaccac

SEQ ID NO: 1866058 - RNA, 19 nt, Artificial Sequence
  Description of Artificial Sequence: Synthetic oligonucleotide
ggcccuggugcugauccua

SEQ ID NO: 1866059 - RNA, 19 nt, Artificial Sequence
  Description of Artificial Sequence: Synthetic oligonucleotide
ggcggcccuuccccgucac

SEQ ID NO: 1866060 - RNA, 19 nt, Artificial Sequence
  Description of Artificial Sequence: Synthetic oligonucleotide
gguugaccagcaccaucuu

SEQ ID NO: 1866061 - RNA, 19 nt, Artificial Sequence
  Description of Artificial Sequence: Synthetic oligonucleotide
gcggcccuuccccgucacc

SEQ ID NO: 1866062 - RNA, 19 nt, Artificial Sequence
  Description of Artificial Sequence: Synthetic oligonucleotide
cggauguucugaacuuucu

SEQ ID NO: 1866063 - RNA, 19 nt, Artificial Sequence
  Description of Artificial Sequence: Synthetic oligonucleotide
gcgaugcacucgguccuca

SEQ ID NO: 1866064 - RNA, 19 nt, Artificial Sequence
  Description of Artificial Sequence: Synthetic oligonucleotide
cacucuccaaaagguccau

SEQ ID NO: 1866065 - RNA, 19 nt, Artificial Sequence
  Description of Artificial Sequence: Synthetic oligonucleotide
cccgggguuccaaaacagu

SEQ ID NO: 1866066 - RNA, 19 nt, Artificial Sequence
  Description of Artificial Sequence: Synthetic oligonucleotide
gagccgccucagcaugauu

SEQ ID NO: 1866067 - RNA, 19 nt, Artificial Sequence
  Description of Artificial Sequence: Synthetic oligonucleotide
gcgggcagucuuaauguuu

SEQ ID NO: 1866068 - RNA, 19 nt, Artificial Sequence
  Description of Artificial Sequence: Synthetic oligonucleotide
cccacgauccugggaacua

SEQ ID NO: 1866069 - RNA, 19 nt, Artificial Sequence
  Description of Artificial Sequence: Synthetic oligonucleotide
cugcucggcagcgggcagu

SEQ ID NO: 1866070 - RNA, 19 nt, Artificial Sequence
  Description of Artificial Sequence: Synthetic oligonucleotide
cuuuggcccuggugcugau

SEQ ID NO: 1866071 - RNA, 19 nt, Artificial Sequence
  Description of Artificial Sequence: Synthetic oligonucleotide
cggcccuuccccgucacca

SEQ ID NO: 1866072 - RNA, 19 nt, Artificial Sequence
  Description of Artificial Sequence: Synthetic oligonucleotide
cagggccgccuuuggcccu

SEQ ID NO: 1866073 - RNA, 19 nt, Artificial Sequence
  Description of Artificial Sequence: Synthetic oligonucleotide
ggcccauauuggcggcggu

SEQ ID NO: 1866074 - RNA, 19 nt, Artificial Sequence
  Description of Artificial Sequence: Synthetic oligonucleotide
cagcaccccgggguuccaa

SEQ ID NO: 1866075 - RNA, 19 nt, Artificial Sequence
  Description of Artificial Sequence: Synthetic oligonucleotide
ggcagcgggcagucuuaau

SEQ ID NO: 1866076 - RNA, 19 nt, Artificial Sequence
  Description of Artificial Sequence: Synthetic oligonucleotide
ccaugucauuuccgucucu

SEQ ID NO: 1866077 - RNA, 19 nt, Artificial Sequence
  Description of Artificial Sequence: Synthetic oligonucleotide
ccaaugcgaugcacucggu

SEQ ID NO: 1866078 - RNA, 19 nt, Artificial Sequence
  Description of Artificial Sequence: Synthetic oligonucleotide
cucgguccucagccuggau

SEQ ID NO: 1866079 - RNA, 19 nt, Artificial Sequence
  Description of Artificial Sequence: Synthetic oligonucleotide
gggccgccuuuggcccugg

SEQ ID NO: 1866080 - RNA, 19 nt, Artificial Sequence
  Description of Artificial Sequence: Synthetic oligonucleotide
cagcuguuaggcggcccuu

SEQ ID NO: 1866081 - RNA, 19 nt, Artificial Sequence
  Description of Artificial Sequence: Synthetic oligonucleotide
cggcggugauggagagcac

SEQ ID NO: 1866082 - RNA, 19 nt, Artificial Sequence
  Description of Artificial Sequence: Synthetic oligonucleotide
ggccgccuuuggcccuggu

SEQ ID NO: 1866083 - RNA, 19 nt, Artificial Sequence
  Description of Artificial Sequence: Synthetic oligonucleotide
ccgucaccaccacguugau

SEQ ID NO: 1866084 - RNA, 19 nt, Artificial Sequence
  Description of Artificial Sequence: Synthetic oligonucleotide
cggcagcgggcagucuuaa

SEQ ID NO: 1866085 - RNA, 19 nt, Artificial Sequence
  Description of Artificial Sequence: Synthetic oligonucleotide
gcucggcagcgggcagucu

SEQ ID NO: 1866086 - RNA, 19 nt, Artificial Sequence
  Description of Artificial Sequence: Synthetic oligonucleotide
aauaauauaauuuacauga

SEQ ID NO: 1866087 - RNA, 19 nt, Artificial Sequence
  Description of Artificial Sequence: Synthetic oligonucleotide
uuauauaauacauuuaaag

SEQ ID NO: 1866088 - RNA, 19 nt, Artificial Sequence
  Description of Artificial Sequence: Synthetic oligonucleotide
aaugaauggcuucaguucc

SEQ ID NO: 1866089 - RNA, 19 nt, Artificial Sequence
  Description of Artificial Sequence: Synthetic oligonucleotide
auuaauuaagucuuggauc

SEQ ID NO: 1866090 - RNA, 19 nt, Artificial Sequence
  Description of Artificial Sequence: Synthetic oligonucleotide
uuaauuaagucuuggaucc

SEQ ID NO: 1866091 - RNA, 19 nt, Artificial Sequence
  Description of Artificial Sequence: Synthetic oligonucleotide
guauaaaguagucagaugc

SEQ ID NO: 1866092 - RNA, 19 nt, Artificial Sequence
  Description of Artificial Sequence: Synthetic oligonucleotide
uugguuauuuaccaaaggg

SEQ ID NO: 1866093 - RNA, 19 nt, Artificial Sequence
  Description of Artificial Sequence: Synthetic oligonucleotide
uucauaaaggucaagugag

SEQ ID NO: 1866094 - RNA, 19 nt, Artificial Sequence
  Description of Artificial Sequence: Synthetic oligonucleotide
auuaccaucauuaagaacu

SEQ ID NO: 1866095 - RNA, 19 nt, Artificial Sequence
  Description of Artificial Sequence: Synthetic oligonucleotide
uauaauacauuuaaaguuc

SEQ ID NO: 1866096 - RNA, 19 nt, Artificial Sequence
  Description of Artificial Sequence: Synthetic oligonucleotide
uaugguaagaguacagugg

SEQ ID NO: 1866097 - RNA, 19 nt, Artificial Sequence
  Description of Artificial Sequence: Synthetic oligonucleotide
uuuaccaucauaagcagug

SEQ ID NO: 1866098 - RNA, 19 nt, Artificial Sequence
  Description of Artificial Sequence: Synthetic oligonucleotide
ugaaacuuaauuuacugca

SEQ ID NO: 1866099 - RNA, 19 nt, Artificial Sequence
  Description of Artificial Sequence: Synthetic oligonucleotide
aaaugugaaacauugugga

SEQ ID NO: 1866100 - RNA, 19 nt, Artificial Sequence
  Description of Artificial Sequence: Synthetic oligonucleotide
uguaagaacacuuugguua

SEQ ID NO: 1866101 - RNA, 19 nt, Artificial Sequence
  Description of Artificial Sequence: Synthetic oligonucleotide
ucaaauauggcacacugac

SEQ ID NO: 1866102 - RNA, 19 nt, Artificial Sequence
  Description of Artificial Sequence: Synthetic oligonucleotide
ugacuuaucaaauaaggcu

SEQ ID NO: 1866103 - RNA, 19 nt, Artificial Sequence
  Description of Artificial Sequence: Synthetic oligonucleotide
augaaacuuaauuuacugc

SEQ ID NO: 1866104 - RNA, 19 nt, Artificial Sequence
  Description of Artificial Sequence: Synthetic oligonucleotide
uuucauaaaggucaaguga

SEQ ID NO: 1866105 - RNA, 19 nt, Artificial Sequence
  Description of Artificial Sequence: Synthetic oligonucleotide
aacauuguggacucacuac

SEQ ID NO: 1866106 - RNA, 19 nt, Artificial Sequence
  Description of Artificial Sequence: Synthetic oligonucleotide
aaauauggcacacugacuu

SEQ ID NO: 1866107 - RNA, 19 nt, Artificial Sequence
  Description of Artificial Sequence: Synthetic oligonucleotide
cuagaaaaccuuuaaaaug

SEQ ID NO: 1866108 - RNA, 19 nt, Artificial Sequence
  Description of Artificial Sequence: Synthetic oligonucleotide
gaaagugucaaucccuugg

SEQ ID NO: 1866109 - RNA, 19 nt, Artificial Sequence
  Description of Artificial Sequence: Synthetic oligonucleotide
uuucauagaaaagauugcg

SEQ ID NO: 1866110 - RNA, 19 nt, Artificial Sequence
  Description of Artificial Sequence: Synthetic oligonucleotide
ucuucauuuaacaacugca

SEQ ID NO: 1866111 - RNA, 19 nt, Artificial Sequence
  Description of Artificial Sequence: Synthetic oligonucleotide
ucaagugaggcuuaaagcu

SEQ ID NO: 1866112 - RNA, 19 nt, Artificial Sequence
  Description of Artificial Sequence: Synthetic oligonucleotide
agcaaagucacacugaagu

SEQ ID NO: 1866113 - RNA, 19 nt, Artificial Sequence
  Description of Artificial Sequence: Synthetic oligonucleotide
ugaacucaguacuugauag

SEQ ID NO: 1866114 - RNA, 19 nt, Artificial Sequence
  Description of Artificial Sequence: Synthetic oligonucleotide
caaaugugaaacauugugg

SEQ ID NO: 1866115 - RNA, 19 nt, Artificial Sequence
  Description of Artificial Sequence: Synthetic oligonucleotide
auuaagaacucuuccuucg

SEQ ID NO: 1866116 - RNA, 19 nt, Artificial Sequence
  Description of Artificial Sequence: Synthetic oligonucleotide
uuugcaagaccuuaauucc

SEQ ID NO: 1866117 - RNA, 19 nt, Artificial Sequence
  Description of Artificial Sequence: Synthetic oligonucleotide
caaagcuucauuaauuaag

SEQ ID NO: 1866118 - RNA, 19 nt, Artificial Sequence
  Description of Artificial Sequence: Synthetic oligonucleotide
ugguuauuuaccaaagggc

SEQ ID NO: 1866119 - RNA, 19 nt, Artificial Sequence
  Description of Artificial Sequence: Synthetic oligonucleotide
ugugauuaccaucauuaag

SEQ ID NO: 1866120 - RNA, 19 nt, Artificial Sequence
  Description of Artificial Sequence: Synthetic oligonucleotide
aauguaaacggcaguauuc

SEQ ID NO: 1866121 - RNA, 19 nt, Artificial Sequence
  Description of Artificial Sequence: Synthetic oligonucleotide
cucuaagcaauguaaacgg

SEQ ID NO: 1866122 - RNA, 19 nt, Artificial Sequence
  Description of Artificial Sequence: Synthetic oligonucleotide
uucaucuucauuuaacaac

SEQ ID NO: 1866123 - RNA, 19 nt, Artificial Sequence
  Description of Artificial Sequence: Synthetic oligonucleotide
auaaagauuaugguaagag

SEQ ID NO: 1866124 - RNA, 19 nt, Artificial Sequence
  Description of Artificial Sequence: Synthetic oligonucleotide
aaauguuacccacauuuca

SEQ ID NO: 1866125 - RNA, 19 nt, Artificial Sequence
  Description of Artificial Sequence: Synthetic oligonucleotide
aagauuaugguaagaguac

SEQ ID NO: 1866126 - RNA, 19 nt, Artificial Sequence
  Description of Artificial Sequence: Synthetic oligonucleotide
uuaccaaagggcuaugugc

SEQ ID NO: 1866127 - RNA, 19 nt, Artificial Sequence
  Description of Artificial Sequence: Synthetic oligonucleotide
uaagcaauguaaacggcag

SEQ ID NO: 1866128 - RNA, 19 nt, Artificial Sequence
  Description of Artificial Sequence: Synthetic oligonucleotide
uuugguuauuuaccaaagg

SEQ ID NO: 1866129 - RNA, 19 nt, Artificial Sequence
  Description of Artificial Sequence: Synthetic oligonucleotide
uuuggaaagugucaauccc

SEQ ID NO: 1866130 - RNA, 19 nt, Artificial Sequence
  Description of Artificial Sequence: Synthetic oligonucleotide
uuuaacaacugcaucacua

SEQ ID NO: 1866131 - RNA, 19 nt, Artificial Sequence
  Description of Artificial Sequence: Synthetic oligonucleotide
uuaugguaagaguacagug

SEQ ID NO: 1866132 - RNA, 19 nt, Artificial Sequence
  Description of Artificial Sequence: Synthetic oligonucleotide
aaagauuaugguaagagua

SEQ ID NO: 1866133 - RNA, 19 nt, Artificial Sequence
  Description of Artificial Sequence: Synthetic oligonucleotide
aguaccaauguuuacuuca

SEQ ID NO: 1866134 - RNA, 19 nt, Artificial Sequence
  Description of Artificial Sequence: Synthetic oligonucleotide
acugacuuaucaaauaagg

SEQ ID NO: 1866135 - RNA, 19 nt, Artificial Sequence
  Description of Artificial Sequence: Synthetic oligonucleotide
aacuguaagaacacuuugg

SEQ ID NO: 1866136 - RNA, 19 nt, Artificial Sequence
  Description of Artificial Sequence: Synthetic oligonucleotide
acucacuacacacaugauc

SEQ ID NO: 1866137 - RNA, 19 nt, Artificial Sequence
  Description of Artificial Sequence: Synthetic oligonucleotide
augacagccauaugcauuc

SEQ ID NO: 1866138 - RNA, 19 nt, Artificial Sequence
  Description of Artificial Sequence: Synthetic oligonucleotide
augaagggaaccaucaccc

SEQ ID NO: 1866139 - RNA, 19 nt, Artificial Sequence
  Description of Artificial Sequence: Synthetic oligonucleotide
ugugaucuccaucugcuag

SEQ ID NO: 1866140 - RNA, 19 nt, Artificial Sequence
  Description of Artificial Sequence: Synthetic oligonucleotide
aagucuuggaucccaacug

SEQ ID NO: 1866141 - RNA, 19 nt, Artificial Sequence
  Description of Artificial Sequence: Synthetic oligonucleotide
ugcaaauaaagauuauggu

SEQ ID NO: 1866142 - RNA, 19 nt, Artificial Sequence
  Description of Artificial Sequence: Synthetic oligonucleotide
cuuggaagggcaaagucag

SEQ ID NO: 1866143 - RNA, 19 nt, Artificial Sequence
  Description of Artificial Sequence: Synthetic oligonucleotide
uaaagauuaugguaagagu

SEQ ID NO: 1866144 - RNA, 19 nt, Artificial Sequence
  Description of Artificial Sequence: Synthetic oligonucleotide
ugaucauuucaacagugac

SEQ ID NO: 1866145 - RNA, 19 nt, Artificial Sequence
  Description of Artificial Sequence: Synthetic oligonucleotide
agugucaaucccuuggaag

SEQ ID NO: 1866146 - RNA, 19 nt, Artificial Sequence
  Description of Artificial Sequence: Synthetic oligonucleotide
uauaaaguagucagaugcu

SEQ ID NO: 1866147 - RNA, 19 nt, Artificial Sequence
  Description of Artificial Sequence: Synthetic oligonucleotide
ucugcuagcuucacaaagc

SEQ ID NO: 1866148 - RNA, 19 nt, Artificial Sequence
  Description of Artificial Sequence: Synthetic oligonucleotide
uuacugcaaauaaagauua

SEQ ID NO: 1866149 - RNA, 19 nt, Artificial Sequence
  Description of Artificial Sequence: Synthetic oligonucleotide
uauuguguuuugcaagacc

SEQ ID NO: 1866150 - RNA, 19 nt, Artificial Sequence
  Description of Artificial Sequence: Synthetic oligonucleotide
ugagucucaggcuuuagca

SEQ ID NO: 1866151 - RNA, 19 nt, Artificial Sequence
  Description of Artificial Sequence: Synthetic oligonucleotide
auguaaacggcaguauucc

SEQ ID NO: 1866152 - RNA, 19 nt, Artificial Sequence
  Description of Artificial Sequence: Synthetic oligonucleotide
aucauuaagaacucuuccu

SEQ ID NO: 1866153 - RNA, 19 nt, Artificial Sequence
  Description of Artificial Sequence: Synthetic oligonucleotide
ugguuugugggcuuuguag

SEQ ID NO: 1866154 - RNA, 19 nt, Artificial Sequence
  Description of Artificial Sequence: Synthetic oligonucleotide
uaagucuuggaucccaacu

SEQ ID NO: 1866155 - RNA, 19 nt, Artificial Sequence
  Description of Artificial Sequence: Synthetic oligonucleotide
uaugcauuccuuuggcaag

SEQ ID NO: 1866156 - RNA, 19 nt, Artificial Sequence
  Description of Artificial Sequence: Synthetic oligonucleotide
uguuacccacauuucauag

SEQ ID NO: 1866157 - RNA, 19 nt, Artificial Sequence
  Description of Artificial Sequence: Synthetic oligonucleotide
auaagcagugaagagcuac

SEQ ID NO: 1866158 - RNA, 19 nt, Artificial Sequence
  Description of Artificial Sequence: Synthetic oligonucleotide
uuacccacauuucauagaa

SEQ ID NO: 1866159 - RNA, 19 nt, Artificial Sequence
  Description of Artificial Sequence: Synthetic oligonucleotide
aguauuguguuuugcaaga

SEQ ID NO: 1866160 - RNA, 19 nt, Artificial Sequence
  Description of Artificial Sequence: Synthetic oligonucleotide
ucauuaauuaagucuugga

SEQ ID NO: 1866161 - RNA, 19 nt, Artificial Sequence
  Description of Artificial Sequence: Synthetic oligonucleotide
gaacacuuugguuauuuac

SEQ ID NO: 1866162 - RNA, 19 nt, Artificial Sequence
  Description of Artificial Sequence: Synthetic oligonucleotide
aucaaugaaauacaucaaa

SEQ ID NO: 1866163 - RNA, 19 nt, Artificial Sequence
  Description of Artificial Sequence: Synthetic oligonucleotide
ugguuucuugccuaagggg

SEQ ID NO: 1866164 - RNA, 19 nt, Artificial Sequence
  Description of Artificial Sequence: Synthetic oligonucleotide
caucauuaagaacucuucc

SEQ ID NO: 1866165 - RNA, 19 nt, Artificial Sequence
  Description of Artificial Sequence: Synthetic oligonucleotide
gugauuaccaucauuaaga

SEQ ID NO: 1866166 - RNA, 19 nt, Artificial Sequence
  Description of Artificial Sequence: Synthetic oligonucleotide
aucauuucaacagugacaa

SEQ ID NO: 1866167 - RNA, 19 nt, Artificial Sequence
  Description of Artificial Sequence: Synthetic oligonucleotide
uucauuuaacaacugcauc

SEQ ID NO: 1866168 - RNA, 19 nt, Artificial Sequence
  Description of Artificial Sequence: Synthetic oligonucleotide
cuagcaaggugauaugaag

SEQ ID NO: 1866169 - RNA, 19 nt, Artificial Sequence
  Description of Artificial Sequence: Synthetic oligonucleotide
cuaugugcuggacugagag

SEQ ID NO: 1866170 - RNA, 19 nt, Artificial Sequence
  Description of Artificial Sequence: Synthetic oligonucleotide
aaagugucaaucccuugga

SEQ ID NO: 1866171 - RNA, 19 nt, Artificial Sequence
  Description of Artificial Sequence: Synthetic oligonucleotide
ugcaagaccuuaauuccag

SEQ ID NO: 1866172 - RNA, 19 nt, Artificial Sequence
  Description of Artificial Sequence: Synthetic oligonucleotide
aaagucacacugaagucag

SEQ ID NO: 1866173 - RNA, 19 nt, Artificial Sequence
  Description of Artificial Sequence: Synthetic oligonucleotide
cugugugcaaguuuuggcc

SEQ ID NO: 1866174 - RNA, 19 nt, Artificial Sequence
  Description of Artificial Sequence: Synthetic oligonucleotide
caucaaauauggcacacug

SEQ ID NO: 1866175 - RNA, 19 nt, Artificial Sequence
  Description of Artificial Sequence: Synthetic oligonucleotide
uugauuccuuaccaaaugu

SEQ ID NO: 1866176 - RNA, 19 nt, Artificial Sequence
  Description of Artificial Sequence: Synthetic oligonucleotide
auaaaguagucagaugcuc

SEQ ID NO: 1866177 - RNA, 19 nt, Artificial Sequence
  Description of Artificial Sequence: Synthetic oligonucleotide
uccuguugcaguauugugu

SEQ ID NO: 1866178 - RNA, 19 nt, Artificial Sequence
  Description of Artificial Sequence: Synthetic oligonucleotide
aacggcaguauuccuucgg

SEQ ID NO: 1866179 - RNA, 19 nt, Artificial Sequence
  Description of Artificial Sequence: Synthetic oligonucleotide
uaccaaagggcuaugugcu

SEQ ID NO: 1866180 - RNA, 19 nt, Artificial Sequence
  Description of Artificial Sequence: Synthetic oligonucleotide
aguuguugauuccuuacca

SEQ ID NO: 1866181 - RNA, 19 nt, Artificial Sequence
  Description of Artificial Sequence: Synthetic oligonucleotide
ugaugugaucuccaucugc

SEQ ID NO: 1866182 - RNA, 19 nt, Artificial Sequence
  Description of Artificial Sequence: Synthetic oligonucleotide
cuuuguagaaacuguaaga

SEQ ID NO: 1866183 - RNA, 19 nt, Artificial Sequence
  Description of Artificial Sequence: Synthetic oligonucleotide
gaaguuguugauuccuuac

SEQ ID NO: 1866184 - RNA, 19 nt, Artificial Sequence
  Description of Artificial Sequence: Synthetic oligonucleotide
ucuaagcaauguaaacggc

SEQ ID NO: 1866185 - RNA, 19 nt, Artificial Sequence
  Description of Artificial Sequence: Synthetic oligonucleotide
uuggaaagugucaaucccu

SEQ ID NO: 1866186 - RNA, 19 nt, Artificial Sequence
  Description of Artificial Sequence: Synthetic oligonucleotide
agucuuggaucccaacugg

SEQ ID NO: 1866187 - RNA, 19 nt, Artificial Sequence
  Description of Artificial Sequence: Synthetic oligonucleotide
aguauaaaguagucagaug

SEQ ID NO: 1866188 - RNA, 19 nt, Artificial Sequence
  Description of Artificial Sequence: Synthetic oligonucleotide
aucugcuagcuucacaaag

SEQ ID NO: 1866189 - RNA, 19 nt, Artificial Sequence
  Description of Artificial Sequence: Synthetic oligonucleotide
caaugaauggcuucaguuc

SEQ ID NO: 1866190 - RNA, 19 nt, Artificial Sequence
  Description of Artificial Sequence: Synthetic oligonucleotide
uggacugagaguucauaag

SEQ ID NO: 1866191 - RNA, 19 nt, Artificial Sequence
  Description of Artificial Sequence: Synthetic oligonucleotide
aacaacugcaucacuagca

SEQ ID NO: 1866192 - RNA, 19 nt, Artificial Sequence
  Description of Artificial Sequence: Synthetic oligonucleotide
aauaaagauuaugguaaga

SEQ ID NO: 1866193 - RNA, 19 nt, Artificial Sequence
  Description of Artificial Sequence: Synthetic oligonucleotide
agcaucaucgugugauuac

SEQ ID NO: 1866194 - RNA, 19 nt, Artificial Sequence
  Description of Artificial Sequence: Synthetic oligonucleotide
cuuaccaaauguugguuug

SEQ ID NO: 1866195 - RNA, 19 nt, Artificial Sequence
  Description of Artificial Sequence: Synthetic oligonucleotide
aacugaacucaguacuuga

SEQ ID NO: 1866196 - RNA, 19 nt, Artificial Sequence
  Description of Artificial Sequence: Synthetic oligonucleotide
auaaaggucaagugaggcu

SEQ ID NO: 1866197 - RNA, 19 nt, Artificial Sequence
  Description of Artificial Sequence: Synthetic oligonucleotide
cuuucucccgccaggaugc

SEQ ID NO: 1866198 - RNA, 19 nt, Artificial Sequence
  Description of Artificial Sequence: Synthetic oligonucleotide
aaacauuguggacucacua

SEQ ID NO: 1866199 - RNA, 19 nt, Artificial Sequence
  Description of Artificial Sequence: Synthetic oligonucleotide
auaugcauuccuuuggcaa

SEQ ID NO: 1866200 - RNA, 19 nt, Artificial Sequence
  Description of Artificial Sequence: Synthetic oligonucleotide
aaggcuagaaaaccuuuaa

SEQ ID NO: 1866201 - RNA, 19 nt, Artificial Sequence
  Description of Artificial Sequence: Synthetic oligonucleotide
acauuguggacucacuaca

SEQ ID NO: 1866202 - RNA, 19 nt, Artificial Sequence
  Description of Artificial Sequence: Synthetic oligonucleotide
gauuaugguaagaguacag

SEQ ID NO: 1866203 - RNA, 19 nt, Artificial Sequence
  Description of Artificial Sequence: Synthetic oligonucleotide
uccaaaagcgcaucaguac

SEQ ID NO: 1866204 - RNA, 19 nt, Artificial Sequence
  Description of Artificial Sequence: Synthetic oligonucleotide
uguaaguguguugauguga

SEQ ID NO: 1866205 - RNA, 19 nt, Artificial Sequence
  Description of Artificial Sequence: Synthetic oligonucleotide
aauuaagucuuggauccca

SEQ ID NO: 1866206 - RNA, 19 nt, Artificial Sequence
  Description of Artificial Sequence: Synthetic oligonucleotide
acucccuucuuccugagca

SEQ ID NO: 1866207 - RNA, 19 nt, Artificial Sequence
  Description of Artificial Sequence: Synthetic oligonucleotide
aaggugauaugaagggaac

SEQ ID NO: 1866208 - RNA, 19 nt, Artificial Sequence
  Description of Artificial Sequence: Synthetic oligonucleotide
uuauuuaccaaagggcuau

SEQ ID NO: 1866209 - RNA, 19 nt, Artificial Sequence
  Description of Artificial Sequence: Synthetic oligonucleotide
uaucaaugaaauacaucaa

SEQ ID NO: 1866210 - RNA, 19 nt, Artificial Sequence
  Description of Artificial Sequence: Synthetic oligonucleotide
aguagucagaugcucuaag

SEQ ID NO: 1866211 - RNA, 19 nt, Artificial Sequence
  Description of Artificial Sequence: Synthetic oligonucleotide
uuguagaaacuguaagaac

SEQ ID NO: 1866212 - RNA, 19 nt, Artificial Sequence
  Description of Artificial Sequence: Synthetic oligonucleotide
aaguuuuggccucaguaua

SEQ ID NO: 1866213 - RNA, 19 nt, Artificial Sequence
  Description of Artificial Sequence: Synthetic oligonucleotide
uaacaacugcaucacuagc

SEQ ID NO: 1866214 - RNA, 19 nt, Artificial Sequence
  Description of Artificial Sequence: Synthetic oligonucleotide
ugcaaagcuucauuaauua

SEQ ID NO: 1866215 - RNA, 19 nt, Artificial Sequence
  Description of Artificial Sequence: Synthetic oligonucleotide
uuaagaacucuuccuucga

SEQ ID NO: 1866216 - RNA, 19 nt, Artificial Sequence
  Description of Artificial Sequence: Synthetic oligonucleotide
acggcaguauuccuucggc

SEQ ID NO: 1866217 - RNA, 19 nt, Artificial Sequence
  Description of Artificial Sequence: Synthetic oligonucleotide
uccuuccuaaucauggccu

SEQ ID NO: 1866218 - RNA, 19 nt, Artificial Sequence
  Description of Artificial Sequence: Synthetic oligonucleotide
uuuuaccaucauaagcagu

SEQ ID NO: 1866219 - RNA, 19 nt, Artificial Sequence
  Description of Artificial Sequence: Synthetic oligonucleotide
aagugaggcuuaaagcuuc

SEQ ID NO: 1866220 - RNA, 19 nt, Artificial Sequence
  Description of Artificial Sequence: Synthetic oligonucleotide
agggcuaugugcuggacug

SEQ ID NO: 1866221 - RNA, 19 nt, Artificial Sequence
  Description of Artificial Sequence: Synthetic oligonucleotide
uuguggacucacuacacac

SEQ ID NO: 1866222 - RNA, 19 nt, Artificial Sequence
  Description of Artificial Sequence: Synthetic oligonucleotide
uaaacggcaguauuccuuc

SEQ ID NO: 1866223 - RNA, 19 nt, Artificial Sequence
  Description of Artificial Sequence: Synthetic oligonucleotide
gaaccaucacccaccaugg

SEQ ID NO: 1866224 - RNA, 19 nt, Artificial Sequence
  Description of Artificial Sequence: Synthetic oligonucleotide
cuaagcaauguaaacggca

SEQ ID NO: 1866225 - RNA, 19 nt, Artificial Sequence
  Description of Artificial Sequence: Synthetic oligonucleotide
aauguuacccacauuucau

SEQ ID NO: 1866226 - RNA, 19 nt, Artificial Sequence
  Description of Artificial Sequence: Synthetic oligonucleotide
cauggccugagucucaggc

SEQ ID NO: 1866227 - RNA, 19 nt, Artificial Sequence
  Description of Artificial Sequence: Synthetic oligonucleotide
ugauuaccaucauuaagaa

SEQ ID NO: 1866228 - RNA, 19 nt, Artificial Sequence
  Description of Artificial Sequence: Synthetic oligonucleotide
gcucuaagcaauguaaacg

SEQ ID NO: 1866229 - RNA, 19 nt, Artificial Sequence
  Description of Artificial Sequence: Synthetic oligonucleotide
ggucaagugaggcuuaaag

SEQ ID NO: 1866230 - RNA, 19 nt, Artificial Sequence
  Description of Artificial Sequence: Synthetic oligonucleotide
caucgugugauuaccauca

SEQ ID NO: 1866231 - RNA, 19 nt, Artificial Sequence
  Description of Artificial Sequence: Synthetic oligonucleotide
aaacugaacucaguacuug

SEQ ID NO: 1866232 - RNA, 19 nt, Artificial Sequence
  Description of Artificial Sequence: Synthetic oligonucleotide
uuguugauuccuuaccaaa

SEQ ID NO: 1866233 - RNA, 19 nt, Artificial Sequence
  Description of Artificial Sequence: Synthetic oligonucleotide
cauuaagaacucuuccuuc

SEQ ID NO: 1866234 - RNA, 19 nt, Artificial Sequence
  Description of Artificial Sequence: Synthetic oligonucleotide
ugugugcaaguuuuggccu

SEQ ID NO: 1866235 - RNA, 19 nt, Artificial Sequence
  Description of Artificial Sequence: Synthetic oligonucleotide
gaacucaguacuugauagc

SEQ ID NO: 1866236 - RNA, 19 nt, Artificial Sequence
  Description of Artificial Sequence: Synthetic oligonucleotide
uguggacucacuacacaca

SEQ ID NO: 1866237 - RNA, 19 nt, Artificial Sequence
  Description of Artificial Sequence: Synthetic oligonucleotide
uuauccuguugcaguauug

SEQ ID NO: 1866238 - RNA, 19 nt, Artificial Sequence
  Description of Artificial Sequence: Synthetic oligonucleotide
uuuuggccucaguauaaag

SEQ ID NO: 1866239 - RNA, 19 nt, Artificial Sequence
  Description of Artificial Sequence: Synthetic oligonucleotide
ugaaacauuguggacucac

SEQ ID NO: 1866240 - RNA, 19 nt, Artificial Sequence
  Description of Artificial Sequence: Synthetic oligonucleotide
agcuccuuccuaaucaugg

SEQ ID NO: 1866241 - RNA, 19 nt, Artificial Sequence
  Description of Artificial Sequence: Synthetic oligonucleotide
gaugcucuaagcaauguaa

SEQ ID NO: 1866242 - RNA, 19 nt, Artificial Sequence
  Description of Artificial Sequence: Synthetic oligonucleotide
aauaaggcuagaaaaccuu

SEQ ID NO: 1866243 - RNA, 19 nt, Artificial Sequence
  Description of Artificial Sequence: Synthetic oligonucleotide
gauuaccaucauuaagaac

SEQ ID NO: 1866244 - RNA, 19 nt, Artificial Sequence
  Description of Artificial Sequence: Synthetic oligonucleotide
ggacaaaugugaaacauug

SEQ ID NO: 1866245 - RNA, 19 nt, Artificial Sequence
  Description of Artificial Sequence: Synthetic oligonucleotide
guagucagaugcucuaagc

SEQ ID NO: 1866246 - RNA, 19 nt, Artificial Sequence
  Description of Artificial Sequence: Synthetic oligonucleotide
uugcaagaccuuaauucca

SEQ ID NO: 1866247 - RNA, 19 nt, Artificial Sequence
  Description of Artificial Sequence: Synthetic oligonucleotide
gcuuuguagaaacuguaag

SEQ ID NO: 1866248 - RNA, 19 nt, Artificial Sequence
  Description of Artificial Sequence: Synthetic oligonucleotide
gaagggaaccaucacccac

SEQ ID NO: 1866249 - RNA, 19 nt, Artificial Sequence
  Description of Artificial Sequence: Synthetic oligonucleotide
ugguaagaguacagugggg

SEQ ID NO: 1866250 - RNA, 19 nt, Artificial Sequence
  Description of Artificial Sequence: Synthetic oligonucleotide
uuucucggugcaaagcuuc

SEQ ID NO: 1866251 - RNA, 19 nt, Artificial Sequence
  Description of Artificial Sequence: Synthetic oligonucleotide
aggugauaugaagggaacc

SEQ ID NO: 1866252 - RNA, 19 nt, Artificial Sequence
  Description of Artificial Sequence: Synthetic oligonucleotide
agaacucuuccuucgaaaa

SEQ ID NO: 1866253 - RNA, 19 nt, Artificial Sequence
  Description of Artificial Sequence: Synthetic oligonucleotide
uuccuuaccaaauguuggu

SEQ ID NO: 1866254 - RNA, 19 nt, Artificial Sequence
  Description of Artificial Sequence: Synthetic oligonucleotide
aaagcuccuuccuaaucau

SEQ ID NO: 1866255 - RNA, 19 nt, Artificial Sequence
  Description of Artificial Sequence: Synthetic oligonucleotide
ugucaaucccuuggaaggg

SEQ ID NO: 1866256 - RNA, 19 nt, Artificial Sequence
  Description of Artificial Sequence: Synthetic oligonucleotide
aaccaucacccaccauggc

SEQ ID NO: 1866257 - RNA, 19 nt, Artificial Sequence
  Description of Artificial Sequence: Synthetic oligonucleotide
ggcaguauuccuucggcgg

SEQ ID NO: 1866258 - RNA, 19 nt, Artificial Sequence
  Description of Artificial Sequence: Synthetic oligonucleotide
guacuugauagcugugugc

SEQ ID NO: 1866259 - RNA, 19 nt, Artificial Sequence
  Description of Artificial Sequence: Synthetic oligonucleotide
aaacggcaguauuccuucg

SEQ ID NO: 1866260 - RNA, 19 nt, Artificial Sequence
  Description of Artificial Sequence: Synthetic oligonucleotide
uucaaauaucaaugaaaua

SEQ ID NO: 1866261 - RNA, 19 nt, Artificial Sequence
  Description of Artificial Sequence: Synthetic oligonucleotide
aagucaggugcuucccuug

SEQ ID NO: 1866262 - RNA, 19 nt, Artificial Sequence
  Description of Artificial Sequence: Synthetic oligonucleotide
uagaaaagauugcguuuug

SEQ ID NO: 1866263 - RNA, 19 nt, Artificial Sequence
  Description of Artificial Sequence: Synthetic oligonucleotide
ugauuccuuaccaaauguu

SEQ ID NO: 1866264 - RNA, 19 nt, Artificial Sequence
  Description of Artificial Sequence: Synthetic oligonucleotide
ggcuagaaaaccuuuaaaa

SEQ ID NO: 1866265 - RNA, 19 nt, Artificial Sequence
  Description of Artificial Sequence: Synthetic oligonucleotide
uuaccaucauuaagaacuc

SEQ ID NO: 1866266 - RNA, 19 nt, Artificial Sequence
  Description of Artificial Sequence: Synthetic oligonucleotide
uaaggcuagaaaaccuuua

SEQ ID NO: 1866267 - RNA, 19 nt, Artificial Sequence
  Description of Artificial Sequence: Synthetic oligonucleotide
ugagcauuggugcuuugua

SEQ ID NO: 1866268 - RNA, 19 nt, Artificial Sequence
  Description of Artificial Sequence: Synthetic oligonucleotide
aaugacagccauaugcauu

SEQ ID NO: 1866269 - RNA, 19 nt, Artificial Sequence
  Description of Artificial Sequence: Synthetic oligonucleotide
acuuaucaaauaaggcuag

SEQ ID NO: 1866270 - RNA, 19 nt, Artificial Sequence
  Description of Artificial Sequence: Synthetic oligonucleotide
ggacucacuacacacauga

SEQ ID NO: 1866271 - RNA, 19 nt, Artificial Sequence
  Description of Artificial Sequence: Synthetic oligonucleotide
ucaucgugugauuaccauc

SEQ ID NO: 1866272 - RNA, 19 nt, Artificial Sequence
  Description of Artificial Sequence: Synthetic oligonucleotide
uucgaaaagcuccuuccua

SEQ ID NO: 1866273 - RNA, 19 nt, Artificial Sequence
  Description of Artificial Sequence: Synthetic oligonucleotide
ucgcuuauccuguugcagu

SEQ ID NO: 1866274 - RNA, 19 nt, Artificial Sequence
  Description of Artificial Sequence: Synthetic oligonucleotide
uagcaaaaguuccuuuauc

SEQ ID NO: 1866275 - RNA, 19 nt, Artificial Sequence
  Description of Artificial Sequence: Synthetic oligonucleotide
accaucauaagcagugaag

SEQ ID NO: 1866276 - RNA, 19 nt, Artificial Sequence
  Description of Artificial Sequence: Synthetic oligonucleotide
aagaguacaguggggacaa

SEQ ID NO: 1866277 - RNA, 19 nt, Artificial Sequence
  Description of Artificial Sequence: Synthetic oligonucleotide
aauauggcacacugacuua

SEQ ID NO: 1866278 - RNA, 19 nt, Artificial Sequence
  Description of Artificial Sequence: Synthetic oligonucleotide
auuguggacucacuacaca

SEQ ID NO: 1866279 - RNA, 19 nt, Artificial Sequence
  Description of Artificial Sequence: Synthetic oligonucleotide
auuccuucggcggcgaguc

SEQ ID NO: 1866280 - RNA, 19 nt, Artificial Sequence
  Description of Artificial Sequence: Synthetic oligonucleotide
cuccuuccuaaucauggcc

SEQ ID NO: 1866281 - RNA, 19 nt, Artificial Sequence
  Description of Artificial Sequence: Synthetic oligonucleotide
caaggugauaugaagggaa

SEQ ID NO: 1866282 - RNA, 19 nt, Artificial Sequence
  Description of Artificial Sequence: Synthetic oligonucleotide
uauccuguugcaguauugu

SEQ ID NO: 1866283 - RNA, 19 nt, Artificial Sequence
  Description of Artificial Sequence: Synthetic oligonucleotide
aaccugacuuuggaaagug

SEQ ID NO: 1866284 - RNA, 19 nt, Artificial Sequence
  Description of Artificial Sequence: Synthetic oligonucleotide
cauuguggacucacuacac

SEQ ID NO: 1866285 - RNA, 19 nt, Artificial Sequence
  Description of Artificial Sequence: Synthetic oligonucleotide
uaaucauggccugagucuc

SEQ ID NO: 1866286 - RNA, 19 nt, Artificial Sequence
  Description of Artificial Sequence: Synthetic oligonucleotide
aagauugcguuuugccaaa

SEQ ID NO: 1866287 - RNA, 19 nt, Artificial Sequence
  Description of Artificial Sequence: Synthetic oligonucleotide
uguaaacggcaguauuccu

SEQ ID NO: 1866288 - RNA, 19 nt, Artificial Sequence
  Description of Artificial Sequence: Synthetic oligonucleotide
gaggcuuaaagcuucugcu

SEQ ID NO: 1866289 - RNA, 19 nt, Artificial Sequence
  Description of Artificial Sequence: Synthetic oligonucleotide
auuuaacaacugcaucacu

SEQ ID NO: 1866290 - RNA, 19 nt, Artificial Sequence
  Description of Artificial Sequence: Synthetic oligonucleotide
cauuaauuaagucuuggau

SEQ ID NO: 1866291 - RNA, 19 nt, Artificial Sequence
  Description of Artificial Sequence: Synthetic oligonucleotide
agauuaugguaagaguaca

SEQ ID NO: 1866292 - RNA, 19 nt, Artificial Sequence
  Description of Artificial Sequence: Synthetic oligonucleotide
uuccuaaucauggccugag

SEQ ID NO: 1866293 - RNA, 19 nt, Artificial Sequence
  Description of Artificial Sequence: Synthetic oligonucleotide
uuaagucuuggaucccaac

SEQ ID NO: 1866294 - RNA, 19 nt, Artificial Sequence
  Description of Artificial Sequence: Synthetic oligonucleotide
caaagucacacugaaguca

SEQ ID NO: 1866295 - RNA, 19 nt, Artificial Sequence
  Description of Artificial Sequence: Synthetic oligonucleotide
acugagaguucauaagguu

SEQ ID NO: 1866296 - RNA, 19 nt, Artificial Sequence
  Description of Artificial Sequence: Synthetic oligonucleotide
aguacaguggggacaaaug

SEQ ID NO: 1866297 - RNA, 19 nt, Artificial Sequence
  Description of Artificial Sequence: Synthetic oligonucleotide
uacaucaaauauggcacac

SEQ ID NO: 1866298 - RNA, 19 nt, Artificial Sequence
  Description of Artificial Sequence: Synthetic oligonucleotide
agaaacuguaagaacacuu

SEQ ID NO: 1866299 - RNA, 19 nt, Artificial Sequence
  Description of Artificial Sequence: Synthetic oligonucleotide
uuggaucccaacugguuuc

SEQ ID NO: 1866300 - RNA, 19 nt, Artificial Sequence
  Description of Artificial Sequence: Synthetic oligonucleotide
uggaaagugucaaucccuu

SEQ ID NO: 1866301 - RNA, 19 nt, Artificial Sequence
  Description of Artificial Sequence: Synthetic oligonucleotide
cagucgcuuauccuguugc

SEQ ID NO: 1866302 - RNA, 19 nt, Artificial Sequence
  Description of Artificial Sequence: Synthetic oligonucleotide
ucaguacuugauagcugug

SEQ ID NO: 1866303 - RNA, 19 nt, Artificial Sequence
  Description of Artificial Sequence: Synthetic oligonucleotide
ccaaaagcgcaucaguacc

SEQ ID NO: 1866304 - RNA, 19 nt, Artificial Sequence
  Description of Artificial Sequence: Synthetic oligonucleotide
uaaugacagccauaugcau

SEQ ID NO: 1866305 - RNA, 19 nt, Artificial Sequence
  Description of Artificial Sequence: Synthetic oligonucleotide
ccuuuaaaauguuacccac

SEQ ID NO: 1866306 - RNA, 19 nt, Artificial Sequence
  Description of Artificial Sequence: Synthetic oligonucleotide
gccauaugcauuccuuugg

SEQ ID NO: 1866307 - RNA, 19 nt, Artificial Sequence
  Description of Artificial Sequence: Synthetic oligonucleotide
ucggugcaaagcuucauua

SEQ ID NO: 1866308 - RNA, 19 nt, Artificial Sequence
  Description of Artificial Sequence: Synthetic oligonucleotide
aagugucaaucccuuggaa

SEQ ID NO: 1866309 - RNA, 19 nt, Artificial Sequence
  Description of Artificial Sequence: Synthetic oligonucleotide
ugcuagcuucacaaagcca

SEQ ID NO: 1866310 - RNA, 19 nt, Artificial Sequence
  Description of Artificial Sequence: Synthetic oligonucleotide
acaugaaacuuaauuuacu

SEQ ID NO: 1866311 - RNA, 19 nt, Artificial Sequence
  Description of Artificial Sequence: Synthetic oligonucleotide
auggcacacugacuuauca

SEQ ID NO: 1866312 - RNA, 19 nt, Artificial Sequence
  Description of Artificial Sequence: Synthetic oligonucleotide
auagcugugugcaaguuuu

SEQ ID NO: 1866313 - RNA, 19 nt, Artificial Sequence
  Description of Artificial Sequence: Synthetic oligonucleotide
aaagggcuaugugcuggac

SEQ ID NO: 1866314 - RNA, 19 nt, Artificial Sequence
  Description of Artificial Sequence: Synthetic oligonucleotide
ucuuggaucccaacugguu

SEQ ID NO: 1866315 - RNA, 19 nt, Artificial Sequence
  Description of Artificial Sequence: Synthetic oligonucleotide
cuaaucauggccugagucu

SEQ ID NO: 1866316 - RNA, 19 nt, Artificial Sequence
  Description of Artificial Sequence: Synthetic oligonucleotide
agaaguuguugauuccuua

SEQ ID NO: 1866317 - RNA, 19 nt, Artificial Sequence
  Description of Artificial Sequence: Synthetic oligonucleotide
ccuucgaaaagcuccuucc

SEQ ID NO: 1866318 - RNA, 19 nt, Artificial Sequence
  Description of Artificial Sequence: Synthetic oligonucleotide
agcaauguaaacggcagua

SEQ ID NO: 1866319 - RNA, 19 nt, Artificial Sequence
  Description of Artificial Sequence: Synthetic oligonucleotide
ugaagggaaccaucaccca

SEQ ID NO: 1866320 - RNA, 19 nt, Artificial Sequence
  Description of Artificial Sequence: Synthetic oligonucleotide
aucaucgugugauuaccau

SEQ ID NO: 1866321 - RNA, 19 nt, Artificial Sequence
  Description of Artificial Sequence: Synthetic oligonucleotide
guuacccacauuucauaga

SEQ ID NO: 1866322 - RNA, 19 nt, Artificial Sequence
  Description of Artificial Sequence: Synthetic oligonucleotide
uaugugcuggacugagagu

SEQ ID NO: 1866323 - RNA, 19 nt, Artificial Sequence
  Description of Artificial Sequence: Synthetic oligonucleotide
auaauauaauuuacaugaa

SEQ ID NO: 1866324 - RNA, 19 nt, Artificial Sequence
  Description of Artificial Sequence: Synthetic oligonucleotide
guuguugauuccuuaccaa

SEQ ID NO: 1866325 - RNA, 19 nt, Artificial Sequence
  Description of Artificial Sequence: Synthetic oligonucleotide
ggugauaugaagggaacca

SEQ ID NO: 1866326 - RNA, 19 nt, Artificial Sequence
  Description of Artificial Sequence: Synthetic oligonucleotide
uuaccaaauguugguuugu

SEQ ID NO: 1866327 - RNA, 19 nt, Artificial Sequence
  Description of Artificial Sequence: Synthetic oligonucleotide
aaaagcgcaucaguaccaa

SEQ ID NO: 1866328 - RNA, 19 nt, Artificial Sequence
  Description of Artificial Sequence: Synthetic oligonucleotide
caaaagcgcaucaguacca

SEQ ID NO: 1866329 - RNA, 19 nt, Artificial Sequence
  Description of Artificial Sequence: Synthetic oligonucleotide
cuacacacaugaucauuuc

SEQ ID NO: 1866330 - RNA, 19 nt, Artificial Sequence
  Description of Artificial Sequence: Synthetic oligonucleotide
gguuugugggcuuuguaga

SEQ ID NO: 1866331 - RNA, 19 nt, Artificial Sequence
  Description of Artificial Sequence: Synthetic oligonucleotide
guacaguuucauaaagguc

SEQ ID NO: 1866332 - RNA, 19 nt, Artificial Sequence
  Description of Artificial Sequence: Synthetic oligonucleotide
gaaaaccuuuaaaauguua

SEQ ID NO: 1866333 - RNA, 19 nt, Artificial Sequence
  Description of Artificial Sequence: Synthetic oligonucleotide
auguuacccacauuucaua

SEQ ID NO: 1866334 - RNA, 19 nt, Artificial Sequence
  Description of Artificial Sequence: Synthetic oligonucleotide
uuaccaucauaagcaguga

SEQ ID NO: 1866335 - RNA, 19 nt, Artificial Sequence
  Description of Artificial Sequence: Synthetic oligonucleotide
augaucauuucaacaguga

SEQ ID NO: 1866336 - RNA, 19 nt, Artificial Sequence
  Description of Artificial Sequence: Synthetic oligonucleotide
uggacucacuacacacaug

SEQ ID NO: 1866337 - RNA, 19 nt, Artificial Sequence
  Description of Artificial Sequence: Synthetic oligonucleotide
gcugugugcaaguuuuggc

SEQ ID NO: 1866338 - RNA, 19 nt, Artificial Sequence
  Description of Artificial Sequence: Synthetic oligonucleotide
ccugacuuuggaaaguguc

SEQ ID NO: 1866339 - RNA, 19 nt, Artificial Sequence
  Description of Artificial Sequence: Synthetic oligonucleotide
aaagcgcaucaguaccaau

SEQ ID NO: 1866340 - RNA, 19 nt, Artificial Sequence
  Description of Artificial Sequence: Synthetic oligonucleotide
gcuagcuucacaaagccaa

SEQ ID NO: 1866341 - RNA, 19 nt, Artificial Sequence
  Description of Artificial Sequence: Synthetic oligonucleotide
guacaguggggacaaaugu

SEQ ID NO: 1866342 - RNA, 19 nt, Artificial Sequence
  Description of Artificial Sequence: Synthetic oligonucleotide
ccuaaucauggccugaguc

SEQ ID NO: 1866343 - RNA, 19 nt, Artificial Sequence
  Description of Artificial Sequence: Synthetic oligonucleotide
gucgcuuauccuguugcag

SEQ ID NO: 1866344 - RNA, 19 nt, Artificial Sequence
  Description of Artificial Sequence: Synthetic oligonucleotide
uuugugggcuuuguagaaa

SEQ ID NO: 1866345 - RNA, 19 nt, Artificial Sequence
  Description of Artificial Sequence: Synthetic oligonucleotide
aagaaguuguugauuccuu

SEQ ID NO: 1866346 - RNA, 19 nt, Artificial Sequence
  Description of Artificial Sequence: Synthetic oligonucleotide
auauggcacacugacuuau

SEQ ID NO: 1866347 - RNA, 19 nt, Artificial Sequence
  Description of Artificial Sequence: Synthetic oligonucleotide
guaagaacacuuugguuau

SEQ ID NO: 1866348 - RNA, 19 nt, Artificial Sequence
  Description of Artificial Sequence: Synthetic oligonucleotide
agucgcuuauccuguugca

SEQ ID NO: 1866349 - RNA, 19 nt, Artificial Sequence
  Description of Artificial Sequence: Synthetic oligonucleotide
aaucccuuggaagggcaaa

SEQ ID NO: 1866350 - RNA, 19 nt, Artificial Sequence
  Description of Artificial Sequence: Synthetic oligonucleotide
uugguuugugggcuuugua

SEQ ID NO: 1866351 - RNA, 19 nt, Artificial Sequence
  Description of Artificial Sequence: Synthetic oligonucleotide
guuugugggcuuuguagaa

SEQ ID NO: 1866352 - RNA, 19 nt, Artificial Sequence
  Description of Artificial Sequence: Synthetic oligonucleotide
ugugcaaguuuuggccuca

SEQ ID NO: 1866353 - RNA, 19 nt, Artificial Sequence
  Description of Artificial Sequence: Synthetic oligonucleotide
cuccauccuuucucggugc

SEQ ID NO: 1866354 - RNA, 19 nt, Artificial Sequence
  Description of Artificial Sequence: Synthetic oligonucleotide
ucgugugauuaccaucauu

SEQ ID NO: 1866355 - RNA, 19 nt, Artificial Sequence
  Description of Artificial Sequence: Synthetic oligonucleotide
acuagcaaggugauaugaa

SEQ ID NO: 1866356 - RNA, 19 nt, Artificial Sequence
  Description of Artificial Sequence: Synthetic oligonucleotide
aauuuacaugaaacuuaau

SEQ ID NO: 1866357 - RNA, 19 nt, Artificial Sequence
  Description of Artificial Sequence: Synthetic oligonucleotide
ccauaugcauuccuuuggc

SEQ ID NO: 1866358 - RNA, 19 nt, Artificial Sequence
  Description of Artificial Sequence: Synthetic oligonucleotide
ggaagggcaaagucaggug

SEQ ID NO: 1866359 - RNA, 19 nt, Artificial Sequence
  Description of Artificial Sequence: Synthetic oligonucleotide
ugcaaguuuuggccucagu

SEQ ID NO: 1866360 - RNA, 19 nt, Artificial Sequence
  Description of Artificial Sequence: Synthetic oligonucleotide
caacagugacaaacugaac

SEQ ID NO: 1866361 - RNA, 19 nt, Artificial Sequence
  Description of Artificial Sequence: Synthetic oligonucleotide
auaaggcuagaaaaccuuu

SEQ ID NO: 1866362 - RNA, 19 nt, Artificial Sequence
  Description of Artificial Sequence: Synthetic oligonucleotide
uagcugugugcaaguuuug

SEQ ID NO: 1866363 - RNA, 19 nt, Artificial Sequence
  Description of Artificial Sequence: Synthetic oligonucleotide
uaaguguguugaugugauc

SEQ ID NO: 1866364 - RNA, 19 nt, Artificial Sequence
  Description of Artificial Sequence: Synthetic oligonucleotide
ucacuacacacaugaucau

SEQ ID NO: 1866365 - RNA, 19 nt, Artificial Sequence
  Description of Artificial Sequence: Synthetic oligonucleotide
caguauuccuucggcggcg

SEQ ID NO: 1866366 - RNA, 19 nt, Artificial Sequence
  Description of Artificial Sequence: Synthetic oligonucleotide
caucaucgugugauuacca

SEQ ID NO: 1866367 - RNA, 19 nt, Artificial Sequence
  Description of Artificial Sequence: Synthetic oligonucleotide
uuucuugccuaaggggaaa

SEQ ID NO: 1866368 - RNA, 19 nt, Artificial Sequence
  Description of Artificial Sequence: Synthetic oligonucleotide
uacucccuucuuccugagc

SEQ ID NO: 1866369 - RNA, 19 nt, Artificial Sequence
  Description of Artificial Sequence: Synthetic oligonucleotide
gcaguauuccuucggcggc

SEQ ID NO: 1866370 - RNA, 19 nt, Artificial Sequence
  Description of Artificial Sequence: Synthetic oligonucleotide
aguuuuggccucaguauaa

SEQ ID NO: 1866371 - RNA, 19 nt, Artificial Sequence
  Description of Artificial Sequence: Synthetic oligonucleotide
uccuucggcggcgagucca

SEQ ID NO: 1866372 - RNA, 19 nt, Artificial Sequence
  Description of Artificial Sequence: Synthetic oligonucleotide
gucaaucccuuggaagggc

SEQ ID NO: 1866373 - RNA, 19 nt, Artificial Sequence
  Description of Artificial Sequence: Synthetic oligonucleotide
cugaacucaguacuugaua

SEQ ID NO: 1866374 - RNA, 19 nt, Artificial Sequence
  Description of Artificial Sequence: Synthetic oligonucleotide
caguaccaauguuuacuuc

SEQ ID NO: 1866375 - RNA, 19 nt, Artificial Sequence
  Description of Artificial Sequence: Synthetic oligonucleotide
acucaguacuugauagcug

SEQ ID NO: 1866376 - RNA, 19 nt, Artificial Sequence
  Description of Artificial Sequence: Synthetic oligonucleotide
ggaaagugucaaucccuug

SEQ ID NO: 1866377 - RNA, 19 nt, Artificial Sequence
  Description of Artificial Sequence: Synthetic oligonucleotide
acugaacucaguacuugau

SEQ ID NO: 1866378 - RNA, 19 nt, Artificial Sequence
  Description of Artificial Sequence: Synthetic oligonucleotide
uccuuaccaaauguugguu

SEQ ID NO: 1866379 - RNA, 19 nt, Artificial Sequence
  Description of Artificial Sequence: Synthetic oligonucleotide
uacccacauuucauagaaa

SEQ ID NO: 1866380 - RNA, 19 nt, Artificial Sequence
  Description of Artificial Sequence: Synthetic oligonucleotide
agggaaccaucacccacca

SEQ ID NO: 1866381 - RNA, 19 nt, Artificial Sequence
  Description of Artificial Sequence: Synthetic oligonucleotide
cugagaguucauaagguuu

SEQ ID NO: 1866382 - RNA, 19 nt, Artificial Sequence
  Description of Artificial Sequence: Synthetic oligonucleotide
acuugauagcugugugcaa

SEQ ID NO: 1866383 - RNA, 19 nt, Artificial Sequence
  Description of Artificial Sequence: Synthetic oligonucleotide
uaccaucauuaagaacucu

SEQ ID NO: 1866384 - RNA, 19 nt, Artificial Sequence
  Description of Artificial Sequence: Synthetic oligonucleotide
agucucugcuaucucugua

SEQ ID NO: 1866385 - RNA, 19 nt, Artificial Sequence
  Description of Artificial Sequence: Synthetic oligonucleotide
caguauaaaguagucagau

SEQ ID NO: 1866386 - RNA, 19 nt, Artificial Sequence
  Description of Artificial Sequence: Synthetic oligonucleotide
gugugcaaguuuuggccuc

SEQ ID NO: 1866387 - RNA, 19 nt, Artificial Sequence
  Description of Artificial Sequence: Synthetic oligonucleotide
gcaucaucgugugauuacc

SEQ ID NO: 1866388 - RNA, 19 nt, Artificial Sequence
  Description of Artificial Sequence: Synthetic oligonucleotide
ccaucugcuagcuucacaa

SEQ ID NO: 1866389 - RNA, 19 nt, Artificial Sequence
  Description of Artificial Sequence: Synthetic oligonucleotide
auuaagucuuggaucccaa

SEQ ID NO: 1866390 - RNA, 19 nt, Artificial Sequence
  Description of Artificial Sequence: Synthetic oligonucleotide
uucggcggcgaguccaguc

SEQ ID NO: 1866391 - RNA, 19 nt, Artificial Sequence
  Description of Artificial Sequence: Synthetic oligonucleotide
uggaucccaacugguuucu

SEQ ID NO: 1866392 - RNA, 19 nt, Artificial Sequence
  Description of Artificial Sequence: Synthetic oligonucleotide
gaaacauuguggacucacu

SEQ ID NO: 1866393 - RNA, 19 nt, Artificial Sequence
  Description of Artificial Sequence: Synthetic oligonucleotide
ucccuuggaagggcaaagu

SEQ ID NO: 1866394 - RNA, 19 nt, Artificial Sequence
  Description of Artificial Sequence: Synthetic oligonucleotide
guaaguguguugaugugau

SEQ ID NO: 1866395 - RNA, 19 nt, Artificial Sequence
  Description of Artificial Sequence: Synthetic oligonucleotide
aaggucaagugaggcuuaa

SEQ ID NO: 1866396 - RNA, 19 nt, Artificial Sequence
  Description of Artificial Sequence: Synthetic oligonucleotide
gcuccuuccuaaucauggc

SEQ ID NO: 1866397 - RNA, 19 nt, Artificial Sequence
  Description of Artificial Sequence: Synthetic oligonucleotide
guggacucacuacacacau

SEQ ID NO: 1866398 - RNA, 19 nt, Artificial Sequence
  Description of Artificial Sequence: Synthetic oligonucleotide
uucuugccuaaggggaaaa

SEQ ID NO: 1866399 - RNA, 19 nt, Artificial Sequence
  Description of Artificial Sequence: Synthetic oligonucleotide
ggcuaugugcuggacugag

SEQ ID NO: 1866400 - RNA, 19 nt, Artificial Sequence
  Description of Artificial Sequence: Synthetic oligonucleotide
ugauagcugugugcaaguu

SEQ ID NO: 1866401 - RNA, 19 nt, Artificial Sequence
  Description of Artificial Sequence: Synthetic oligonucleotide
cuuggaucccaacugguuu

SEQ ID NO: 1866402 - RNA, 19 nt, Artificial Sequence
  Description of Artificial Sequence: Synthetic oligonucleotide
cuucgaaaagcuccuuccu

SEQ ID NO: 1866403 - RNA, 19 nt, Artificial Sequence
  Description of Artificial Sequence: Synthetic oligonucleotide
guguuuugcaagaccuuaa

SEQ ID NO: 1866404 - RNA, 19 nt, Artificial Sequence
  Description of Artificial Sequence: Synthetic oligonucleotide
aucgugugauuaccaucau

SEQ ID NO: 1866405 - RNA, 19 nt, Artificial Sequence
  Description of Artificial Sequence: Synthetic oligonucleotide
guauuccuucggcggcgag

SEQ ID NO: 1866406 - RNA, 19 nt, Artificial Sequence
  Description of Artificial Sequence: Synthetic oligonucleotide
aguauuccuucggcggcga

SEQ ID NO: 1866407 - RNA, 19 nt, Artificial Sequence
  Description of Artificial Sequence: Synthetic oligonucleotide
guaaacggcaguauuccuu

SEQ ID NO: 1866408 - RNA, 19 nt, Artificial Sequence
  Description of Artificial Sequence: Synthetic oligonucleotide
agucagcaucaucguguga

SEQ ID NO: 1866409 - RNA, 19 nt, Artificial Sequence
  Description of Artificial Sequence: Synthetic oligonucleotide
ccuuccuaaucauggccug

SEQ ID NO: 1866410 - RNA, 19 nt, Artificial Sequence
  Description of Artificial Sequence: Synthetic oligonucleotide
guuuuggccucaguauaaa

SEQ ID NO: 1866411 - RNA, 19 nt, Artificial Sequence
  Description of Artificial Sequence: Synthetic oligonucleotide
agugaggcuuaaagcuucu

SEQ ID NO: 1866412 - RNA, 19 nt, Artificial Sequence
  Description of Artificial Sequence: Synthetic oligonucleotide
ucucggugcaaagcuucau

SEQ ID NO: 1866413 - RNA, 19 nt, Artificial Sequence
  Description of Artificial Sequence: Synthetic oligonucleotide
gcaucaguaccaauguuua

SEQ ID NO: 1866414 - RNA, 19 nt, Artificial Sequence
  Description of Artificial Sequence: Synthetic oligonucleotide
gaguacaguggggacaaau

SEQ ID NO: 1866415 - RNA, 19 nt, Artificial Sequence
  Description of Artificial Sequence: Synthetic oligonucleotide
ucccuccggcucuauuuuc

SEQ ID NO: 1866416 - RNA, 19 nt, Artificial Sequence
  Description of Artificial Sequence: Synthetic oligonucleotide
ugcauuccuuuggcaagaa

SEQ ID NO: 1866417 - RNA, 19 nt, Artificial Sequence
  Description of Artificial Sequence: Synthetic oligonucleotide
cuuccuaaucauggccuga

SEQ ID NO: 1866418 - RNA, 19 nt, Artificial Sequence
  Description of Artificial Sequence: Synthetic oligonucleotide
cuguaagaacacuuugguu

SEQ ID NO: 1866419 - RNA, 19 nt, Artificial Sequence
  Description of Artificial Sequence: Synthetic oligonucleotide
gugcuggacugagaguuca

SEQ ID NO: 1866420 - RNA, 19 nt, Artificial Sequence
  Description of Artificial Sequence: Synthetic oligonucleotide
ucccuucuuccugagcauu

SEQ ID NO: 1866421 - RNA, 19 nt, Artificial Sequence
  Description of Artificial Sequence: Synthetic oligonucleotide
uuccuucggcggcgagucc

SEQ ID NO: 1866422 - RNA, 19 nt, Artificial Sequence
  Description of Artificial Sequence: Synthetic oligonucleotide
gcaaggugauaugaaggga

SEQ ID NO: 1866423 - RNA, 19 nt, Artificial Sequence
  Description of Artificial Sequence: Synthetic oligonucleotide
caacugguuucuugccuaa

SEQ ID NO: 1866424 - RNA, 19 nt, Artificial Sequence
  Description of Artificial Sequence: Synthetic oligonucleotide
cccuuggaagggcaaaguc

SEQ ID NO: 1866425 - RNA, 19 nt, Artificial Sequence
  Description of Artificial Sequence: Synthetic oligonucleotide
gugauaugaagggaaccau

SEQ ID NO: 1866426 - RNA, 19 nt, Artificial Sequence
  Description of Artificial Sequence: Synthetic oligonucleotide
caguacuugauagcugugu

SEQ ID NO: 1866427 - RNA, 19 nt, Artificial Sequence
  Description of Artificial Sequence: Synthetic oligonucleotide
caaucccuuggaagggcaa

SEQ ID NO: 1866428 - RNA, 19 nt, Artificial Sequence
  Description of Artificial Sequence: Synthetic oligonucleotide
gugacaaacugaacucagu

SEQ ID NO: 1866429 - RNA, 19 nt, Artificial Sequence
  Description of Artificial Sequence: Synthetic oligonucleotide
gaccuuaauuccagcugua

SEQ ID NO: 1866430 - RNA, 19 nt, Artificial Sequence
  Description of Artificial Sequence: Synthetic oligonucleotide
guaccaauguuuacuucau

SEQ ID NO: 1866431 - RNA, 19 nt, Artificial Sequence
  Description of Artificial Sequence: Synthetic oligonucleotide
cggcaguauuccuucggcg

SEQ ID NO: 1866432 - RNA, 19 nt, Artificial Sequence
  Description of Artificial Sequence: Synthetic oligonucleotide
uuucucccgccaggaugcc

SEQ ID NO: 1866433 - RNA, 19 nt, Artificial Sequence
  Description of Artificial Sequence: Synthetic oligonucleotide
gcgaguccagucccuccgg

SEQ ID NO: 1866434 - RNA, 19 nt, Artificial Sequence
  Description of Artificial Sequence: Synthetic oligonucleotide
gccucaguauaaaguaguc

SEQ ID NO: 1866435 - RNA, 19 nt, Artificial Sequence
  Description of Artificial Sequence: Synthetic oligonucleotide
cuucuacucccuucuuccu

SEQ ID NO: 1866436 - RNA, 19 nt, Artificial Sequence
  Description of Artificial Sequence: Synthetic oligonucleotide
gucaggugcuucccuugaa

SEQ ID NO: 1866437 - RNA, 19 nt, Artificial Sequence
  Description of Artificial Sequence: Synthetic oligonucleotide
cuuucucggugcaaagcuu

SEQ ID NO: 1866438 - RNA, 19 nt, Artificial Sequence
  Description of Artificial Sequence: Synthetic oligonucleotide
agauugcguuuugccaaaa

SEQ ID NO: 1866439 - RNA, 19 nt, Artificial Sequence
  Description of Artificial Sequence: Synthetic oligonucleotide
cuugaaggauuuccucaau

SEQ ID NO: 1866440 - RNA, 19 nt, Artificial Sequence
  Description of Artificial Sequence: Synthetic oligonucleotide
ccaacugguuucuugccua

SEQ ID NO: 1866441 - RNA, 19 nt, Artificial Sequence
  Description of Artificial Sequence: Synthetic oligonucleotide
cuuuggccagucgcuuauc

SEQ ID NO: 1866442 - RNA, 19 nt, Artificial Sequence
  Description of Artificial Sequence: Synthetic oligonucleotide
ggggacaaaugugaaacau

SEQ ID NO: 1866443 - RNA, 19 nt, Artificial Sequence
  Description of Artificial Sequence: Synthetic oligonucleotide
agggcaaagucaggugcuu

SEQ ID NO: 1866444 - RNA, 19 nt, Artificial Sequence
  Description of Artificial Sequence: Synthetic oligonucleotide
ggcuuuagcaaaaguuccu

SEQ ID NO: 1866445 - RNA, 19 nt, Artificial Sequence
  Description of Artificial Sequence: Synthetic oligonucleotide
ccagucgcuuauccuguug

SEQ ID NO: 1866446 - RNA, 19 nt, Artificial Sequence
  Description of Artificial Sequence: Synthetic oligonucleotide
uuccuucgaaaagcuccuu

SEQ ID NO: 1866447 - RNA, 19 nt, Artificial Sequence
  Description of Artificial Sequence: Synthetic oligonucleotide
aggucaagugaggcuuaaa

SEQ ID NO: 1866448 - RNA, 19 nt, Artificial Sequence
  Description of Artificial Sequence: Synthetic oligonucleotide
gucuuggaucccaacuggu

SEQ ID NO: 1866449 - RNA, 19 nt, Artificial Sequence
  Description of Artificial Sequence: Synthetic oligonucleotide
cucggugcaaagcuucauu

SEQ ID NO: 1866450 - RNA, 19 nt, Artificial Sequence
  Description of Artificial Sequence: Synthetic oligonucleotide
gggcuuuguagaaacugua

SEQ ID NO: 1866451 - RNA, 19 nt, Artificial Sequence
  Description of Artificial Sequence: Synthetic oligonucleotide
cauuggugcuuuguacagu

SEQ ID NO: 1866452 - RNA, 19 nt, Artificial Sequence
  Description of Artificial Sequence: Synthetic oligonucleotide
cacuacacacaugaucauu

SEQ ID NO: 1866453 - RNA, 19 nt, Artificial Sequence
  Description of Artificial Sequence: Synthetic oligonucleotide
ccuuaccaaauguugguuu

SEQ ID NO: 1866454 - RNA, 19 nt, Artificial Sequence
  Description of Artificial Sequence: Synthetic oligonucleotide
gcaauguaaacggcaguau

SEQ ID NO: 1866455 - RNA, 19 nt, Artificial Sequence
  Description of Artificial Sequence: Synthetic oligonucleotide
gacucacuacacacaugau

SEQ ID NO: 1866456 - RNA, 19 nt, Artificial Sequence
  Description of Artificial Sequence: Synthetic oligonucleotide
gcuaugugcuggacugaga

SEQ ID NO: 1866457 - RNA, 19 nt, Artificial Sequence
  Description of Artificial Sequence: Synthetic oligonucleotide
ggcuuuggccagucgcuua

SEQ ID NO: 1866458 - RNA, 19 nt, Artificial Sequence
  Description of Artificial Sequence: Synthetic oligonucleotide
ccaucacccaccauggcuu

SEQ ID NO: 1866459 - RNA, 19 nt, Artificial Sequence
  Description of Artificial Sequence: Synthetic oligonucleotide
gucccuccggcucuauuuu

SEQ ID NO: 1866460 - RNA, 19 nt, Artificial Sequence
  Description of Artificial Sequence: Synthetic oligonucleotide
agaguacaguggggacaaa

SEQ ID NO: 1866461 - RNA, 19 nt, Artificial Sequence
  Description of Artificial Sequence: Synthetic oligonucleotide
cggugcaaagcuucauuaa

SEQ ID NO: 1866462 - RNA, 19 nt, Artificial Sequence
  Description of Artificial Sequence: Synthetic oligonucleotide
caucacccaccauggcuuu

SEQ ID NO: 1866463 - RNA, 19 nt, Artificial Sequence
  Description of Artificial Sequence: Synthetic oligonucleotide
ggccagucgcuuauccugu

SEQ ID NO: 1866464 - RNA, 19 nt, Artificial Sequence
  Description of Artificial Sequence: Synthetic oligonucleotide
ucccgccaggaugccuuuu

SEQ ID NO: 1866465 - RNA, 19 nt, Artificial Sequence
  Description of Artificial Sequence: Synthetic oligonucleotide
cggcggcgaguccaguccc

SEQ ID NO: 1866466 - RNA, 19 nt, Artificial Sequence
  Description of Artificial Sequence: Synthetic oligonucleotide
gcggcgaguccagucccuc

SEQ ID NO: 1866467 - RNA, 19 nt, Artificial Sequence
  Description of Artificial Sequence: Synthetic oligonucleotide
gccugagucucaggcuuua

SEQ ID NO: 1866468 - RNA, 19 nt, Artificial Sequence
  Description of Artificial Sequence: Synthetic oligonucleotide
ccauccuuucucggugcaa

SEQ ID NO: 1866469 - RNA, 19 nt, Artificial Sequence
  Description of Artificial Sequence: Synthetic oligonucleotide
gggaaccaucacccaccau

SEQ ID NO: 1866470 - RNA, 19 nt, Artificial Sequence
  Description of Artificial Sequence: Synthetic oligonucleotide
cuucggcggcgaguccagu

SEQ ID NO: 1866471 - RNA, 19 nt, Artificial Sequence
  Description of Artificial Sequence: Synthetic oligonucleotide
ggaucccaacugguuucuu

SEQ ID NO: 1866472 - RNA, 19 nt, Artificial Sequence
  Description of Artificial Sequence: Synthetic oligonucleotide
ggccugagucucaggcuuu

SEQ ID NO: 1866473 - RNA, 19 nt, Artificial Sequence
  Description of Artificial Sequence: Synthetic oligonucleotide
uuuauaacuaacuaaagcc

SEQ ID NO: 1866474 - RNA, 19 nt, Artificial Sequence
  Description of Artificial Sequence: Synthetic oligonucleotide
aaaacauagucccauauac

SEQ ID NO: 1866475 - RNA, 19 nt, Artificial Sequence
  Description of Artificial Sequence: Synthetic oligonucleotide
uauauaaaggaguuaaggg

SEQ ID NO: 1866476 - RNA, 19 nt, Artificial Sequence
  Description of Artificial Sequence: Synthetic oligonucleotide
acuaauaucaggcaugcac

SEQ ID NO: 1866477 - RNA, 19 nt, Artificial Sequence
  Description of Artificial Sequence: Synthetic oligonucleotide
aagauaagaaagcucacgg

SEQ ID NO: 1866478 - RNA, 19 nt, Artificial Sequence
  Description of Artificial Sequence: Synthetic oligonucleotide
ugauagucaaacuugaaag

SEQ ID NO: 1866479 - RNA, 19 nt, Artificial Sequence
  Description of Artificial Sequence: Synthetic oligonucleotide
gauuguauaacacccauag

SEQ ID NO: 1866480 - RNA, 19 nt, Artificial Sequence
  Description of Artificial Sequence: Synthetic oligonucleotide
aacauagucccauauacag

SEQ ID NO: 1866481 - RNA, 19 nt, Artificial Sequence
  Description of Artificial Sequence: Synthetic oligonucleotide
aaacgaauuccauacaaag

SEQ ID NO: 1866482 - RNA, 19 nt, Artificial Sequence
  Description of Artificial Sequence: Synthetic oligonucleotide
uuuaagaugaauuggcuug

SEQ ID NO: 1866483 - RNA, 19 nt, Artificial Sequence
  Description of Artificial Sequence: Synthetic oligonucleotide
uuauaacuaacuaaagccc

SEQ ID NO: 1866484 - RNA, 19 nt, Artificial Sequence
  Description of Artificial Sequence: Synthetic oligonucleotide
agagauuuacccuaugugg

SEQ ID NO: 1866485 - RNA, 19 nt, Artificial Sequence
  Description of Artificial Sequence: Synthetic oligonucleotide
aguaaaucacaguauaggg

SEQ ID NO: 1866486 - RNA, 19 nt, Artificial Sequence
  Description of Artificial Sequence: Synthetic oligonucleotide
ucuuuuauuucagugaccg

SEQ ID NO: 1866487 - RNA, 19 nt, Artificial Sequence
  Description of Artificial Sequence: Synthetic oligonucleotide
ucagauaacaagauguccc

SEQ ID NO: 1866488 - RNA, 19 nt, Artificial Sequence
  Description of Artificial Sequence: Synthetic oligonucleotide
uguuauacuucuuuuaggc

SEQ ID NO: 1866489 - RNA, 19 nt, Artificial Sequence
  Description of Artificial Sequence: Synthetic oligonucleotide
gaugauaaagaaaauuggg

SEQ ID NO: 1866490 - RNA, 19 nt, Artificial Sequence
  Description of Artificial Sequence: Synthetic oligonucleotide
aguuaauggaauuuaugac

SEQ ID NO: 1866491 - RNA, 19 nt, Artificial Sequence
  Description of Artificial Sequence: Synthetic oligonucleotide
acgaauuccauacaaagag

SEQ ID NO: 1866492 - RNA, 19 nt, Artificial Sequence
  Description of Artificial Sequence: Synthetic oligonucleotide
uucucagauaacaagaugu

SEQ ID NO: 1866493 - RNA, 19 nt, Artificial Sequence
  Description of Artificial Sequence: Synthetic oligonucleotide
uuuguagccugauagacag

SEQ ID NO: 1866494 - RNA, 19 nt, Artificial Sequence
  Description of Artificial Sequence: Synthetic oligonucleotide
aguaauaugcaucucauaa

SEQ ID NO: 1866495 - RNA, 19 nt, Artificial Sequence
  Description of Artificial Sequence: Synthetic oligonucleotide
aacaagaugucccaagaug

SEQ ID NO: 1866496 - RNA, 19 nt, Artificial Sequence
  Description of Artificial Sequence: Synthetic oligonucleotide
uuauacuucuuuuaggcac

SEQ ID NO: 1866497 - RNA, 19 nt, Artificial Sequence
  Description of Artificial Sequence: Synthetic oligonucleotide
aagagauuuacccuaugug

SEQ ID NO: 1866498 - RNA, 19 nt, Artificial Sequence
  Description of Artificial Sequence: Synthetic oligonucleotide
auguuuuguagccugauag

SEQ ID NO: 1866499 - RNA, 19 nt, Artificial Sequence
  Description of Artificial Sequence: Synthetic oligonucleotide
aagaucucccuagaaaacc

SEQ ID NO: 1866500 - RNA, 19 nt, Artificial Sequence
  Description of Artificial Sequence: Synthetic oligonucleotide
aaccaaauacacaugacuc

SEQ ID NO: 1866501 - RNA, 19 nt, Artificial Sequence
  Description of Artificial Sequence: Synthetic oligonucleotide
uucagugaccgaaagaaug

SEQ ID NO: 1866502 - RNA, 19 nt, Artificial Sequence
  Description of Artificial Sequence: Synthetic oligonucleotide
cuaauaucaggcaugcacc

SEQ ID NO: 1866503 - RNA, 19 nt, Artificial Sequence
  Description of Artificial Sequence: Synthetic oligonucleotide
uauaacuaacuaaagcccu

SEQ ID NO: 1866504 - RNA, 19 nt, Artificial Sequence
  Description of Artificial Sequence: Synthetic oligonucleotide
accuugagaaaacauaguc

SEQ ID NO: 1866505 - RNA, 19 nt, Artificial Sequence
  Description of Artificial Sequence: Synthetic oligonucleotide
uaaguaaaucacaguauag

SEQ ID NO: 1866506 - RNA, 19 nt, Artificial Sequence
  Description of Artificial Sequence: Synthetic oligonucleotide
aaagagauuuacccuaugu

SEQ ID NO: 1866507 - RNA, 19 nt, Artificial Sequence
  Description of Artificial Sequence: Synthetic oligonucleotide
uuaacuucuucccauggca

SEQ ID NO: 1866508 - RNA, 19 nt, Artificial Sequence
  Description of Artificial Sequence: Synthetic oligonucleotide
uacaguaauaugcaucuca

SEQ ID NO: 1866509 - RNA, 19 nt, Artificial Sequence
  Description of Artificial Sequence: Synthetic oligonucleotide
gaugaauuggcuuguauca

SEQ ID NO: 1866510 - RNA, 19 nt, Artificial Sequence
  Description of Artificial Sequence: Synthetic oligonucleotide
aguuaagggaccuugagaa

SEQ ID NO: 1866511 - RNA, 19 nt, Artificial Sequence
  Description of Artificial Sequence: Synthetic oligonucleotide
ucuugacuggccuaaauug

SEQ ID NO: 1866512 - RNA, 19 nt, Artificial Sequence
  Description of Artificial Sequence: Synthetic oligonucleotide
aauuaugcucaugagcuag

SEQ ID NO: 1866513 - RNA, 19 nt, Artificial Sequence
  Description of Artificial Sequence: Synthetic oligonucleotide
acuaaagcccucuggauuc

SEQ ID NO: 1866514 - RNA, 19 nt, Artificial Sequence
  Description of Artificial Sequence: Synthetic oligonucleotide
ucaaccaucccaucaacag

SEQ ID NO: 1866515 - RNA, 19 nt, Artificial Sequence
  Description of Artificial Sequence: Synthetic oligonucleotide
uuaaacagugccagguuag

SEQ ID NO: 1866516 - RNA, 19 nt, Artificial Sequence
  Description of Artificial Sequence: Synthetic oligonucleotide
gacacaaagaucucccuag

SEQ ID NO: 1866517 - RNA, 19 nt, Artificial Sequence
  Description of Artificial Sequence: Synthetic oligonucleotide
ucuacagcgcccaaacccg

SEQ ID NO: 1866518 - RNA, 19 nt, Artificial Sequence
  Description of Artificial Sequence: Synthetic oligonucleotide
ucuuuuaggcacaugugug

SEQ ID NO: 1866519 - RNA, 19 nt, Artificial Sequence
  Description of Artificial Sequence: Synthetic oligonucleotide
aaauugggagccaaucccc

SEQ ID NO: 1866520 - RNA, 19 nt, Artificial Sequence
  Description of Artificial Sequence: Synthetic oligonucleotide
uuuuauuucagugaccgaa

SEQ ID NO: 1866521 - RNA, 19 nt, Artificial Sequence
  Description of Artificial Sequence: Synthetic oligonucleotide
accuggauuguauaacacc

SEQ ID NO: 1866522 - RNA, 19 nt, Artificial Sequence
  Description of Artificial Sequence: Synthetic oligonucleotide
acuaacuaaagcccucugg

SEQ ID NO: 1866523 - RNA, 19 nt, Artificial Sequence
  Description of Artificial Sequence: Synthetic oligonucleotide
uucuuuuaggcacaugugu

SEQ ID NO: 1866524 - RNA, 19 nt, Artificial Sequence
  Description of Artificial Sequence: Synthetic oligonucleotide
uuauccaugcauuucuccc

SEQ ID NO: 1866525 - RNA, 19 nt, Artificial Sequence
  Description of Artificial Sequence: Synthetic oligonucleotide
ucugguaguaagaauuaug

SEQ ID NO: 1866526 - RNA, 19 nt, Artificial Sequence
  Description of Artificial Sequence: Synthetic oligonucleotide
gacagaguaaguuaacuuc

SEQ ID NO: 1866527 - RNA, 19 nt, Artificial Sequence
  Description of Artificial Sequence: Synthetic oligonucleotide
gucgauuuaagaugaauug

SEQ ID NO: 1866528 - RNA, 19 nt, Artificial Sequence
  Description of Artificial Sequence: Synthetic oligonucleotide
uggcuuguaucaaugaagc

SEQ ID NO: 1866529 - RNA, 19 nt, Artificial Sequence
  Description of Artificial Sequence: Synthetic oligonucleotide
uguucauucucagauaaca

SEQ ID NO: 1866530 - RNA, 19 nt, Artificial Sequence
  Description of Artificial Sequence: Synthetic oligonucleotide
cacaguucacaaaacaggc

SEQ ID NO: 1866531 - RNA, 19 nt, Artificial Sequence
  Description of Artificial Sequence: Synthetic oligonucleotide
gguaguaagaauuaugcuc

SEQ ID NO: 1866532 - RNA, 19 nt, Artificial Sequence
  Description of Artificial Sequence: Synthetic oligonucleotide
ucagugaccgaaagaaugc

SEQ ID NO: 1866533 - RNA, 19 nt, Artificial Sequence
  Description of Artificial Sequence: Synthetic oligonucleotide
aacuggucuuuguucauuc

SEQ ID NO: 1866534 - RNA, 19 nt, Artificial Sequence
  Description of Artificial Sequence: Synthetic oligonucleotide
uaugacuaauaucaggcau

SEQ ID NO: 1866535 - RNA, 19 nt, Artificial Sequence
  Description of Artificial Sequence: Synthetic oligonucleotide
uuccagucgauuuaagaug

SEQ ID NO: 1866536 - RNA, 19 nt, Artificial Sequence
  Description of Artificial Sequence: Synthetic oligonucleotide
aagcgcucaacacaguuca

SEQ ID NO: 1866537 - RNA, 19 nt, Artificial Sequence
  Description of Artificial Sequence: Synthetic oligonucleotide
cucacgguuaaacagugcc

SEQ ID NO: 1866538 - RNA, 19 nt, Artificial Sequence
  Description of Artificial Sequence: Synthetic oligonucleotide
uacaaagagauuuacccua

SEQ ID NO: 1866539 - RNA, 19 nt, Artificial Sequence
  Description of Artificial Sequence: Synthetic oligonucleotide
caguuaauggaauuuauga

SEQ ID NO: 1866540 - RNA, 19 nt, Artificial Sequence
  Description of Artificial Sequence: Synthetic oligonucleotide
guuauuucccuacugcuac

SEQ ID NO: 1866541 - RNA, 19 nt, Artificial Sequence
  Description of Artificial Sequence: Synthetic oligonucleotide
uauacuucuuuuaggcaca

SEQ ID NO: 1866542 - RNA, 19 nt, Artificial Sequence
  Description of Artificial Sequence: Synthetic oligonucleotide
guuaauggaauuuaugacu

SEQ ID NO: 1866543 - RNA, 19 nt, Artificial Sequence
  Description of Artificial Sequence: Synthetic oligonucleotide
uuuuguagccugauagaca

SEQ ID NO: 1866544 - RNA, 19 nt, Artificial Sequence
  Description of Artificial Sequence: Synthetic oligonucleotide
ugcgucuccaccucgauga

SEQ ID NO: 1866545 - RNA, 19 nt, Artificial Sequence
  Description of Artificial Sequence: Synthetic oligonucleotide
agaaaauugggagccaauc

SEQ ID NO: 1866546 - RNA, 19 nt, Artificial Sequence
  Description of Artificial Sequence: Synthetic oligonucleotide
uuccuuuauaacuaacuaa

SEQ ID NO: 1866547 - RNA, 19 nt, Artificial Sequence
  Description of Artificial Sequence: Synthetic oligonucleotide
aaguuccgucaucuggugc

SEQ ID NO: 1866548 - RNA, 19 nt, Artificial Sequence
  Description of Artificial Sequence: Synthetic oligonucleotide
ugacucucaacucccauac

SEQ ID NO: 1866549 - RNA, 19 nt, Artificial Sequence
  Description of Artificial Sequence: Synthetic oligonucleotide
agaguaaguuaacuucuuc

SEQ ID NO: 1866550 - RNA, 19 nt, Artificial Sequence
  Description of Artificial Sequence: Synthetic oligonucleotide
uguggucccacuaucaaau

SEQ ID NO: 1866551 - RNA, 19 nt, Artificial Sequence
  Description of Artificial Sequence: Synthetic oligonucleotide
agauuuacccuaugugguc

SEQ ID NO: 1866552 - RNA, 19 nt, Artificial Sequence
  Description of Artificial Sequence: Synthetic oligonucleotide
uuaugacuaauaucaggca

SEQ ID NO: 1866553 - RNA, 19 nt, Artificial Sequence
  Description of Artificial Sequence: Synthetic oligonucleotide
agucagaaagacuuucuga

SEQ ID NO: 1866554 - RNA, 19 nt, Artificial Sequence
  Description of Artificial Sequence: Synthetic oligonucleotide
aaguuaacuucuucccaug

SEQ ID NO: 1866555 - RNA, 19 nt, Artificial Sequence
  Description of Artificial Sequence: Synthetic oligonucleotide
auuuacccuaugugguccc

SEQ ID NO: 1866556 - RNA, 19 nt, Artificial Sequence
  Description of Artificial Sequence: Synthetic oligonucleotide
ucccauauacaguaauaug

SEQ ID NO: 1866557 - RNA, 19 nt, Artificial Sequence
  Description of Artificial Sequence: Synthetic oligonucleotide
auaaaggaguuaagggacc

SEQ ID NO: 1866558 - RNA, 19 nt, Artificial Sequence
  Description of Artificial Sequence: Synthetic oligonucleotide
aaucacaguauagggaaga

SEQ ID NO: 1866559 - RNA, 19 nt, Artificial Sequence
  Description of Artificial Sequence: Synthetic oligonucleotide
uuaagggaccuugagaaaa

SEQ ID NO: 1866560 - RNA, 19 nt, Artificial Sequence
  Description of Artificial Sequence: Synthetic oligonucleotide
cuuauccaugcauuucucc

SEQ ID NO: 1866561 - RNA, 19 nt, Artificial Sequence
  Description of Artificial Sequence: Synthetic oligonucleotide
aagagguaaugcugagauc

SEQ ID NO: 1866562 - RNA, 19 nt, Artificial Sequence
  Description of Artificial Sequence: Synthetic oligonucleotide
gugugaauguuuuguagcc

SEQ ID NO: 1866563 - RNA, 19 nt, Artificial Sequence
  Description of Artificial Sequence: Synthetic oligonucleotide
aaggaguuaagggaccuug

SEQ ID NO: 1866564 - RNA, 19 nt, Artificial Sequence
  Description of Artificial Sequence: Synthetic oligonucleotide
guauagggaagagacaacc

SEQ ID NO: 1866565 - RNA, 19 nt, Artificial Sequence
  Description of Artificial Sequence: Synthetic oligonucleotide
cacuaucaaaauuauauaa

SEQ ID NO: 1866566 - RNA, 19 nt, Artificial Sequence
  Description of Artificial Sequence: Synthetic oligonucleotide
auaucaggcaugcaccucu

SEQ ID NO: 1866567 - RNA, 19 nt, Artificial Sequence
  Description of Artificial Sequence: Synthetic oligonucleotide
cuaacuaaagcccucugga

SEQ ID NO: 1866568 - RNA, 19 nt, Artificial Sequence
  Description of Artificial Sequence: Synthetic oligonucleotide
ucucagauaacaagauguc

SEQ ID NO: 1866569 - RNA, 19 nt, Artificial Sequence
  Description of Artificial Sequence: Synthetic oligonucleotide
accgaaagaaugcaguuaa

SEQ ID NO: 1866570 - RNA, 19 nt, Artificial Sequence
  Description of Artificial Sequence: Synthetic oligonucleotide
uaagaaagcucacgguuaa

SEQ ID NO: 1866571 - RNA, 19 nt, Artificial Sequence
  Description of Artificial Sequence: Synthetic oligonucleotide
uaauaucaggcaugcaccu

SEQ ID NO: 1866572 - RNA, 19 nt, Artificial Sequence
  Description of Artificial Sequence: Synthetic oligonucleotide
agauaagaaagcucacggu

SEQ ID NO: 1866573 - RNA, 19 nt, Artificial Sequence
  Description of Artificial Sequence: Synthetic oligonucleotide
acugcgggucuacagcgcc

SEQ ID NO: 1866574 - RNA, 19 nt, Artificial Sequence
  Description of Artificial Sequence: Synthetic oligonucleotide
gauagacagaguaaguuaa

SEQ ID NO: 1866575 - RNA, 19 nt, Artificial Sequence
  Description of Artificial Sequence: Synthetic oligonucleotide
gaaagcucacgguuaaaca

SEQ ID NO: 1866576 - RNA, 19 nt, Artificial Sequence
  Description of Artificial Sequence: Synthetic oligonucleotide
ccagaaacgaauuccauac

SEQ ID NO: 1866577 - RNA, 19 nt, Artificial Sequence
  Description of Artificial Sequence: Synthetic oligonucleotide
ccuggauuguauaacaccc

SEQ ID NO: 1866578 - RNA, 19 nt, Artificial Sequence
  Description of Artificial Sequence: Synthetic oligonucleotide
aauaucaggcaugcaccuc

SEQ ID NO: 1866579 - RNA, 19 nt, Artificial Sequence
  Description of Artificial Sequence: Synthetic oligonucleotide
gcuuguaucaaugaagcgc

SEQ ID NO: 1866580 - RNA, 19 nt, Artificial Sequence
  Description of Artificial Sequence: Synthetic oligonucleotide
uguaccuugagaccguguu

SEQ ID NO: 1866581 - RNA, 19 nt, Artificial Sequence
  Description of Artificial Sequence: Synthetic oligonucleotide
aaaguuccgucaucuggug

SEQ ID NO: 1866582 - RNA, 19 nt, Artificial Sequence
  Description of Artificial Sequence: Synthetic oligonucleotide
ucucccuagaaaaccagaa

SEQ ID NO: 1866583 - RNA, 19 nt, Artificial Sequence
  Description of Artificial Sequence: Synthetic oligonucleotide
gcaaaguuccgucaucugg

SEQ ID NO: 1866584 - RNA, 19 nt, Artificial Sequence
  Description of Artificial Sequence: Synthetic oligonucleotide
acuuccacuaucaaaauua

SEQ ID NO: 1866585 - RNA, 19 nt, Artificial Sequence
  Description of Artificial Sequence: Synthetic oligonucleotide
gauuuacccuauguggucc

SEQ ID NO: 1866586 - RNA, 19 nt, Artificial Sequence
  Description of Artificial Sequence: Synthetic oligonucleotide
gauaagaaagcucacgguu

SEQ ID NO: 1866587 - RNA, 19 nt, Artificial Sequence
  Description of Artificial Sequence: Synthetic oligonucleotide
acucucaacucccauacau

SEQ ID NO: 1866588 - RNA, 19 nt, Artificial Sequence
  Description of Artificial Sequence: Synthetic oligonucleotide
uggauuguauaacacccau

SEQ ID NO: 1866589 - RNA, 19 nt, Artificial Sequence
  Description of Artificial Sequence: Synthetic oligonucleotide
cuggccuaaauuguuauac

SEQ ID NO: 1866590 - RNA, 19 nt, Artificial Sequence
  Description of Artificial Sequence: Synthetic oligonucleotide
aacuaacuaaagcccucug

SEQ ID NO: 1866591 - RNA, 19 nt, Artificial Sequence
  Description of Artificial Sequence: Synthetic oligonucleotide
cacaugacucucaacuccc

SEQ ID NO: 1866592 - RNA, 19 nt, Artificial Sequence
  Description of Artificial Sequence: Synthetic oligonucleotide
aagaugaauuggcuuguau

SEQ ID NO: 1866593 - RNA, 19 nt, Artificial Sequence
  Description of Artificial Sequence: Synthetic oligonucleotide
aggaggaauccaucccugc

SEQ ID NO: 1866594 - RNA, 19 nt, Artificial Sequence
  Description of Artificial Sequence: Synthetic oligonucleotide
ccuugagaaaacauagucc

SEQ ID NO: 1866595 - RNA, 19 nt, Artificial Sequence
  Description of Artificial Sequence: Synthetic oligonucleotide
aaccuggauuguauaacac

SEQ ID NO: 1866596 - RNA, 19 nt, Artificial Sequence
  Description of Artificial Sequence: Synthetic oligonucleotide
uucugagaagacugguuug

SEQ ID NO: 1866597 - RNA, 19 nt, Artificial Sequence
  Description of Artificial Sequence: Synthetic oligonucleotide
acaugugugaauguuuugu

SEQ ID NO: 1866598 - RNA, 19 nt, Artificial Sequence
  Description of Artificial Sequence: Synthetic oligonucleotide
aaacccgcgcccgaggagg

SEQ ID NO: 1866599 - RNA, 19 nt, Artificial Sequence
  Description of Artificial Sequence: Synthetic oligonucleotide
cucagauaacaagaugucc

SEQ ID NO: 1866600 - RNA, 19 nt, Artificial Sequence
  Description of Artificial Sequence: Synthetic oligonucleotide
uuagccagguuauuucccu

SEQ ID NO: 1866601 - RNA, 19 nt, Artificial Sequence
  Description of Artificial Sequence: Synthetic oligonucleotide
cauagucccauauacagua

SEQ ID NO: 1866602 - RNA, 19 nt, Artificial Sequence
  Description of Artificial Sequence: Synthetic oligonucleotide
cuagauuccuuuauaacua

SEQ ID NO: 1866603 - RNA, 19 nt, Artificial Sequence
  Description of Artificial Sequence: Synthetic oligonucleotide
auaacuaacuaaagcccuc

SEQ ID NO: 1866604 - RNA, 19 nt, Artificial Sequence
  Description of Artificial Sequence: Synthetic oligonucleotide
ucacgguuaaacagugcca

SEQ ID NO: 1866605 - RNA, 19 nt, Artificial Sequence
  Description of Artificial Sequence: Synthetic oligonucleotide
cuucuuuuaggcacaugug

SEQ ID NO: 1866606 - RNA, 19 nt, Artificial Sequence
  Description of Artificial Sequence: Synthetic oligonucleotide
ugcgcgaccacgcgggccg

SEQ ID NO: 1866607 - RNA, 19 nt, Artificial Sequence
  Description of Artificial Sequence: Synthetic oligonucleotide
uucuugacuggccuaaauu

SEQ ID NO: 1866608 - RNA, 19 nt, Artificial Sequence
  Description of Artificial Sequence: Synthetic oligonucleotide
gaauuggcuuguaucaaug

SEQ ID NO: 1866609 - RNA, 19 nt, Artificial Sequence
  Description of Artificial Sequence: Synthetic oligonucleotide
uagucaaacuugaaagaua

SEQ ID NO: 1866610 - RNA, 19 nt, Artificial Sequence
  Description of Artificial Sequence: Synthetic oligonucleotide
guaaguuaacuucuuccca

SEQ ID NO: 1866611 - RNA, 19 nt, Artificial Sequence
  Description of Artificial Sequence: Synthetic oligonucleotide
caacugcgggucuacagcg

SEQ ID NO: 1866612 - RNA, 19 nt, Artificial Sequence
  Description of Artificial Sequence: Synthetic oligonucleotide
ugagcuagauuccuuuaua

SEQ ID NO: 1866613 - RNA, 19 nt, Artificial Sequence
  Description of Artificial Sequence: Synthetic oligonucleotide
ucgaugaaaugcugcaacu

SEQ ID NO: 1866614 - RNA, 19 nt, Artificial Sequence
  Description of Artificial Sequence: Synthetic oligonucleotide
ugcaacugcgggucuacag

SEQ ID NO: 1866615 - RNA, 19 nt, Artificial Sequence
  Description of Artificial Sequence: Synthetic oligonucleotide
uauguggucccacuaucaa

SEQ ID NO: 1866616 - RNA, 19 nt, Artificial Sequence
  Description of Artificial Sequence: Synthetic oligonucleotide
uagacagaguaaguuaacu

SEQ ID NO: 1866617 - RNA, 19 nt, Artificial Sequence
  Description of Artificial Sequence: Synthetic oligonucleotide
gaguuaagggaccuugaga

SEQ ID NO: 1866618 - RNA, 19 nt, Artificial Sequence
  Description of Artificial Sequence: Synthetic oligonucleotide
ugaauuggcuuguaucaau

SEQ ID NO: 1866619 - RNA, 19 nt, Artificial Sequence
  Description of Artificial Sequence: Synthetic oligonucleotide
gagaagacugguuuggacu

SEQ ID NO: 1866620 - RNA, 19 nt, Artificial Sequence
  Description of Artificial Sequence: Synthetic oligonucleotide
cacaaccaaauacacauga

SEQ ID NO: 1866621 - RNA, 19 nt, Artificial Sequence
  Description of Artificial Sequence: Synthetic oligonucleotide
cuuguaucaaugaagcgcu

SEQ ID NO: 1866622 - RNA, 19 nt, Artificial Sequence
  Description of Artificial Sequence: Synthetic oligonucleotide
ggaccuugagaaaacauag

SEQ ID NO: 1866623 - RNA, 19 nt, Artificial Sequence
  Description of Artificial Sequence: Synthetic oligonucleotide
acaaccaaauacacaugac

SEQ ID NO: 1866624 - RNA, 19 nt, Artificial Sequence
  Description of Artificial Sequence: Synthetic oligonucleotide
agacagaguaaguuaacuu

SEQ ID NO: 1866625 - RNA, 19 nt, Artificial Sequence
  Description of Artificial Sequence: Synthetic oligonucleotide
uaagggaccuugagaaaac

SEQ ID NO: 1866626 - RNA, 19 nt, Artificial Sequence
  Description of Artificial Sequence: Synthetic oligonucleotide
cacgguuaaacagugccag

SEQ ID NO: 1866627 - RNA, 19 nt, Artificial Sequence
  Description of Artificial Sequence: Synthetic oligonucleotide
cccuagaaaaccagaaacg

SEQ ID NO: 1866628 - RNA, 19 nt, Artificial Sequence
  Description of Artificial Sequence: Synthetic oligonucleotide
cgauuuaagaugaauuggc

SEQ ID NO: 1866629 - RNA, 19 nt, Artificial Sequence
  Description of Artificial Sequence: Synthetic oligonucleotide
cuaccugaaacuguuguuc

SEQ ID NO: 1866630 - RNA, 19 nt, Artificial Sequence
  Description of Artificial Sequence: Synthetic oligonucleotide
caaccaucccaucaacagc

SEQ ID NO: 1866631 - RNA, 19 nt, Artificial Sequence
  Description of Artificial Sequence: Synthetic oligonucleotide
ugcccauuguaccuugaga

SEQ ID NO: 1866632 - RNA, 19 nt, Artificial Sequence
  Description of Artificial Sequence: Synthetic oligonucleotide
uaccugaaacuguuguucu

SEQ ID NO: 1866633 - RNA, 19 nt, Artificial Sequence
  Description of Artificial Sequence: Synthetic oligonucleotide
auagacagaguaaguuaac

SEQ ID NO: 1866634 - RNA, 19 nt, Artificial Sequence
  Description of Artificial Sequence: Synthetic oligonucleotide
uccauacaaagagauuuac

SEQ ID NO: 1866635 - RNA, 19 nt, Artificial Sequence
  Description of Artificial Sequence: Synthetic oligonucleotide
ugguuuggacuucuggguc

SEQ ID NO: 1866636 - RNA, 19 nt, Artificial Sequence
  Description of Artificial Sequence: Synthetic oligonucleotide
guaaugcugagaucaguca

SEQ ID NO: 1866637 - RNA, 19 nt, Artificial Sequence
  Description of Artificial Sequence: Synthetic oligonucleotide
uccaacuuuggcccaggcu

SEQ ID NO: 1866638 - RNA, 19 nt, Artificial Sequence
  Description of Artificial Sequence: Synthetic oligonucleotide
uaacuaacuaaagcccucu

SEQ ID NO: 1866639 - RNA, 19 nt, Artificial Sequence
  Description of Artificial Sequence: Synthetic oligonucleotide
aguauagggaagagacaac

SEQ ID NO: 1866640 - RNA, 19 nt, Artificial Sequence
  Description of Artificial Sequence: Synthetic oligonucleotide
agucgauuuaagaugaauu

SEQ ID NO: 1866641 - RNA, 19 nt, Artificial Sequence
  Description of Artificial Sequence: Synthetic oligonucleotide
uuucagugaccgaaagaau

SEQ ID NO: 1866642 - RNA, 19 nt, Artificial Sequence
  Description of Artificial Sequence: Synthetic oligonucleotide
gcuagauuccuuuauaacu

SEQ ID NO: 1866643 - RNA, 19 nt, Artificial Sequence
  Description of Artificial Sequence: Synthetic oligonucleotide
aagcucacgguuaaacagu

SEQ ID NO: 1866644 - RNA, 19 nt, Artificial Sequence
  Description of Artificial Sequence: Synthetic oligonucleotide
gcccauuguaccuugagac

SEQ ID NO: 1866645 - RNA, 19 nt, Artificial Sequence
  Description of Artificial Sequence: Synthetic oligonucleotide
uaaaggaguuaagggaccu

SEQ ID NO: 1866646 - RNA, 19 nt, Artificial Sequence
  Description of Artificial Sequence: Synthetic oligonucleotide
cagucagaaagacuuucug

SEQ ID NO: 1866647 - RNA, 19 nt, Artificial Sequence
  Description of Artificial Sequence: Synthetic oligonucleotide
uugacuggccuaaauuguu

SEQ ID NO: 1866648 - RNA, 19 nt, Artificial Sequence
  Description of Artificial Sequence: Synthetic oligonucleotide
uuucccuacugcuacuuuu

SEQ ID NO: 1866649 - RNA, 19 nt, Artificial Sequence
  Description of Artificial Sequence: Synthetic oligonucleotide
gacaaccuggauuguauaa

SEQ ID NO: 1866650 - RNA, 19 nt, Artificial Sequence
  Description of Artificial Sequence: Synthetic oligonucleotide
ucuaccugaaacuguuguu

SEQ ID NO: 1866651 - RNA, 19 nt, Artificial Sequence
  Description of Artificial Sequence: Synthetic oligonucleotide
guuaaacagugccagguua

SEQ ID NO: 1866652 - RNA, 19 nt, Artificial Sequence
  Description of Artificial Sequence: Synthetic oligonucleotide
uagucccauauacaguaau

SEQ ID NO: 1866653 - RNA, 19 nt, Artificial Sequence
  Description of Artificial Sequence: Synthetic oligonucleotide
uacagcgcccaaacccgcg

SEQ ID NO: 1866654 - RNA, 19 nt, Artificial Sequence
  Description of Artificial Sequence: Synthetic oligonucleotide
augucccaagaugauaaag

SEQ ID NO: 1866655 - RNA, 19 nt, Artificial Sequence
  Description of Artificial Sequence: Synthetic oligonucleotide
uggccuaaauuguuauacu

SEQ ID NO: 1866656 - RNA, 19 nt, Artificial Sequence
  Description of Artificial Sequence: Synthetic oligonucleotide
acgguuaaacagugccagg

SEQ ID NO: 1866657 - RNA, 19 nt, Artificial Sequence
  Description of Artificial Sequence: Synthetic oligonucleotide
gguuagccagguuauuucc

SEQ ID NO: 1866658 - RNA, 19 nt, Artificial Sequence
  Description of Artificial Sequence: Synthetic oligonucleotide
ccauuguaccuugagaccg

SEQ ID NO: 1866659 - RNA, 19 nt, Artificial Sequence
  Description of Artificial Sequence: Synthetic oligonucleotide
cagauaacaagauguccca

SEQ ID NO: 1866660 - RNA, 19 nt, Artificial Sequence
  Description of Artificial Sequence: Synthetic oligonucleotide
gaaacgaauuccauacaaa

SEQ ID NO: 1866661 - RNA, 19 nt, Artificial Sequence
  Description of Artificial Sequence: Synthetic oligonucleotide
gaauccaucccugcgcgac

SEQ ID NO: 1866662 - RNA, 19 nt, Artificial Sequence
  Description of Artificial Sequence: Synthetic oligonucleotide
aguucacaaaacaggccuc

SEQ ID NO: 1866663 - RNA, 19 nt, Artificial Sequence
  Description of Artificial Sequence: Synthetic oligonucleotide
ugaccgaaagaaugcaguu

SEQ ID NO: 1866664 - RNA, 19 nt, Artificial Sequence
  Description of Artificial Sequence: Synthetic oligonucleotide
uccgucaucuggugcacca

SEQ ID NO: 1866665 - RNA, 19 nt, Artificial Sequence
  Description of Artificial Sequence: Synthetic oligonucleotide
aacugcgggucuacagcgc

SEQ ID NO: 1866666 - RNA, 19 nt, Artificial Sequence
  Description of Artificial Sequence: Synthetic oligonucleotide
gaucucccuagaaaaccag

SEQ ID NO: 1866667 - RNA, 19 nt, Artificial Sequence
  Description of Artificial Sequence: Synthetic oligonucleotide
auaagaaagcucacgguua

SEQ ID NO: 1866668 - RNA, 19 nt, Artificial Sequence
  Description of Artificial Sequence: Synthetic oligonucleotide
gagauuuacccuauguggu

SEQ ID NO: 1866669 - RNA, 19 nt, Artificial Sequence
  Description of Artificial Sequence: Synthetic oligonucleotide
cuugaaagauaagaaagcu

SEQ ID NO: 1866670 - RNA, 19 nt, Artificial Sequence
  Description of Artificial Sequence: Synthetic oligonucleotide
aucacaguauagggaagag

SEQ ID NO: 1866671 - RNA, 19 nt, Artificial Sequence
  Description of Artificial Sequence: Synthetic oligonucleotide
uuauuucccuacugcuacu

SEQ ID NO: 1866672 - RNA, 19 nt, Artificial Sequence
  Description of Artificial Sequence: Synthetic oligonucleotide
agugaccgaaagaaugcag

SEQ ID NO: 1866673 - RNA, 19 nt, Artificial Sequence
  Description of Artificial Sequence: Synthetic oligonucleotide
aaacaggccucagcccgac

SEQ ID NO: 1866674 - RNA, 19 nt, Artificial Sequence
  Description of Artificial Sequence: Synthetic oligonucleotide
acaguaauaugcaucucau

SEQ ID NO: 1866675 - RNA, 19 nt, Artificial Sequence
  Description of Artificial Sequence: Synthetic oligonucleotide
ugcaucucauaauuucauu

SEQ ID NO: 1866676 - RNA, 19 nt, Artificial Sequence
  Description of Artificial Sequence: Synthetic oligonucleotide
ugacuggccuaaauuguua

SEQ ID NO: 1866677 - RNA, 19 nt, Artificial Sequence
  Description of Artificial Sequence: Synthetic oligonucleotide
aagaugucccaagaugaua

SEQ ID NO: 1866678 - RNA, 19 nt, Artificial Sequence
  Description of Artificial Sequence: Synthetic oligonucleotide
guaucaaugaagcgcucaa

SEQ ID NO: 1866679 - RNA, 19 nt, Artificial Sequence
  Description of Artificial Sequence: Synthetic oligonucleotide
guuagccagguuauuuccc

SEQ ID NO: 1866680 - RNA, 19 nt, Artificial Sequence
  Description of Artificial Sequence: Synthetic oligonucleotide
aucccaucaacagcucuuc

SEQ ID NO: 1866681 - RNA, 19 nt, Artificial Sequence
  Description of Artificial Sequence: Synthetic oligonucleotide
agcaaaguuccgucaucug

SEQ ID NO: 1866682 - RNA, 19 nt, Artificial Sequence
  Description of Artificial Sequence: Synthetic oligonucleotide
gguaaugcugagaucaguc

SEQ ID NO: 1866683 - RNA, 19 nt, Artificial Sequence
  Description of Artificial Sequence: Synthetic oligonucleotide
cuauguggucccacuauca

SEQ ID NO: 1866684 - RNA, 19 nt, Artificial Sequence
  Description of Artificial Sequence: Synthetic oligonucleotide
uuccacuaucaaaauuaua

SEQ ID NO: 1866685 - RNA, 19 nt, Artificial Sequence
  Description of Artificial Sequence: Synthetic oligonucleotide
auaacacccauagaauguu

SEQ ID NO: 1866686 - RNA, 19 nt, Artificial Sequence
  Description of Artificial Sequence: Synthetic oligonucleotide
aggcuuauccaugcauuuc

SEQ ID NO: 1866687 - RNA, 19 nt, Artificial Sequence
  Description of Artificial Sequence: Synthetic oligonucleotide
cucaggcugcccauuguac

SEQ ID NO: 1866688 - RNA, 19 nt, Artificial Sequence
  Description of Artificial Sequence: Synthetic oligonucleotide
ucucgcagagucuuuuauu

SEQ ID NO: 1866689 - RNA, 19 nt, Artificial Sequence
  Description of Artificial Sequence: Synthetic oligonucleotide
ggcuuguaucaaugaagcg

SEQ ID NO: 1866690 - RNA, 19 nt, Artificial Sequence
  Description of Artificial Sequence: Synthetic oligonucleotide
gccugauagacagaguaag

SEQ ID NO: 1866691 - RNA, 19 nt, Artificial Sequence
  Description of Artificial Sequence: Synthetic oligonucleotide
uucagcucugauagucaaa

SEQ ID NO: 1866692 - RNA, 19 nt, Artificial Sequence
  Description of Artificial Sequence: Synthetic oligonucleotide
gcaacugcgggucuacagc

SEQ ID NO: 1866693 - RNA, 19 nt, Artificial Sequence
  Description of Artificial Sequence: Synthetic oligonucleotide
agaucucccuagaaaacca

SEQ ID NO: 1866694 - RNA, 19 nt, Artificial Sequence
  Description of Artificial Sequence: Synthetic oligonucleotide
uuuaucucgcagagucuuu

SEQ ID NO: 1866695 - RNA, 19 nt, Artificial Sequence
  Description of Artificial Sequence: Synthetic oligonucleotide
cccacuaucaaauuauaaa

SEQ ID NO: 1866696 - RNA, 19 nt, Artificial Sequence
  Description of Artificial Sequence: Synthetic oligonucleotide
uucugcgucuccaccucga

SEQ ID NO: 1866697 - RNA, 19 nt, Artificial Sequence
  Description of Artificial Sequence: Synthetic oligonucleotide
auguggucccacuaucaaa

SEQ ID NO: 1866698 - RNA, 19 nt, Artificial Sequence
  Description of Artificial Sequence: Synthetic oligonucleotide
cacaugugugaauguuuug

SEQ ID NO: 1866699 - RNA, 19 nt, Artificial Sequence
  Description of Artificial Sequence: Synthetic oligonucleotide
caaagagauuuacccuaug

SEQ ID NO: 1866700 - RNA, 19 nt, Artificial Sequence
  Description of Artificial Sequence: Synthetic oligonucleotide
gcaguuaauggaauuuaug

SEQ ID NO: 1866701 - RNA, 19 nt, Artificial Sequence
  Description of Artificial Sequence: Synthetic oligonucleotide
gaauuaugcucaugagcua

SEQ ID NO: 1866702 - RNA, 19 nt, Artificial Sequence
  Description of Artificial Sequence: Synthetic oligonucleotide
ucccugcgcgaccacgcgg

SEQ ID NO: 1866703 - RNA, 19 nt, Artificial Sequence
  Description of Artificial Sequence: Synthetic oligonucleotide
uucucccagcaaaguuccg

SEQ ID NO: 1866704 - RNA, 19 nt, Artificial Sequence
  Description of Artificial Sequence: Synthetic oligonucleotide
acauagucccauauacagu

SEQ ID NO: 1866705 - RNA, 19 nt, Artificial Sequence
  Description of Artificial Sequence: Synthetic oligonucleotide
cuggauuguauaacaccca

SEQ ID NO: 1866706 - RNA, 19 nt, Artificial Sequence
  Description of Artificial Sequence: Synthetic oligonucleotide
gaggaggaauccaucccug

SEQ ID NO: 1866707 - RNA, 19 nt, Artificial Sequence
  Description of Artificial Sequence: Synthetic oligonucleotide
uuaucucgcagagucuuuu

SEQ ID NO: 1866708 - RNA, 19 nt, Artificial Sequence
  Description of Artificial Sequence: Synthetic oligonucleotide
caugugugaauguuuugua

SEQ ID NO: 1866709 - RNA, 19 nt, Artificial Sequence
  Description of Artificial Sequence: Synthetic oligonucleotide
cuugacuggccuaaauugu

SEQ ID NO: 1866710 - RNA, 19 nt, Artificial Sequence
  Description of Artificial Sequence: Synthetic oligonucleotide
uuaugcucaugagcuagau

SEQ ID NO: 1866711 - RNA, 19 nt, Artificial Sequence
  Description of Artificial Sequence: Synthetic oligonucleotide
cagucugguaguaagaauu

SEQ ID NO: 1866712 - RNA, 19 nt, Artificial Sequence
  Description of Artificial Sequence: Synthetic oligonucleotide
uuguaccuugagaccgugu

SEQ ID NO: 1866713 - RNA, 19 nt, Artificial Sequence
  Description of Artificial Sequence: Synthetic oligonucleotide
augaauuggcuuguaucaa

SEQ ID NO: 1866714 - RNA, 19 nt, Artificial Sequence
  Description of Artificial Sequence: Synthetic oligonucleotide
ccuaaauuguuauacuucu

SEQ ID NO: 1866715 - RNA, 19 nt, Artificial Sequence
  Description of Artificial Sequence: Synthetic oligonucleotide
acaguauagggaagagaca

SEQ ID NO: 1866716 - RNA, 19 nt, Artificial Sequence
  Description of Artificial Sequence: Synthetic oligonucleotide
gccuaaauuguuauacuuc

SEQ ID NO: 1866717 - RNA, 19 nt, Artificial Sequence
  Description of Artificial Sequence: Synthetic oligonucleotide
guuaagggaccuugagaaa

SEQ ID NO: 1866718 - RNA, 19 nt, Artificial Sequence
  Description of Artificial Sequence: Synthetic oligonucleotide
agacaaccuggauuguaua

SEQ ID NO: 1866719 - RNA, 19 nt, Artificial Sequence
  Description of Artificial Sequence: Synthetic oligonucleotide
uaucucgcagagucuuuua

SEQ ID NO: 1866720 - RNA, 19 nt, Artificial Sequence
  Description of Artificial Sequence: Synthetic oligonucleotide
aaaggaguuaagggaccuu

SEQ ID NO: 1866721 - RNA, 19 nt, Artificial Sequence
  Description of Artificial Sequence: Synthetic oligonucleotide
agcucacgguuaaacagug

SEQ ID NO: 1866722 - RNA, 19 nt, Artificial Sequence
  Description of Artificial Sequence: Synthetic oligonucleotide
auuaugcucaugagcuaga

SEQ ID NO: 1866723 - RNA, 19 nt, Artificial Sequence
  Description of Artificial Sequence: Synthetic oligonucleotide
acuggccuaaauuguuaua

SEQ ID NO: 1866724 - RNA, 19 nt, Artificial Sequence
  Description of Artificial Sequence: Synthetic oligonucleotide
gggucuacagcgcccaaac

SEQ ID NO: 1866725 - RNA, 19 nt, Artificial Sequence
  Description of Artificial Sequence: Synthetic oligonucleotide
aucccugcgcgaccacgcg

SEQ ID NO: 1866726 - RNA, 19 nt, Artificial Sequence
  Description of Artificial Sequence: Synthetic oligonucleotide
auuguaccuugagaccgug

SEQ ID NO: 1866727 - RNA, 19 nt, Artificial Sequence
  Description of Artificial Sequence: Synthetic oligonucleotide
uuuacccuaugugguccca

SEQ ID NO: 1866728 - RNA, 19 nt, Artificial Sequence
  Description of Artificial Sequence: Synthetic oligonucleotide
uuguagccugauagacaga

SEQ ID NO: 1866729 - RNA, 19 nt, Artificial Sequence
  Description of Artificial Sequence: Synthetic oligonucleotide
agguaaugcugagaucagu

SEQ ID NO: 1866730 - RNA, 19 nt, Artificial Sequence
  Description of Artificial Sequence: Synthetic oligonucleotide
agcccgacuguccaacuuu

SEQ ID NO: 1866731 - RNA, 19 nt, Artificial Sequence
  Description of Artificial Sequence: Synthetic oligonucleotide
uccaugcauuucucccagc

SEQ ID NO: 1866732 - RNA, 19 nt, Artificial Sequence
  Description of Artificial Sequence: Synthetic oligonucleotide
agucccauauacaguaaua

SEQ ID NO: 1866733 - RNA, 19 nt, Artificial Sequence
  Description of Artificial Sequence: Synthetic oligonucleotide
cucuaccugaaacuguugu

SEQ ID NO: 1866734 - RNA, 19 nt, Artificial Sequence
  Description of Artificial Sequence: Synthetic oligonucleotide
gaccgaaagaaugcaguua

SEQ ID NO: 1866735 - RNA, 19 nt, Artificial Sequence
  Description of Artificial Sequence: Synthetic oligonucleotide
aucucccuagaaaaccaga

SEQ ID NO: 1866736 - RNA, 19 nt, Artificial Sequence
  Description of Artificial Sequence: Synthetic oligonucleotide
uuacccuauguggucccac

SEQ ID NO: 1866737 - RNA, 19 nt, Artificial Sequence
  Description of Artificial Sequence: Synthetic oligonucleotide
uaucaggcaugcaccucua

SEQ ID NO: 1866738 - RNA, 19 nt, Artificial Sequence
  Description of Artificial Sequence: Synthetic oligonucleotide
agucugguaguaagaauua

SEQ ID NO: 1866739 - RNA, 19 nt, Artificial Sequence
  Description of Artificial Sequence: Synthetic oligonucleotide
ccgacuguccaacuuuggc

SEQ ID NO: 1866740 - RNA, 19 nt, Artificial Sequence
  Description of Artificial Sequence: Synthetic oligonucleotide
guuguucuugacuggccua

SEQ ID NO: 1866741 - RNA, 19 nt, Artificial Sequence
  Description of Artificial Sequence: Synthetic oligonucleotide
augcugagaucagucagaa

SEQ ID NO: 1866742 - RNA, 19 nt, Artificial Sequence
  Description of Artificial Sequence: Synthetic oligonucleotide
cucucaacucccauacaua

SEQ ID NO: 1866743 - RNA, 19 nt, Artificial Sequence
  Description of Artificial Sequence: Synthetic oligonucleotide
ugcgggucuacagcgccca

SEQ ID NO: 1866744 - RNA, 19 nt, Artificial Sequence
  Description of Artificial Sequence: Synthetic oligonucleotide
gugaccgaaagaaugcagu

SEQ ID NO: 1866745 - RNA, 19 nt, Artificial Sequence
  Description of Artificial Sequence: Synthetic oligonucleotide
cccacauagccauuucuuc

SEQ ID NO: 1866746 - RNA, 19 nt, Artificial Sequence
  Description of Artificial Sequence: Synthetic oligonucleotide
caaacccgcgcccgaggag

SEQ ID NO: 1866747 - RNA, 19 nt, Artificial Sequence
  Description of Artificial Sequence: Synthetic oligonucleotide
gacuggccuaaauuguuau

SEQ ID NO: 1866748 - RNA, 19 nt, Artificial Sequence
  Description of Artificial Sequence: Synthetic oligonucleotide
cucaacucccauacauaaa

SEQ ID NO: 1866749 - RNA, 19 nt, Artificial Sequence
  Description of Artificial Sequence: Synthetic oligonucleotide
uacuucuuuuaggcacaug

SEQ ID NO: 1866750 - RNA, 19 nt, Artificial Sequence
  Description of Artificial Sequence: Synthetic oligonucleotide
ccacauagccauuucuuca

SEQ ID NO: 1866751 - RNA, 19 nt, Artificial Sequence
  Description of Artificial Sequence: Synthetic oligonucleotide
gagacaaccuggauuguau

SEQ ID NO: 1866752 - RNA, 19 nt, Artificial Sequence
  Description of Artificial Sequence: Synthetic oligonucleotide
aggaguuaagggaccuuga

SEQ ID NO: 1866753 - RNA, 19 nt, Artificial Sequence
  Description of Artificial Sequence: Synthetic oligonucleotide
gucccauauacaguaauau

SEQ ID NO: 1866754 - RNA, 19 nt, Artificial Sequence
  Description of Artificial Sequence: Synthetic oligonucleotide
uagccagguuauuucccua

SEQ ID NO: 1866755 - RNA, 19 nt, Artificial Sequence
  Description of Artificial Sequence: Synthetic oligonucleotide
cugauagacagaguaaguu

SEQ ID NO: 1866756 - RNA, 19 nt, Artificial Sequence
  Description of Artificial Sequence: Synthetic oligonucleotide
ccagguuauuucccuacug

SEQ ID NO: 1866757 - RNA, 19 nt, Artificial Sequence
  Description of Artificial Sequence: Synthetic oligonucleotide
ccuauguggucccacuauc

SEQ ID NO: 1866758 - RNA, 19 nt, Artificial Sequence
  Description of Artificial Sequence: Synthetic oligonucleotide
cugcgggucuacagcgccc

SEQ ID NO: 1866759 - RNA, 19 nt, Artificial Sequence
  Description of Artificial Sequence: Synthetic oligonucleotide
cuuccacuaucaaaauuau

SEQ ID NO: 1866760 - RNA, 19 nt, Artificial Sequence
  Description of Artificial Sequence: Synthetic oligonucleotide
gcugaaagcgcugcuucug

SEQ ID NO: 1866761 - RNA, 19 nt, Artificial Sequence
  Description of Artificial Sequence: Synthetic oligonucleotide
agccugauagacagaguaa

SEQ ID NO: 1866762 - RNA, 19 nt, Artificial Sequence
  Description of Artificial Sequence: Synthetic oligonucleotide
cuggauucucaggcugccc

SEQ ID NO: 1866763 - RNA, 19 nt, Artificial Sequence
  Description of Artificial Sequence: Synthetic oligonucleotide
gaccuugagaaaacauagu

SEQ ID NO: 1866764 - RNA, 19 nt, Artificial Sequence
  Description of Artificial Sequence: Synthetic oligonucleotide
ccacuaucaaaauuauaua

SEQ ID NO: 1866765 - RNA, 19 nt, Artificial Sequence
  Description of Artificial Sequence: Synthetic oligonucleotide
agcgcucaacacaguucac

SEQ ID NO: 1866766 - RNA, 19 nt, Artificial Sequence
  Description of Artificial Sequence: Synthetic oligonucleotide
cagugaccgaaagaaugca

SEQ ID NO: 1866767 - RNA, 19 nt, Artificial Sequence
  Description of Artificial Sequence: Synthetic oligonucleotide
ccaugcauuucucccagca

SEQ ID NO: 1866768 - RNA, 19 nt, Artificial Sequence
  Description of Artificial Sequence: Synthetic oligonucleotide
auagucccauauacaguaa

SEQ ID NO: 1866769 - RNA, 19 nt, Artificial Sequence
  Description of Artificial Sequence: Synthetic oligonucleotide
caagaugucccaagaugau

SEQ ID NO: 1866770 - RNA, 19 nt, Artificial Sequence
  Description of Artificial Sequence: Synthetic oligonucleotide
cagcgcccaaacccgcgcc

SEQ ID NO: 1866771 - RNA, 19 nt, Artificial Sequence
  Description of Artificial Sequence: Synthetic oligonucleotide
ggccuaaauuguuauacuu

SEQ ID NO: 1866772 - RNA, 19 nt, Artificial Sequence
  Description of Artificial Sequence: Synthetic oligonucleotide
cugagaagacugguuugga

SEQ ID NO: 1866773 - RNA, 19 nt, Artificial Sequence
  Description of Artificial Sequence: Synthetic oligonucleotide
cauuguaccuugagaccgu

SEQ ID NO: 1866774 - RNA, 19 nt, Artificial Sequence
  Description of Artificial Sequence: Synthetic oligonucleotide
guuccgucaucuggugcac

SEQ ID NO: 1866775 - RNA, 19 nt, Artificial Sequence
  Description of Artificial Sequence: Synthetic oligonucleotide
ggucccacuaucaaauuau

SEQ ID NO: 1866776 - RNA, 19 nt, Artificial Sequence
  Description of Artificial Sequence: Synthetic oligonucleotide
caggcugcccauuguaccu

SEQ ID NO: 1866777 - RNA, 19 nt, Artificial Sequence
  Description of Artificial Sequence: Synthetic oligonucleotide
uccaucccugcgcgaccac

SEQ ID NO: 1866778 - RNA, 19 nt, Artificial Sequence
  Description of Artificial Sequence: Synthetic oligonucleotide
cccgacuguccaacuuugg

SEQ ID NO: 1866779 - RNA, 19 nt, Artificial Sequence
  Description of Artificial Sequence: Synthetic oligonucleotide
cagaguaaguuaacuucuu

SEQ ID NO: 1866780 - RNA, 19 nt, Artificial Sequence
  Description of Artificial Sequence: Synthetic oligonucleotide
ggauuguauaacacccaua

SEQ ID NO: 1866781 - RNA, 19 nt, Artificial Sequence
  Description of Artificial Sequence: Synthetic oligonucleotide
guaccuugagaccguguuu

SEQ ID NO: 1866782 - RNA, 19 nt, Artificial Sequence
  Description of Artificial Sequence: Synthetic oligonucleotide
ggucuguuccagucgauuu

SEQ ID NO: 1866783 - RNA, 19 nt, Artificial Sequence
  Description of Artificial Sequence: Synthetic oligonucleotide
gcgcucaacacaguucaca

SEQ ID NO: 1866784 - RNA, 19 nt, Artificial Sequence
  Description of Artificial Sequence: Synthetic oligonucleotide
cagcucuucauugcuugaa

SEQ ID NO: 1866785 - RNA, 19 nt, Artificial Sequence
  Description of Artificial Sequence: Synthetic oligonucleotide
caggcuuauccaugcauuu

SEQ ID NO: 1866786 - RNA, 19 nt, Artificial Sequence
  Description of Artificial Sequence: Synthetic oligonucleotide
agacugguuuggacuucug

SEQ ID NO: 1866787 - RNA, 19 nt, Artificial Sequence
  Description of Artificial Sequence: Synthetic oligonucleotide
gucccacuaucaaauuaua

SEQ ID NO: 1866788 - RNA, 19 nt, Artificial Sequence
  Description of Artificial Sequence: Synthetic oligonucleotide
cacuuccacuaucaaaauu

SEQ ID NO: 1866789 - RNA, 19 nt, Artificial Sequence
  Description of Artificial Sequence: Synthetic oligonucleotide
cugcgcgaccacgcgggcc

SEQ ID NO: 1866790 - RNA, 19 nt, Artificial Sequence
  Description of Artificial Sequence: Synthetic oligonucleotide
cagucgauuuaagaugaau

SEQ ID NO: 1866791 - RNA, 19 nt, Artificial Sequence
  Description of Artificial Sequence: Synthetic oligonucleotide
aacccgcgcccgaggagga

SEQ ID NO: 1866792 - RNA, 19 nt, Artificial Sequence
  Description of Artificial Sequence: Synthetic oligonucleotide
gcugcaacugcgggucuac

SEQ ID NO: 1866793 - RNA, 19 nt, Artificial Sequence
  Description of Artificial Sequence: Synthetic oligonucleotide
cagguuagccagguuauuu

SEQ ID NO: 1866794 - RNA, 19 nt, Artificial Sequence
  Description of Artificial Sequence: Synthetic oligonucleotide
caugcaccucuaccugaaa

SEQ ID NO: 1866795 - RNA, 19 nt, Artificial Sequence
  Description of Artificial Sequence: Synthetic oligonucleotide
gcucacgguuaaacagugc

SEQ ID NO: 1866796 - RNA, 19 nt, Artificial Sequence
  Description of Artificial Sequence: Synthetic oligonucleotide
gcccgacuguccaacuuug

SEQ ID NO: 1866797 - RNA, 19 nt, Artificial Sequence
  Description of Artificial Sequence: Synthetic oligonucleotide
cuaaagcccucuggauucu

SEQ ID NO: 1866798 - RNA, 19 nt, Artificial Sequence
  Description of Artificial Sequence: Synthetic oligonucleotide
acccgcgcccgaggaggac

SEQ ID NO: 1866799 - RNA, 19 nt, Artificial Sequence
  Description of Artificial Sequence: Synthetic oligonucleotide
ccaggcuuauccaugcauu

SEQ ID NO: 1866800 - RNA, 19 nt, Artificial Sequence
  Description of Artificial Sequence: Synthetic oligonucleotide
cccgcgcccgaggaggacg

SEQ ID NO: 1866801 - RNA, 19 nt, Artificial Sequence
  Description of Artificial Sequence: Synthetic oligonucleotide
guggucccacuaucaaauu

SEQ ID NO: 1866802 - RNA, 19 nt, Artificial Sequence
  Description of Artificial Sequence: Synthetic oligonucleotide
cugcaacugcgggucuaca

SEQ ID NO: 1866803 - RNA, 19 nt, Artificial Sequence
  Description of Artificial Sequence: Synthetic oligonucleotide
gcgaccacgcgggccgaag

SEQ ID NO: 1866804 - RNA, 19 nt, Artificial Sequence
  Description of Artificial Sequence: Synthetic oligonucleotide
cgguuaaacagugccaggu

SEQ ID NO: 1866805 - RNA, 19 nt, Artificial Sequence
  Description of Artificial Sequence: Synthetic oligonucleotide
ccccacauagccauuucuu

SEQ ID NO: 1866806 - RNA, 19 nt, Artificial Sequence
  Description of Artificial Sequence: Synthetic oligonucleotide
ccagucgauuuaagaugaa

SEQ ID NO: 1866807 - RNA, 19 nt, Artificial Sequence
  Description of Artificial Sequence: Synthetic oligonucleotide
cccuauguggucccacuau

SEQ ID NO: 1866808 - RNA, 19 nt, Artificial Sequence
  Description of Artificial Sequence: Synthetic oligonucleotide
cccaggcuuauccaugcau

SEQ ID NO: 1866809 - RNA, 19 nt, Artificial Sequence
  Description of Artificial Sequence: Synthetic oligonucleotide
ccugcgcgaccacgcgggc

SEQ ID NO: 1866810 - RNA, 19 nt, Artificial Sequence
  Description of Artificial Sequence: Synthetic oligonucleotide
gggucuguuccagucgauu

SEQ ID NO: 1866811 - RNA, 19 nt, Artificial Sequence
  Description of Artificial Sequence: Synthetic oligonucleotide
cccucuggauucucaggcu

SEQ ID NO: 1866812 - RNA, 19 nt, Artificial Sequence
  Description of Artificial Sequence: Synthetic oligonucleotide
gcgucuccaccucgaugaa

SEQ ID NO: 1866813 - RNA, 19 nt, Artificial Sequence
  Description of Artificial Sequence: Synthetic oligonucleotide
ccgaaagaaugcaguuaau

SEQ ID NO: 1866814 - RNA, 19 nt, Artificial Sequence
  Description of Artificial Sequence: Synthetic oligonucleotide
ccucagcccgacuguccaa

SEQ ID NO: 1866815 - RNA, 19 nt, Artificial Sequence
  Description of Artificial Sequence: Synthetic oligonucleotide
ccgcgcccgaggaggacga

SEQ ID NO: 1866816 - RNA, 19 nt, Artificial Sequence
  Description of Artificial Sequence: Synthetic oligonucleotide
gcgggucuacagcgcccaa

SEQ ID NO: 1866817 - RNA, 19 nt, Artificial Sequence
  Description of Artificial Sequence: Synthetic oligonucleotide
cgucuccaccucgaugaaa

SEQ ID NO: 1866818 - RNA, 19 nt, Artificial Sequence
  Description of Artificial Sequence: Synthetic oligonucleotide
cgggucuacagcgcccaaa

SEQ ID NO: 1866819 - RNA, 19 nt, Artificial Sequence
  Description of Artificial Sequence: Synthetic oligonucleotide
cgcgcccgaggaggacgag

SEQ ID NO: 1866820 - RNA, 19 nt, Artificial Sequence
  Description of Artificial Sequence: Synthetic oligonucleotide
gcgcgaccacgcgggccga

SEQ ID NO: 1866821 - RNA, 19 nt, Artificial Sequence
  Description of Artificial Sequence: Synthetic oligonucleotide
cgcgaccacgcgggccgaa

SEQ ID NO: 1866822 - RNA, 19 nt, Artificial Sequence
  Description of Artificial Sequence: Synthetic oligonucleotide
aauauaacgcuuuagucuc

SEQ ID NO: 1866823 - RNA, 19 nt, Artificial Sequence
  Description of Artificial Sequence: Synthetic oligonucleotide
uaugagaccagucuggagg

SEQ ID NO: 1866824 - RNA, 19 nt, Artificial Sequence
  Description of Artificial Sequence: Synthetic oligonucleotide
aacaggguaagguccaucc

SEQ ID NO: 1866825 - RNA, 19 nt, Artificial Sequence
  Description of Artificial Sequence: Synthetic oligonucleotide
ugaaauugagaacugugcc

SEQ ID NO: 1866826 - RNA, 19 nt, Artificial Sequence
  Description of Artificial Sequence: Synthetic oligonucleotide
cuucuuguaguuucgaugg

SEQ ID NO: 1866827 - RNA, 19 nt, Artificial Sequence
  Description of Artificial Sequence: Synthetic oligonucleotide
gaaggauugcccuucaugc

SEQ ID NO: 1866828 - RNA, 19 nt, Artificial Sequence
  Description of Artificial Sequence: Synthetic oligonucleotide
aacaacauaggucccuggg

SEQ ID NO: 1866829 - RNA, 19 nt, Artificial Sequence
  Description of Artificial Sequence: Synthetic oligonucleotide
cuugaaucugaugagaccg

SEQ ID NO: 1866830 - RNA, 19 nt, Artificial Sequence
  Description of Artificial Sequence: Synthetic oligonucleotide
acuucccucucacagagcc

SEQ ID NO: 1866831 - RNA, 19 nt, Artificial Sequence
  Description of Artificial Sequence: Synthetic oligonucleotide
aacgcuuuagucucaccac

SEQ ID NO: 1866832 - RNA, 19 nt, Artificial Sequence
  Description of Artificial Sequence: Synthetic oligonucleotide
ucuagucucaucuuguaca

SEQ ID NO: 1866833 - RNA, 19 nt, Artificial Sequence
  Description of Artificial Sequence: Synthetic oligonucleotide
ucugguaccagcauccgcc

SEQ ID NO: 1866834 - RNA, 19 nt, Artificial Sequence
  Description of Artificial Sequence: Synthetic oligonucleotide
uuugguaaagucuagcuuu

SEQ ID NO: 1866835 - RNA, 19 nt, Artificial Sequence
  Description of Artificial Sequence: Synthetic oligonucleotide
auauuggcgacauccaagg

SEQ ID NO: 1866836 - RNA, 19 nt, Artificial Sequence
  Description of Artificial Sequence: Synthetic oligonucleotide
aaggauugcccuucaugcc

SEQ ID NO: 1866837 - RNA, 19 nt, Artificial Sequence
  Description of Artificial Sequence: Synthetic oligonucleotide
aacugcugaugauauuggc

SEQ ID NO: 1866838 - RNA, 19 nt, Artificial Sequence
  Description of Artificial Sequence: Synthetic oligonucleotide
augaaauugagaacugugc

SEQ ID NO: 1866839 - RNA, 19 nt, Artificial Sequence
  Description of Artificial Sequence: Synthetic oligonucleotide
acuugaaucugaugagacc

SEQ ID NO: 1866840 - RNA, 19 nt, Artificial Sequence
  Description of Artificial Sequence: Synthetic oligonucleotide
gaauauaacgcuuuagucu

SEQ ID NO: 1866841 - RNA, 19 nt, Artificial Sequence
  Description of Artificial Sequence: Synthetic oligonucleotide
gauuccuuccccugaaggg

SEQ ID NO: 1866842 - RNA, 19 nt, Artificial Sequence
  Description of Artificial Sequence: Synthetic oligonucleotide
ugucguacaauggagugcg

SEQ ID NO: 1866843 - RNA, 19 nt, Artificial Sequence
  Description of Artificial Sequence: Synthetic oligonucleotide
ugcgauaaagcuccccugg

SEQ ID NO: 1866844 - RNA, 19 nt, Artificial Sequence
  Description of Artificial Sequence: Synthetic oligonucleotide
uuggcgacauccaaggaag

SEQ ID NO: 1866845 - RNA, 19 nt, Artificial Sequence
  Description of Artificial Sequence: Synthetic oligonucleotide
uguauaacaggguaagguc

SEQ ID NO: 1866846 - RNA, 19 nt, Artificial Sequence
  Description of Artificial Sequence: Synthetic oligonucleotide
uaacgcuuuagucucacca

SEQ ID NO: 1866847 - RNA, 19 nt, Artificial Sequence
  Description of Artificial Sequence: Synthetic oligonucleotide
agcucugcgauaaagcucc

SEQ ID NO: 1866848 - RNA, 19 nt, Artificial Sequence
  Description of Artificial Sequence: Synthetic oligonucleotide
agagcaugaaauugagaac

SEQ ID NO: 1866849 - RNA, 19 nt, Artificial Sequence
  Description of Artificial Sequence: Synthetic oligonucleotide
ugugccaacaacauagguc

SEQ ID NO: 1866850 - RNA, 19 nt, Artificial Sequence
  Description of Artificial Sequence: Synthetic oligonucleotide
ucuuguauaacaggguaag

SEQ ID NO: 1866851 - RNA, 19 nt, Artificial Sequence
  Description of Artificial Sequence: Synthetic oligonucleotide
uucaaggugaucccggccc

SEQ ID NO: 1866852 - RNA, 19 nt, Artificial Sequence
  Description of Artificial Sequence: Synthetic oligonucleotide
cugacucugaauugaagcg

SEQ ID NO: 1866853 - RNA, 19 nt, Artificial Sequence
  Description of Artificial Sequence: Synthetic oligonucleotide
uuuaaggcucucuucaaac

SEQ ID NO: 1866854 - RNA, 19 nt, Artificial Sequence
  Description of Artificial Sequence: Synthetic oligonucleotide
ugaaagcugcuucagugcc

SEQ ID NO: 1866855 - RNA, 19 nt, Artificial Sequence
  Description of Artificial Sequence: Synthetic oligonucleotide
ucaucuuguacaaccaggu

SEQ ID NO: 1866856 - RNA, 19 nt, Artificial Sequence
  Description of Artificial Sequence: Synthetic oligonucleotide
uucgaugggcaccacaagc

SEQ ID NO: 1866857 - RNA, 19 nt, Artificial Sequence
  Description of Artificial Sequence: Synthetic oligonucleotide
cacaagcccgaauauaacg

SEQ ID NO: 1866858 - RNA, 19 nt, Artificial Sequence
  Description of Artificial Sequence: Synthetic oligonucleotide
uucgcggucgaccugaacu

SEQ ID NO: 1866859 - RNA, 19 nt, Artificial Sequence
  Description of Artificial Sequence: Synthetic oligonucleotide
aaacccaccuuagagagca

SEQ ID NO: 1866860 - RNA, 19 nt, Artificial Sequence
  Description of Artificial Sequence: Synthetic oligonucleotide
ugaugagaccggaacuucg

SEQ ID NO: 1866861 - RNA, 19 nt, Artificial Sequence
  Description of Artificial Sequence: Synthetic oligonucleotide
ugugggagcgacaggaacc

SEQ ID NO: 1866862 - RNA, 19 nt, Artificial Sequence
  Description of Artificial Sequence: Synthetic oligonucleotide
aaauugagaacugugccaa

SEQ ID NO: 1866863 - RNA, 19 nt, Artificial Sequence
  Description of Artificial Sequence: Synthetic oligonucleotide
acaacauaggucccugggg

SEQ ID NO: 1866864 - RNA, 19 nt, Artificial Sequence
  Description of Artificial Sequence: Synthetic oligonucleotide
aucacugcugaugaugccc

SEQ ID NO: 1866865 - RNA, 19 nt, Artificial Sequence
  Description of Artificial Sequence: Synthetic oligonucleotide
acaagcccgaauauaacgc

SEQ ID NO: 1866866 - RNA, 19 nt, Artificial Sequence
  Description of Artificial Sequence: Synthetic oligonucleotide
gauauuggcgacauccaag

SEQ ID NO: 1866867 - RNA, 19 nt, Artificial Sequence
  Description of Artificial Sequence: Synthetic oligonucleotide
gaugaugccccgcauauga

SEQ ID NO: 1866868 - RNA, 19 nt, Artificial Sequence
  Description of Artificial Sequence: Synthetic oligonucleotide
aauuucugucguacaaugg

SEQ ID NO: 1866869 - RNA, 19 nt, Artificial Sequence
  Description of Artificial Sequence: Synthetic oligonucleotide
guaagguccauccugggac

SEQ ID NO: 1866870 - RNA, 19 nt, Artificial Sequence
  Description of Artificial Sequence: Synthetic oligonucleotide
aagucuagcuuuccuucuc

SEQ ID NO: 1866871 - RNA, 19 nt, Artificial Sequence
  Description of Artificial Sequence: Synthetic oligonucleotide
uagagagcaugaaauugag

SEQ ID NO: 1866872 - RNA, 19 nt, Artificial Sequence
  Description of Artificial Sequence: Synthetic oligonucleotide
ugggacauggaguucagcu

SEQ ID NO: 1866873 - RNA, 19 nt, Artificial Sequence
  Description of Artificial Sequence: Synthetic oligonucleotide
cuuagagagcaugaaauug

SEQ ID NO: 1866874 - RNA, 19 nt, Artificial Sequence
  Description of Artificial Sequence: Synthetic oligonucleotide
ucugucguacaauggagug

SEQ ID NO: 1866875 - RNA, 19 nt, Artificial Sequence
  Description of Artificial Sequence: Synthetic oligonucleotide
aaagucuagcuuuccuucu

SEQ ID NO: 1866876 - RNA, 19 nt, Artificial Sequence
  Description of Artificial Sequence: Synthetic oligonucleotide
gaccucuucacuuugguaa

SEQ ID NO: 1866877 - RNA, 19 nt, Artificial Sequence
  Description of Artificial Sequence: Synthetic oligonucleotide
ucgaugggcaccacaagcc

SEQ ID NO: 1866878 - RNA, 19 nt, Artificial Sequence
  Description of Artificial Sequence: Synthetic oligonucleotide
gacacuucuccaaggaagg

SEQ ID NO: 1866879 - RNA, 19 nt, Artificial Sequence
  Description of Artificial Sequence: Synthetic oligonucleotide
guauaacaggguaaggucc

SEQ ID NO: 1866880 - RNA, 19 nt, Artificial Sequence
  Description of Artificial Sequence: Synthetic oligonucleotide
uacaauggagugcguaacc

SEQ ID NO: 1866881 - RNA, 19 nt, Artificial Sequence
  Description of Artificial Sequence: Synthetic oligonucleotide
aggcauuccgucuucgcgg

SEQ ID NO: 1866882 - RNA, 19 nt, Artificial Sequence
  Description of Artificial Sequence: Synthetic oligonucleotide
aaaauuucugucguacaau

SEQ ID NO: 1866883 - RNA, 19 nt, Artificial Sequence
  Description of Artificial Sequence: Synthetic oligonucleotide
uggguucuggacuugaauc

SEQ ID NO: 1866884 - RNA, 19 nt, Artificial Sequence
  Description of Artificial Sequence: Synthetic oligonucleotide
gagaccggaacuucgugcc

SEQ ID NO: 1866885 - RNA, 19 nt, Artificial Sequence
  Description of Artificial Sequence: Synthetic oligonucleotide
ugagaccggaacuucgugc

SEQ ID NO: 1866886 - RNA, 19 nt, Artificial Sequence
  Description of Artificial Sequence: Synthetic oligonucleotide
aauggagugcguaaccgug

SEQ ID NO: 1866887 - RNA, 19 nt, Artificial Sequence
  Description of Artificial Sequence: Synthetic oligonucleotide
agcuuuccuucucugguac

SEQ ID NO: 1866888 - RNA, 19 nt, Artificial Sequence
  Description of Artificial Sequence: Synthetic oligonucleotide
gugaucccggcccacaugg

SEQ ID NO: 1866889 - RNA, 19 nt, Artificial Sequence
  Description of Artificial Sequence: Synthetic oligonucleotide
uggaguucagcuacucuca

SEQ ID NO: 1866890 - RNA, 19 nt, Artificial Sequence
  Description of Artificial Sequence: Synthetic oligonucleotide
agagcgguucuuccuuucc

SEQ ID NO: 1866891 - RNA, 19 nt, Artificial Sequence
  Description of Artificial Sequence: Synthetic oligonucleotide
ugauguagagcuggaaucu

SEQ ID NO: 1866892 - RNA, 19 nt, Artificial Sequence
  Description of Artificial Sequence: Synthetic oligonucleotide
uucucucugggucacugca

SEQ ID NO: 1866893 - RNA, 19 nt, Artificial Sequence
  Description of Artificial Sequence: Synthetic oligonucleotide
ugauauuggcgacauccaa

SEQ ID NO: 1866894 - RNA, 19 nt, Artificial Sequence
  Description of Artificial Sequence: Synthetic oligonucleotide
uugcccuucaugccaagug

SEQ ID NO: 1866895 - RNA, 19 nt, Artificial Sequence
  Description of Artificial Sequence: Synthetic oligonucleotide
aggcucuuguauaacaggg

SEQ ID NO: 1866896 - RNA, 19 nt, Artificial Sequence
  Description of Artificial Sequence: Synthetic oligonucleotide
auaacgcuuuagucucacc

SEQ ID NO: 1866897 - RNA, 19 nt, Artificial Sequence
  Description of Artificial Sequence: Synthetic oligonucleotide
aagagcgguucuuccuuuc

SEQ ID NO: 1866898 - RNA, 19 nt, Artificial Sequence
  Description of Artificial Sequence: Synthetic oligonucleotide
uucagcuacucucaccauc

SEQ ID NO: 1866899 - RNA, 19 nt, Artificial Sequence
  Description of Artificial Sequence: Synthetic oligonucleotide
caaccucggaagaagcugc

SEQ ID NO: 1866900 - RNA, 19 nt, Artificial Sequence
  Description of Artificial Sequence: Synthetic oligonucleotide
cugcugaugauauuggcga

SEQ ID NO: 1866901 - RNA, 19 nt, Artificial Sequence
  Description of Artificial Sequence: Synthetic oligonucleotide
aggauugcccuucaugcca

SEQ ID NO: 1866902 - RNA, 19 nt, Artificial Sequence
  Description of Artificial Sequence: Synthetic oligonucleotide
cucucuucggugacgagac

SEQ ID NO: 1866903 - RNA, 19 nt, Artificial Sequence
  Description of Artificial Sequence: Synthetic oligonucleotide
agagcccuccccuuccucg

SEQ ID NO: 1866904 - RNA, 19 nt, Artificial Sequence
  Description of Artificial Sequence: Synthetic oligonucleotide
caggcucuuguauaacagg

SEQ ID NO: 1866905 - RNA, 19 nt, Artificial Sequence
  Description of Artificial Sequence: Synthetic oligonucleotide
gaaucugacucugaauuga

SEQ ID NO: 1866906 - RNA, 19 nt, Artificial Sequence
  Description of Artificial Sequence: Synthetic oligonucleotide
gacuugaaucugaugagac

SEQ ID NO: 1866907 - RNA, 19 nt, Artificial Sequence
  Description of Artificial Sequence: Synthetic oligonucleotide
aggucuguuugucuguucu

SEQ ID NO: 1866908 - RNA, 19 nt, Artificial Sequence
  Description of Artificial Sequence: Synthetic oligonucleotide
uuucgaugggcaccacaag

SEQ ID NO: 1866909 - RNA, 19 nt, Artificial Sequence
  Description of Artificial Sequence: Synthetic oligonucleotide
uccucuagucucaucuugu

SEQ ID NO: 1866910 - RNA, 19 nt, Artificial Sequence
  Description of Artificial Sequence: Synthetic oligonucleotide
uggaugguccucucuucgg

SEQ ID NO: 1866911 - RNA, 19 nt, Artificial Sequence
  Description of Artificial Sequence: Synthetic oligonucleotide
uuggaagagcgguucuucc

SEQ ID NO: 1866912 - RNA, 19 nt, Artificial Sequence
  Description of Artificial Sequence: Synthetic oligonucleotide
uggugcucucuccugcccg

SEQ ID NO: 1866913 - RNA, 19 nt, Artificial Sequence
  Description of Artificial Sequence: Synthetic oligonucleotide
caggcauuccgucuucgcg

SEQ ID NO: 1866914 - RNA, 19 nt, Artificial Sequence
  Description of Artificial Sequence: Synthetic oligonucleotide
cucugaauugaagcgagac

SEQ ID NO: 1866915 - RNA, 19 nt, Artificial Sequence
  Description of Artificial Sequence: Synthetic oligonucleotide
agacccaaccuucugacuu

SEQ ID NO: 1866916 - RNA, 19 nt, Artificial Sequence
  Description of Artificial Sequence: Synthetic oligonucleotide
acaaccaggucuguuuguc

SEQ ID NO: 1866917 - RNA, 19 nt, Artificial Sequence
  Description of Artificial Sequence: Synthetic oligonucleotide
accuuagagagcaugaaau

SEQ ID NO: 1866918 - RNA, 19 nt, Artificial Sequence
  Description of Artificial Sequence: Synthetic oligonucleotide
uuugcucucaacugcuuuu

SEQ ID NO: 1866919 - RNA, 19 nt, Artificial Sequence
  Description of Artificial Sequence: Synthetic oligonucleotide
cucaccaucacugcugaug

SEQ ID NO: 1866920 - RNA, 19 nt, Artificial Sequence
  Description of Artificial Sequence: Synthetic oligonucleotide
ucuucggugacgagaccca

SEQ ID NO: 1866921 - RNA, 19 nt, Artificial Sequence
  Description of Artificial Sequence: Synthetic oligonucleotide
caggguaagguccauccug

SEQ ID NO: 1866922 - RNA, 19 nt, Artificial Sequence
  Description of Artificial Sequence: Synthetic oligonucleotide
cuuguauaacaggguaagg

SEQ ID NO: 1866923 - RNA, 19 nt, Artificial Sequence
  Description of Artificial Sequence: Synthetic oligonucleotide
ccaaacccaccuuagagag

SEQ ID NO: 1866924 - RNA, 19 nt, Artificial Sequence
  Description of Artificial Sequence: Synthetic oligonucleotide
uucaacgccugcuucuccu

SEQ ID NO: 1866925 - RNA, 19 nt, Artificial Sequence
  Description of Artificial Sequence: Synthetic oligonucleotide
agagucgcucacuucccuc

SEQ ID NO: 1866926 - RNA, 19 nt, Artificial Sequence
  Description of Artificial Sequence: Synthetic oligonucleotide
uacucucaccaucacugcu

SEQ ID NO: 1866927 - RNA, 19 nt, Artificial Sequence
  Description of Artificial Sequence: Synthetic oligonucleotide
cugaauugaagcgagaccu

SEQ ID NO: 1866928 - RNA, 19 nt, Artificial Sequence
  Description of Artificial Sequence: Synthetic oligonucleotide
aacgccugcuucuccucag

SEQ ID NO: 1866929 - RNA, 19 nt, Artificial Sequence
  Description of Artificial Sequence: Synthetic oligonucleotide
cucuucggugacgagaccc

SEQ ID NO: 1866930 - RNA, 19 nt, Artificial Sequence
  Description of Artificial Sequence: Synthetic oligonucleotide
gaugguccucucuucggug

SEQ ID NO: 1866931 - RNA, 19 nt, Artificial Sequence
  Description of Artificial Sequence: Synthetic oligonucleotide
augagaccagucuggaggu

SEQ ID NO: 1866932 - RNA, 19 nt, Artificial Sequence
  Description of Artificial Sequence: Synthetic oligonucleotide
uguuugucuguucuuccuu

SEQ ID NO: 1866933 - RNA, 19 nt, Artificial Sequence
  Description of Artificial Sequence: Synthetic oligonucleotide
cauuccgucuucgcggucg

SEQ ID NO: 1866934 - RNA, 19 nt, Artificial Sequence
  Description of Artificial Sequence: Synthetic oligonucleotide
gaugccccgcauaugagac

SEQ ID NO: 1866935 - RNA, 19 nt, Artificial Sequence
  Description of Artificial Sequence: Synthetic oligonucleotide
gaguucagcuacucucacc

SEQ ID NO: 1866936 - RNA, 19 nt, Artificial Sequence
  Description of Artificial Sequence: Synthetic oligonucleotide
aggguaagguccauccugg

SEQ ID NO: 1866937 - RNA, 19 nt, Artificial Sequence
  Description of Artificial Sequence: Synthetic oligonucleotide
ucuggaggugcuuggcgug

SEQ ID NO: 1866938 - RNA, 19 nt, Artificial Sequence
  Description of Artificial Sequence: Synthetic oligonucleotide
uaagguccauccugggaca

SEQ ID NO: 1866939 - RNA, 19 nt, Artificial Sequence
  Description of Artificial Sequence: Synthetic oligonucleotide
ggacauggaguucagcuac

SEQ ID NO: 1866940 - RNA, 19 nt, Artificial Sequence
  Description of Artificial Sequence: Synthetic oligonucleotide
gagcagucuggacuggaug

SEQ ID NO: 1866941 - RNA, 19 nt, Artificial Sequence
  Description of Artificial Sequence: Synthetic oligonucleotide
uucccucucacagagcccu

SEQ ID NO: 1866942 - RNA, 19 nt, Artificial Sequence
  Description of Artificial Sequence: Synthetic oligonucleotide
ugaaucugaugagaccgga

SEQ ID NO: 1866943 - RNA, 19 nt, Artificial Sequence
  Description of Artificial Sequence: Synthetic oligonucleotide
aggacacucaggcacuccu

SEQ ID NO: 1866944 - RNA, 19 nt, Artificial Sequence
  Description of Artificial Sequence: Synthetic oligonucleotide
auggagugcguaaccgugc

SEQ ID NO: 1866945 - RNA, 19 nt, Artificial Sequence
  Description of Artificial Sequence: Synthetic oligonucleotide
auuccuuccccugaagggu

SEQ ID NO: 1866946 - RNA, 19 nt, Artificial Sequence
  Description of Artificial Sequence: Synthetic oligonucleotide
ggaaucugacucugaauug

SEQ ID NO: 1866947 - RNA, 19 nt, Artificial Sequence
  Description of Artificial Sequence: Synthetic oligonucleotide
gagugcguaaccgugcuga

SEQ ID NO: 1866948 - RNA, 19 nt, Artificial Sequence
  Description of Artificial Sequence: Synthetic oligonucleotide
ccaaccuucugacuugugg

SEQ ID NO: 1866949 - RNA, 19 nt, Artificial Sequence
  Description of Artificial Sequence: Synthetic oligonucleotide
ucuucuuggaagagcgguu

SEQ ID NO: 1866950 - RNA, 19 nt, Artificial Sequence
  Description of Artificial Sequence: Synthetic oligonucleotide
acaggcucuuguauaacag

SEQ ID NO: 1866951 - RNA, 19 nt, Artificial Sequence
  Description of Artificial Sequence: Synthetic oligonucleotide
acgcuuuagucucaccaca

SEQ ID NO: 1866952 - RNA, 19 nt, Artificial Sequence
  Description of Artificial Sequence: Synthetic oligonucleotide
gcauaugagaccagucugg

SEQ ID NO: 1866953 - RNA, 19 nt, Artificial Sequence
  Description of Artificial Sequence: Synthetic oligonucleotide
acgagacccaaccuucuga

SEQ ID NO: 1866954 - RNA, 19 nt, Artificial Sequence
  Description of Artificial Sequence: Synthetic oligonucleotide
gcgacaggaacccagcagc

SEQ ID NO: 1866955 - RNA, 19 nt, Artificial Sequence
  Description of Artificial Sequence: Synthetic oligonucleotide
aggcacuccuugugggagc

SEQ ID NO: 1866956 - RNA, 19 nt, Artificial Sequence
  Description of Artificial Sequence: Synthetic oligonucleotide
ucaugccaagugcuuccag

SEQ ID NO: 1866957 - RNA, 19 nt, Artificial Sequence
  Description of Artificial Sequence: Synthetic oligonucleotide
ugcuucagugccacaggcu

SEQ ID NO: 1866958 - RNA, 19 nt, Artificial Sequence
  Description of Artificial Sequence: Synthetic oligonucleotide
agcaggagaccucuucacu

SEQ ID NO: 1866959 - RNA, 19 nt, Artificial Sequence
  Description of Artificial Sequence: Synthetic oligonucleotide
ucgcggucgaccugaacug

SEQ ID NO: 1866960 - RNA, 19 nt, Artificial Sequence
  Description of Artificial Sequence: Synthetic oligonucleotide
uggagugcguaaccgugcu

SEQ ID NO: 1866961 - RNA, 19 nt, Artificial Sequence
  Description of Artificial Sequence: Synthetic oligonucleotide
aguuucgaugggcaccaca

SEQ ID NO: 1866962 - RNA, 19 nt, Artificial Sequence
  Description of Artificial Sequence: Synthetic oligonucleotide
ugaauugaagcgagaccuu

SEQ ID NO: 1866963 - RNA, 19 nt, Artificial Sequence
  Description of Artificial Sequence: Synthetic oligonucleotide
uauuggcgacauccaagga

SEQ ID NO: 1866964 - RNA, 19 nt, Artificial Sequence
  Description of Artificial Sequence: Synthetic oligonucleotide
ugaguccagagcucugcga

SEQ ID NO: 1866965 - RNA, 19 nt, Artificial Sequence
  Description of Artificial Sequence: Synthetic oligonucleotide
gguaccagcauccgccugc

SEQ ID NO: 1866966 - RNA, 19 nt, Artificial Sequence
  Description of Artificial Sequence: Synthetic oligonucleotide
caacaacauaggucccugg

SEQ ID NO: 1866967 - RNA, 19 nt, Artificial Sequence
  Description of Artificial Sequence: Synthetic oligonucleotide
cacuuugguaaagucuagc

SEQ ID NO: 1866968 - RNA, 19 nt, Artificial Sequence
  Description of Artificial Sequence: Synthetic oligonucleotide
ucagggcaaccucggaaga

SEQ ID NO: 1866969 - RNA, 19 nt, Artificial Sequence
  Description of Artificial Sequence: Synthetic oligonucleotide
cuucucugguaccagcauc

SEQ ID NO: 1866970 - RNA, 19 nt, Artificial Sequence
  Description of Artificial Sequence: Synthetic oligonucleotide
cuccucuagucucaucuug

SEQ ID NO: 1866971 - RNA, 19 nt, Artificial Sequence
  Description of Artificial Sequence: Synthetic oligonucleotide
agcuacucucaccaucacu

SEQ ID NO: 1866972 - RNA, 19 nt, Artificial Sequence
  Description of Artificial Sequence: Synthetic oligonucleotide
ucgaccugaacugcugaug

SEQ ID NO: 1866973 - RNA, 19 nt, Artificial Sequence
  Description of Artificial Sequence: Synthetic oligonucleotide
ugccccgcauaugagacca

SEQ ID NO: 1866974 - RNA, 19 nt, Artificial Sequence
  Description of Artificial Sequence: Synthetic oligonucleotide
augagaccggaacuucgug

SEQ ID NO: 1866975 - RNA, 19 nt, Artificial Sequence
  Description of Artificial Sequence: Synthetic oligonucleotide
uuggcguggccucuccucu

SEQ ID NO: 1866976 - RNA, 19 nt, Artificial Sequence
  Description of Artificial Sequence: Synthetic oligonucleotide
ucgugccuugccuuucugc

SEQ ID NO: 1866977 - RNA, 19 nt, Artificial Sequence
  Description of Artificial Sequence: Synthetic oligonucleotide
ugcugaugauauuggcgac

SEQ ID NO: 1866978 - RNA, 19 nt, Artificial Sequence
  Description of Artificial Sequence: Synthetic oligonucleotide
cugucguacaauggagugc

SEQ ID NO: 1866979 - RNA, 19 nt, Artificial Sequence
  Description of Artificial Sequence: Synthetic oligonucleotide
augccccgcauaugagacc

SEQ ID NO: 1866980 - RNA, 19 nt, Artificial Sequence
  Description of Artificial Sequence: Synthetic oligonucleotide
guucaaggugaucccggcc

SEQ ID NO: 1866981 - RNA, 19 nt, Artificial Sequence
  Description of Artificial Sequence: Synthetic oligonucleotide
acuuguggguucuggacuu

SEQ ID NO: 1866982 - RNA, 19 nt, Artificial Sequence
  Description of Artificial Sequence: Synthetic oligonucleotide
cgaauauaacgcuuuaguc

SEQ ID NO: 1866983 - RNA, 19 nt, Artificial Sequence
  Description of Artificial Sequence: Synthetic oligonucleotide
aacuucgugccuugccuuu

SEQ ID NO: 1866984 - RNA, 19 nt, Artificial Sequence
  Description of Artificial Sequence: Synthetic oligonucleotide
uccgucuucgcggucgacc

SEQ ID NO: 1866985 - RNA, 19 nt, Artificial Sequence
  Description of Artificial Sequence: Synthetic oligonucleotide
aaucugacucugaauugaa

SEQ ID NO: 1866986 - RNA, 19 nt, Artificial Sequence
  Description of Artificial Sequence: Synthetic oligonucleotide
gacgagacccaaccuucug

SEQ ID NO: 1866987 - RNA, 19 nt, Artificial Sequence
  Description of Artificial Sequence: Synthetic oligonucleotide
gagcaggagaccucuucac

SEQ ID NO: 1866988 - RNA, 19 nt, Artificial Sequence
  Description of Artificial Sequence: Synthetic oligonucleotide
agggcaaccucggaagaag

SEQ ID NO: 1866989 - RNA, 19 nt, Artificial Sequence
  Description of Artificial Sequence: Synthetic oligonucleotide
cuggacuggaugauguaga

SEQ ID NO: 1866990 - RNA, 19 nt, Artificial Sequence
  Description of Artificial Sequence: Synthetic oligonucleotide
gaggucagggcaaccucgg

SEQ ID NO: 1866991 - RNA, 19 nt, Artificial Sequence
  Description of Artificial Sequence: Synthetic oligonucleotide
aauugaagcgagaccuuuu

SEQ ID NO: 1866992 - RNA, 19 nt, Artificial Sequence
  Description of Artificial Sequence: Synthetic oligonucleotide
ccgagagucgcucacuucc

SEQ ID NO: 1866993 - RNA, 19 nt, Artificial Sequence
  Description of Artificial Sequence: Synthetic oligonucleotide
ugacgagacccaaccuucu

SEQ ID NO: 1866994 - RNA, 19 nt, Artificial Sequence
  Description of Artificial Sequence: Synthetic oligonucleotide
agugcguaaccgugcugag

SEQ ID NO: 1866995 - RNA, 19 nt, Artificial Sequence
  Description of Artificial Sequence: Synthetic oligonucleotide
augguccucucuucgguga

SEQ ID NO: 1866996 - RNA, 19 nt, Artificial Sequence
  Description of Artificial Sequence: Synthetic oligonucleotide
guuucgaugggcaccacaa

SEQ ID NO: 1866997 - RNA, 19 nt, Artificial Sequence
  Description of Artificial Sequence: Synthetic oligonucleotide
caacugcuuuuauuuuaag

SEQ ID NO: 1866998 - RNA, 19 nt, Artificial Sequence
  Description of Artificial Sequence: Synthetic oligonucleotide
guaguuucgaugggcacca

SEQ ID NO: 1866999 - RNA, 19 nt, Artificial Sequence
  Description of Artificial Sequence: Synthetic oligonucleotide
cuuggaagagcgguucuuc

SEQ ID NO: 1867000 - RNA, 19 nt, Artificial Sequence
  Description of Artificial Sequence: Synthetic oligonucleotide
ucggaagaagcugcgcgug

SEQ ID NO: 1867001 - RNA, 19 nt, Artificial Sequence
  Description of Artificial Sequence: Synthetic oligonucleotide
gacuuguggguucuggacu

SEQ ID NO: 1867002 - RNA, 19 nt, Artificial Sequence
  Description of Artificial Sequence: Synthetic oligonucleotide
uacaaccaggucuguuugu

SEQ ID NO: 1867003 - RNA, 19 nt, Artificial Sequence
  Description of Artificial Sequence: Synthetic oligonucleotide
ugagcagucuggacuggau

SEQ ID NO: 1867004 - RNA, 19 nt, Artificial Sequence
  Description of Artificial Sequence: Synthetic oligonucleotide
guacaauggagugcguaac

SEQ ID NO: 1867005 - RNA, 19 nt, Artificial Sequence
  Description of Artificial Sequence: Synthetic oligonucleotide
uucggugacgagacccaac

SEQ ID NO: 1867006 - RNA, 19 nt, Artificial Sequence
  Description of Artificial Sequence: Synthetic oligonucleotide
cugcgauaaagcuccccug

SEQ ID NO: 1867007 - RNA, 19 nt, Artificial Sequence
  Description of Artificial Sequence: Synthetic oligonucleotide
cacucaggcacuccuugug

SEQ ID NO: 1867008 - RNA, 19 nt, Artificial Sequence
  Description of Artificial Sequence: Synthetic oligonucleotide
ugguaaagucuagcuuucc

SEQ ID NO: 1867009 - RNA, 19 nt, Artificial Sequence
  Description of Artificial Sequence: Synthetic oligonucleotide
acaggguaagguccauccu

SEQ ID NO: 1867010 - RNA, 19 nt, Artificial Sequence
  Description of Artificial Sequence: Synthetic oligonucleotide
agugccacaggcucuugua

SEQ ID NO: 1867011 - RNA, 19 nt, Artificial Sequence
  Description of Artificial Sequence: Synthetic oligonucleotide
ccucggaagaagcugcgcg

SEQ ID NO: 1867012 - RNA, 19 nt, Artificial Sequence
  Description of Artificial Sequence: Synthetic oligonucleotide
cuuggcguggccucuccuc

SEQ ID NO: 1867013 - RNA, 19 nt, Artificial Sequence
  Description of Artificial Sequence: Synthetic oligonucleotide
cgacacuucuccaaggaag

SEQ ID NO: 1867014 - RNA, 19 nt, Artificial Sequence
  Description of Artificial Sequence: Synthetic oligonucleotide
accucuucacuuugguaaa

SEQ ID NO: 1867015 - RNA, 19 nt, Artificial Sequence
  Description of Artificial Sequence: Synthetic oligonucleotide
augauauuggcgacaucca

SEQ ID NO: 1867016 - RNA, 19 nt, Artificial Sequence
  Description of Artificial Sequence: Synthetic oligonucleotide
uguggguucuggacuugaa

SEQ ID NO: 1867017 - RNA, 19 nt, Artificial Sequence
  Description of Artificial Sequence: Synthetic oligonucleotide
agucgcucacuucccucuc

SEQ ID NO: 1867018 - RNA, 19 nt, Artificial Sequence
  Description of Artificial Sequence: Synthetic oligonucleotide
ugccacaggcucuuguaua

SEQ ID NO: 1867019 - RNA, 19 nt, Artificial Sequence
  Description of Artificial Sequence: Synthetic oligonucleotide
cucugguaccagcauccgc

SEQ ID NO: 1867020 - RNA, 19 nt, Artificial Sequence
  Description of Artificial Sequence: Synthetic oligonucleotide
ucgcucacuucccucucac

SEQ ID NO: 1867021 - RNA, 19 nt, Artificial Sequence
  Description of Artificial Sequence: Synthetic oligonucleotide
accucggaagaagcugcgc

SEQ ID NO: 1867022 - RNA, 19 nt, Artificial Sequence
  Description of Artificial Sequence: Synthetic oligonucleotide
cuucccucucacagagccc

SEQ ID NO: 1867023 - RNA, 19 nt, Artificial Sequence
  Description of Artificial Sequence: Synthetic oligonucleotide
uccaggcauuccgucuucg

SEQ ID NO: 1867024 - RNA, 19 nt, Artificial Sequence
  Description of Artificial Sequence: Synthetic oligonucleotide
gugacgagacccaaccuuc

SEQ ID NO: 1867025 - RNA, 19 nt, Artificial Sequence
  Description of Artificial Sequence: Synthetic oligonucleotide
gagcucugcgauaaagcuc

SEQ ID NO: 1867026 - RNA, 19 nt, Artificial Sequence
  Description of Artificial Sequence: Synthetic oligonucleotide
ucguacaauggagugcgua

SEQ ID NO: 1867027 - RNA, 19 nt, Artificial Sequence
  Description of Artificial Sequence: Synthetic oligonucleotide
gcgauaaagcuccccuggg

SEQ ID NO: 1867028 - RNA, 19 nt, Artificial Sequence
  Description of Artificial Sequence: Synthetic oligonucleotide
cagggcccgacacuucucc

SEQ ID NO: 1867029 - RNA, 19 nt, Artificial Sequence
  Description of Artificial Sequence: Synthetic oligonucleotide
guaaccgugcugaggucag

SEQ ID NO: 1867030 - RNA, 19 nt, Artificial Sequence
  Description of Artificial Sequence: Synthetic oligonucleotide
cuucaacgccugcuucucc

SEQ ID NO: 1867031 - RNA, 19 nt, Artificial Sequence
  Description of Artificial Sequence: Synthetic oligonucleotide
ugccaagugcuuccagcuc

SEQ ID NO: 1867032 - RNA, 19 nt, Artificial Sequence
  Description of Artificial Sequence: Synthetic oligonucleotide
uggcgacauccaaggaagc

SEQ ID NO: 1867033 - RNA, 19 nt, Artificial Sequence
  Description of Artificial Sequence: Synthetic oligonucleotide
cucucacagagcccucccc

SEQ ID NO: 1867034 - RNA, 19 nt, Artificial Sequence
  Description of Artificial Sequence: Synthetic oligonucleotide
accagucuggaggugcuug

SEQ ID NO: 1867035 - RNA, 19 nt, Artificial Sequence
  Description of Artificial Sequence: Synthetic oligonucleotide
guccugagcagucuggacu

SEQ ID NO: 1867036 - RNA, 19 nt, Artificial Sequence
  Description of Artificial Sequence: Synthetic oligonucleotide
ggcaccacaagcccgaaua

SEQ ID NO: 1867037 - RNA, 19 nt, Artificial Sequence
  Description of Artificial Sequence: Synthetic oligonucleotide
cauaugagaccagucugga

SEQ ID NO: 1867038 - RNA, 19 nt, Artificial Sequence
  Description of Artificial Sequence: Synthetic oligonucleotide
gauugcccuucaugccaag

SEQ ID NO: 1867039 - RNA, 19 nt, Artificial Sequence
  Description of Artificial Sequence: Synthetic oligonucleotide
agucucaccacagcuggau

SEQ ID NO: 1867040 - RNA, 19 nt, Artificial Sequence
  Description of Artificial Sequence: Synthetic oligonucleotide
gaguccagagcucugcgau

SEQ ID NO: 1867041 - RNA, 19 nt, Artificial Sequence
  Description of Artificial Sequence: Synthetic oligonucleotide
agaccucuucacuuuggua

SEQ ID NO: 1867042 - RNA, 19 nt, Artificial Sequence
  Description of Artificial Sequence: Synthetic oligonucleotide
acuucgugccuugccuuuc

SEQ ID NO: 1867043 - RNA, 19 nt, Artificial Sequence
  Description of Artificial Sequence: Synthetic oligonucleotide
uucgugccuugccuuucug

SEQ ID NO: 1867044 - RNA, 19 nt, Artificial Sequence
  Description of Artificial Sequence: Synthetic oligonucleotide
ucucuucggugacgagacc

SEQ ID NO: 1867045 - RNA, 19 nt, Artificial Sequence
  Description of Artificial Sequence: Synthetic oligonucleotide
gguaagguccauccuggga

SEQ ID NO: 1867046 - RNA, 19 nt, Artificial Sequence
  Description of Artificial Sequence: Synthetic oligonucleotide
uagucucaccacagcugga

SEQ ID NO: 1867047 - RNA, 19 nt, Artificial Sequence
  Description of Artificial Sequence: Synthetic oligonucleotide
ccaccagccgcuucaacgc

SEQ ID NO: 1867048 - RNA, 19 nt, Artificial Sequence
  Description of Artificial Sequence: Synthetic oligonucleotide
ugaugauauuggcgacauc

SEQ ID NO: 1867049 - RNA, 19 nt, Artificial Sequence
  Description of Artificial Sequence: Synthetic oligonucleotide
aaggugaucccggcccaca

SEQ ID NO: 1867050 - RNA, 19 nt, Artificial Sequence
  Description of Artificial Sequence: Synthetic oligonucleotide
ucaacgccugcuucuccuc

SEQ ID NO: 1867051 - RNA, 19 nt, Artificial Sequence
  Description of Artificial Sequence: Synthetic oligonucleotide
gcaaccucggaagaagcug

SEQ ID NO: 1867052 - RNA, 19 nt, Artificial Sequence
  Description of Artificial Sequence: Synthetic oligonucleotide
ugguaccagcauccgccug

SEQ ID NO: 1867053 - RNA, 19 nt, Artificial Sequence
  Description of Artificial Sequence: Synthetic oligonucleotide
gcucucuccugcccgagag

SEQ ID NO: 1867054 - RNA, 19 nt, Artificial Sequence
  Description of Artificial Sequence: Synthetic oligonucleotide
agagagcaugaaauugaga

SEQ ID NO: 1867055 - RNA, 19 nt, Artificial Sequence
  Description of Artificial Sequence: Synthetic oligonucleotide
gcucuuguauaacagggua

SEQ ID NO: 1867056 - RNA, 19 nt, Artificial Sequence
  Description of Artificial Sequence: Synthetic oligonucleotide
cugggucacugcagggagc

SEQ ID NO: 1867057 - RNA, 19 nt, Artificial Sequence
  Description of Artificial Sequence: Synthetic oligonucleotide
accggaacuucgugccuug

SEQ ID NO: 1867058 - RNA, 19 nt, Artificial Sequence
  Description of Artificial Sequence: Synthetic oligonucleotide
gugcguaaccgugcugagg

SEQ ID NO: 1867059 - RNA, 19 nt, Artificial Sequence
  Description of Artificial Sequence: Synthetic oligonucleotide
cgugccuugccuuucugcc

SEQ ID NO: 1867060 - RNA, 19 nt, Artificial Sequence
  Description of Artificial Sequence: Synthetic oligonucleotide
caccuuagagagcaugaaa

SEQ ID NO: 1867061 - RNA, 19 nt, Artificial Sequence
  Description of Artificial Sequence: Synthetic oligonucleotide
aagcccgaauauaacgcuu

SEQ ID NO: 1867062 - RNA, 19 nt, Artificial Sequence
  Description of Artificial Sequence: Synthetic oligonucleotide
accccaaacccaccuuaga

SEQ ID NO: 1867063 - RNA, 19 nt, Artificial Sequence
  Description of Artificial Sequence: Synthetic oligonucleotide
cacuccuugugggagcgac

SEQ ID NO: 1867064 - RNA, 19 nt, Artificial Sequence
  Description of Artificial Sequence: Synthetic oligonucleotide
acccaccuuagagagcaug

SEQ ID NO: 1867065 - RNA, 19 nt, Artificial Sequence
  Description of Artificial Sequence: Synthetic oligonucleotide
cacugcugaugaugccccg

SEQ ID NO: 1867066 - RNA, 19 nt, Artificial Sequence
  Description of Artificial Sequence: Synthetic oligonucleotide
uugcucucaacugcuuuua

SEQ ID NO: 1867067 - RNA, 19 nt, Artificial Sequence
  Description of Artificial Sequence: Synthetic oligonucleotide
ugcuuggcguggccucucc

SEQ ID NO: 1867068 - RNA, 19 nt, Artificial Sequence
  Description of Artificial Sequence: Synthetic oligonucleotide
uaacaggguaagguccauc

SEQ ID NO: 1867069 - RNA, 19 nt, Artificial Sequence
  Description of Artificial Sequence: Synthetic oligonucleotide
gagucgcucacuucccucu

SEQ ID NO: 1867070 - RNA, 19 nt, Artificial Sequence
  Description of Artificial Sequence: Synthetic oligonucleotide
gaugagaccggaacuucgu

SEQ ID NO: 1867071 - RNA, 19 nt, Artificial Sequence
  Description of Artificial Sequence: Synthetic oligonucleotide
uccucagguucaaggugau

SEQ ID NO: 1867072 - RNA, 19 nt, Artificial Sequence
  Description of Artificial Sequence: Synthetic oligonucleotide
ugcucucuccugcccgaga

SEQ ID NO: 1867073 - RNA, 19 nt, Artificial Sequence
  Description of Artificial Sequence: Synthetic oligonucleotide
ggcgacauccaaggaagcc

SEQ ID NO: 1867074 - RNA, 19 nt, Artificial Sequence
  Description of Artificial Sequence: Synthetic oligonucleotide
cgauaaagcuccccugggg

SEQ ID NO: 1867075 - RNA, 19 nt, Artificial Sequence
  Description of Artificial Sequence: Synthetic oligonucleotide
cucugcgauaaagcucccc

SEQ ID NO: 1867076 - RNA, 19 nt, Artificial Sequence
  Description of Artificial Sequence: Synthetic oligonucleotide
ggaacuucgugccuugccu

SEQ ID NO: 1867077 - RNA, 19 nt, Artificial Sequence
  Description of Artificial Sequence: Synthetic oligonucleotide
auauaacgcuuuagucuca

SEQ ID NO: 1867078 - RNA, 19 nt, Artificial Sequence
  Description of Artificial Sequence: Synthetic oligonucleotide
guggccucuccucuucuga

SEQ ID NO: 1867079 - RNA, 19 nt, Artificial Sequence
  Description of Artificial Sequence: Synthetic oligonucleotide
agaccggaacuucgugccu

SEQ ID NO: 1867080 - RNA, 19 nt, Artificial Sequence
  Description of Artificial Sequence: Synthetic oligonucleotide
ggacuugaaucugaugaga

SEQ ID NO: 1867081 - RNA, 19 nt, Artificial Sequence
  Description of Artificial Sequence: Synthetic oligonucleotide
caagcccgaauauaacgcu

SEQ ID NO: 1867082 - RNA, 19 nt, Artificial Sequence
  Description of Artificial Sequence: Synthetic oligonucleotide
augaugccccgcauaugag

SEQ ID NO: 1867083 - RNA, 19 nt, Artificial Sequence
  Description of Artificial Sequence: Synthetic oligonucleotide
gggagcgacaggaacccag

SEQ ID NO: 1867084 - RNA, 19 nt, Artificial Sequence
  Description of Artificial Sequence: Synthetic oligonucleotide
auuccgucuucgcggucga

SEQ ID NO: 1867085 - RNA, 19 nt, Artificial Sequence
  Description of Artificial Sequence: Synthetic oligonucleotide
ggguaagguccauccuggg

SEQ ID NO: 1867086 - RNA, 19 nt, Artificial Sequence
  Description of Artificial Sequence: Synthetic oligonucleotide
ugagaccagucuggaggug

SEQ ID NO: 1867087 - RNA, 19 nt, Artificial Sequence
  Description of Artificial Sequence: Synthetic oligonucleotide
ggguucuggacuugaaucu

SEQ ID NO: 1867088 - RNA, 19 nt, Artificial Sequence
  Description of Artificial Sequence: Synthetic oligonucleotide
caccagccgcuucaacgcc

SEQ ID NO: 1867089 - RNA, 19 nt, Artificial Sequence
  Description of Artificial Sequence: Synthetic oligonucleotide
gaauugaagcgagaccuuu

SEQ ID NO: 1867090 - RNA, 19 nt, Artificial Sequence
  Description of Artificial Sequence: Synthetic oligonucleotide
uccuuccccugaaggguuc

SEQ ID NO: 1867091 - RNA, 19 nt, Artificial Sequence
  Description of Artificial Sequence: Synthetic oligonucleotide
cccaaacccaccuuagaga

SEQ ID NO: 1867092 - RNA, 19 nt, Artificial Sequence
  Description of Artificial Sequence: Synthetic oligonucleotide
ccgaauauaacgcuuuagu

SEQ ID NO: 1867093 - RNA, 19 nt, Artificial Sequence
  Description of Artificial Sequence: Synthetic oligonucleotide
ggaguucagcuacucucac

SEQ ID NO: 1867094 - RNA, 19 nt, Artificial Sequence
  Description of Artificial Sequence: Synthetic oligonucleotide
gaucccggcccacaugggu

SEQ ID NO: 1867095 - RNA, 19 nt, Artificial Sequence
  Description of Artificial Sequence: Synthetic oligonucleotide
cucgucacugcucuccucu

SEQ ID NO: 1867096 - RNA, 19 nt, Artificial Sequence
  Description of Artificial Sequence: Synthetic oligonucleotide
aguccagagcucugcgaua

SEQ ID NO: 1867097 - RNA, 19 nt, Artificial Sequence
  Description of Artificial Sequence: Synthetic oligonucleotide
caauggagugcguaaccgu

SEQ ID NO: 1867098 - RNA, 19 nt, Artificial Sequence
  Description of Artificial Sequence: Synthetic oligonucleotide
cugaugaugccccgcauau

SEQ ID NO: 1867099 - RNA, 19 nt, Artificial Sequence
  Description of Artificial Sequence: Synthetic oligonucleotide
gucuucgcggucgaccuga

SEQ ID NO: 1867100 - RNA, 19 nt, Artificial Sequence
  Description of Artificial Sequence: Synthetic oligonucleotide
ggacuggaugauguagagc

SEQ ID NO: 1867101 - RNA, 19 nt, Artificial Sequence
  Description of Artificial Sequence: Synthetic oligonucleotide
guccagagcucugcgauaa

SEQ ID NO: 1867102 - RNA, 19 nt, Artificial Sequence
  Description of Artificial Sequence: Synthetic oligonucleotide
ccagagcucugcgauaaag

SEQ ID NO: 1867103 - RNA, 19 nt, Artificial Sequence
  Description of Artificial Sequence: Synthetic oligonucleotide
ggucagggcaaccucggaa

SEQ ID NO: 1867104 - RNA, 19 nt, Artificial Sequence
  Description of Artificial Sequence: Synthetic oligonucleotide
gcgacauccaaggaagcca

SEQ ID NO: 1867105 - RNA, 19 nt, Artificial Sequence
  Description of Artificial Sequence: Synthetic oligonucleotide
ccuucugacuuguggguuc

SEQ ID NO: 1867106 - RNA, 19 nt, Artificial Sequence
  Description of Artificial Sequence: Synthetic oligonucleotide
ccaaggaagccaccucagc

SEQ ID NO: 1867107 - RNA, 19 nt, Artificial Sequence
  Description of Artificial Sequence: Synthetic oligonucleotide
aggugaucccggcccacau

SEQ ID NO: 1867108 - RNA, 19 nt, Artificial Sequence
  Description of Artificial Sequence: Synthetic oligonucleotide
cacuucccucucacagagc

SEQ ID NO: 1867109 - RNA, 19 nt, Artificial Sequence
  Description of Artificial Sequence: Synthetic oligonucleotide
ggagcgacaggaacccagc

SEQ ID NO: 1867110 - RNA, 19 nt, Artificial Sequence
  Description of Artificial Sequence: Synthetic oligonucleotide
ccuugugggagcgacagga

SEQ ID NO: 1867111 - RNA, 19 nt, Artificial Sequence
  Description of Artificial Sequence: Synthetic oligonucleotide
ggaacccagcagcuucuug

SEQ ID NO: 1867112 - RNA, 19 nt, Artificial Sequence
  Description of Artificial Sequence: Synthetic oligonucleotide
agcccgaauauaacgcuuu

SEQ ID NO: 1867113 - RNA, 19 nt, Artificial Sequence
  Description of Artificial Sequence: Synthetic oligonucleotide
cuucagggcccgacacuuc

SEQ ID NO: 1867114 - RNA, 19 nt, Artificial Sequence
  Description of Artificial Sequence: Synthetic oligonucleotide
cuugugggagcgacaggaa

SEQ ID NO: 1867115 - RNA, 19 nt, Artificial Sequence
  Description of Artificial Sequence: Synthetic oligonucleotide
cccgaauauaacgcuuuag

SEQ ID NO: 1867116 - RNA, 19 nt, Artificial Sequence
  Description of Artificial Sequence: Synthetic oligonucleotide
gggagcaggagaccucuuc

SEQ ID NO: 1867117 - RNA, 19 nt, Artificial Sequence
  Description of Artificial Sequence: Synthetic oligonucleotide
accuucugacuuguggguu

SEQ ID NO: 1867118 - RNA, 19 nt, Artificial Sequence
  Description of Artificial Sequence: Synthetic oligonucleotide
cucggaagaagcugcgcgu

SEQ ID NO: 1867119 - RNA, 19 nt, Artificial Sequence
  Description of Artificial Sequence: Synthetic oligonucleotide
gugcuuccagcucagcccu

SEQ ID NO: 1867120 - RNA, 19 nt, Artificial Sequence
  Description of Artificial Sequence: Synthetic oligonucleotide
gaacuucgugccuugccuu

SEQ ID NO: 1867121 - RNA, 19 nt, Artificial Sequence
  Description of Artificial Sequence: Synthetic oligonucleotide
aggucagggcaaccucgga

SEQ ID NO: 1867122 - RNA, 19 nt, Artificial Sequence
  Description of Artificial Sequence: Synthetic oligonucleotide
cgagacccaaccuucugac

SEQ ID NO: 1867123 - RNA, 19 nt, Artificial Sequence
  Description of Artificial Sequence: Synthetic oligonucleotide
gccucuccucuucugaguc

SEQ ID NO: 1867124 - RNA, 19 nt, Artificial Sequence
  Description of Artificial Sequence: Synthetic oligonucleotide
acucugaauugaagcgaga

SEQ ID NO: 1867125 - RNA, 19 nt, Artificial Sequence
  Description of Artificial Sequence: Synthetic oligonucleotide
ccaacaacauaggucccug

SEQ ID NO: 1867126 - RNA, 19 nt, Artificial Sequence
  Description of Artificial Sequence: Synthetic oligonucleotide
cauggaguucagcuacucu

SEQ ID NO: 1867127 - RNA, 19 nt, Artificial Sequence
  Description of Artificial Sequence: Synthetic oligonucleotide
gccacaggcucuuguauaa

SEQ ID NO: 1867128 - RNA, 19 nt, Artificial Sequence
  Description of Artificial Sequence: Synthetic oligonucleotide
gccuugccuuucuuggagc

SEQ ID NO: 1867129 - RNA, 19 nt, Artificial Sequence
  Description of Artificial Sequence: Synthetic oligonucleotide
guccucucuucggugacga

SEQ ID NO: 1867130 - RNA, 19 nt, Artificial Sequence
  Description of Artificial Sequence: Synthetic oligonucleotide
gagagucgcucacuucccu

SEQ ID NO: 1867131 - RNA, 19 nt, Artificial Sequence
  Description of Artificial Sequence: Synthetic oligonucleotide
ucgucacugcucuccucua

SEQ ID NO: 1867132 - RNA, 19 nt, Artificial Sequence
  Description of Artificial Sequence: Synthetic oligonucleotide
gucgcucacuucccucuca

SEQ ID NO: 1867133 - RNA, 19 nt, Artificial Sequence
  Description of Artificial Sequence: Synthetic oligonucleotide
ggucgaccugaacugcuga

SEQ ID NO: 1867134 - RNA, 19 nt, Artificial Sequence
  Description of Artificial Sequence: Synthetic oligonucleotide
gcccgacacuucuccaagg

SEQ ID NO: 1867135 - RNA, 19 nt, Artificial Sequence
  Description of Artificial Sequence: Synthetic oligonucleotide
cccaccuuagagagcauga

SEQ ID NO: 1867136 - RNA, 19 nt, Artificial Sequence
  Description of Artificial Sequence: Synthetic oligonucleotide
guuccaggcauuccgucuu

SEQ ID NO: 1867137 - RNA, 19 nt, Artificial Sequence
  Description of Artificial Sequence: Synthetic oligonucleotide
gguuccaggcauuccgucu

SEQ ID NO: 1867138 - RNA, 19 nt, Artificial Sequence
  Description of Artificial Sequence: Synthetic oligonucleotide
ucuucgcggucgaccugaa

SEQ ID NO: 1867139 - RNA, 19 nt, Artificial Sequence
  Description of Artificial Sequence: Synthetic oligonucleotide
cagcuacucucaccaucac

SEQ ID NO: 1867140 - RNA, 19 nt, Artificial Sequence
  Description of Artificial Sequence: Synthetic oligonucleotide
gguccucucuucggugacg

SEQ ID NO: 1867141 - RNA, 19 nt, Artificial Sequence
  Description of Artificial Sequence: Synthetic oligonucleotide
acccaaccuucugacuugu

SEQ ID NO: 1867142 - RNA, 19 nt, Artificial Sequence
  Description of Artificial Sequence: Synthetic oligonucleotide
ugcccgagagucgcucacu

SEQ ID NO: 1867143 - RNA, 19 nt, Artificial Sequence
  Description of Artificial Sequence: Synthetic oligonucleotide
gcugaugaugccccgcaua

SEQ ID NO: 1867144 - RNA, 19 nt, Artificial Sequence
  Description of Artificial Sequence: Synthetic oligonucleotide
uccugcccgagagucgcuc

SEQ ID NO: 1867145 - RNA, 19 nt, Artificial Sequence
  Description of Artificial Sequence: Synthetic oligonucleotide
cccgcauaugagaccaguc

SEQ ID NO: 1867146 - RNA, 19 nt, Artificial Sequence
  Description of Artificial Sequence: Synthetic oligonucleotide
cugugccaacaacauaggu

SEQ ID NO: 1867147 - RNA, 19 nt, Artificial Sequence
  Description of Artificial Sequence: Synthetic oligonucleotide
cuucgcggucgaccugaac

SEQ ID NO: 1867148 - RNA, 19 nt, Artificial Sequence
  Description of Artificial Sequence: Synthetic oligonucleotide
ggugcucucuccugcccga

SEQ ID NO: 1867149 - RNA, 19 nt, Artificial Sequence
  Description of Artificial Sequence: Synthetic oligonucleotide
ccucucacagagcccuccc

SEQ ID NO: 1867150 - RNA, 19 nt, Artificial Sequence
  Description of Artificial Sequence: Synthetic oligonucleotide
ggaugguccucucuucggu

SEQ ID NO: 1867151 - RNA, 19 nt, Artificial Sequence
  Description of Artificial Sequence: Synthetic oligonucleotide
cgagagucgcucacuuccc

SEQ ID NO: 1867152 - RNA, 19 nt, Artificial Sequence
  Description of Artificial Sequence: Synthetic oligonucleotide
gacauggaguucagcuacu

SEQ ID NO: 1867153 - RNA, 19 nt, Artificial Sequence
  Description of Artificial Sequence: Synthetic oligonucleotide
guaccagcauccgccugca

SEQ ID NO: 1867154 - RNA, 19 nt, Artificial Sequence
  Description of Artificial Sequence: Synthetic oligonucleotide
ugggagcgacaggaaccca

SEQ ID NO: 1867155 - RNA, 19 nt, Artificial Sequence
  Description of Artificial Sequence: Synthetic oligonucleotide
gcuucaacgccugcuucuc

SEQ ID NO: 1867156 - RNA, 19 nt, Artificial Sequence
  Description of Artificial Sequence: Synthetic oligonucleotide
gcaugaaauugagaacugu

SEQ ID NO: 1867157 - RNA, 19 nt, Artificial Sequence
  Description of Artificial Sequence: Synthetic oligonucleotide
cagagcccuccccuuccuc

SEQ ID NO: 1867158 - RNA, 19 nt, Artificial Sequence
  Description of Artificial Sequence: Synthetic oligonucleotide
gucgaccugaacugcugau

SEQ ID NO: 1867159 - RNA, 19 nt, Artificial Sequence
  Description of Artificial Sequence: Synthetic oligonucleotide
caccacaagcccgaauaua

SEQ ID NO: 1867160 - RNA, 19 nt, Artificial Sequence
  Description of Artificial Sequence: Synthetic oligonucleotide
ggggauuccuuccccugaa

SEQ ID NO: 1867161 - RNA, 19 nt, Artificial Sequence
  Description of Artificial Sequence: Synthetic oligonucleotide
caggaacccagcagcuucu

SEQ ID NO: 1867162 - RNA, 19 nt, Artificial Sequence
  Description of Artificial Sequence: Synthetic oligonucleotide
cagcuucuuguaguuucga

SEQ ID NO: 1867163 - RNA, 19 nt, Artificial Sequence
  Description of Artificial Sequence: Synthetic oligonucleotide
ccgcauaugagaccagucu

SEQ ID NO: 1867164 - RNA, 19 nt, Artificial Sequence
  Description of Artificial Sequence: Synthetic oligonucleotide
cugguaccagcauccgccu

SEQ ID NO: 1867165 - RNA, 19 nt, Artificial Sequence
  Description of Artificial Sequence: Synthetic oligonucleotide
cagggcaaccucggaagaa

SEQ ID NO: 1867166 - RNA, 19 nt, Artificial Sequence
  Description of Artificial Sequence: Synthetic oligonucleotide
uaguuucgaugggcaccac

SEQ ID NO: 1867167 - RNA, 19 nt, Artificial Sequence
  Description of Artificial Sequence: Synthetic oligonucleotide
cuucugacuuguggguucu

SEQ ID NO: 1867168 - RNA, 19 nt, Artificial Sequence
  Description of Artificial Sequence: Synthetic oligonucleotide
ggcauuccgucuucgcggu

SEQ ID NO: 1867169 - RNA, 19 nt, Artificial Sequence
  Description of Artificial Sequence: Synthetic oligonucleotide
ggcucuuguauaacagggu

SEQ ID NO: 1867170 - RNA, 19 nt, Artificial Sequence
  Description of Artificial Sequence: Synthetic oligonucleotide
ccuuagagagcaugaaauu

SEQ ID NO: 1867171 - RNA, 19 nt, Artificial Sequence
  Description of Artificial Sequence: Synthetic oligonucleotide
ccuuccucgucacugcucu

SEQ ID NO: 1867172 - RNA, 19 nt, Artificial Sequence
  Description of Artificial Sequence: Synthetic oligonucleotide
cuucgugccuugccuuucu

SEQ ID NO: 1867173 - RNA, 19 nt, Artificial Sequence
  Description of Artificial Sequence: Synthetic oligonucleotide
cagggagcaggagaccucu

SEQ ID NO: 1867174 - RNA, 19 nt, Artificial Sequence
  Description of Artificial Sequence: Synthetic oligonucleotide
gcucucaacugcuuuuauu

SEQ ID NO: 1867175 - RNA, 19 nt, Artificial Sequence
  Description of Artificial Sequence: Synthetic oligonucleotide
cguaaccgugcugagguca

SEQ ID NO: 1867176 - RNA, 19 nt, Artificial Sequence
  Description of Artificial Sequence: Synthetic oligonucleotide
gaccggaacuucgugccuu

SEQ ID NO: 1867177 - RNA, 19 nt, Artificial Sequence
  Description of Artificial Sequence: Synthetic oligonucleotide
gccaacaacauaggucccu

SEQ ID NO: 1867178 - RNA, 19 nt, Artificial Sequence
  Description of Artificial Sequence: Synthetic oligonucleotide
uuccgucuucgcggucgac

SEQ ID NO: 1867179 - RNA, 19 nt, Artificial Sequence
  Description of Artificial Sequence: Synthetic oligonucleotide
aggaacccagcagcuucuu

SEQ ID NO: 1867180 - RNA, 19 nt, Artificial Sequence
  Description of Artificial Sequence: Synthetic oligonucleotide
ccucuagucucaucuugua

SEQ ID NO: 1867181 - RNA, 19 nt, Artificial Sequence
  Description of Artificial Sequence: Synthetic oligonucleotide
cccgagagucgcucacuuc

SEQ ID NO: 1867182 - RNA, 19 nt, Artificial Sequence
  Description of Artificial Sequence: Synthetic oligonucleotide
aacccaccuuagagagcau

SEQ ID NO: 1867183 - RNA, 19 nt, Artificial Sequence
  Description of Artificial Sequence: Synthetic oligonucleotide
gcccgaauauaacgcuuua

SEQ ID NO: 1867184 - RNA, 19 nt, Artificial Sequence
  Description of Artificial Sequence: Synthetic oligonucleotide
ccacaggcucuuguauaac

SEQ ID NO: 1867185 - RNA, 19 nt, Artificial Sequence
  Description of Artificial Sequence: Synthetic oligonucleotide
ccgcuucaacgccugcuuc

SEQ ID NO: 1867186 - RNA, 19 nt, Artificial Sequence
  Description of Artificial Sequence: Synthetic oligonucleotide
ccgacacuucuccaaggaa

SEQ ID NO: 1867187 - RNA, 19 nt, Artificial Sequence
  Description of Artificial Sequence: Synthetic oligonucleotide
cggucgaccugaacugcug

SEQ ID NO: 1867188 - RNA, 19 nt, Artificial Sequence
  Description of Artificial Sequence: Synthetic oligonucleotide
cuuguacaaccaggucugu

SEQ ID NO: 1867189 - RNA, 19 nt, Artificial Sequence
  Description of Artificial Sequence: Synthetic oligonucleotide
ggucuguuugucuguucuu

SEQ ID NO: 1867190 - RNA, 19 nt, Artificial Sequence
  Description of Artificial Sequence: Synthetic oligonucleotide
gcguaaccgugcugagguc

SEQ ID NO: 1867191 - RNA, 19 nt, Artificial Sequence
  Description of Artificial Sequence: Synthetic oligonucleotide
gcaccacaagcccgaauau

SEQ ID NO: 1867192 - RNA, 19 nt, Artificial Sequence
  Description of Artificial Sequence: Synthetic oligonucleotide
gcccuucaugccaagugcu

SEQ ID NO: 1867193 - RNA, 19 nt, Artificial Sequence
  Description of Artificial Sequence: Synthetic oligonucleotide
gggucacugcagggagcag

SEQ ID NO: 1867194 - RNA, 19 nt, Artificial Sequence
  Description of Artificial Sequence: Synthetic oligonucleotide
cgcggucgaccugaacugc

SEQ ID NO: 1867195 - RNA, 19 nt, Artificial Sequence
  Description of Artificial Sequence: Synthetic oligonucleotide
gcauuccgucuucgcgguc

SEQ ID NO: 1867196 - RNA, 19 nt, Artificial Sequence
  Description of Artificial Sequence: Synthetic oligonucleotide
gcucugcgauaaagcuccc

SEQ ID NO: 1867197 - RNA, 19 nt, Artificial Sequence
  Description of Artificial Sequence: Synthetic oligonucleotide
caccaucacugcugaugau

SEQ ID NO: 1867198 - RNA, 19 nt, Artificial Sequence
  Description of Artificial Sequence: Synthetic oligonucleotide
gcagucuggacuggaugau

SEQ ID NO: 1867199 - RNA, 19 nt, Artificial Sequence
  Description of Artificial Sequence: Synthetic oligonucleotide
cggaagaagcugcgcguga

SEQ ID NO: 1867200 - RNA, 19 nt, Artificial Sequence
  Description of Artificial Sequence: Synthetic oligonucleotide
gucguacaauggagugcgu

SEQ ID NO: 1867201 - RNA, 19 nt, Artificial Sequence
  Description of Artificial Sequence: Synthetic oligonucleotide
gaccagucuggaggugcuu

SEQ ID NO: 1867202 - RNA, 19 nt, Artificial Sequence
  Description of Artificial Sequence: Synthetic oligonucleotide
gcuuggcguggccucuccu

SEQ ID NO: 1867203 - RNA, 19 nt, Artificial Sequence
  Description of Artificial Sequence: Synthetic oligonucleotide
cgucuucgcggucgaccug

SEQ ID NO: 1867204 - RNA, 19 nt, Artificial Sequence
  Description of Artificial Sequence: Synthetic oligonucleotide
gcggucgaccugaacugcu

SEQ ID NO: 1867205 - RNA, 19 nt, Artificial Sequence
  Description of Artificial Sequence: Synthetic oligonucleotide
cgacaggaacccagcagcu

SEQ ID NO: 1867206 - RNA, 19 nt, Artificial Sequence
  Description of Artificial Sequence: Synthetic oligonucleotide
gcccgagagucgcucacuu

SEQ ID NO: 1867207 - RNA, 19 nt, Artificial Sequence
  Description of Artificial Sequence: Synthetic oligonucleotide
gccccgcauaugagaccag

SEQ ID NO: 1867208 - RNA, 19 nt, Artificial Sequence
  Description of Artificial Sequence: Synthetic oligonucleotide
ccccgcauaugagaccagu

SEQ ID NO: 1867209 - RNA, 19 nt, Artificial Sequence
  Description of Artificial Sequence: Synthetic oligonucleotide
gcacuccuugugggagcga

SEQ ID NO: 1867210 - RNA, 19 nt, Artificial Sequence
  Description of Artificial Sequence: Synthetic oligonucleotide
cugcuccuucagggcccga

SEQ ID NO: 1867211 - RNA, 19 nt, Artificial Sequence
  Description of Artificial Sequence: Synthetic oligonucleotide
gcucagcccugaggacacu

SEQ ID NO: 1867212 - RNA, 19 nt, Artificial Sequence
  Description of Artificial Sequence: Synthetic oligonucleotide
ccggcccacaugggucaaa

SEQ ID NO: 1867213 - RNA, 19 nt, Artificial Sequence
  Description of Artificial Sequence: Synthetic oligonucleotide
cccggcccacaugggucaa

SEQ ID NO: 1867214 - RNA, 19 nt, Artificial Sequence
  Description of Artificial Sequence: Synthetic oligonucleotide
uuaucuuuggguaaaauag

SEQ ID NO: 1867215 - RNA, 19 nt, Artificial Sequence
  Description of Artificial Sequence: Synthetic oligonucleotide
aaggauuugguagaaagcg

SEQ ID NO: 1867216 - RNA, 19 nt, Artificial Sequence
  Description of Artificial Sequence: Synthetic oligonucleotide
aaggccaucuuccaaauag

SEQ ID NO: 1867217 - RNA, 19 nt, Artificial Sequence
  Description of Artificial Sequence: Synthetic oligonucleotide
aguggaauguauuugcugg

SEQ ID NO: 1867218 - RNA, 19 nt, Artificial Sequence
  Description of Artificial Sequence: Synthetic oligonucleotide
uacguuaugugucaucucg

SEQ ID NO: 1867219 - RNA, 19 nt, Artificial Sequence
  Description of Artificial Sequence: Synthetic oligonucleotide
aaggggaucuuguaaacgg

SEQ ID NO: 1867220 - RNA, 19 nt, Artificial Sequence
  Description of Artificial Sequence: Synthetic oligonucleotide
aagcgagucaaucugaucu

SEQ ID NO: 1867221 - RNA, 19 nt, Artificial Sequence
  Description of Artificial Sequence: Synthetic oligonucleotide
ugaucuaaggaaaucuucc

SEQ ID NO: 1867222 - RNA, 19 nt, Artificial Sequence
  Description of Artificial Sequence: Synthetic oligonucleotide
aaauccaaaaucugguuga

SEQ ID NO: 1867223 - RNA, 19 nt, Artificial Sequence
  Description of Artificial Sequence: Synthetic oligonucleotide
uguaaacggacucugauuc

SEQ ID NO: 1867224 - RNA, 19 nt, Artificial Sequence
  Description of Artificial Sequence: Synthetic oligonucleotide
uggcuuucaacaaagaacu

SEQ ID NO: 1867225 - RNA, 19 nt, Artificial Sequence
  Description of Artificial Sequence: Synthetic oligonucleotide
caaaguuaggccaaugccc

SEQ ID NO: 1867226 - RNA, 19 nt, Artificial Sequence
  Description of Artificial Sequence: Synthetic oligonucleotide
aaauagacuuuccuuccuc

SEQ ID NO: 1867227 - RNA, 19 nt, Artificial Sequence
  Description of Artificial Sequence: Synthetic oligonucleotide
uuuaucaaacuuaucugga

SEQ ID NO: 1867228 - RNA, 19 nt, Artificial Sequence
  Description of Artificial Sequence: Synthetic oligonucleotide
aaaugacuauccuuuagga

SEQ ID NO: 1867229 - RNA, 19 nt, Artificial Sequence
  Description of Artificial Sequence: Synthetic oligonucleotide
aaaggcguauagucugucc

SEQ ID NO: 1867230 - RNA, 19 nt, Artificial Sequence
  Description of Artificial Sequence: Synthetic oligonucleotide
aacucugcgucacugugac

SEQ ID NO: 1867231 - RNA, 19 nt, Artificial Sequence
  Description of Artificial Sequence: Synthetic oligonucleotide
uauccuuuaggaaauucug

SEQ ID NO: 1867232 - RNA, 19 nt, Artificial Sequence
  Description of Artificial Sequence: Synthetic oligonucleotide
auucggaugauucaaagaa

SEQ ID NO: 1867233 - RNA, 19 nt, Artificial Sequence
  Description of Artificial Sequence: Synthetic oligonucleotide
auaaucuucuagucccucc

SEQ ID NO: 1867234 - RNA, 19 nt, Artificial Sequence
  Description of Artificial Sequence: Synthetic oligonucleotide
uguuguaagaguaaccuuu

SEQ ID NO: 1867235 - RNA, 19 nt, Artificial Sequence
  Description of Artificial Sequence: Synthetic oligonucleotide
uagaaagcgagucaaucug

SEQ ID NO: 1867236 - RNA, 19 nt, Artificial Sequence
  Description of Artificial Sequence: Synthetic oligonucleotide
aaucaucuacguuaugugu

SEQ ID NO: 1867237 - RNA, 19 nt, Artificial Sequence
  Description of Artificial Sequence: Synthetic oligonucleotide
cuucaugcaacugaaaggc

SEQ ID NO: 1867238 - RNA, 19 nt, Artificial Sequence
  Description of Artificial Sequence: Synthetic oligonucleotide
agccuugugcaacugacgc

SEQ ID NO: 1867239 - RNA, 19 nt, Artificial Sequence
  Description of Artificial Sequence: Synthetic oligonucleotide
ugucuuugccaccaguuag

SEQ ID NO: 1867240 - RNA, 19 nt, Artificial Sequence
  Description of Artificial Sequence: Synthetic oligonucleotide
ugugucaucucgaaguacu

SEQ ID NO: 1867241 - RNA, 19 nt, Artificial Sequence
  Description of Artificial Sequence: Synthetic oligonucleotide
uccagaacugcaaagccug

SEQ ID NO: 1867242 - RNA, 19 nt, Artificial Sequence
  Description of Artificial Sequence: Synthetic oligonucleotide
uguaagaguaaccuuuauc

SEQ ID NO: 1867243 - RNA, 19 nt, Artificial Sequence
  Description of Artificial Sequence: Synthetic oligonucleotide
ucuuuaagcggcacguaag

SEQ ID NO: 1867244 - RNA, 19 nt, Artificial Sequence
  Description of Artificial Sequence: Synthetic oligonucleotide
aauagacuuuccuuccucu

SEQ ID NO: 1867245 - RNA, 19 nt, Artificial Sequence
  Description of Artificial Sequence: Synthetic oligonucleotide
uuggguaaaauagugaauc

SEQ ID NO: 1867246 - RNA, 19 nt, Artificial Sequence
  Description of Artificial Sequence: Synthetic oligonucleotide
uggguaaaauagugaaucg

SEQ ID NO: 1867247 - RNA, 19 nt, Artificial Sequence
  Description of Artificial Sequence: Synthetic oligonucleotide
aaugacuauccuuuaggaa

SEQ ID NO: 1867248 - RNA, 19 nt, Artificial Sequence
  Description of Artificial Sequence: Synthetic oligonucleotide
aggauaaucuucaugcaac

SEQ ID NO: 1867249 - RNA, 19 nt, Artificial Sequence
  Description of Artificial Sequence: Synthetic oligonucleotide
cacgaugucuuuaagcggc

SEQ ID NO: 1867250 - RNA, 19 nt, Artificial Sequence
  Description of Artificial Sequence: Synthetic oligonucleotide
gaucuaaggaaaucuuccc

SEQ ID NO: 1867251 - RNA, 19 nt, Artificial Sequence
  Description of Artificial Sequence: Synthetic oligonucleotide
uuugguagaaagcgaguca

SEQ ID NO: 1867252 - RNA, 19 nt, Artificial Sequence
  Description of Artificial Sequence: Synthetic oligonucleotide
cugauucccacuuaacccc

SEQ ID NO: 1867253 - RNA, 19 nt, Artificial Sequence
  Description of Artificial Sequence: Synthetic oligonucleotide
ucggaugauucaaagaaaa

SEQ ID NO: 1867254 - RNA, 19 nt, Artificial Sequence
  Description of Artificial Sequence: Synthetic oligonucleotide
aaaggggaucuuguaaacg

SEQ ID NO: 1867255 - RNA, 19 nt, Artificial Sequence
  Description of Artificial Sequence: Synthetic oligonucleotide
auuugguagaaagcgaguc

SEQ ID NO: 1867256 - RNA, 19 nt, Artificial Sequence
  Description of Artificial Sequence: Synthetic oligonucleotide
ucaugcaacugaaaggcgu

SEQ ID NO: 1867257 - RNA, 19 nt, Artificial Sequence
  Description of Artificial Sequence: Synthetic oligonucleotide
uccucugauaaacucuugc

SEQ ID NO: 1867258 - RNA, 19 nt, Artificial Sequence
  Description of Artificial Sequence: Synthetic oligonucleotide
aaggcguauagucuguccu

SEQ ID NO: 1867259 - RNA, 19 nt, Artificial Sequence
  Description of Artificial Sequence: Synthetic oligonucleotide
uaagcggcacguaagcaag

SEQ ID NO: 1867260 - RNA, 19 nt, Artificial Sequence
  Description of Artificial Sequence: Synthetic oligonucleotide
ucuacguuaugugucaucu

SEQ ID NO: 1867261 - RNA, 19 nt, Artificial Sequence
  Description of Artificial Sequence: Synthetic oligonucleotide
aucugguugaucccggagg

SEQ ID NO: 1867262 - RNA, 19 nt, Artificial Sequence
  Description of Artificial Sequence: Synthetic oligonucleotide
ugauucggaugauucaaag

SEQ ID NO: 1867263 - RNA, 19 nt, Artificial Sequence
  Description of Artificial Sequence: Synthetic oligonucleotide
aaagcgagucaaucugauc

SEQ ID NO: 1867264 - RNA, 19 nt, Artificial Sequence
  Description of Artificial Sequence: Synthetic oligonucleotide
aaacuuaucuggauccauc

SEQ ID NO: 1867265 - RNA, 19 nt, Artificial Sequence
  Description of Artificial Sequence: Synthetic oligonucleotide
ugauauccuguucucgaag

SEQ ID NO: 1867266 - RNA, 19 nt, Artificial Sequence
  Description of Artificial Sequence: Synthetic oligonucleotide
uaggccaaugcccuucagg

SEQ ID NO: 1867267 - RNA, 19 nt, Artificial Sequence
  Description of Artificial Sequence: Synthetic oligonucleotide
gccacgaugucuuuaagcg

SEQ ID NO: 1867268 - RNA, 19 nt, Artificial Sequence
  Description of Artificial Sequence: Synthetic oligonucleotide
cacuuaaccccacuuaggc

SEQ ID NO: 1867269 - RNA, 19 nt, Artificial Sequence
  Description of Artificial Sequence: Synthetic oligonucleotide
acgaagauggugauucucc

SEQ ID NO: 1867270 - RNA, 19 nt, Artificial Sequence
  Description of Artificial Sequence: Synthetic oligonucleotide
aaaguuaggccaaugcccu

SEQ ID NO: 1867271 - RNA, 19 nt, Artificial Sequence
  Description of Artificial Sequence: Synthetic oligonucleotide
caaaaucugguugaucccg

SEQ ID NO: 1867272 - RNA, 19 nt, Artificial Sequence
  Description of Artificial Sequence: Synthetic oligonucleotide
cugaaaggcguauagucug

SEQ ID NO: 1867273 - RNA, 19 nt, Artificial Sequence
  Description of Artificial Sequence: Synthetic oligonucleotide
gauaaacucuugcuuccag

SEQ ID NO: 1867274 - RNA, 19 nt, Artificial Sequence
  Description of Artificial Sequence: Synthetic oligonucleotide
cacuuauagcuucaaaaug

SEQ ID NO: 1867275 - RNA, 19 nt, Artificial Sequence
  Description of Artificial Sequence: Synthetic oligonucleotide
ugggcacccaugauaaucc

SEQ ID NO: 1867276 - RNA, 19 nt, Artificial Sequence
  Description of Artificial Sequence: Synthetic oligonucleotide
ucaucuacguuauguguca

SEQ ID NO: 1867277 - RNA, 19 nt, Artificial Sequence
  Description of Artificial Sequence: Synthetic oligonucleotide
ucagcaaaggggaucuugu

SEQ ID NO: 1867278 - RNA, 19 nt, Artificial Sequence
  Description of Artificial Sequence: Synthetic oligonucleotide
aucaucuacguuauguguc

SEQ ID NO: 1867279 - RNA, 19 nt, Artificial Sequence
  Description of Artificial Sequence: Synthetic oligonucleotide
cuuuaagcggcacguaagc

SEQ ID NO: 1867280 - RNA, 19 nt, Artificial Sequence
  Description of Artificial Sequence: Synthetic oligonucleotide
uuaagcggcacguaagcaa

SEQ ID NO: 1867281 - RNA, 19 nt, Artificial Sequence
  Description of Artificial Sequence: Synthetic oligonucleotide
auauccuguucucgaagac

SEQ ID NO: 1867282 - RNA, 19 nt, Artificial Sequence
  Description of Artificial Sequence: Synthetic oligonucleotide
uacaaaguggaauguauuu

SEQ ID NO: 1867283 - RNA, 19 nt, Artificial Sequence
  Description of Artificial Sequence: Synthetic oligonucleotide
agugccagagccuuagaca

SEQ ID NO: 1867284 - RNA, 19 nt, Artificial Sequence
  Description of Artificial Sequence: Synthetic oligonucleotide
gaacugcaaagccuguucc

SEQ ID NO: 1867285 - RNA, 19 nt, Artificial Sequence
  Description of Artificial Sequence: Synthetic oligonucleotide
aucuaaggaaaucuuccca

SEQ ID NO: 1867286 - RNA, 19 nt, Artificial Sequence
  Description of Artificial Sequence: Synthetic oligonucleotide
ucuuccaaauagacuuucc

SEQ ID NO: 1867287 - RNA, 19 nt, Artificial Sequence
  Description of Artificial Sequence: Synthetic oligonucleotide
acaaagaacugauucggau

SEQ ID NO: 1867288 - RNA, 19 nt, Artificial Sequence
  Description of Artificial Sequence: Synthetic oligonucleotide
uuaucaaacuuaucuggau

SEQ ID NO: 1867289 - RNA, 19 nt, Artificial Sequence
  Description of Artificial Sequence: Synthetic oligonucleotide
aguggucacaucaugaacu

SEQ ID NO: 1867290 - RNA, 19 nt, Artificial Sequence
  Description of Artificial Sequence: Synthetic oligonucleotide
uccauuuccagggaggagu

SEQ ID NO: 1867291 - RNA, 19 nt, Artificial Sequence
  Description of Artificial Sequence: Synthetic oligonucleotide
ucgaagacucuucucuuca

SEQ ID NO: 1867292 - RNA, 19 nt, Artificial Sequence
  Description of Artificial Sequence: Synthetic oligonucleotide
aguguaagaaugacugagg

SEQ ID NO: 1867293 - RNA, 19 nt, Artificial Sequence
  Description of Artificial Sequence: Synthetic oligonucleotide
uaaacggacucugauuccc

SEQ ID NO: 1867294 - RNA, 19 nt, Artificial Sequence
  Description of Artificial Sequence: Synthetic oligonucleotide
ucuuuccucugauaaacuc

SEQ ID NO: 1867295 - RNA, 19 nt, Artificial Sequence
  Description of Artificial Sequence: Synthetic oligonucleotide
guauagucuguccucuugc

SEQ ID NO: 1867296 - RNA, 19 nt, Artificial Sequence
  Description of Artificial Sequence: Synthetic oligonucleotide
guuaugugucaucucgaag

SEQ ID NO: 1867297 - RNA, 19 nt, Artificial Sequence
  Description of Artificial Sequence: Synthetic oligonucleotide
aacugacgcaugcaaggug

SEQ ID NO: 1867298 - RNA, 19 nt, Artificial Sequence
  Description of Artificial Sequence: Synthetic oligonucleotide
auaaacucuugcuuccaga

SEQ ID NO: 1867299 - RNA, 19 nt, Artificial Sequence
  Description of Artificial Sequence: Synthetic oligonucleotide
cugaucuaaggaaaucuuc

SEQ ID NO: 1867300 - RNA, 19 nt, Artificial Sequence
  Description of Artificial Sequence: Synthetic oligonucleotide
gauucggaugauucaaaga

SEQ ID NO: 1867301 - RNA, 19 nt, Artificial Sequence
  Description of Artificial Sequence: Synthetic oligonucleotide
ugacuauccuuuaggaaau

SEQ ID NO: 1867302 - RNA, 19 nt, Artificial Sequence
  Description of Artificial Sequence: Synthetic oligonucleotide
gcaacugacgcaugcaagg

SEQ ID NO: 1867303 - RNA, 19 nt, Artificial Sequence
  Description of Artificial Sequence: Synthetic oligonucleotide
ucaggauaaucuucaugca

SEQ ID NO: 1867304 - RNA, 19 nt, Artificial Sequence
  Description of Artificial Sequence: Synthetic oligonucleotide
uuaaccccacuuaggcuag

SEQ ID NO: 1867305 - RNA, 19 nt, Artificial Sequence
  Description of Artificial Sequence: Synthetic oligonucleotide
ugguggauuggucaggaua

SEQ ID NO: 1867306 - RNA, 19 nt, Artificial Sequence
  Description of Artificial Sequence: Synthetic oligonucleotide
guggaauguauuugcuggg

SEQ ID NO: 1867307 - RNA, 19 nt, Artificial Sequence
  Description of Artificial Sequence: Synthetic oligonucleotide
ucgaaguacuucugacagg

SEQ ID NO: 1867308 - RNA, 19 nt, Artificial Sequence
  Description of Artificial Sequence: Synthetic oligonucleotide
aguaaccuuuaucaaacuu

SEQ ID NO: 1867309 - RNA, 19 nt, Artificial Sequence
  Description of Artificial Sequence: Synthetic oligonucleotide
aaggaccuggcuguuagug

SEQ ID NO: 1867310 - RNA, 19 nt, Artificial Sequence
  Description of Artificial Sequence: Synthetic oligonucleotide
uucggaugauucaaagaaa

SEQ ID NO: 1867311 - RNA, 19 nt, Artificial Sequence
  Description of Artificial Sequence: Synthetic oligonucleotide
cugacaggcuaccugguag

SEQ ID NO: 1867312 - RNA, 19 nt, Artificial Sequence
  Description of Artificial Sequence: Synthetic oligonucleotide
ucuuguaaacggacucuga

SEQ ID NO: 1867313 - RNA, 19 nt, Artificial Sequence
  Description of Artificial Sequence: Synthetic oligonucleotide
acuauccuuuaggaaauuc

SEQ ID NO: 1867314 - RNA, 19 nt, Artificial Sequence
  Description of Artificial Sequence: Synthetic oligonucleotide
augggcacccaugauaauc

SEQ ID NO: 1867315 - RNA, 19 nt, Artificial Sequence
  Description of Artificial Sequence: Synthetic oligonucleotide
caucggacugcacugcagg

SEQ ID NO: 1867316 - RNA, 19 nt, Artificial Sequence
  Description of Artificial Sequence: Synthetic oligonucleotide
ugacggauguuguaagagu

SEQ ID NO: 1867317 - RNA, 19 nt, Artificial Sequence
  Description of Artificial Sequence: Synthetic oligonucleotide
ggcuguuagugccagagcc

SEQ ID NO: 1867318 - RNA, 19 nt, Artificial Sequence
  Description of Artificial Sequence: Synthetic oligonucleotide
uaggcgaggaugcagugau

SEQ ID NO: 1867319 - RNA, 19 nt, Artificial Sequence
  Description of Artificial Sequence: Synthetic oligonucleotide
aucuuuggguaaaauagug

SEQ ID NO: 1867320 - RNA, 19 nt, Artificial Sequence
  Description of Artificial Sequence: Synthetic oligonucleotide
aaaguggaauguauuugcu

SEQ ID NO: 1867321 - RNA, 19 nt, Artificial Sequence
  Description of Artificial Sequence: Synthetic oligonucleotide
acugcauccggccuccaug

SEQ ID NO: 1867322 - RNA, 19 nt, Artificial Sequence
  Description of Artificial Sequence: Synthetic oligonucleotide
aucuacguuaugugucauc

SEQ ID NO: 1867323 - RNA, 19 nt, Artificial Sequence
  Description of Artificial Sequence: Synthetic oligonucleotide
gaaguggucacaucaugaa

SEQ ID NO: 1867324 - RNA, 19 nt, Artificial Sequence
  Description of Artificial Sequence: Synthetic oligonucleotide
guaaccuuuaucaaacuua

SEQ ID NO: 1867325 - RNA, 19 nt, Artificial Sequence
  Description of Artificial Sequence: Synthetic oligonucleotide
ugugacggauguuguaaga

SEQ ID NO: 1867326 - RNA, 19 nt, Artificial Sequence
  Description of Artificial Sequence: Synthetic oligonucleotide
ggugauucucccucaaagc

SEQ ID NO: 1867327 - RNA, 19 nt, Artificial Sequence
  Description of Artificial Sequence: Synthetic oligonucleotide
ugaaaggcguauagucugu

SEQ ID NO: 1867328 - RNA, 19 nt, Artificial Sequence
  Description of Artificial Sequence: Synthetic oligonucleotide
aaaucugguugaucccgga

SEQ ID NO: 1867329 - RNA, 19 nt, Artificial Sequence
  Description of Artificial Sequence: Synthetic oligonucleotide
aggcuggagccguucaucg

SEQ ID NO: 1867330 - RNA, 19 nt, Artificial Sequence
  Description of Artificial Sequence: Synthetic oligonucleotide
gaagacucuucucuucauc

SEQ ID NO: 1867331 - RNA, 19 nt, Artificial Sequence
  Description of Artificial Sequence: Synthetic oligonucleotide
uccccuuuacuaaauccaa

SEQ ID NO: 1867332 - RNA, 19 nt, Artificial Sequence
  Description of Artificial Sequence: Synthetic oligonucleotide
gccacaaucaucuacguua

SEQ ID NO: 1867333 - RNA, 19 nt, Artificial Sequence
  Description of Artificial Sequence: Synthetic oligonucleotide
aggcguauagucuguccuc

SEQ ID NO: 1867334 - RNA, 19 nt, Artificial Sequence
  Description of Artificial Sequence: Synthetic oligonucleotide
acuuaaccccacuuaggcu

SEQ ID NO: 1867335 - RNA, 19 nt, Artificial Sequence
  Description of Artificial Sequence: Synthetic oligonucleotide
aguuaggccaaugcccuuc

SEQ ID NO: 1867336 - RNA, 19 nt, Artificial Sequence
  Description of Artificial Sequence: Synthetic oligonucleotide
uuuaagcggcacguaagca

SEQ ID NO: 1867337 - RNA, 19 nt, Artificial Sequence
  Description of Artificial Sequence: Synthetic oligonucleotide
aaauaaucuucuagucccu

SEQ ID NO: 1867338 - RNA, 19 nt, Artificial Sequence
  Description of Artificial Sequence: Synthetic oligonucleotide
uaagaaugacugagguggu

SEQ ID NO: 1867339 - RNA, 19 nt, Artificial Sequence
  Description of Artificial Sequence: Synthetic oligonucleotide
auguauuugcuggggaaag

SEQ ID NO: 1867340 - RNA, 19 nt, Artificial Sequence
  Description of Artificial Sequence: Synthetic oligonucleotide
aaccccacuuaggcuaggc

SEQ ID NO: 1867341 - RNA, 19 nt, Artificial Sequence
  Description of Artificial Sequence: Synthetic oligonucleotide
ucaucggacugcacugcag

SEQ ID NO: 1867342 - RNA, 19 nt, Artificial Sequence
  Description of Artificial Sequence: Synthetic oligonucleotide
ccaaauagacuuuccuucc

SEQ ID NO: 1867343 - RNA, 19 nt, Artificial Sequence
  Description of Artificial Sequence: Synthetic oligonucleotide
aagccuugugcaacugacg

SEQ ID NO: 1867344 - RNA, 19 nt, Artificial Sequence
  Description of Artificial Sequence: Synthetic oligonucleotide
cugaacuuuaucuuugggu

SEQ ID NO: 1867345 - RNA, 19 nt, Artificial Sequence
  Description of Artificial Sequence: Synthetic oligonucleotide
uucaucggacugcacugca

SEQ ID NO: 1867346 - RNA, 19 nt, Artificial Sequence
  Description of Artificial Sequence: Synthetic oligonucleotide
gaaugacugaggugguuga

SEQ ID NO: 1867347 - RNA, 19 nt, Artificial Sequence
  Description of Artificial Sequence: Synthetic oligonucleotide
caggccauacugcauccgg

SEQ ID NO: 1867348 - RNA, 19 nt, Artificial Sequence
  Description of Artificial Sequence: Synthetic oligonucleotide
cugaacucguucaggauga

SEQ ID NO: 1867349 - RNA, 19 nt, Artificial Sequence
  Description of Artificial Sequence: Synthetic oligonucleotide
cuuaggcuaggcgaggaug

SEQ ID NO: 1867350 - RNA, 19 nt, Artificial Sequence
  Description of Artificial Sequence: Synthetic oligonucleotide
aucuuguaaacggacucug

SEQ ID NO: 1867351 - RNA, 19 nt, Artificial Sequence
  Description of Artificial Sequence: Synthetic oligonucleotide
ugacaggcuaccugguagu

SEQ ID NO: 1867352 - RNA, 19 nt, Artificial Sequence
  Description of Artificial Sequence: Synthetic oligonucleotide
acgcaugcaaggugggaag

SEQ ID NO: 1867353 - RNA, 19 nt, Artificial Sequence
  Description of Artificial Sequence: Synthetic oligonucleotide
ugauaaacucuugcuucca

SEQ ID NO: 1867354 - RNA, 19 nt, Artificial Sequence
  Description of Artificial Sequence: Synthetic oligonucleotide
cuugcuuccagaacugcaa

SEQ ID NO: 1867355 - RNA, 19 nt, Artificial Sequence
  Description of Artificial Sequence: Synthetic oligonucleotide
cuauccuuuaggaaauucu

SEQ ID NO: 1867356 - RNA, 19 nt, Artificial Sequence
  Description of Artificial Sequence: Synthetic oligonucleotide
agcggcacguaagcaaggc

SEQ ID NO: 1867357 - RNA, 19 nt, Artificial Sequence
  Description of Artificial Sequence: Synthetic oligonucleotide
gagccuuagacagcguggc

SEQ ID NO: 1867358 - RNA, 19 nt, Artificial Sequence
  Description of Artificial Sequence: Synthetic oligonucleotide
gugggaaggauuugguaga

SEQ ID NO: 1867359 - RNA, 19 nt, Artificial Sequence
  Description of Artificial Sequence: Synthetic oligonucleotide
accccacuuaggcuaggcg

SEQ ID NO: 1867360 - RNA, 19 nt, Artificial Sequence
  Description of Artificial Sequence: Synthetic oligonucleotide
guguaagaaugacugaggu

SEQ ID NO: 1867361 - RNA, 19 nt, Artificial Sequence
  Description of Artificial Sequence: Synthetic oligonucleotide
gacggaaugggcacccaug

SEQ ID NO: 1867362 - RNA, 19 nt, Artificial Sequence
  Description of Artificial Sequence: Synthetic oligonucleotide
cuccaugacgaagauggug

SEQ ID NO: 1867363 - RNA, 19 nt, Artificial Sequence
  Description of Artificial Sequence: Synthetic oligonucleotide
gucuuuaagcggcacguaa

SEQ ID NO: 1867364 - RNA, 19 nt, Artificial Sequence
  Description of Artificial Sequence: Synthetic oligonucleotide
ugaguccccuuuacuaaau

SEQ ID NO: 1867365 - RNA, 19 nt, Artificial Sequence
  Description of Artificial Sequence: Synthetic oligonucleotide
caggauaaucuucaugcaa

SEQ ID NO: 1867366 - RNA, 19 nt, Artificial Sequence
  Description of Artificial Sequence: Synthetic oligonucleotide
aggccauacugcauccggc

SEQ ID NO: 1867367 - RNA, 19 nt, Artificial Sequence
  Description of Artificial Sequence: Synthetic oligonucleotide
agaaagcgagucaaucuga

SEQ ID NO: 1867368 - RNA, 19 nt, Artificial Sequence
  Description of Artificial Sequence: Synthetic oligonucleotide
uggcuguuagugccagagc

SEQ ID NO: 1867369 - RNA, 19 nt, Artificial Sequence
  Description of Artificial Sequence: Synthetic oligonucleotide
cgaaguacuucugacaggc

SEQ ID NO: 1867370 - RNA, 19 nt, Artificial Sequence
  Description of Artificial Sequence: Synthetic oligonucleotide
guccccuuuacuaaaucca

SEQ ID NO: 1867371 - RNA, 19 nt, Artificial Sequence
  Description of Artificial Sequence: Synthetic oligonucleotide
uggauuggucaggauaauc

SEQ ID NO: 1867372 - RNA, 19 nt, Artificial Sequence
  Description of Artificial Sequence: Synthetic oligonucleotide
gaugcagugauauccuguu

SEQ ID NO: 1867373 - RNA, 19 nt, Artificial Sequence
  Description of Artificial Sequence: Synthetic oligonucleotide
ggccacgaugucuuuaagc

SEQ ID NO: 1867374 - RNA, 19 nt, Artificial Sequence
  Description of Artificial Sequence: Synthetic oligonucleotide
gacgaagauggugauucuc

SEQ ID NO: 1867375 - RNA, 19 nt, Artificial Sequence
  Description of Artificial Sequence: Synthetic oligonucleotide
agcaacucugcgucacugu

SEQ ID NO: 1867376 - RNA, 19 nt, Artificial Sequence
  Description of Artificial Sequence: Synthetic oligonucleotide
uagacagcguggcucugaa

SEQ ID NO: 1867377 - RNA, 19 nt, Artificial Sequence
  Description of Artificial Sequence: Synthetic oligonucleotide
ggauguuguaagaguaacc

SEQ ID NO: 1867378 - RNA, 19 nt, Artificial Sequence
  Description of Artificial Sequence: Synthetic oligonucleotide
uuaggauccgcuggcuuuc

SEQ ID NO: 1867379 - RNA, 19 nt, Artificial Sequence
  Description of Artificial Sequence: Synthetic oligonucleotide
ucagcaacucugcgucacu

SEQ ID NO: 1867380 - RNA, 19 nt, Artificial Sequence
  Description of Artificial Sequence: Synthetic oligonucleotide
cugacgcaugcaagguggg

SEQ ID NO: 1867381 - RNA, 19 nt, Artificial Sequence
  Description of Artificial Sequence: Synthetic oligonucleotide
uucccacuuaaccccacuu

SEQ ID NO: 1867382 - RNA, 19 nt, Artificial Sequence
  Description of Artificial Sequence: Synthetic oligonucleotide
ugcgucacugugacggaau

SEQ ID NO: 1867383 - RNA, 19 nt, Artificial Sequence
  Description of Artificial Sequence: Synthetic oligonucleotide
gaguucagagaggccagug

SEQ ID NO: 1867384 - RNA, 19 nt, Artificial Sequence
  Description of Artificial Sequence: Synthetic oligonucleotide
gggaggaguucagagaggc

SEQ ID NO: 1867385 - RNA, 19 nt, Artificial Sequence
  Description of Artificial Sequence: Synthetic oligonucleotide
gauuggucaggauaaucuu

SEQ ID NO: 1867386 - RNA, 19 nt, Artificial Sequence
  Description of Artificial Sequence: Synthetic oligonucleotide
aguuaggauccgcuggcuu

SEQ ID NO: 1867387 - RNA, 19 nt, Artificial Sequence
  Description of Artificial Sequence: Synthetic oligonucleotide
ugacggaaugggcacccau

SEQ ID NO: 1867388 - RNA, 19 nt, Artificial Sequence
  Description of Artificial Sequence: Synthetic oligonucleotide
gacgcaugcaaggugggaa

SEQ ID NO: 1867389 - RNA, 19 nt, Artificial Sequence
  Description of Artificial Sequence: Synthetic oligonucleotide
uaccugguagugagucccc

SEQ ID NO: 1867390 - RNA, 19 nt, Artificial Sequence
  Description of Artificial Sequence: Synthetic oligonucleotide
uuccaaaguuaggccaaug

SEQ ID NO: 1867391 - RNA, 19 nt, Artificial Sequence
  Description of Artificial Sequence: Synthetic oligonucleotide
ggguaaaauagugaaucga

SEQ ID NO: 1867392 - RNA, 19 nt, Artificial Sequence
  Description of Artificial Sequence: Synthetic oligonucleotide
uuagugccagagccuuaga

SEQ ID NO: 1867393 - RNA, 19 nt, Artificial Sequence
  Description of Artificial Sequence: Synthetic oligonucleotide
gguggauuggucaggauaa

SEQ ID NO: 1867394 - RNA, 19 nt, Artificial Sequence
  Description of Artificial Sequence: Synthetic oligonucleotide
gcauccggccuccaugacg

SEQ ID NO: 1867395 - RNA, 19 nt, Artificial Sequence
  Description of Artificial Sequence: Synthetic oligonucleotide
ccacuuaaccccacuuagg

SEQ ID NO: 1867396 - RNA, 19 nt, Artificial Sequence
  Description of Artificial Sequence: Synthetic oligonucleotide
gaucuuguaaacggacucu

SEQ ID NO: 1867397 - RNA, 19 nt, Artificial Sequence
  Description of Artificial Sequence: Synthetic oligonucleotide
aaacggacucugauuccca

SEQ ID NO: 1867398 - RNA, 19 nt, Artificial Sequence
  Description of Artificial Sequence: Synthetic oligonucleotide
ggcuugguggauuggucag

SEQ ID NO: 1867399 - RNA, 19 nt, Artificial Sequence
  Description of Artificial Sequence: Synthetic oligonucleotide
accuuacaaaguggaaugu

SEQ ID NO: 1867400 - RNA, 19 nt, Artificial Sequence
  Description of Artificial Sequence: Synthetic oligonucleotide
cuacguuaugugucaucuc

SEQ ID NO: 1867401 - RNA, 19 nt, Artificial Sequence
  Description of Artificial Sequence: Synthetic oligonucleotide
agcgagucaaucugaucua

SEQ ID NO: 1867402 - RNA, 19 nt, Artificial Sequence
  Description of Artificial Sequence: Synthetic oligonucleotide
acggacucugauucccacu

SEQ ID NO: 1867403 - RNA, 19 nt, Artificial Sequence
  Description of Artificial Sequence: Synthetic oligonucleotide
aagcggcacguaagcaagg

SEQ ID NO: 1867404 - RNA, 19 nt, Artificial Sequence
  Description of Artificial Sequence: Synthetic oligonucleotide
agaacugauucggaugauu

SEQ ID NO: 1867405 - RNA, 19 nt, Artificial Sequence
  Description of Artificial Sequence: Synthetic oligonucleotide
cccacuuaggcuaggcgag

SEQ ID NO: 1867406 - RNA, 19 nt, Artificial Sequence
  Description of Artificial Sequence: Synthetic oligonucleotide
ggucacaucaugaacuaaa

SEQ ID NO: 1867407 - RNA, 19 nt, Artificial Sequence
  Description of Artificial Sequence: Synthetic oligonucleotide
ggagccguucaucggacug

SEQ ID NO: 1867408 - RNA, 19 nt, Artificial Sequence
  Description of Artificial Sequence: Synthetic oligonucleotide
aagaaugacugaggugguu

SEQ ID NO: 1867409 - RNA, 19 nt, Artificial Sequence
  Description of Artificial Sequence: Synthetic oligonucleotide
uggccaguguaagaaugac

SEQ ID NO: 1867410 - RNA, 19 nt, Artificial Sequence
  Description of Artificial Sequence: Synthetic oligonucleotide
uggccacgaugucuuuaag

SEQ ID NO: 1867411 - RNA, 19 nt, Artificial Sequence
  Description of Artificial Sequence: Synthetic oligonucleotide
ugguagugaguccccuuua

SEQ ID NO: 1867412 - RNA, 19 nt, Artificial Sequence
  Description of Artificial Sequence: Synthetic oligonucleotide
guacuucugacaggcuacc

SEQ ID NO: 1867413 - RNA, 19 nt, Artificial Sequence
  Description of Artificial Sequence: Synthetic oligonucleotide
ggauuggucaggauaaucu

SEQ ID NO: 1867414 - RNA, 19 nt, Artificial Sequence
  Description of Artificial Sequence: Synthetic oligonucleotide
ggaaagggguuacugaagu

SEQ ID NO: 1867415 - RNA, 19 nt, Artificial Sequence
  Description of Artificial Sequence: Synthetic oligonucleotide
gugauauccuguucucgaa

SEQ ID NO: 1867416 - RNA, 19 nt, Artificial Sequence
  Description of Artificial Sequence: Synthetic oligonucleotide
aaguuaggccaaugcccuu

SEQ ID NO: 1867417 - RNA, 19 nt, Artificial Sequence
  Description of Artificial Sequence: Synthetic oligonucleotide
gaaaggcguauagucuguc

SEQ ID NO: 1867418 - RNA, 19 nt, Artificial Sequence
  Description of Artificial Sequence: Synthetic oligonucleotide
auggugauucucccucaaa

SEQ ID NO: 1867419 - RNA, 19 nt, Artificial Sequence
  Description of Artificial Sequence: Synthetic oligonucleotide
uguuagugccagagccuua

SEQ ID NO: 1867420 - RNA, 19 nt, Artificial Sequence
  Description of Artificial Sequence: Synthetic oligonucleotide
acuuaggcuaggcgaggau

SEQ ID NO: 1867421 - RNA, 19 nt, Artificial Sequence
  Description of Artificial Sequence: Synthetic oligonucleotide
cuggagccguucaucggac

SEQ ID NO: 1867422 - RNA, 19 nt, Artificial Sequence
  Description of Artificial Sequence: Synthetic oligonucleotide
caacucugcgucacuguga

SEQ ID NO: 1867423 - RNA, 19 nt, Artificial Sequence
  Description of Artificial Sequence: Synthetic oligonucleotide
cugauucggaugauucaaa

SEQ ID NO: 1867424 - RNA, 19 nt, Artificial Sequence
  Description of Artificial Sequence: Synthetic oligonucleotide
cuugguggauuggucagga

SEQ ID NO: 1867425 - RNA, 19 nt, Artificial Sequence
  Description of Artificial Sequence: Synthetic oligonucleotide
ugggaaggauuugguagaa

SEQ ID NO: 1867426 - RNA, 19 nt, Artificial Sequence
  Description of Artificial Sequence: Synthetic oligonucleotide
ggauccgcuggcuuucaac

SEQ ID NO: 1867427 - RNA, 19 nt, Artificial Sequence
  Description of Artificial Sequence: Synthetic oligonucleotide
gggaaagggguuacugaag

SEQ ID NO: 1867428 - RNA, 19 nt, Artificial Sequence
  Description of Artificial Sequence: Synthetic oligonucleotide
cucugauaaacucuugcuu

SEQ ID NO: 1867429 - RNA, 19 nt, Artificial Sequence
  Description of Artificial Sequence: Synthetic oligonucleotide
ugacgcaugcaagguggga

SEQ ID NO: 1867430 - RNA, 19 nt, Artificial Sequence
  Description of Artificial Sequence: Synthetic oligonucleotide
acguuaugugucaucucga

SEQ ID NO: 1867431 - RNA, 19 nt, Artificial Sequence
  Description of Artificial Sequence: Synthetic oligonucleotide
guuaggauccgcuggcuuu

SEQ ID NO: 1867432 - RNA, 19 nt, Artificial Sequence
  Description of Artificial Sequence: Synthetic oligonucleotide
caucacuuauagcuucaaa

SEQ ID NO: 1867433 - RNA, 19 nt, Artificial Sequence
  Description of Artificial Sequence: Synthetic oligonucleotide
ggauaaucuucaugcaacu

SEQ ID NO: 1867434 - RNA, 19 nt, Artificial Sequence
  Description of Artificial Sequence: Synthetic oligonucleotide
guagugaguccccuuuacu

SEQ ID NO: 1867435 - RNA, 19 nt, Artificial Sequence
  Description of Artificial Sequence: Synthetic oligonucleotide
aggggaucuuguaaacgga

SEQ ID NO: 1867436 - RNA, 19 nt, Artificial Sequence
  Description of Artificial Sequence: Synthetic oligonucleotide
acaggcuaccugguaguga

SEQ ID NO: 1867437 - RNA, 19 nt, Artificial Sequence
  Description of Artificial Sequence: Synthetic oligonucleotide
uacugcauccggccuccau

SEQ ID NO: 1867438 - RNA, 19 nt, Artificial Sequence
  Description of Artificial Sequence: Synthetic oligonucleotide
agccuuagacagcguggcu

SEQ ID NO: 1867439 - RNA, 19 nt, Artificial Sequence
  Description of Artificial Sequence: Synthetic oligonucleotide
cacaaucaucuacguuaug

SEQ ID NO: 1867440 - RNA, 19 nt, Artificial Sequence
  Description of Artificial Sequence: Synthetic oligonucleotide
aggccaucuuccaaauaga

SEQ ID NO: 1867441 - RNA, 19 nt, Artificial Sequence
  Description of Artificial Sequence: Synthetic oligonucleotide
cagcaacucugcgucacug

SEQ ID NO: 1867442 - RNA, 19 nt, Artificial Sequence
  Description of Artificial Sequence: Synthetic oligonucleotide
ggggaucuuguaaacggac

SEQ ID NO: 1867443 - RNA, 19 nt, Artificial Sequence
  Description of Artificial Sequence: Synthetic oligonucleotide
gaaagcgagucaaucugau

SEQ ID NO: 1867444 - RNA, 19 nt, Artificial Sequence
  Description of Artificial Sequence: Synthetic oligonucleotide
acguaagcaaggccaucuu

SEQ ID NO: 1867445 - RNA, 19 nt, Artificial Sequence
  Description of Artificial Sequence: Synthetic oligonucleotide
cugugacggaaugggcacc

SEQ ID NO: 1867446 - RNA, 19 nt, Artificial Sequence
  Description of Artificial Sequence: Synthetic oligonucleotide
ggguuacugaaguggucac

SEQ ID NO: 1867447 - RNA, 19 nt, Artificial Sequence
  Description of Artificial Sequence: Synthetic oligonucleotide
uaaccccacuuaggcuagg

SEQ ID NO: 1867448 - RNA, 19 nt, Artificial Sequence
  Description of Artificial Sequence: Synthetic oligonucleotide
ugcuggggaaagggguuac

SEQ ID NO: 1867449 - RNA, 19 nt, Artificial Sequence
  Description of Artificial Sequence: Synthetic oligonucleotide
ggcuaccugguagugaguc

SEQ ID NO: 1867450 - RNA, 19 nt, Artificial Sequence
  Description of Artificial Sequence: Synthetic oligonucleotide
gccuuagacagcguggcuc

SEQ ID NO: 1867451 - RNA, 19 nt, Artificial Sequence
  Description of Artificial Sequence: Synthetic oligonucleotide
ggcacccaugauaaucccc

SEQ ID NO: 1867452 - RNA, 19 nt, Artificial Sequence
  Description of Artificial Sequence: Synthetic oligonucleotide
ccccacuuaggcuaggcga

SEQ ID NO: 1867453 - RNA, 19 nt, Artificial Sequence
  Description of Artificial Sequence: Synthetic oligonucleotide
uugguggauuggucaggau

SEQ ID NO: 1867454 - RNA, 19 nt, Artificial Sequence
  Description of Artificial Sequence: Synthetic oligonucleotide
agccguucaucggacugca

SEQ ID NO: 1867455 - RNA, 19 nt, Artificial Sequence
  Description of Artificial Sequence: Synthetic oligonucleotide
cacguaagcaaggccaucu

SEQ ID NO: 1867456 - RNA, 19 nt, Artificial Sequence
  Description of Artificial Sequence: Synthetic oligonucleotide
cuaggcgaggaugcaguga

SEQ ID NO: 1867457 - RNA, 19 nt, Artificial Sequence
  Description of Artificial Sequence: Synthetic oligonucleotide
augcaacugaaaggcguau

SEQ ID NO: 1867458 - RNA, 19 nt, Artificial Sequence
  Description of Artificial Sequence: Synthetic oligonucleotide
gcuaggcgaggaugcagug

SEQ ID NO: 1867459 - RNA, 19 nt, Artificial Sequence
  Description of Artificial Sequence: Synthetic oligonucleotide
cgagucaaucugaucuaag

SEQ ID NO: 1867460 - RNA, 19 nt, Artificial Sequence
  Description of Artificial Sequence: Synthetic oligonucleotide
ccauacugcauccggccuc

SEQ ID NO: 1867461 - RNA, 19 nt, Artificial Sequence
  Description of Artificial Sequence: Synthetic oligonucleotide
gcggcacguaagcaaggcc

SEQ ID NO: 1867462 - RNA, 19 nt, Artificial Sequence
  Description of Artificial Sequence: Synthetic oligonucleotide
gcgucacugugacggaaug

SEQ ID NO: 1867463 - RNA, 19 nt, Artificial Sequence
  Description of Artificial Sequence: Synthetic oligonucleotide
accugguagugaguccccu

SEQ ID NO: 1867464 - RNA, 19 nt, Artificial Sequence
  Description of Artificial Sequence: Synthetic oligonucleotide
cggcacguaagcaaggcca

SEQ ID NO: 1867465 - RNA, 19 nt, Artificial Sequence
  Description of Artificial Sequence: Synthetic oligonucleotide
cacuuaggcuaggcgagga

SEQ ID NO: 1867466 - RNA, 19 nt, Artificial Sequence
  Description of Artificial Sequence: Synthetic oligonucleotide
caaacuuaucuggauccau

SEQ ID NO: 1867467 - RNA, 19 nt, Artificial Sequence
  Description of Artificial Sequence: Synthetic oligonucleotide
cugguagugaguccccuuu

SEQ ID NO: 1867468 - RNA, 19 nt, Artificial Sequence
  Description of Artificial Sequence: Synthetic oligonucleotide
ccaucuuuccucugauaaa

SEQ ID NO: 1867469 - RNA, 19 nt, Artificial Sequence
  Description of Artificial Sequence: Synthetic oligonucleotide
aggauccgcuggcuuucaa

SEQ ID NO: 1867470 - RNA, 19 nt, Artificial Sequence
  Description of Artificial Sequence: Synthetic oligonucleotide
cguggcucugaacucguuc

SEQ ID NO: 1867471 - RNA, 19 nt, Artificial Sequence
  Description of Artificial Sequence: Synthetic oligonucleotide
cucugaacucguucaggau

SEQ ID NO: 1867472 - RNA, 19 nt, Artificial Sequence
  Description of Artificial Sequence: Synthetic oligonucleotide
guuugggcugaggcgucuc

SEQ ID NO: 1867473 - RNA, 19 nt, Artificial Sequence
  Description of Artificial Sequence: Synthetic oligonucleotide
caacugacgcaugcaaggu

SEQ ID NO: 1867474 - RNA, 19 nt, Artificial Sequence
  Description of Artificial Sequence: Synthetic oligonucleotide
ccacuuaggcuaggcgagg

SEQ ID NO: 1867475 - RNA, 19 nt, Artificial Sequence
  Description of Artificial Sequence: Synthetic oligonucleotide
ggcgaggaugcagugauau

SEQ ID NO: 1867476 - RNA, 19 nt, Artificial Sequence
  Description of Artificial Sequence: Synthetic oligonucleotide
cguuaugugucaucucgaa

SEQ ID NO: 1867477 - RNA, 19 nt, Artificial Sequence
  Description of Artificial Sequence: Synthetic oligonucleotide
cuguuagugccagagccuu

SEQ ID NO: 1867478 - RNA, 19 nt, Artificial Sequence
  Description of Artificial Sequence: Synthetic oligonucleotide
ggcguauagucuguccucu

SEQ ID NO: 1867479 - RNA, 19 nt, Artificial Sequence
  Description of Artificial Sequence: Synthetic oligonucleotide
cacugcaggcaaggaccug

SEQ ID NO: 1867480 - RNA, 19 nt, Artificial Sequence
  Description of Artificial Sequence: Synthetic oligonucleotide
cgcaugcaaggugggaagg

SEQ ID NO: 1867481 - RNA, 19 nt, Artificial Sequence
  Description of Artificial Sequence: Synthetic oligonucleotide
ccagugcagccgaugcauc

SEQ ID NO: 1867482 - RNA, 19 nt, Artificial Sequence
  Description of Artificial Sequence: Synthetic oligonucleotide
ccccuuuacuaaauccaaa

SEQ ID NO: 1867483 - RNA, 19 nt, Artificial Sequence
  Description of Artificial Sequence: Synthetic oligonucleotide
ccuugugcaacugacgcau

SEQ ID NO: 1867484 - RNA, 19 nt, Artificial Sequence
  Description of Artificial Sequence: Synthetic oligonucleotide
gcgagucaaucugaucuaa

SEQ ID NO: 1867485 - RNA, 19 nt, Artificial Sequence
  Description of Artificial Sequence: Synthetic oligonucleotide
ggcuaggcgaggaugcagu

SEQ ID NO: 1867486 - RNA, 19 nt, Artificial Sequence
  Description of Artificial Sequence: Synthetic oligonucleotide
ggccaguguaagaaugacu

SEQ ID NO: 1867487 - RNA, 19 nt, Artificial Sequence
  Description of Artificial Sequence: Synthetic oligonucleotide
ccacaaucaucuacguuau

SEQ ID NO: 1867488 - RNA, 19 nt, Artificial Sequence
  Description of Artificial Sequence: Synthetic oligonucleotide
ccaaagcugugacggaugu

SEQ ID NO: 1867489 - RNA, 19 nt, Artificial Sequence
  Description of Artificial Sequence: Synthetic oligonucleotide
caaggaccuggcuguuagu

SEQ ID NO: 1867490 - RNA, 19 nt, Artificial Sequence
  Description of Artificial Sequence: Synthetic oligonucleotide
gacuauccuuuaggaaauu

SEQ ID NO: 1867491 - RNA, 19 nt, Artificial Sequence
  Description of Artificial Sequence: Synthetic oligonucleotide
cugcgucacugugacggaa

SEQ ID NO: 1867492 - RNA, 19 nt, Artificial Sequence
  Description of Artificial Sequence: Synthetic oligonucleotide
gggaaggauuugguagaaa

SEQ ID NO: 1867493 - RNA, 19 nt, Artificial Sequence
  Description of Artificial Sequence: Synthetic oligonucleotide
gugucaucucgaaguacuu

SEQ ID NO: 1867494 - RNA, 19 nt, Artificial Sequence
  Description of Artificial Sequence: Synthetic oligonucleotide
gcacguaagcaaggccauc

SEQ ID NO: 1867495 - RNA, 19 nt, Artificial Sequence
  Description of Artificial Sequence: Synthetic oligonucleotide
ggcacguaagcaaggccau

SEQ ID NO: 1867496 - RNA, 19 nt, Artificial Sequence
  Description of Artificial Sequence: Synthetic oligonucleotide
caguuaggauccgcuggcu

SEQ ID NO: 1867497 - RNA, 19 nt, Artificial Sequence
  Description of Artificial Sequence: Synthetic oligonucleotide
guggauuggucaggauaau

SEQ ID NO: 1867498 - RNA, 19 nt, Artificial Sequence
  Description of Artificial Sequence: Synthetic oligonucleotide
caucuacguuaugugucau

SEQ ID NO: 1867499 - RNA, 19 nt, Artificial Sequence
  Description of Artificial Sequence: Synthetic oligonucleotide
ggaguucagagaggccagu

SEQ ID NO: 1867500 - RNA, 19 nt, Artificial Sequence
  Description of Artificial Sequence: Synthetic oligonucleotide
ggcaaggaccuggcuguua

SEQ ID NO: 1867501 - RNA, 19 nt, Artificial Sequence
  Description of Artificial Sequence: Synthetic oligonucleotide
gcgucucuggcuggcugga

SEQ ID NO: 1867502 - RNA, 19 nt, Artificial Sequence
  Description of Artificial Sequence: Synthetic oligonucleotide
ccuguucucgaagacucuu

SEQ ID NO: 1867503 - RNA, 19 nt, Artificial Sequence
  Description of Artificial Sequence: Synthetic oligonucleotide
gcguauagucuguccucuu

SEQ ID NO: 1867504 - RNA, 19 nt, Artificial Sequence
  Description of Artificial Sequence: Synthetic oligonucleotide
gccguucaucggacugcac

SEQ ID NO: 1867505 - RNA, 19 nt, Artificial Sequence
  Description of Artificial Sequence: Synthetic oligonucleotide
gcuggggaaagggguuacu

SEQ ID NO: 1867506 - RNA, 19 nt, Artificial Sequence
  Description of Artificial Sequence: Synthetic oligonucleotide
caucagcaaaggggaucuu

SEQ ID NO: 1867507 - RNA, 19 nt, Artificial Sequence
  Description of Artificial Sequence: Synthetic oligonucleotide
ccgaugcaucccugcucuu

SEQ ID NO: 1867508 - RNA, 19 nt, Artificial Sequence
  Description of Artificial Sequence: Synthetic oligonucleotide
gcguggcucugaacucguu

SEQ ID NO: 1867509 - RNA, 19 nt, Artificial Sequence
  Description of Artificial Sequence: Synthetic oligonucleotide
ugaagaaagauacaacugg

SEQ ID NO: 1867510 - RNA, 19 nt, Artificial Sequence
  Description of Artificial Sequence: Synthetic oligonucleotide
acuugagacaaccauaacc

SEQ ID NO: 1867511 - RNA, 19 nt, Artificial Sequence
  Description of Artificial Sequence: Synthetic oligonucleotide
acaaccauaaccaaguucc

SEQ ID NO: 1867512 - RNA, 19 nt, Artificial Sequence
  Description of Artificial Sequence: Synthetic oligonucleotide
aaacagaaacgaucgacgc

SEQ ID NO: 1867513 - RNA, 19 nt, Artificial Sequence
  Description of Artificial Sequence: Synthetic oligonucleotide
aaagauacaacuggacucc

SEQ ID NO: 1867514 - RNA, 19 nt, Artificial Sequence
  Description of Artificial Sequence: Synthetic oligonucleotide
uuuagauucacagagucag

SEQ ID NO: 1867515 - RNA, 19 nt, Artificial Sequence
  Description of Artificial Sequence: Synthetic oligonucleotide
ucgacaaaccaccagaucc

SEQ ID NO: 1867516 - RNA, 19 nt, Artificial Sequence
  Description of Artificial Sequence: Synthetic oligonucleotide
aagaauuuggagcuuguag

SEQ ID NO: 1867517 - RNA, 19 nt, Artificial Sequence
  Description of Artificial Sequence: Synthetic oligonucleotide
acaaucuacaaacucgucg

SEQ ID NO: 1867518 - RNA, 19 nt, Artificial Sequence
  Description of Artificial Sequence: Synthetic oligonucleotide
aaaauuaggucgacaaacc

SEQ ID NO: 1867519 - RNA, 19 nt, Artificial Sequence
  Description of Artificial Sequence: Synthetic oligonucleotide
aacagaaacgaucgacgcc

SEQ ID NO: 1867520 - RNA, 19 nt, Artificial Sequence
  Description of Artificial Sequence: Synthetic oligonucleotide
ucccaaacagaaacgaucg

SEQ ID NO: 1867521 - RNA, 19 nt, Artificial Sequence
  Description of Artificial Sequence: Synthetic oligonucleotide
uccagaugacucaagaucc

SEQ ID NO: 1867522 - RNA, 19 nt, Artificial Sequence
  Description of Artificial Sequence: Synthetic oligonucleotide
caaucuacaaacucgucgg

SEQ ID NO: 1867523 - RNA, 19 nt, Artificial Sequence
  Description of Artificial Sequence: Synthetic oligonucleotide
uccaacgugauccacuggg

SEQ ID NO: 1867524 - RNA, 19 nt, Artificial Sequence
  Description of Artificial Sequence: Synthetic oligonucleotide
aaacgaucgacgccaaaac

SEQ ID NO: 1867525 - RNA, 19 nt, Artificial Sequence
  Description of Artificial Sequence: Synthetic oligonucleotide
aauuaggucgacaaaccac

SEQ ID NO: 1867526 - RNA, 19 nt, Artificial Sequence
  Description of Artificial Sequence: Synthetic oligonucleotide
cuguaauuuagauucacag

SEQ ID NO: 1867527 - RNA, 19 nt, Artificial Sequence
  Description of Artificial Sequence: Synthetic oligonucleotide
gaaagauacaacuggacuc

SEQ ID NO: 1867528 - RNA, 19 nt, Artificial Sequence
  Description of Artificial Sequence: Synthetic oligonucleotide
uuugguguguauuaaaauc

SEQ ID NO: 1867529 - RNA, 19 nt, Artificial Sequence
  Description of Artificial Sequence: Synthetic oligonucleotide
caguagguaacucacaggg

SEQ ID NO: 1867530 - RNA, 19 nt, Artificial Sequence
  Description of Artificial Sequence: Synthetic oligonucleotide
auuaggucgacaaaccacc

SEQ ID NO: 1867531 - RNA, 19 nt, Artificial Sequence
  Description of Artificial Sequence: Synthetic oligonucleotide
gaaaaugauccguggauag

SEQ ID NO: 1867532 - RNA, 19 nt, Artificial Sequence
  Description of Artificial Sequence: Synthetic oligonucleotide
gaugacucaagauccaagc

SEQ ID NO: 1867533 - RNA, 19 nt, Artificial Sequence
  Description of Artificial Sequence: Synthetic oligonucleotide
aaggaguagagcaacgugg

SEQ ID NO: 1867534 - RNA, 19 nt, Artificial Sequence
  Description of Artificial Sequence: Synthetic oligonucleotide
uauacaaggcuuauucucu

SEQ ID NO: 1867535 - RNA, 19 nt, Artificial Sequence
  Description of Artificial Sequence: Synthetic oligonucleotide
uuauacaaggcuuauucuc

SEQ ID NO: 1867536 - RNA, 19 nt, Artificial Sequence
  Description of Artificial Sequence: Synthetic oligonucleotide
cuugagacaaccauaacca

SEQ ID NO: 1867537 - RNA, 19 nt, Artificial Sequence
  Description of Artificial Sequence: Synthetic oligonucleotide
aaggcuuauucucucguag

SEQ ID NO: 1867538 - RNA, 19 nt, Artificial Sequence
  Description of Artificial Sequence: Synthetic oligonucleotide
ugugcauggguaaacacac

SEQ ID NO: 1867539 - RNA, 19 nt, Artificial Sequence
  Description of Artificial Sequence: Synthetic oligonucleotide
accaccagaucccaagucc

SEQ ID NO: 1867540 - RNA, 19 nt, Artificial Sequence
  Description of Artificial Sequence: Synthetic oligonucleotide
uuugguuuauccuguuggg

SEQ ID NO: 1867541 - RNA, 19 nt, Artificial Sequence
  Description of Artificial Sequence: Synthetic oligonucleotide
aaauuaggucgacaaacca

SEQ ID NO: 1867542 - RNA, 19 nt, Artificial Sequence
  Description of Artificial Sequence: Synthetic oligonucleotide
augacucaagauccaagcc

SEQ ID NO: 1867543 - RNA, 19 nt, Artificial Sequence
  Description of Artificial Sequence: Synthetic oligonucleotide
cuuguaguaauuagccggg

SEQ ID NO: 1867544 - RNA, 19 nt, Artificial Sequence
  Description of Artificial Sequence: Synthetic oligonucleotide
gcuuguaguaauuagccgg

SEQ ID NO: 1867545 - RNA, 19 nt, Artificial Sequence
  Description of Artificial Sequence: Synthetic oligonucleotide
ugcauggguaaacacacgc

SEQ ID NO: 1867546 - RNA, 19 nt, Artificial Sequence
  Description of Artificial Sequence: Synthetic oligonucleotide
gaagucacuauuucuuuug

SEQ ID NO: 1867547 - RNA, 19 nt, Artificial Sequence
  Description of Artificial Sequence: Synthetic oligonucleotide
uucucucguagaaaggucc

SEQ ID NO: 1867548 - RNA, 19 nt, Artificial Sequence
  Description of Artificial Sequence: Synthetic oligonucleotide
uuauucucucguagaaagg

SEQ ID NO: 1867549 - RNA, 19 nt, Artificial Sequence
  Description of Artificial Sequence: Synthetic oligonucleotide
gugguuaugaaguaguguc

SEQ ID NO: 1867550 - RNA, 19 nt, Artificial Sequence
  Description of Artificial Sequence: Synthetic oligonucleotide
agcaaaauuaggucgacaa

SEQ ID NO: 1867551 - RNA, 19 nt, Artificial Sequence
  Description of Artificial Sequence: Synthetic oligonucleotide
uuuauacaaggcuuauucu

SEQ ID NO: 1867552 - RNA, 19 nt, Artificial Sequence
  Description of Artificial Sequence: Synthetic oligonucleotide
ugugagauccaguucggcc

SEQ ID NO: 1867553 - RNA, 19 nt, Artificial Sequence
  Description of Artificial Sequence: Synthetic oligonucleotide
uguauucccagcucggggc

SEQ ID NO: 1867554 - RNA, 19 nt, Artificial Sequence
  Description of Artificial Sequence: Synthetic oligonucleotide
agcaguagguaacucacag

SEQ ID NO: 1867555 - RNA, 19 nt, Artificial Sequence
  Description of Artificial Sequence: Synthetic oligonucleotide
aaacucgucggguagguaa

SEQ ID NO: 1867556 - RNA, 19 nt, Artificial Sequence
  Description of Artificial Sequence: Synthetic oligonucleotide
acucccacaacacugcuug

SEQ ID NO: 1867557 - RNA, 19 nt, Artificial Sequence
  Description of Artificial Sequence: Synthetic oligonucleotide
gacgccaaaacaucccagg

SEQ ID NO: 1867558 - RNA, 19 nt, Artificial Sequence
  Description of Artificial Sequence: Synthetic oligonucleotide
uuuaguagacagugcacca

SEQ ID NO: 1867559 - RNA, 19 nt, Artificial Sequence
  Description of Artificial Sequence: Synthetic oligonucleotide
aacaguagguuccccagga

SEQ ID NO: 1867560 - RNA, 19 nt, Artificial Sequence
  Description of Artificial Sequence: Synthetic oligonucleotide
agaaacggcguucugaaaa

SEQ ID NO: 1867561 - RNA, 19 nt, Artificial Sequence
  Description of Artificial Sequence: Synthetic oligonucleotide
aguaauuagccgggcaacc

SEQ ID NO: 1867562 - RNA, 19 nt, Artificial Sequence
  Description of Artificial Sequence: Synthetic oligonucleotide
uaauuuagauucacagagu

SEQ ID NO: 1867563 - RNA, 19 nt, Artificial Sequence
  Description of Artificial Sequence: Synthetic oligonucleotide
aacgugauccacuggggca

SEQ ID NO: 1867564 - RNA, 19 nt, Artificial Sequence
  Description of Artificial Sequence: Synthetic oligonucleotide
aacuugagacaaccauaac

SEQ ID NO: 1867565 - RNA, 19 nt, Artificial Sequence
  Description of Artificial Sequence: Synthetic oligonucleotide
ucucucguagaaagguccg

SEQ ID NO: 1867566 - RNA, 19 nt, Artificial Sequence
  Description of Artificial Sequence: Synthetic oligonucleotide
uguccgguguacuuuauac

SEQ ID NO: 1867567 - RNA, 19 nt, Artificial Sequence
  Description of Artificial Sequence: Synthetic oligonucleotide
agcuuguaguaauuagccg

SEQ ID NO: 1867568 - RNA, 19 nt, Artificial Sequence
  Description of Artificial Sequence: Synthetic oligonucleotide
uacaacuggacucccacaa

SEQ ID NO: 1867569 - RNA, 19 nt, Artificial Sequence
  Description of Artificial Sequence: Synthetic oligonucleotide
uccgguguacuuuauacaa

SEQ ID NO: 1867570 - RNA, 19 nt, Artificial Sequence
  Description of Artificial Sequence: Synthetic oligonucleotide
uggagcuuguaguaauuag

SEQ ID NO: 1867571 - RNA, 19 nt, Artificial Sequence
  Description of Artificial Sequence: Synthetic oligonucleotide
uucuaugucuccuggagau

SEQ ID NO: 1867572 - RNA, 19 nt, Artificial Sequence
  Description of Artificial Sequence: Synthetic oligonucleotide
gaaggaguagagcaacgug

SEQ ID NO: 1867573 - RNA, 19 nt, Artificial Sequence
  Description of Artificial Sequence: Synthetic oligonucleotide
caaaccaccagaucccaag

SEQ ID NO: 1867574 - RNA, 19 nt, Artificial Sequence
  Description of Artificial Sequence: Synthetic oligonucleotide
gggugugagauccaguucg

SEQ ID NO: 1867575 - RNA, 19 nt, Artificial Sequence
  Description of Artificial Sequence: Synthetic oligonucleotide
ucgcuguauucccagcucg

SEQ ID NO: 1867576 - RNA, 19 nt, Artificial Sequence
  Description of Artificial Sequence: Synthetic oligonucleotide
uuaaacgaguggcuccgag

SEQ ID NO: 1867577 - RNA, 19 nt, Artificial Sequence
  Description of Artificial Sequence: Synthetic oligonucleotide
aacgaucgacgccaaaaca

SEQ ID NO: 1867578 - RNA, 19 nt, Artificial Sequence
  Description of Artificial Sequence: Synthetic oligonucleotide
agugaugagcaaaauuagg

SEQ ID NO: 1867579 - RNA, 19 nt, Artificial Sequence
  Description of Artificial Sequence: Synthetic oligonucleotide
aagccaggccgccacggcc

SEQ ID NO: 1867580 - RNA, 19 nt, Artificial Sequence
  Description of Artificial Sequence: Synthetic oligonucleotide
aaccaccagaucccaaguc

SEQ ID NO: 1867581 - RNA, 19 nt, Artificial Sequence
  Description of Artificial Sequence: Synthetic oligonucleotide
acagaaacgaucgacgcca

SEQ ID NO: 1867582 - RNA, 19 nt, Artificial Sequence
  Description of Artificial Sequence: Synthetic oligonucleotide
uuucuaugucuccuggaga

SEQ ID NO: 1867583 - RNA, 19 nt, Artificial Sequence
  Description of Artificial Sequence: Synthetic oligonucleotide
acagcaguagguaacucac

SEQ ID NO: 1867584 - RNA, 19 nt, Artificial Sequence
  Description of Artificial Sequence: Synthetic oligonucleotide
aaagccaggccgccacggc

SEQ ID NO: 1867585 - RNA, 19 nt, Artificial Sequence
  Description of Artificial Sequence: Synthetic oligonucleotide
ugguguguauuaaaaucca

SEQ ID NO: 1867586 - RNA, 19 nt, Artificial Sequence
  Description of Artificial Sequence: Synthetic oligonucleotide
uacaaggcuuauucucucg

SEQ ID NO: 1867587 - RNA, 19 nt, Artificial Sequence
  Description of Artificial Sequence: Synthetic oligonucleotide
acagucauuucuaugucuc

SEQ ID NO: 1867588 - RNA, 19 nt, Artificial Sequence
  Description of Artificial Sequence: Synthetic oligonucleotide
uccacaucacuguaggccu

SEQ ID NO: 1867589 - RNA, 19 nt, Artificial Sequence
  Description of Artificial Sequence: Synthetic oligonucleotide
acgaguggcuccgagagac

SEQ ID NO: 1867590 - RNA, 19 nt, Artificial Sequence
  Description of Artificial Sequence: Synthetic oligonucleotide
aagauacaacuggacuccc

SEQ ID NO: 1867591 - RNA, 19 nt, Artificial Sequence
  Description of Artificial Sequence: Synthetic oligonucleotide
agcaacgugguuaugaagu

SEQ ID NO: 1867592 - RNA, 19 nt, Artificial Sequence
  Description of Artificial Sequence: Synthetic oligonucleotide
cagugaugagcaaaauuag

SEQ ID NO: 1867593 - RNA, 19 nt, Artificial Sequence
  Description of Artificial Sequence: Synthetic oligonucleotide
auacaaggcuuauucucuc

SEQ ID NO: 1867594 - RNA, 19 nt, Artificial Sequence
  Description of Artificial Sequence: Synthetic oligonucleotide
cauuaaacgaguggcuccg

SEQ ID NO: 1867595 - RNA, 19 nt, Artificial Sequence
  Description of Artificial Sequence: Synthetic oligonucleotide
ucucguagaaagguccggg

SEQ ID NO: 1867596 - RNA, 19 nt, Artificial Sequence
  Description of Artificial Sequence: Synthetic oligonucleotide
acagagucagaauuuuggu

SEQ ID NO: 1867597 - RNA, 19 nt, Artificial Sequence
  Description of Artificial Sequence: Synthetic oligonucleotide
uagguaacucacagggcag

SEQ ID NO: 1867598 - RNA, 19 nt, Artificial Sequence
  Description of Artificial Sequence: Synthetic oligonucleotide
ucuacaaacucgucgggua

SEQ ID NO: 1867599 - RNA, 19 nt, Artificial Sequence
  Description of Artificial Sequence: Synthetic oligonucleotide
guuaugaaguaguguccgg

SEQ ID NO: 1867600 - RNA, 19 nt, Artificial Sequence
  Description of Artificial Sequence: Synthetic oligonucleotide
cagagucagaauuuuggug

SEQ ID NO: 1867601 - RNA, 19 nt, Artificial Sequence
  Description of Artificial Sequence: Synthetic oligonucleotide
aagccacacagaaacggcg

SEQ ID NO: 1867602 - RNA, 19 nt, Artificial Sequence
  Description of Artificial Sequence: Synthetic oligonucleotide
gacaaccauaaccaaguuc

SEQ ID NO: 1867603 - RNA, 19 nt, Artificial Sequence
  Description of Artificial Sequence: Synthetic oligonucleotide
aacgugguuaugaaguagu

SEQ ID NO: 1867604 - RNA, 19 nt, Artificial Sequence
  Description of Artificial Sequence: Synthetic oligonucleotide
uagagcaacgugguuauga

SEQ ID NO: 1867605 - RNA, 19 nt, Artificial Sequence
  Description of Artificial Sequence: Synthetic oligonucleotide
gaucccaaguccucccagg

SEQ ID NO: 1867606 - RNA, 19 nt, Artificial Sequence
  Description of Artificial Sequence: Synthetic oligonucleotide
uuaguagacagugcaccag

SEQ ID NO: 1867607 - RNA, 19 nt, Artificial Sequence
  Description of Artificial Sequence: Synthetic oligonucleotide
uuaugaaguaguguccggu

SEQ ID NO: 1867608 - RNA, 19 nt, Artificial Sequence
  Description of Artificial Sequence: Synthetic oligonucleotide
aggucgacaaaccaccaga

SEQ ID NO: 1867609 - RNA, 19 nt, Artificial Sequence
  Description of Artificial Sequence: Synthetic oligonucleotide
aacuggacucccacaacac

SEQ ID NO: 1867610 - RNA, 19 nt, Artificial Sequence
  Description of Artificial Sequence: Synthetic oligonucleotide
gguuaugaaguaguguccg

SEQ ID NO: 1867611 - RNA, 19 nt, Artificial Sequence
  Description of Artificial Sequence: Synthetic oligonucleotide
aagguccggggacuggcac

SEQ ID NO: 1867612 - RNA, 19 nt, Artificial Sequence
  Description of Artificial Sequence: Synthetic oligonucleotide
ggcguucugaaaaugaucc

SEQ ID NO: 1867613 - RNA, 19 nt, Artificial Sequence
  Description of Artificial Sequence: Synthetic oligonucleotide
aagaaggaguagagcaacg

SEQ ID NO: 1867614 - RNA, 19 nt, Artificial Sequence
  Description of Artificial Sequence: Synthetic oligonucleotide
aguagagcaacgugguuau

SEQ ID NO: 1867615 - RNA, 19 nt, Artificial Sequence
  Description of Artificial Sequence: Synthetic oligonucleotide
caagccacacagaaacggc

SEQ ID NO: 1867616 - RNA, 19 nt, Artificial Sequence
  Description of Artificial Sequence: Synthetic oligonucleotide
aaacacacgcuuugguuua

SEQ ID NO: 1867617 - RNA, 19 nt, Artificial Sequence
  Description of Artificial Sequence: Synthetic oligonucleotide
acagaaacggcguucugaa

SEQ ID NO: 1867618 - RNA, 19 nt, Artificial Sequence
  Description of Artificial Sequence: Synthetic oligonucleotide
ugaaaaugauccguggaua

SEQ ID NO: 1867619 - RNA, 19 nt, Artificial Sequence
  Description of Artificial Sequence: Synthetic oligonucleotide
ccuagcaccaucuucccgg

SEQ ID NO: 1867620 - RNA, 19 nt, Artificial Sequence
  Description of Artificial Sequence: Synthetic oligonucleotide
uccagugaugagcaaaauu

SEQ ID NO: 1867621 - RNA, 19 nt, Artificial Sequence
  Description of Artificial Sequence: Synthetic oligonucleotide
uuagauucacagagucaga

SEQ ID NO: 1867622 - RNA, 19 nt, Artificial Sequence
  Description of Artificial Sequence: Synthetic oligonucleotide
gaauuuggagcuuguagua

SEQ ID NO: 1867623 - RNA, 19 nt, Artificial Sequence
  Description of Artificial Sequence: Synthetic oligonucleotide
uaggucgacaaaccaccag

SEQ ID NO: 1867624 - RNA, 19 nt, Artificial Sequence
  Description of Artificial Sequence: Synthetic oligonucleotide
cucguagaaagguccgggg

SEQ ID NO: 1867625 - RNA, 19 nt, Artificial Sequence
  Description of Artificial Sequence: Synthetic oligonucleotide
guaguaauuagccgggcaa

SEQ ID NO: 1867626 - RNA, 19 nt, Artificial Sequence
  Description of Artificial Sequence: Synthetic oligonucleotide
acagugcaccaguugcuac

SEQ ID NO: 1867627 - RNA, 19 nt, Artificial Sequence
  Description of Artificial Sequence: Synthetic oligonucleotide
aaugauccguggauagaag

SEQ ID NO: 1867628 - RNA, 19 nt, Artificial Sequence
  Description of Artificial Sequence: Synthetic oligonucleotide
gaaacgaucgacgccaaaa

SEQ ID NO: 1867629 - RNA, 19 nt, Artificial Sequence
  Description of Artificial Sequence: Synthetic oligonucleotide
uacaaacucgucggguagg

SEQ ID NO: 1867630 - RNA, 19 nt, Artificial Sequence
  Description of Artificial Sequence: Synthetic oligonucleotide
cuguauucccagcucgggg

SEQ ID NO: 1867631 - RNA, 19 nt, Artificial Sequence
  Description of Artificial Sequence: Synthetic oligonucleotide
agcaacaguagguucccca

SEQ ID NO: 1867632 - RNA, 19 nt, Artificial Sequence
  Description of Artificial Sequence: Synthetic oligonucleotide
cuacaaacucgucggguag

SEQ ID NO: 1867633 - RNA, 19 nt, Artificial Sequence
  Description of Artificial Sequence: Synthetic oligonucleotide
ucugcaagguaagguuugg

SEQ ID NO: 1867634 - RNA, 19 nt, Artificial Sequence
  Description of Artificial Sequence: Synthetic oligonucleotide
aucgacgccaaaacauccc

SEQ ID NO: 1867635 - RNA, 19 nt, Artificial Sequence
  Description of Artificial Sequence: Synthetic oligonucleotide
uaauuagccgggcaaccua

SEQ ID NO: 1867636 - RNA, 19 nt, Artificial Sequence
  Description of Artificial Sequence: Synthetic oligonucleotide
agggucagcaguuucccga

SEQ ID NO: 1867637 - RNA, 19 nt, Artificial Sequence
  Description of Artificial Sequence: Synthetic oligonucleotide
gaucgacgccaaaacaucc

SEQ ID NO: 1867638 - RNA, 19 nt, Artificial Sequence
  Description of Artificial Sequence: Synthetic oligonucleotide
uuagccgggcaaccuaaca

SEQ ID NO: 1867639 - RNA, 19 nt, Artificial Sequence
  Description of Artificial Sequence: Synthetic oligonucleotide
acaaggcuuauucucucgu

SEQ ID NO: 1867640 - RNA, 19 nt, Artificial Sequence
  Description of Artificial Sequence: Synthetic oligonucleotide
cacacgcuuugguuuaucc

SEQ ID NO: 1867641 - RNA, 19 nt, Artificial Sequence
  Description of Artificial Sequence: Synthetic oligonucleotide
agguaacucacagggcagc

SEQ ID NO: 1867642 - RNA, 19 nt, Artificial Sequence
  Description of Artificial Sequence: Synthetic oligonucleotide
uuaggucgacaaaccacca

SEQ ID NO: 1867643 - RNA, 19 nt, Artificial Sequence
  Description of Artificial Sequence: Synthetic oligonucleotide
guagacagugcaccaguug

SEQ ID NO: 1867644 - RNA, 19 nt, Artificial Sequence
  Description of Artificial Sequence: Synthetic oligonucleotide
aggcgguugcauuuccaac

SEQ ID NO: 1867645 - RNA, 19 nt, Artificial Sequence
  Description of Artificial Sequence: Synthetic oligonucleotide
caacgugauccacuggggc

SEQ ID NO: 1867646 - RNA, 19 nt, Artificial Sequence
  Description of Artificial Sequence: Synthetic oligonucleotide
ggagcuuguaguaauuagc

SEQ ID NO: 1867647 - RNA, 19 nt, Artificial Sequence
  Description of Artificial Sequence: Synthetic oligonucleotide
gagcaacgugguuaugaag

SEQ ID NO: 1867648 - RNA, 19 nt, Artificial Sequence
  Description of Artificial Sequence: Synthetic oligonucleotide
uauccuguugggccccugc

SEQ ID NO: 1867649 - RNA, 19 nt, Artificial Sequence
  Description of Artificial Sequence: Synthetic oligonucleotide
uaguaauuagccgggcaac

SEQ ID NO: 1867650 - RNA, 19 nt, Artificial Sequence
  Description of Artificial Sequence: Synthetic oligonucleotide
agggugugagauccaguuc

SEQ ID NO: 1867651 - RNA, 19 nt, Artificial Sequence
  Description of Artificial Sequence: Synthetic oligonucleotide
ucgucggguagguaagagc

SEQ ID NO: 1867652 - RNA, 19 nt, Artificial Sequence
  Description of Artificial Sequence: Synthetic oligonucleotide
ugucccaaacagaaacgau

SEQ ID NO: 1867653 - RNA, 19 nt, Artificial Sequence
  Description of Artificial Sequence: Synthetic oligonucleotide
gagauuucucacuggcgca

SEQ ID NO: 1867654 - RNA, 19 nt, Artificial Sequence
  Description of Artificial Sequence: Synthetic oligonucleotide
gcauuaaacgaguggcucc

SEQ ID NO: 1867655 - RNA, 19 nt, Artificial Sequence
  Description of Artificial Sequence: Synthetic oligonucleotide
guguacuuuauacaaggcu

SEQ ID NO: 1867656 - RNA, 19 nt, Artificial Sequence
  Description of Artificial Sequence: Synthetic oligonucleotide
cagucauuucuaugucucc

SEQ ID NO: 1867657 - RNA, 19 nt, Artificial Sequence
  Description of Artificial Sequence: Synthetic oligonucleotide
gguuuauccuguugggccc

SEQ ID NO: 1867658 - RNA, 19 nt, Artificial Sequence
  Description of Artificial Sequence: Synthetic oligonucleotide
cuaaaggggaaagugaugu

SEQ ID NO: 1867659 - RNA, 19 nt, Artificial Sequence
  Description of Artificial Sequence: Synthetic oligonucleotide
auucucucguagaaagguc

SEQ ID NO: 1867660 - RNA, 19 nt, Artificial Sequence
  Description of Artificial Sequence: Synthetic oligonucleotide
agagcaacgugguuaugaa

SEQ ID NO: 1867661 - RNA, 19 nt, Artificial Sequence
  Description of Artificial Sequence: Synthetic oligonucleotide
uccgagagacacagugcag

SEQ ID NO: 1867662 - RNA, 19 nt, Artificial Sequence
  Description of Artificial Sequence: Synthetic oligonucleotide
gucccaaacagaaacgauc

SEQ ID NO: 1867663 - RNA, 19 nt, Artificial Sequence
  Description of Artificial Sequence: Synthetic oligonucleotide
aaggaugaccggagagugg

SEQ ID NO: 1867664 - RNA, 19 nt, Artificial Sequence
  Description of Artificial Sequence: Synthetic oligonucleotide
aacucgucggguagguaag

SEQ ID NO: 1867665 - RNA, 19 nt, Artificial Sequence
  Description of Artificial Sequence: Synthetic oligonucleotide
gaguagagcaacgugguua

SEQ ID NO: 1867666 - RNA, 19 nt, Artificial Sequence
  Description of Artificial Sequence: Synthetic oligonucleotide
auuuccaacgugauccacu

SEQ ID NO: 1867667 - RNA, 19 nt, Artificial Sequence
  Description of Artificial Sequence: Synthetic oligonucleotide
aggcuuauucucucguaga

SEQ ID NO: 1867668 - RNA, 19 nt, Artificial Sequence
  Description of Artificial Sequence: Synthetic oligonucleotide
uugagacaaccauaaccaa

SEQ ID NO: 1867669 - RNA, 19 nt, Artificial Sequence
  Description of Artificial Sequence: Synthetic oligonucleotide
uuuggagcuuguaguaauu

SEQ ID NO: 1867670 - RNA, 19 nt, Artificial Sequence
  Description of Artificial Sequence: Synthetic oligonucleotide
ggcuccgagagacacagug

SEQ ID NO: 1867671 - RNA, 19 nt, Artificial Sequence
  Description of Artificial Sequence: Synthetic oligonucleotide
aauuagccgggcaaccuaa

SEQ ID NO: 1867672 - RNA, 19 nt, Artificial Sequence
  Description of Artificial Sequence: Synthetic oligonucleotide
gagcaaaggaugaccggag

SEQ ID NO: 1867673 - RNA, 19 nt, Artificial Sequence
  Description of Artificial Sequence: Synthetic oligonucleotide
agccgggcaaccuaacacu

SEQ ID NO: 1867674 - RNA, 19 nt, Artificial Sequence
  Description of Artificial Sequence: Synthetic oligonucleotide
uuccaacgugauccacugg

SEQ ID NO: 1867675 - RNA, 19 nt, Artificial Sequence
  Description of Artificial Sequence: Synthetic oligonucleotide
uugcauuuccaacgugauc

SEQ ID NO: 1867676 - RNA, 19 nt, Artificial Sequence
  Description of Artificial Sequence: Synthetic oligonucleotide
uccaguucggccguggcau

SEQ ID NO: 1867677 - RNA, 19 nt, Artificial Sequence
  Description of Artificial Sequence: Synthetic oligonucleotide
aguaguguccgguguacuu

SEQ ID NO: 1867678 - RNA, 19 nt, Artificial Sequence
  Description of Artificial Sequence: Synthetic oligonucleotide
gcaacaguagguuccccag

SEQ ID NO: 1867679 - RNA, 19 nt, Artificial Sequence
  Description of Artificial Sequence: Synthetic oligonucleotide
ccaucacugggcaucagcc

SEQ ID NO: 1867680 - RNA, 19 nt, Artificial Sequence
  Description of Artificial Sequence: Synthetic oligonucleotide
acgaucgacgccaaaacau

SEQ ID NO: 1867681 - RNA, 19 nt, Artificial Sequence
  Description of Artificial Sequence: Synthetic oligonucleotide
acgccaaaacaucccagga

SEQ ID NO: 1867682 - RNA, 19 nt, Artificial Sequence
  Description of Artificial Sequence: Synthetic oligonucleotide
cuccgagagacacagugca

SEQ ID NO: 1867683 - RNA, 19 nt, Artificial Sequence
  Description of Artificial Sequence: Synthetic oligonucleotide
ggcuacgggacccucgggg

SEQ ID NO: 1867684 - RNA, 19 nt, Artificial Sequence
  Description of Artificial Sequence: Synthetic oligonucleotide
acuggacugcaguguguuc

SEQ ID NO: 1867685 - RNA, 19 nt, Artificial Sequence
  Description of Artificial Sequence: Synthetic oligonucleotide
acggcuguuccaguguguc

SEQ ID NO: 1867686 - RNA, 19 nt, Artificial Sequence
  Description of Artificial Sequence: Synthetic oligonucleotide
aacgaguggcuccgagaga

SEQ ID NO: 1867687 - RNA, 19 nt, Artificial Sequence
  Description of Artificial Sequence: Synthetic oligonucleotide
ugagcaaaauuaggucgac

SEQ ID NO: 1867688 - RNA, 19 nt, Artificial Sequence
  Description of Artificial Sequence: Synthetic oligonucleotide
caacgugguuaugaaguag

SEQ ID NO: 1867689 - RNA, 19 nt, Artificial Sequence
  Description of Artificial Sequence: Synthetic oligonucleotide
uuguaguaauuagccgggc

SEQ ID NO: 1867690 - RNA, 19 nt, Artificial Sequence
  Description of Artificial Sequence: Synthetic oligonucleotide
uuucccgacggcuguucca

SEQ ID NO: 1867691 - RNA, 19 nt, Artificial Sequence
  Description of Artificial Sequence: Synthetic oligonucleotide
auccguggauagaagucac

SEQ ID NO: 1867692 - RNA, 19 nt, Artificial Sequence
  Description of Artificial Sequence: Synthetic oligonucleotide
ucggguagguaagagcaaa

SEQ ID NO: 1867693 - RNA, 19 nt, Artificial Sequence
  Description of Artificial Sequence: Synthetic oligonucleotide
ccaagccacacagaaacgg

SEQ ID NO: 1867694 - RNA, 19 nt, Artificial Sequence
  Description of Artificial Sequence: Synthetic oligonucleotide
aggaguagagcaacguggu

SEQ ID NO: 1867695 - RNA, 19 nt, Artificial Sequence
  Description of Artificial Sequence: Synthetic oligonucleotide
aaacaaagccaggccgcca

SEQ ID NO: 1867696 - RNA, 19 nt, Artificial Sequence
  Description of Artificial Sequence: Synthetic oligonucleotide
uccguggauagaagucacu

SEQ ID NO: 1867697 - RNA, 19 nt, Artificial Sequence
  Description of Artificial Sequence: Synthetic oligonucleotide
cacaaucuacaaacucguc

SEQ ID NO: 1867698 - RNA, 19 nt, Artificial Sequence
  Description of Artificial Sequence: Synthetic oligonucleotide
aaguaguguccgguguacu

SEQ ID NO: 1867699 - RNA, 19 nt, Artificial Sequence
  Description of Artificial Sequence: Synthetic oligonucleotide
cucucguagaaagguccgg

SEQ ID NO: 1867700 - RNA, 19 nt, Artificial Sequence
  Description of Artificial Sequence: Synthetic oligonucleotide
guaacucacagggcagccc

SEQ ID NO: 1867701 - RNA, 19 nt, Artificial Sequence
  Description of Artificial Sequence: Synthetic oligonucleotide
uaguguccgguguacuuua

SEQ ID NO: 1867702 - RNA, 19 nt, Artificial Sequence
  Description of Artificial Sequence: Synthetic oligonucleotide
gcguucugaaaaugauccg

SEQ ID NO: 1867703 - RNA, 19 nt, Artificial Sequence
  Description of Artificial Sequence: Synthetic oligonucleotide
guacuuuauacaaggcuua

SEQ ID NO: 1867704 - RNA, 19 nt, Artificial Sequence
  Description of Artificial Sequence: Synthetic oligonucleotide
auuagccgggcaaccuaac

SEQ ID NO: 1867705 - RNA, 19 nt, Artificial Sequence
  Description of Artificial Sequence: Synthetic oligonucleotide
ucccacaacacugcuuguc

SEQ ID NO: 1867706 - RNA, 19 nt, Artificial Sequence
  Description of Artificial Sequence: Synthetic oligonucleotide
cguggcauuaaacgagugg

SEQ ID NO: 1867707 - RNA, 19 nt, Artificial Sequence
  Description of Artificial Sequence: Synthetic oligonucleotide
guuuauccuguugggcccc

SEQ ID NO: 1867708 - RNA, 19 nt, Artificial Sequence
  Description of Artificial Sequence: Synthetic oligonucleotide
guuucccgacggcuguucc

SEQ ID NO: 1867709 - RNA, 19 nt, Artificial Sequence
  Description of Artificial Sequence: Synthetic oligonucleotide
agauccaguucggccgugg

SEQ ID NO: 1867710 - RNA, 19 nt, Artificial Sequence
  Description of Artificial Sequence: Synthetic oligonucleotide
gucgacaaaccaccagauc

SEQ ID NO: 1867711 - RNA, 19 nt, Artificial Sequence
  Description of Artificial Sequence: Synthetic oligonucleotide
gcuaccaucacugggcauc

SEQ ID NO: 1867712 - RNA, 19 nt, Artificial Sequence
  Description of Artificial Sequence: Synthetic oligonucleotide
acaaacucgucggguaggu

SEQ ID NO: 1867713 - RNA, 19 nt, Artificial Sequence
  Description of Artificial Sequence: Synthetic oligonucleotide
gguaagagcaaaggaugac

SEQ ID NO: 1867714 - RNA, 19 nt, Artificial Sequence
  Description of Artificial Sequence: Synthetic oligonucleotide
ggcauuaaacgaguggcuc

SEQ ID NO: 1867715 - RNA, 19 nt, Artificial Sequence
  Description of Artificial Sequence: Synthetic oligonucleotide
gguuugguuugaaaaguuc

SEQ ID NO: 1867716 - RNA, 19 nt, Artificial Sequence
  Description of Artificial Sequence: Synthetic oligonucleotide
gucgcuguauucccagcuc

SEQ ID NO: 1867717 - RNA, 19 nt, Artificial Sequence
  Description of Artificial Sequence: Synthetic oligonucleotide
ccaacgugauccacugggg

SEQ ID NO: 1867718 - RNA, 19 nt, Artificial Sequence
  Description of Artificial Sequence: Synthetic oligonucleotide
gagcaaaauuaggucgaca

SEQ ID NO: 1867719 - RNA, 19 nt, Artificial Sequence
  Description of Artificial Sequence: Synthetic oligonucleotide
gguguguauuaaaauccac

SEQ ID NO: 1867720 - RNA, 19 nt, Artificial Sequence
  Description of Artificial Sequence: Synthetic oligonucleotide
gguaagguuugguuugaaa

SEQ ID NO: 1867721 - RNA, 19 nt, Artificial Sequence
  Description of Artificial Sequence: Synthetic oligonucleotide
ggggcuacgggacccucgg

SEQ ID NO: 1867722 - RNA, 19 nt, Artificial Sequence
  Description of Artificial Sequence: Synthetic oligonucleotide
uacgggacccucgggguga

SEQ ID NO: 1867723 - RNA, 19 nt, Artificial Sequence
  Description of Artificial Sequence: Synthetic oligonucleotide
acacagaaacggcguucug

SEQ ID NO: 1867724 - RNA, 19 nt, Artificial Sequence
  Description of Artificial Sequence: Synthetic oligonucleotide
ccgagagacacagugcagc

SEQ ID NO: 1867725 - RNA, 19 nt, Artificial Sequence
  Description of Artificial Sequence: Synthetic oligonucleotide
cauggguaaacacacgcuu

SEQ ID NO: 1867726 - RNA, 19 nt, Artificial Sequence
  Description of Artificial Sequence: Synthetic oligonucleotide
gugcauggguaaacacacg

SEQ ID NO: 1867727 - RNA, 19 nt, Artificial Sequence
  Description of Artificial Sequence: Synthetic oligonucleotide
cguagaaagguccggggac

SEQ ID NO: 1867728 - RNA, 19 nt, Artificial Sequence
  Description of Artificial Sequence: Synthetic oligonucleotide
gguaacucacagggcagcc

SEQ ID NO: 1867729 - RNA, 19 nt, Artificial Sequence
  Description of Artificial Sequence: Synthetic oligonucleotide
agauacaacuggacuccca

SEQ ID NO: 1867730 - RNA, 19 nt, Artificial Sequence
  Description of Artificial Sequence: Synthetic oligonucleotide
acgugauccacuggggcau

SEQ ID NO: 1867731 - RNA, 19 nt, Artificial Sequence
  Description of Artificial Sequence: Synthetic oligonucleotide
gacccucggggugagcggc

SEQ ID NO: 1867732 - RNA, 19 nt, Artificial Sequence
  Description of Artificial Sequence: Synthetic oligonucleotide
cacagucauuucuaugucu

SEQ ID NO: 1867733 - RNA, 19 nt, Artificial Sequence
  Description of Artificial Sequence: Synthetic oligonucleotide
agaaacgaucgacgccaaa

SEQ ID NO: 1867734 - RNA, 19 nt, Artificial Sequence
  Description of Artificial Sequence: Synthetic oligonucleotide
gucagaauuuuggugugua

SEQ ID NO: 1867735 - RNA, 19 nt, Artificial Sequence
  Description of Artificial Sequence: Synthetic oligonucleotide
cuacgggacccucggggug

SEQ ID NO: 1867736 - RNA, 19 nt, Artificial Sequence
  Description of Artificial Sequence: Synthetic oligonucleotide
cagugcagcaacaguaggu

SEQ ID NO: 1867737 - RNA, 19 nt, Artificial Sequence
  Description of Artificial Sequence: Synthetic oligonucleotide
cgucggguagguaagagca

SEQ ID NO: 1867738 - RNA, 19 nt, Artificial Sequence
  Description of Artificial Sequence: Synthetic oligonucleotide
ggggucgcuguauucccag

SEQ ID NO: 1867739 - RNA, 19 nt, Artificial Sequence
  Description of Artificial Sequence: Synthetic oligonucleotide
ugccugugcauggguaaac

SEQ ID NO: 1867740 - RNA, 19 nt, Artificial Sequence
  Description of Artificial Sequence: Synthetic oligonucleotide
agguuugguuugaaaaguu

SEQ ID NO: 1867741 - RNA, 19 nt, Artificial Sequence
  Description of Artificial Sequence: Synthetic oligonucleotide
ccgguguacuuuauacaag

SEQ ID NO: 1867742 - RNA, 19 nt, Artificial Sequence
  Description of Artificial Sequence: Synthetic oligonucleotide
ucuaugucuccuggagauu

SEQ ID NO: 1867743 - RNA, 19 nt, Artificial Sequence
  Description of Artificial Sequence: Synthetic oligonucleotide
ggacuggcacacucaauuc

SEQ ID NO: 1867744 - RNA, 19 nt, Artificial Sequence
  Description of Artificial Sequence: Synthetic oligonucleotide
acgcuuugguuuauccugu

SEQ ID NO: 1867745 - RNA, 19 nt, Artificial Sequence
  Description of Artificial Sequence: Synthetic oligonucleotide
acacacgcuuugguuuauc

SEQ ID NO: 1867746 - RNA, 19 nt, Artificial Sequence
  Description of Artificial Sequence: Synthetic oligonucleotide
guaauuagccgggcaaccu

SEQ ID NO: 1867747 - RNA, 19 nt, Artificial Sequence
  Description of Artificial Sequence: Synthetic oligonucleotide
gugugagauccaguucggc

SEQ ID NO: 1867748 - RNA, 19 nt, Artificial Sequence
  Description of Artificial Sequence: Synthetic oligonucleotide
caaggcuuauucucucgua

SEQ ID NO: 1867749 - RNA, 19 nt, Artificial Sequence
  Description of Artificial Sequence: Synthetic oligonucleotide
uuuauccuguugggccccu

SEQ ID NO: 1867750 - RNA, 19 nt, Artificial Sequence
  Description of Artificial Sequence: Synthetic oligonucleotide
aacacacgcuuugguuuau

SEQ ID NO: 1867751 - RNA, 19 nt, Artificial Sequence
  Description of Artificial Sequence: Synthetic oligonucleotide
gggacuggcacacucaauu

SEQ ID NO: 1867752 - RNA, 19 nt, Artificial Sequence
  Description of Artificial Sequence: Synthetic oligonucleotide
aguagacagugcaccaguu

SEQ ID NO: 1867753 - RNA, 19 nt, Artificial Sequence
  Description of Artificial Sequence: Synthetic oligonucleotide
cagcaguagguaacucaca

SEQ ID NO: 1867754 - RNA, 19 nt, Artificial Sequence
  Description of Artificial Sequence: Synthetic oligonucleotide
ugcuaccaucacugggcau

SEQ ID NO: 1867755 - RNA, 19 nt, Artificial Sequence
  Description of Artificial Sequence: Synthetic oligonucleotide
cgaucgacgccaaaacauc

SEQ ID NO: 1867756 - RNA, 19 nt, Artificial Sequence
  Description of Artificial Sequence: Synthetic oligonucleotide
uuauccuguugggccccug

SEQ ID NO: 1867757 - RNA, 19 nt, Artificial Sequence
  Description of Artificial Sequence: Synthetic oligonucleotide
gcuccgagagacacagugc

SEQ ID NO: 1867758 - RNA, 19 nt, Artificial Sequence
  Description of Artificial Sequence: Synthetic oligonucleotide
ccaaacuugagacaaccau

SEQ ID NO: 1867759 - RNA, 19 nt, Artificial Sequence
  Description of Artificial Sequence: Synthetic oligonucleotide
cuaccaucacugggcauca

SEQ ID NO: 1867760 - RNA, 19 nt, Artificial Sequence
  Description of Artificial Sequence: Synthetic oligonucleotide
cagaugacucaagauccaa

SEQ ID NO: 1867761 - RNA, 19 nt, Artificial Sequence
  Description of Artificial Sequence: Synthetic oligonucleotide
ccgcacagcaguagguaac

SEQ ID NO: 1867762 - RNA, 19 nt, Artificial Sequence
  Description of Artificial Sequence: Synthetic oligonucleotide
cacacagaaacggcguucu

SEQ ID NO: 1867763 - RNA, 19 nt, Artificial Sequence
  Description of Artificial Sequence: Synthetic oligonucleotide
gcaacgugguuaugaagua

SEQ ID NO: 1867764 - RNA, 19 nt, Artificial Sequence
  Description of Artificial Sequence: Synthetic oligonucleotide
cgcuguauucccagcucgg

SEQ ID NO: 1867765 - RNA, 19 nt, Artificial Sequence
  Description of Artificial Sequence: Synthetic oligonucleotide
acaaaccaccagaucccaa

SEQ ID NO: 1867766 - RNA, 19 nt, Artificial Sequence
  Description of Artificial Sequence: Synthetic oligonucleotide
acucgucggguagguaaga

SEQ ID NO: 1867767 - RNA, 19 nt, Artificial Sequence
  Description of Artificial Sequence: Synthetic oligonucleotide
aguucggccguggcauuaa

SEQ ID NO: 1867768 - RNA, 19 nt, Artificial Sequence
  Description of Artificial Sequence: Synthetic oligonucleotide
caaccauaaccaaguuccu

SEQ ID NO: 1867769 - RNA, 19 nt, Artificial Sequence
  Description of Artificial Sequence: Synthetic oligonucleotide
ggucgcuguauucccagcu

SEQ ID NO: 1867770 - RNA, 19 nt, Artificial Sequence
  Description of Artificial Sequence: Synthetic oligonucleotide
uucccagcucggggcuacg

SEQ ID NO: 1867771 - RNA, 19 nt, Artificial Sequence
  Description of Artificial Sequence: Synthetic oligonucleotide
ggaugaccggagagugggg

SEQ ID NO: 1867772 - RNA, 19 nt, Artificial Sequence
  Description of Artificial Sequence: Synthetic oligonucleotide
cccagcucggggcuacggg

SEQ ID NO: 1867773 - RNA, 19 nt, Artificial Sequence
  Description of Artificial Sequence: Synthetic oligonucleotide
guguccgguguacuuuaua

SEQ ID NO: 1867774 - RNA, 19 nt, Artificial Sequence
  Description of Artificial Sequence: Synthetic oligonucleotide
gagauccaguucggccgug

SEQ ID NO: 1867775 - RNA, 19 nt, Artificial Sequence
  Description of Artificial Sequence: Synthetic oligonucleotide
cccuagcaccaucuucccg

SEQ ID NO: 1867776 - RNA, 19 nt, Artificial Sequence
  Description of Artificial Sequence: Synthetic oligonucleotide
cagcaacaguagguucccc

SEQ ID NO: 1867777 - RNA, 19 nt, Artificial Sequence
  Description of Artificial Sequence: Synthetic oligonucleotide
ccagaugacucaagaucca

SEQ ID NO: 1867778 - RNA, 19 nt, Artificial Sequence
  Description of Artificial Sequence: Synthetic oligonucleotide
cagaaacggcguucugaaa

SEQ ID NO: 1867779 - RNA, 19 nt, Artificial Sequence
  Description of Artificial Sequence: Synthetic oligonucleotide
cccaaacuugagacaacca

SEQ ID NO: 1867780 - RNA, 19 nt, Artificial Sequence
  Description of Artificial Sequence: Synthetic oligonucleotide
gcaucagcccuccagugau

SEQ ID NO: 1867781 - RNA, 19 nt, Artificial Sequence
  Description of Artificial Sequence: Synthetic oligonucleotide
gggucgcuguauucccagc

SEQ ID NO: 1867782 - RNA, 19 nt, Artificial Sequence
  Description of Artificial Sequence: Synthetic oligonucleotide
acggccgaccggacccggc

SEQ ID NO: 1867783 - RNA, 19 nt, Artificial Sequence
  Description of Artificial Sequence: Synthetic oligonucleotide
cagaaacgaucgacgccaa

SEQ ID NO: 1867784 - RNA, 19 nt, Artificial Sequence
  Description of Artificial Sequence: Synthetic oligonucleotide
cgacgccaaaacaucccag

SEQ ID NO: 1867785 - RNA, 19 nt, Artificial Sequence
  Description of Artificial Sequence: Synthetic oligonucleotide
gccgcacagcaguagguaa

SEQ ID NO: 1867786 - RNA, 19 nt, Artificial Sequence
  Description of Artificial Sequence: Synthetic oligonucleotide
ccacacagaaacggcguuc

SEQ ID NO: 1867787 - RNA, 19 nt, Artificial Sequence
  Description of Artificial Sequence: Synthetic oligonucleotide
ccagcucggggcuacggga

SEQ ID NO: 1867788 - RNA, 19 nt, Artificial Sequence
  Description of Artificial Sequence: Synthetic oligonucleotide
uggcuccgagagacacagu

SEQ ID NO: 1867789 - RNA, 19 nt, Artificial Sequence
  Description of Artificial Sequence: Synthetic oligonucleotide
gucggguagguaagagcaa

SEQ ID NO: 1867790 - RNA, 19 nt, Artificial Sequence
  Description of Artificial Sequence: Synthetic oligonucleotide
gccugugcauggguaaaca

SEQ ID NO: 1867791 - RNA, 19 nt, Artificial Sequence
  Description of Artificial Sequence: Synthetic oligonucleotide
aguguccgguguacuuuau

SEQ ID NO: 1867792 - RNA, 19 nt, Artificial Sequence
  Description of Artificial Sequence: Synthetic oligonucleotide
gcuacgggacccucggggu

SEQ ID NO: 1867793 - RNA, 19 nt, Artificial Sequence
  Description of Artificial Sequence: Synthetic oligonucleotide
gcauggguaaacacacgcu

SEQ ID NO: 1867794 - RNA, 19 nt, Artificial Sequence
  Description of Artificial Sequence: Synthetic oligonucleotide
gggcuacgggacccucggg

SEQ ID NO: 1867795 - RNA, 19 nt, Artificial Sequence
  Description of Artificial Sequence: Synthetic oligonucleotide
agcggcgccugagggugug

SEQ ID NO: 1867796 - RNA, 19 nt, Artificial Sequence
  Description of Artificial Sequence: Synthetic oligonucleotide
guucggccguggcauuaaa

SEQ ID NO: 1867797 - RNA, 19 nt, Artificial Sequence
  Description of Artificial Sequence: Synthetic oligonucleotide
accggacccggcgcuguca

SEQ ID NO: 1867798 - RNA, 19 nt, Artificial Sequence
  Description of Artificial Sequence: Synthetic oligonucleotide
ggggugagcggcgccugag

SEQ ID NO: 1867799 - RNA, 19 nt, Artificial Sequence
  Description of Artificial Sequence: Synthetic oligonucleotide
cguucugaaaaugauccgu

SEQ ID NO: 1867800 - RNA, 19 nt, Artificial Sequence
  Description of Artificial Sequence: Synthetic oligonucleotide
gaccggacccggcgcuguc

SEQ ID NO: 1867801 - RNA, 19 nt, Artificial Sequence
  Description of Artificial Sequence: Synthetic oligonucleotide
caaguuccugggaggcggu

SEQ ID NO: 1867802 - RNA, 19 nt, Artificial Sequence
  Description of Artificial Sequence: Synthetic oligonucleotide
gcucggggcuacgggaccc

SEQ ID NO: 1867803 - RNA, 19 nt, Artificial Sequence
  Description of Artificial Sequence: Synthetic oligonucleotide
gccgccacggccgaccgga

SEQ ID NO: 1867804 - RNA, 19 nt, Artificial Sequence
  Description of Artificial Sequence: Synthetic oligonucleotide
gacucccacaacacugcuu

SEQ ID NO: 1867805 - RNA, 19 nt, Artificial Sequence
  Description of Artificial Sequence: Synthetic oligonucleotide
ggucgacaaaccaccagau

SEQ ID NO: 1867806 - RNA, 19 nt, Artificial Sequence
  Description of Artificial Sequence: Synthetic oligonucleotide
ucggggcuacgggacccuc

SEQ ID NO: 1867807 - RNA, 19 nt, Artificial Sequence
  Description of Artificial Sequence: Synthetic oligonucleotide
cugcaagguaagguuuggu

SEQ ID NO: 1867808 - RNA, 19 nt, Artificial Sequence
  Description of Artificial Sequence: Synthetic oligonucleotide
ggcgccugagggugugaga

SEQ ID NO: 1867809 - RNA, 19 nt, Artificial Sequence
  Description of Artificial Sequence: Synthetic oligonucleotide
cggcuguuccagugugucc

SEQ ID NO: 1867810 - RNA, 19 nt, Artificial Sequence
  Description of Artificial Sequence: Synthetic oligonucleotide
cggggcuacgggacccucg

SEQ ID NO: 1867811 - RNA, 19 nt, Artificial Sequence
  Description of Artificial Sequence: Synthetic oligonucleotide
caaacucgucggguaggua

SEQ ID NO: 1867812 - RNA, 19 nt, Artificial Sequence
  Description of Artificial Sequence: Synthetic oligonucleotide
ggaguagagcaacgugguu

SEQ ID NO: 1867813 - RNA, 19 nt, Artificial Sequence
  Description of Artificial Sequence: Synthetic oligonucleotide
cggccgaccggacccggcg

SEQ ID NO: 1867814 - RNA, 19 nt, Artificial Sequence
  Description of Artificial Sequence: Synthetic oligonucleotide
caguucggccguggcauua

SEQ ID NO: 1867815 - RNA, 19 nt, Artificial Sequence
  Description of Artificial Sequence: Synthetic oligonucleotide
cucccacaacacugcuugu

SEQ ID NO: 1867816 - RNA, 19 nt, Artificial Sequence
  Description of Artificial Sequence: Synthetic oligonucleotide
gccacacagaaacggcguu

SEQ ID NO: 1867817 - RNA, 19 nt, Artificial Sequence
  Description of Artificial Sequence: Synthetic oligonucleotide
ccacaacacugcuugucau

SEQ ID NO: 1867818 - RNA, 19 nt, Artificial Sequence
  Description of Artificial Sequence: Synthetic oligonucleotide
cgggccggucccagagacc

SEQ ID NO: 1867819 - RNA, 19 nt, Artificial Sequence
  Description of Artificial Sequence: Synthetic oligonucleotide
cggggacuggcacacucaa

SEQ ID NO: 1867820 - RNA, 19 nt, Artificial Sequence
  Description of Artificial Sequence: Synthetic oligonucleotide
gccgaccggacccggcgcu

SEQ ID NO: 1867821 - RNA, 19 nt, Artificial Sequence
  Description of Artificial Sequence: Synthetic oligonucleotide
cggcgccugagggugugag

SEQ ID NO: 1867822 - RNA, 19 nt, Artificial Sequence
  Description of Artificial Sequence: Synthetic oligonucleotide
cgaguggcuccgagagaca

SEQ ID NO: 1867823 - RNA, 19 nt, Artificial Sequence
  Description of Artificial Sequence: Synthetic oligonucleotide
cucggggcuacgggacccu

SEQ ID NO: 1867824 - RNA, 19 nt, Artificial Sequence
  Description of Artificial Sequence: Synthetic oligonucleotide
ccgaccggacccggcgcug

SEQ ID NO: 1867825 - RNA, 19 nt, Artificial Sequence
  Description of Artificial Sequence: Synthetic oligonucleotide
gcccuccagugaugagcaa

SEQ ID NO: 1867826 - RNA, 19 nt, Artificial Sequence
  Description of Artificial Sequence: Synthetic oligonucleotide
ccgccacggccgaccggac

SEQ ID NO: 1867827 - RNA, 19 nt, Artificial Sequence
  Description of Artificial Sequence: Synthetic oligonucleotide
cccagagacccggccuaaa

SEQ ID NO: 1867828 - RNA, 19 nt, Artificial Sequence
  Description of Artificial Sequence: Synthetic oligonucleotide
ccaggccgccacggccgac

SEQ ID NO: 1867829 - RNA, 19 nt, Artificial Sequence
  Description of Artificial Sequence: Synthetic oligonucleotide
gcggcgccugaggguguga

SEQ ID NO: 1867830 - RNA, 19 nt, Artificial Sequence
  Description of Artificial Sequence: Synthetic oligonucleotide
ccaguucggccguggcauu

SEQ ID NO: 1867831 - RNA, 19 nt, Artificial Sequence
  Description of Artificial Sequence: Synthetic oligonucleotide
cgaccggacccggcgcugu

SEQ ID NO: 1867832 - RNA, 19 nt, Artificial Sequence
  Description of Artificial Sequence: Synthetic oligonucleotide
augacagcagcuuugaugc

SEQ ID NO: 1867833 - RNA, 19 nt, Artificial Sequence
  Description of Artificial Sequence: Synthetic oligonucleotide
aacaauuucuuggaaaggg

SEQ ID NO: 1867834 - RNA, 19 nt, Artificial Sequence
  Description of Artificial Sequence: Synthetic oligonucleotide
uauagucucauccuuguag

SEQ ID NO: 1867835 - RNA, 19 nt, Artificial Sequence
  Description of Artificial Sequence: Synthetic oligonucleotide
ugaccuacaagcaacagga

SEQ ID NO: 1867836 - RNA, 19 nt, Artificial Sequence
  Description of Artificial Sequence: Synthetic oligonucleotide
aacucgauuucucagaaga

SEQ ID NO: 1867837 - RNA, 19 nt, Artificial Sequence
  Description of Artificial Sequence: Synthetic oligonucleotide
uuugaugcccuucaggaag

SEQ ID NO: 1867838 - RNA, 19 nt, Artificial Sequence
  Description of Artificial Sequence: Synthetic oligonucleotide
aauuucuuggaaagggucc

SEQ ID NO: 1867839 - RNA, 19 nt, Artificial Sequence
  Description of Artificial Sequence: Synthetic oligonucleotide
uucucuuccaccaaagggc

SEQ ID NO: 1867840 - RNA, 19 nt, Artificial Sequence
  Description of Artificial Sequence: Synthetic oligonucleotide
aaggccaaccuccaacucc

SEQ ID NO: 1867841 - RNA, 19 nt, Artificial Sequence
  Description of Artificial Sequence: Synthetic oligonucleotide
cacaacauccuuaaggccg

SEQ ID NO: 1867842 - RNA, 19 nt, Artificial Sequence
  Description of Artificial Sequence: Synthetic oligonucleotide
aagccaaugacagcaaagc

SEQ ID NO: 1867843 - RNA, 19 nt, Artificial Sequence
  Description of Artificial Sequence: Synthetic oligonucleotide
aaaacccaaguguuugugg

SEQ ID NO: 1867844 - RNA, 19 nt, Artificial Sequence
  Description of Artificial Sequence: Synthetic oligonucleotide
ucuuuggucauuuuaacuc

SEQ ID NO: 1867845 - RNA, 19 nt, Artificial Sequence
  Description of Artificial Sequence: Synthetic oligonucleotide
uaagccaaagccaaugaca

SEQ ID NO: 1867846 - RNA, 19 nt, Artificial Sequence
  Description of Artificial Sequence: Synthetic oligonucleotide
uaugguguucccaacagca

SEQ ID NO: 1867847 - RNA, 19 nt, Artificial Sequence
  Description of Artificial Sequence: Synthetic oligonucleotide
agguccaacaauuucuugg

SEQ ID NO: 1867848 - RNA, 19 nt, Artificial Sequence
  Description of Artificial Sequence: Synthetic oligonucleotide
uuuuaacucgauuucucag

SEQ ID NO: 1867849 - RNA, 19 nt, Artificial Sequence
  Description of Artificial Sequence: Synthetic oligonucleotide
aaaagguccaacaauuucu

SEQ ID NO: 1867850 - RNA, 19 nt, Artificial Sequence
  Description of Artificial Sequence: Synthetic oligonucleotide
cagaccuuccacaacaucc

SEQ ID NO: 1867851 - RNA, 19 nt, Artificial Sequence
  Description of Artificial Sequence: Synthetic oligonucleotide
uuuaacucgauuucucaga

SEQ ID NO: 1867852 - RNA, 19 nt, Artificial Sequence
  Description of Artificial Sequence: Synthetic oligonucleotide
cuuuccacggggaugaagc

SEQ ID NO: 1867853 - RNA, 19 nt, Artificial Sequence
  Description of Artificial Sequence: Synthetic oligonucleotide
cuuuggucauuuuaacucg

SEQ ID NO: 1867854 - RNA, 19 nt, Artificial Sequence
  Description of Artificial Sequence: Synthetic oligonucleotide
uuucucagaagagacacag

SEQ ID NO: 1867855 - RNA, 19 nt, Artificial Sequence
  Description of Artificial Sequence: Synthetic oligonucleotide
aauaagccaaagccaauga

SEQ ID NO: 1867856 - RNA, 19 nt, Artificial Sequence
  Description of Artificial Sequence: Synthetic oligonucleotide
uccaaaggugauauuagca

SEQ ID NO: 1867857 - RNA, 19 nt, Artificial Sequence
  Description of Artificial Sequence: Synthetic oligonucleotide
uacacagagaaacccuacg

SEQ ID NO: 1867858 - RNA, 19 nt, Artificial Sequence
  Description of Artificial Sequence: Synthetic oligonucleotide
auaagccaaagccaaugac

SEQ ID NO: 1867859 - RNA, 19 nt, Artificial Sequence
  Description of Artificial Sequence: Synthetic oligonucleotide
acaagcaacaggaaggccg

SEQ ID NO: 1867860 - RNA, 19 nt, Artificial Sequence
  Description of Artificial Sequence: Synthetic oligonucleotide
uguaugguguucccaacag

SEQ ID NO: 1867861 - RNA, 19 nt, Artificial Sequence
  Description of Artificial Sequence: Synthetic oligonucleotide
ucgauuucucagaagagac

SEQ ID NO: 1867862 - RNA, 19 nt, Artificial Sequence
  Description of Artificial Sequence: Synthetic oligonucleotide
gucauccugaccuacaagc

SEQ ID NO: 1867863 - RNA, 19 nt, Artificial Sequence
  Description of Artificial Sequence: Synthetic oligonucleotide
gauuucucagaagagacac

SEQ ID NO: 1867864 - RNA, 19 nt, Artificial Sequence
  Description of Artificial Sequence: Synthetic oligonucleotide
aaacccaaguguuugugga

SEQ ID NO: 1867865 - RNA, 19 nt, Artificial Sequence
  Description of Artificial Sequence: Synthetic oligonucleotide
aaggaggccauagcaaggc

SEQ ID NO: 1867866 - RNA, 19 nt, Artificial Sequence
  Description of Artificial Sequence: Synthetic oligonucleotide
ucauccuuguaguguaugg

SEQ ID NO: 1867867 - RNA, 19 nt, Artificial Sequence
  Description of Artificial Sequence: Synthetic oligonucleotide
gagccauugaugaugacag

SEQ ID NO: 1867868 - RNA, 19 nt, Artificial Sequence
  Description of Artificial Sequence: Synthetic oligonucleotide
acagagaaacccuacgucu

SEQ ID NO: 1867869 - RNA, 19 nt, Artificial Sequence
  Description of Artificial Sequence: Synthetic oligonucleotide
aagccaaagccaaugacag

SEQ ID NO: 1867870 - RNA, 19 nt, Artificial Sequence
  Description of Artificial Sequence: Synthetic oligonucleotide
cauagcaaggccaaguuca

SEQ ID NO: 1867871 - RNA, 19 nt, Artificial Sequence
  Description of Artificial Sequence: Synthetic oligonucleotide
agccaaugacagcaaagcc

SEQ ID NO: 1867872 - RNA, 19 nt, Artificial Sequence
  Description of Artificial Sequence: Synthetic oligonucleotide
aaguucaccccuuuggaaa

SEQ ID NO: 1867873 - RNA, 19 nt, Artificial Sequence
  Description of Artificial Sequence: Synthetic oligonucleotide
ccuacaagcaacaggaagg

SEQ ID NO: 1867874 - RNA, 19 nt, Artificial Sequence
  Description of Artificial Sequence: Synthetic oligonucleotide
auuuuaacucgauuucuca

SEQ ID NO: 1867875 - RNA, 19 nt, Artificial Sequence
  Description of Artificial Sequence: Synthetic oligonucleotide
uaauaagccaaagccaaug

SEQ ID NO: 1867876 - RNA, 19 nt, Artificial Sequence
  Description of Artificial Sequence: Synthetic oligonucleotide
ucuucucuuccaccaaagg

SEQ ID NO: 1867877 - RNA, 19 nt, Artificial Sequence
  Description of Artificial Sequence: Synthetic oligonucleotide
aacaggaaggccgugucag

SEQ ID NO: 1867878 - RNA, 19 nt, Artificial Sequence
  Description of Artificial Sequence: Synthetic oligonucleotide
uugcagaccuuccacaaca

SEQ ID NO: 1867879 - RNA, 19 nt, Artificial Sequence
  Description of Artificial Sequence: Synthetic oligonucleotide
ugugguacacagagaaacc

SEQ ID NO: 1867880 - RNA, 19 nt, Artificial Sequence
  Description of Artificial Sequence: Synthetic oligonucleotide
accuacaagcaacaggaag

SEQ ID NO: 1867881 - RNA, 19 nt, Artificial Sequence
  Description of Artificial Sequence: Synthetic oligonucleotide
gaugaagcucuucucuucc

SEQ ID NO: 1867882 - RNA, 19 nt, Artificial Sequence
  Description of Artificial Sequence: Synthetic oligonucleotide
aaagccaaugacagcaaag

SEQ ID NO: 1867883 - RNA, 19 nt, Artificial Sequence
  Description of Artificial Sequence: Synthetic oligonucleotide
uuaacucgauuucucagaa

SEQ ID NO: 1867884 - RNA, 19 nt, Artificial Sequence
  Description of Artificial Sequence: Synthetic oligonucleotide
uuuuaccugagggugacug

SEQ ID NO: 1867885 - RNA, 19 nt, Artificial Sequence
  Description of Artificial Sequence: Synthetic oligonucleotide
cugaccuacaagcaacagg

SEQ ID NO: 1867886 - RNA, 19 nt, Artificial Sequence
  Description of Artificial Sequence: Synthetic oligonucleotide
uccaacaauuucuuggaaa

SEQ ID NO: 1867887 - RNA, 19 nt, Artificial Sequence
  Description of Artificial Sequence: Synthetic oligonucleotide
auagucucauccuuguagu

SEQ ID NO: 1867888 - RNA, 19 nt, Artificial Sequence
  Description of Artificial Sequence: Synthetic oligonucleotide
cuuaaggccgucuuugguc

SEQ ID NO: 1867889 - RNA, 19 nt, Artificial Sequence
  Description of Artificial Sequence: Synthetic oligonucleotide
cucagaagagacacagggg

SEQ ID NO: 1867890 - RNA, 19 nt, Artificial Sequence
  Description of Artificial Sequence: Synthetic oligonucleotide
aagcucuucucuuccacca

SEQ ID NO: 1867891 - RNA, 19 nt, Artificial Sequence
  Description of Artificial Sequence: Synthetic oligonucleotide
cugagggugacugagcagg

SEQ ID NO: 1867892 - RNA, 19 nt, Artificial Sequence
  Description of Artificial Sequence: Synthetic oligonucleotide
ugguguucccaacagcagc

SEQ ID NO: 1867893 - RNA, 19 nt, Artificial Sequence
  Description of Artificial Sequence: Synthetic oligonucleotide
cuccagaaggccaaccucc

SEQ ID NO: 1867894 - RNA, 19 nt, Artificial Sequence
  Description of Artificial Sequence: Synthetic oligonucleotide
gucauuuuaacucgauuuc

SEQ ID NO: 1867895 - RNA, 19 nt, Artificial Sequence
  Description of Artificial Sequence: Synthetic oligonucleotide
agcuuugaugcccuucagg

SEQ ID NO: 1867896 - RNA, 19 nt, Artificial Sequence
  Description of Artificial Sequence: Synthetic oligonucleotide
uugaugcccuucaggaagg

SEQ ID NO: 1867897 - RNA, 19 nt, Artificial Sequence
  Description of Artificial Sequence: Synthetic oligonucleotide
ucauuuuaacucgauuucu

SEQ ID NO: 1867898 - RNA, 19 nt, Artificial Sequence
  Description of Artificial Sequence: Synthetic oligonucleotide
caauuucuuggaaaggguc

SEQ ID NO: 1867899 - RNA, 19 nt, Artificial Sequence
  Description of Artificial Sequence: Synthetic oligonucleotide
cauugaugaugacagcagc

SEQ ID NO: 1867900 - RNA, 19 nt, Artificial Sequence
  Description of Artificial Sequence: Synthetic oligonucleotide
cauuuuaacucgauuucuc

SEQ ID NO: 1867901 - RNA, 19 nt, Artificial Sequence
  Description of Artificial Sequence: Synthetic oligonucleotide
accaaagggcuuugcagac

SEQ ID NO: 1867902 - RNA, 19 nt, Artificial Sequence
  Description of Artificial Sequence: Synthetic oligonucleotide
ugucagaccuuuccacggg

SEQ ID NO: 1867903 - RNA, 19 nt, Artificial Sequence
  Description of Artificial Sequence: Synthetic oligonucleotide
uccuuguaguguauggugu

SEQ ID NO: 1867904 - RNA, 19 nt, Artificial Sequence
  Description of Artificial Sequence: Synthetic oligonucleotide
agggugacugagcagguag

SEQ ID NO: 1867905 - RNA, 19 nt, Artificial Sequence
  Description of Artificial Sequence: Synthetic oligonucleotide
ccaacaauuucuuggaaag

SEQ ID NO: 1867906 - RNA, 19 nt, Artificial Sequence
  Description of Artificial Sequence: Synthetic oligonucleotide
aagggcuuugcagaccuuc

SEQ ID NO: 1867907 - RNA, 19 nt, Artificial Sequence
  Description of Artificial Sequence: Synthetic oligonucleotide
uccacggggaugaagcucu

SEQ ID NO: 1867908 - RNA, 19 nt, Artificial Sequence
  Description of Artificial Sequence: Synthetic oligonucleotide
ucauccugaccuacaagca

SEQ ID NO: 1867909 - RNA, 19 nt, Artificial Sequence
  Description of Artificial Sequence: Synthetic oligonucleotide
aguguaugguguucccaac

SEQ ID NO: 1867910 - RNA, 19 nt, Artificial Sequence
  Description of Artificial Sequence: Synthetic oligonucleotide
uuuggucauuuuaacucga

SEQ ID NO: 1867911 - RNA, 19 nt, Artificial Sequence
  Description of Artificial Sequence: Synthetic oligonucleotide
uucucagaagagacacagg

SEQ ID NO: 1867912 - RNA, 19 nt, Artificial Sequence
  Description of Artificial Sequence: Synthetic oligonucleotide
acuccagaaggccaaccuc

SEQ ID NO: 1867913 - RNA, 19 nt, Artificial Sequence
  Description of Artificial Sequence: Synthetic oligonucleotide
ugcccuucaggaaggaggc

SEQ ID NO: 1867914 - RNA, 19 nt, Artificial Sequence
  Description of Artificial Sequence: Synthetic oligonucleotide
acacagagaaacccuacgu

SEQ ID NO: 1867915 - RNA, 19 nt, Artificial Sequence
  Description of Artificial Sequence: Synthetic oligonucleotide
ugguacacagagaaacccu

SEQ ID NO: 1867916 - RNA, 19 nt, Artificial Sequence
  Description of Artificial Sequence: Synthetic oligonucleotide
gaagcucuucucuuccacc

SEQ ID NO: 1867917 - RNA, 19 nt, Artificial Sequence
  Description of Artificial Sequence: Synthetic oligonucleotide
uuaccugagggugacugag

SEQ ID NO: 1867918 - RNA, 19 nt, Artificial Sequence
  Description of Artificial Sequence: Synthetic oligonucleotide
cuccaaaggugauauuagc

SEQ ID NO: 1867919 - RNA, 19 nt, Artificial Sequence
  Description of Artificial Sequence: Synthetic oligonucleotide
gugucagaccuuuccacgg

SEQ ID NO: 1867920 - RNA, 19 nt, Artificial Sequence
  Description of Artificial Sequence: Synthetic oligonucleotide
uaguguaugguguucccaa

SEQ ID NO: 1867921 - RNA, 19 nt, Artificial Sequence
  Description of Artificial Sequence: Synthetic oligonucleotide
uccaccaaagggcuuugca

SEQ ID NO: 1867922 - RNA, 19 nt, Artificial Sequence
  Description of Artificial Sequence: Synthetic oligonucleotide
uguaguguaugguguuccc

SEQ ID NO: 1867923 - RNA, 19 nt, Artificial Sequence
  Description of Artificial Sequence: Synthetic oligonucleotide
ugaagcucuucucuuccac

SEQ ID NO: 1867924 - RNA, 19 nt, Artificial Sequence
  Description of Artificial Sequence: Synthetic oligonucleotide
augcccuucaggaaggagg

SEQ ID NO: 1867925 - RNA, 19 nt, Artificial Sequence
  Description of Artificial Sequence: Synthetic oligonucleotide
ugugugugugugugugugg

SEQ ID NO: 1867926 - RNA, 19 nt, Artificial Sequence
  Description of Artificial Sequence: Synthetic oligonucleotide
uacuccagaaggccaaccu

SEQ ID NO: 1867927 - RNA, 19 nt, Artificial Sequence
  Description of Artificial Sequence: Synthetic oligonucleotide
uucaggaaggaggccauag

SEQ ID NO: 1867928 - RNA, 19 nt, Artificial Sequence
  Description of Artificial Sequence: Synthetic oligonucleotide
ggaaggaggccauagcaag

SEQ ID NO: 1867929 - RNA, 19 nt, Artificial Sequence
  Description of Artificial Sequence: Synthetic oligonucleotide
uuguaguguaugguguucc

SEQ ID NO: 1867930 - RNA, 19 nt, Artificial Sequence
  Description of Artificial Sequence: Synthetic oligonucleotide
uccuuaaggccgucuuugg

SEQ ID NO: 1867931 - RNA, 19 nt, Artificial Sequence
  Description of Artificial Sequence: Synthetic oligonucleotide
aagguccaacaauuucuug

SEQ ID NO: 1867932 - RNA, 19 nt, Artificial Sequence
  Description of Artificial Sequence: Synthetic oligonucleotide
cuacaagcaacaggaaggc

SEQ ID NO: 1867933 - RNA, 19 nt, Artificial Sequence
  Description of Artificial Sequence: Synthetic oligonucleotide
auccugaccuacaagcaac

SEQ ID NO: 1867934 - RNA, 19 nt, Artificial Sequence
  Description of Artificial Sequence: Synthetic oligonucleotide
ccaaaggugauauuagcac

SEQ ID NO: 1867935 - RNA, 19 nt, Artificial Sequence
  Description of Artificial Sequence: Synthetic oligonucleotide
uuugcagaccuuccacaac

SEQ ID NO: 1867936 - RNA, 19 nt, Artificial Sequence
  Description of Artificial Sequence: Synthetic oligonucleotide
agccaaagccaaugacagc

SEQ ID NO: 1867937 - RNA, 19 nt, Artificial Sequence
  Description of Artificial Sequence: Synthetic oligonucleotide
cacagagccauugaugaug

SEQ ID NO: 1867938 - RNA, 19 nt, Artificial Sequence
  Description of Artificial Sequence: Synthetic oligonucleotide
uaggcuccccuccaaaggu

SEQ ID NO: 1867939 - RNA, 19 nt, Artificial Sequence
  Description of Artificial Sequence: Synthetic oligonucleotide
gacagcagcuuugaugccc

SEQ ID NO: 1867940 - RNA, 19 nt, Artificial Sequence
  Description of Artificial Sequence: Synthetic oligonucleotide
gccaaguucaccccuuugg

SEQ ID NO: 1867941 - RNA, 19 nt, Artificial Sequence
  Description of Artificial Sequence: Synthetic oligonucleotide
caacaauuucuuggaaagg

SEQ ID NO: 1867942 - RNA, 19 nt, Artificial Sequence
  Description of Artificial Sequence: Synthetic oligonucleotide
auugaugaugacagcagcu

SEQ ID NO: 1867943 - RNA, 19 nt, Artificial Sequence
  Description of Artificial Sequence: Synthetic oligonucleotide
acggggaugaagcucuucu

SEQ ID NO: 1867944 - RNA, 19 nt, Artificial Sequence
  Description of Artificial Sequence: Synthetic oligonucleotide
agagaaacccuacgucuca

SEQ ID NO: 1867945 - RNA, 19 nt, Artificial Sequence
  Description of Artificial Sequence: Synthetic oligonucleotide
uuuaccugagggugacuga

SEQ ID NO: 1867946 - RNA, 19 nt, Artificial Sequence
  Description of Artificial Sequence: Synthetic oligonucleotide
gaaacccuacgucucaaaa

SEQ ID NO: 1867947 - RNA, 19 nt, Artificial Sequence
  Description of Artificial Sequence: Synthetic oligonucleotide
gugguacacagagaaaccc

SEQ ID NO: 1867948 - RNA, 19 nt, Artificial Sequence
  Description of Artificial Sequence: Synthetic oligonucleotide
agccauugaugaugacagc

SEQ ID NO: 1867949 - RNA, 19 nt, Artificial Sequence
  Description of Artificial Sequence: Synthetic oligonucleotide
agcgcucccaccacgaagg

SEQ ID NO: 1867950 - RNA, 19 nt, Artificial Sequence
  Description of Artificial Sequence: Synthetic oligonucleotide
gcuuugaugcccuucagga

SEQ ID NO: 1867951 - RNA, 19 nt, Artificial Sequence
  Description of Artificial Sequence: Synthetic oligonucleotide
auuucuuggaaagggucca

SEQ ID NO: 1867952 - RNA, 19 nt, Artificial Sequence
  Description of Artificial Sequence: Synthetic oligonucleotide
uaacucgauuucucagaag

SEQ ID NO: 1867953 - RNA, 19 nt, Artificial Sequence
  Description of Artificial Sequence: Synthetic oligonucleotide
aggaggccauagcaaggcc

SEQ ID NO: 1867954 - RNA, 19 nt, Artificial Sequence
  Description of Artificial Sequence: Synthetic oligonucleotide
gccaaugacagcaaagccc

SEQ ID NO: 1867955 - RNA, 19 nt, Artificial Sequence
  Description of Artificial Sequence: Synthetic oligonucleotide
auccuuaaggccgucuuug

SEQ ID NO: 1867956 - RNA, 19 nt, Artificial Sequence
  Description of Artificial Sequence: Synthetic oligonucleotide
cagagaaacccuacgucuc

SEQ ID NO: 1867957 - RNA, 19 nt, Artificial Sequence
  Description of Artificial Sequence: Synthetic oligonucleotide
gcucccaccacgaagggcg

SEQ ID NO: 1867958 - RNA, 19 nt, Artificial Sequence
  Description of Artificial Sequence: Synthetic oligonucleotide
gugugugugugugugcgcg

SEQ ID NO: 1867959 - RNA, 19 nt, Artificial Sequence
  Description of Artificial Sequence: Synthetic oligonucleotide
uccugaccuacaagcaaca

SEQ ID NO: 1867960 - RNA, 19 nt, Artificial Sequence
  Description of Artificial Sequence: Synthetic oligonucleotide
agucucauccuuguagugu

SEQ ID NO: 1867961 - RNA, 19 nt, Artificial Sequence
  Description of Artificial Sequence: Synthetic oligonucleotide
accugagggugacugagca

SEQ ID NO: 1867962 - RNA, 19 nt, Artificial Sequence
  Description of Artificial Sequence: Synthetic oligonucleotide
ucagaccuuuccacgggga

SEQ ID NO: 1867963 - RNA, 19 nt, Artificial Sequence
  Description of Artificial Sequence: Synthetic oligonucleotide
aaagguccaacaauuucuu

SEQ ID NO: 1867964 - RNA, 19 nt, Artificial Sequence
  Description of Artificial Sequence: Synthetic oligonucleotide
ugugugugugguacacaga

SEQ ID NO: 1867965 - RNA, 19 nt, Artificial Sequence
  Description of Artificial Sequence: Synthetic oligonucleotide
acaauuucuuggaaagggu

SEQ ID NO: 1867966 - RNA, 19 nt, Artificial Sequence
  Description of Artificial Sequence: Synthetic oligonucleotide
uagucucauccuuguagug

SEQ ID NO: 1867967 - RNA, 19 nt, Artificial Sequence
  Description of Artificial Sequence: Synthetic oligonucleotide
uggucauuuuaacucgauu

SEQ ID NO: 1867968 - RNA, 19 nt, Artificial Sequence
  Description of Artificial Sequence: Synthetic oligonucleotide
caccaaagggcuuugcaga

SEQ ID NO: 1867969 - RNA, 19 nt, Artificial Sequence
  Description of Artificial Sequence: Synthetic oligonucleotide
uccagaaggccaaccucca

SEQ ID NO: 1867970 - RNA, 19 nt, Artificial Sequence
  Description of Artificial Sequence: Synthetic oligonucleotide
auagcaaggccaaguucac

SEQ ID NO: 1867971 - RNA, 19 nt, Artificial Sequence
  Description of Artificial Sequence: Synthetic oligonucleotide
aguucaccccuuuggaaau

SEQ ID NO: 1867972 - RNA, 19 nt, Artificial Sequence
  Description of Artificial Sequence: Synthetic oligonucleotide
uguucccaacagcagccac

SEQ ID NO: 1867973 - RNA, 19 nt, Artificial Sequence
  Description of Artificial Sequence: Synthetic oligonucleotide
uggucauccugaccuacaa

SEQ ID NO: 1867974 - RNA, 19 nt, Artificial Sequence
  Description of Artificial Sequence: Synthetic oligonucleotide
uucaccccuuuggaaaucc

SEQ ID NO: 1867975 - RNA, 19 nt, Artificial Sequence
  Description of Artificial Sequence: Synthetic oligonucleotide
ugugugugugugugguaca

SEQ ID NO: 1867976 - RNA, 19 nt, Artificial Sequence
  Description of Artificial Sequence: Synthetic oligonucleotide
uuggucauuuuaacucgau

SEQ ID NO: 1867977 - RNA, 19 nt, Artificial Sequence
  Description of Artificial Sequence: Synthetic oligonucleotide
agggcuuugcagaccuucc

SEQ ID NO: 1867978 - RNA, 19 nt, Artificial Sequence
  Description of Artificial Sequence: Synthetic oligonucleotide
gaccuuuccacggggauga

SEQ ID NO: 1867979 - RNA, 19 nt, Artificial Sequence
  Description of Artificial Sequence: Synthetic oligonucleotide
ggucauuuuaacucgauuu

SEQ ID NO: 1867980 - RNA, 19 nt, Artificial Sequence
  Description of Artificial Sequence: Synthetic oligonucleotide
cucgauuucucagaagaga

SEQ ID NO: 1867981 - RNA, 19 nt, Artificial Sequence
  Description of Artificial Sequence: Synthetic oligonucleotide
gccaaagccaaugacagca

SEQ ID NO: 1867982 - RNA, 19 nt, Artificial Sequence
  Description of Artificial Sequence: Synthetic oligonucleotide
ucuuccaccaaagggcuuu

SEQ ID NO: 1867983 - RNA, 19 nt, Artificial Sequence
  Description of Artificial Sequence: Synthetic oligonucleotide
gguccaacaauuucuugga

SEQ ID NO: 1867984 - RNA, 19 nt, Artificial Sequence
  Description of Artificial Sequence: Synthetic oligonucleotide
ccauugaugaugacagcag

SEQ ID NO: 1867985 - RNA, 19 nt, Artificial Sequence
  Description of Artificial Sequence: Synthetic oligonucleotide
ugugugugugugugugcgc

SEQ ID NO: 1867986 - RNA, 19 nt, Artificial Sequence
  Description of Artificial Sequence: Synthetic oligonucleotide
acucgauuucucagaagag

SEQ ID NO: 1867987 - RNA, 19 nt, Artificial Sequence
  Description of Artificial Sequence: Synthetic oligonucleotide
gugugugugugugugguac

SEQ ID NO: 1867988 - RNA, 19 nt, Artificial Sequence
  Description of Artificial Sequence: Synthetic oligonucleotide
aacauccuuaaggccgucu

SEQ ID NO: 1867989 - RNA, 19 nt, Artificial Sequence
  Description of Artificial Sequence: Synthetic oligonucleotide
ugugugugugugugugugu

SEQ ID NO: 1867990 - RNA, 19 nt, Artificial Sequence
  Description of Artificial Sequence: Synthetic oligonucleotide
uaccugagggugacugagc

SEQ ID NO: 1867991 - RNA, 19 nt, Artificial Sequence
  Description of Artificial Sequence: Synthetic oligonucleotide
guguaugguguucccaaca

SEQ ID NO: 1867992 - RNA, 19 nt, Artificial Sequence
  Description of Artificial Sequence: Synthetic oligonucleotide
cuuugcagaccuuccacaa

SEQ ID NO: 1867993 - RNA, 19 nt, Artificial Sequence
  Description of Artificial Sequence: Synthetic oligonucleotide
uacaagcaacaggaaggcc

SEQ ID NO: 1867994 - RNA, 19 nt, Artificial Sequence
  Description of Artificial Sequence: Synthetic oligonucleotide
ccaccaaagggcuuugcag

SEQ ID NO: 1867995 - RNA, 19 nt, Artificial Sequence
  Description of Artificial Sequence: Synthetic oligonucleotide
ccuccaaaggugauauuag

SEQ ID NO: 1867996 - RNA, 19 nt, Artificial Sequence
  Description of Artificial Sequence: Synthetic oligonucleotide
agaccuuccacaacauccu

SEQ ID NO: 1867997 - RNA, 19 nt, Artificial Sequence
  Description of Artificial Sequence: Synthetic oligonucleotide
cuuguaguguaugguguuc

SEQ ID NO: 1867998 - RNA, 19 nt, Artificial Sequence
  Description of Artificial Sequence: Synthetic oligonucleotide
gucuuuggucauuuuaacu

SEQ ID NO: 1867999 - RNA, 19 nt, Artificial Sequence
  Description of Artificial Sequence: Synthetic oligonucleotide
gugugugugugugugugug

SEQ ID NO: 1868000 - RNA, 19 nt, Artificial Sequence
  Description of Artificial Sequence: Synthetic oligonucleotide
ucaccccuuuggaaauccc

SEQ ID NO: 1868001 - RNA, 19 nt, Artificial Sequence
  Description of Artificial Sequence: Synthetic oligonucleotide
gguguucccaacagcagcc

SEQ ID NO: 1868002 - RNA, 19 nt, Artificial Sequence
  Description of Artificial Sequence: Synthetic oligonucleotide
augaagcucuucucuucca

SEQ ID NO: 1868003 - RNA, 19 nt, Artificial Sequence
  Description of Artificial Sequence: Synthetic oligonucleotide
ugagggugacugagcaggu

SEQ ID NO: 1868004 - RNA, 19 nt, Artificial Sequence
  Description of Artificial Sequence: Synthetic oligonucleotide
uguggucauccugaccuac

SEQ ID NO: 1868005 - RNA, 19 nt, Artificial Sequence
  Description of Artificial Sequence: Synthetic oligonucleotide
acagagccauugaugauga

SEQ ID NO: 1868006 - RNA, 19 nt, Artificial Sequence
  Description of Artificial Sequence: Synthetic oligonucleotide
ugugugugugugcgcgugu

SEQ ID NO: 1868007 - RNA, 19 nt, Artificial Sequence
  Description of Artificial Sequence: Synthetic oligonucleotide
uccccuccaaaggugauau

SEQ ID NO: 1868008 - RNA, 19 nt, Artificial Sequence
  Description of Artificial Sequence: Synthetic oligonucleotide
cccuuuggaaaucccaagc

SEQ ID NO: 1868009 - RNA, 19 nt, Artificial Sequence
  Description of Artificial Sequence: Synthetic oligonucleotide
gaugcccuucaggaaggag

SEQ ID NO: 1868010 - RNA, 19 nt, Artificial Sequence
  Description of Artificial Sequence: Synthetic oligonucleotide
agaccuuuccacggggaug

SEQ ID NO: 1868011 - RNA, 19 nt, Artificial Sequence
  Description of Artificial Sequence: Synthetic oligonucleotide
agccacagagccauugaug

SEQ ID NO: 1868012 - RNA, 19 nt, Artificial Sequence
  Description of Artificial Sequence: Synthetic oligonucleotide
acaacauccuuaaggccgu

SEQ ID NO: 1868013 - RNA, 19 nt, Artificial Sequence
  Description of Artificial Sequence: Synthetic oligonucleotide
ugugugugugugguacaca

SEQ ID NO: 1868014 - RNA, 19 nt, Artificial Sequence
  Description of Artificial Sequence: Synthetic oligonucleotide
agaaacccuacgucucaaa

SEQ ID NO: 1868015 - RNA, 19 nt, Artificial Sequence
  Description of Artificial Sequence: Synthetic oligonucleotide
cucauccuuguaguguaug

SEQ ID NO: 1868016 - RNA, 19 nt, Artificial Sequence
  Description of Artificial Sequence: Synthetic oligonucleotide
agcaacaggaaggccgugu

SEQ ID NO: 1868017 - RNA, 19 nt, Artificial Sequence
  Description of Artificial Sequence: Synthetic oligonucleotide
aaggccgugucagaccuuu

SEQ ID NO: 1868018 - RNA, 19 nt, Artificial Sequence
  Description of Artificial Sequence: Synthetic oligonucleotide
caaguucaccccuuuggaa

SEQ ID NO: 1868019 - RNA, 19 nt, Artificial Sequence
  Description of Artificial Sequence: Synthetic oligonucleotide
gccauugaugaugacagca

SEQ ID NO: 1868020 - RNA, 19 nt, Artificial Sequence
  Description of Artificial Sequence: Synthetic oligonucleotide
ugcagaccuuccacaacau

SEQ ID NO: 1868021 - RNA, 19 nt, Artificial Sequence
  Description of Artificial Sequence: Synthetic oligonucleotide
augguguucccaacagcag

SEQ ID NO: 1868022 - RNA, 19 nt, Artificial Sequence
  Description of Artificial Sequence: Synthetic oligonucleotide
ugugugugugugugcgcgu

SEQ ID NO: 1868023 - RNA, 19 nt, Artificial Sequence
  Description of Artificial Sequence: Synthetic oligonucleotide
cgugucagaccuuuccacg

SEQ ID NO: 1868024 - RNA, 19 nt, Artificial Sequence
  Description of Artificial Sequence: Synthetic oligonucleotide
cuuugaugcccuucaggaa

SEQ ID NO: 1868025 - RNA, 19 nt, Artificial Sequence
  Description of Artificial Sequence: Synthetic oligonucleotide
ggaugaagcucuucucuuc

SEQ ID NO: 1868026 - RNA, 19 nt, Artificial Sequence
  Description of Artificial Sequence: Synthetic oligonucleotide
ugacagcagcuuugaugcc

SEQ ID NO: 1868027 - RNA, 19 nt, Artificial Sequence
  Description of Artificial Sequence: Synthetic oligonucleotide
cacacggccucgcgcacgg

SEQ ID NO: 1868028 - RNA, 19 nt, Artificial Sequence
  Description of Artificial Sequence: Synthetic oligonucleotide
uagcaaggccaaguucacc

SEQ ID NO: 1868029 - RNA, 19 nt, Artificial Sequence
  Description of Artificial Sequence: Synthetic oligonucleotide
cuuccacaacauccuuaag

SEQ ID NO: 1868030 - RNA, 19 nt, Artificial Sequence
  Description of Artificial Sequence: Synthetic oligonucleotide
ggucauccugaccuacaag

SEQ ID NO: 1868031 - RNA, 19 nt, Artificial Sequence
  Description of Artificial Sequence: Synthetic oligonucleotide
cauccugaccuacaagcaa

SEQ ID NO: 1868032 - RNA, 19 nt, Artificial Sequence
  Description of Artificial Sequence: Synthetic oligonucleotide
ggcuuugcagaccuuccac

SEQ ID NO: 1868033 - RNA, 19 nt, Artificial Sequence
  Description of Artificial Sequence: Synthetic oligonucleotide
agcagccacagagccauug

SEQ ID NO: 1868034 - RNA, 19 nt, Artificial Sequence
  Description of Artificial Sequence: Synthetic oligonucleotide
guaguguaugguguuccca

SEQ ID NO: 1868035 - RNA, 19 nt, Artificial Sequence
  Description of Artificial Sequence: Synthetic oligonucleotide
auuucucagaagagacaca

SEQ ID NO: 1868036 - RNA, 19 nt, Artificial Sequence
  Description of Artificial Sequence: Synthetic oligonucleotide
ucucauccuuguaguguau

SEQ ID NO: 1868037 - RNA, 19 nt, Artificial Sequence
  Description of Artificial Sequence: Synthetic oligonucleotide
aggccaaccuccaacucca

SEQ ID NO: 1868038 - RNA, 19 nt, Artificial Sequence
  Description of Artificial Sequence: Synthetic oligonucleotide
caaagggcuuugcagaccu

SEQ ID NO: 1868039 - RNA, 19 nt, Artificial Sequence
  Description of Artificial Sequence: Synthetic oligonucleotide
ccacaacauccuuaaggcc

SEQ ID NO: 1868040 - RNA, 19 nt, Artificial Sequence
  Description of Artificial Sequence: Synthetic oligonucleotide
cagcgcucccaccacgaag

SEQ ID NO: 1868041 - RNA, 19 nt, Artificial Sequence
  Description of Artificial Sequence: Synthetic oligonucleotide
gaggccauagcaaggccaa

SEQ ID NO: 1868042 - RNA, 19 nt, Artificial Sequence
  Description of Artificial Sequence: Synthetic oligonucleotide
ggccgugucagaccuuucc

SEQ ID NO: 1868043 - RNA, 19 nt, Artificial Sequence
  Description of Artificial Sequence: Synthetic oligonucleotide
caccccuuuggaaauccca

SEQ ID NO: 1868044 - RNA, 19 nt, Artificial Sequence
  Description of Artificial Sequence: Synthetic oligonucleotide
gguauagucucauccuugu

SEQ ID NO: 1868045 - RNA, 19 nt, Artificial Sequence
  Description of Artificial Sequence: Synthetic oligonucleotide
ggguauagucucauccuug

SEQ ID NO: 1868046 - RNA, 19 nt, Artificial Sequence
  Description of Artificial Sequence: Synthetic oligonucleotide
uuccacggggaugaagcuc

SEQ ID NO: 1868047 - RNA, 19 nt, Artificial Sequence
  Description of Artificial Sequence: Synthetic oligonucleotide
ccaaccuccaacuccaaaa

SEQ ID NO: 1868048 - RNA, 19 nt, Artificial Sequence
  Description of Artificial Sequence: Synthetic oligonucleotide
uguguguguguguguggua

SEQ ID NO: 1868049 - RNA, 19 nt, Artificial Sequence
  Description of Artificial Sequence: Synthetic oligonucleotide
ccaaugacagcaaagcccu

SEQ ID NO: 1868050 - RNA, 19 nt, Artificial Sequence
  Description of Artificial Sequence: Synthetic oligonucleotide
gcuuugcagaccuuccaca

SEQ ID NO: 1868051 - RNA, 19 nt, Artificial Sequence
  Description of Artificial Sequence: Synthetic oligonucleotide
acagcagcuuugaugcccu

SEQ ID NO: 1868052 - RNA, 19 nt, Artificial Sequence
  Description of Artificial Sequence: Synthetic oligonucleotide
guacuccagaaggccaacc

SEQ ID NO: 1868053 - RNA, 19 nt, Artificial Sequence
  Description of Artificial Sequence: Synthetic oligonucleotide
caagcaacaggaaggccgu

SEQ ID NO: 1868054 - RNA, 19 nt, Artificial Sequence
  Description of Artificial Sequence: Synthetic oligonucleotide
uuucuuggaaaggguccau

SEQ ID NO: 1868055 - RNA, 19 nt, Artificial Sequence
  Description of Artificial Sequence: Synthetic oligonucleotide
gugugugugugugguacac

SEQ ID NO: 1868056 - RNA, 19 nt, Artificial Sequence
  Description of Artificial Sequence: Synthetic oligonucleotide
uucuuggaaaggguccauu

SEQ ID NO: 1868057 - RNA, 19 nt, Artificial Sequence
  Description of Artificial Sequence: Synthetic oligonucleotide
accccuuuggaaaucccaa

SEQ ID NO: 1868058 - RNA, 19 nt, Artificial Sequence
  Description of Artificial Sequence: Synthetic oligonucleotide
gugugugugugugcgcgug

SEQ ID NO: 1868059 - RNA, 19 nt, Artificial Sequence
  Description of Artificial Sequence: Synthetic oligonucleotide
ugcgcgugugugugugugu

SEQ ID NO: 1868060 - RNA, 19 nt, Artificial Sequence
  Description of Artificial Sequence: Synthetic oligonucleotide
gcaaggccaaguucacccc

SEQ ID NO: 1868061 - RNA, 19 nt, Artificial Sequence
  Description of Artificial Sequence: Synthetic oligonucleotide
cagcuuugaugcccuucag

SEQ ID NO: 1868062 - RNA, 19 nt, Artificial Sequence
  Description of Artificial Sequence: Synthetic oligonucleotide
uuguggucauccugaccua

SEQ ID NO: 1868063 - RNA, 19 nt, Artificial Sequence
  Description of Artificial Sequence: Synthetic oligonucleotide
ggggaugaagcucuucucu

SEQ ID NO: 1868064 - RNA, 19 nt, Artificial Sequence
  Description of Artificial Sequence: Synthetic oligonucleotide
ccuuccacaacauccuuaa

SEQ ID NO: 1868065 - RNA, 19 nt, Artificial Sequence
  Description of Artificial Sequence: Synthetic oligonucleotide
caacaggaaggccguguca

SEQ ID NO: 1868066 - RNA, 19 nt, Artificial Sequence
  Description of Artificial Sequence: Synthetic oligonucleotide
gcaacaggaaggccguguc

SEQ ID NO: 1868067 - RNA, 19 nt, Artificial Sequence
  Description of Artificial Sequence: Synthetic oligonucleotide
guauagucucauccuugua

SEQ ID NO: 1868068 - RNA, 19 nt, Artificial Sequence
  Description of Artificial Sequence: Synthetic oligonucleotide
guccaacaauuucuuggaa

SEQ ID NO: 1868069 - RNA, 19 nt, Artificial Sequence
  Description of Artificial Sequence: Synthetic oligonucleotide
uuccaccaaagggcuuugc

SEQ ID NO: 1868070 - RNA, 19 nt, Artificial Sequence
  Description of Artificial Sequence: Synthetic oligonucleotide
ugugcgcgugugugugugu

SEQ ID NO: 1868071 - RNA, 19 nt, Artificial Sequence
  Description of Artificial Sequence: Synthetic oligonucleotide
ccauagcaaggccaaguuc

SEQ ID NO: 1868072 - RNA, 19 nt, Artificial Sequence
  Description of Artificial Sequence: Synthetic oligonucleotide
gguacacagagaaacccua

SEQ ID NO: 1868073 - RNA, 19 nt, Artificial Sequence
  Description of Artificial Sequence: Synthetic oligonucleotide
ccgucuuuggucauuuuaa

SEQ ID NO: 1868074 - RNA, 19 nt, Artificial Sequence
  Description of Artificial Sequence: Synthetic oligonucleotide
ggaggccauagcaaggcca

SEQ ID NO: 1868075 - RNA, 19 nt, Artificial Sequence
  Description of Artificial Sequence: Synthetic oligonucleotide
ccccuuuggaaaucccaag

SEQ ID NO: 1868076 - RNA, 19 nt, Artificial Sequence
  Description of Artificial Sequence: Synthetic oligonucleotide
ggaaggccgugucagaccu

SEQ ID NO: 1868077 - RNA, 19 nt, Artificial Sequence
  Description of Artificial Sequence: Synthetic oligonucleotide
ccaaguucaccccuuugga

SEQ ID NO: 1868078 - RNA, 19 nt, Artificial Sequence
  Description of Artificial Sequence: Synthetic oligonucleotide
cgucuuuggucauuuuaac

SEQ ID NO: 1868079 - RNA, 19 nt, Artificial Sequence
  Description of Artificial Sequence: Synthetic oligonucleotide
ccgugucagaccuuuccac

SEQ ID NO: 1868080 - RNA, 19 nt, Artificial Sequence
  Description of Artificial Sequence: Synthetic oligonucleotide
gagaaacccuacgucucaa

SEQ ID NO: 1868081 - RNA, 19 nt, Artificial Sequence
  Description of Artificial Sequence: Synthetic oligonucleotide
ugaugcccuucaggaagga

SEQ ID NO: 1868082 - RNA, 19 nt, Artificial Sequence
  Description of Artificial Sequence: Synthetic oligonucleotide
gugcgcgugugugugugug

SEQ ID NO: 1868083 - RNA, 19 nt, Artificial Sequence
  Description of Artificial Sequence: Synthetic oligonucleotide
accuuccacaacauccuua

SEQ ID NO: 1868084 - RNA, 19 nt, Artificial Sequence
  Description of Artificial Sequence: Synthetic oligonucleotide
uaaggccgucuuuggucau

SEQ ID NO: 1868085 - RNA, 19 nt, Artificial Sequence
  Description of Artificial Sequence: Synthetic oligonucleotide
cuuccaccaaagggcuuug

SEQ ID NO: 1868086 - RNA, 19 nt, Artificial Sequence
  Description of Artificial Sequence: Synthetic oligonucleotide
gcgugugugugugugugug

SEQ ID NO: 1868087 - RNA, 19 nt, Artificial Sequence
  Description of Artificial Sequence: Synthetic oligonucleotide
ccuuuuaccugagggugac

SEQ ID NO: 1868088 - RNA, 19 nt, Artificial Sequence
  Description of Artificial Sequence: Synthetic oligonucleotide
cauccuuguaguguauggu

SEQ ID NO: 1868089 - RNA, 19 nt, Artificial Sequence
  Description of Artificial Sequence: Synthetic oligonucleotide
aaggccgucuuuggucauu

SEQ ID NO: 1868090 - RNA, 19 nt, Artificial Sequence
  Description of Artificial Sequence: Synthetic oligonucleotide
guguguguguguguguggu

SEQ ID NO: 1868091 - RNA, 19 nt, Artificial Sequence
  Description of Artificial Sequence: Synthetic oligonucleotide
gccgucuuuggucauuuua

SEQ ID NO: 1868092 - RNA, 19 nt, Artificial Sequence
  Description of Artificial Sequence: Synthetic oligonucleotide
guggucauccugaccuaca

SEQ ID NO: 1868093 - RNA, 19 nt, Artificial Sequence
  Description of Artificial Sequence: Synthetic oligonucleotide
ggccaaguucaccccuuug

SEQ ID NO: 1868094 - RNA, 19 nt, Artificial Sequence
  Description of Artificial Sequence: Synthetic oligonucleotide
ccugagggugacugagcag

SEQ ID NO: 1868095 - RNA, 19 nt, Artificial Sequence
  Description of Artificial Sequence: Synthetic oligonucleotide
gcagaccuuccacaacauc

SEQ ID NO: 1868096 - RNA, 19 nt, Artificial Sequence
  Description of Artificial Sequence: Synthetic oligonucleotide
gcagccacagagccauuga

SEQ ID NO: 1868097 - RNA, 19 nt, Artificial Sequence
  Description of Artificial Sequence: Synthetic oligonucleotide
cagagccauugaugaugac

SEQ ID NO: 1868098 - RNA, 19 nt, Artificial Sequence
  Description of Artificial Sequence: Synthetic oligonucleotide
aggcuccccuccaaaggug

SEQ ID NO: 1868099 - RNA, 19 nt, Artificial Sequence
  Description of Artificial Sequence: Synthetic oligonucleotide
gggcuuugcagaccuucca

SEQ ID NO: 1868100 - RNA, 19 nt, Artificial Sequence
  Description of Artificial Sequence: Synthetic oligonucleotide
gaccuacaagcaacaggaa

SEQ ID NO: 1868101 - RNA, 19 nt, Artificial Sequence
  Description of Artificial Sequence: Synthetic oligonucleotide
aggccauagcaaggccaag

SEQ ID NO: 1868102 - RNA, 19 nt, Artificial Sequence
  Description of Artificial Sequence: Synthetic oligonucleotide
ccaaagggcuuugcagacc

SEQ ID NO: 1868103 - RNA, 19 nt, Artificial Sequence
  Description of Artificial Sequence: Synthetic oligonucleotide
guucaccccuuuggaaauc

SEQ ID NO: 1868104 - RNA, 19 nt, Artificial Sequence
  Description of Artificial Sequence: Synthetic oligonucleotide
uggcgcgcacacggccucg

SEQ ID NO: 1868105 - RNA, 19 nt, Artificial Sequence
  Description of Artificial Sequence: Synthetic oligonucleotide
cccuccaaaggugauauua

SEQ ID NO: 1868106 - RNA, 19 nt, Artificial Sequence
  Description of Artificial Sequence: Synthetic oligonucleotide
cgauuucucagaagagaca

SEQ ID NO: 1868107 - RNA, 19 nt, Artificial Sequence
  Description of Artificial Sequence: Synthetic oligonucleotide
ccugaccuacaagcaacag

SEQ ID NO: 1868108 - RNA, 19 nt, Artificial Sequence
  Description of Artificial Sequence: Synthetic oligonucleotide
gcgcacacggccucgcgca

SEQ ID NO: 1868109 - RNA, 19 nt, Artificial Sequence
  Description of Artificial Sequence: Synthetic oligonucleotide
aaagggcuuugcagaccuu

SEQ ID NO: 1868110 - RNA, 19 nt, Artificial Sequence
  Description of Artificial Sequence: Synthetic oligonucleotide
acggccucgcgcacgggca

SEQ ID NO: 1868111 - RNA, 19 nt, Artificial Sequence
  Description of Artificial Sequence: Synthetic oligonucleotide
gcgcgugugugugugugug

SEQ ID NO: 1868112 - RNA, 19 nt, Artificial Sequence
  Description of Artificial Sequence: Synthetic oligonucleotide
gggaugaagcucuucucuu

SEQ ID NO: 1868113 - RNA, 19 nt, Artificial Sequence
  Description of Artificial Sequence: Synthetic oligonucleotide
ccuuuccacggggaugaag

SEQ ID NO: 1868114 - RNA, 19 nt, Artificial Sequence
  Description of Artificial Sequence: Synthetic oligonucleotide
aggccgucuuuggucauuu

SEQ ID NO: 1868115 - RNA, 19 nt, Artificial Sequence
  Description of Artificial Sequence: Synthetic oligonucleotide
gggguauagucucauccuu

SEQ ID NO: 1868116 - RNA, 19 nt, Artificial Sequence
  Description of Artificial Sequence: Synthetic oligonucleotide
cacggggaugaagcucuuc

SEQ ID NO: 1868117 - RNA, 19 nt, Artificial Sequence
  Description of Artificial Sequence: Synthetic oligonucleotide
gagggugacugagcaggua

SEQ ID NO: 1868118 - RNA, 19 nt, Artificial Sequence
  Description of Artificial Sequence: Synthetic oligonucleotide
cauccuuaaggccgucuuu

SEQ ID NO: 1868119 - RNA, 19 nt, Artificial Sequence
  Description of Artificial Sequence: Synthetic oligonucleotide
ggcuccccuccaaagguga

SEQ ID NO: 1868120 - RNA, 19 nt, Artificial Sequence
  Description of Artificial Sequence: Synthetic oligonucleotide
cagaccuuuccacggggau

SEQ ID NO: 1868121 - RNA, 19 nt, Artificial Sequence
  Description of Artificial Sequence: Synthetic oligonucleotide
ggccauagcaaggccaagu

SEQ ID NO: 1868122 - RNA, 19 nt, Artificial Sequence
  Description of Artificial Sequence: Synthetic oligonucleotide
gcacacggccucgcgcacg

SEQ ID NO: 1868123 - RNA, 19 nt, Artificial Sequence
  Description of Artificial Sequence: Synthetic oligonucleotide
gccauagcaaggccaaguu

SEQ ID NO: 1868124 - RNA, 19 nt, Artificial Sequence
  Description of Artificial Sequence: Synthetic oligonucleotide
gccaaccuccaacuccaaa

SEQ ID NO: 1868125 - RNA, 19 nt, Artificial Sequence
  Description of Artificial Sequence: Synthetic oligonucleotide
aggccgugucagaccuuuc

SEQ ID NO: 1868126 - RNA, 19 nt, Artificial Sequence
  Description of Artificial Sequence: Synthetic oligonucleotide
ccaaagccaaugacagcaa

SEQ ID NO: 1868127 - RNA, 19 nt, Artificial Sequence
  Description of Artificial Sequence: Synthetic oligonucleotide
caacauccuuaaggccguc

SEQ ID NO: 1868128 - RNA, 19 nt, Artificial Sequence
  Description of Artificial Sequence: Synthetic oligonucleotide
cagccacagagccauugau

SEQ ID NO: 1868129 - RNA, 19 nt, Artificial Sequence
  Description of Artificial Sequence: Synthetic oligonucleotide
gcgcucccaccacgaaggg

SEQ ID NO: 1868130 - RNA, 19 nt, Artificial Sequence
  Description of Artificial Sequence: Synthetic oligonucleotide
ucccaccacgaagggcguc

SEQ ID NO: 1868131 - RNA, 19 nt, Artificial Sequence
  Description of Artificial Sequence: Synthetic oligonucleotide
cggggaugaagcucuucuc

SEQ ID NO: 1868132 - RNA, 19 nt, Artificial Sequence
  Description of Artificial Sequence: Synthetic oligonucleotide
accgcgcgcgccagcgcuc

SEQ ID NO: 1868133 - RNA, 19 nt, Artificial Sequence
  Description of Artificial Sequence: Synthetic oligonucleotide
cuccccuccaaaggugaua

SEQ ID NO: 1868134 - RNA, 19 nt, Artificial Sequence
  Description of Artificial Sequence: Synthetic oligonucleotide
ccuuaaggccgucuuuggu

SEQ ID NO: 1868135 - RNA, 19 nt, Artificial Sequence
  Description of Artificial Sequence: Synthetic oligonucleotide
cuucaggaaggaggccaua

SEQ ID NO: 1868136 - RNA, 19 nt, Artificial Sequence
  Description of Artificial Sequence: Synthetic oligonucleotide
cgcgcacacggccucgcgc

SEQ ID NO: 1868137 - RNA, 19 nt, Artificial Sequence
  Description of Artificial Sequence: Synthetic oligonucleotide
gcgcgcacacggccucgcg

SEQ ID NO: 1868138 - RNA, 19 nt, Artificial Sequence
  Description of Artificial Sequence: Synthetic oligonucleotide
ggugacugagcagguaguu

SEQ ID NO: 1868139 - RNA, 19 nt, Artificial Sequence
  Description of Artificial Sequence: Synthetic oligonucleotide
ggccucgcgcacgggcacg

SEQ ID NO: 1868140 - RNA, 19 nt, Artificial Sequence
  Description of Artificial Sequence: Synthetic oligonucleotide
ccuuguaguguaugguguu

SEQ ID NO: 1868141 - RNA, 19 nt, Artificial Sequence
  Description of Artificial Sequence: Synthetic oligonucleotide
gccagcgcucccaccacga

SEQ ID NO: 1868142 - RNA, 19 nt, Artificial Sequence
  Description of Artificial Sequence: Synthetic oligonucleotide
cgcgccagcgcucccacca

SEQ ID NO: 1868143 - RNA, 19 nt, Artificial Sequence
  Description of Artificial Sequence: Synthetic oligonucleotide
gggugacugagcagguagu

SEQ ID NO: 1868144 - RNA, 19 nt, Artificial Sequence
  Description of Artificial Sequence: Synthetic oligonucleotide
cgccagcgcucccaccacg

SEQ ID NO: 1868145 - RNA, 19 nt, Artificial Sequence
  Description of Artificial Sequence: Synthetic oligonucleotide
caaugacagcaaagcccuu

SEQ ID NO: 1868146 - RNA, 19 nt, Artificial Sequence
  Description of Artificial Sequence: Synthetic oligonucleotide
ggcgcgcacacggccucgc

SEQ ID NO: 1868147 - RNA, 19 nt, Artificial Sequence
  Description of Artificial Sequence: Synthetic oligonucleotide
cucccaccacgaagggcgu

SEQ ID NO: 1868148 - RNA, 19 nt, Artificial Sequence
  Description of Artificial Sequence: Synthetic oligonucleotide
cgcucccaccacgaagggc

SEQ ID NO: 1868149 - RNA, 19 nt, Artificial Sequence
  Description of Artificial Sequence: Synthetic oligonucleotide
gcgccagcgcucccaccac

SEQ ID NO: 1868150 - RNA, 19 nt, Artificial Sequence
  Description of Artificial Sequence: Synthetic oligonucleotide
gaaggccgugucagaccuu

SEQ ID NO: 1868151 - RNA, 19 nt, Artificial Sequence
  Description of Artificial Sequence: Synthetic oligonucleotide
gcgcgccagcgcucccacc

SEQ ID NO: 1868152 - RNA, 19 nt, Artificial Sequence
  Description of Artificial Sequence: Synthetic oligonucleotide
cgugugugugugugugugu

SEQ ID NO: 1868153 - RNA, 19 nt, Artificial Sequence
  Description of Artificial Sequence: Synthetic oligonucleotide
cgcacacggccucgcgcac

SEQ ID NO: 1868154 - RNA, 19 nt, Artificial Sequence
  Description of Artificial Sequence: Synthetic oligonucleotide
ccagcgcucccaccacgaa

SEQ ID NO: 1868155 - RNA, 19 nt, Artificial Sequence
  Description of Artificial Sequence: Synthetic oligonucleotide
ccgcgcgcgccagcgcucc

SEQ ID NO: 1868156 - RNA, 19 nt, Artificial Sequence
  Description of Artificial Sequence: Synthetic oligonucleotide
cgcgcgccagcgcucccac

SEQ ID NO: 1868157 - RNA, 19 nt, Artificial Sequence
  Description of Artificial Sequence: Synthetic oligonucleotide
cggccucgcgcacgggcac

SEQ ID NO: 1868158 - RNA, 19 nt, Artificial Sequence
  Description of Artificial Sequence: Synthetic oligonucleotide
ggccaaccuccaacuccaa

SEQ ID NO: 1868159 - RNA, 19 nt, Artificial Sequence
  Description of Artificial Sequence: Synthetic oligonucleotide
gcgcgcgccagcgcuccca

SEQ ID NO: 1868160 - RNA, 19 nt, Artificial Sequence
  Description of Artificial Sequence: Synthetic oligonucleotide
gcuccccuccaaaggugau

SEQ ID NO: 1868161 - RNA, 19 nt, Artificial Sequence
  Description of Artificial Sequence: Synthetic oligonucleotide
ggccgucuuuggucauuuu

SEQ ID NO: 1868162 - RNA, 19 nt, Artificial Sequence
  Description of Artificial Sequence: Synthetic oligonucleotide
cgcgugugugugugugugu

SEQ ID NO: 1868163 - RNA, 19 nt, Artificial Sequence
  Description of Artificial Sequence: Synthetic oligonucleotide
cgcgcgcgccagcgcuccc

SEQ ID NO: 1868164 - RNA, 19 nt, Artificial Sequence
  Description of Artificial Sequence: Synthetic oligonucleotide
ccccuccaaaggugauauu

SEQ ID NO: 1868165 - RNA, 19 nt, Artificial Sequence
  Description of Artificial Sequence: Synthetic oligonucleotide
aauaggaacccguagaucc

SEQ ID NO: 1868166 - RNA, 19 nt, Artificial Sequence
  Description of Artificial Sequence: Synthetic oligonucleotide
uuugagauaaaccuuaugc

SEQ ID NO: 1868167 - RNA, 19 nt, Artificial Sequence
  Description of Artificial Sequence: Synthetic oligonucleotide
auagcaaaagucuucaagg

SEQ ID NO: 1868168 - RNA, 19 nt, Artificial Sequence
  Description of Artificial Sequence: Synthetic oligonucleotide
aauagcaaaagucuucaag

SEQ ID NO: 1868169 - RNA, 19 nt, Artificial Sequence
  Description of Artificial Sequence: Synthetic oligonucleotide
aaaccuuaugcucuagccc

SEQ ID NO: 1868170 - RNA, 19 nt, Artificial Sequence
  Description of Artificial Sequence: Synthetic oligonucleotide
aacaaaauagcaaaagucu

SEQ ID NO: 1868171 - RNA, 19 nt, Artificial Sequence
  Description of Artificial Sequence: Synthetic oligonucleotide
aaguuuguugcaugucucc

SEQ ID NO: 1868172 - RNA, 19 nt, Artificial Sequence
  Description of Artificial Sequence: Synthetic oligonucleotide
aaucccagaauccacacau

SEQ ID NO: 1868173 - RNA, 19 nt, Artificial Sequence
  Description of Artificial Sequence: Synthetic oligonucleotide
gacuggaucauagacacgg

SEQ ID NO: 1868174 - RNA, 19 nt, Artificial Sequence
  Description of Artificial Sequence: Synthetic oligonucleotide
cuaauaggggcuuggaagg

SEQ ID NO: 1868175 - RNA, 19 nt, Artificial Sequence
  Description of Artificial Sequence: Synthetic oligonucleotide
ucuaagaaucccagaaucc

SEQ ID NO: 1868176 - RNA, 19 nt, Artificial Sequence
  Description of Artificial Sequence: Synthetic oligonucleotide
aaccuuaugcucuagccca

SEQ ID NO: 1868177 - RNA, 19 nt, Artificial Sequence
  Description of Artificial Sequence: Synthetic oligonucleotide
uguaucugauuuaaaucag

SEQ ID NO: 1868178 - RNA, 19 nt, Artificial Sequence
  Description of Artificial Sequence: Synthetic oligonucleotide
uaaaccuuaugcucuagcc

SEQ ID NO: 1868179 - RNA, 19 nt, Artificial Sequence
  Description of Artificial Sequence: Synthetic oligonucleotide
uucaguugagauuugagau

SEQ ID NO: 1868180 - RNA, 19 nt, Artificial Sequence
  Description of Artificial Sequence: Synthetic oligonucleotide
gaacuguauauccuggucc

SEQ ID NO: 1868181 - RNA, 19 nt, Artificial Sequence
  Description of Artificial Sequence: Synthetic oligonucleotide
auaaaccuuaugcucuagc

SEQ ID NO: 1868182 - RNA, 19 nt, Artificial Sequence
  Description of Artificial Sequence: Synthetic oligonucleotide
uugagauaaaccuuaugcu

SEQ ID NO: 1868183 - RNA, 19 nt, Artificial Sequence
  Description of Artificial Sequence: Synthetic oligonucleotide
ugaaguuuguugcaugucu

SEQ ID NO: 1868184 - RNA, 19 nt, Artificial Sequence
  Description of Artificial Sequence: Synthetic oligonucleotide
ugcuaguugcccaugagug

SEQ ID NO: 1868185 - RNA, 19 nt, Artificial Sequence
  Description of Artificial Sequence: Synthetic oligonucleotide
uuuucaguucgcacguugg

SEQ ID NO: 1868186 - RNA, 19 nt, Artificial Sequence
  Description of Artificial Sequence: Synthetic oligonucleotide
agggaggaacuguauaucc

SEQ ID NO: 1868187 - RNA, 19 nt, Artificial Sequence
  Description of Artificial Sequence: Synthetic oligonucleotide
aaaucagggagcuuccgcu

SEQ ID NO: 1868188 - RNA, 19 nt, Artificial Sequence
  Description of Artificial Sequence: Synthetic oligonucleotide
acauucuuugcccugaaca

SEQ ID NO: 1868189 - RNA, 19 nt, Artificial Sequence
  Description of Artificial Sequence: Synthetic oligonucleotide
aagaucugggucucgucac

SEQ ID NO: 1868190 - RNA, 19 nt, Artificial Sequence
  Description of Artificial Sequence: Synthetic oligonucleotide
uuuaggaucccaguaucgg

SEQ ID NO: 1868191 - RNA, 19 nt, Artificial Sequence
  Description of Artificial Sequence: Synthetic oligonucleotide
gacagaauugcccucagga

SEQ ID NO: 1868192 - RNA, 19 nt, Artificial Sequence
  Description of Artificial Sequence: Synthetic oligonucleotide
aauggguacucuccauagg

SEQ ID NO: 1868193 - RNA, 19 nt, Artificial Sequence
  Description of Artificial Sequence: Synthetic oligonucleotide
uccuacacaccccaggacc

SEQ ID NO: 1868194 - RNA, 19 nt, Artificial Sequence
  Description of Artificial Sequence: Synthetic oligonucleotide
ugugacaagcuucugugac

SEQ ID NO: 1868195 - RNA, 19 nt, Artificial Sequence
  Description of Artificial Sequence: Synthetic oligonucleotide
aguuaucccugccugacag

SEQ ID NO: 1868196 - RNA, 19 nt, Artificial Sequence
  Description of Artificial Sequence: Synthetic oligonucleotide
gaagguucaccccuuuuag

SEQ ID NO: 1868197 - RNA, 19 nt, Artificial Sequence
  Description of Artificial Sequence: Synthetic oligonucleotide
uuucaguucgcacguuggg

SEQ ID NO: 1868198 - RNA, 19 nt, Artificial Sequence
  Description of Artificial Sequence: Synthetic oligonucleotide
uaaaucagggagcuuccgc

SEQ ID NO: 1868199 - RNA, 19 nt, Artificial Sequence
  Description of Artificial Sequence: Synthetic oligonucleotide
uauccuggucccaaauagg

SEQ ID NO: 1868200 - RNA, 19 nt, Artificial Sequence
  Description of Artificial Sequence: Synthetic oligonucleotide
agccacaagaggcuaauag

SEQ ID NO: 1868201 - RNA, 19 nt, Artificial Sequence
  Description of Artificial Sequence: Synthetic oligonucleotide
gaauguacccuccucggug

SEQ ID NO: 1868202 - RNA, 19 nt, Artificial Sequence
  Description of Artificial Sequence: Synthetic oligonucleotide
ugccucacggucauguccg

SEQ ID NO: 1868203 - RNA, 19 nt, Artificial Sequence
  Description of Artificial Sequence: Synthetic oligonucleotide
aaauaggaacccguagauc

SEQ ID NO: 1868204 - RNA, 19 nt, Artificial Sequence
  Description of Artificial Sequence: Synthetic oligonucleotide
aucauagacacggaccugg

SEQ ID NO: 1868205 - RNA, 19 nt, Artificial Sequence
  Description of Artificial Sequence: Synthetic oligonucleotide
ugauaaggguuccaucggc

SEQ ID NO: 1868206 - RNA, 19 nt, Artificial Sequence
  Description of Artificial Sequence: Synthetic oligonucleotide
ugauuuaaaucagggagcu

SEQ ID NO: 1868207 - RNA, 19 nt, Artificial Sequence
  Description of Artificial Sequence: Synthetic oligonucleotide
uggaauguacccuccucgg

SEQ ID NO: 1868208 - RNA, 19 nt, Artificial Sequence
  Description of Artificial Sequence: Synthetic oligonucleotide
cuugccgaaaaucaauuuc

SEQ ID NO: 1868209 - RNA, 19 nt, Artificial Sequence
  Description of Artificial Sequence: Synthetic oligonucleotide
aggacccaccuucaguucc

SEQ ID NO: 1868210 - RNA, 19 nt, Artificial Sequence
  Description of Artificial Sequence: Synthetic oligonucleotide
cuggaauguacccuccucg

SEQ ID NO: 1868211 - RNA, 19 nt, Artificial Sequence
  Description of Artificial Sequence: Synthetic oligonucleotide
acagaauugcccucaggag

SEQ ID NO: 1868212 - RNA, 19 nt, Artificial Sequence
  Description of Artificial Sequence: Synthetic oligonucleotide
aauguacccuccucggugu

SEQ ID NO: 1868213 - RNA, 19 nt, Artificial Sequence
  Description of Artificial Sequence: Synthetic oligonucleotide
uccucgguguuaaagugcc

SEQ ID NO: 1868214 - RNA, 19 nt, Artificial Sequence
  Description of Artificial Sequence: Synthetic oligonucleotide
aacccguagauccagccaa

SEQ ID NO: 1868215 - RNA, 19 nt, Artificial Sequence
  Description of Artificial Sequence: Synthetic oligonucleotide
uggcgcauccuacacaccc

SEQ ID NO: 1868216 - RNA, 19 nt, Artificial Sequence
  Description of Artificial Sequence: Synthetic oligonucleotide
agguucaccccuuuuagga

SEQ ID NO: 1868217 - RNA, 19 nt, Artificial Sequence
  Description of Artificial Sequence: Synthetic oligonucleotide
guucaguugagauuugaga

SEQ ID NO: 1868218 - RNA, 19 nt, Artificial Sequence
  Description of Artificial Sequence: Synthetic oligonucleotide
acacaugugauaaggguuc

SEQ ID NO: 1868219 - RNA, 19 nt, Artificial Sequence
  Description of Artificial Sequence: Synthetic oligonucleotide
ucccagaauccacacaugu

SEQ ID NO: 1868220 - RNA, 19 nt, Artificial Sequence
  Description of Artificial Sequence: Synthetic oligonucleotide
uuuggagagucccuuguau

SEQ ID NO: 1868221 - RNA, 19 nt, Artificial Sequence
  Description of Artificial Sequence: Synthetic oligonucleotide
ucaguucgcacguugggcu

SEQ ID NO: 1868222 - RNA, 19 nt, Artificial Sequence
  Description of Artificial Sequence: Synthetic oligonucleotide
agucccuuguaucugauuu

SEQ ID NO: 1868223 - RNA, 19 nt, Artificial Sequence
  Description of Artificial Sequence: Synthetic oligonucleotide
uggagagucccuuguaucu

SEQ ID NO: 1868224 - RNA, 19 nt, Artificial Sequence
  Description of Artificial Sequence: Synthetic oligonucleotide
caauggguacucuccauag

SEQ ID NO: 1868225 - RNA, 19 nt, Artificial Sequence
  Description of Artificial Sequence: Synthetic oligonucleotide
agaugcccaaaguucaucu

SEQ ID NO: 1868226 - RNA, 19 nt, Artificial Sequence
  Description of Artificial Sequence: Synthetic oligonucleotide
gugauaaggguuccaucgg

SEQ ID NO: 1868227 - RNA, 19 nt, Artificial Sequence
  Description of Artificial Sequence: Synthetic oligonucleotide
agagugggucagaugaugc

SEQ ID NO: 1868228 - RNA, 19 nt, Artificial Sequence
  Description of Artificial Sequence: Synthetic oligonucleotide
uguuuggagagucccuugu

SEQ ID NO: 1868229 - RNA, 19 nt, Artificial Sequence
  Description of Artificial Sequence: Synthetic oligonucleotide
uguggcaaccacauggcua

SEQ ID NO: 1868230 - RNA, 19 nt, Artificial Sequence
  Description of Artificial Sequence: Synthetic oligonucleotide
aaggguuccaucggccugg

SEQ ID NO: 1868231 - RNA, 19 nt, Artificial Sequence
  Description of Artificial Sequence: Synthetic oligonucleotide
aguuuguugcaugucuccg

SEQ ID NO: 1868232 - RNA, 19 nt, Artificial Sequence
  Description of Artificial Sequence: Synthetic oligonucleotide
uuaggaucccaguaucggu

SEQ ID NO: 1868233 - RNA, 19 nt, Artificial Sequence
  Description of Artificial Sequence: Synthetic oligonucleotide
cuucggauccuguguaucc

SEQ ID NO: 1868234 - RNA, 19 nt, Artificial Sequence
  Description of Artificial Sequence: Synthetic oligonucleotide
uccuguguauccucaagac

SEQ ID NO: 1868235 - RNA, 19 nt, Artificial Sequence
  Description of Artificial Sequence: Synthetic oligonucleotide
uauccucaagacucugucc

SEQ ID NO: 1868236 - RNA, 19 nt, Artificial Sequence
  Description of Artificial Sequence: Synthetic oligonucleotide
ggugccgacccacacaugg

SEQ ID NO: 1868237 - RNA, 19 nt, Artificial Sequence
  Description of Artificial Sequence: Synthetic oligonucleotide
ucaguugagauuugagaua

SEQ ID NO: 1868238 - RNA, 19 nt, Artificial Sequence
  Description of Artificial Sequence: Synthetic oligonucleotide
uuaaaucagggagcuuccg

SEQ ID NO: 1868239 - RNA, 19 nt, Artificial Sequence
  Description of Artificial Sequence: Synthetic oligonucleotide
uucaccccuuuuaggaucc

SEQ ID NO: 1868240 - RNA, 19 nt, Artificial Sequence
  Description of Artificial Sequence: Synthetic oligonucleotide
gauaaggguuccaucggcc

SEQ ID NO: 1868241 - RNA, 19 nt, Artificial Sequence
  Description of Artificial Sequence: Synthetic oligonucleotide
uauauccuggucccaaaua

SEQ ID NO: 1868242 - RNA, 19 nt, Artificial Sequence
  Description of Artificial Sequence: Synthetic oligonucleotide
ucaauggguacucuccaua

SEQ ID NO: 1868243 - RNA, 19 nt, Artificial Sequence
  Description of Artificial Sequence: Synthetic oligonucleotide
ggguacucuccauaggugg

SEQ ID NO: 1868244 - RNA, 19 nt, Artificial Sequence
  Description of Artificial Sequence: Synthetic oligonucleotide
cuuugcccugaacacaggc

SEQ ID NO: 1868245 - RNA, 19 nt, Artificial Sequence
  Description of Artificial Sequence: Synthetic oligonucleotide
uucaguucgcacguugggc

SEQ ID NO: 1868246 - RNA, 19 nt, Artificial Sequence
  Description of Artificial Sequence: Synthetic oligonucleotide
gguguuaaagugccucacg

SEQ ID NO: 1868247 - RNA, 19 nt, Artificial Sequence
  Description of Artificial Sequence: Synthetic oligonucleotide
uggguacucuccauaggug

SEQ ID NO: 1868248 - RNA, 19 nt, Artificial Sequence
  Description of Artificial Sequence: Synthetic oligonucleotide
agauuugagauaaaccuua

SEQ ID NO: 1868249 - RNA, 19 nt, Artificial Sequence
  Description of Artificial Sequence: Synthetic oligonucleotide
uaauaggggcuuggaaggg

SEQ ID NO: 1868250 - RNA, 19 nt, Artificial Sequence
  Description of Artificial Sequence: Synthetic oligonucleotide
acggacacugccugccagc

SEQ ID NO: 1868251 - RNA, 19 nt, Artificial Sequence
  Description of Artificial Sequence: Synthetic oligonucleotide
gaugcccaaaguucaucug

SEQ ID NO: 1868252 - RNA, 19 nt, Artificial Sequence
  Description of Artificial Sequence: Synthetic oligonucleotide
gagauaaaccuuaugcucu

SEQ ID NO: 1868253 - RNA, 19 nt, Artificial Sequence
  Description of Artificial Sequence: Synthetic oligonucleotide
cucacggucauguccgcgc

SEQ ID NO: 1868254 - RNA, 19 nt, Artificial Sequence
  Description of Artificial Sequence: Synthetic oligonucleotide
cuguaggucccauacuuuc

SEQ ID NO: 1868255 - RNA, 19 nt, Artificial Sequence
  Description of Artificial Sequence: Synthetic oligonucleotide
acaagcuucugugacccag

SEQ ID NO: 1868256 - RNA, 19 nt, Artificial Sequence
  Description of Artificial Sequence: Synthetic oligonucleotide
aguucaguugagauuugag

SEQ ID NO: 1868257 - RNA, 19 nt, Artificial Sequence
  Description of Artificial Sequence: Synthetic oligonucleotide
ucugggucucgucacccgc

SEQ ID NO: 1868258 - RNA, 19 nt, Artificial Sequence
  Description of Artificial Sequence: Synthetic oligonucleotide
uagacguccuugccgaaaa

SEQ ID NO: 1868259 - RNA, 19 nt, Artificial Sequence
  Description of Artificial Sequence: Synthetic oligonucleotide
auuucugcuaguugcccau

SEQ ID NO: 1868260 - RNA, 19 nt, Artificial Sequence
  Description of Artificial Sequence: Synthetic oligonucleotide
gaaguuuguugcaugucuc

SEQ ID NO: 1868261 - RNA, 19 nt, Artificial Sequence
  Description of Artificial Sequence: Synthetic oligonucleotide
ccaagagugggucagauga

SEQ ID NO: 1868262 - RNA, 19 nt, Artificial Sequence
  Description of Artificial Sequence: Synthetic oligonucleotide
gaucccaguaucggugccg

SEQ ID NO: 1868263 - RNA, 19 nt, Artificial Sequence
  Description of Artificial Sequence: Synthetic oligonucleotide
aauaggggcuuggaagggu

SEQ ID NO: 1868264 - RNA, 19 nt, Artificial Sequence
  Description of Artificial Sequence: Synthetic oligonucleotide
gaggcuaauaggggcuugg

SEQ ID NO: 1868265 - RNA, 19 nt, Artificial Sequence
  Description of Artificial Sequence: Synthetic oligonucleotide
uuguuuggagagucccuug

SEQ ID NO: 1868266 - RNA, 19 nt, Artificial Sequence
  Description of Artificial Sequence: Synthetic oligonucleotide
ucggugccgacccacacau

SEQ ID NO: 1868267 - RNA, 19 nt, Artificial Sequence
  Description of Artificial Sequence: Synthetic oligonucleotide
agccaaucauuccucacau

SEQ ID NO: 1868268 - RNA, 19 nt, Artificial Sequence
  Description of Artificial Sequence: Synthetic oligonucleotide
acggucauguccgcgcagc

SEQ ID NO: 1868269 - RNA, 19 nt, Artificial Sequence
  Description of Artificial Sequence: Synthetic oligonucleotide
ucggaacgugcccuccccg

SEQ ID NO: 1868270 - RNA, 19 nt, Artificial Sequence
  Description of Artificial Sequence: Synthetic oligonucleotide
gagaccucggaacgugccc

SEQ ID NO: 1868271 - RNA, 19 nt, Artificial Sequence
  Description of Artificial Sequence: Synthetic oligonucleotide
acuucggauccuguguauc

SEQ ID NO: 1868272 - RNA, 19 nt, Artificial Sequence
  Description of Artificial Sequence: Synthetic oligonucleotide
uccaagagugggucagaug

SEQ ID NO: 1868273 - RNA, 19 nt, Artificial Sequence
  Description of Artificial Sequence: Synthetic oligonucleotide
cugggcgagaccucggaac

SEQ ID NO: 1868274 - RNA, 19 nt, Artificial Sequence
  Description of Artificial Sequence: Synthetic oligonucleotide
ucuguaggucccauacuuu

SEQ ID NO: 1868275 - RNA, 19 nt, Artificial Sequence
  Description of Artificial Sequence: Synthetic oligonucleotide
uguccggauggcgugaagu

SEQ ID NO: 1868276 - RNA, 19 nt, Artificial Sequence
  Description of Artificial Sequence: Synthetic oligonucleotide
auggcugucaauggguacu

SEQ ID NO: 1868277 - RNA, 19 nt, Artificial Sequence
  Description of Artificial Sequence: Synthetic oligonucleotide
agauaaaccuuaugcucua

SEQ ID NO: 1868278 - RNA, 19 nt, Artificial Sequence
  Description of Artificial Sequence: Synthetic oligonucleotide
ucccacauguggcaaccac

SEQ ID NO: 1868279 - RNA, 19 nt, Artificial Sequence
  Description of Artificial Sequence: Synthetic oligonucleotide
aauugcccucaggaguaag

SEQ ID NO: 1868280 - RNA, 19 nt, Artificial Sequence
  Description of Artificial Sequence: Synthetic oligonucleotide
ucauagacacggaccuggu

SEQ ID NO: 1868281 - RNA, 19 nt, Artificial Sequence
  Description of Artificial Sequence: Synthetic oligonucleotide
ugcccugaacacaggcugc

SEQ ID NO: 1868282 - RNA, 19 nt, Artificial Sequence
  Description of Artificial Sequence: Synthetic oligonucleotide
cuaugugcugggucuuggc

SEQ ID NO: 1868283 - RNA, 19 nt, Artificial Sequence
  Description of Artificial Sequence: Synthetic oligonucleotide
gucauguccgcgcagccca

SEQ ID NO: 1868284 - RNA, 19 nt, Artificial Sequence
  Description of Artificial Sequence: Synthetic oligonucleotide
cauggcuaugugcuggguc

SEQ ID NO: 1868285 - RNA, 19 nt, Artificial Sequence
  Description of Artificial Sequence: Synthetic oligonucleotide
ucccaaauaggaacccgua

SEQ ID NO: 1868286 - RNA, 19 nt, Artificial Sequence
  Description of Artificial Sequence: Synthetic oligonucleotide
cucgguguuaaagugccuc

SEQ ID NO: 1868287 - RNA, 19 nt, Artificial Sequence
  Description of Artificial Sequence: Synthetic oligonucleotide
uccagccaaucauuccuca

SEQ ID NO: 1868288 - RNA, 19 nt, Artificial Sequence
  Description of Artificial Sequence: Synthetic oligonucleotide
uugcaugucuccgcugaag

SEQ ID NO: 1868289 - RNA, 19 nt, Artificial Sequence
  Description of Artificial Sequence: Synthetic oligonucleotide
acguccuugccgaaaauca

SEQ ID NO: 1868290 - RNA, 19 nt, Artificial Sequence
  Description of Artificial Sequence: Synthetic oligonucleotide
ccaguagacguccuugccg

SEQ ID NO: 1868291 - RNA, 19 nt, Artificial Sequence
  Description of Artificial Sequence: Synthetic oligonucleotide
caguagacguccuugccga

SEQ ID NO: 1868292 - RNA, 19 nt, Artificial Sequence
  Description of Artificial Sequence: Synthetic oligonucleotide
guggacuucggauccugug

SEQ ID NO: 1868293 - RNA, 19 nt, Artificial Sequence
  Description of Artificial Sequence: Synthetic oligonucleotide
gaacccguagauccagcca

SEQ ID NO: 1868294 - RNA, 19 nt, Artificial Sequence
  Description of Artificial Sequence: Synthetic oligonucleotide
cuuucccacauguggcaac

SEQ ID NO: 1868295 - RNA, 19 nt, Artificial Sequence
  Description of Artificial Sequence: Synthetic oligonucleotide
gcauccuacacaccccagg

SEQ ID NO: 1868296 - RNA, 19 nt, Artificial Sequence
  Description of Artificial Sequence: Synthetic oligonucleotide
gacagcccaguagacgucc

SEQ ID NO: 1868297 - RNA, 19 nt, Artificial Sequence
  Description of Artificial Sequence: Synthetic oligonucleotide
gucacaccagacucuaaga

SEQ ID NO: 1868298 - RNA, 19 nt, Artificial Sequence
  Description of Artificial Sequence: Synthetic oligonucleotide
caccccaggacccaccuuc

SEQ ID NO: 1868299 - RNA, 19 nt, Artificial Sequence
  Description of Artificial Sequence: Synthetic oligonucleotide
ggaucauagacacggaccu

SEQ ID NO: 1868300 - RNA, 19 nt, Artificial Sequence
  Description of Artificial Sequence: Synthetic oligonucleotide
auuugccuccaaagaugcc

SEQ ID NO: 1868301 - RNA, 19 nt, Artificial Sequence
  Description of Artificial Sequence: Synthetic oligonucleotide
guuccaucggccugggcga

SEQ ID NO: 1868302 - RNA, 19 nt, Artificial Sequence
  Description of Artificial Sequence: Synthetic oligonucleotide
cagaugaugcuuccuuguc

SEQ ID NO: 1868303 - RNA, 19 nt, Artificial Sequence
  Description of Artificial Sequence: Synthetic oligonucleotide
uaucggugccgacccacac

SEQ ID NO: 1868304 - RNA, 19 nt, Artificial Sequence
  Description of Artificial Sequence: Synthetic oligonucleotide
uggugguacccugugcaug

SEQ ID NO: 1868305 - RNA, 19 nt, Artificial Sequence
  Description of Artificial Sequence: Synthetic oligonucleotide
cagccaaucauuccucaca

SEQ ID NO: 1868306 - RNA, 19 nt, Artificial Sequence
  Description of Artificial Sequence: Synthetic oligonucleotide
cauagacacggaccuggug

SEQ ID NO: 1868307 - RNA, 19 nt, Artificial Sequence
  Description of Artificial Sequence: Synthetic oligonucleotide
ccaaauaggaacccguaga

SEQ ID NO: 1868308 - RNA, 19 nt, Artificial Sequence
  Description of Artificial Sequence: Synthetic oligonucleotide
ggaacccguagauccagcc

SEQ ID NO: 1868309 - RNA, 19 nt, Artificial Sequence
  Description of Artificial Sequence: Synthetic oligonucleotide
auugucacaccagacucua

SEQ ID NO: 1868310 - RNA, 19 nt, Artificial Sequence
  Description of Artificial Sequence: Synthetic oligonucleotide
guacucuccauagguggcc

SEQ ID NO: 1868311 - RNA, 19 nt, Artificial Sequence
  Description of Artificial Sequence: Synthetic oligonucleotide
cauucaccgccuccucccg

SEQ ID NO: 1868312 - RNA, 19 nt, Artificial Sequence
  Description of Artificial Sequence: Synthetic oligonucleotide
ccaguaucggugccgaccc

SEQ ID NO: 1868313 - RNA, 19 nt, Artificial Sequence
  Description of Artificial Sequence: Synthetic oligonucleotide
aacgugcccuccccgccug

SEQ ID NO: 1868314 - RNA, 19 nt, Artificial Sequence
  Description of Artificial Sequence: Synthetic oligonucleotide
aucggccugggcgagaccu

SEQ ID NO: 1868315 - RNA, 19 nt, Artificial Sequence
  Description of Artificial Sequence: Synthetic oligonucleotide
aggcaguucaguugagauu

SEQ ID NO: 1868316 - RNA, 19 nt, Artificial Sequence
  Description of Artificial Sequence: Synthetic oligonucleotide
gggagagacuggaucauag

SEQ ID NO: 1868317 - RNA, 19 nt, Artificial Sequence
  Description of Artificial Sequence: Synthetic oligonucleotide
aucggugccgacccacaca

SEQ ID NO: 1868318 - RNA, 19 nt, Artificial Sequence
  Description of Artificial Sequence: Synthetic oligonucleotide
auguggcaaccacauggcu

SEQ ID NO: 1868319 - RNA, 19 nt, Artificial Sequence
  Description of Artificial Sequence: Synthetic oligonucleotide
ucaaggacuggaggaucca

SEQ ID NO: 1868320 - RNA, 19 nt, Artificial Sequence
  Description of Artificial Sequence: Synthetic oligonucleotide
ugccgacccacacaugguu

SEQ ID NO: 1868321 - RNA, 19 nt, Artificial Sequence
  Description of Artificial Sequence: Synthetic oligonucleotide
cucuuucccacauguggca

SEQ ID NO: 1868322 - RNA, 19 nt, Artificial Sequence
  Description of Artificial Sequence: Synthetic oligonucleotide
agcccaguagacguccuug

SEQ ID NO: 1868323 - RNA, 19 nt, Artificial Sequence
  Description of Artificial Sequence: Synthetic oligonucleotide
uccucaagacucuguccaa

SEQ ID NO: 1868324 - RNA, 19 nt, Artificial Sequence
  Description of Artificial Sequence: Synthetic oligonucleotide
cucggaacgugcccucccc

SEQ ID NO: 1868325 - RNA, 19 nt, Artificial Sequence
  Description of Artificial Sequence: Synthetic oligonucleotide
gagauuugagauaaaccuu

SEQ ID NO: 1868326 - RNA, 19 nt, Artificial Sequence
  Description of Artificial Sequence: Synthetic oligonucleotide
cuaggacuggccgucgcug

SEQ ID NO: 1868327 - RNA, 19 nt, Artificial Sequence
  Description of Artificial Sequence: Synthetic oligonucleotide
gaccuggugguacccugug

SEQ ID NO: 1868328 - RNA, 19 nt, Artificial Sequence
  Description of Artificial Sequence: Synthetic oligonucleotide
cccaaauaggaacccguag

SEQ ID NO: 1868329 - RNA, 19 nt, Artificial Sequence
  Description of Artificial Sequence: Synthetic oligonucleotide
guggcaaccacauggcuau

SEQ ID NO: 1868330 - RNA, 19 nt, Artificial Sequence
  Description of Artificial Sequence: Synthetic oligonucleotide
guccgcgcagcccaccaag

SEQ ID NO: 1868331 - RNA, 19 nt, Artificial Sequence
  Description of Artificial Sequence: Synthetic oligonucleotide
ucgcacguugggcuguuua

SEQ ID NO: 1868332 - RNA, 19 nt, Artificial Sequence
  Description of Artificial Sequence: Synthetic oligonucleotide
ugcccuccccgccugggca

SEQ ID NO: 1868333 - RNA, 19 nt, Artificial Sequence
  Description of Artificial Sequence: Synthetic oligonucleotide
gcaaccacauggcuaugug

SEQ ID NO: 1868334 - RNA, 19 nt, Artificial Sequence
  Description of Artificial Sequence: Synthetic oligonucleotide
aggaacccguagauccagc

SEQ ID NO: 1868335 - RNA, 19 nt, Artificial Sequence
  Description of Artificial Sequence: Synthetic oligonucleotide
caagaggcuaauaggggcu

SEQ ID NO: 1868336 - RNA, 19 nt, Artificial Sequence
  Description of Artificial Sequence: Synthetic oligonucleotide
acguugggcuguuuauuaa

SEQ ID NO: 1868337 - RNA, 19 nt, Artificial Sequence
  Description of Artificial Sequence: Synthetic oligonucleotide
uuucugcuaguugcccaug

SEQ ID NO: 1868338 - RNA, 19 nt, Artificial Sequence
  Description of Artificial Sequence: Synthetic oligonucleotide
ucccugccugacaggagga

SEQ ID NO: 1868339 - RNA, 19 nt, Artificial Sequence
  Description of Artificial Sequence: Synthetic oligonucleotide
cagggaggaacuguauauc

SEQ ID NO: 1868340 - RNA, 19 nt, Artificial Sequence
  Description of Artificial Sequence: Synthetic oligonucleotide
ggucucgucacccgcgcgc

SEQ ID NO: 1868341 - RNA, 19 nt, Artificial Sequence
  Description of Artificial Sequence: Synthetic oligonucleotide
caguucgcacguugggcug

SEQ ID NO: 1868342 - RNA, 19 nt, Artificial Sequence
  Description of Artificial Sequence: Synthetic oligonucleotide
uuggcgcauccuacacacc

SEQ ID NO: 1868343 - RNA, 19 nt, Artificial Sequence
  Description of Artificial Sequence: Synthetic oligonucleotide
uccgcgcagcccaccaaga

SEQ ID NO: 1868344 - RNA, 19 nt, Artificial Sequence
  Description of Artificial Sequence: Synthetic oligonucleotide
ccggauggcgugaaguuug

SEQ ID NO: 1868345 - RNA, 19 nt, Artificial Sequence
  Description of Artificial Sequence: Synthetic oligonucleotide
ggagagacuggaucauaga

SEQ ID NO: 1868346 - RNA, 19 nt, Artificial Sequence
  Description of Artificial Sequence: Synthetic oligonucleotide
acaugugauaaggguucca

SEQ ID NO: 1868347 - RNA, 19 nt, Artificial Sequence
  Description of Artificial Sequence: Synthetic oligonucleotide
acuguauauccugguccca

SEQ ID NO: 1868348 - RNA, 19 nt, Artificial Sequence
  Description of Artificial Sequence: Synthetic oligonucleotide
ggcaguucaguugagauuu

SEQ ID NO: 1868349 - RNA, 19 nt, Artificial Sequence
  Description of Artificial Sequence: Synthetic oligonucleotide
uccaagccacaagaggcua

SEQ ID NO: 1868350 - RNA, 19 nt, Artificial Sequence
  Description of Artificial Sequence: Synthetic oligonucleotide
cccagaauccacacaugug

SEQ ID NO: 1868351 - RNA, 19 nt, Artificial Sequence
  Description of Artificial Sequence: Synthetic oligonucleotide
agacuggaucauagacacg

SEQ ID NO: 1868352 - RNA, 19 nt, Artificial Sequence
  Description of Artificial Sequence: Synthetic oligonucleotide
cauugucacaccagacucu

SEQ ID NO: 1868353 - RNA, 19 nt, Artificial Sequence
  Description of Artificial Sequence: Synthetic oligonucleotide
gguacccugugcaugugac

SEQ ID NO: 1868354 - RNA, 19 nt, Artificial Sequence
  Description of Artificial Sequence: Synthetic oligonucleotide
agaggcuaauaggggcuug

SEQ ID NO: 1868355 - RNA, 19 nt, Artificial Sequence
  Description of Artificial Sequence: Synthetic oligonucleotide
auguccgcgcagcccacca

SEQ ID NO: 1868356 - RNA, 19 nt, Artificial Sequence
  Description of Artificial Sequence: Synthetic oligonucleotide
ccacguggacuucggaucc

SEQ ID NO: 1868357 - RNA, 19 nt, Artificial Sequence
  Description of Artificial Sequence: Synthetic oligonucleotide
agacagcccaguagacguc

SEQ ID NO: 1868358 - RNA, 19 nt, Artificial Sequence
  Description of Artificial Sequence: Synthetic oligonucleotide
ggaacgugcccuccccgcc

SEQ ID NO: 1868359 - RNA, 19 nt, Artificial Sequence
  Description of Artificial Sequence: Synthetic oligonucleotide
gcgugaaguuuguugcaug

SEQ ID NO: 1868360 - RNA, 19 nt, Artificial Sequence
  Description of Artificial Sequence: Synthetic oligonucleotide
ggagagucccuuguaucug

SEQ ID NO: 1868361 - RNA, 19 nt, Artificial Sequence
  Description of Artificial Sequence: Synthetic oligonucleotide
ucauguccgcgcagcccac

SEQ ID NO: 1868362 - RNA, 19 nt, Artificial Sequence
  Description of Artificial Sequence: Synthetic oligonucleotide
cccaguaucggugccgacc

SEQ ID NO: 1868363 - RNA, 19 nt, Artificial Sequence
  Description of Artificial Sequence: Synthetic oligonucleotide
cuguauauccuggucccaa

SEQ ID NO: 1868364 - RNA, 19 nt, Artificial Sequence
  Description of Artificial Sequence: Synthetic oligonucleotide
gcuuccgcuuggcauuugc

SEQ ID NO: 1868365 - RNA, 19 nt, Artificial Sequence
  Description of Artificial Sequence: Synthetic oligonucleotide
ccuggugguacccugugca

SEQ ID NO: 1868366 - RNA, 19 nt, Artificial Sequence
  Description of Artificial Sequence: Synthetic oligonucleotide
aguucgcacguugggcugu

SEQ ID NO: 1868367 - RNA, 19 nt, Artificial Sequence
  Description of Artificial Sequence: Synthetic oligonucleotide
cacaggcugcucaggcuuc

SEQ ID NO: 1868368 - RNA, 19 nt, Artificial Sequence
  Description of Artificial Sequence: Synthetic oligonucleotide
ggcuaauaggggcuuggaa

SEQ ID NO: 1868369 - RNA, 19 nt, Artificial Sequence
  Description of Artificial Sequence: Synthetic oligonucleotide
ggugguacccugugcaugu

SEQ ID NO: 1868370 - RNA, 19 nt, Artificial Sequence
  Description of Artificial Sequence: Synthetic oligonucleotide
cucaggaguaagggucaug

SEQ ID NO: 1868371 - RNA, 19 nt, Artificial Sequence
  Description of Artificial Sequence: Synthetic oligonucleotide
ggucuuggcgcauccuaca

SEQ ID NO: 1868372 - RNA, 19 nt, Artificial Sequence
  Description of Artificial Sequence: Synthetic oligonucleotide
gcccaguagacguccuugc

SEQ ID NO: 1868373 - RNA, 19 nt, Artificial Sequence
  Description of Artificial Sequence: Synthetic oligonucleotide
cucgucacccgcgcgccag

SEQ ID NO: 1868374 - RNA, 19 nt, Artificial Sequence
  Description of Artificial Sequence: Synthetic oligonucleotide
uguacccuccucgguguua

SEQ ID NO: 1868375 - RNA, 19 nt, Artificial Sequence
  Description of Artificial Sequence: Synthetic oligonucleotide
gacaagcuucugugaccca

SEQ ID NO: 1868376 - RNA, 19 nt, Artificial Sequence
  Description of Artificial Sequence: Synthetic oligonucleotide
uggccgucgcuggggagag

SEQ ID NO: 1868377 - RNA, 19 nt, Artificial Sequence
  Description of Artificial Sequence: Synthetic oligonucleotide
gucucgucacccgcgcgcc

SEQ ID NO: 1868378 - RNA, 19 nt, Artificial Sequence
  Description of Artificial Sequence: Synthetic oligonucleotide
ucucgucacccgcgcgcca

SEQ ID NO: 1868379 - RNA, 19 nt, Artificial Sequence
  Description of Artificial Sequence: Synthetic oligonucleotide
uguccgcgcagcccaccaa

SEQ ID NO: 1868380 - RNA, 19 nt, Artificial Sequence
  Description of Artificial Sequence: Synthetic oligonucleotide
ggaucccaguaucggugcc

SEQ ID NO: 1868381 - RNA, 19 nt, Artificial Sequence
  Description of Artificial Sequence: Synthetic oligonucleotide
ucgucacccgcgcgccagc

SEQ ID NO: 1868382 - RNA, 19 nt, Artificial Sequence
  Description of Artificial Sequence: Synthetic oligonucleotide
uucccacauguggcaacca

SEQ ID NO: 1868383 - RNA, 19 nt, Artificial Sequence
  Description of Artificial Sequence: Synthetic oligonucleotide
cacggucauguccgcgcag

SEQ ID NO: 1868384 - RNA, 19 nt, Artificial Sequence
  Description of Artificial Sequence: Synthetic oligonucleotide
guugcaugucuccgcugaa

SEQ ID NO: 1868385 - RNA, 19 nt, Artificial Sequence
  Description of Artificial Sequence: Synthetic oligonucleotide
ccuugucauugucacacca

SEQ ID NO: 1868386 - RNA, 19 nt, Artificial Sequence
  Description of Artificial Sequence: Synthetic oligonucleotide
ggacuucggauccugugua

SEQ ID NO: 1868387 - RNA, 19 nt, Artificial Sequence
  Description of Artificial Sequence: Synthetic oligonucleotide
ccucaagacucuguccaag

SEQ ID NO: 1868388 - RNA, 19 nt, Artificial Sequence
  Description of Artificial Sequence: Synthetic oligonucleotide
ugccuccaaagaugcccaa

SEQ ID NO: 1868389 - RNA, 19 nt, Artificial Sequence
  Description of Artificial Sequence: Synthetic oligonucleotide
ucuccauagguggccucua

SEQ ID NO: 1868390 - RNA, 19 nt, Artificial Sequence
  Description of Artificial Sequence: Synthetic oligonucleotide
guacccuccucgguguuaa

SEQ ID NO: 1868391 - RNA, 19 nt, Artificial Sequence
  Description of Artificial Sequence: Synthetic oligonucleotide
ggcgagaccucggaacgug

SEQ ID NO: 1868392 - RNA, 19 nt, Artificial Sequence
  Description of Artificial Sequence: Synthetic oligonucleotide
cccacauguggcaaccaca

SEQ ID NO: 1868393 - RNA, 19 nt, Artificial Sequence
  Description of Artificial Sequence: Synthetic oligonucleotide
gaacgugcccuccccgccu

SEQ ID NO: 1868394 - RNA, 19 nt, Artificial Sequence
  Description of Artificial Sequence: Synthetic oligonucleotide
cauguccgcgcagcccacc

SEQ ID NO: 1868395 - RNA, 19 nt, Artificial Sequence
  Description of Artificial Sequence: Synthetic oligonucleotide
cuucuguaggucccauacu

SEQ ID NO: 1868396 - RNA, 19 nt, Artificial Sequence
  Description of Artificial Sequence: Synthetic oligonucleotide
gacuucggauccuguguau

SEQ ID NO: 1868397 - RNA, 19 nt, Artificial Sequence
  Description of Artificial Sequence: Synthetic oligonucleotide
gcuaguugcccaugagugu

SEQ ID NO: 1868398 - RNA, 19 nt, Artificial Sequence
  Description of Artificial Sequence: Synthetic oligonucleotide
cgagaccucggaacgugcc

SEQ ID NO: 1868399 - RNA, 19 nt, Artificial Sequence
  Description of Artificial Sequence: Synthetic oligonucleotide
guaucggugccgacccaca

SEQ ID NO: 1868400 - RNA, 19 nt, Artificial Sequence
  Description of Artificial Sequence: Synthetic oligonucleotide
ucggccugggcgagaccuc

SEQ ID NO: 1868401 - RNA, 19 nt, Artificial Sequence
  Description of Artificial Sequence: Synthetic oligonucleotide
ccuuaugcucuagcccacg

SEQ ID NO: 1868402 - RNA, 19 nt, Artificial Sequence
  Description of Artificial Sequence: Synthetic oligonucleotide
ggacuggccgucgcugggg

SEQ ID NO: 1868403 - RNA, 19 nt, Artificial Sequence
  Description of Artificial Sequence: Synthetic oligonucleotide
agcccacguggacuucgga

SEQ ID NO: 1868404 - RNA, 19 nt, Artificial Sequence
  Description of Artificial Sequence: Synthetic oligonucleotide
gaggauccaggccgcuucu

SEQ ID NO: 1868405 - RNA, 19 nt, Artificial Sequence
  Description of Artificial Sequence: Synthetic oligonucleotide
ggcgcauccuacacacccc

SEQ ID NO: 1868406 - RNA, 19 nt, Artificial Sequence
  Description of Artificial Sequence: Synthetic oligonucleotide
cacagagcauucaccgccu

SEQ ID NO: 1868407 - RNA, 19 nt, Artificial Sequence
  Description of Artificial Sequence: Synthetic oligonucleotide
ggaauguacccuccucggu

SEQ ID NO: 1868408 - RNA, 19 nt, Artificial Sequence
  Description of Artificial Sequence: Synthetic oligonucleotide
cuguccggauggcgugaag

SEQ ID NO: 1868409 - RNA, 19 nt, Artificial Sequence
  Description of Artificial Sequence: Synthetic oligonucleotide
ccguagauccagccaauca

SEQ ID NO: 1868410 - RNA, 19 nt, Artificial Sequence
  Description of Artificial Sequence: Synthetic oligonucleotide
ucccaguaucggugccgac

SEQ ID NO: 1868411 - RNA, 19 nt, Artificial Sequence
  Description of Artificial Sequence: Synthetic oligonucleotide
ucaccccuuuuaggauccc

SEQ ID NO: 1868412 - RNA, 19 nt, Artificial Sequence
  Description of Artificial Sequence: Synthetic oligonucleotide
guccaagccacaagaggcu

SEQ ID NO: 1868413 - RNA, 19 nt, Artificial Sequence
  Description of Artificial Sequence: Synthetic oligonucleotide
ccuuuuaggaucccaguau

SEQ ID NO: 1868414 - RNA, 19 nt, Artificial Sequence
  Description of Artificial Sequence: Synthetic oligonucleotide
gaauugcccucaggaguaa

SEQ ID NO: 1868415 - RNA, 19 nt, Artificial Sequence
  Description of Artificial Sequence: Synthetic oligonucleotide
ggaggcaguucaguugaga

SEQ ID NO: 1868416 - RNA, 19 nt, Artificial Sequence
  Description of Artificial Sequence: Synthetic oligonucleotide
gggucucgucacccgcgcg

SEQ ID NO: 1868417 - RNA, 19 nt, Artificial Sequence
  Description of Artificial Sequence: Synthetic oligonucleotide
gcgcauccuacacacccca

SEQ ID NO: 1868418 - RNA, 19 nt, Artificial Sequence
  Description of Artificial Sequence: Synthetic oligonucleotide
gcucuggaauguacccucc

SEQ ID NO: 1868419 - RNA, 19 nt, Artificial Sequence
  Description of Artificial Sequence: Synthetic oligonucleotide
auguacccuccucgguguu

SEQ ID NO: 1868420 - RNA, 19 nt, Artificial Sequence
  Description of Artificial Sequence: Synthetic oligonucleotide
gccgucgcuggggagagac

SEQ ID NO: 1868421 - RNA, 19 nt, Artificial Sequence
  Description of Artificial Sequence: Synthetic oligonucleotide
acggaccuggugguacccu

SEQ ID NO: 1868422 - RNA, 19 nt, Artificial Sequence
  Description of Artificial Sequence: Synthetic oligonucleotide
ccagggaggaacuguauau

SEQ ID NO: 1868423 - RNA, 19 nt, Artificial Sequence
  Description of Artificial Sequence: Synthetic oligonucleotide
uccaucggccugggcgaga

SEQ ID NO: 1868424 - RNA, 19 nt, Artificial Sequence
  Description of Artificial Sequence: Synthetic oligonucleotide
gucacccgcgcgccagcac

SEQ ID NO: 1868425 - RNA, 19 nt, Artificial Sequence
  Description of Artificial Sequence: Synthetic oligonucleotide
ccucggaacgugcccuccc

SEQ ID NO: 1868426 - RNA, 19 nt, Artificial Sequence
  Description of Artificial Sequence: Synthetic oligonucleotide
cucuagcccacguggacuu

SEQ ID NO: 1868427 - RNA, 19 nt, Artificial Sequence
  Description of Artificial Sequence: Synthetic oligonucleotide
gugguacccugugcaugug

SEQ ID NO: 1868428 - RNA, 19 nt, Artificial Sequence
  Description of Artificial Sequence: Synthetic oligonucleotide
caucggccugggcgagacc

SEQ ID NO: 1868429 - RNA, 19 nt, Artificial Sequence
  Description of Artificial Sequence: Synthetic oligonucleotide
caccccuuuuaggauccca

SEQ ID NO: 1868430 - RNA, 19 nt, Artificial Sequence
  Description of Artificial Sequence: Synthetic oligonucleotide
gagucccuuguaucugauu

SEQ ID NO: 1868431 - RNA, 19 nt, Artificial Sequence
  Description of Artificial Sequence: Synthetic oligonucleotide
gccccuucagacagcccag

SEQ ID NO: 1868432 - RNA, 19 nt, Artificial Sequence
  Description of Artificial Sequence: Synthetic oligonucleotide
ccucacggucauguccgcg

SEQ ID NO: 1868433 - RNA, 19 nt, Artificial Sequence
  Description of Artificial Sequence: Synthetic oligonucleotide
acaccccaggacccaccuu

SEQ ID NO: 1868434 - RNA, 19 nt, Artificial Sequence
  Description of Artificial Sequence: Synthetic oligonucleotide
acccguagauccagccaau

SEQ ID NO: 1868435 - RNA, 19 nt, Artificial Sequence
  Description of Artificial Sequence: Synthetic oligonucleotide
uacccuccucgguguuaaa

SEQ ID NO: 1868436 - RNA, 19 nt, Artificial Sequence
  Description of Artificial Sequence: Synthetic oligonucleotide
ggacccaccuucaguucca

SEQ ID NO: 1868437 - RNA, 19 nt, Artificial Sequence
  Description of Artificial Sequence: Synthetic oligonucleotide
gcgagaccucggaacgugc

SEQ ID NO: 1868438 - RNA, 19 nt, Artificial Sequence
  Description of Artificial Sequence: Synthetic oligonucleotide
ccaagccacaagaggcuaa

SEQ ID NO: 1868439 - RNA, 19 nt, Artificial Sequence
  Description of Artificial Sequence: Synthetic oligonucleotide
cgguguuaaagugccucac

SEQ ID NO: 1868440 - RNA, 19 nt, Artificial Sequence
  Description of Artificial Sequence: Synthetic oligonucleotide
gacccaccuucaguuccaa

SEQ ID NO: 1868441 - RNA, 19 nt, Artificial Sequence
  Description of Artificial Sequence: Synthetic oligonucleotide
ccaucggccugggcgagac

SEQ ID NO: 1868442 - RNA, 19 nt, Artificial Sequence
  Description of Artificial Sequence: Synthetic oligonucleotide
cgcgcgccagcacagagca

SEQ ID NO: 1868443 - RNA, 19 nt, Artificial Sequence
  Description of Artificial Sequence: Synthetic oligonucleotide
gcucuagcccacguggacu

SEQ ID NO: 1868444 - RNA, 19 nt, Artificial Sequence
  Description of Artificial Sequence: Synthetic oligonucleotide
aggauccaggccgcuucuu

SEQ ID NO: 1868445 - RNA, 19 nt, Artificial Sequence
  Description of Artificial Sequence: Synthetic oligonucleotide
gcccacguggacuucggau

SEQ ID NO: 1868446 - RNA, 19 nt, Artificial Sequence
  Description of Artificial Sequence: Synthetic oligonucleotide
cguccuugccgaaaaucaa

SEQ ID NO: 1868447 - RNA, 19 nt, Artificial Sequence
  Description of Artificial Sequence: Synthetic oligonucleotide
ggauccaggccgcuucuuu

SEQ ID NO: 1868448 - RNA, 19 nt, Artificial Sequence
  Description of Artificial Sequence: Synthetic oligonucleotide
gccugggcgagaccucgga

SEQ ID NO: 1868449 - RNA, 19 nt, Artificial Sequence
  Description of Artificial Sequence: Synthetic oligonucleotide
ggcgugaaguuuguugcau

SEQ ID NO: 1868450 - RNA, 19 nt, Artificial Sequence
  Description of Artificial Sequence: Synthetic oligonucleotide
gccucacggucauguccgc

SEQ ID NO: 1868451 - RNA, 19 nt, Artificial Sequence
  Description of Artificial Sequence: Synthetic oligonucleotide
cccguagauccagccaauc

SEQ ID NO: 1868452 - RNA, 19 nt, Artificial Sequence
  Description of Artificial Sequence: Synthetic oligonucleotide
ggcuuggaaggguggcacu

SEQ ID NO: 1868453 - RNA, 19 nt, Artificial Sequence
  Description of Artificial Sequence: Synthetic oligonucleotide
ggccugggcgagaccucgg

SEQ ID NO: 1868454 - RNA, 19 nt, Artificial Sequence
  Description of Artificial Sequence: Synthetic oligonucleotide
uucgcacguugggcuguuu

SEQ ID NO: 1868455 - RNA, 19 nt, Artificial Sequence
  Description of Artificial Sequence: Synthetic oligonucleotide
ccuugccgaaaaucaauuu

SEQ ID NO: 1868456 - RNA, 19 nt, Artificial Sequence
  Description of Artificial Sequence: Synthetic oligonucleotide
gugccgacccacacauggu

SEQ ID NO: 1868457 - RNA, 19 nt, Artificial Sequence
  Description of Artificial Sequence: Synthetic oligonucleotide
cggcuguccggauggcgug

SEQ ID NO: 1868458 - RNA, 19 nt, Artificial Sequence
  Description of Artificial Sequence: Synthetic oligonucleotide
cggccugggcgagaccucg

SEQ ID NO: 1868459 - RNA, 19 nt, Artificial Sequence
  Description of Artificial Sequence: Synthetic oligonucleotide
ggaccuggugguacccugu

SEQ ID NO: 1868460 - RNA, 19 nt, Artificial Sequence
  Description of Artificial Sequence: Synthetic oligonucleotide
acccgcgcgccagcacaga

SEQ ID NO: 1868461 - RNA, 19 nt, Artificial Sequence
  Description of Artificial Sequence: Synthetic oligonucleotide
ccugggcgagaccucggaa

SEQ ID NO: 1868462 - RNA, 19 nt, Artificial Sequence
  Description of Artificial Sequence: Synthetic oligonucleotide
gccaaucauuccucacauu

SEQ ID NO: 1868463 - RNA, 19 nt, Artificial Sequence
  Description of Artificial Sequence: Synthetic oligonucleotide
gcacguugggcuguuuauu

SEQ ID NO: 1868464 - RNA, 19 nt, Artificial Sequence
  Description of Artificial Sequence: Synthetic oligonucleotide
guucgcacguugggcuguu

SEQ ID NO: 1868465 - RNA, 19 nt, Artificial Sequence
  Description of Artificial Sequence: Synthetic oligonucleotide
ccucgguguuaaagugccu

SEQ ID NO: 1868466 - RNA, 19 nt, Artificial Sequence
  Description of Artificial Sequence: Synthetic oligonucleotide
ggauggcgugaaguuuguu

SEQ ID NO: 1868467 - RNA, 19 nt, Artificial Sequence
  Description of Artificial Sequence: Synthetic oligonucleotide
cggugccgacccacacaug

SEQ ID NO: 1868468 - RNA, 19 nt, Artificial Sequence
  Description of Artificial Sequence: Synthetic oligonucleotide
ccgcggcuguccggauggc

SEQ ID NO: 1868469 - RNA, 19 nt, Artificial Sequence
  Description of Artificial Sequence: Synthetic oligonucleotide
ccgcgcagcccaccaagau

SEQ ID NO: 1868470 - RNA, 19 nt, Artificial Sequence
  Description of Artificial Sequence: Synthetic oligonucleotide
ccgucgcuggggagagacu

SEQ ID NO: 1868471 - RNA, 19 nt, Artificial Sequence
  Description of Artificial Sequence: Synthetic oligonucleotide
cgucacccgcgcgccagca

SEQ ID NO: 1868472 - RNA, 19 nt, Artificial Sequence
  Description of Artificial Sequence: Synthetic oligonucleotide
ccucaggaguaagggucau

SEQ ID NO: 1868473 - RNA, 19 nt, Artificial Sequence
  Description of Artificial Sequence: Synthetic oligonucleotide
ggccgucgcuggggagaga

SEQ ID NO: 1868474 - RNA, 19 nt, Artificial Sequence
  Description of Artificial Sequence: Synthetic oligonucleotide
aaugaguuuaacuuuauac

SEQ ID NO: 1868475 - RNA, 19 nt, Artificial Sequence
  Description of Artificial Sequence: Synthetic oligonucleotide
aagaauaugugacagccac

SEQ ID NO: 1868476 - RNA, 19 nt, Artificial Sequence
  Description of Artificial Sequence: Synthetic oligonucleotide
aauguuuucaggaacuagc

SEQ ID NO: 1868477 - RNA, 19 nt, Artificial Sequence
  Description of Artificial Sequence: Synthetic oligonucleotide
gaugacuuccaacagaggg

SEQ ID NO: 1868478 - RNA, 19 nt, Artificial Sequence
  Description of Artificial Sequence: Synthetic oligonucleotide
auaugugacagccacagac

SEQ ID NO: 1868479 - RNA, 19 nt, Artificial Sequence
  Description of Artificial Sequence: Synthetic oligonucleotide
aaaaguuaaucguagggca

SEQ ID NO: 1868480 - RNA, 19 nt, Artificial Sequence
  Description of Artificial Sequence: Synthetic oligonucleotide
uuuguugcuagaauagccg

SEQ ID NO: 1868481 - RNA, 19 nt, Artificial Sequence
  Description of Artificial Sequence: Synthetic oligonucleotide
uaaagaauaugugacagcc

SEQ ID NO: 1868482 - RNA, 19 nt, Artificial Sequence
  Description of Artificial Sequence: Synthetic oligonucleotide
uuuuguacucgaaaagagg

SEQ ID NO: 1868483 - RNA, 19 nt, Artificial Sequence
  Description of Artificial Sequence: Synthetic oligonucleotide
uuuguacucgaaaagaggu

SEQ ID NO: 1868484 - RNA, 19 nt, Artificial Sequence
  Description of Artificial Sequence: Synthetic oligonucleotide
uuaacuuuauacauaucug

SEQ ID NO: 1868485 - RNA, 19 nt, Artificial Sequence
  Description of Artificial Sequence: Synthetic oligonucleotide
aaagaggucugucugaaca

SEQ ID NO: 1868486 - RNA, 19 nt, Artificial Sequence
  Description of Artificial Sequence: Synthetic oligonucleotide
gacacuuuuguuaagaaug

SEQ ID NO: 1868487 - RNA, 19 nt, Artificial Sequence
  Description of Artificial Sequence: Synthetic oligonucleotide
uuaaagcucacacagcucu

SEQ ID NO: 1868488 - RNA, 19 nt, Artificial Sequence
  Description of Artificial Sequence: Synthetic oligonucleotide
aauuucugaagauccgggg

SEQ ID NO: 1868489 - RNA, 19 nt, Artificial Sequence
  Description of Artificial Sequence: Synthetic oligonucleotide
ucaauuaccauguggauaa

SEQ ID NO: 1868490 - RNA, 19 nt, Artificial Sequence
  Description of Artificial Sequence: Synthetic oligonucleotide
uuaagaauguuacucccag

SEQ ID NO: 1868491 - RNA, 19 nt, Artificial Sequence
  Description of Artificial Sequence: Synthetic oligonucleotide
uugaugacuuccaacagag

SEQ ID NO: 1868492 - RNA, 19 nt, Artificial Sequence
  Description of Artificial Sequence: Synthetic oligonucleotide
ucuuaaagcucacacagcu

SEQ ID NO: 1868493 - RNA, 19 nt, Artificial Sequence
  Description of Artificial Sequence: Synthetic oligonucleotide
aaucguagggcacacaagu

SEQ ID NO: 1868494 - RNA, 19 nt, Artificial Sequence
  Description of Artificial Sequence: Synthetic oligonucleotide
uuuguuaagaauguuacuc

SEQ ID NO: 1868495 - RNA, 19 nt, Artificial Sequence
  Description of Artificial Sequence: Synthetic oligonucleotide
ucaguaguuaauccaauug

SEQ ID NO: 1868496 - RNA, 19 nt, Artificial Sequence
  Description of Artificial Sequence: Synthetic oligonucleotide
uccaauuggcuuuugauca

SEQ ID NO: 1868497 - RNA, 19 nt, Artificial Sequence
  Description of Artificial Sequence: Synthetic oligonucleotide
ucagguaauuuucucuucg

SEQ ID NO: 1868498 - RNA, 19 nt, Artificial Sequence
  Description of Artificial Sequence: Synthetic oligonucleotide
aauagccggaggcacauuc

SEQ ID NO: 1868499 - RNA, 19 nt, Artificial Sequence
  Description of Artificial Sequence: Synthetic oligonucleotide
uuugaucagaagaauguug

SEQ ID NO: 1868500 - RNA, 19 nt, Artificial Sequence
  Description of Artificial Sequence: Synthetic oligonucleotide
uaacuuuauacauaucuga

SEQ ID NO: 1868501 - RNA, 19 nt, Artificial Sequence
  Description of Artificial Sequence: Synthetic oligonucleotide
accaacuuggcauauaaug

SEQ ID NO: 1868502 - RNA, 19 nt, Artificial Sequence
  Description of Artificial Sequence: Synthetic oligonucleotide
aguaguaucuuguuuguug

SEQ ID NO: 1868503 - RNA, 19 nt, Artificial Sequence
  Description of Artificial Sequence: Synthetic oligonucleotide
ugugucaauguuuucagga

SEQ ID NO: 1868504 - RNA, 19 nt, Artificial Sequence
  Description of Artificial Sequence: Synthetic oligonucleotide
acuguucaguaguuaaucc

SEQ ID NO: 1868505 - RNA, 19 nt, Artificial Sequence
  Description of Artificial Sequence: Synthetic oligonucleotide
gaauguuacucccagaaga

SEQ ID NO: 1868506 - RNA, 19 nt, Artificial Sequence
  Description of Artificial Sequence: Synthetic oligonucleotide
aguaguuaauccaauuggc

SEQ ID NO: 1868507 - RNA, 19 nt, Artificial Sequence
  Description of Artificial Sequence: Synthetic oligonucleotide
uugaucagaagaauguugu

SEQ ID NO: 1868508 - RNA, 19 nt, Artificial Sequence
  Description of Artificial Sequence: Synthetic oligonucleotide
uucagagacaccaucaauc

SEQ ID NO: 1868509 - RNA, 19 nt, Artificial Sequence
  Description of Artificial Sequence: Synthetic oligonucleotide
gaucucaauuaccaugugg

SEQ ID NO: 1868510 - RNA, 19 nt, Artificial Sequence
  Description of Artificial Sequence: Synthetic oligonucleotide
aggugcuuuguacaaauac

SEQ ID NO: 1868511 - RNA, 19 nt, Artificial Sequence
  Description of Artificial Sequence: Synthetic oligonucleotide
caguaguuaauccaauugg

SEQ ID NO: 1868512 - RNA, 19 nt, Artificial Sequence
  Description of Artificial Sequence: Synthetic oligonucleotide
ugaguuuaacuuuauacau

SEQ ID NO: 1868513 - RNA, 19 nt, Artificial Sequence
  Description of Artificial Sequence: Synthetic oligonucleotide
ucagcuauguugugcaagg

SEQ ID NO: 1868514 - RNA, 19 nt, Artificial Sequence
  Description of Artificial Sequence: Synthetic oligonucleotide
cagaagauuucucaggugc

SEQ ID NO: 1868515 - RNA, 19 nt, Artificial Sequence
  Description of Artificial Sequence: Synthetic oligonucleotide
uacauucucuccaaauuag

SEQ ID NO: 1868516 - RNA, 19 nt, Artificial Sequence
  Description of Artificial Sequence: Synthetic oligonucleotide
uguccuggaauaaagaaua

SEQ ID NO: 1868517 - RNA, 19 nt, Artificial Sequence
  Description of Artificial Sequence: Synthetic oligonucleotide
aacuuuauacauaucugag

SEQ ID NO: 1868518 - RNA, 19 nt, Artificial Sequence
  Description of Artificial Sequence: Synthetic oligonucleotide
aucaguaauaaucuucuga

SEQ ID NO: 1868519 - RNA, 19 nt, Artificial Sequence
  Description of Artificial Sequence: Synthetic oligonucleotide
gaauaugugacagccacag

SEQ ID NO: 1868520 - RNA, 19 nt, Artificial Sequence
  Description of Artificial Sequence: Synthetic oligonucleotide
uggcauauaaugcaguccu

SEQ ID NO: 1868521 - RNA, 19 nt, Artificial Sequence
  Description of Artificial Sequence: Synthetic oligonucleotide
uaugugucaauguuuucag

SEQ ID NO: 1868522 - RNA, 19 nt, Artificial Sequence
  Description of Artificial Sequence: Synthetic oligonucleotide
auccaauuggcuuuugauc

SEQ ID NO: 1868523 - RNA, 19 nt, Artificial Sequence
  Description of Artificial Sequence: Synthetic oligonucleotide
uucuguugggaucacagga

SEQ ID NO: 1868524 - RNA, 19 nt, Artificial Sequence
  Description of Artificial Sequence: Synthetic oligonucleotide
uuaaucguagggcacacaa

SEQ ID NO: 1868525 - RNA, 19 nt, Artificial Sequence
  Description of Artificial Sequence: Synthetic oligonucleotide
uuuucaggaacuagcauuc

SEQ ID NO: 1868526 - RNA, 19 nt, Artificial Sequence
  Description of Artificial Sequence: Synthetic oligonucleotide
aacagaggguccaagagag

SEQ ID NO: 1868527 - RNA, 19 nt, Artificial Sequence
  Description of Artificial Sequence: Synthetic oligonucleotide
ucgaaaagaggucugucug

SEQ ID NO: 1868528 - RNA, 19 nt, Artificial Sequence
  Description of Artificial Sequence: Synthetic oligonucleotide
aguuggucucauuuuggcc

SEQ ID NO: 1868529 - RNA, 19 nt, Artificial Sequence
  Description of Artificial Sequence: Synthetic oligonucleotide
aaaguuaaucguagggcac

SEQ ID NO: 1868530 - RNA, 19 nt, Artificial Sequence
  Description of Artificial Sequence: Synthetic oligonucleotide
ucgacauuucagaugaugu

SEQ ID NO: 1868531 - RNA, 19 nt, Artificial Sequence
  Description of Artificial Sequence: Synthetic oligonucleotide
uguucaguaguuaauccaa

SEQ ID NO: 1868532 - RNA, 19 nt, Artificial Sequence
  Description of Artificial Sequence: Synthetic oligonucleotide
ggaacuagcauucuaauga

SEQ ID NO: 1868533 - RNA, 19 nt, Artificial Sequence
  Description of Artificial Sequence: Synthetic oligonucleotide
uguuaugcaguugucaucu

SEQ ID NO: 1868534 - RNA, 19 nt, Artificial Sequence
  Description of Artificial Sequence: Synthetic oligonucleotide
uucucuucgacauuucaga

SEQ ID NO: 1868535 - RNA, 19 nt, Artificial Sequence
  Description of Artificial Sequence: Synthetic oligonucleotide
ugcuagaauagccggaggc

SEQ ID NO: 1868536 - RNA, 19 nt, Artificial Sequence
  Description of Artificial Sequence: Synthetic oligonucleotide
gaauaaagaauaugugaca

SEQ ID NO: 1868537 - RNA, 19 nt, Artificial Sequence
  Description of Artificial Sequence: Synthetic oligonucleotide
aagagaguagcuuugccuu

SEQ ID NO: 1868538 - RNA, 19 nt, Artificial Sequence
  Description of Artificial Sequence: Synthetic oligonucleotide
uuguugcuagaauagccgg

SEQ ID NO: 1868539 - RNA, 19 nt, Artificial Sequence
  Description of Artificial Sequence: Synthetic oligonucleotide
uucuuguccuggaauaaag

SEQ ID NO: 1868540 - RNA, 19 nt, Artificial Sequence
  Description of Artificial Sequence: Synthetic oligonucleotide
agcuauguugugcaaggac

SEQ ID NO: 1868541 - RNA, 19 nt, Artificial Sequence
  Description of Artificial Sequence: Synthetic oligonucleotide
cuugguaucagugacuaug

SEQ ID NO: 1868542 - RNA, 19 nt, Artificial Sequence
  Description of Artificial Sequence: Synthetic oligonucleotide
agguaauuuucucuucgac

SEQ ID NO: 1868543 - RNA, 19 nt, Artificial Sequence
  Description of Artificial Sequence: Synthetic oligonucleotide
ugcaaggacauuuucuugu

SEQ ID NO: 1868544 - RNA, 19 nt, Artificial Sequence
  Description of Artificial Sequence: Synthetic oligonucleotide
uguggauaagguauguguc

SEQ ID NO: 1868545 - RNA, 19 nt, Artificial Sequence
  Description of Artificial Sequence: Synthetic oligonucleotide
uguuacucccagaagauuu

SEQ ID NO: 1868546 - RNA, 19 nt, Artificial Sequence
  Description of Artificial Sequence: Synthetic oligonucleotide
ucaggaacuagcauucuaa

SEQ ID NO: 1868547 - RNA, 19 nt, Artificial Sequence
  Description of Artificial Sequence: Synthetic oligonucleotide
gaacuagcauucuaaugag

SEQ ID NO: 1868548 - RNA, 19 nt, Artificial Sequence
  Description of Artificial Sequence: Synthetic oligonucleotide
agcucuugggcugaaaugg

SEQ ID NO: 1868549 - RNA, 19 nt, Artificial Sequence
  Description of Artificial Sequence: Synthetic oligonucleotide
acauaucugaguugauggg

SEQ ID NO: 1868550 - RNA, 19 nt, Artificial Sequence
  Description of Artificial Sequence: Synthetic oligonucleotide
uuucggauaacaucaguaa

SEQ ID NO: 1868551 - RNA, 19 nt, Artificial Sequence
  Description of Artificial Sequence: Synthetic oligonucleotide
uguacucgaaaagaggucu

SEQ ID NO: 1868552 - RNA, 19 nt, Artificial Sequence
  Description of Artificial Sequence: Synthetic oligonucleotide
ugggaucacaggaagguug

SEQ ID NO: 1868553 - RNA, 19 nt, Artificial Sequence
  Description of Artificial Sequence: Synthetic oligonucleotide
ucagagacaccaucaaucu

SEQ ID NO: 1868554 - RNA, 19 nt, Artificial Sequence
  Description of Artificial Sequence: Synthetic oligonucleotide
ucggauaacaucaguaaua

SEQ ID NO: 1868555 - RNA, 19 nt, Artificial Sequence
  Description of Artificial Sequence: Synthetic oligonucleotide
agaagaauguuguucaauu

SEQ ID NO: 1868556 - RNA, 19 nt, Artificial Sequence
  Description of Artificial Sequence: Synthetic oligonucleotide
gguaucagugacuaugucc

SEQ ID NO: 1868557 - RNA, 19 nt, Artificial Sequence
  Description of Artificial Sequence: Synthetic oligonucleotide
uguugggaucacaggaagg

SEQ ID NO: 1868558 - RNA, 19 nt, Artificial Sequence
  Description of Artificial Sequence: Synthetic oligonucleotide
aacaucucuuucuguuggg

SEQ ID NO: 1868559 - RNA, 19 nt, Artificial Sequence
  Description of Artificial Sequence: Synthetic oligonucleotide
ucguagggcacacaaguug

SEQ ID NO: 1868560 - RNA, 19 nt, Artificial Sequence
  Description of Artificial Sequence: Synthetic oligonucleotide
guuggucucauuuuggcca

SEQ ID NO: 1868561 - RNA, 19 nt, Artificial Sequence
  Description of Artificial Sequence: Synthetic oligonucleotide
agguuuuguacucgaaaag

SEQ ID NO: 1868562 - RNA, 19 nt, Artificial Sequence
  Description of Artificial Sequence: Synthetic oligonucleotide
auucucagcuauguugugc

SEQ ID NO: 1868563 - RNA, 19 nt, Artificial Sequence
  Description of Artificial Sequence: Synthetic oligonucleotide
gcuuuguacaaauacauuc

SEQ ID NO: 1868564 - RNA, 19 nt, Artificial Sequence
  Description of Artificial Sequence: Synthetic oligonucleotide
guuuuguacucgaaaagag

SEQ ID NO: 1868565 - RNA, 19 nt, Artificial Sequence
  Description of Artificial Sequence: Synthetic oligonucleotide
aguccuaguguccagcucu

SEQ ID NO: 1868566 - RNA, 19 nt, Artificial Sequence
  Description of Artificial Sequence: Synthetic oligonucleotide
ugagguuuuguacucgaaa

SEQ ID NO: 1868567 - RNA, 19 nt, Artificial Sequence
  Description of Artificial Sequence: Synthetic oligonucleotide
aucucaauuaccaugugga

SEQ ID NO: 1868568 - RNA, 19 nt, Artificial Sequence
  Description of Artificial Sequence: Synthetic oligonucleotide
cuaguguccagcucuuggg

SEQ ID NO: 1868569 - RNA, 19 nt, Artificial Sequence
  Description of Artificial Sequence: Synthetic oligonucleotide
aaccacucagguaauuuuc

SEQ ID NO: 1868570 - RNA, 19 nt, Artificial Sequence
  Description of Artificial Sequence: Synthetic oligonucleotide
uguucaauuucugaagauc

SEQ ID NO: 1868571 - RNA, 19 nt, Artificial Sequence
  Description of Artificial Sequence: Synthetic oligonucleotide
ugccaguaucagcugaggg

SEQ ID NO: 1868572 - RNA, 19 nt, Artificial Sequence
  Description of Artificial Sequence: Synthetic oligonucleotide
caggaucucaauuaccaug

SEQ ID NO: 1868573 - RNA, 19 nt, Artificial Sequence
  Description of Artificial Sequence: Synthetic oligonucleotide
auuagcauguuucugccuu

SEQ ID NO: 1868574 - RNA, 19 nt, Artificial Sequence
  Description of Artificial Sequence: Synthetic oligonucleotide
aaugcaguccuagugucca

SEQ ID NO: 1868575 - RNA, 19 nt, Artificial Sequence
  Description of Artificial Sequence: Synthetic oligonucleotide
guuuguugcuagaauagcc

SEQ ID NO: 1868576 - RNA, 19 nt, Artificial Sequence
  Description of Artificial Sequence: Synthetic oligonucleotide
uucuaaugaguuuaacuuu

SEQ ID NO: 1868577 - RNA, 19 nt, Artificial Sequence
  Description of Artificial Sequence: Synthetic oligonucleotide
ucuuguccuggaauaaaga

SEQ ID NO: 1868578 - RNA, 19 nt, Artificial Sequence
  Description of Artificial Sequence: Synthetic oligonucleotide
aauaaucuucugaaccucu

SEQ ID NO: 1868579 - RNA, 19 nt, Artificial Sequence
  Description of Artificial Sequence: Synthetic oligonucleotide
augagcugccaguaucagc

SEQ ID NO: 1868580 - RNA, 19 nt, Artificial Sequence
  Description of Artificial Sequence: Synthetic oligonucleotide
gaugucuugguaucaguga

SEQ ID NO: 1868581 - RNA, 19 nt, Artificial Sequence
  Description of Artificial Sequence: Synthetic oligonucleotide
uucuuaaagcucacacagc

SEQ ID NO: 1868582 - RNA, 19 nt, Artificial Sequence
  Description of Artificial Sequence: Synthetic oligonucleotide
aaaccacucagguaauuuu

SEQ ID NO: 1868583 - RNA, 19 nt, Artificial Sequence
  Description of Artificial Sequence: Synthetic oligonucleotide
uaaucguagggcacacaag

SEQ ID NO: 1868584 - RNA, 19 nt, Artificial Sequence
  Description of Artificial Sequence: Synthetic oligonucleotide
acaaaaguguuugaugacu

SEQ ID NO: 1868585 - RNA, 19 nt, Artificial Sequence
  Description of Artificial Sequence: Synthetic oligonucleotide
ugugugugugugcuagucc

SEQ ID NO: 1868586 - RNA, 19 nt, Artificial Sequence
  Description of Artificial Sequence: Synthetic oligonucleotide
uucggauaacaucaguaau

SEQ ID NO: 1868587 - RNA, 19 nt, Artificial Sequence
  Description of Artificial Sequence: Synthetic oligonucleotide
gagguuuuguacucgaaaa

SEQ ID NO: 1868588 - RNA, 19 nt, Artificial Sequence
  Description of Artificial Sequence: Synthetic oligonucleotide
aacuuggcauauaaugcag

SEQ ID NO: 1868589 - RNA, 19 nt, Artificial Sequence
  Description of Artificial Sequence: Synthetic oligonucleotide
gaggguuucggauaacauc

SEQ ID NO: 1868590 - RNA, 19 nt, Artificial Sequence
  Description of Artificial Sequence: Synthetic oligonucleotide
aaccucuggggucaggcca

SEQ ID NO: 1868591 - RNA, 19 nt, Artificial Sequence
  Description of Artificial Sequence: Synthetic oligonucleotide
uaguuggucucauuuuggc

SEQ ID NO: 1868592 - RNA, 19 nt, Artificial Sequence
  Description of Artificial Sequence: Synthetic oligonucleotide
acuaccugacuuuucuucu

SEQ ID NO: 1868593 - RNA, 19 nt, Artificial Sequence
  Description of Artificial Sequence: Synthetic oligonucleotide
ugcuaguccauuucuauuu

SEQ ID NO: 1868594 - RNA, 19 nt, Artificial Sequence
  Description of Artificial Sequence: Synthetic oligonucleotide
uaauccaauuggcuuuuga

SEQ ID NO: 1868595 - RNA, 19 nt, Artificial Sequence
  Description of Artificial Sequence: Synthetic oligonucleotide
uaucugaguugaugggagg

SEQ ID NO: 1868596 - RNA, 19 nt, Artificial Sequence
  Description of Artificial Sequence: Synthetic oligonucleotide
uguugcuagaauagccgga

SEQ ID NO: 1868597 - RNA, 19 nt, Artificial Sequence
  Description of Artificial Sequence: Synthetic oligonucleotide
auacauaucugaguugaug

SEQ ID NO: 1868598 - RNA, 19 nt, Artificial Sequence
  Description of Artificial Sequence: Synthetic oligonucleotide
guaauaaucuucugaaccu

SEQ ID NO: 1868599 - RNA, 19 nt, Artificial Sequence
  Description of Artificial Sequence: Synthetic oligonucleotide
uucgacauuucagaugaug

SEQ ID NO: 1868600 - RNA, 19 nt, Artificial Sequence
  Description of Artificial Sequence: Synthetic oligonucleotide
cuuggcauauaaugcaguc

SEQ ID NO: 1868601 - RNA, 19 nt, Artificial Sequence
  Description of Artificial Sequence: Synthetic oligonucleotide
ggugauugcaucccgacac

SEQ ID NO: 1868602 - RNA, 19 nt, Artificial Sequence
  Description of Artificial Sequence: Synthetic oligonucleotide
uguuuguugcuagaauagc

SEQ ID NO: 1868603 - RNA, 19 nt, Artificial Sequence
  Description of Artificial Sequence: Synthetic oligonucleotide
ucuguugggaucacaggaa

SEQ ID NO: 1868604 - RNA, 19 nt, Artificial Sequence
  Description of Artificial Sequence: Synthetic oligonucleotide
ccuauucucagcuauguug

SEQ ID NO: 1868605 - RNA, 19 nt, Artificial Sequence
  Description of Artificial Sequence: Synthetic oligonucleotide
ugucugaacacuguucacu

SEQ ID NO: 1868606 - RNA, 19 nt, Artificial Sequence
  Description of Artificial Sequence: Synthetic oligonucleotide
aaguuaaucguagggcaca

SEQ ID NO: 1868607 - RNA, 19 nt, Artificial Sequence
  Description of Artificial Sequence: Synthetic oligonucleotide
ucucuuucuguugggauca

SEQ ID NO: 1868608 - RNA, 19 nt, Artificial Sequence
  Description of Artificial Sequence: Synthetic oligonucleotide
ugugcuaguccauuucuau

SEQ ID NO: 1868609 - RNA, 19 nt, Artificial Sequence
  Description of Artificial Sequence: Synthetic oligonucleotide
gguaauuuucucuucgaca

SEQ ID NO: 1868610 - RNA, 19 nt, Artificial Sequence
  Description of Artificial Sequence: Synthetic oligonucleotide
uuggcauauaaugcagucc

SEQ ID NO: 1868611 - RNA, 19 nt, Artificial Sequence
  Description of Artificial Sequence: Synthetic oligonucleotide
cuuuugaucagaagaaugu

SEQ ID NO: 1868612 - RNA, 19 nt, Artificial Sequence
  Description of Artificial Sequence: Synthetic oligonucleotide
cacuugacaaaaguguuug

SEQ ID NO: 1868613 - RNA, 19 nt, Artificial Sequence
  Description of Artificial Sequence: Synthetic oligonucleotide
guugcuagaauagccggag

SEQ ID NO: 1868614 - RNA, 19 nt, Artificial Sequence
  Description of Artificial Sequence: Synthetic oligonucleotide
cagacugugagagugagca

SEQ ID NO: 1868615 - RNA, 19 nt, Artificial Sequence
  Description of Artificial Sequence: Synthetic oligonucleotide
agagaguagcuuugccuuc

SEQ ID NO: 1868616 - RNA, 19 nt, Artificial Sequence
  Description of Artificial Sequence: Synthetic oligonucleotide
ugggcuaagugcaugccaa

SEQ ID NO: 1868617 - RNA, 19 nt, Artificial Sequence
  Description of Artificial Sequence: Synthetic oligonucleotide
ucuugagguuuuguacucg

SEQ ID NO: 1868618 - RNA, 19 nt, Artificial Sequence
  Description of Artificial Sequence: Synthetic oligonucleotide
uaccugacuuuucuucugc

SEQ ID NO: 1868619 - RNA, 19 nt, Artificial Sequence
  Description of Artificial Sequence: Synthetic oligonucleotide
augugucaauguuuucagg

SEQ ID NO: 1868620 - RNA, 19 nt, Artificial Sequence
  Description of Artificial Sequence: Synthetic oligonucleotide
cauucuaaugaguuuaacu

SEQ ID NO: 1868621 - RNA, 19 nt, Artificial Sequence
  Description of Artificial Sequence: Synthetic oligonucleotide
ucagugacuauguccuugu

SEQ ID NO: 1868622 - RNA, 19 nt, Artificial Sequence
  Description of Artificial Sequence: Synthetic oligonucleotide
ugugagagugagcauucuc

SEQ ID NO: 1868623 - RNA, 19 nt, Artificial Sequence
  Description of Artificial Sequence: Synthetic oligonucleotide
uuaugcaguugucaucuua

SEQ ID NO: 1868624 - RNA, 19 nt, Artificial Sequence
  Description of Artificial Sequence: Synthetic oligonucleotide
acaccaucaaucuguuuca

SEQ ID NO: 1868625 - RNA, 19 nt, Artificial Sequence
  Description of Artificial Sequence: Synthetic oligonucleotide
aguuguuaugcaguuguca

SEQ ID NO: 1868626 - RNA, 19 nt, Artificial Sequence
  Description of Artificial Sequence: Synthetic oligonucleotide
uaauaaucuucugaaccuc

SEQ ID NO: 1868627 - RNA, 19 nt, Artificial Sequence
  Description of Artificial Sequence: Synthetic oligonucleotide
aauaugugacagccacaga

SEQ ID NO: 1868628 - RNA, 19 nt, Artificial Sequence
  Description of Artificial Sequence: Synthetic oligonucleotide
uugcuagaauagccggagg

SEQ ID NO: 1868629 - RNA, 19 nt, Artificial Sequence
  Description of Artificial Sequence: Synthetic oligonucleotide
acucagguaauuuucucuu

SEQ ID NO: 1868630 - RNA, 19 nt, Artificial Sequence
  Description of Artificial Sequence: Synthetic oligonucleotide
uuguacucgaaaagagguc

SEQ ID NO: 1868631 - RNA, 19 nt, Artificial Sequence
  Description of Artificial Sequence: Synthetic oligonucleotide
auauccaguaguaucuugu

SEQ ID NO: 1868632 - RNA, 19 nt, Artificial Sequence
  Description of Artificial Sequence: Synthetic oligonucleotide
guaguuggucucauuuugg

SEQ ID NO: 1868633 - RNA, 19 nt, Artificial Sequence
  Description of Artificial Sequence: Synthetic oligonucleotide
ugaagauccgggguuagaa

SEQ ID NO: 1868634 - RNA, 19 nt, Artificial Sequence
  Description of Artificial Sequence: Synthetic oligonucleotide
acuagcauucuaaugaguu

SEQ ID NO: 1868635 - RNA, 19 nt, Artificial Sequence
  Description of Artificial Sequence: Synthetic oligonucleotide
gacuguucaguaguuaauc

SEQ ID NO: 1868636 - RNA, 19 nt, Artificial Sequence
  Description of Artificial Sequence: Synthetic oligonucleotide
aggaucucaauuaccaugu

SEQ ID NO: 1868637 - RNA, 19 nt, Artificial Sequence
  Description of Artificial Sequence: Synthetic oligonucleotide
gaagauccgggguuagaac

SEQ ID NO: 1868638 - RNA, 19 nt, Artificial Sequence
  Description of Artificial Sequence: Synthetic oligonucleotide
uuaccauguggauaaggua

SEQ ID NO: 1868639 - RNA, 19 nt, Artificial Sequence
  Description of Artificial Sequence: Synthetic oligonucleotide
ugugagaggcagaagccua

SEQ ID NO: 1868640 - RNA, 19 nt, Artificial Sequence
  Description of Artificial Sequence: Synthetic oligonucleotide
aguuaaucguagggcacac

SEQ ID NO: 1868641 - RNA, 19 nt, Artificial Sequence
  Description of Artificial Sequence: Synthetic oligonucleotide
agugacuauguccuuguuu

SEQ ID NO: 1868642 - RNA, 19 nt, Artificial Sequence
  Description of Artificial Sequence: Synthetic oligonucleotide
gacauuucagaugaugucu

SEQ ID NO: 1868643 - RNA, 19 nt, Artificial Sequence
  Description of Artificial Sequence: Synthetic oligonucleotide
uucagugcuagggaaacau

SEQ ID NO: 1868644 - RNA, 19 nt, Artificial Sequence
  Description of Artificial Sequence: Synthetic oligonucleotide
uuagcauguuucugccuug

SEQ ID NO: 1868645 - RNA, 19 nt, Artificial Sequence
  Description of Artificial Sequence: Synthetic oligonucleotide
aggaagguuggcuucugcu

SEQ ID NO: 1868646 - RNA, 19 nt, Artificial Sequence
  Description of Artificial Sequence: Synthetic oligonucleotide
guggauaagguauguguca

SEQ ID NO: 1868647 - RNA, 19 nt, Artificial Sequence
  Description of Artificial Sequence: Synthetic oligonucleotide
cuagaauagccggaggcac

SEQ ID NO: 1868648 - RNA, 19 nt, Artificial Sequence
  Description of Artificial Sequence: Synthetic oligonucleotide
uucagcaguaguuggucuc

SEQ ID NO: 1868649 - RNA, 19 nt, Artificial Sequence
  Description of Artificial Sequence: Synthetic oligonucleotide
guagcuuugccuucagaga

SEQ ID NO: 1868650 - RNA, 19 nt, Artificial Sequence
  Description of Artificial Sequence: Synthetic oligonucleotide
uuuugaucagaagaauguu

SEQ ID NO: 1868651 - RNA, 19 nt, Artificial Sequence
  Description of Artificial Sequence: Synthetic oligonucleotide
cuguucaguaguuaaucca

SEQ ID NO: 1868652 - RNA, 19 nt, Artificial Sequence
  Description of Artificial Sequence: Synthetic oligonucleotide
uuucagcaguaguuggucu

SEQ ID NO: 1868653 - RNA, 19 nt, Artificial Sequence
  Description of Artificial Sequence: Synthetic oligonucleotide
cugaacacuguucacuuga

SEQ ID NO: 1868654 - RNA, 19 nt, Artificial Sequence
  Description of Artificial Sequence: Synthetic oligonucleotide
gcaguugucaucuuaacua

SEQ ID NO: 1868655 - RNA, 19 nt, Artificial Sequence
  Description of Artificial Sequence: Synthetic oligonucleotide
guaucagugacuauguccu

SEQ ID NO: 1868656 - RNA, 19 nt, Artificial Sequence
  Description of Artificial Sequence: Synthetic oligonucleotide
gacauuuucuuguccugga

SEQ ID NO: 1868657 - RNA, 19 nt, Artificial Sequence
  Description of Artificial Sequence: Synthetic oligonucleotide
ugacuuccaacagaggguc

SEQ ID NO: 1868658 - RNA, 19 nt, Artificial Sequence
  Description of Artificial Sequence: Synthetic oligonucleotide
ucugaacacuguucacuug

SEQ ID NO: 1868659 - RNA, 19 nt, Artificial Sequence
  Description of Artificial Sequence: Synthetic oligonucleotide
uucaggaacuagcauucua

SEQ ID NO: 1868660 - RNA, 19 nt, Artificial Sequence
  Description of Artificial Sequence: Synthetic oligonucleotide
uuguuaugcaguugucauc

SEQ ID NO: 1868661 - RNA, 19 nt, Artificial Sequence
  Description of Artificial Sequence: Synthetic oligonucleotide
ugagggcacauuuccuuug

SEQ ID NO: 1868662 - RNA, 19 nt, Artificial Sequence
  Description of Artificial Sequence: Synthetic oligonucleotide
cuuaaagcucacacagcuc

SEQ ID NO: 1868663 - RNA, 19 nt, Artificial Sequence
  Description of Artificial Sequence: Synthetic oligonucleotide
caauguuuucaggaacuag

SEQ ID NO: 1868664 - RNA, 19 nt, Artificial Sequence
  Description of Artificial Sequence: Synthetic oligonucleotide
uaucuuguuuguugcuaga

SEQ ID NO: 1868665 - RNA, 19 nt, Artificial Sequence
  Description of Artificial Sequence: Synthetic oligonucleotide
gggguuagaacuuggcagc

SEQ ID NO: 1868666 - RNA, 19 nt, Artificial Sequence
  Description of Artificial Sequence: Synthetic oligonucleotide
cuaguccauuucuauuuac

SEQ ID NO: 1868667 - RNA, 19 nt, Artificial Sequence
  Description of Artificial Sequence: Synthetic oligonucleotide
ucucaauuaccauguggau

SEQ ID NO: 1868668 - RNA, 19 nt, Artificial Sequence
  Description of Artificial Sequence: Synthetic oligonucleotide
guucacuugacaaaagugu

SEQ ID NO: 1868669 - RNA, 19 nt, Artificial Sequence
  Description of Artificial Sequence: Synthetic oligonucleotide
aaguuguuaugcaguuguc

SEQ ID NO: 1868670 - RNA, 19 nt, Artificial Sequence
  Description of Artificial Sequence: Synthetic oligonucleotide
uuuucuuguccuggaauaa

SEQ ID NO: 1868671 - RNA, 19 nt, Artificial Sequence
  Description of Artificial Sequence: Synthetic oligonucleotide
gugagcauucuccauuuuc

SEQ ID NO: 1868672 - RNA, 19 nt, Artificial Sequence
  Description of Artificial Sequence: Synthetic oligonucleotide
uggugauugcaucccgaca

SEQ ID NO: 1868673 - RNA, 19 nt, Artificial Sequence
  Description of Artificial Sequence: Synthetic oligonucleotide
uggauaagguaugugucaa

SEQ ID NO: 1868674 - RNA, 19 nt, Artificial Sequence
  Description of Artificial Sequence: Synthetic oligonucleotide
acugugagagugagcauuc

SEQ ID NO: 1868675 - RNA, 19 nt, Artificial Sequence
  Description of Artificial Sequence: Synthetic oligonucleotide
ucucuucgacauuucagau

SEQ ID NO: 1868676 - RNA, 19 nt, Artificial Sequence
  Description of Artificial Sequence: Synthetic oligonucleotide
aagguaugugucaauguuu

SEQ ID NO: 1868677 - RNA, 19 nt, Artificial Sequence
  Description of Artificial Sequence: Synthetic oligonucleotide
aucccgacacuuuuguuaa

SEQ ID NO: 1868678 - RNA, 19 nt, Artificial Sequence
  Description of Artificial Sequence: Synthetic oligonucleotide
aguguuugaugacuuccaa

SEQ ID NO: 1868679 - RNA, 19 nt, Artificial Sequence
  Description of Artificial Sequence: Synthetic oligonucleotide
ugugugugugugugugugc

SEQ ID NO: 1868680 - RNA, 19 nt, Artificial Sequence
  Description of Artificial Sequence: Synthetic oligonucleotide
gaggguccaagagaguagc

SEQ ID NO: 1868681 - RNA, 19 nt, Artificial Sequence
  Description of Artificial Sequence: Synthetic oligonucleotide
gcauauaaugcaguccuag

SEQ ID NO: 1868682 - RNA, 19 nt, Artificial Sequence
  Description of Artificial Sequence: Synthetic oligonucleotide
gugacuauguccuuguuuu

SEQ ID NO: 1868683 - RNA, 19 nt, Artificial Sequence
  Description of Artificial Sequence: Synthetic oligonucleotide
ucuccaaauuagacuguuc

SEQ ID NO: 1868684 - RNA, 19 nt, Artificial Sequence
  Description of Artificial Sequence: Synthetic oligonucleotide
uauucucagcuauguugug

SEQ ID NO: 1868685 - RNA, 19 nt, Artificial Sequence
  Description of Artificial Sequence: Synthetic oligonucleotide
acucgaaaagaggucuguc

SEQ ID NO: 1868686 - RNA, 19 nt, Artificial Sequence
  Description of Artificial Sequence: Synthetic oligonucleotide
guuaagaauguuacuccca

SEQ ID NO: 1868687 - RNA, 19 nt, Artificial Sequence
  Description of Artificial Sequence: Synthetic oligonucleotide
ggaagguuggcuucugcug

SEQ ID NO: 1868688 - RNA, 19 nt, Artificial Sequence
  Description of Artificial Sequence: Synthetic oligonucleotide
acugccugggcuaagugca

SEQ ID NO: 1868689 - RNA, 19 nt, Artificial Sequence
  Description of Artificial Sequence: Synthetic oligonucleotide
uccaagagaguagcuuugc

SEQ ID NO: 1868690 - RNA, 19 nt, Artificial Sequence
  Description of Artificial Sequence: Synthetic oligonucleotide
cucagcuauguugugcaag

SEQ ID NO: 1868691 - RNA, 19 nt, Artificial Sequence
  Description of Artificial Sequence: Synthetic oligonucleotide
uccgggguuagaacuuggc

SEQ ID NO: 1868692 - RNA, 19 nt, Artificial Sequence
  Description of Artificial Sequence: Synthetic oligonucleotide
ccuggaauaaagaauaugu

SEQ ID NO: 1868693 - RNA, 19 nt, Artificial Sequence
  Description of Artificial Sequence: Synthetic oligonucleotide
gugugugugugugugcuag

SEQ ID NO: 1868694 - RNA, 19 nt, Artificial Sequence
  Description of Artificial Sequence: Synthetic oligonucleotide
ucagaagaauguuguucaa

SEQ ID NO: 1868695 - RNA, 19 nt, Artificial Sequence
  Description of Artificial Sequence: Synthetic oligonucleotide
gcuuuugaucagaagaaug

SEQ ID NO: 1868696 - RNA, 19 nt, Artificial Sequence
  Description of Artificial Sequence: Synthetic oligonucleotide
auuuucagcaguaguuggu

SEQ ID NO: 1868697 - RNA, 19 nt, Artificial Sequence
  Description of Artificial Sequence: Synthetic oligonucleotide
cauaucugaguugauggga

SEQ ID NO: 1868698 - RNA, 19 nt, Artificial Sequence
  Description of Artificial Sequence: Synthetic oligonucleotide
ugcuagggaaacaucucuu

SEQ ID NO: 1868699 - RNA, 19 nt, Artificial Sequence
  Description of Artificial Sequence: Synthetic oligonucleotide
gaugggaggguuucggaua

SEQ ID NO: 1868700 - RNA, 19 nt, Artificial Sequence
  Description of Artificial Sequence: Synthetic oligonucleotide
cuggugauugcaucccgac

SEQ ID NO: 1868701 - RNA, 19 nt, Artificial Sequence
  Description of Artificial Sequence: Synthetic oligonucleotide
guuucggauaacaucagua

SEQ ID NO: 1868702 - RNA, 19 nt, Artificial Sequence
  Description of Artificial Sequence: Synthetic oligonucleotide
uuccuuuggcaaaccacuc

SEQ ID NO: 1868703 - RNA, 19 nt, Artificial Sequence
  Description of Artificial Sequence: Synthetic oligonucleotide
uuggcaaaccacucaggua

SEQ ID NO: 1868704 - RNA, 19 nt, Artificial Sequence
  Description of Artificial Sequence: Synthetic oligonucleotide
cuaccugacuuuucuucug

SEQ ID NO: 1868705 - RNA, 19 nt, Artificial Sequence
  Description of Artificial Sequence: Synthetic oligonucleotide
gcuaagugcaugccaacug

SEQ ID NO: 1868706 - RNA, 19 nt, Artificial Sequence
  Description of Artificial Sequence: Synthetic oligonucleotide
agggcacacaaguuguuau

SEQ ID NO: 1868707 - RNA, 19 nt, Artificial Sequence
  Description of Artificial Sequence: Synthetic oligonucleotide
ucugaguugaugggagggu

SEQ ID NO: 1868708 - RNA, 19 nt, Artificial Sequence
  Description of Artificial Sequence: Synthetic oligonucleotide
aacuagcauucuaaugagu

SEQ ID NO: 1868709 - RNA, 19 nt, Artificial Sequence
  Description of Artificial Sequence: Synthetic oligonucleotide
auugaugagcugccaguau

SEQ ID NO: 1868710 - RNA, 19 nt, Artificial Sequence
  Description of Artificial Sequence: Synthetic oligonucleotide
agcuuucacugccugggcu

SEQ ID NO: 1868711 - RNA, 19 nt, Artificial Sequence
  Description of Artificial Sequence: Synthetic oligonucleotide
aguaucuuguuuguugcua

SEQ ID NO: 1868712 - RNA, 19 nt, Artificial Sequence
  Description of Artificial Sequence: Synthetic oligonucleotide
ucacaggaagguuggcuuc

SEQ ID NO: 1868713 - RNA, 19 nt, Artificial Sequence
  Description of Artificial Sequence: Synthetic oligonucleotide
caucccgacacuuuuguua

SEQ ID NO: 1868714 - RNA, 19 nt, Artificial Sequence
  Description of Artificial Sequence: Synthetic oligonucleotide
gugcaaggacauuuucuug

SEQ ID NO: 1868715 - RNA, 19 nt, Artificial Sequence
  Description of Artificial Sequence: Synthetic oligonucleotide
cucagguaauuuucucuuc

SEQ ID NO: 1868716 - RNA, 19 nt, Artificial Sequence
  Description of Artificial Sequence: Synthetic oligonucleotide
uugagguuuuguacucgaa

SEQ ID NO: 1868717 - RNA, 19 nt, Artificial Sequence
  Description of Artificial Sequence: Synthetic oligonucleotide
gcucucuucagugcuaggg

SEQ ID NO: 1868718 - RNA, 19 nt, Artificial Sequence
  Description of Artificial Sequence: Synthetic oligonucleotide
agacuucccuggugauugc

SEQ ID NO: 1868719 - RNA, 19 nt, Artificial Sequence
  Description of Artificial Sequence: Synthetic oligonucleotide
cuugagguuuuguacucga

SEQ ID NO: 1868720 - RNA, 19 nt, Artificial Sequence
  Description of Artificial Sequence: Synthetic oligonucleotide
ugaucagaagaauguuguu

SEQ ID NO: 1868721 - RNA, 19 nt, Artificial Sequence
  Description of Artificial Sequence: Synthetic oligonucleotide
acugcugugagaggcagaa

SEQ ID NO: 1868722 - RNA, 19 nt, Artificial Sequence
  Description of Artificial Sequence: Synthetic oligonucleotide
caacagaggguccaagaga

SEQ ID NO: 1868723 - RNA, 19 nt, Artificial Sequence
  Description of Artificial Sequence: Synthetic oligonucleotide
agaagauuucucaggugcu

SEQ ID NO: 1868724 - RNA, 19 nt, Artificial Sequence
  Description of Artificial Sequence: Synthetic oligonucleotide
ucugaagauccgggguuag

SEQ ID NO: 1868725 - RNA, 19 nt, Artificial Sequence
  Description of Artificial Sequence: Synthetic oligonucleotide
uacucgaaaagaggucugu

SEQ ID NO: 1868726 - RNA, 19 nt, Artificial Sequence
  Description of Artificial Sequence: Synthetic oligonucleotide
aauuggcuuuugaucagaa

SEQ ID NO: 1868727 - RNA, 19 nt, Artificial Sequence
  Description of Artificial Sequence: Synthetic oligonucleotide
acaaguuguuaugcaguug

SEQ ID NO: 1868728 - RNA, 19 nt, Artificial Sequence
  Description of Artificial Sequence: Synthetic oligonucleotide
auaagacuucccuggugau

SEQ ID NO: 1868729 - RNA, 19 nt, Artificial Sequence
  Description of Artificial Sequence: Synthetic oligonucleotide
ugugugugugugugugugu

SEQ ID NO: 1868730 - RNA, 19 nt, Artificial Sequence
  Description of Artificial Sequence: Synthetic oligonucleotide
ugcaguccuaguguccagc

SEQ ID NO: 1868731 - RNA, 19 nt, Artificial Sequence
  Description of Artificial Sequence: Synthetic oligonucleotide
ggcacauuuccuuuggcaa

SEQ ID NO: 1868732 - RNA, 19 nt, Artificial Sequence
  Description of Artificial Sequence: Synthetic oligonucleotide
aguugaugggaggguuucg

SEQ ID NO: 1868733 - RNA, 19 nt, Artificial Sequence
  Description of Artificial Sequence: Synthetic oligonucleotide
uugggcugaaauggcaggu

SEQ ID NO: 1868734 - RNA, 19 nt, Artificial Sequence
  Description of Artificial Sequence: Synthetic oligonucleotide
guaguuaauccaauuggcu

SEQ ID NO: 1868735 - RNA, 19 nt, Artificial Sequence
  Description of Artificial Sequence: Synthetic oligonucleotide
ggcacacaaguuguuaugc

SEQ ID NO: 1868736 - RNA, 19 nt, Artificial Sequence
  Description of Artificial Sequence: Synthetic oligonucleotide
uuacucccagaagauuucu

SEQ ID NO: 1868737 - RNA, 19 nt, Artificial Sequence
  Description of Artificial Sequence: Synthetic oligonucleotide
agaggguccaagagaguag

SEQ ID NO: 1868738 - RNA, 19 nt, Artificial Sequence
  Description of Artificial Sequence: Synthetic oligonucleotide
cauguggauaagguaugug

SEQ ID NO: 1868739 - RNA, 19 nt, Artificial Sequence
  Description of Artificial Sequence: Synthetic oligonucleotide
acagacugugagagugagc

SEQ ID NO: 1868740 - RNA, 19 nt, Artificial Sequence
  Description of Artificial Sequence: Synthetic oligonucleotide
gugugugugugugugugug

SEQ ID NO: 1868741 - RNA, 19 nt, Artificial Sequence
  Description of Artificial Sequence: Synthetic oligonucleotide
agaguagcuuugccuucag

SEQ ID NO: 1868742 - RNA, 19 nt, Artificial Sequence
  Description of Artificial Sequence: Synthetic oligonucleotide
gggaucacaggaagguugg

SEQ ID NO: 1868743 - RNA, 19 nt, Artificial Sequence
  Description of Artificial Sequence: Synthetic oligonucleotide
cgggguuagaacuuggcag

SEQ ID NO: 1868744 - RNA, 19 nt, Artificial Sequence
  Description of Artificial Sequence: Synthetic oligonucleotide
ugguaucagugacuauguc

SEQ ID NO: 1868745 - RNA, 19 nt, Artificial Sequence
  Description of Artificial Sequence: Synthetic oligonucleotide
cacagacugugagagugag

SEQ ID NO: 1868746 - RNA, 19 nt, Artificial Sequence
  Description of Artificial Sequence: Synthetic oligonucleotide
uuggucucauuuuggccau

SEQ ID NO: 1868747 - RNA, 19 nt, Artificial Sequence
  Description of Artificial Sequence: Synthetic oligonucleotide
agaggucugucugaacacu

SEQ ID NO: 1868748 - RNA, 19 nt, Artificial Sequence
  Description of Artificial Sequence: Synthetic oligonucleotide
cucaauuaccauguggaua

SEQ ID NO: 1868749 - RNA, 19 nt, Artificial Sequence
  Description of Artificial Sequence: Synthetic oligonucleotide
agccuauucucagcuaugu

SEQ ID NO: 1868750 - RNA, 19 nt, Artificial Sequence
  Description of Artificial Sequence: Synthetic oligonucleotide
accauguggauaagguaug

SEQ ID NO: 1868751 - RNA, 19 nt, Artificial Sequence
  Description of Artificial Sequence: Synthetic oligonucleotide
cucgaaaagaggucugucu

SEQ ID NO: 1868752 - RNA, 19 nt, Artificial Sequence
  Description of Artificial Sequence: Synthetic oligonucleotide
guuacucccagaagauuuc

SEQ ID NO: 1868753 - RNA, 19 nt, Artificial Sequence
  Description of Artificial Sequence: Synthetic oligonucleotide
cugucugaacacuguucac

SEQ ID NO: 1868754 - RNA, 19 nt, Artificial Sequence
  Description of Artificial Sequence: Synthetic oligonucleotide
gccauugaugagcugccag

SEQ ID NO: 1868755 - RNA, 19 nt, Artificial Sequence
  Description of Artificial Sequence: Synthetic oligonucleotide
uagccggaggcacauucau

SEQ ID NO: 1868756 - RNA, 19 nt, Artificial Sequence
  Description of Artificial Sequence: Synthetic oligonucleotide
ggguagccagcuuucacug

SEQ ID NO: 1868757 - RNA, 19 nt, Artificial Sequence
  Description of Artificial Sequence: Synthetic oligonucleotide
uucacugccugggcuaagu

SEQ ID NO: 1868758 - RNA, 19 nt, Artificial Sequence
  Description of Artificial Sequence: Synthetic oligonucleotide
acaucucuuucuguuggga

SEQ ID NO: 1868759 - RNA, 19 nt, Artificial Sequence
  Description of Artificial Sequence: Synthetic oligonucleotide
cauauaaugcaguccuagu

SEQ ID NO: 1868760 - RNA, 19 nt, Artificial Sequence
  Description of Artificial Sequence: Synthetic oligonucleotide
gauccgggguuagaacuug

SEQ ID NO: 1868761 - RNA, 19 nt, Artificial Sequence
  Description of Artificial Sequence: Synthetic oligonucleotide
cagguaauuuucucuucga

SEQ ID NO: 1868762 - RNA, 19 nt, Artificial Sequence
  Description of Artificial Sequence: Synthetic oligonucleotide
agaauaugugacagccaca

SEQ ID NO: 1868763 - RNA, 19 nt, Artificial Sequence
  Description of Artificial Sequence: Synthetic oligonucleotide
agaauagccggaggcacau

SEQ ID NO: 1868764 - RNA, 19 nt, Artificial Sequence
  Description of Artificial Sequence: Synthetic oligonucleotide
accacucagguaauuuucu

SEQ ID NO: 1868765 - RNA, 19 nt, Artificial Sequence
  Description of Artificial Sequence: Synthetic oligonucleotide
aguaucagcugagggcaca

SEQ ID NO: 1868766 - RNA, 19 nt, Artificial Sequence
  Description of Artificial Sequence: Synthetic oligonucleotide
uugcuuccaccaacuuggc

SEQ ID NO: 1868767 - RNA, 19 nt, Artificial Sequence
  Description of Artificial Sequence: Synthetic oligonucleotide
aagcucacacagcucucuu

SEQ ID NO: 1868768 - RNA, 19 nt, Artificial Sequence
  Description of Artificial Sequence: Synthetic oligonucleotide
ggagccauaagacuucccu

SEQ ID NO: 1868769 - RNA, 19 nt, Artificial Sequence
  Description of Artificial Sequence: Synthetic oligonucleotide
uuaauccaauuggcuuuug

SEQ ID NO: 1868770 - RNA, 19 nt, Artificial Sequence
  Description of Artificial Sequence: Synthetic oligonucleotide
ugugugugugugugcuagu

SEQ ID NO: 1868771 - RNA, 19 nt, Artificial Sequence
  Description of Artificial Sequence: Synthetic oligonucleotide
cugaggagccauaagacuu

SEQ ID NO: 1868772 - RNA, 19 nt, Artificial Sequence
  Description of Artificial Sequence: Synthetic oligonucleotide
guacucgaaaagaggucug

SEQ ID NO: 1868773 - RNA, 19 nt, Artificial Sequence
  Description of Artificial Sequence: Synthetic oligonucleotide
uucugaagauccgggguua

SEQ ID NO: 1868774 - RNA, 19 nt, Artificial Sequence
  Description of Artificial Sequence: Synthetic oligonucleotide
caacugcugugagaggcag

SEQ ID NO: 1868775 - RNA, 19 nt, Artificial Sequence
  Description of Artificial Sequence: Synthetic oligonucleotide
agaagccuauucucagcua

SEQ ID NO: 1868776 - RNA, 19 nt, Artificial Sequence
  Description of Artificial Sequence: Synthetic oligonucleotide
agacuguucaguaguuaau

SEQ ID NO: 1868777 - RNA, 19 nt, Artificial Sequence
  Description of Artificial Sequence: Synthetic oligonucleotide
gggcacauuuccuuuggca

SEQ ID NO: 1868778 - RNA, 19 nt, Artificial Sequence
  Description of Artificial Sequence: Synthetic oligonucleotide
gugcuagggaaacaucucu

SEQ ID NO: 1868779 - RNA, 19 nt, Artificial Sequence
  Description of Artificial Sequence: Synthetic oligonucleotide
cugccaguaucagcugagg

SEQ ID NO: 1868780 - RNA, 19 nt, Artificial Sequence
  Description of Artificial Sequence: Synthetic oligonucleotide
ugauugcaucccgacacuu

SEQ ID NO: 1868781 - RNA, 19 nt, Artificial Sequence
  Description of Artificial Sequence: Synthetic oligonucleotide
cugggcuaagugcaugcca

SEQ ID NO: 1868782 - RNA, 19 nt, Artificial Sequence
  Description of Artificial Sequence: Synthetic oligonucleotide
cagaagccuauucucagcu

SEQ ID NO: 1868783 - RNA, 19 nt, Artificial Sequence
  Description of Artificial Sequence: Synthetic oligonucleotide
gaguagcuuugccuucaga

SEQ ID NO: 1868784 - RNA, 19 nt, Artificial Sequence
  Description of Artificial Sequence: Synthetic oligonucleotide
ugugugugugugugugcua

SEQ ID NO: 1868785 - RNA, 19 nt, Artificial Sequence
  Description of Artificial Sequence: Synthetic oligonucleotide
gcaaggacauuuucuuguc

SEQ ID NO: 1868786 - RNA, 19 nt, Artificial Sequence
  Description of Artificial Sequence: Synthetic oligonucleotide
gcuagaauagccggaggca

SEQ ID NO: 1868787 - RNA, 19 nt, Artificial Sequence
  Description of Artificial Sequence: Synthetic oligonucleotide
ucccgacacuuuuguuaag

SEQ ID NO: 1868788 - RNA, 19 nt, Artificial Sequence
  Description of Artificial Sequence: Synthetic oligonucleotide
agcauucuaaugaguuuaa

SEQ ID NO: 1868789 - RNA, 19 nt, Artificial Sequence
  Description of Artificial Sequence: Synthetic oligonucleotide
cagcuuucacugccugggc

SEQ ID NO: 1868790 - RNA, 19 nt, Artificial Sequence
  Description of Artificial Sequence: Synthetic oligonucleotide
cuccucuugagguuuugua

SEQ ID NO: 1868791 - RNA, 19 nt, Artificial Sequence
  Description of Artificial Sequence: Synthetic oligonucleotide
aggccagcucucuccauau

SEQ ID NO: 1868792 - RNA, 19 nt, Artificial Sequence
  Description of Artificial Sequence: Synthetic oligonucleotide
gugugugugugugcuaguc

SEQ ID NO: 1868793 - RNA, 19 nt, Artificial Sequence
  Description of Artificial Sequence: Synthetic oligonucleotide
uaucagugacuauguccuu

SEQ ID NO: 1868794 - RNA, 19 nt, Artificial Sequence
  Description of Artificial Sequence: Synthetic oligonucleotide
gguuagaacuuggcagcag

SEQ ID NO: 1868795 - RNA, 19 nt, Artificial Sequence
  Description of Artificial Sequence: Synthetic oligonucleotide
auagccggaggcacauuca

SEQ ID NO: 1868796 - RNA, 19 nt, Artificial Sequence
  Description of Artificial Sequence: Synthetic oligonucleotide
caguaucagcugagggcac

SEQ ID NO: 1868797 - RNA, 19 nt, Artificial Sequence
  Description of Artificial Sequence: Synthetic oligonucleotide
gguagccagcuuucacugc

SEQ ID NO: 1868798 - RNA, 19 nt, Artificial Sequence
  Description of Artificial Sequence: Synthetic oligonucleotide
ccaucaaucuguuucacau

SEQ ID NO: 1868799 - RNA, 19 nt, Artificial Sequence
  Description of Artificial Sequence: Synthetic oligonucleotide
uggccauauccaguaguau

SEQ ID NO: 1868800 - RNA, 19 nt, Artificial Sequence
  Description of Artificial Sequence: Synthetic oligonucleotide
cuagcauucuaaugaguuu

SEQ ID NO: 1868801 - RNA, 19 nt, Artificial Sequence
  Description of Artificial Sequence: Synthetic oligonucleotide
ccagaagauuucucaggug

SEQ ID NO: 1868802 - RNA, 19 nt, Artificial Sequence
  Description of Artificial Sequence: Synthetic oligonucleotide
agacugugagagugagcau

SEQ ID NO: 1868803 - RNA, 19 nt, Artificial Sequence
  Description of Artificial Sequence: Synthetic oligonucleotide
cgacauuucagaugauguc

SEQ ID NO: 1868804 - RNA, 19 nt, Artificial Sequence
  Description of Artificial Sequence: Synthetic oligonucleotide
aacugcugugagaggcaga

SEQ ID NO: 1868805 - RNA, 19 nt, Artificial Sequence
  Description of Artificial Sequence: Synthetic oligonucleotide
ggaucucaauuaccaugug

SEQ ID NO: 1868806 - RNA, 19 nt, Artificial Sequence
  Description of Artificial Sequence: Synthetic oligonucleotide
gcugccaguaucagcugag

SEQ ID NO: 1868807 - RNA, 19 nt, Artificial Sequence
  Description of Artificial Sequence: Synthetic oligonucleotide
agugagcauucuccauuuu

SEQ ID NO: 1868808 - RNA, 19 nt, Artificial Sequence
  Description of Artificial Sequence: Synthetic oligonucleotide
gccauauccaguaguaucu

SEQ ID NO: 1868809 - RNA, 19 nt, Artificial Sequence
  Description of Artificial Sequence: Synthetic oligonucleotide
caauuaccauguggauaag

SEQ ID NO: 1868810 - RNA, 19 nt, Artificial Sequence
  Description of Artificial Sequence: Synthetic oligonucleotide
uccuaguguccagcucuug

SEQ ID NO: 1868811 - RNA, 19 nt, Artificial Sequence
  Description of Artificial Sequence: Synthetic oligonucleotide
auccgggguuagaacuugg

SEQ ID NO: 1868812 - RNA, 19 nt, Artificial Sequence
  Description of Artificial Sequence: Synthetic oligonucleotide
cugaaauggcagguucuga

SEQ ID NO: 1868813 - RNA, 19 nt, Artificial Sequence
  Description of Artificial Sequence: Synthetic oligonucleotide
gcaguaguuggucucauuu

SEQ ID NO: 1868814 - RNA, 19 nt, Artificial Sequence
  Description of Artificial Sequence: Synthetic oligonucleotide
caccaucaaucuguuucac

SEQ ID NO: 1868815 - RNA, 19 nt, Artificial Sequence
  Description of Artificial Sequence: Synthetic oligonucleotide
gagagugagcauucuccau

SEQ ID NO: 1868816 - RNA, 19 nt, Artificial Sequence
  Description of Artificial Sequence: Synthetic oligonucleotide
gaagauuucucaggugcuu

SEQ ID NO: 1868817 - RNA, 19 nt, Artificial Sequence
  Description of Artificial Sequence: Synthetic oligonucleotide
ugggcugaaauggcagguu

SEQ ID NO: 1868818 - RNA, 19 nt, Artificial Sequence
  Description of Artificial Sequence: Synthetic oligonucleotide
guuaaucguagggcacaca

SEQ ID NO: 1868819 - RNA, 19 nt, Artificial Sequence
  Description of Artificial Sequence: Synthetic oligonucleotide
cacaaguuguuaugcaguu

SEQ ID NO: 1868820 - RNA, 19 nt, Artificial Sequence
  Description of Artificial Sequence: Synthetic oligonucleotide
gguccaagagaguagcuuu

SEQ ID NO: 1868821 - RNA, 19 nt, Artificial Sequence
  Description of Artificial Sequence: Synthetic oligonucleotide
caucucuuucuguugggau

SEQ ID NO: 1868822 - RNA, 19 nt, Artificial Sequence
  Description of Artificial Sequence: Synthetic oligonucleotide
agauccgggguuagaacuu

SEQ ID NO: 1868823 - RNA, 19 nt, Artificial Sequence
  Description of Artificial Sequence: Synthetic oligonucleotide
gggguagccagcuuucacu

SEQ ID NO: 1868824 - RNA, 19 nt, Artificial Sequence
  Description of Artificial Sequence: Synthetic oligonucleotide
gcauucuaaugaguuuaac

SEQ ID NO: 1868825 - RNA, 19 nt, Artificial Sequence
  Description of Artificial Sequence: Synthetic oligonucleotide
gugugugugugugugugcu

SEQ ID NO: 1868826 - RNA, 19 nt, Artificial Sequence
  Description of Artificial Sequence: Synthetic oligonucleotide
ccacucagguaauuuucuc

SEQ ID NO: 1868827 - RNA, 19 nt, Artificial Sequence
  Description of Artificial Sequence: Synthetic oligonucleotide
aucguagggcacacaaguu

SEQ ID NO: 1868828 - RNA, 19 nt, Artificial Sequence
  Description of Artificial Sequence: Synthetic oligonucleotide
caggaacuagcauucuaau

SEQ ID NO: 1868829 - RNA, 19 nt, Artificial Sequence
  Description of Artificial Sequence: Synthetic oligonucleotide
gcaugccaacugcugugag

SEQ ID NO: 1868830 - RNA, 19 nt, Artificial Sequence
  Description of Artificial Sequence: Synthetic oligonucleotide
gcuaguccauuucuauuua

SEQ ID NO: 1868831 - RNA, 19 nt, Artificial Sequence
  Description of Artificial Sequence: Synthetic oligonucleotide
ccaccaacuuggcauauaa

SEQ ID NO: 1868832 - RNA, 19 nt, Artificial Sequence
  Description of Artificial Sequence: Synthetic oligonucleotide
gugcuaguccauuucuauu

SEQ ID NO: 1868833 - RNA, 19 nt, Artificial Sequence
  Description of Artificial Sequence: Synthetic oligonucleotide
gccggaggcacauucauuu

SEQ ID NO: 1868834 - RNA, 19 nt, Artificial Sequence
  Description of Artificial Sequence: Synthetic oligonucleotide
caguaguuggucucauuuu

SEQ ID NO: 1868835 - RNA, 19 nt, Artificial Sequence
  Description of Artificial Sequence: Synthetic oligonucleotide
cagaagaauguuguucaau

SEQ ID NO: 1868836 - RNA, 19 nt, Artificial Sequence
  Description of Artificial Sequence: Synthetic oligonucleotide
cugaaccucuggggucagg

SEQ ID NO: 1868837 - RNA, 19 nt, Artificial Sequence
  Description of Artificial Sequence: Synthetic oligonucleotide
uaucagcugagggcacauu

SEQ ID NO: 1868838 - RNA, 19 nt, Artificial Sequence
  Description of Artificial Sequence: Synthetic oligonucleotide
cccuggugauugcaucccg

SEQ ID NO: 1868839 - RNA, 19 nt, Artificial Sequence
  Description of Artificial Sequence: Synthetic oligonucleotide
cugaagauccgggguuaga

SEQ ID NO: 1868840 - RNA, 19 nt, Artificial Sequence
  Description of Artificial Sequence: Synthetic oligonucleotide
cggauaacaucaguaauaa

SEQ ID NO: 1868841 - RNA, 19 nt, Artificial Sequence
  Description of Artificial Sequence: Synthetic oligonucleotide
cugagggcacauuuccuuu

SEQ ID NO: 1868842 - RNA, 19 nt, Artificial Sequence
  Description of Artificial Sequence: Synthetic oligonucleotide
ccuggugauugcaucccga

SEQ ID NO: 1868843 - RNA, 19 nt, Artificial Sequence
  Description of Artificial Sequence: Synthetic oligonucleotide
cauucuccaggaucucaau

SEQ ID NO: 1868844 - RNA, 19 nt, Artificial Sequence
  Description of Artificial Sequence: Synthetic oligonucleotide
ccugggcuaagugcaugcc

SEQ ID NO: 1868845 - RNA, 19 nt, Artificial Sequence
  Description of Artificial Sequence: Synthetic oligonucleotide
ccgacacuuuuguuaagaa

SEQ ID NO: 1868846 - RNA, 19 nt, Artificial Sequence
  Description of Artificial Sequence: Synthetic oligonucleotide
ggauaacaucaguaauaau

SEQ ID NO: 1868847 - RNA, 19 nt, Artificial Sequence
  Description of Artificial Sequence: Synthetic oligonucleotide
ggauaagguaugugucaau

SEQ ID NO: 1868848 - RNA, 19 nt, Artificial Sequence
  Description of Artificial Sequence: Synthetic oligonucleotide
cguagggcacacaaguugu

SEQ ID NO: 1868849 - RNA, 19 nt, Artificial Sequence
  Description of Artificial Sequence: Synthetic oligonucleotide
caccaacuuggcauauaau

SEQ ID NO: 1868850 - RNA, 19 nt, Artificial Sequence
  Description of Artificial Sequence: Synthetic oligonucleotide
ggcuuuugaucagaagaau

SEQ ID NO: 1868851 - RNA, 19 nt, Artificial Sequence
  Description of Artificial Sequence: Synthetic oligonucleotide
ggucugucugaacacuguu

SEQ ID NO: 1868852 - RNA, 19 nt, Artificial Sequence
  Description of Artificial Sequence: Synthetic oligonucleotide
cugaguugaugggaggguu

SEQ ID NO: 1868853 - RNA, 19 nt, Artificial Sequence
  Description of Artificial Sequence: Synthetic oligonucleotide
ccacagacugugagaguga

SEQ ID NO: 1868854 - RNA, 19 nt, Artificial Sequence
  Description of Artificial Sequence: Synthetic oligonucleotide
agccggaggcacauucauu

SEQ ID NO: 1868855 - RNA, 19 nt, Artificial Sequence
  Description of Artificial Sequence: Synthetic oligonucleotide
guccuggaauaaagaauau

SEQ ID NO: 1868856 - RNA, 19 nt, Artificial Sequence
  Description of Artificial Sequence: Synthetic oligonucleotide
guuaugcaguugucaucuu

SEQ ID NO: 1868857 - RNA, 19 nt, Artificial Sequence
  Description of Artificial Sequence: Synthetic oligonucleotide
ggcauauaaugcaguccua

SEQ ID NO: 1868858 - RNA, 19 nt, Artificial Sequence
  Description of Artificial Sequence: Synthetic oligonucleotide
ggaggguuucggauaacau

SEQ ID NO: 1868859 - RNA, 19 nt, Artificial Sequence
  Description of Artificial Sequence: Synthetic oligonucleotide
ggguccaagagaguagcuu

SEQ ID NO: 1868860 - RNA, 19 nt, Artificial Sequence
  Description of Artificial Sequence: Synthetic oligonucleotide
cgacacuuuuguuaagaau

SEQ ID NO: 1868861 - RNA, 19 nt, Artificial Sequence
  Description of Artificial Sequence: Synthetic oligonucleotide
guagggcacacaaguuguu

SEQ ID NO: 1868862 - RNA, 19 nt, Artificial Sequence
  Description of Artificial Sequence: Synthetic oligonucleotide
cugugagagugagcauucu

SEQ ID NO: 1868863 - RNA, 19 nt, Artificial Sequence
  Description of Artificial Sequence: Synthetic oligonucleotide
cggaggcacauucauuuua

SEQ ID NO: 1868864 - RNA, 19 nt, Artificial Sequence
  Description of Artificial Sequence: Synthetic oligonucleotide
ccaggaucucaauuaccau

SEQ ID NO: 1868865 - RNA, 19 nt, Artificial Sequence
  Description of Artificial Sequence: Synthetic oligonucleotide
cuucgacauuucagaugau

SEQ ID NO: 1868866 - RNA, 19 nt, Artificial Sequence
  Description of Artificial Sequence: Synthetic oligonucleotide
guccuaguguccagcucuu

SEQ ID NO: 1868867 - RNA, 19 nt, Artificial Sequence
  Description of Artificial Sequence: Synthetic oligonucleotide
cagugacuauguccuuguu

SEQ ID NO: 1868868 - RNA, 19 nt, Artificial Sequence
  Description of Artificial Sequence: Synthetic oligonucleotide
ggcaaaccacucagguaau

SEQ ID NO: 1868869 - RNA, 19 nt, Artificial Sequence
  Description of Artificial Sequence: Synthetic oligonucleotide
gcaucccgacacuuuuguu

SEQ ID NO: 1868870 - RNA, 19 nt, Artificial Sequence
  Description of Artificial Sequence: Synthetic oligonucleotide
ccacuaccugacuuuucuu

SEQ ID NO: 1868871 - RNA, 19 nt, Artificial Sequence
  Description of Artificial Sequence: Synthetic oligonucleotide
ccggaggcacauucauuuu

SEQ ID NO: 1868872 - RNA, 19 nt, Artificial Sequence
  Description of Artificial Sequence: Synthetic oligonucleotide
aaaaguucauccaugaugc

SEQ ID NO: 1868873 - RNA, 19 nt, Artificial Sequence
  Description of Artificial Sequence: Synthetic oligonucleotide
aaauuaagaugauagcugg

SEQ ID NO: 1868874 - RNA, 19 nt, Artificial Sequence
  Description of Artificial Sequence: Synthetic oligonucleotide
aacaagaagaccuagugcu

SEQ ID NO: 1868875 - RNA, 19 nt, Artificial Sequence
  Description of Artificial Sequence: Synthetic oligonucleotide
uauaauucaggguaaacug

SEQ ID NO: 1868876 - RNA, 19 nt, Artificial Sequence
  Description of Artificial Sequence: Synthetic oligonucleotide
ucuuuaauuguucagcagc

SEQ ID NO: 1868877 - RNA, 19 nt, Artificial Sequence
  Description of Artificial Sequence: Synthetic oligonucleotide
uauaucaucuuugaggcgg

SEQ ID NO: 1868878 - RNA, 19 nt, Artificial Sequence
  Description of Artificial Sequence: Synthetic oligonucleotide
auaaauuaagaugauagcu

SEQ ID NO: 1868879 - RNA, 19 nt, Artificial Sequence
  Description of Artificial Sequence: Synthetic oligonucleotide
ugaacaagaagaccuagug

SEQ ID NO: 1868880 - RNA, 19 nt, Artificial Sequence
  Description of Artificial Sequence: Synthetic oligonucleotide
uuacagauuuucuagggcc

SEQ ID NO: 1868881 - RNA, 19 nt, Artificial Sequence
  Description of Artificial Sequence: Synthetic oligonucleotide
augaauaauagcuuccuug

SEQ ID NO: 1868882 - RNA, 19 nt, Artificial Sequence
  Description of Artificial Sequence: Synthetic oligonucleotide
uucuagguaauucuugugc

SEQ ID NO: 1868883 - RNA, 19 nt, Artificial Sequence
  Description of Artificial Sequence: Synthetic oligonucleotide
agaggcgacacccauuucc

SEQ ID NO: 1868884 - RNA, 19 nt, Artificial Sequence
  Description of Artificial Sequence: Synthetic oligonucleotide
ucacguauaauucagggua

SEQ ID NO: 1868885 - RNA, 19 nt, Artificial Sequence
  Description of Artificial Sequence: Synthetic oligonucleotide
aaucugagaacuuggagaa

SEQ ID NO: 1868886 - RNA, 19 nt, Artificial Sequence
  Description of Artificial Sequence: Synthetic oligonucleotide
cagaggaucacuuauauca

SEQ ID NO: 1868887 - RNA, 19 nt, Artificial Sequence
  Description of Artificial Sequence: Synthetic oligonucleotide
ugaauaauagcuuccuugu

SEQ ID NO: 1868888 - RNA, 19 nt, Artificial Sequence
  Description of Artificial Sequence: Synthetic oligonucleotide
ucaaugaauaauagcuucc

SEQ ID NO: 1868889 - RNA, 19 nt, Artificial Sequence
  Description of Artificial Sequence: Synthetic oligonucleotide
uuaauuguucagcagcucu

SEQ ID NO: 1868890 - RNA, 19 nt, Artificial Sequence
  Description of Artificial Sequence: Synthetic oligonucleotide
aaccgcauugcacagagga

SEQ ID NO: 1868891 - RNA, 19 nt, Artificial Sequence
  Description of Artificial Sequence: Synthetic oligonucleotide
uucccguugaauuuguucc

SEQ ID NO: 1868892 - RNA, 19 nt, Artificial Sequence
  Description of Artificial Sequence: Synthetic oligonucleotide
uucccuguuagucuacucg

SEQ ID NO: 1868893 - RNA, 19 nt, Artificial Sequence
  Description of Artificial Sequence: Synthetic oligonucleotide
aagugucuggguuucacag

SEQ ID NO: 1868894 - RNA, 19 nt, Artificial Sequence
  Description of Artificial Sequence: Synthetic oligonucleotide
uggaggaaagcauuuaucu

SEQ ID NO: 1868895 - RNA, 19 nt, Artificial Sequence
  Description of Artificial Sequence: Synthetic oligonucleotide
ucuagcaagaacaaaccau

SEQ ID NO: 1868896 - RNA, 19 nt, Artificial Sequence
  Description of Artificial Sequence: Synthetic oligonucleotide
auuucaacugugcaggucu

SEQ ID NO: 1868897 - RNA, 19 nt, Artificial Sequence
  Description of Artificial Sequence: Synthetic oligonucleotide
ucuagguaauucuugugcc

SEQ ID NO: 1868898 - RNA, 19 nt, Artificial Sequence
  Description of Artificial Sequence: Synthetic oligonucleotide
uucguuucugccaagcucu

SEQ ID NO: 1868899 - RNA, 19 nt, Artificial Sequence
  Description of Artificial Sequence: Synthetic oligonucleotide
ucuugguuuuauauguacc

SEQ ID NO: 1868900 - RNA, 19 nt, Artificial Sequence
  Description of Artificial Sequence: Synthetic oligonucleotide
ucacaguaaccucacaggc

SEQ ID NO: 1868901 - RNA, 19 nt, Artificial Sequence
  Description of Artificial Sequence: Synthetic oligonucleotide
ucuacucgcucuaggaagg

SEQ ID NO: 1868902 - RNA, 19 nt, Artificial Sequence
  Description of Artificial Sequence: Synthetic oligonucleotide
uaauucaggguaaacugga

SEQ ID NO: 1868903 - RNA, 19 nt, Artificial Sequence
  Description of Artificial Sequence: Synthetic oligonucleotide
auagcuuccuuguagaaaa

SEQ ID NO: 1868904 - RNA, 19 nt, Artificial Sequence
  Description of Artificial Sequence: Synthetic oligonucleotide
cuagcaagaacaaaccauc

SEQ ID NO: 1868905 - RNA, 19 nt, Artificial Sequence
  Description of Artificial Sequence: Synthetic oligonucleotide
gaacaagaagaccuagugc

SEQ ID NO: 1868906 - RNA, 19 nt, Artificial Sequence
  Description of Artificial Sequence: Synthetic oligonucleotide
acaguaaccucacaggccu

SEQ ID NO: 1868907 - RNA, 19 nt, Artificial Sequence
  Description of Artificial Sequence: Synthetic oligonucleotide
uuuaucuucccuguuaguc

SEQ ID NO: 1868908 - RNA, 19 nt, Artificial Sequence
  Description of Artificial Sequence: Synthetic oligonucleotide
ucuaucaaucaguuaauau

SEQ ID NO: 1868909 - RNA, 19 nt, Artificial Sequence
  Description of Artificial Sequence: Synthetic oligonucleotide
uggguuauucuuuaauugu

SEQ ID NO: 1868910 - RNA, 19 nt, Artificial Sequence
  Description of Artificial Sequence: Synthetic oligonucleotide
aggaagugcacaucugaac

SEQ ID NO: 1868911 - RNA, 19 nt, Artificial Sequence
  Description of Artificial Sequence: Synthetic oligonucleotide
auaauucaggguaaacugg

SEQ ID NO: 1868912 - RNA, 19 nt, Artificial Sequence
  Description of Artificial Sequence: Synthetic oligonucleotide
agaaguuucggacuggcau

SEQ ID NO: 1868913 - RNA, 19 nt, Artificial Sequence
  Description of Artificial Sequence: Synthetic oligonucleotide
auuuucuagggccaguccu

SEQ ID NO: 1868914 - RNA, 19 nt, Artificial Sequence
  Description of Artificial Sequence: Synthetic oligonucleotide
caaucugagaacuuggaga

SEQ ID NO: 1868915 - RNA, 19 nt, Artificial Sequence
  Description of Artificial Sequence: Synthetic oligonucleotide
cuagguaauucuugugccg

SEQ ID NO: 1868916 - RNA, 19 nt, Artificial Sequence
  Description of Artificial Sequence: Synthetic oligonucleotide
uuugaggcggaguggagcc

SEQ ID NO: 1868917 - RNA, 19 nt, Artificial Sequence
  Description of Artificial Sequence: Synthetic oligonucleotide
ucaacgucauacacaaaac

SEQ ID NO: 1868918 - RNA, 19 nt, Artificial Sequence
  Description of Artificial Sequence: Synthetic oligonucleotide
aggaaagcauuuaucuucc

SEQ ID NO: 1868919 - RNA, 19 nt, Artificial Sequence
  Description of Artificial Sequence: Synthetic oligonucleotide
aagcauuuaucuucccugu

SEQ ID NO: 1868920 - RNA, 19 nt, Artificial Sequence
  Description of Artificial Sequence: Synthetic oligonucleotide
guucuuuguggagacaugg

SEQ ID NO: 1868921 - RNA, 19 nt, Artificial Sequence
  Description of Artificial Sequence: Synthetic oligonucleotide
uacggcagcacacaugagu

SEQ ID NO: 1868922 - RNA, 19 nt, Artificial Sequence
  Description of Artificial Sequence: Synthetic oligonucleotide
auuuucacguauaauucag

SEQ ID NO: 1868923 - RNA, 19 nt, Artificial Sequence
  Description of Artificial Sequence: Synthetic oligonucleotide
uaaccucacaggccuacgg

SEQ ID NO: 1868924 - RNA, 19 nt, Artificial Sequence
  Description of Artificial Sequence: Synthetic oligonucleotide
gucuacucgcucuaggaag

SEQ ID NO: 1868925 - RNA, 19 nt, Artificial Sequence
  Description of Artificial Sequence: Synthetic oligonucleotide
ugauuucuaucaaucaguu

SEQ ID NO: 1868926 - RNA, 19 nt, Artificial Sequence
  Description of Artificial Sequence: Synthetic oligonucleotide
uucacguauaauucagggu

SEQ ID NO: 1868927 - RNA, 19 nt, Artificial Sequence
  Description of Artificial Sequence: Synthetic oligonucleotide
uccuacagggguaaccaug

SEQ ID NO: 1868928 - RNA, 19 nt, Artificial Sequence
  Description of Artificial Sequence: Synthetic oligonucleotide
uuuccuacagggguaacca

SEQ ID NO: 1868929 - RNA, 19 nt, Artificial Sequence
  Description of Artificial Sequence: Synthetic oligonucleotide
ugcacagaggaucacuuau

SEQ ID NO: 1868930 - RNA, 19 nt, Artificial Sequence
  Description of Artificial Sequence: Synthetic oligonucleotide
uggagccugacgcugcagg

SEQ ID NO: 1868931 - RNA, 19 nt, Artificial Sequence
  Description of Artificial Sequence: Synthetic oligonucleotide
uuuggcgagcuccuuguca

SEQ ID NO: 1868932 - RNA, 19 nt, Artificial Sequence
  Description of Artificial Sequence: Synthetic oligonucleotide
ucugaacaagaagaccuag

SEQ ID NO: 1868933 - RNA, 19 nt, Artificial Sequence
  Description of Artificial Sequence: Synthetic oligonucleotide
aacuucaacgucauacaca

SEQ ID NO: 1868934 - RNA, 19 nt, Artificial Sequence
  Description of Artificial Sequence: Synthetic oligonucleotide
cauacacaaaacugggguc

SEQ ID NO: 1868935 - RNA, 19 nt, Artificial Sequence
  Description of Artificial Sequence: Synthetic oligonucleotide
ucccuguuagucuacucgc

SEQ ID NO: 1868936 - RNA, 19 nt, Artificial Sequence
  Description of Artificial Sequence: Synthetic oligonucleotide
aucugaacagcagcgagag

SEQ ID NO: 1868937 - RNA, 19 nt, Artificial Sequence
  Description of Artificial Sequence: Synthetic oligonucleotide
uuucuaucaaucaguuaau

SEQ ID NO: 1868938 - RNA, 19 nt, Artificial Sequence
  Description of Artificial Sequence: Synthetic oligonucleotide
cacaguaaccucacaggcc

SEQ ID NO: 1868939 - RNA, 19 nt, Artificial Sequence
  Description of Artificial Sequence: Synthetic oligonucleotide
gauuuucuagggccagucc

SEQ ID NO: 1868940 - RNA, 19 nt, Artificial Sequence
  Description of Artificial Sequence: Synthetic oligonucleotide
cucuugguuuuauauguac

SEQ ID NO: 1868941 - RNA, 19 nt, Artificial Sequence
  Description of Artificial Sequence: Synthetic oligonucleotide
guaauucuugugccguggg

SEQ ID NO: 1868942 - RNA, 19 nt, Artificial Sequence
  Description of Artificial Sequence: Synthetic oligonucleotide
ucaaucaguuaauauucua

SEQ ID NO: 1868943 - RNA, 19 nt, Artificial Sequence
  Description of Artificial Sequence: Synthetic oligonucleotide
acauaugauuucuaucaau

SEQ ID NO: 1868944 - RNA, 19 nt, Artificial Sequence
  Description of Artificial Sequence: Synthetic oligonucleotide
uggcaugauacgcuggcga

SEQ ID NO: 1868945 - RNA, 19 nt, Artificial Sequence
  Description of Artificial Sequence: Synthetic oligonucleotide
ucguguuuacagauuuucu

SEQ ID NO: 1868946 - RNA, 19 nt, Artificial Sequence
  Description of Artificial Sequence: Synthetic oligonucleotide
aagaccuagugcucacuca

SEQ ID NO: 1868947 - RNA, 19 nt, Artificial Sequence
  Description of Artificial Sequence: Synthetic oligonucleotide
accuagugcucacucacag

SEQ ID NO: 1868948 - RNA, 19 nt, Artificial Sequence
  Description of Artificial Sequence: Synthetic oligonucleotide
acgcuggcgacucuucccc

SEQ ID NO: 1868949 - RNA, 19 nt, Artificial Sequence
  Description of Artificial Sequence: Synthetic oligonucleotide
auacgcuggcgacucuucc

SEQ ID NO: 1868950 - RNA, 19 nt, Artificial Sequence
  Description of Artificial Sequence: Synthetic oligonucleotide
ucuaguuuguucaggucuu

SEQ ID NO: 1868951 - RNA, 19 nt, Artificial Sequence
  Description of Artificial Sequence: Synthetic oligonucleotide
cauccaaccgcauugcaca

SEQ ID NO: 1868952 - RNA, 19 nt, Artificial Sequence
  Description of Artificial Sequence: Synthetic oligonucleotide
uggagaucacuguacauuu

SEQ ID NO: 1868953 - RNA, 19 nt, Artificial Sequence
  Description of Artificial Sequence: Synthetic oligonucleotide
ugcaaguaaccucguaaaa

SEQ ID NO: 1868954 - RNA, 19 nt, Artificial Sequence
  Description of Artificial Sequence: Synthetic oligonucleotide
acauggaucagcaggucuc

SEQ ID NO: 1868955 - RNA, 19 nt, Artificial Sequence
  Description of Artificial Sequence: Synthetic oligonucleotide
aauucaggguaaacuggag

SEQ ID NO: 1868956 - RNA, 19 nt, Artificial Sequence
  Description of Artificial Sequence: Synthetic oligonucleotide
ggucucagaacucaucggc

SEQ ID NO: 1868957 - RNA, 19 nt, Artificial Sequence
  Description of Artificial Sequence: Synthetic oligonucleotide
aggaucacuuauaucaucu

SEQ ID NO: 1868958 - RNA, 19 nt, Artificial Sequence
  Description of Artificial Sequence: Synthetic oligonucleotide
aguaaccucacaggccuac

SEQ ID NO: 1868959 - RNA, 19 nt, Artificial Sequence
  Description of Artificial Sequence: Synthetic oligonucleotide
cuucguuucugccaagcuc

SEQ ID NO: 1868960 - RNA, 19 nt, Artificial Sequence
  Description of Artificial Sequence: Synthetic oligonucleotide
uauauguaccuucguguuu

SEQ ID NO: 1868961 - RNA, 19 nt, Artificial Sequence
  Description of Artificial Sequence: Synthetic oligonucleotide
uuguucuuuguggagacau

SEQ ID NO: 1868962 - RNA, 19 nt, Artificial Sequence
  Description of Artificial Sequence: Synthetic oligonucleotide
aguacaggaagugcacauc

SEQ ID NO: 1868963 - RNA, 19 nt, Artificial Sequence
  Description of Artificial Sequence: Synthetic oligonucleotide
caguucuagguaauucuug

SEQ ID NO: 1868964 - RNA, 19 nt, Artificial Sequence
  Description of Artificial Sequence: Synthetic oligonucleotide
ugugccguggguuauucuu

SEQ ID NO: 1868965 - RNA, 19 nt, Artificial Sequence
  Description of Artificial Sequence: Synthetic oligonucleotide
ugucuaaaccagccucuca

SEQ ID NO: 1868966 - RNA, 19 nt, Artificial Sequence
  Description of Artificial Sequence: Synthetic oligonucleotide
cucgguuucauugucauaa

SEQ ID NO: 1868967 - RNA, 19 nt, Artificial Sequence
  Description of Artificial Sequence: Synthetic oligonucleotide
caggucugaacaagaagac

SEQ ID NO: 1868968 - RNA, 19 nt, Artificial Sequence
  Description of Artificial Sequence: Synthetic oligonucleotide
uucggacuggcaugauacg

SEQ ID NO: 1868969 - RNA, 19 nt, Artificial Sequence
  Description of Artificial Sequence: Synthetic oligonucleotide
guucuagguaauucuugug

SEQ ID NO: 1868970 - RNA, 19 nt, Artificial Sequence
  Description of Artificial Sequence: Synthetic oligonucleotide
cuggaggaaagcauuuauc

SEQ ID NO: 1868971 - RNA, 19 nt, Artificial Sequence
  Description of Artificial Sequence: Synthetic oligonucleotide
acggcagcacacaugaguc

SEQ ID NO: 1868972 - RNA, 19 nt, Artificial Sequence
  Description of Artificial Sequence: Synthetic oligonucleotide
guaaccauggggugaguuc

SEQ ID NO: 1868973 - RNA, 19 nt, Artificial Sequence
  Description of Artificial Sequence: Synthetic oligonucleotide
uguuagucuacucgcucua

SEQ ID NO: 1868974 - RNA, 19 nt, Artificial Sequence
  Description of Artificial Sequence: Synthetic oligonucleotide
aauggucguuucccguuga

SEQ ID NO: 1868975 - RNA, 19 nt, Artificial Sequence
  Description of Artificial Sequence: Synthetic oligonucleotide
auauguaccuucguguuua

SEQ ID NO: 1868976 - RNA, 19 nt, Artificial Sequence
  Description of Artificial Sequence: Synthetic oligonucleotide
ucggacuggcaugauacgc

SEQ ID NO: 1868977 - RNA, 19 nt, Artificial Sequence
  Description of Artificial Sequence: Synthetic oligonucleotide
cucuggugcaaucugagaa

SEQ ID NO: 1868978 - RNA, 19 nt, Artificial Sequence
  Description of Artificial Sequence: Synthetic oligonucleotide
uuuaauuguucagcagcuc

SEQ ID NO: 1868979 - RNA, 19 nt, Artificial Sequence
  Description of Artificial Sequence: Synthetic oligonucleotide
uggaucagcaggucucaga

SEQ ID NO: 1868980 - RNA, 19 nt, Artificial Sequence
  Description of Artificial Sequence: Synthetic oligonucleotide
gacacccauuuccuacagg

SEQ ID NO: 1868981 - RNA, 19 nt, Artificial Sequence
  Description of Artificial Sequence: Synthetic oligonucleotide
agugguagcuucccacugu

SEQ ID NO: 1868982 - RNA, 19 nt, Artificial Sequence
  Description of Artificial Sequence: Synthetic oligonucleotide
cuuuaauuguucagcagcu

SEQ ID NO: 1868983 - RNA, 19 nt, Artificial Sequence
  Description of Artificial Sequence: Synthetic oligonucleotide
agccugacgcugcaggaag

SEQ ID NO: 1868984 - RNA, 19 nt, Artificial Sequence
  Description of Artificial Sequence: Synthetic oligonucleotide
uacgcuggcgacucuuccc

SEQ ID NO: 1868985 - RNA, 19 nt, Artificial Sequence
  Description of Artificial Sequence: Synthetic oligonucleotide
uaccuucguguuuacagau

SEQ ID NO: 1868986 - RNA, 19 nt, Artificial Sequence
  Description of Artificial Sequence: Synthetic oligonucleotide
cacccauuuccuacagggg

SEQ ID NO: 1868987 - RNA, 19 nt, Artificial Sequence
  Description of Artificial Sequence: Synthetic oligonucleotide
ugagggaacucaacuucaa

SEQ ID NO: 1868988 - RNA, 19 nt, Artificial Sequence
  Description of Artificial Sequence: Synthetic oligonucleotide
ggugcaaucugagaacuug

SEQ ID NO: 1868989 - RNA, 19 nt, Artificial Sequence
  Description of Artificial Sequence: Synthetic oligonucleotide
acaugagucucuugguuuu

SEQ ID NO: 1868990 - RNA, 19 nt, Artificial Sequence
  Description of Artificial Sequence: Synthetic oligonucleotide
cuuguuagauggagaucac

SEQ ID NO: 1868991 - RNA, 19 nt, Artificial Sequence
  Description of Artificial Sequence: Synthetic oligonucleotide
ucguuucccguugaauuug

SEQ ID NO: 1868992 - RNA, 19 nt, Artificial Sequence
  Description of Artificial Sequence: Synthetic oligonucleotide
uuccuuuuggcgagcuccu

SEQ ID NO: 1868993 - RNA, 19 nt, Artificial Sequence
  Description of Artificial Sequence: Synthetic oligonucleotide
cgucauacacaaaacuggg

SEQ ID NO: 1868994 - RNA, 19 nt, Artificial Sequence
  Description of Artificial Sequence: Synthetic oligonucleotide
aagaggcgacacccauuuc

SEQ ID NO: 1868995 - RNA, 19 nt, Artificial Sequence
  Description of Artificial Sequence: Synthetic oligonucleotide
uccugagggaacucaacuu

SEQ ID NO: 1868996 - RNA, 19 nt, Artificial Sequence
  Description of Artificial Sequence: Synthetic oligonucleotide
ucccacugucuaaaccagc

SEQ ID NO: 1868997 - RNA, 19 nt, Artificial Sequence
  Description of Artificial Sequence: Synthetic oligonucleotide
ucccguugaauuuguuccu

SEQ ID NO: 1868998 - RNA, 19 nt, Artificial Sequence
  Description of Artificial Sequence: Synthetic oligonucleotide
ucaugcccuuagcacaggu

SEQ ID NO: 1868999 - RNA, 19 nt, Artificial Sequence
  Description of Artificial Sequence: Synthetic oligonucleotide
agguaauucuugugccgug

SEQ ID NO: 1869000 - RNA, 19 nt, Artificial Sequence
  Description of Artificial Sequence: Synthetic oligonucleotide
acugucuaaaccagccucu

SEQ ID NO: 1869001 - RNA, 19 nt, Artificial Sequence
  Description of Artificial Sequence: Synthetic oligonucleotide
uugguuuuauauguaccuu

SEQ ID NO: 1869002 - RNA, 19 nt, Artificial Sequence
  Description of Artificial Sequence: Synthetic oligonucleotide
ccuuguuagauggagauca

SEQ ID NO: 1869003 - RNA, 19 nt, Artificial Sequence
  Description of Artificial Sequence: Synthetic oligonucleotide
aucaaucaguuaauauucu

SEQ ID NO: 1869004 - RNA, 19 nt, Artificial Sequence
  Description of Artificial Sequence: Synthetic oligonucleotide
auucuugugccguggguua

SEQ ID NO: 1869005 - RNA, 19 nt, Artificial Sequence
  Description of Artificial Sequence: Synthetic oligonucleotide
aggacgggaagcuggccug

SEQ ID NO: 1869006 - RNA, 19 nt, Artificial Sequence
  Description of Artificial Sequence: Synthetic oligonucleotide
cugcaaguaaccucguaaa

SEQ ID NO: 1869007 - RNA, 19 nt, Artificial Sequence
  Description of Artificial Sequence: Synthetic oligonucleotide
caucuuugaggcggagugg

SEQ ID NO: 1869008 - RNA, 19 nt, Artificial Sequence
  Description of Artificial Sequence: Synthetic oligonucleotide
cauugucauaaauuaagau

SEQ ID NO: 1869009 - RNA, 19 nt, Artificial Sequence
  Description of Artificial Sequence: Synthetic oligonucleotide
gcacaucugaacagcagcg

SEQ ID NO: 1869010 - RNA, 19 nt, Artificial Sequence
  Description of Artificial Sequence: Synthetic oligonucleotide
guacaggaagugcacaucu

SEQ ID NO: 1869011 - RNA, 19 nt, Artificial Sequence
  Description of Artificial Sequence: Synthetic oligonucleotide
cucgcucuaggaaggcaag

SEQ ID NO: 1869012 - RNA, 19 nt, Artificial Sequence
  Description of Artificial Sequence: Synthetic oligonucleotide
cugagggaacucaacuuca

SEQ ID NO: 1869013 - RNA, 19 nt, Artificial Sequence
  Description of Artificial Sequence: Synthetic oligonucleotide
uuccccucgguuucauugu

SEQ ID NO: 1869014 - RNA, 19 nt, Artificial Sequence
  Description of Artificial Sequence: Synthetic oligonucleotide
aaacuggaggaaagcauuu

SEQ ID NO: 1869015 - RNA, 19 nt, Artificial Sequence
  Description of Artificial Sequence: Synthetic oligonucleotide
gaagaggcgacacccauuu

SEQ ID NO: 1869016 - RNA, 19 nt, Artificial Sequence
  Description of Artificial Sequence: Synthetic oligonucleotide
guuagucuacucgcucuag

SEQ ID NO: 1869017 - RNA, 19 nt, Artificial Sequence
  Description of Artificial Sequence: Synthetic oligonucleotide
caauggucguuucccguug

SEQ ID NO: 1869018 - RNA, 19 nt, Artificial Sequence
  Description of Artificial Sequence: Synthetic oligonucleotide
aggaagaggcgacacccau

SEQ ID NO: 1869019 - RNA, 19 nt, Artificial Sequence
  Description of Artificial Sequence: Synthetic oligonucleotide
ugccccugcaaguaaccuc

SEQ ID NO: 1869020 - RNA, 19 nt, Artificial Sequence
  Description of Artificial Sequence: Synthetic oligonucleotide
gccccugcaaguaaccucg

SEQ ID NO: 1869021 - RNA, 19 nt, Artificial Sequence
  Description of Artificial Sequence: Synthetic oligonucleotide
cuggcgacucuuccccucg

SEQ ID NO: 1869022 - RNA, 19 nt, Artificial Sequence
  Description of Artificial Sequence: Synthetic oligonucleotide
caugcccuuagcacagguc

SEQ ID NO: 1869023 - RNA, 19 nt, Artificial Sequence
  Description of Artificial Sequence: Synthetic oligonucleotide
cauuucuuggcaauguauu

SEQ ID NO: 1869024 - RNA, 19 nt, Artificial Sequence
  Description of Artificial Sequence: Synthetic oligonucleotide
ucggcugacucgguguccc

SEQ ID NO: 1869025 - RNA, 19 nt, Artificial Sequence
  Description of Artificial Sequence: Synthetic oligonucleotide
aacuggaggaaagcauuua

SEQ ID NO: 1869026 - RNA, 19 nt, Artificial Sequence
  Description of Artificial Sequence: Synthetic oligonucleotide
ggcgacacccauuuccuac

SEQ ID NO: 1869027 - RNA, 19 nt, Artificial Sequence
  Description of Artificial Sequence: Synthetic oligonucleotide
uauguaccuucguguuuac

SEQ ID NO: 1869028 - RNA, 19 nt, Artificial Sequence
  Description of Artificial Sequence: Synthetic oligonucleotide
ccugagggaacucaacuuc

SEQ ID NO: 1869029 - RNA, 19 nt, Artificial Sequence
  Description of Artificial Sequence: Synthetic oligonucleotide
cucaucggcugacucggug

SEQ ID NO: 1869030 - RNA, 19 nt, Artificial Sequence
  Description of Artificial Sequence: Synthetic oligonucleotide
ccaaccgcauugcacagag

SEQ ID NO: 1869031 - RNA, 19 nt, Artificial Sequence
  Description of Artificial Sequence: Synthetic oligonucleotide
guaaccucacaggccuacg

SEQ ID NO: 1869032 - RNA, 19 nt, Artificial Sequence
  Description of Artificial Sequence: Synthetic oligonucleotide
cuuagcacagguccuugaa

SEQ ID NO: 1869033 - RNA, 19 nt, Artificial Sequence
  Description of Artificial Sequence: Synthetic oligonucleotide
acgguggccuuguuagaug

SEQ ID NO: 1869034 - RNA, 19 nt, Artificial Sequence
  Description of Artificial Sequence: Synthetic oligonucleotide
ucguuucugccaagcucug

SEQ ID NO: 1869035 - RNA, 19 nt, Artificial Sequence
  Description of Artificial Sequence: Synthetic oligonucleotide
ggaacucaacuucaacguc

SEQ ID NO: 1869036 - RNA, 19 nt, Artificial Sequence
  Description of Artificial Sequence: Synthetic oligonucleotide
caacgucauacacaaaacu

SEQ ID NO: 1869037 - RNA, 19 nt, Artificial Sequence
  Description of Artificial Sequence: Synthetic oligonucleotide
ugacucggugucccagcug

SEQ ID NO: 1869038 - RNA, 19 nt, Artificial Sequence
  Description of Artificial Sequence: Synthetic oligonucleotide
cauuucaacugugcagguc

SEQ ID NO: 1869039 - RNA, 19 nt, Artificial Sequence
  Description of Artificial Sequence: Synthetic oligonucleotide
acgcguccggcugaggacg

SEQ ID NO: 1869040 - RNA, 19 nt, Artificial Sequence
  Description of Artificial Sequence: Synthetic oligonucleotide
cacguauaauucaggguaa

SEQ ID NO: 1869041 - RNA, 19 nt, Artificial Sequence
  Description of Artificial Sequence: Synthetic oligonucleotide
agcacacaugagucucuug

SEQ ID NO: 1869042 - RNA, 19 nt, Artificial Sequence
  Description of Artificial Sequence: Synthetic oligonucleotide
uuuuggcgagcuccuuguc

SEQ ID NO: 1869043 - RNA, 19 nt, Artificial Sequence
  Description of Artificial Sequence: Synthetic oligonucleotide
uaucaucuuugaggcggag

SEQ ID NO: 1869044 - RNA, 19 nt, Artificial Sequence
  Description of Artificial Sequence: Synthetic oligonucleotide
agaggaucacuuauaucau

SEQ ID NO: 1869045 - RNA, 19 nt, Artificial Sequence
  Description of Artificial Sequence: Synthetic oligonucleotide
agcgagagggcuguuucca

SEQ ID NO: 1869046 - RNA, 19 nt, Artificial Sequence
  Description of Artificial Sequence: Synthetic oligonucleotide
aucggcugacucggugucc

SEQ ID NO: 1869047 - RNA, 19 nt, Artificial Sequence
  Description of Artificial Sequence: Synthetic oligonucleotide
uugcacagaggaucacuua

SEQ ID NO: 1869048 - RNA, 19 nt, Artificial Sequence
  Description of Artificial Sequence: Synthetic oligonucleotide
cugagcgcggcgugugcgg

SEQ ID NO: 1869049 - RNA, 19 nt, Artificial Sequence
  Description of Artificial Sequence: Synthetic oligonucleotide
agggguaaccaugggguga

SEQ ID NO: 1869050 - RNA, 19 nt, Artificial Sequence
  Description of Artificial Sequence: Synthetic oligonucleotide
cuggcaugauacgcuggcg

SEQ ID NO: 1869051 - RNA, 19 nt, Artificial Sequence
  Description of Artificial Sequence: Synthetic oligonucleotide
guaaacuggaggaaagcau

SEQ ID NO: 1869052 - RNA, 19 nt, Artificial Sequence
  Description of Artificial Sequence: Synthetic oligonucleotide
cagcgagagggcuguuucc

SEQ ID NO: 1869053 - RNA, 19 nt, Artificial Sequence
  Description of Artificial Sequence: Synthetic oligonucleotide
ggacuggcaugauacgcug

SEQ ID NO: 1869054 - RNA, 19 nt, Artificial Sequence
  Description of Artificial Sequence: Synthetic oligonucleotide
gauacgcuggcgacucuuc

SEQ ID NO: 1869055 - RNA, 19 nt, Artificial Sequence
  Description of Artificial Sequence: Synthetic oligonucleotide
ggaaccuaacuccacauuu

SEQ ID NO: 1869056 - RNA, 19 nt, Artificial Sequence
  Description of Artificial Sequence: Synthetic oligonucleotide
gcauuuaucuucccuguua

SEQ ID NO: 1869057 - RNA, 19 nt, Artificial Sequence
  Description of Artificial Sequence: Synthetic oligonucleotide
uucuagggccaguccuugu

SEQ ID NO: 1869058 - RNA, 19 nt, Artificial Sequence
  Description of Artificial Sequence: Synthetic oligonucleotide
uuccuacagggguaaccau

SEQ ID NO: 1869059 - RNA, 19 nt, Artificial Sequence
  Description of Artificial Sequence: Synthetic oligonucleotide
cuguuagucuacucgcucu

SEQ ID NO: 1869060 - RNA, 19 nt, Artificial Sequence
  Description of Artificial Sequence: Synthetic oligonucleotide
cuuuuggcgagcuccuugu

SEQ ID NO: 1869061 - RNA, 19 nt, Artificial Sequence
  Description of Artificial Sequence: Synthetic oligonucleotide
gggcuguuuccauccaacc

SEQ ID NO: 1869062 - RNA, 19 nt, Artificial Sequence
  Description of Artificial Sequence: Synthetic oligonucleotide
gaguggagccugacgcugc

SEQ ID NO: 1869063 - RNA, 19 nt, Artificial Sequence
  Description of Artificial Sequence: Synthetic oligonucleotide
agaucacuguacauuucaa

SEQ ID NO: 1869064 - RNA, 19 nt, Artificial Sequence
  Description of Artificial Sequence: Synthetic oligonucleotide
cacgcguccggcugaggac

SEQ ID NO: 1869065 - RNA, 19 nt, Artificial Sequence
  Description of Artificial Sequence: Synthetic oligonucleotide
uggucguuucccguugaau

SEQ ID NO: 1869066 - RNA, 19 nt, Artificial Sequence
  Description of Artificial Sequence: Synthetic oligonucleotide
gguuucacaguaaccucac

SEQ ID NO: 1869067 - RNA, 19 nt, Artificial Sequence
  Description of Artificial Sequence: Synthetic oligonucleotide
ggcggaguggagccugacg

SEQ ID NO: 1869068 - RNA, 19 nt, Artificial Sequence
  Description of Artificial Sequence: Synthetic oligonucleotide
ucgcucuaggaaggcaaga

SEQ ID NO: 1869069 - RNA, 19 nt, Artificial Sequence
  Description of Artificial Sequence: Synthetic oligonucleotide
cagccucucacaggaagug

SEQ ID NO: 1869070 - RNA, 19 nt, Artificial Sequence
  Description of Artificial Sequence: Synthetic oligonucleotide
gguuucauugucauaaauu

SEQ ID NO: 1869071 - RNA, 19 nt, Artificial Sequence
  Description of Artificial Sequence: Synthetic oligonucleotide
uggugcaaucugagaacuu

SEQ ID NO: 1869072 - RNA, 19 nt, Artificial Sequence
  Description of Artificial Sequence: Synthetic oligonucleotide
acguauaauucaggguaaa

SEQ ID NO: 1869073 - RNA, 19 nt, Artificial Sequence
  Description of Artificial Sequence: Synthetic oligonucleotide
uccaaccgcauugcacaga

SEQ ID NO: 1869074 - RNA, 19 nt, Artificial Sequence
  Description of Artificial Sequence: Synthetic oligonucleotide
caaccgcauugcacagagg

SEQ ID NO: 1869075 - RNA, 19 nt, Artificial Sequence
  Description of Artificial Sequence: Synthetic oligonucleotide
gggguaaccauggggugag

SEQ ID NO: 1869076 - RNA, 19 nt, Artificial Sequence
  Description of Artificial Sequence: Synthetic oligonucleotide
uugugccguggguuauucu

SEQ ID NO: 1869077 - RNA, 19 nt, Artificial Sequence
  Description of Artificial Sequence: Synthetic oligonucleotide
cuugugccguggguuauuc

SEQ ID NO: 1869078 - RNA, 19 nt, Artificial Sequence
  Description of Artificial Sequence: Synthetic oligonucleotide
cuacucgcucuaggaaggc

SEQ ID NO: 1869079 - RNA, 19 nt, Artificial Sequence
  Description of Artificial Sequence: Synthetic oligonucleotide
gucaauggucguuucccgu

SEQ ID NO: 1869080 - RNA, 19 nt, Artificial Sequence
  Description of Artificial Sequence: Synthetic oligonucleotide
ucggggucaauggucguuu

SEQ ID NO: 1869081 - RNA, 19 nt, Artificial Sequence
  Description of Artificial Sequence: Synthetic oligonucleotide
ccuguuagucuacucgcuc

SEQ ID NO: 1869082 - RNA, 19 nt, Artificial Sequence
  Description of Artificial Sequence: Synthetic oligonucleotide
caggguaaacuggaggaaa

SEQ ID NO: 1869083 - RNA, 19 nt, Artificial Sequence
  Description of Artificial Sequence: Synthetic oligonucleotide
ggucguuucccguugaauu

SEQ ID NO: 1869084 - RNA, 19 nt, Artificial Sequence
  Description of Artificial Sequence: Synthetic oligonucleotide
ccuuuuggcgagcuccuug

SEQ ID NO: 1869085 - RNA, 19 nt, Artificial Sequence
  Description of Artificial Sequence: Synthetic oligonucleotide
gcagcgagagggcuguuuc

SEQ ID NO: 1869086 - RNA, 19 nt, Artificial Sequence
  Description of Artificial Sequence: Synthetic oligonucleotide
auggaucagcaggucucag

SEQ ID NO: 1869087 - RNA, 19 nt, Artificial Sequence
  Description of Artificial Sequence: Synthetic oligonucleotide
cauggaucagcaggucuca

SEQ ID NO: 1869088 - RNA, 19 nt, Artificial Sequence
  Description of Artificial Sequence: Synthetic oligonucleotide
augagucucuugguuuuau

SEQ ID NO: 1869089 - RNA, 19 nt, Artificial Sequence
  Description of Artificial Sequence: Synthetic oligonucleotide
gucguuucccguugaauuu

SEQ ID NO: 1869090 - RNA, 19 nt, Artificial Sequence
  Description of Artificial Sequence: Synthetic oligonucleotide
gaccuagugcucacucaca

SEQ ID NO: 1869091 - RNA, 19 nt, Artificial Sequence
  Description of Artificial Sequence: Synthetic oligonucleotide
cuacggcagcacacaugag

SEQ ID NO: 1869092 - RNA, 19 nt, Artificial Sequence
  Description of Artificial Sequence: Synthetic oligonucleotide
ccgcauugcacagaggauc

SEQ ID NO: 1869093 - RNA, 19 nt, Artificial Sequence
  Description of Artificial Sequence: Synthetic oligonucleotide
gaggcgacacccauuuccu

SEQ ID NO: 1869094 - RNA, 19 nt, Artificial Sequence
  Description of Artificial Sequence: Synthetic oligonucleotide
uucuugugccguggguuau

SEQ ID NO: 1869095 - RNA, 19 nt, Artificial Sequence
  Description of Artificial Sequence: Synthetic oligonucleotide
agccucucacaggaagugu

SEQ ID NO: 1869096 - RNA, 19 nt, Artificial Sequence
  Description of Artificial Sequence: Synthetic oligonucleotide
gacgggaagcuggccugag

SEQ ID NO: 1869097 - RNA, 19 nt, Artificial Sequence
  Description of Artificial Sequence: Synthetic oligonucleotide
auguaccuucguguuuaca

SEQ ID NO: 1869098 - RNA, 19 nt, Artificial Sequence
  Description of Artificial Sequence: Synthetic oligonucleotide
aggccuacggcagcacaca

SEQ ID NO: 1869099 - RNA, 19 nt, Artificial Sequence
  Description of Artificial Sequence: Synthetic oligonucleotide
gucugaacaagaagaccua

SEQ ID NO: 1869100 - RNA, 19 nt, Artificial Sequence
  Description of Artificial Sequence: Synthetic oligonucleotide
ggccuuguuagauggagau

SEQ ID NO: 1869101 - RNA, 19 nt, Artificial Sequence
  Description of Artificial Sequence: Synthetic oligonucleotide
augauacgcuggcgacucu

SEQ ID NO: 1869102 - RNA, 19 nt, Artificial Sequence
  Description of Artificial Sequence: Synthetic oligonucleotide
ggaggaaagcauuuaucuu

SEQ ID NO: 1869103 - RNA, 19 nt, Artificial Sequence
  Description of Artificial Sequence: Synthetic oligonucleotide
cacaggaagugucuggguu

SEQ ID NO: 1869104 - RNA, 19 nt, Artificial Sequence
  Description of Artificial Sequence: Synthetic oligonucleotide
cuggccugagcgcggcgug

SEQ ID NO: 1869105 - RNA, 19 nt, Artificial Sequence
  Description of Artificial Sequence: Synthetic oligonucleotide
cauuuccuacagggguaac

SEQ ID NO: 1869106 - RNA, 19 nt, Artificial Sequence
  Description of Artificial Sequence: Synthetic oligonucleotide
cuggugcaaucugagaacu

SEQ ID NO: 1869107 - RNA, 19 nt, Artificial Sequence
  Description of Artificial Sequence: Synthetic oligonucleotide
ugagcgcggcgugugcggu

SEQ ID NO: 1869108 - RNA, 19 nt, Artificial Sequence
  Description of Artificial Sequence: Synthetic oligonucleotide
accgcauugcacagaggau

SEQ ID NO: 1869109 - RNA, 19 nt, Artificial Sequence
  Description of Artificial Sequence: Synthetic oligonucleotide
ucuugugccguggguuauu

SEQ ID NO: 1869110 - RNA, 19 nt, Artificial Sequence
  Description of Artificial Sequence: Synthetic oligonucleotide
agcuggccugagcgcggcg

SEQ ID NO: 1869111 - RNA, 19 nt, Artificial Sequence
  Description of Artificial Sequence: Synthetic oligonucleotide
gagccugacgcugcaggaa

SEQ ID NO: 1869112 - RNA, 19 nt, Artificial Sequence
  Description of Artificial Sequence: Synthetic oligonucleotide
gcacgcguccggcugagga

SEQ ID NO: 1869113 - RNA, 19 nt, Artificial Sequence
  Description of Artificial Sequence: Synthetic oligonucleotide
ccggcugaggacgggaagc

SEQ ID NO: 1869114 - RNA, 19 nt, Artificial Sequence
  Description of Artificial Sequence: Synthetic oligonucleotide
uggcgagcuccuugucauc

SEQ ID NO: 1869115 - RNA, 19 nt, Artificial Sequence
  Description of Artificial Sequence: Synthetic oligonucleotide
ggagaucacuguacauuuc

SEQ ID NO: 1869116 - RNA, 19 nt, Artificial Sequence
  Description of Artificial Sequence: Synthetic oligonucleotide
aggcggaguggagccugac

SEQ ID NO: 1869117 - RNA, 19 nt, Artificial Sequence
  Description of Artificial Sequence: Synthetic oligonucleotide
gggacaccaguucuaggua

SEQ ID NO: 1869118 - RNA, 19 nt, Artificial Sequence
  Description of Artificial Sequence: Synthetic oligonucleotide
accuucguguuuacagauu

SEQ ID NO: 1869119 - RNA, 19 nt, Artificial Sequence
  Description of Artificial Sequence: Synthetic oligonucleotide
aggcgacacccauuuccua

SEQ ID NO: 1869120 - RNA, 19 nt, Artificial Sequence
  Description of Artificial Sequence: Synthetic oligonucleotide
ccugagcgcggcgugugcg

SEQ ID NO: 1869121 - RNA, 19 nt, Artificial Sequence
  Description of Artificial Sequence: Synthetic oligonucleotide
cuucaacgucauacacaaa

SEQ ID NO: 1869122 - RNA, 19 nt, Artificial Sequence
  Description of Artificial Sequence: Synthetic oligonucleotide
uccuuuuggcgagcuccuu

SEQ ID NO: 1869123 - RNA, 19 nt, Artificial Sequence
  Description of Artificial Sequence: Synthetic oligonucleotide
gcuggcgacucuuccccuc

SEQ ID NO: 1869124 - RNA, 19 nt, Artificial Sequence
  Description of Artificial Sequence: Synthetic oligonucleotide
agcccgcacgcguccggcu

SEQ ID NO: 1869125 - RNA, 19 nt, Artificial Sequence
  Description of Artificial Sequence: Synthetic oligonucleotide
cugacucggugucccagcu

SEQ ID NO: 1869126 - RNA, 19 nt, Artificial Sequence
  Description of Artificial Sequence: Synthetic oligonucleotide
gccuuguuagauggagauc

SEQ ID NO: 1869127 - RNA, 19 nt, Artificial Sequence
  Description of Artificial Sequence: Synthetic oligonucleotide
ggaucacuuauaucaucuu

SEQ ID NO: 1869128 - RNA, 19 nt, Artificial Sequence
  Description of Artificial Sequence: Synthetic oligonucleotide
ccuucguguuuacagauuu

SEQ ID NO: 1869129 - RNA, 19 nt, Artificial Sequence
  Description of Artificial Sequence: Synthetic oligonucleotide
cagcccgcacgcguccggc

SEQ ID NO: 1869130 - RNA, 19 nt, Artificial Sequence
  Description of Artificial Sequence: Synthetic oligonucleotide
cacgguggccuuguuagau

SEQ ID NO: 1869131 - RNA, 19 nt, Artificial Sequence
  Description of Artificial Sequence: Synthetic oligonucleotide
gaggcggaguggagccuga

SEQ ID NO: 1869132 - RNA, 19 nt, Artificial Sequence
  Description of Artificial Sequence: Synthetic oligonucleotide
caguaaccucacaggccua

SEQ ID NO: 1869133 - RNA, 19 nt, Artificial Sequence
  Description of Artificial Sequence: Synthetic oligonucleotide
acucaucggcugacucggu

SEQ ID NO: 1869134 - RNA, 19 nt, Artificial Sequence
  Description of Artificial Sequence: Synthetic oligonucleotide
gguaaccauggggugaguu

SEQ ID NO: 1869135 - RNA, 19 nt, Artificial Sequence
  Description of Artificial Sequence: Synthetic oligonucleotide
gcaugauacgcuggcgacu

SEQ ID NO: 1869136 - RNA, 19 nt, Artificial Sequence
  Description of Artificial Sequence: Synthetic oligonucleotide
ugcgcacgguggccuuguu

SEQ ID NO: 1869137 - RNA, 19 nt, Artificial Sequence
  Description of Artificial Sequence: Synthetic oligonucleotide
gcacgguggccuuguuaga

SEQ ID NO: 1869138 - RNA, 19 nt, Artificial Sequence
  Description of Artificial Sequence: Synthetic oligonucleotide
gcucugccccugcaaguaa

SEQ ID NO: 1869139 - RNA, 19 nt, Artificial Sequence
  Description of Artificial Sequence: Synthetic oligonucleotide
gccguggguuauucuuuaa

SEQ ID NO: 1869140 - RNA, 19 nt, Artificial Sequence
  Description of Artificial Sequence: Synthetic oligonucleotide
ccccucgguuucauuguca

SEQ ID NO: 1869141 - RNA, 19 nt, Artificial Sequence
  Description of Artificial Sequence: Synthetic oligonucleotide
ccuucguuucugccaagcu

SEQ ID NO: 1869142 - RNA, 19 nt, Artificial Sequence
  Description of Artificial Sequence: Synthetic oligonucleotide
ccuagugcucacucacagu

SEQ ID NO: 1869143 - RNA, 19 nt, Artificial Sequence
  Description of Artificial Sequence: Synthetic oligonucleotide
ggacgggaagcuggccuga

SEQ ID NO: 1869144 - RNA, 19 nt, Artificial Sequence
  Description of Artificial Sequence: Synthetic oligonucleotide
cccuguuagucuacucgcu

SEQ ID NO: 1869145 - RNA, 19 nt, Artificial Sequence
  Description of Artificial Sequence: Synthetic oligonucleotide
ccguggguuauucuuuaau

SEQ ID NO: 1869146 - RNA, 19 nt, Artificial Sequence
  Description of Artificial Sequence: Synthetic oligonucleotide
gccugacgcugcaggaaga

SEQ ID NO: 1869147 - RNA, 19 nt, Artificial Sequence
  Description of Artificial Sequence: Synthetic oligonucleotide
cccucgguuucauugucau

SEQ ID NO: 1869148 - RNA, 19 nt, Artificial Sequence
  Description of Artificial Sequence: Synthetic oligonucleotide
cgcguccggcugaggacgg

SEQ ID NO: 1869149 - RNA, 19 nt, Artificial Sequence
  Description of Artificial Sequence: Synthetic oligonucleotide
gcgagcuccuugucaucua

SEQ ID NO: 1869150 - RNA, 19 nt, Artificial Sequence
  Description of Artificial Sequence: Synthetic oligonucleotide
gcgacucuuccccucgguu

SEQ ID NO: 1869151 - RNA, 19 nt, Artificial Sequence
  Description of Artificial Sequence: Synthetic oligonucleotide
ccucgguuucauugucaua

SEQ ID NO: 1869152 - RNA, 19 nt, Artificial Sequence
  Description of Artificial Sequence: Synthetic oligonucleotide
gcguccggcugaggacggg

SEQ ID NO: 1869153 - RNA, 19 nt, Artificial Sequence
  Description of Artificial Sequence: Synthetic oligonucleotide
cccagcccgcacgcguccg

SEQ ID NO: 1869154 - RNA, 19 nt, Artificial Sequence
  Description of Artificial Sequence: Synthetic oligonucleotide
cagcacacaugagucucuu

SEQ ID NO: 1869155 - RNA, 19 nt, Artificial Sequence
  Description of Artificial Sequence: Synthetic oligonucleotide
gcgagagggcuguuuccau

SEQ ID NO: 1869156 - RNA, 19 nt, Artificial Sequence
  Description of Artificial Sequence: Synthetic oligonucleotide
cggggucaauggucguuuc

SEQ ID NO: 1869157 - RNA, 19 nt, Artificial Sequence
  Description of Artificial Sequence: Synthetic oligonucleotide
ggccuacggcagcacacau

SEQ ID NO: 1869158 - RNA, 19 nt, Artificial Sequence
  Description of Artificial Sequence: Synthetic oligonucleotide
cgguuucauugucauaaau

SEQ ID NO: 1869159 - RNA, 19 nt, Artificial Sequence
  Description of Artificial Sequence: Synthetic oligonucleotide
cguuucccguugaauuugu

SEQ ID NO: 1869160 - RNA, 19 nt, Artificial Sequence
  Description of Artificial Sequence: Synthetic oligonucleotide
cccugcaaguaaccucgua

SEQ ID NO: 1869161 - RNA, 19 nt, Artificial Sequence
  Description of Artificial Sequence: Synthetic oligonucleotide
cgacucuuccccucgguuu

SEQ ID NO: 1869162 - RNA, 19 nt, Artificial Sequence
  Description of Artificial Sequence: Synthetic oligonucleotide
cugcgcacgguggccuugu

SEQ ID NO: 1869163 - RNA, 19 nt, Artificial Sequence
  Description of Artificial Sequence: Synthetic oligonucleotide
gcggcgugugcgguccuaa

SEQ ID NO: 1869164 - RNA, 19 nt, Artificial Sequence
  Description of Artificial Sequence: Synthetic oligonucleotide
ccgcacgcguccggcugag

SEQ ID NO: 1869165 - RNA, 19 nt, Artificial Sequence
  Description of Artificial Sequence: Synthetic oligonucleotide
ggguaaccauggggugagu

SEQ ID NO: 1869166 - RNA, 19 nt, Artificial Sequence
  Description of Artificial Sequence: Synthetic oligonucleotide
cgcacgcguccggcugagg

SEQ ID NO: 1869167 - RNA, 19 nt, Artificial Sequence
  Description of Artificial Sequence: Synthetic oligonucleotide
ccccugcaaguaaccucgu

SEQ ID NO: 1869168 - RNA, 19 nt, Artificial Sequence
  Description of Artificial Sequence: Synthetic oligonucleotide
cagcagcgagagggcuguu

SEQ ID NO: 1869169 - RNA, 19 nt, Artificial Sequence
  Description of Artificial Sequence: Synthetic oligonucleotide
cgcggcgugugcgguccua

SEQ ID NO: 1869170 - RNA, 19 nt, Artificial Sequence
  Description of Artificial Sequence: Synthetic oligonucleotide
aauaauaauggucuggaac

SEQ ID NO: 1869171 - RNA, 19 nt, Artificial Sequence
  Description of Artificial Sequence: Synthetic oligonucleotide
aauaaugagagccauagca

SEQ ID NO: 1869172 - RNA, 19 nt, Artificial Sequence
  Description of Artificial Sequence: Synthetic oligonucleotide
aaggauaucauagggaccc

SEQ ID NO: 1869173 - RNA, 19 nt, Artificial Sequence
  Description of Artificial Sequence: Synthetic oligonucleotide
uuuauuaucuccaauaaua

SEQ ID NO: 1869174 - RNA, 19 nt, Artificial Sequence
  Description of Artificial Sequence: Synthetic oligonucleotide
ugugaaaauaaugagagcc

SEQ ID NO: 1869175 - RNA, 19 nt, Artificial Sequence
  Description of Artificial Sequence: Synthetic oligonucleotide
uuaucuccaauaauaaugg

SEQ ID NO: 1869176 - RNA, 19 nt, Artificial Sequence
  Description of Artificial Sequence: Synthetic oligonucleotide
aaaauacuaguuuucuuuc

SEQ ID NO: 1869177 - RNA, 19 nt, Artificial Sequence
  Description of Artificial Sequence: Synthetic oligonucleotide
gaagauuacaguucaagcc

SEQ ID NO: 1869178 - RNA, 19 nt, Artificial Sequence
  Description of Artificial Sequence: Synthetic oligonucleotide
auacgcaagagguaaaagc

SEQ ID NO: 1869179 - RNA, 19 nt, Artificial Sequence
  Description of Artificial Sequence: Synthetic oligonucleotide
agugauagaaaucuucagg

SEQ ID NO: 1869180 - RNA, 19 nt, Artificial Sequence
  Description of Artificial Sequence: Synthetic oligonucleotide
auaauaauggucuggaacu

SEQ ID NO: 1869181 - RNA, 19 nt, Artificial Sequence
  Description of Artificial Sequence: Synthetic oligonucleotide
aagauuacaguucaagccu

SEQ ID NO: 1869182 - RNA, 19 nt, Artificial Sequence
  Description of Artificial Sequence: Synthetic oligonucleotide
uuuaucuacaggaacgacc

SEQ ID NO: 1869183 - RNA, 19 nt, Artificial Sequence
  Description of Artificial Sequence: Synthetic oligonucleotide
aaugcuuuuagucucuccu

SEQ ID NO: 1869184 - RNA, 19 nt, Artificial Sequence
  Description of Artificial Sequence: Synthetic oligonucleotide
aaacagaucccucuucaac

SEQ ID NO: 1869185 - RNA, 19 nt, Artificial Sequence
  Description of Artificial Sequence: Synthetic oligonucleotide
uuuucuuucuaucuguuac

SEQ ID NO: 1869186 - RNA, 19 nt, Artificial Sequence
  Description of Artificial Sequence: Synthetic oligonucleotide
cauaguaaaaccuccagug

SEQ ID NO: 1869187 - RNA, 19 nt, Artificial Sequence
  Description of Artificial Sequence: Synthetic oligonucleotide
uuuugaauaauuauacaau

SEQ ID NO: 1869188 - RNA, 19 nt, Artificial Sequence
  Description of Artificial Sequence: Synthetic oligonucleotide
uuaucuacaggaacgacca

SEQ ID NO: 1869189 - RNA, 19 nt, Artificial Sequence
  Description of Artificial Sequence: Synthetic oligonucleotide
uggucuggaacucaggagg

SEQ ID NO: 1869190 - RNA, 19 nt, Artificial Sequence
  Description of Artificial Sequence: Synthetic oligonucleotide
aaaagccccacucugacca

SEQ ID NO: 1869191 - RNA, 19 nt, Artificial Sequence
  Description of Artificial Sequence: Synthetic oligonucleotide
auuaucuccaauaauaaug

SEQ ID NO: 1869192 - RNA, 19 nt, Artificial Sequence
  Description of Artificial Sequence: Synthetic oligonucleotide
aaauaaugagagccauagc

SEQ ID NO: 1869193 - RNA, 19 nt, Artificial Sequence
  Description of Artificial Sequence: Synthetic oligonucleotide
ucuauagccaacaucauuu

SEQ ID NO: 1869194 - RNA, 19 nt, Artificial Sequence
  Description of Artificial Sequence: Synthetic oligonucleotide
uucgacuucuuuucgaagg

SEQ ID NO: 1869195 - RNA, 19 nt, Artificial Sequence
  Description of Artificial Sequence: Synthetic oligonucleotide
caaaacacugcacugacag

SEQ ID NO: 1869196 - RNA, 19 nt, Artificial Sequence
  Description of Artificial Sequence: Synthetic oligonucleotide
ugaagauuacaguucaagc

SEQ ID NO: 1869197 - RNA, 19 nt, Artificial Sequence
  Description of Artificial Sequence: Synthetic oligonucleotide
aguauccuaguuuucuggc

SEQ ID NO: 1869198 - RNA, 19 nt, Artificial Sequence
  Description of Artificial Sequence: Synthetic oligonucleotide
uuuuaauaaauguguuucc

SEQ ID NO: 1869199 - RNA, 19 nt, Artificial Sequence
  Description of Artificial Sequence: Synthetic oligonucleotide
uucauuuuauguuucccag

SEQ ID NO: 1869200 - RNA, 19 nt, Artificial Sequence
  Description of Artificial Sequence: Synthetic oligonucleotide
aagcuuauaaaggucuucg

SEQ ID NO: 1869201 - RNA, 19 nt, Artificial Sequence
  Description of Artificial Sequence: Synthetic oligonucleotide
aacagaucccucuucaaca

SEQ ID NO: 1869202 - RNA, 19 nt, Artificial Sequence
  Description of Artificial Sequence: Synthetic oligonucleotide
uccauuuugaauaauuaua

SEQ ID NO: 1869203 - RNA, 19 nt, Artificial Sequence
  Description of Artificial Sequence: Synthetic oligonucleotide
caagccugcaccaugaaag

SEQ ID NO: 1869204 - RNA, 19 nt, Artificial Sequence
  Description of Artificial Sequence: Synthetic oligonucleotide
auugucuccauuuugaaua

SEQ ID NO: 1869205 - RNA, 19 nt, Artificial Sequence
  Description of Artificial Sequence: Synthetic oligonucleotide
aacucacucauccugcaag

SEQ ID NO: 1869206 - RNA, 19 nt, Artificial Sequence
  Description of Artificial Sequence: Synthetic oligonucleotide
aucauuagcaaacugcaca

SEQ ID NO: 1869207 - RNA, 19 nt, Artificial Sequence
  Description of Artificial Sequence: Synthetic oligonucleotide
aucauagggacccacuaac

SEQ ID NO: 1869208 - RNA, 19 nt, Artificial Sequence
  Description of Artificial Sequence: Synthetic oligonucleotide
uuugaauaauuauacaauu

SEQ ID NO: 1869209 - RNA, 19 nt, Artificial Sequence
  Description of Artificial Sequence: Synthetic oligonucleotide
acuuugugaaaauaaugag

SEQ ID NO: 1869210 - RNA, 19 nt, Artificial Sequence
  Description of Artificial Sequence: Synthetic oligonucleotide
aggaucaaggucuucacag

SEQ ID NO: 1869211 - RNA, 19 nt, Artificial Sequence
  Description of Artificial Sequence: Synthetic oligonucleotide
uuacaguucaagccugugg

SEQ ID NO: 1869212 - RNA, 19 nt, Artificial Sequence
  Description of Artificial Sequence: Synthetic oligonucleotide
uacaguucaagccugugga

SEQ ID NO: 1869213 - RNA, 19 nt, Artificial Sequence
  Description of Artificial Sequence: Synthetic oligonucleotide
ucauccugcaagcugaucu

SEQ ID NO: 1869214 - RNA, 19 nt, Artificial Sequence
  Description of Artificial Sequence: Synthetic oligonucleotide
uauacuggaaguucaucag

SEQ ID NO: 1869215 - RNA, 19 nt, Artificial Sequence
  Description of Artificial Sequence: Synthetic oligonucleotide
uuuaauaaauguguuucca

SEQ ID NO: 1869216 - RNA, 19 nt, Artificial Sequence
  Description of Artificial Sequence: Synthetic oligonucleotide
aucacauucaucauuagca

SEQ ID NO: 1869217 - RNA, 19 nt, Artificial Sequence
  Description of Artificial Sequence: Synthetic oligonucleotide
acuaaccgaaguccaaggc

SEQ ID NO: 1869218 - RNA, 19 nt, Artificial Sequence
  Description of Artificial Sequence: Synthetic oligonucleotide
uguuacuucuuuaaguuuu

SEQ ID NO: 1869219 - RNA, 19 nt, Artificial Sequence
  Description of Artificial Sequence: Synthetic oligonucleotide
gucaucauuuccugaaugg

SEQ ID NO: 1869220 - RNA, 19 nt, Artificial Sequence
  Description of Artificial Sequence: Synthetic oligonucleotide
agagguaaaagcuggccag

SEQ ID NO: 1869221 - RNA, 19 nt, Artificial Sequence
  Description of Artificial Sequence: Synthetic oligonucleotide
uccaauaauaauggucugg

SEQ ID NO: 1869222 - RNA, 19 nt, Artificial Sequence
  Description of Artificial Sequence: Synthetic oligonucleotide
gaguauccuaguuuucugg

SEQ ID NO: 1869223 - RNA, 19 nt, Artificial Sequence
  Description of Artificial Sequence: Synthetic oligonucleotide
ucuguuacuucuuuaaguu

SEQ ID NO: 1869224 - RNA, 19 nt, Artificial Sequence
  Description of Artificial Sequence: Synthetic oligonucleotide
cuuugugaaaauaaugaga

SEQ ID NO: 1869225 - RNA, 19 nt, Artificial Sequence
  Description of Artificial Sequence: Synthetic oligonucleotide
uauccuaguuuucuggcug

SEQ ID NO: 1869226 - RNA, 19 nt, Artificial Sequence
  Description of Artificial Sequence: Synthetic oligonucleotide
caugaaaggucuuugucac

SEQ ID NO: 1869227 - RNA, 19 nt, Artificial Sequence
  Description of Artificial Sequence: Synthetic oligonucleotide
cauuccuaauucaagcccc

SEQ ID NO: 1869228 - RNA, 19 nt, Artificial Sequence
  Description of Artificial Sequence: Synthetic oligonucleotide
ugaucuauguucucuguac

SEQ ID NO: 1869229 - RNA, 19 nt, Artificial Sequence
  Description of Artificial Sequence: Synthetic oligonucleotide
aaagcuuauaaaggucuuc

SEQ ID NO: 1869230 - RNA, 19 nt, Artificial Sequence
  Description of Artificial Sequence: Synthetic oligonucleotide
aauacuaguuuucuuucua

SEQ ID NO: 1869231 - RNA, 19 nt, Artificial Sequence
  Description of Artificial Sequence: Synthetic oligonucleotide
uccacaauugccuugcaaa

SEQ ID NO: 1869232 - RNA, 19 nt, Artificial Sequence
  Description of Artificial Sequence: Synthetic oligonucleotide
uaucuguuacuucuuuaag

SEQ ID NO: 1869233 - RNA, 19 nt, Artificial Sequence
  Description of Artificial Sequence: Synthetic oligonucleotide
uugaauaauuauacaauuu

SEQ ID NO: 1869234 - RNA, 19 nt, Artificial Sequence
  Description of Artificial Sequence: Synthetic oligonucleotide
aacagauuauacgcaagag

SEQ ID NO: 1869235 - RNA, 19 nt, Artificial Sequence
  Description of Artificial Sequence: Synthetic oligonucleotide
agaagugauagaaaucuuc

SEQ ID NO: 1869236 - RNA, 19 nt, Artificial Sequence
  Description of Artificial Sequence: Synthetic oligonucleotide
uuauaaaggucuucgacuu

SEQ ID NO: 1869237 - RNA, 19 nt, Artificial Sequence
  Description of Artificial Sequence: Synthetic oligonucleotide
ucaucauuuccugaauggg

SEQ ID NO: 1869238 - RNA, 19 nt, Artificial Sequence
  Description of Artificial Sequence: Synthetic oligonucleotide
uacaggaacgaccaagccu

SEQ ID NO: 1869239 - RNA, 19 nt, Artificial Sequence
  Description of Artificial Sequence: Synthetic oligonucleotide
caacuuugugaaaauaaug

SEQ ID NO: 1869240 - RNA, 19 nt, Artificial Sequence
  Description of Artificial Sequence: Synthetic oligonucleotide
ggagacaucggcuucacag

SEQ ID NO: 1869241 - RNA, 19 nt, Artificial Sequence
  Description of Artificial Sequence: Synthetic oligonucleotide
aauucuucugaggucagca

SEQ ID NO: 1869242 - RNA, 19 nt, Artificial Sequence
  Description of Artificial Sequence: Synthetic oligonucleotide
ucaacagauuauacgcaag

SEQ ID NO: 1869243 - RNA, 19 nt, Artificial Sequence
  Description of Artificial Sequence: Synthetic oligonucleotide
gacuucuuuucgaaggucg

SEQ ID NO: 1869244 - RNA, 19 nt, Artificial Sequence
  Description of Artificial Sequence: Synthetic oligonucleotide
aggucuucgacuucuuuuc

SEQ ID NO: 1869245 - RNA, 19 nt, Artificial Sequence
  Description of Artificial Sequence: Synthetic oligonucleotide
aucuccaauaauaaugguc

SEQ ID NO: 1869246 - RNA, 19 nt, Artificial Sequence
  Description of Artificial Sequence: Synthetic oligonucleotide
aucuguuacuucuuuaagu

SEQ ID NO: 1869247 - RNA, 19 nt, Artificial Sequence
  Description of Artificial Sequence: Synthetic oligonucleotide
accaacauauacuggaagu

SEQ ID NO: 1869248 - RNA, 19 nt, Artificial Sequence
  Description of Artificial Sequence: Synthetic oligonucleotide
aggagggucauaguaaaac

SEQ ID NO: 1869249 - RNA, 19 nt, Artificial Sequence
  Description of Artificial Sequence: Synthetic oligonucleotide
aggauuuacuuuucuucac

SEQ ID NO: 1869250 - RNA, 19 nt, Artificial Sequence
  Description of Artificial Sequence: Synthetic oligonucleotide
auuuguaccaacauauacu

SEQ ID NO: 1869251 - RNA, 19 nt, Artificial Sequence
  Description of Artificial Sequence: Synthetic oligonucleotide
cauagggacccacuaaccg

SEQ ID NO: 1869252 - RNA, 19 nt, Artificial Sequence
  Description of Artificial Sequence: Synthetic oligonucleotide
aauguguuuccauuauuua

SEQ ID NO: 1869253 - RNA, 19 nt, Artificial Sequence
  Description of Artificial Sequence: Synthetic oligonucleotide
ugauagaaaucuucaggca

SEQ ID NO: 1869254 - RNA, 19 nt, Artificial Sequence
  Description of Artificial Sequence: Synthetic oligonucleotide
aaggucgcuggagacaucg

SEQ ID NO: 1869255 - RNA, 19 nt, Artificial Sequence
  Description of Artificial Sequence: Synthetic oligonucleotide
auagaaaucuucaggcagg

SEQ ID NO: 1869256 - RNA, 19 nt, Artificial Sequence
  Description of Artificial Sequence: Synthetic oligonucleotide
aacauauacuggaaguuca

SEQ ID NO: 1869257 - RNA, 19 nt, Artificial Sequence
  Description of Artificial Sequence: Synthetic oligonucleotide
ucauuuuauguuucccagc

SEQ ID NO: 1869258 - RNA, 19 nt, Artificial Sequence
  Description of Artificial Sequence: Synthetic oligonucleotide
ucauuagcaaacugcacaa

SEQ ID NO: 1869259 - RNA, 19 nt, Artificial Sequence
  Description of Artificial Sequence: Synthetic oligonucleotide
uaccaacauauacuggaag

SEQ ID NO: 1869260 - RNA, 19 nt, Artificial Sequence
  Description of Artificial Sequence: Synthetic oligonucleotide
aaaaccuccagugaagauu

SEQ ID NO: 1869261 - RNA, 19 nt, Artificial Sequence
  Description of Artificial Sequence: Synthetic oligonucleotide
ugcaagcugaucuauguuc

SEQ ID NO: 1869262 - RNA, 19 nt, Artificial Sequence
  Description of Artificial Sequence: Synthetic oligonucleotide
ugcuuuuagucucuccuca

SEQ ID NO: 1869263 - RNA, 19 nt, Artificial Sequence
  Description of Artificial Sequence: Synthetic oligonucleotide
gauuauacgcaagagguaa

SEQ ID NO: 1869264 - RNA, 19 nt, Artificial Sequence
  Description of Artificial Sequence: Synthetic oligonucleotide
uucaacagauuauacgcaa

SEQ ID NO: 1869265 - RNA, 19 nt, Artificial Sequence
  Description of Artificial Sequence: Synthetic oligonucleotide
aaauguguuuccauuauuu

SEQ ID NO: 1869266 - RNA, 19 nt, Artificial Sequence
  Description of Artificial Sequence: Synthetic oligonucleotide
uaaaagcuggccagcaacu

SEQ ID NO: 1869267 - RNA, 19 nt, Artificial Sequence
  Description of Artificial Sequence: Synthetic oligonucleotide
acaggaacgaccaagccug

SEQ ID NO: 1869268 - RNA, 19 nt, Artificial Sequence
  Description of Artificial Sequence: Synthetic oligonucleotide
guccauuccuaauucaagc

SEQ ID NO: 1869269 - RNA, 19 nt, Artificial Sequence
  Description of Artificial Sequence: Synthetic oligonucleotide
uauuaucuccaauaauaau

SEQ ID NO: 1869270 - RNA, 19 nt, Artificial Sequence
  Description of Artificial Sequence: Synthetic oligonucleotide
aaguccaaggcuuguggca

SEQ ID NO: 1869271 - RNA, 19 nt, Artificial Sequence
  Description of Artificial Sequence: Synthetic oligonucleotide
aacuugauggcagcaaaca

SEQ ID NO: 1869272 - RNA, 19 nt, Artificial Sequence
  Description of Artificial Sequence: Synthetic oligonucleotide
cagauuauacgcaagaggu

SEQ ID NO: 1869273 - RNA, 19 nt, Artificial Sequence
  Description of Artificial Sequence: Synthetic oligonucleotide
uauguuucccagcaaggau

SEQ ID NO: 1869274 - RNA, 19 nt, Artificial Sequence
  Description of Artificial Sequence: Synthetic oligonucleotide
ugcuucauuuguaccaaca

SEQ ID NO: 1869275 - RNA, 19 nt, Artificial Sequence
  Description of Artificial Sequence: Synthetic oligonucleotide
ccuaauucaagccccaugc

SEQ ID NO: 1869276 - RNA, 19 nt, Artificial Sequence
  Description of Artificial Sequence: Synthetic oligonucleotide
auaaauguguuuccauuau

SEQ ID NO: 1869277 - RNA, 19 nt, Artificial Sequence
  Description of Artificial Sequence: Synthetic oligonucleotide
agccccaugccauaaucac

SEQ ID NO: 1869278 - RNA, 19 nt, Artificial Sequence
  Description of Artificial Sequence: Synthetic oligonucleotide
aucauuuccugaaugggag

SEQ ID NO: 1869279 - RNA, 19 nt, Artificial Sequence
  Description of Artificial Sequence: Synthetic oligonucleotide
ucauagggacccacuaacc

SEQ ID NO: 1869280 - RNA, 19 nt, Artificial Sequence
  Description of Artificial Sequence: Synthetic oligonucleotide
gagaaucccugaaauaccc

SEQ ID NO: 1869281 - RNA, 19 nt, Artificial Sequence
  Description of Artificial Sequence: Synthetic oligonucleotide
ugacagagcaacucacuca

SEQ ID NO: 1869282 - RNA, 19 nt, Artificial Sequence
  Description of Artificial Sequence: Synthetic oligonucleotide
aauaauggucuggaacuca

SEQ ID NO: 1869283 - RNA, 19 nt, Artificial Sequence
  Description of Artificial Sequence: Synthetic oligonucleotide
uccuaauucaagccccaug

SEQ ID NO: 1869284 - RNA, 19 nt, Artificial Sequence
  Description of Artificial Sequence: Synthetic oligonucleotide
uuucgaaggucgcuggaga

SEQ ID NO: 1869285 - RNA, 19 nt, Artificial Sequence
  Description of Artificial Sequence: Synthetic oligonucleotide
uuauguuucccagcaagga

SEQ ID NO: 1869286 - RNA, 19 nt, Artificial Sequence
  Description of Artificial Sequence: Synthetic oligonucleotide
aaugggagcaaaugcuuuu

SEQ ID NO: 1869287 - RNA, 19 nt, Artificial Sequence
  Description of Artificial Sequence: Synthetic oligonucleotide
aauaacuugauggcagcaa

SEQ ID NO: 1869288 - RNA, 19 nt, Artificial Sequence
  Description of Artificial Sequence: Synthetic oligonucleotide
cuuauaaaggucuucgacu

SEQ ID NO: 1869289 - RNA, 19 nt, Artificial Sequence
  Description of Artificial Sequence: Synthetic oligonucleotide
cuuucuaucuguuacuucu

SEQ ID NO: 1869290 - RNA, 19 nt, Artificial Sequence
  Description of Artificial Sequence: Synthetic oligonucleotide
gcaaggauaucauagggac

SEQ ID NO: 1869291 - RNA, 19 nt, Artificial Sequence
  Description of Artificial Sequence: Synthetic oligonucleotide
uaauggucuggaacucagg

SEQ ID NO: 1869292 - RNA, 19 nt, Artificial Sequence
  Description of Artificial Sequence: Synthetic oligonucleotide
caugccauaaucacauuca

SEQ ID NO: 1869293 - RNA, 19 nt, Artificial Sequence
  Description of Artificial Sequence: Synthetic oligonucleotide
ucuucaggcagggaaagcu

SEQ ID NO: 1869294 - RNA, 19 nt, Artificial Sequence
  Description of Artificial Sequence: Synthetic oligonucleotide
aaauaccccaugugguacu

SEQ ID NO: 1869295 - RNA, 19 nt, Artificial Sequence
  Description of Artificial Sequence: Synthetic oligonucleotide
cuucauuuuauguuuccca

SEQ ID NO: 1869296 - RNA, 19 nt, Artificial Sequence
  Description of Artificial Sequence: Synthetic oligonucleotide
uagaaaucuucaggcaggg

SEQ ID NO: 1869297 - RNA, 19 nt, Artificial Sequence
  Description of Artificial Sequence: Synthetic oligonucleotide
acagaucccucuucaacag

SEQ ID NO: 1869298 - RNA, 19 nt, Artificial Sequence
  Description of Artificial Sequence: Synthetic oligonucleotide
gagagccauagcaaaagag

SEQ ID NO: 1869299 - RNA, 19 nt, Artificial Sequence
  Description of Artificial Sequence: Synthetic oligonucleotide
caguccuacuucaaaacac

SEQ ID NO: 1869300 - RNA, 19 nt, Artificial Sequence
  Description of Artificial Sequence: Synthetic oligonucleotide
uauacgcaagagguaaaag

SEQ ID NO: 1869301 - RNA, 19 nt, Artificial Sequence
  Description of Artificial Sequence: Synthetic oligonucleotide
uaaccgaaguccaaggcuu

SEQ ID NO: 1869302 - RNA, 19 nt, Artificial Sequence
  Description of Artificial Sequence: Synthetic oligonucleotide
auaacuugauggcagcaaa

SEQ ID NO: 1869303 - RNA, 19 nt, Artificial Sequence
  Description of Artificial Sequence: Synthetic oligonucleotide
uaucauagggacccacuaa

SEQ ID NO: 1869304 - RNA, 19 nt, Artificial Sequence
  Description of Artificial Sequence: Synthetic oligonucleotide
aaagagguccauuccuaau

SEQ ID NO: 1869305 - RNA, 19 nt, Artificial Sequence
  Description of Artificial Sequence: Synthetic oligonucleotide
uuuucgaaggucgcuggag

SEQ ID NO: 1869306 - RNA, 19 nt, Artificial Sequence
  Description of Artificial Sequence: Synthetic oligonucleotide
aucuacaggaacgaccaag

SEQ ID NO: 1869307 - RNA, 19 nt, Artificial Sequence
  Description of Artificial Sequence: Synthetic oligonucleotide
uaacuugauggcagcaaac

SEQ ID NO: 1869308 - RNA, 19 nt, Artificial Sequence
  Description of Artificial Sequence: Synthetic oligonucleotide
auagggacccacuaaccga

SEQ ID NO: 1869309 - RNA, 19 nt, Artificial Sequence
  Description of Artificial Sequence: Synthetic oligonucleotide
ucuauguucucuguacuuc

SEQ ID NO: 1869310 - RNA, 19 nt, Artificial Sequence
  Description of Artificial Sequence: Synthetic oligonucleotide
uccagaagugauagaaauc

SEQ ID NO: 1869311 - RNA, 19 nt, Artificial Sequence
  Description of Artificial Sequence: Synthetic oligonucleotide
ugaguuuuauuaucuccaa

SEQ ID NO: 1869312 - RNA, 19 nt, Artificial Sequence
  Description of Artificial Sequence: Synthetic oligonucleotide
ucuucgacuucuuuucgaa

SEQ ID NO: 1869313 - RNA, 19 nt, Artificial Sequence
  Description of Artificial Sequence: Synthetic oligonucleotide
caaggauaucauagggacc

SEQ ID NO: 1869314 - RNA, 19 nt, Artificial Sequence
  Description of Artificial Sequence: Synthetic oligonucleotide
ucugaccaguccuacuuca

SEQ ID NO: 1869315 - RNA, 19 nt, Artificial Sequence
  Description of Artificial Sequence: Synthetic oligonucleotide
gaacgaccaagccugcacc

SEQ ID NO: 1869316 - RNA, 19 nt, Artificial Sequence
  Description of Artificial Sequence: Synthetic oligonucleotide
ugagagccauagcaaaaga

SEQ ID NO: 1869317 - RNA, 19 nt, Artificial Sequence
  Description of Artificial Sequence: Synthetic oligonucleotide
cacuaaccgaaguccaagg

SEQ ID NO: 1869318 - RNA, 19 nt, Artificial Sequence
  Description of Artificial Sequence: Synthetic oligonucleotide
cuaauucaagccccaugcc

SEQ ID NO: 1869319 - RNA, 19 nt, Artificial Sequence
  Description of Artificial Sequence: Synthetic oligonucleotide
auggucuggaacucaggag

SEQ ID NO: 1869320 - RNA, 19 nt, Artificial Sequence
  Description of Artificial Sequence: Synthetic oligonucleotide
uggccagcaacuuugugaa

SEQ ID NO: 1869321 - RNA, 19 nt, Artificial Sequence
  Description of Artificial Sequence: Synthetic oligonucleotide
uuuugcaaacagaucccuc

SEQ ID NO: 1869322 - RNA, 19 nt, Artificial Sequence
  Description of Artificial Sequence: Synthetic oligonucleotide
ugcaaauucuucugagguc

SEQ ID NO: 1869323 - RNA, 19 nt, Artificial Sequence
  Description of Artificial Sequence: Synthetic oligonucleotide
ucaggagggucauaguaaa

SEQ ID NO: 1869324 - RNA, 19 nt, Artificial Sequence
  Description of Artificial Sequence: Synthetic oligonucleotide
ucgacuucuuuucgaaggu

SEQ ID NO: 1869325 - RNA, 19 nt, Artificial Sequence
  Description of Artificial Sequence: Synthetic oligonucleotide
gaaauaccccaugugguac

SEQ ID NO: 1869326 - RNA, 19 nt, Artificial Sequence
  Description of Artificial Sequence: Synthetic oligonucleotide
caggauuuacuuuucuuca

SEQ ID NO: 1869327 - RNA, 19 nt, Artificial Sequence
  Description of Artificial Sequence: Synthetic oligonucleotide
ucauuuccugaaugggagc

SEQ ID NO: 1869328 - RNA, 19 nt, Artificial Sequence
  Description of Artificial Sequence: Synthetic oligonucleotide
augaaaggucuuugucacg

SEQ ID NO: 1869329 - RNA, 19 nt, Artificial Sequence
  Description of Artificial Sequence: Synthetic oligonucleotide
uuucaggaagcucucuaua

SEQ ID NO: 1869330 - RNA, 19 nt, Artificial Sequence
  Description of Artificial Sequence: Synthetic oligonucleotide
gacccacuaaccgaagucc

SEQ ID NO: 1869331 - RNA, 19 nt, Artificial Sequence
  Description of Artificial Sequence: Synthetic oligonucleotide
ucacuugcagccuccacaa

SEQ ID NO: 1869332 - RNA, 19 nt, Artificial Sequence
  Description of Artificial Sequence: Synthetic oligonucleotide
aacgaccaagccugcacca

SEQ ID NO: 1869333 - RNA, 19 nt, Artificial Sequence
  Description of Artificial Sequence: Synthetic oligonucleotide
uguuucccagcaaggauau

SEQ ID NO: 1869334 - RNA, 19 nt, Artificial Sequence
  Description of Artificial Sequence: Synthetic oligonucleotide
caagagguaaaagcuggcc

SEQ ID NO: 1869335 - RNA, 19 nt, Artificial Sequence
  Description of Artificial Sequence: Synthetic oligonucleotide
auacuaguuuucuuucuau

SEQ ID NO: 1869336 - RNA, 19 nt, Artificial Sequence
  Description of Artificial Sequence: Synthetic oligonucleotide
ucuaucuguuacuucuuua

SEQ ID NO: 1869337 - RNA, 19 nt, Artificial Sequence
  Description of Artificial Sequence: Synthetic oligonucleotide
aaaccuccagugaagauua

SEQ ID NO: 1869338 - RNA, 19 nt, Artificial Sequence
  Description of Artificial Sequence: Synthetic oligonucleotide
gguacugaguuuuauuauc

SEQ ID NO: 1869339 - RNA, 19 nt, Artificial Sequence
  Description of Artificial Sequence: Synthetic oligonucleotide
auaauggucuggaacucag

SEQ ID NO: 1869340 - RNA, 19 nt, Artificial Sequence
  Description of Artificial Sequence: Synthetic oligonucleotide
agaaucccugaaauacccc

SEQ ID NO: 1869341 - RNA, 19 nt, Artificial Sequence
  Description of Artificial Sequence: Synthetic oligonucleotide
uuugcuucauuuguaccaa

SEQ ID NO: 1869342 - RNA, 19 nt, Artificial Sequence
  Description of Artificial Sequence: Synthetic oligonucleotide
uuauacgcaagagguaaaa

SEQ ID NO: 1869343 - RNA, 19 nt, Artificial Sequence
  Description of Artificial Sequence: Synthetic oligonucleotide
ucauuuguaccaacauaua

SEQ ID NO: 1869344 - RNA, 19 nt, Artificial Sequence
  Description of Artificial Sequence: Synthetic oligonucleotide
augguucucuguuccagug

SEQ ID NO: 1869345 - RNA, 19 nt, Artificial Sequence
  Description of Artificial Sequence: Synthetic oligonucleotide
aguucaagccuguggauuu

SEQ ID NO: 1869346 - RNA, 19 nt, Artificial Sequence
  Description of Artificial Sequence: Synthetic oligonucleotide
ugguacugaguuuuauuau

SEQ ID NO: 1869347 - RNA, 19 nt, Artificial Sequence
  Description of Artificial Sequence: Synthetic oligonucleotide
gucacgaccuucuugucuc

SEQ ID NO: 1869348 - RNA, 19 nt, Artificial Sequence
  Description of Artificial Sequence: Synthetic oligonucleotide
gccauagcaaaagaggucc

SEQ ID NO: 1869349 - RNA, 19 nt, Artificial Sequence
  Description of Artificial Sequence: Synthetic oligonucleotide
uagggacccacuaaccgaa

SEQ ID NO: 1869350 - RNA, 19 nt, Artificial Sequence
  Description of Artificial Sequence: Synthetic oligonucleotide
cuggccagcaacuuuguga

SEQ ID NO: 1869351 - RNA, 19 nt, Artificial Sequence
  Description of Artificial Sequence: Synthetic oligonucleotide
uguggauuuugucuucauu

SEQ ID NO: 1869352 - RNA, 19 nt, Artificial Sequence
  Description of Artificial Sequence: Synthetic oligonucleotide
cuacuucaaaacacugcac

SEQ ID NO: 1869353 - RNA, 19 nt, Artificial Sequence
  Description of Artificial Sequence: Synthetic oligonucleotide
ucugucucaucuucauggu

SEQ ID NO: 1869354 - RNA, 19 nt, Artificial Sequence
  Description of Artificial Sequence: Synthetic oligonucleotide
ucccugaaauaccccaugu

SEQ ID NO: 1869355 - RNA, 19 nt, Artificial Sequence
  Description of Artificial Sequence: Synthetic oligonucleotide
uuuuaucuacaggaacgac

SEQ ID NO: 1869356 - RNA, 19 nt, Artificial Sequence
  Description of Artificial Sequence: Synthetic oligonucleotide
cugacagagcaacucacuc

SEQ ID NO: 1869357 - RNA, 19 nt, Artificial Sequence
  Description of Artificial Sequence: Synthetic oligonucleotide
caacagauuauacgcaaga

SEQ ID NO: 1869358 - RNA, 19 nt, Artificial Sequence
  Description of Artificial Sequence: Synthetic oligonucleotide
ucacaggauuuacuuuucu

SEQ ID NO: 1869359 - RNA, 19 nt, Artificial Sequence
  Description of Artificial Sequence: Synthetic oligonucleotide
gugaaaauaaugagagcca

SEQ ID NO: 1869360 - RNA, 19 nt, Artificial Sequence
  Description of Artificial Sequence: Synthetic oligonucleotide
ccuccagugaagauuacag

SEQ ID NO: 1869361 - RNA, 19 nt, Artificial Sequence
  Description of Artificial Sequence: Synthetic oligonucleotide
uacugaguuuuauuaucuc

SEQ ID NO: 1869362 - RNA, 19 nt, Artificial Sequence
  Description of Artificial Sequence: Synthetic oligonucleotide
agcuuauaaaggucuucga

SEQ ID NO: 1869363 - RNA, 19 nt, Artificial Sequence
  Description of Artificial Sequence: Synthetic oligonucleotide
ucuguacuucugcuugcca

SEQ ID NO: 1869364 - RNA, 19 nt, Artificial Sequence
  Description of Artificial Sequence: Synthetic oligonucleotide
uaauaauggucuggaacuc

SEQ ID NO: 1869365 - RNA, 19 nt, Artificial Sequence
  Description of Artificial Sequence: Synthetic oligonucleotide
cuucgacuucuuuucgaag

SEQ ID NO: 1869366 - RNA, 19 nt, Artificial Sequence
  Description of Artificial Sequence: Synthetic oligonucleotide
ugaccaguccuacuucaaa

SEQ ID NO: 1869367 - RNA, 19 nt, Artificial Sequence
  Description of Artificial Sequence: Synthetic oligonucleotide
uguuccagugaguauccua

SEQ ID NO: 1869368 - RNA, 19 nt, Artificial Sequence
  Description of Artificial Sequence: Synthetic oligonucleotide
ucucuguacuucugcuugc

SEQ ID NO: 1869369 - RNA, 19 nt, Artificial Sequence
  Description of Artificial Sequence: Synthetic oligonucleotide
acacugcacugacagagca

SEQ ID NO: 1869370 - RNA, 19 nt, Artificial Sequence
  Description of Artificial Sequence: Synthetic oligonucleotide
uucgaaggucgcuggagac

SEQ ID NO: 1869371 - RNA, 19 nt, Artificial Sequence
  Description of Artificial Sequence: Synthetic oligonucleotide
aucaggagaaucccugaaa

SEQ ID NO: 1869372 - RNA, 19 nt, Artificial Sequence
  Description of Artificial Sequence: Synthetic oligonucleotide
agagcaacucacucauccu

SEQ ID NO: 1869373 - RNA, 19 nt, Artificial Sequence
  Description of Artificial Sequence: Synthetic oligonucleotide
uucuaucuguuacuucuuu

SEQ ID NO: 1869374 - RNA, 19 nt, Artificial Sequence
  Description of Artificial Sequence: Synthetic oligonucleotide
ugguucucuguuccaguga

SEQ ID NO: 1869375 - RNA, 19 nt, Artificial Sequence
  Description of Artificial Sequence: Synthetic oligonucleotide
gcaaacugcacaaaaguca

SEQ ID NO: 1869376 - RNA, 19 nt, Artificial Sequence
  Description of Artificial Sequence: Synthetic oligonucleotide
uaaaaccuccagugaagau

SEQ ID NO: 1869377 - RNA, 19 nt, Artificial Sequence
  Description of Artificial Sequence: Synthetic oligonucleotide
agccauagcaaaagagguc

SEQ ID NO: 1869378 - RNA, 19 nt, Artificial Sequence
  Description of Artificial Sequence: Synthetic oligonucleotide
gaccaguccuacuucaaaa

SEQ ID NO: 1869379 - RNA, 19 nt, Artificial Sequence
  Description of Artificial Sequence: Synthetic oligonucleotide
uccugcaagcugaucuaug

SEQ ID NO: 1869380 - RNA, 19 nt, Artificial Sequence
  Description of Artificial Sequence: Synthetic oligonucleotide
aagcucucuauagccaaca

SEQ ID NO: 1869381 - RNA, 19 nt, Artificial Sequence
  Description of Artificial Sequence: Synthetic oligonucleotide
cacugacagagcaacucac

SEQ ID NO: 1869382 - RNA, 19 nt, Artificial Sequence
  Description of Artificial Sequence: Synthetic oligonucleotide
ccauuccuaauucaagccc

SEQ ID NO: 1869383 - RNA, 19 nt, Artificial Sequence
  Description of Artificial Sequence: Synthetic oligonucleotide
ucuggaacucaggaggguc

SEQ ID NO: 1869384 - RNA, 19 nt, Artificial Sequence
  Description of Artificial Sequence: Synthetic oligonucleotide
ccuacuucaaaacacugca

SEQ ID NO: 1869385 - RNA, 19 nt, Artificial Sequence
  Description of Artificial Sequence: Synthetic oligonucleotide
agauuacaguucaagccug

SEQ ID NO: 1869386 - RNA, 19 nt, Artificial Sequence
  Description of Artificial Sequence: Synthetic oligonucleotide
ucccucuucaacagauuau

SEQ ID NO: 1869387 - RNA, 19 nt, Artificial Sequence
  Description of Artificial Sequence: Synthetic oligonucleotide
guaaaaccuccagugaaga

SEQ ID NO: 1869388 - RNA, 19 nt, Artificial Sequence
  Description of Artificial Sequence: Synthetic oligonucleotide
cuccaauaauaauggucug

SEQ ID NO: 1869389 - RNA, 19 nt, Artificial Sequence
  Description of Artificial Sequence: Synthetic oligonucleotide
caacugucuucucacgcug

SEQ ID NO: 1869390 - RNA, 19 nt, Artificial Sequence
  Description of Artificial Sequence: Synthetic oligonucleotide
cugaaugggagcaaaugcu

SEQ ID NO: 1869391 - RNA, 19 nt, Artificial Sequence
  Description of Artificial Sequence: Synthetic oligonucleotide
agaugaucuucaauaauuu

SEQ ID NO: 1869392 - RNA, 19 nt, Artificial Sequence
  Description of Artificial Sequence: Synthetic oligonucleotide
uucuuucuaucuguuacuu

SEQ ID NO: 1869393 - RNA, 19 nt, Artificial Sequence
  Description of Artificial Sequence: Synthetic oligonucleotide
agcaaacacauugucucca

SEQ ID NO: 1869394 - RNA, 19 nt, Artificial Sequence
  Description of Artificial Sequence: Synthetic oligonucleotide
cauauacuggaaguucauc

SEQ ID NO: 1869395 - RNA, 19 nt, Artificial Sequence
  Description of Artificial Sequence: Synthetic oligonucleotide
gaucuauguucucuguacu

SEQ ID NO: 1869396 - RNA, 19 nt, Artificial Sequence
  Description of Artificial Sequence: Synthetic oligonucleotide
cagaugaucuucaauaauu

SEQ ID NO: 1869397 - RNA, 19 nt, Artificial Sequence
  Description of Artificial Sequence: Synthetic oligonucleotide
cgcaagagguaaaagcugg

SEQ ID NO: 1869398 - RNA, 19 nt, Artificial Sequence
  Description of Artificial Sequence: Synthetic oligonucleotide
cugaaauaccccauguggu

SEQ ID NO: 1869399 - RNA, 19 nt, Artificial Sequence
  Description of Artificial Sequence: Synthetic oligonucleotide
acaucggcuucacaggauu

SEQ ID NO: 1869400 - RNA, 19 nt, Artificial Sequence
  Description of Artificial Sequence: Synthetic oligonucleotide
cuuguggcaagugcaucag

SEQ ID NO: 1869401 - RNA, 19 nt, Artificial Sequence
  Description of Artificial Sequence: Synthetic oligonucleotide
gaugaucuucaauaauuuu

SEQ ID NO: 1869402 - RNA, 19 nt, Artificial Sequence
  Description of Artificial Sequence: Synthetic oligonucleotide
aagccccaugccauaauca

SEQ ID NO: 1869403 - RNA, 19 nt, Artificial Sequence
  Description of Artificial Sequence: Synthetic oligonucleotide
caaaagagguccauuccua

SEQ ID NO: 1869404 - RNA, 19 nt, Artificial Sequence
  Description of Artificial Sequence: Synthetic oligonucleotide
acagaacuuccagaaguga

SEQ ID NO: 1869405 - RNA, 19 nt, Artificial Sequence
  Description of Artificial Sequence: Synthetic oligonucleotide
cuaaccgaaguccaaggcu

SEQ ID NO: 1869406 - RNA, 19 nt, Artificial Sequence
  Description of Artificial Sequence: Synthetic oligonucleotide
caagccccaugccauaauc

SEQ ID NO: 1869407 - RNA, 19 nt, Artificial Sequence
  Description of Artificial Sequence: Synthetic oligonucleotide
uugcagccuccacaauugc

SEQ ID NO: 1869408 - RNA, 19 nt, Artificial Sequence
  Description of Artificial Sequence: Synthetic oligonucleotide
ucgaaggucgcuggagaca

SEQ ID NO: 1869409 - RNA, 19 nt, Artificial Sequence
  Description of Artificial Sequence: Synthetic oligonucleotide
ggaacgaccaagccugcac

SEQ ID NO: 1869410 - RNA, 19 nt, Artificial Sequence
  Description of Artificial Sequence: Synthetic oligonucleotide
auguuucccagcaaggaua

SEQ ID NO: 1869411 - RNA, 19 nt, Artificial Sequence
  Description of Artificial Sequence: Synthetic oligonucleotide
agaucccucuucaacagau

SEQ ID NO: 1869412 - RNA, 19 nt, Artificial Sequence
  Description of Artificial Sequence: Synthetic oligonucleotide
auagcaaaagagguccauu

SEQ ID NO: 1869413 - RNA, 19 nt, Artificial Sequence
  Description of Artificial Sequence: Synthetic oligonucleotide
acaguucaagccuguggau

SEQ ID NO: 1869414 - RNA, 19 nt, Artificial Sequence
  Description of Artificial Sequence: Synthetic oligonucleotide
ucggcuucacaggauuuac

SEQ ID NO: 1869415 - RNA, 19 nt, Artificial Sequence
  Description of Artificial Sequence: Synthetic oligonucleotide
ggaaagcuuauaaaggucu

SEQ ID NO: 1869416 - RNA, 19 nt, Artificial Sequence
  Description of Artificial Sequence: Synthetic oligonucleotide
acgcaagagguaaaagcug

SEQ ID NO: 1869417 - RNA, 19 nt, Artificial Sequence
  Description of Artificial Sequence: Synthetic oligonucleotide
gauaucauagggacccacu

SEQ ID NO: 1869418 - RNA, 19 nt, Artificial Sequence
  Description of Artificial Sequence: Synthetic oligonucleotide
gcuuuucaggaucaagguc

SEQ ID NO: 1869419 - RNA, 19 nt, Artificial Sequence
  Description of Artificial Sequence: Synthetic oligonucleotide
acugcacaaaagucaucau

SEQ ID NO: 1869420 - RNA, 19 nt, Artificial Sequence
  Description of Artificial Sequence: Synthetic oligonucleotide
ggucgcuggagacaucggc

SEQ ID NO: 1869421 - RNA, 19 nt, Artificial Sequence
  Description of Artificial Sequence: Synthetic oligonucleotide
caauaauaauggucuggaa

SEQ ID NO: 1869422 - RNA, 19 nt, Artificial Sequence
  Description of Artificial Sequence: Synthetic oligonucleotide
aaccgaaguccaaggcuug

SEQ ID NO: 1869423 - RNA, 19 nt, Artificial Sequence
  Description of Artificial Sequence: Synthetic oligonucleotide
cuggaacucaggaggguca

SEQ ID NO: 1869424 - RNA, 19 nt, Artificial Sequence
  Description of Artificial Sequence: Synthetic oligonucleotide
gcuuguggcaagugcauca

SEQ ID NO: 1869425 - RNA, 19 nt, Artificial Sequence
  Description of Artificial Sequence: Synthetic oligonucleotide
agguaaaagcuggccagca

SEQ ID NO: 1869426 - RNA, 19 nt, Artificial Sequence
  Description of Artificial Sequence: Synthetic oligonucleotide
caagcugaucuauguucuc

SEQ ID NO: 1869427 - RNA, 19 nt, Artificial Sequence
  Description of Artificial Sequence: Synthetic oligonucleotide
guacugaguuuuauuaucu

SEQ ID NO: 1869428 - RNA, 19 nt, Artificial Sequence
  Description of Artificial Sequence: Synthetic oligonucleotide
cuauguucucuguacuucu

SEQ ID NO: 1869429 - RNA, 19 nt, Artificial Sequence
  Description of Artificial Sequence: Synthetic oligonucleotide
ggucuggaacucaggaggg

SEQ ID NO: 1869430 - RNA, 19 nt, Artificial Sequence
  Description of Artificial Sequence: Synthetic oligonucleotide
gucuucucacgcugcggcc

SEQ ID NO: 1869431 - RNA, 19 nt, Artificial Sequence
  Description of Artificial Sequence: Synthetic oligonucleotide
cuucucacgcugcggcccc

SEQ ID NO: 1869432 - RNA, 19 nt, Artificial Sequence
  Description of Artificial Sequence: Synthetic oligonucleotide
ccaauaauaauggucugga

SEQ ID NO: 1869433 - RNA, 19 nt, Artificial Sequence
  Description of Artificial Sequence: Synthetic oligonucleotide
gugaguauccuaguuuucu

SEQ ID NO: 1869434 - RNA, 19 nt, Artificial Sequence
  Description of Artificial Sequence: Synthetic oligonucleotide
agauuauacgcaagaggua

SEQ ID NO: 1869435 - RNA, 19 nt, Artificial Sequence
  Description of Artificial Sequence: Synthetic oligonucleotide
ucaagccccaugccauaau

SEQ ID NO: 1869436 - RNA, 19 nt, Artificial Sequence
  Description of Artificial Sequence: Synthetic oligonucleotide
auuccuaauucaagcccca

SEQ ID NO: 1869437 - RNA, 19 nt, Artificial Sequence
  Description of Artificial Sequence: Synthetic oligonucleotide
auuauacgcaagagguaaa

SEQ ID NO: 1869438 - RNA, 19 nt, Artificial Sequence
  Description of Artificial Sequence: Synthetic oligonucleotide
ucgcuggagacaucggcuu

SEQ ID NO: 1869439 - RNA, 19 nt, Artificial Sequence
  Description of Artificial Sequence: Synthetic oligonucleotide
ggacccacuaaccgaaguc

SEQ ID NO: 1869440 - RNA, 19 nt, Artificial Sequence
  Description of Artificial Sequence: Synthetic oligonucleotide
cucugaccaguccuacuuc

SEQ ID NO: 1869441 - RNA, 19 nt, Artificial Sequence
  Description of Artificial Sequence: Synthetic oligonucleotide
gaccaagccugcaccauga

SEQ ID NO: 1869442 - RNA, 19 nt, Artificial Sequence
  Description of Artificial Sequence: Synthetic oligonucleotide
gcucucuauagccaacauc

SEQ ID NO: 1869443 - RNA, 19 nt, Artificial Sequence
  Description of Artificial Sequence: Synthetic oligonucleotide
caaacagaucccucuucaa

SEQ ID NO: 1869444 - RNA, 19 nt, Artificial Sequence
  Description of Artificial Sequence: Synthetic oligonucleotide
agcucucuauagccaacau

SEQ ID NO: 1869445 - RNA, 19 nt, Artificial Sequence
  Description of Artificial Sequence: Synthetic oligonucleotide
cagaacuuccagaagugau

SEQ ID NO: 1869446 - RNA, 19 nt, Artificial Sequence
  Description of Artificial Sequence: Synthetic oligonucleotide
cugaucuauguucucugua

SEQ ID NO: 1869447 - RNA, 19 nt, Artificial Sequence
  Description of Artificial Sequence: Synthetic oligonucleotide
auucaagccccaugccaua

SEQ ID NO: 1869448 - RNA, 19 nt, Artificial Sequence
  Description of Artificial Sequence: Synthetic oligonucleotide
guaccaacauauacuggaa

SEQ ID NO: 1869449 - RNA, 19 nt, Artificial Sequence
  Description of Artificial Sequence: Synthetic oligonucleotide
cuuuucgaaggucgcugga

SEQ ID NO: 1869450 - RNA, 19 nt, Artificial Sequence
  Description of Artificial Sequence: Synthetic oligonucleotide
ccgaccaucccgcagccgc

SEQ ID NO: 1869451 - RNA, 19 nt, Artificial Sequence
  Description of Artificial Sequence: Synthetic oligonucleotide
caucacuugcagccuccac

SEQ ID NO: 1869452 - RNA, 19 nt, Artificial Sequence
  Description of Artificial Sequence: Synthetic oligonucleotide
aaccuccagugaagauuac

SEQ ID NO: 1869453 - RNA, 19 nt, Artificial Sequence
  Description of Artificial Sequence: Synthetic oligonucleotide
cagugaguauccuaguuuu

SEQ ID NO: 1869454 - RNA, 19 nt, Artificial Sequence
  Description of Artificial Sequence: Synthetic oligonucleotide
ggucauaguaaaaccucca

SEQ ID NO: 1869455 - RNA, 19 nt, Artificial Sequence
  Description of Artificial Sequence: Synthetic oligonucleotide
uccuaguuuucuggcugcu

SEQ ID NO: 1869456 - RNA, 19 nt, Artificial Sequence
  Description of Artificial Sequence: Synthetic oligonucleotide
caucaggagaaucccugaa

SEQ ID NO: 1869457 - RNA, 19 nt, Artificial Sequence
  Description of Artificial Sequence: Synthetic oligonucleotide
agugcaucagcuggcuuuu

SEQ ID NO: 1869458 - RNA, 19 nt, Artificial Sequence
  Description of Artificial Sequence: Synthetic oligonucleotide
cauugucuccauuuugaau

SEQ ID NO: 1869459 - RNA, 19 nt, Artificial Sequence
  Description of Artificial Sequence: Synthetic oligonucleotide
agaaaucuucaggcaggga

SEQ ID NO: 1869460 - RNA, 19 nt, Artificial Sequence
  Description of Artificial Sequence: Synthetic oligonucleotide
uugucacgaccuucuuguc

SEQ ID NO: 1869461 - RNA, 19 nt, Artificial Sequence
  Description of Artificial Sequence: Synthetic oligonucleotide
acccacuaaccgaagucca

SEQ ID NO: 1869462 - RNA, 19 nt, Artificial Sequence
  Description of Artificial Sequence: Synthetic oligonucleotide
ucacgaccuucuugucucu

SEQ ID NO: 1869463 - RNA, 19 nt, Artificial Sequence
  Description of Artificial Sequence: Synthetic oligonucleotide
ggcaagugcaucagcuggc

SEQ ID NO: 1869464 - RNA, 19 nt, Artificial Sequence
  Description of Artificial Sequence: Synthetic oligonucleotide
caggagaaucccugaaaua

SEQ ID NO: 1869465 - RNA, 19 nt, Artificial Sequence
  Description of Artificial Sequence: Synthetic oligonucleotide
cauccugcaagcugaucua

SEQ ID NO: 1869466 - RNA, 19 nt, Artificial Sequence
  Description of Artificial Sequence: Synthetic oligonucleotide
caggaacgaccaagccugc

SEQ ID NO: 1869467 - RNA, 19 nt, Artificial Sequence
  Description of Artificial Sequence: Synthetic oligonucleotide
uuccuaauucaagccccau

SEQ ID NO: 1869468 - RNA, 19 nt, Artificial Sequence
  Description of Artificial Sequence: Synthetic oligonucleotide
gaaagcuuauaaaggucuu

SEQ ID NO: 1869469 - RNA, 19 nt, Artificial Sequence
  Description of Artificial Sequence: Synthetic oligonucleotide
cuccagugaagauuacagu

SEQ ID NO: 1869470 - RNA, 19 nt, Artificial Sequence
  Description of Artificial Sequence: Synthetic oligonucleotide
ccacuaaccgaaguccaag

SEQ ID NO: 1869471 - RNA, 19 nt, Artificial Sequence
  Description of Artificial Sequence: Synthetic oligonucleotide
ggauaucauagggacccac

SEQ ID NO: 1869472 - RNA, 19 nt, Artificial Sequence
  Description of Artificial Sequence: Synthetic oligonucleotide
agccugcaccaugaaaggu

SEQ ID NO: 1869473 - RNA, 19 nt, Artificial Sequence
  Description of Artificial Sequence: Synthetic oligonucleotide
gaccaucccgcagccgcag

SEQ ID NO: 1869474 - RNA, 19 nt, Artificial Sequence
  Description of Artificial Sequence: Synthetic oligonucleotide
ugucuccauuuugaauaau

SEQ ID NO: 1869475 - RNA, 19 nt, Artificial Sequence
  Description of Artificial Sequence: Synthetic oligonucleotide
cucuauagccaacaucauu

SEQ ID NO: 1869476 - RNA, 19 nt, Artificial Sequence
  Description of Artificial Sequence: Synthetic oligonucleotide
gaaugggagcaaaugcuuu

SEQ ID NO: 1869477 - RNA, 19 nt, Artificial Sequence
  Description of Artificial Sequence: Synthetic oligonucleotide
gccugcaccaugaaagguc

SEQ ID NO: 1869478 - RNA, 19 nt, Artificial Sequence
  Description of Artificial Sequence: Synthetic oligonucleotide
accgaaguccaaggcuugu

SEQ ID NO: 1869479 - RNA, 19 nt, Artificial Sequence
  Description of Artificial Sequence: Synthetic oligonucleotide
aggauaucauagggaccca

SEQ ID NO: 1869480 - RNA, 19 nt, Artificial Sequence
  Description of Artificial Sequence: Synthetic oligonucleotide
aggaacgaccaagccugca

SEQ ID NO: 1869481 - RNA, 19 nt, Artificial Sequence
  Description of Artificial Sequence: Synthetic oligonucleotide
cugcgcuucccgccgccgc

SEQ ID NO: 1869482 - RNA, 19 nt, Artificial Sequence
  Description of Artificial Sequence: Synthetic oligonucleotide
gucgcuggagacaucggcu

SEQ ID NO: 1869483 - RNA, 19 nt, Artificial Sequence
  Description of Artificial Sequence: Synthetic oligonucleotide
uucucacgcugcggccccg

SEQ ID NO: 1869484 - RNA, 19 nt, Artificial Sequence
  Description of Artificial Sequence: Synthetic oligonucleotide
cagaucccucuucaacaga

SEQ ID NO: 1869485 - RNA, 19 nt, Artificial Sequence
  Description of Artificial Sequence: Synthetic oligonucleotide
gcaagcugaucuauguucu

SEQ ID NO: 1869486 - RNA, 19 nt, Artificial Sequence
  Description of Artificial Sequence: Synthetic oligonucleotide
aggucgcuggagacaucgg

SEQ ID NO: 1869487 - RNA, 19 nt, Artificial Sequence
  Description of Artificial Sequence: Synthetic oligonucleotide
aggcuuguggcaagugcau

SEQ ID NO: 1869488 - RNA, 19 nt, Artificial Sequence
  Description of Artificial Sequence: Synthetic oligonucleotide
caggagggucauaguaaaa

SEQ ID NO: 1869489 - RNA, 19 nt, Artificial Sequence
  Description of Artificial Sequence: Synthetic oligonucleotide
acgaccaagccugcaccau

SEQ ID NO: 1869490 - RNA, 19 nt, Artificial Sequence
  Description of Artificial Sequence: Synthetic oligonucleotide
cucauccugcaagcugauc

SEQ ID NO: 1869491 - RNA, 19 nt, Artificial Sequence
  Description of Artificial Sequence: Synthetic oligonucleotide
cucacgcugcggccccgcc

SEQ ID NO: 1869492 - RNA, 19 nt, Artificial Sequence
  Description of Artificial Sequence: Synthetic oligonucleotide
gcugaucuauguucucugu

SEQ ID NO: 1869493 - RNA, 19 nt, Artificial Sequence
  Description of Artificial Sequence: Synthetic oligonucleotide
cagaagugauagaaaucuu

SEQ ID NO: 1869494 - RNA, 19 nt, Artificial Sequence
  Description of Artificial Sequence: Synthetic oligonucleotide
accccaugugguacugagu

SEQ ID NO: 1869495 - RNA, 19 nt, Artificial Sequence
  Description of Artificial Sequence: Synthetic oligonucleotide
agggacccacuaaccgaag

SEQ ID NO: 1869496 - RNA, 19 nt, Artificial Sequence
  Description of Artificial Sequence: Synthetic oligonucleotide
ccccaugccauaaucacau

SEQ ID NO: 1869497 - RNA, 19 nt, Artificial Sequence
  Description of Artificial Sequence: Synthetic oligonucleotide
cacaauugccuugcaaauu

SEQ ID NO: 1869498 - RNA, 19 nt, Artificial Sequence
  Description of Artificial Sequence: Synthetic oligonucleotide
ccauagcaaaagaggucca

SEQ ID NO: 1869499 - RNA, 19 nt, Artificial Sequence
  Description of Artificial Sequence: Synthetic oligonucleotide
gcuucacaggauuuacuuu

SEQ ID NO: 1869500 - RNA, 19 nt, Artificial Sequence
  Description of Artificial Sequence: Synthetic oligonucleotide
gccuguggauuuugucuuc

SEQ ID NO: 1869501 - RNA, 19 nt, Artificial Sequence
  Description of Artificial Sequence: Synthetic oligonucleotide
agcuggccagcaacuuugu

SEQ ID NO: 1869502 - RNA, 19 nt, Artificial Sequence
  Description of Artificial Sequence: Synthetic oligonucleotide
acucauccugcaagcugau

SEQ ID NO: 1869503 - RNA, 19 nt, Artificial Sequence
  Description of Artificial Sequence: Synthetic oligonucleotide
gacaucggcuucacaggau

SEQ ID NO: 1869504 - RNA, 19 nt, Artificial Sequence
  Description of Artificial Sequence: Synthetic oligonucleotide
ggcuuguggcaagugcauc

SEQ ID NO: 1869505 - RNA, 19 nt, Artificial Sequence
  Description of Artificial Sequence: Synthetic oligonucleotide
cacucugaccaguccuacu

SEQ ID NO: 1869506 - RNA, 19 nt, Artificial Sequence
  Description of Artificial Sequence: Synthetic oligonucleotide
gaaggucgcuggagacauc

SEQ ID NO: 1869507 - RNA, 19 nt, Artificial Sequence
  Description of Artificial Sequence: Synthetic oligonucleotide
guacuucugcuugccagau

SEQ ID NO: 1869508 - RNA, 19 nt, Artificial Sequence
  Description of Artificial Sequence: Synthetic oligonucleotide
cgaccaagccugcaccaug

SEQ ID NO: 1869509 - RNA, 19 nt, Artificial Sequence
  Description of Artificial Sequence: Synthetic oligonucleotide
gccccacucugaccagucc

SEQ ID NO: 1869510 - RNA, 19 nt, Artificial Sequence
  Description of Artificial Sequence: Synthetic oligonucleotide
cugcaagcugaucuauguu

SEQ ID NO: 1869511 - RNA, 19 nt, Artificial Sequence
  Description of Artificial Sequence: Synthetic oligonucleotide
guuucccagcaaggauauc

SEQ ID NO: 1869512 - RNA, 19 nt, Artificial Sequence
  Description of Artificial Sequence: Synthetic oligonucleotide
gggacccacuaaccgaagu

SEQ ID NO: 1869513 - RNA, 19 nt, Artificial Sequence
  Description of Artificial Sequence: Synthetic oligonucleotide
ccagaugaucuucaauaau

SEQ ID NO: 1869514 - RNA, 19 nt, Artificial Sequence
  Description of Artificial Sequence: Synthetic oligonucleotide
cccacuaaccgaaguccaa

SEQ ID NO: 1869515 - RNA, 19 nt, Artificial Sequence
  Description of Artificial Sequence: Synthetic oligonucleotide
uggcugcuucugugaguuu

SEQ ID NO: 1869516 - RNA, 19 nt, Artificial Sequence
  Description of Artificial Sequence: Synthetic oligonucleotide
acgcugcggccccgccccg

SEQ ID NO: 1869517 - RNA, 19 nt, Artificial Sequence
  Description of Artificial Sequence: Synthetic oligonucleotide
ggaaguucaucaggagaau

SEQ ID NO: 1869518 - RNA, 19 nt, Artificial Sequence
  Description of Artificial Sequence: Synthetic oligonucleotide
gcaagugcaucagcuggcu

SEQ ID NO: 1869519 - RNA, 19 nt, Artificial Sequence
  Description of Artificial Sequence: Synthetic oligonucleotide
gugcaucagcuggcuuuuc

SEQ ID NO: 1869520 - RNA, 19 nt, Artificial Sequence
  Description of Artificial Sequence: Synthetic oligonucleotide
gccgaccaucccgcagccg

SEQ ID NO: 1869521 - RNA, 19 nt, Artificial Sequence
  Description of Artificial Sequence: Synthetic oligonucleotide
ggccagcaacuuugugaaa

SEQ ID NO: 1869522 - RNA, 19 nt, Artificial Sequence
  Description of Artificial Sequence: Synthetic oligonucleotide
ggaacucaggagggucaua

SEQ ID NO: 1869523 - RNA, 19 nt, Artificial Sequence
  Description of Artificial Sequence: Synthetic oligonucleotide
cgccgaccaucccgcagcc

SEQ ID NO: 1869524 - RNA, 19 nt, Artificial Sequence
  Description of Artificial Sequence: Synthetic oligonucleotide
cgaaggucgcuggagacau

SEQ ID NO: 1869525 - RNA, 19 nt, Artificial Sequence
  Description of Artificial Sequence: Synthetic oligonucleotide
cacuugcagccuccacaau

SEQ ID NO: 1869526 - RNA, 19 nt, Artificial Sequence
  Description of Artificial Sequence: Synthetic oligonucleotide
ccuccacaauugccuugca

SEQ ID NO: 1869527 - RNA, 19 nt, Artificial Sequence
  Description of Artificial Sequence: Synthetic oligonucleotide
cggcuucacaggauuuacu

SEQ ID NO: 1869528 - RNA, 19 nt, Artificial Sequence
  Description of Artificial Sequence: Synthetic oligonucleotide
cccgcccggccugcgcuuc

SEQ ID NO: 1869529 - RNA, 19 nt, Artificial Sequence
  Description of Artificial Sequence: Synthetic oligonucleotide
aaaauuuguagucuggggc

SEQ ID NO: 1869530 - RNA, 19 nt, Artificial Sequence
  Description of Artificial Sequence: Synthetic oligonucleotide
auuaaaguaggccacuggc

SEQ ID NO: 1869531 - RNA, 19 nt, Artificial Sequence
  Description of Artificial Sequence: Synthetic oligonucleotide
aaggugaagacccugcccc

SEQ ID NO: 1869532 - RNA, 19 nt, Artificial Sequence
  Description of Artificial Sequence: Synthetic oligonucleotide
caaaguaugacacagcacc

SEQ ID NO: 1869533 - RNA, 19 nt, Artificial Sequence
  Description of Artificial Sequence: Synthetic oligonucleotide
ucaguuugcaguauauucg

SEQ ID NO: 1869534 - RNA, 19 nt, Artificial Sequence
  Description of Artificial Sequence: Synthetic oligonucleotide
aguauauucgcauugacaa

SEQ ID NO: 1869535 - RNA, 19 nt, Artificial Sequence
  Description of Artificial Sequence: Synthetic oligonucleotide
uauauucgcauugacaacg

SEQ ID NO: 1869536 - RNA, 19 nt, Artificial Sequence
  Description of Artificial Sequence: Synthetic oligonucleotide
uuugcuugcaucccaagcc

SEQ ID NO: 1869537 - RNA, 19 nt, Artificial Sequence
  Description of Artificial Sequence: Synthetic oligonucleotide
aaucccuucaucuguaaug

SEQ ID NO: 1869538 - RNA, 19 nt, Artificial Sequence
  Description of Artificial Sequence: Synthetic oligonucleotide
uguccgcuaacacugaagg

SEQ ID NO: 1869539 - RNA, 19 nt, Artificial Sequence
  Description of Artificial Sequence: Synthetic oligonucleotide
ugugagauugcuacaaccc

SEQ ID NO: 1869540 - RNA, 19 nt, Artificial Sequence
  Description of Artificial Sequence: Synthetic oligonucleotide
aaucaugaauuaaaguagg

SEQ ID NO: 1869541 - RNA, 19 nt, Artificial Sequence
  Description of Artificial Sequence: Synthetic oligonucleotide
uguaaugagcucacagugg

SEQ ID NO: 1869542 - RNA, 19 nt, Artificial Sequence
  Description of Artificial Sequence: Synthetic oligonucleotide
uuggguaugacacauugac

SEQ ID NO: 1869543 - RNA, 19 nt, Artificial Sequence
  Description of Artificial Sequence: Synthetic oligonucleotide
cuagaguuggguaugacac

SEQ ID NO: 1869544 - RNA, 19 nt, Artificial Sequence
  Description of Artificial Sequence: Synthetic oligonucleotide
uucgcauugacaacggugc

SEQ ID NO: 1869545 - RNA, 19 nt, Artificial Sequence
  Description of Artificial Sequence: Synthetic oligonucleotide
acggaaauaagcuaacaug

SEQ ID NO: 1869546 - RNA, 19 nt, Artificial Sequence
  Description of Artificial Sequence: Synthetic oligonucleotide
caugaauuaaaguaggcca

SEQ ID NO: 1869547 - RNA, 19 nt, Artificial Sequence
  Description of Artificial Sequence: Synthetic oligonucleotide
aaaucaguaggaaucauga

SEQ ID NO: 1869548 - RNA, 19 nt, Artificial Sequence
  Description of Artificial Sequence: Synthetic oligonucleotide
ucaugaauuaaaguaggcc

SEQ ID NO: 1869549 - RNA, 19 nt, Artificial Sequence
  Description of Artificial Sequence: Synthetic oligonucleotide
ucaguaggaaucaugaauu

SEQ ID NO: 1869550 - RNA, 19 nt, Artificial Sequence
  Description of Artificial Sequence: Synthetic oligonucleotide
gaguguaaagccugcaucc

SEQ ID NO: 1869551 - RNA, 19 nt, Artificial Sequence
  Description of Artificial Sequence: Synthetic oligonucleotide
uuucccacggguuucuacg

SEQ ID NO: 1869552 - RNA, 19 nt, Artificial Sequence
  Description of Artificial Sequence: Synthetic oligonucleotide
aacggaaauaagcuaacau

SEQ ID NO: 1869553 - RNA, 19 nt, Artificial Sequence
  Description of Artificial Sequence: Synthetic oligonucleotide
ugacauaaacagaaaggug

SEQ ID NO: 1869554 - RNA, 19 nt, Artificial Sequence
  Description of Artificial Sequence: Synthetic oligonucleotide
uugacaacggugcuucuag

SEQ ID NO: 1869555 - RNA, 19 nt, Artificial Sequence
  Description of Artificial Sequence: Synthetic oligonucleotide
gguaucaccaguuacugcc

SEQ ID NO: 1869556 - RNA, 19 nt, Artificial Sequence
  Description of Artificial Sequence: Synthetic oligonucleotide
gagcuaagaguguaaagcc

SEQ ID NO: 1869557 - RNA, 19 nt, Artificial Sequence
  Description of Artificial Sequence: Synthetic oligonucleotide
aucaguaggaaucaugaau

SEQ ID NO: 1869558 - RNA, 19 nt, Artificial Sequence
  Description of Artificial Sequence: Synthetic oligonucleotide
uuuugcuugcaucccaagc

SEQ ID NO: 1869559 - RNA, 19 nt, Artificial Sequence
  Description of Artificial Sequence: Synthetic oligonucleotide
ugaugcgugagcaggacug

SEQ ID NO: 1869560 - RNA, 19 nt, Artificial Sequence
  Description of Artificial Sequence: Synthetic oligonucleotide
uuaaaguaggccacuggcu

SEQ ID NO: 1869561 - RNA, 19 nt, Artificial Sequence
  Description of Artificial Sequence: Synthetic oligonucleotide
cucaguuugcaguauauuc

SEQ ID NO: 1869562 - RNA, 19 nt, Artificial Sequence
  Description of Artificial Sequence: Synthetic oligonucleotide
acccgagaggcacaaagcc

SEQ ID NO: 1869563 - RNA, 19 nt, Artificial Sequence
  Description of Artificial Sequence: Synthetic oligonucleotide
augaauuaaaguaggccac

SEQ ID NO: 1869564 - RNA, 19 nt, Artificial Sequence
  Description of Artificial Sequence: Synthetic oligonucleotide
ucuuuuaccuguaaugcuu

SEQ ID NO: 1869565 - RNA, 19 nt, Artificial Sequence
  Description of Artificial Sequence: Synthetic oligonucleotide
gauugggugauggugacgc

SEQ ID NO: 1869566 - RNA, 19 nt, Artificial Sequence
  Description of Artificial Sequence: Synthetic oligonucleotide
cuuaacggaaauaagcuaa

SEQ ID NO: 1869567 - RNA, 19 nt, Artificial Sequence
  Description of Artificial Sequence: Synthetic oligonucleotide
ugagauugcuacaacccga

SEQ ID NO: 1869568 - RNA, 19 nt, Artificial Sequence
  Description of Artificial Sequence: Synthetic oligonucleotide
ucuuuggugucuuaacgga

SEQ ID NO: 1869569 - RNA, 19 nt, Artificial Sequence
  Description of Artificial Sequence: Synthetic oligonucleotide
aagcugagcccgcaugcgc

SEQ ID NO: 1869570 - RNA, 19 nt, Artificial Sequence
  Description of Artificial Sequence: Synthetic oligonucleotide
caauuccgagcuaagagug

SEQ ID NO: 1869571 - RNA, 19 nt, Artificial Sequence
  Description of Artificial Sequence: Synthetic oligonucleotide
gugagauugcuacaacccg

SEQ ID NO: 1869572 - RNA, 19 nt, Artificial Sequence
  Description of Artificial Sequence: Synthetic oligonucleotide
uggauggauagcuggauga

SEQ ID NO: 1869573 - RNA, 19 nt, Artificial Sequence
  Description of Artificial Sequence: Synthetic oligonucleotide
gucaaaguaugacacagca

SEQ ID NO: 1869574 - RNA, 19 nt, Artificial Sequence
  Description of Artificial Sequence: Synthetic oligonucleotide
agaaaggugaagacccugc

SEQ ID NO: 1869575 - RNA, 19 nt, Artificial Sequence
  Description of Artificial Sequence: Synthetic oligonucleotide
ugcgcuugaugccugcgcg

SEQ ID NO: 1869576 - RNA, 19 nt, Artificial Sequence
  Description of Artificial Sequence: Synthetic oligonucleotide
uugcaguauauucgcauug

SEQ ID NO: 1869577 - RNA, 19 nt, Artificial Sequence
  Description of Artificial Sequence: Synthetic oligonucleotide
aucaugaauuaaaguaggc

SEQ ID NO: 1869578 - RNA, 19 nt, Artificial Sequence
  Description of Artificial Sequence: Synthetic oligonucleotide
gaaugguaucaccaguuac

SEQ ID NO: 1869579 - RNA, 19 nt, Artificial Sequence
  Description of Artificial Sequence: Synthetic oligonucleotide
uacgugggaaccaccagcc

SEQ ID NO: 1869580 - RNA, 19 nt, Artificial Sequence
  Description of Artificial Sequence: Synthetic oligonucleotide
cugugagauugcuacaacc

SEQ ID NO: 1869581 - RNA, 19 nt, Artificial Sequence
  Description of Artificial Sequence: Synthetic oligonucleotide
ucaaaguaugacacagcac

SEQ ID NO: 1869582 - RNA, 19 nt, Artificial Sequence
  Description of Artificial Sequence: Synthetic oligonucleotide
aaggugaaugguaucacca

SEQ ID NO: 1869583 - RNA, 19 nt, Artificial Sequence
  Description of Artificial Sequence: Synthetic oligonucleotide
acgccaucaucagugaugc

SEQ ID NO: 1869584 - RNA, 19 nt, Artificial Sequence
  Description of Artificial Sequence: Synthetic oligonucleotide
gaaauaagcuaacaugccu

SEQ ID NO: 1869585 - RNA, 19 nt, Artificial Sequence
  Description of Artificial Sequence: Synthetic oligonucleotide
aacaugccuuuucccacgg

SEQ ID NO: 1869586 - RNA, 19 nt, Artificial Sequence
  Description of Artificial Sequence: Synthetic oligonucleotide
cuaacaugccuuuucccac

SEQ ID NO: 1869587 - RNA, 19 nt, Artificial Sequence
  Description of Artificial Sequence: Synthetic oligonucleotide
uucuacgugggaaccacca

SEQ ID NO: 1869588 - RNA, 19 nt, Artificial Sequence
  Description of Artificial Sequence: Synthetic oligonucleotide
uucuagucuuccaagugaa

SEQ ID NO: 1869589 - RNA, 19 nt, Artificial Sequence
  Description of Artificial Sequence: Synthetic oligonucleotide
ucuuaacggaaauaagcua

SEQ ID NO: 1869590 - RNA, 19 nt, Artificial Sequence
  Description of Artificial Sequence: Synthetic oligonucleotide
acaacggugcuucuagucu

SEQ ID NO: 1869591 - RNA, 19 nt, Artificial Sequence
  Description of Artificial Sequence: Synthetic oligonucleotide
acugaagguacacaggcuu

SEQ ID NO: 1869592 - RNA, 19 nt, Artificial Sequence
  Description of Artificial Sequence: Synthetic oligonucleotide
gugucucaaagcuucgucc

SEQ ID NO: 1869593 - RNA, 19 nt, Artificial Sequence
  Description of Artificial Sequence: Synthetic oligonucleotide
ggcaauuccgagcuaagag

SEQ ID NO: 1869594 - RNA, 19 nt, Artificial Sequence
  Description of Artificial Sequence: Synthetic oligonucleotide
ucgagauugggugauggug

SEQ ID NO: 1869595 - RNA, 19 nt, Artificial Sequence
  Description of Artificial Sequence: Synthetic oligonucleotide
ugcagagucgagauugggu

SEQ ID NO: 1869596 - RNA, 19 nt, Artificial Sequence
  Description of Artificial Sequence: Synthetic oligonucleotide
gcaucugugagauugcuac

SEQ ID NO: 1869597 - RNA, 19 nt, Artificial Sequence
  Description of Artificial Sequence: Synthetic oligonucleotide
uccaagugaaaaguccugc

SEQ ID NO: 1869598 - RNA, 19 nt, Artificial Sequence
  Description of Artificial Sequence: Synthetic oligonucleotide
aaucaguaggaaucaugaa

SEQ ID NO: 1869599 - RNA, 19 nt, Artificial Sequence
  Description of Artificial Sequence: Synthetic oligonucleotide
uccgcuaacacugaaggua

SEQ ID NO: 1869600 - RNA, 19 nt, Artificial Sequence
  Description of Artificial Sequence: Synthetic oligonucleotide
aggugaaugguaucaccag

SEQ ID NO: 1869601 - RNA, 19 nt, Artificial Sequence
  Description of Artificial Sequence: Synthetic oligonucleotide
uuguccgcuaacacugaag

SEQ ID NO: 1869602 - RNA, 19 nt, Artificial Sequence
  Description of Artificial Sequence: Synthetic oligonucleotide
ucuacgugggaaccaccag

SEQ ID NO: 1869603 - RNA, 19 nt, Artificial Sequence
  Description of Artificial Sequence: Synthetic oligonucleotide
cuacgugggaaccaccagc

SEQ ID NO: 1869604 - RNA, 19 nt, Artificial Sequence
  Description of Artificial Sequence: Synthetic oligonucleotide
uggguaugacacauugaca

SEQ ID NO: 1869605 - RNA, 19 nt, Artificial Sequence
  Description of Artificial Sequence: Synthetic oligonucleotide
caacccgagaggcacaaag

SEQ ID NO: 1869606 - RNA, 19 nt, Artificial Sequence
  Description of Artificial Sequence: Synthetic oligonucleotide
gccugcauccgucaaaugg

SEQ ID NO: 1869607 - RNA, 19 nt, Artificial Sequence
  Description of Artificial Sequence: Synthetic oligonucleotide
uuugcaguauauucgcauu

SEQ ID NO: 1869608 - RNA, 19 nt, Artificial Sequence
  Description of Artificial Sequence: Synthetic oligonucleotide
gaauuaaaguaggccacug

SEQ ID NO: 1869609 - RNA, 19 nt, Artificial Sequence
  Description of Artificial Sequence: Synthetic oligonucleotide
aaaguaugacacagcaccu

SEQ ID NO: 1869610 - RNA, 19 nt, Artificial Sequence
  Description of Artificial Sequence: Synthetic oligonucleotide
gacgcucuaagccacggca

SEQ ID NO: 1869611 - RNA, 19 nt, Artificial Sequence
  Description of Artificial Sequence: Synthetic oligonucleotide
uggcuuaaggauugguaga

SEQ ID NO: 1869612 - RNA, 19 nt, Artificial Sequence
  Description of Artificial Sequence: Synthetic oligonucleotide
ucaagugcagaaucccuuc

SEQ ID NO: 1869613 - RNA, 19 nt, Artificial Sequence
  Description of Artificial Sequence: Synthetic oligonucleotide
ucuaagccacggcaguucu

SEQ ID NO: 1869614 - RNA, 19 nt, Artificial Sequence
  Description of Artificial Sequence: Synthetic oligonucleotide
gagauugcuacaacccgag

SEQ ID NO: 1869615 - RNA, 19 nt, Artificial Sequence
  Description of Artificial Sequence: Synthetic oligonucleotide
cucucaugcccacacgugc

SEQ ID NO: 1869616 - RNA, 19 nt, Artificial Sequence
  Description of Artificial Sequence: Synthetic oligonucleotide
auucgcauugacaacggug

SEQ ID NO: 1869617 - RNA, 19 nt, Artificial Sequence
  Description of Artificial Sequence: Synthetic oligonucleotide
cagucguacagcuccagac

SEQ ID NO: 1869618 - RNA, 19 nt, Artificial Sequence
  Description of Artificial Sequence: Synthetic oligonucleotide
ugaaugguaucaccaguua

SEQ ID NO: 1869619 - RNA, 19 nt, Artificial Sequence
  Description of Artificial Sequence: Synthetic oligonucleotide
ucucucaugcccacacgug

SEQ ID NO: 1869620 - RNA, 19 nt, Artificial Sequence
  Description of Artificial Sequence: Synthetic oligonucleotide
acgcagacuggucugaccu

SEQ ID NO: 1869621 - RNA, 19 nt, Artificial Sequence
  Description of Artificial Sequence: Synthetic oligonucleotide
gcagagucgagauugggug

SEQ ID NO: 1869622 - RNA, 19 nt, Artificial Sequence
  Description of Artificial Sequence: Synthetic oligonucleotide
augcgcuugaugccugcgc

SEQ ID NO: 1869623 - RNA, 19 nt, Artificial Sequence
  Description of Artificial Sequence: Synthetic oligonucleotide
uuaaggugaaugguaucac

SEQ ID NO: 1869624 - RNA, 19 nt, Artificial Sequence
  Description of Artificial Sequence: Synthetic oligonucleotide
gacaacggugcuucuaguc

SEQ ID NO: 1869625 - RNA, 19 nt, Artificial Sequence
  Description of Artificial Sequence: Synthetic oligonucleotide
ugcugaagucuuuuaccug

SEQ ID NO: 1869626 - RNA, 19 nt, Artificial Sequence
  Description of Artificial Sequence: Synthetic oligonucleotide
cuucuagucuuccaaguga

SEQ ID NO: 1869627 - RNA, 19 nt, Artificial Sequence
  Description of Artificial Sequence: Synthetic oligonucleotide
agucgagauugggugaugg

SEQ ID NO: 1869628 - RNA, 19 nt, Artificial Sequence
  Description of Artificial Sequence: Synthetic oligonucleotide
ugcucaagugcagaauccc

SEQ ID NO: 1869629 - RNA, 19 nt, Artificial Sequence
  Description of Artificial Sequence: Synthetic oligonucleotide
uggugacgcagacuggucu

SEQ ID NO: 1869630 - RNA, 19 nt, Artificial Sequence
  Description of Artificial Sequence: Synthetic oligonucleotide
gccagguuaaggugaaugg

SEQ ID NO: 1869631 - RNA, 19 nt, Artificial Sequence
  Description of Artificial Sequence: Synthetic oligonucleotide
ugcaguauauucgcauuga

SEQ ID NO: 1869632 - RNA, 19 nt, Artificial Sequence
  Description of Artificial Sequence: Synthetic oligonucleotide
uuuggguuuguccgcuaac

SEQ ID NO: 1869633 - RNA, 19 nt, Artificial Sequence
  Description of Artificial Sequence: Synthetic oligonucleotide
accuguaaugcuuucccaa

SEQ ID NO: 1869634 - RNA, 19 nt, Artificial Sequence
  Description of Artificial Sequence: Synthetic oligonucleotide
uugcuacaacccgagaggc

SEQ ID NO: 1869635 - RNA, 19 nt, Artificial Sequence
  Description of Artificial Sequence: Synthetic oligonucleotide
agacgcucuaagccacggc

SEQ ID NO: 1869636 - RNA, 19 nt, Artificial Sequence
  Description of Artificial Sequence: Synthetic oligonucleotide
ugcuugcaucccaagccag

SEQ ID NO: 1869637 - RNA, 19 nt, Artificial Sequence
  Description of Artificial Sequence: Synthetic oligonucleotide
uccagacgcucuaagccac

SEQ ID NO: 1869638 - RNA, 19 nt, Artificial Sequence
  Description of Artificial Sequence: Synthetic oligonucleotide
uacccgcagucucucaugc

SEQ ID NO: 1869639 - RNA, 19 nt, Artificial Sequence
  Description of Artificial Sequence: Synthetic oligonucleotide
gcuaacaugccuuuuccca

SEQ ID NO: 1869640 - RNA, 19 nt, Artificial Sequence
  Description of Artificial Sequence: Synthetic oligonucleotide
cuguaaugcuuucccaaug

SEQ ID NO: 1869641 - RNA, 19 nt, Artificial Sequence
  Description of Artificial Sequence: Synthetic oligonucleotide
uggccuaagcagcugcugu

SEQ ID NO: 1869642 - RNA, 19 nt, Artificial Sequence
  Description of Artificial Sequence: Synthetic oligonucleotide
auauucgcauugacaacgg

SEQ ID NO: 1869643 - RNA, 19 nt, Artificial Sequence
  Description of Artificial Sequence: Synthetic oligonucleotide
uuucuacgugggaaccacc

SEQ ID NO: 1869644 - RNA, 19 nt, Artificial Sequence
  Description of Artificial Sequence: Synthetic oligonucleotide
uaacggaaauaagcuaaca

SEQ ID NO: 1869645 - RNA, 19 nt, Artificial Sequence
  Description of Artificial Sequence: Synthetic oligonucleotide
ugaccggagcaaaguaggc

SEQ ID NO: 1869646 - RNA, 19 nt, Artificial Sequence
  Description of Artificial Sequence: Synthetic oligonucleotide
agagacgcaucugugagau

SEQ ID NO: 1869647 - RNA, 19 nt, Artificial Sequence
  Description of Artificial Sequence: Synthetic oligonucleotide
ugguaucaccaguuacugc

SEQ ID NO: 1869648 - RNA, 19 nt, Artificial Sequence
  Description of Artificial Sequence: Synthetic oligonucleotide
agguacacaggcuuugauu

SEQ ID NO: 1869649 - RNA, 19 nt, Artificial Sequence
  Description of Artificial Sequence: Synthetic oligonucleotide
cauggaccuugacaugagg

SEQ ID NO: 1869650 - RNA, 19 nt, Artificial Sequence
  Description of Artificial Sequence: Synthetic oligonucleotide
uccgugacaaggaggcagu

SEQ ID NO: 1869651 - RNA, 19 nt, Artificial Sequence
  Description of Artificial Sequence: Synthetic oligonucleotide
agaguuggguaugacacau

SEQ ID NO: 1869652 - RNA, 19 nt, Artificial Sequence
  Description of Artificial Sequence: Synthetic oligonucleotide
agugaugcgugagcaggac

SEQ ID NO: 1869653 - RNA, 19 nt, Artificial Sequence
  Description of Artificial Sequence: Synthetic oligonucleotide
gcauccgucaaaugggagc

SEQ ID NO: 1869654 - RNA, 19 nt, Artificial Sequence
  Description of Artificial Sequence: Synthetic oligonucleotide
gcuaagaguguaaagccug

SEQ ID NO: 1869655 - RNA, 19 nt, Artificial Sequence
  Description of Artificial Sequence: Synthetic oligonucleotide
uauucgcauugacaacggu

SEQ ID NO: 1869656 - RNA, 19 nt, Artificial Sequence
  Description of Artificial Sequence: Synthetic oligonucleotide
gucauggcaauuccgagcu

SEQ ID NO: 1869657 - RNA, 19 nt, Artificial Sequence
  Description of Artificial Sequence: Synthetic oligonucleotide
uggaggggugaccggagca

SEQ ID NO: 1869658 - RNA, 19 nt, Artificial Sequence
  Description of Artificial Sequence: Synthetic oligonucleotide
aggaagcugagcccgcaug

SEQ ID NO: 1869659 - RNA, 19 nt, Artificial Sequence
  Description of Artificial Sequence: Synthetic oligonucleotide
gucuuaacggaaauaagcu

SEQ ID NO: 1869660 - RNA, 19 nt, Artificial Sequence
  Description of Artificial Sequence: Synthetic oligonucleotide
cuagucuuccaagugaaaa

SEQ ID NO: 1869661 - RNA, 19 nt, Artificial Sequence
  Description of Artificial Sequence: Synthetic oligonucleotide
uuuguccgcuaacacugaa

SEQ ID NO: 1869662 - RNA, 19 nt, Artificial Sequence
  Description of Artificial Sequence: Synthetic oligonucleotide
uuuuaccuguaaugcuuuc

SEQ ID NO: 1869663 - RNA, 19 nt, Artificial Sequence
  Description of Artificial Sequence: Synthetic oligonucleotide
ucuagucuuccaagugaaa

SEQ ID NO: 1869664 - RNA, 19 nt, Artificial Sequence
  Description of Artificial Sequence: Synthetic oligonucleotide
agcauccgugacaaggagg

SEQ ID NO: 1869665 - RNA, 19 nt, Artificial Sequence
  Description of Artificial Sequence: Synthetic oligonucleotide
uaaagccugcauccgucaa

SEQ ID NO: 1869666 - RNA, 19 nt, Artificial Sequence
  Description of Artificial Sequence: Synthetic oligonucleotide
uggucugaccuggaggaug

SEQ ID NO: 1869667 - RNA, 19 nt, Artificial Sequence
  Description of Artificial Sequence: Synthetic oligonucleotide
aauuccgagcuaagagugu

SEQ ID NO: 1869668 - RNA, 19 nt, Artificial Sequence
  Description of Artificial Sequence: Synthetic oligonucleotide
aagccugcauccgucaaau

SEQ ID NO: 1869669 - RNA, 19 nt, Artificial Sequence
  Description of Artificial Sequence: Synthetic oligonucleotide
gugagagacgcaucuguga

SEQ ID NO: 1869670 - RNA, 19 nt, Artificial Sequence
  Description of Artificial Sequence: Synthetic oligonucleotide
guuucuacgugggaaccac

SEQ ID NO: 1869671 - RNA, 19 nt, Artificial Sequence
  Description of Artificial Sequence: Synthetic oligonucleotide
gcacaaagccugcagccgg

SEQ ID NO: 1869672 - RNA, 19 nt, Artificial Sequence
  Description of Artificial Sequence: Synthetic oligonucleotide
gacgcagacuggucugacc

SEQ ID NO: 1869673 - RNA, 19 nt, Artificial Sequence
  Description of Artificial Sequence: Synthetic oligonucleotide
aguacccgcagucucucau

SEQ ID NO: 1869674 - RNA, 19 nt, Artificial Sequence
  Description of Artificial Sequence: Synthetic oligonucleotide
auucucaguuugcaguaua

SEQ ID NO: 1869675 - RNA, 19 nt, Artificial Sequence
  Description of Artificial Sequence: Synthetic oligonucleotide
ugcccacacgugcugcugc

SEQ ID NO: 1869676 - RNA, 19 nt, Artificial Sequence
  Description of Artificial Sequence: Synthetic oligonucleotide
agcucacagugggacaaac

SEQ ID NO: 1869677 - RNA, 19 nt, Artificial Sequence
  Description of Artificial Sequence: Synthetic oligonucleotide
ugccuuuucccacggguuu

SEQ ID NO: 1869678 - RNA, 19 nt, Artificial Sequence
  Description of Artificial Sequence: Synthetic oligonucleotide
guuugcaguauauucgcau

SEQ ID NO: 1869679 - RNA, 19 nt, Artificial Sequence
  Description of Artificial Sequence: Synthetic oligonucleotide
aaguaggccacuggcuuaa

SEQ ID NO: 1869680 - RNA, 19 nt, Artificial Sequence
  Description of Artificial Sequence: Synthetic oligonucleotide
agguuaaggugaaugguau

SEQ ID NO: 1869681 - RNA, 19 nt, Artificial Sequence
  Description of Artificial Sequence: Synthetic oligonucleotide
ucguacagcuccagacgcu

SEQ ID NO: 1869682 - RNA, 19 nt, Artificial Sequence
  Description of Artificial Sequence: Synthetic oligonucleotide
gcuacaacccgagaggcac

SEQ ID NO: 1869683 - RNA, 19 nt, Artificial Sequence
  Description of Artificial Sequence: Synthetic oligonucleotide
cauccgucaaaugggagca

SEQ ID NO: 1869684 - RNA, 19 nt, Artificial Sequence
  Description of Artificial Sequence: Synthetic oligonucleotide
aucaggacacacucuucaa

SEQ ID NO: 1869685 - RNA, 19 nt, Artificial Sequence
  Description of Artificial Sequence: Synthetic oligonucleotide
augggagcaucgggcagcc

SEQ ID NO: 1869686 - RNA, 19 nt, Artificial Sequence
  Description of Artificial Sequence: Synthetic oligonucleotide
uuacugccaucugugcuga

SEQ ID NO: 1869687 - RNA, 19 nt, Artificial Sequence
  Description of Artificial Sequence: Synthetic oligonucleotide
uggcaauuccgagcuaaga

SEQ ID NO: 1869688 - RNA, 19 nt, Artificial Sequence
  Description of Artificial Sequence: Synthetic oligonucleotide
gguacacaggcuuugauuu

SEQ ID NO: 1869689 - RNA, 19 nt, Artificial Sequence
  Description of Artificial Sequence: Synthetic oligonucleotide
uccgagcuaagaguguaaa

SEQ ID NO: 1869690 - RNA, 19 nt, Artificial Sequence
  Description of Artificial Sequence: Synthetic oligonucleotide
ucgcauugacaacggugcu

SEQ ID NO: 1869691 - RNA, 19 nt, Artificial Sequence
  Description of Artificial Sequence: Synthetic oligonucleotide
ccgagaggcacaaagccug

SEQ ID NO: 1869692 - RNA, 19 nt, Artificial Sequence
  Description of Artificial Sequence: Synthetic oligonucleotide
agauugggugauggugacg

SEQ ID NO: 1869693 - RNA, 19 nt, Artificial Sequence
  Description of Artificial Sequence: Synthetic oligonucleotide
gagagacgcaucugugaga

SEQ ID NO: 1869694 - RNA, 19 nt, Artificial Sequence
  Description of Artificial Sequence: Synthetic oligonucleotide
acgagcucguggcaguggu

SEQ ID NO: 1869695 - RNA, 19 nt, Artificial Sequence
  Description of Artificial Sequence: Synthetic oligonucleotide
ucccacggguuucuacgug

SEQ ID NO: 1869696 - RNA, 19 nt, Artificial Sequence
  Description of Artificial Sequence: Synthetic oligonucleotide
ggucugaccuggaggaugg

SEQ ID NO: 1869697 - RNA, 19 nt, Artificial Sequence
  Description of Artificial Sequence: Synthetic oligonucleotide
gagcucguggcagugguuc

SEQ ID NO: 1869698 - RNA, 19 nt, Artificial Sequence
  Description of Artificial Sequence: Synthetic oligonucleotide
gauggugacgcagacuggu

SEQ ID NO: 1869699 - RNA, 19 nt, Artificial Sequence
  Description of Artificial Sequence: Synthetic oligonucleotide
uucccacggguuucuacgu

SEQ ID NO: 1869700 - RNA, 19 nt, Artificial Sequence
  Description of Artificial Sequence: Synthetic oligonucleotide
acaugccuuuucccacggg

SEQ ID NO: 1869701 - RNA, 19 nt, Artificial Sequence
  Description of Artificial Sequence: Synthetic oligonucleotide
acuggcuuaaggauuggua

SEQ ID NO: 1869702 - RNA, 19 nt, Artificial Sequence
  Description of Artificial Sequence: Synthetic oligonucleotide
ucucaguuugcaguauauu

SEQ ID NO: 1869703 - RNA, 19 nt, Artificial Sequence
  Description of Artificial Sequence: Synthetic oligonucleotide
ugacaacggugcuucuagu

SEQ ID NO: 1869704 - RNA, 19 nt, Artificial Sequence
  Description of Artificial Sequence: Synthetic oligonucleotide
uuggccuaagcagcugcug

SEQ ID NO: 1869705 - RNA, 19 nt, Artificial Sequence
  Description of Artificial Sequence: Synthetic oligonucleotide
ucaugcccacacgugcugc

SEQ ID NO: 1869706 - RNA, 19 nt, Artificial Sequence
  Description of Artificial Sequence: Synthetic oligonucleotide
ggugacgcagacuggucug

SEQ ID NO: 1869707 - RNA, 19 nt, Artificial Sequence
  Description of Artificial Sequence: Synthetic oligonucleotide
uccgucaaaugggagcauc

SEQ ID NO: 1869708 - RNA, 19 nt, Artificial Sequence
  Description of Artificial Sequence: Synthetic oligonucleotide
gaccggagcaaaguaggca

SEQ ID NO: 1869709 - RNA, 19 nt, Artificial Sequence
  Description of Artificial Sequence: Synthetic oligonucleotide
cacggcaguucuccaagug

SEQ ID NO: 1869710 - RNA, 19 nt, Artificial Sequence
  Description of Artificial Sequence: Synthetic oligonucleotide
ccgucaaaugggagcaucg

SEQ ID NO: 1869711 - RNA, 19 nt, Artificial Sequence
  Description of Artificial Sequence: Synthetic oligonucleotide
agaaucccuucaucuguaa

SEQ ID NO: 1869712 - RNA, 19 nt, Artificial Sequence
  Description of Artificial Sequence: Synthetic oligonucleotide
guacccgcagucucucaug

SEQ ID NO: 1869713 - RNA, 19 nt, Artificial Sequence
  Description of Artificial Sequence: Synthetic oligonucleotide
ugcuuuggguuuguccgcu

SEQ ID NO: 1869714 - RNA, 19 nt, Artificial Sequence
  Description of Artificial Sequence: Synthetic oligonucleotide
agauugcuacaacccgaga

SEQ ID NO: 1869715 - RNA, 19 nt, Artificial Sequence
  Description of Artificial Sequence: Synthetic oligonucleotide
uuuguagucuggggcaguu

SEQ ID NO: 1869716 - RNA, 19 nt, Artificial Sequence
  Description of Artificial Sequence: Synthetic oligonucleotide
gacgcaucugugagauugc

SEQ ID NO: 1869717 - RNA, 19 nt, Artificial Sequence
  Description of Artificial Sequence: Synthetic oligonucleotide
gcagacuggucugaccugg

SEQ ID NO: 1869718 - RNA, 19 nt, Artificial Sequence
  Description of Artificial Sequence: Synthetic oligonucleotide
cauggcaauuccgagcuaa

SEQ ID NO: 1869719 - RNA, 19 nt, Artificial Sequence
  Description of Artificial Sequence: Synthetic oligonucleotide
auuccgagcuaagagugua

SEQ ID NO: 1869720 - RNA, 19 nt, Artificial Sequence
  Description of Artificial Sequence: Synthetic oligonucleotide
agagucgagauugggugau

SEQ ID NO: 1869721 - RNA, 19 nt, Artificial Sequence
  Description of Artificial Sequence: Synthetic oligonucleotide
ggcucuuugcucugcuuug

SEQ ID NO: 1869722 - RNA, 19 nt, Artificial Sequence
  Description of Artificial Sequence: Synthetic oligonucleotide
gcaauuccgagcuaagagu

SEQ ID NO: 1869723 - RNA, 19 nt, Artificial Sequence
  Description of Artificial Sequence: Synthetic oligonucleotide
aguuugcaguauauucgca

SEQ ID NO: 1869724 - RNA, 19 nt, Artificial Sequence
  Description of Artificial Sequence: Synthetic oligonucleotide
uacaacccgagaggcacaa

SEQ ID NO: 1869725 - RNA, 19 nt, Artificial Sequence
  Description of Artificial Sequence: Synthetic oligonucleotide
ccuagaguuggguaugaca

SEQ ID NO: 1869726 - RNA, 19 nt, Artificial Sequence
  Description of Artificial Sequence: Synthetic oligonucleotide
gcuaacacugaagguacac

SEQ ID NO: 1869727 - RNA, 19 nt, Artificial Sequence
  Description of Artificial Sequence: Synthetic oligonucleotide
cccacggguuucuacgugg

SEQ ID NO: 1869728 - RNA, 19 nt, Artificial Sequence
  Description of Artificial Sequence: Synthetic oligonucleotide
ccgcuaacacugaagguac

SEQ ID NO: 1869729 - RNA, 19 nt, Artificial Sequence
  Description of Artificial Sequence: Synthetic oligonucleotide
cagacgcucuaagccacgg

SEQ ID NO: 1869730 - RNA, 19 nt, Artificial Sequence
  Description of Artificial Sequence: Synthetic oligonucleotide
cagagucgagauuggguga

SEQ ID NO: 1869731 - RNA, 19 nt, Artificial Sequence
  Description of Artificial Sequence: Synthetic oligonucleotide
ugagcccgcaugcgcuuga

SEQ ID NO: 1869732 - RNA, 19 nt, Artificial Sequence
  Description of Artificial Sequence: Synthetic oligonucleotide
caugccuuuucccacgggu

SEQ ID NO: 1869733 - RNA, 19 nt, Artificial Sequence
  Description of Artificial Sequence: Synthetic oligonucleotide
ggcauggaccuugacauga

SEQ ID NO: 1869734 - RNA, 19 nt, Artificial Sequence
  Description of Artificial Sequence: Synthetic oligonucleotide
caugcgcuugaugccugcg

SEQ ID NO: 1869735 - RNA, 19 nt, Artificial Sequence
  Description of Artificial Sequence: Synthetic oligonucleotide
acgcucuaagccacggcag

SEQ ID NO: 1869736 - RNA, 19 nt, Artificial Sequence
  Description of Artificial Sequence: Synthetic oligonucleotide
gucccuagaguuggguaug

SEQ ID NO: 1869737 - RNA, 19 nt, Artificial Sequence
  Description of Artificial Sequence: Synthetic oligonucleotide
agggccgugagagacgcau

SEQ ID NO: 1869738 - RNA, 19 nt, Artificial Sequence
  Description of Artificial Sequence: Synthetic oligonucleotide
uuggucccuagaguugggu

SEQ ID NO: 1869739 - RNA, 19 nt, Artificial Sequence
  Description of Artificial Sequence: Synthetic oligonucleotide
cugcauccgucaaauggga

SEQ ID NO: 1869740 - RNA, 19 nt, Artificial Sequence
  Description of Artificial Sequence: Synthetic oligonucleotide
uggcagucguacagcucca

SEQ ID NO: 1869741 - RNA, 19 nt, Artificial Sequence
  Description of Artificial Sequence: Synthetic oligonucleotide
ccagccauucucaguuugc

SEQ ID NO: 1869742 - RNA, 19 nt, Artificial Sequence
  Description of Artificial Sequence: Synthetic oligonucleotide
augugucucaaagcuucgu

SEQ ID NO: 1869743 - RNA, 19 nt, Artificial Sequence
  Description of Artificial Sequence: Synthetic oligonucleotide
gaguccucacuucuuuggu

SEQ ID NO: 1869744 - RNA, 19 nt, Artificial Sequence
  Description of Artificial Sequence: Synthetic oligonucleotide
cuaagccacggcaguucuc

SEQ ID NO: 1869745 - RNA, 19 nt, Artificial Sequence
  Description of Artificial Sequence: Synthetic oligonucleotide
ggugaaugguaucaccagu

SEQ ID NO: 1869746 - RNA, 19 nt, Artificial Sequence
  Description of Artificial Sequence: Synthetic oligonucleotide
uugcaucccaagccagguu

SEQ ID NO: 1869747 - RNA, 19 nt, Artificial Sequence
  Description of Artificial Sequence: Synthetic oligonucleotide
ccgagcuaagaguguaaag

SEQ ID NO: 1869748 - RNA, 19 nt, Artificial Sequence
  Description of Artificial Sequence: Synthetic oligonucleotide
ucacgagcucguggcagug

SEQ ID NO: 1869749 - RNA, 19 nt, Artificial Sequence
  Description of Artificial Sequence: Synthetic oligonucleotide
gaccugcuggcagucguac

SEQ ID NO: 1869750 - RNA, 19 nt, Artificial Sequence
  Description of Artificial Sequence: Synthetic oligonucleotide
gaagacccugccccaccca

SEQ ID NO: 1869751 - RNA, 19 nt, Artificial Sequence
  Description of Artificial Sequence: Synthetic oligonucleotide
gcagaaucccuucaucugu

SEQ ID NO: 1869752 - RNA, 19 nt, Artificial Sequence
  Description of Artificial Sequence: Synthetic oligonucleotide
augccugcgcgggugaccu

SEQ ID NO: 1869753 - RNA, 19 nt, Artificial Sequence
  Description of Artificial Sequence: Synthetic oligonucleotide
ucccuagaguuggguauga

SEQ ID NO: 1869754 - RNA, 19 nt, Artificial Sequence
  Description of Artificial Sequence: Synthetic oligonucleotide
cuuuuaccuguaaugcuuu

SEQ ID NO: 1869755 - RNA, 19 nt, Artificial Sequence
  Description of Artificial Sequence: Synthetic oligonucleotide
guguaaagccugcauccgu

SEQ ID NO: 1869756 - RNA, 19 nt, Artificial Sequence
  Description of Artificial Sequence: Synthetic oligonucleotide
ugaggcucacgagcucgug

SEQ ID NO: 1869757 - RNA, 19 nt, Artificial Sequence
  Description of Artificial Sequence: Synthetic oligonucleotide
cagaaucccuucaucugua

SEQ ID NO: 1869758 - RNA, 19 nt, Artificial Sequence
  Description of Artificial Sequence: Synthetic oligonucleotide
ugacgcagacuggucugac

SEQ ID NO: 1869759 - RNA, 19 nt, Artificial Sequence
  Description of Artificial Sequence: Synthetic oligonucleotide
cucaagugcagaaucccuu

SEQ ID NO: 1869760 - RNA, 19 nt, Artificial Sequence
  Description of Artificial Sequence: Synthetic oligonucleotide
cugccaucugugcugaagu

SEQ ID NO: 1869761 - RNA, 19 nt, Artificial Sequence
  Description of Artificial Sequence: Synthetic oligonucleotide
ccacggguuucuacguggg

SEQ ID NO: 1869762 - RNA, 19 nt, Artificial Sequence
  Description of Artificial Sequence: Synthetic oligonucleotide
acgcaucugugagauugcu

SEQ ID NO: 1869763 - RNA, 19 nt, Artificial Sequence
  Description of Artificial Sequence: Synthetic oligonucleotide
gagucgagauugggugaug

SEQ ID NO: 1869764 - RNA, 19 nt, Artificial Sequence
  Description of Artificial Sequence: Synthetic oligonucleotide
cuacaacccgagaggcaca

SEQ ID NO: 1869765 - RNA, 19 nt, Artificial Sequence
  Description of Artificial Sequence: Synthetic oligonucleotide
caccaguuacugccaucug

SEQ ID NO: 1869766 - RNA, 19 nt, Artificial Sequence
  Description of Artificial Sequence: Synthetic oligonucleotide
gcgcuugaugccugcgcgg

SEQ ID NO: 1869767 - RNA, 19 nt, Artificial Sequence
  Description of Artificial Sequence: Synthetic oligonucleotide
cgugagagacgcaucugug

SEQ ID NO: 1869768 - RNA, 19 nt, Artificial Sequence
  Description of Artificial Sequence: Synthetic oligonucleotide
agccugcauccgucaaaug

SEQ ID NO: 1869769 - RNA, 19 nt, Artificial Sequence
  Description of Artificial Sequence: Synthetic oligonucleotide
gcucacgagcucguggcag

SEQ ID NO: 1869770 - RNA, 19 nt, Artificial Sequence
  Description of Artificial Sequence: Synthetic oligonucleotide
cccgcaugcgcuugaugcc

SEQ ID NO: 1869771 - RNA, 19 nt, Artificial Sequence
  Description of Artificial Sequence: Synthetic oligonucleotide
cagggcuugcagcuuggga

SEQ ID NO: 1869772 - RNA, 19 nt, Artificial Sequence
  Description of Artificial Sequence: Synthetic oligonucleotide
gguuucuacgugggaacca

SEQ ID NO: 1869773 - RNA, 19 nt, Artificial Sequence
  Description of Artificial Sequence: Synthetic oligonucleotide
ggacaguggauggauagcu

SEQ ID NO: 1869774 - RNA, 19 nt, Artificial Sequence
  Description of Artificial Sequence: Synthetic oligonucleotide
cgucaaaugggagcaucgg

SEQ ID NO: 1869775 - RNA, 19 nt, Artificial Sequence
  Description of Artificial Sequence: Synthetic oligonucleotide
cggguuucuacgugggaac

SEQ ID NO: 1869776 - RNA, 19 nt, Artificial Sequence
  Description of Artificial Sequence: Synthetic oligonucleotide
cuuggccuaagcagcugcu

SEQ ID NO: 1869777 - RNA, 19 nt, Artificial Sequence
  Description of Artificial Sequence: Synthetic oligonucleotide
gugaugcgugagcaggacu

SEQ ID NO: 1869778 - RNA, 19 nt, Artificial Sequence
  Description of Artificial Sequence: Synthetic oligonucleotide
aguaggccacuggcuuaag

SEQ ID NO: 1869779 - RNA, 19 nt, Artificial Sequence
  Description of Artificial Sequence: Synthetic oligonucleotide
ccagacgcucuaagccacg

SEQ ID NO: 1869780 - RNA, 19 nt, Artificial Sequence
  Description of Artificial Sequence: Synthetic oligonucleotide
ucguggcagugguucugaa

SEQ ID NO: 1869781 - RNA, 19 nt, Artificial Sequence
  Description of Artificial Sequence: Synthetic oligonucleotide
gcagucguacagcuccaga

SEQ ID NO: 1869782 - RNA, 19 nt, Artificial Sequence
  Description of Artificial Sequence: Synthetic oligonucleotide
guccgcuaacacugaaggu

SEQ ID NO: 1869783 - RNA, 19 nt, Artificial Sequence
  Description of Artificial Sequence: Synthetic oligonucleotide
cucguggcagugguucuga

SEQ ID NO: 1869784 - RNA, 19 nt, Artificial Sequence
  Description of Artificial Sequence: Synthetic oligonucleotide
caacggugcuucuagucuu

SEQ ID NO: 1869785 - RNA, 19 nt, Artificial Sequence
  Description of Artificial Sequence: Synthetic oligonucleotide
cagacuggucugaccugga

SEQ ID NO: 1869786 - RNA, 19 nt, Artificial Sequence
  Description of Artificial Sequence: Synthetic oligonucleotide
gucugaccuggaggauggg

SEQ ID NO: 1869787 - RNA, 19 nt, Artificial Sequence
  Description of Artificial Sequence: Synthetic oligonucleotide
cucacgagcucguggcagu

SEQ ID NO: 1869788 - RNA, 19 nt, Artificial Sequence
  Description of Artificial Sequence: Synthetic oligonucleotide
cacggguuucuacguggga

SEQ ID NO: 1869789 - RNA, 19 nt, Artificial Sequence
  Description of Artificial Sequence: Synthetic oligonucleotide
ccggagcaaaguaggcaug

SEQ ID NO: 1869790 - RNA, 19 nt, Artificial Sequence
  Description of Artificial Sequence: Synthetic oligonucleotide
gcgcgggugaccugcuggc

SEQ ID NO: 1869791 - RNA, 19 nt, Artificial Sequence
  Description of Artificial Sequence: Synthetic oligonucleotide
ggccgugagagacgcaucu

SEQ ID NO: 1869792 - RNA, 19 nt, Artificial Sequence
  Description of Artificial Sequence: Synthetic oligonucleotide
cugagcccgcaugcgcuug

SEQ ID NO: 1869793 - RNA, 19 nt, Artificial Sequence
  Description of Artificial Sequence: Synthetic oligonucleotide
cacaaagccugcagccggu

SEQ ID NO: 1869794 - RNA, 19 nt, Artificial Sequence
  Description of Artificial Sequence: Synthetic oligonucleotide
gccugcgcgggugaccugc

SEQ ID NO: 1869795 - RNA, 19 nt, Artificial Sequence
  Description of Artificial Sequence: Synthetic oligonucleotide
gcuuaaggauugguagaaa

SEQ ID NO: 1869796 - RNA, 19 nt, Artificial Sequence
  Description of Artificial Sequence: Synthetic oligonucleotide
gugagcaggacugcagguu

SEQ ID NO: 1869797 - RNA, 19 nt, Artificial Sequence
  Description of Artificial Sequence: Synthetic oligonucleotide
ccuguaaugcuuucccaau

SEQ ID NO: 1869798 - RNA, 19 nt, Artificial Sequence
  Description of Artificial Sequence: Synthetic oligonucleotide
gcucguggcagugguucug

SEQ ID NO: 1869799 - RNA, 19 nt, Artificial Sequence
  Description of Artificial Sequence: Synthetic oligonucleotide
gugggaaccaccagccauu

SEQ ID NO: 1869800 - RNA, 19 nt, Artificial Sequence
  Description of Artificial Sequence: Synthetic oligonucleotide
gccuuuucccacggguuuc

SEQ ID NO: 1869801 - RNA, 19 nt, Artificial Sequence
  Description of Artificial Sequence: Synthetic oligonucleotide
auccgucaaaugggagcau

SEQ ID NO: 1869802 - RNA, 19 nt, Artificial Sequence
  Description of Artificial Sequence: Synthetic oligonucleotide
gccgugagagacgcaucug

SEQ ID NO: 1869803 - RNA, 19 nt, Artificial Sequence
  Description of Artificial Sequence: Synthetic oligonucleotide
ggcucacgagcucguggca

SEQ ID NO: 1869804 - RNA, 19 nt, Artificial Sequence
  Description of Artificial Sequence: Synthetic oligonucleotide
cauugacaacggugcuucu

SEQ ID NO: 1869805 - RNA, 19 nt, Artificial Sequence
  Description of Artificial Sequence: Synthetic oligonucleotide
cugcgcgggugaccugcug

SEQ ID NO: 1869806 - RNA, 19 nt, Artificial Sequence
  Description of Artificial Sequence: Synthetic oligonucleotide
ugccugcgcgggugaccug

SEQ ID NO: 1869807 - RNA, 19 nt, Artificial Sequence
  Description of Artificial Sequence: Synthetic oligonucleotide
acaacccgagaggcacaaa

SEQ ID NO: 1869808 - RNA, 19 nt, Artificial Sequence
  Description of Artificial Sequence: Synthetic oligonucleotide
cccgagaggcacaaagccu

SEQ ID NO: 1869809 - RNA, 19 nt, Artificial Sequence
  Description of Artificial Sequence: Synthetic oligonucleotide
guacagcuccagacgcucu

SEQ ID NO: 1869810 - RNA, 19 nt, Artificial Sequence
  Description of Artificial Sequence: Synthetic oligonucleotide
cacuggcuuaaggauuggu

SEQ ID NO: 1869811 - RNA, 19 nt, Artificial Sequence
  Description of Artificial Sequence: Synthetic oligonucleotide
gcucacagugggacaaacu

SEQ ID NO: 1869812 - RNA, 19 nt, Artificial Sequence
  Description of Artificial Sequence: Synthetic oligonucleotide
cccuagaguuggguaugac

SEQ ID NO: 1869813 - RNA, 19 nt, Artificial Sequence
  Description of Artificial Sequence: Synthetic oligonucleotide
gcacagucgguguccacuu

SEQ ID NO: 1869814 - RNA, 19 nt, Artificial Sequence
  Description of Artificial Sequence: Synthetic oligonucleotide
gagacgcaucugugagauu

SEQ ID NO: 1869815 - RNA, 19 nt, Artificial Sequence
  Description of Artificial Sequence: Synthetic oligonucleotide
caccagccauucucaguuu

SEQ ID NO: 1869816 - RNA, 19 nt, Artificial Sequence
  Description of Artificial Sequence: Synthetic oligonucleotide
ccgcaugcgcuugaugccu

SEQ ID NO: 1869817 - RNA, 19 nt, Artificial Sequence
  Description of Artificial Sequence: Synthetic oligonucleotide
ccacggcaguucuccaagu

SEQ ID NO: 1869818 - RNA, 19 nt, Artificial Sequence
  Description of Artificial Sequence: Synthetic oligonucleotide
gcuugcagcuugggacagu

SEQ ID NO: 1869819 - RNA, 19 nt, Artificial Sequence
  Description of Artificial Sequence: Synthetic oligonucleotide
cgcauugacaacggugcuu

SEQ ID NO: 1869820 - RNA, 19 nt, Artificial Sequence
  Description of Artificial Sequence: Synthetic oligonucleotide
ccugcgcgggugaccugcu

SEQ ID NO: 1869821 - RNA, 19 nt, Artificial Sequence
  Description of Artificial Sequence: Synthetic oligonucleotide
aaugacaccauccucaucu

SEQ ID NO: 1869822 - RNA, 19 nt, Artificial Sequence
  Description of Artificial Sequence: Synthetic oligonucleotide
aaagauggaaaauuggucu

SEQ ID NO: 1869823 - RNA, 19 nt, Artificial Sequence
  Description of Artificial Sequence: Synthetic oligonucleotide
aaaugaugaucaaagaugg

SEQ ID NO: 1869824 - RNA, 19 nt, Artificial Sequence
  Description of Artificial Sequence: Synthetic oligonucleotide
guuucuuucguacaggcgg

SEQ ID NO: 1869825 - RNA, 19 nt, Artificial Sequence
  Description of Artificial Sequence: Synthetic oligonucleotide
aaagguucaguuucuuucg

SEQ ID NO: 1869826 - RNA, 19 nt, Artificial Sequence
  Description of Artificial Sequence: Synthetic oligonucleotide
uacacauugauuuauuaga

SEQ ID NO: 1869827 - RNA, 19 nt, Artificial Sequence
  Description of Artificial Sequence: Synthetic oligonucleotide
aggccaguggaucugagcc

SEQ ID NO: 1869828 - RNA, 19 nt, Artificial Sequence
  Description of Artificial Sequence: Synthetic oligonucleotide
uguucugccaaaugaauug

SEQ ID NO: 1869829 - RNA, 19 nt, Artificial Sequence
  Description of Artificial Sequence: Synthetic oligonucleotide
caucauaaugacaccaucc

SEQ ID NO: 1869830 - RNA, 19 nt, Artificial Sequence
  Description of Artificial Sequence: Synthetic oligonucleotide
uauugcacgauccugggaa

SEQ ID NO: 1869831 - RNA, 19 nt, Artificial Sequence
  Description of Artificial Sequence: Synthetic oligonucleotide
aagauggaaaauuggucug

SEQ ID NO: 1869832 - RNA, 19 nt, Artificial Sequence
  Description of Artificial Sequence: Synthetic oligonucleotide
ucugacuauugcacgaucc

SEQ ID NO: 1869833 - RNA, 19 nt, Artificial Sequence
  Description of Artificial Sequence: Synthetic oligonucleotide
uacaagagagccuggaucu

SEQ ID NO: 1869834 - RNA, 19 nt, Artificial Sequence
  Description of Artificial Sequence: Synthetic oligonucleotide
uggaucugagccuaugcgg

SEQ ID NO: 1869835 - RNA, 19 nt, Artificial Sequence
  Description of Artificial Sequence: Synthetic oligonucleotide
ugaugaucaaagauggaaa

SEQ ID NO: 1869836 - RNA, 19 nt, Artificial Sequence
  Description of Artificial Sequence: Synthetic oligonucleotide
cuccgcaucauaaugacac

SEQ ID NO: 1869837 - RNA, 19 nt, Artificial Sequence
  Description of Artificial Sequence: Synthetic oligonucleotide
ugcccuuuggggaugaaag

SEQ ID NO: 1869838 - RNA, 19 nt, Artificial Sequence
  Description of Artificial Sequence: Synthetic oligonucleotide
aggcaaaucugccuugggc

SEQ ID NO: 1869839 - RNA, 19 nt, Artificial Sequence
  Description of Artificial Sequence: Synthetic oligonucleotide
aaaacuacacauugauuua

SEQ ID NO: 1869840 - RNA, 19 nt, Artificial Sequence
  Description of Artificial Sequence: Synthetic oligonucleotide
aucauaaugacaccauccu

SEQ ID NO: 1869841 - RNA, 19 nt, Artificial Sequence
  Description of Artificial Sequence: Synthetic oligonucleotide
gacuauugcacgauccugg

SEQ ID NO: 1869842 - RNA, 19 nt, Artificial Sequence
  Description of Artificial Sequence: Synthetic oligonucleotide
aacugcgguggcuuuguac

SEQ ID NO: 1869843 - RNA, 19 nt, Artificial Sequence
  Description of Artificial Sequence: Synthetic oligonucleotide
ucgaugucaccuugcaugg

SEQ ID NO: 1869844 - RNA, 19 nt, Artificial Sequence
  Description of Artificial Sequence: Synthetic oligonucleotide
uguacaugguugucgaugu

SEQ ID NO: 1869845 - RNA, 19 nt, Artificial Sequence
  Description of Artificial Sequence: Synthetic oligonucleotide
agcaaaggucucuucugcc

SEQ ID NO: 1869846 - RNA, 19 nt, Artificial Sequence
  Description of Artificial Sequence: Synthetic oligonucleotide
ugugggagagucuauggga

SEQ ID NO: 1869847 - RNA, 19 nt, Artificial Sequence
  Description of Artificial Sequence: Synthetic oligonucleotide
ugucuccccagccacaugc

SEQ ID NO: 1869848 - RNA, 19 nt, Artificial Sequence
  Description of Artificial Sequence: Synthetic oligonucleotide
ucugugggagagucuaugg

SEQ ID NO: 1869849 - RNA, 19 nt, Artificial Sequence
  Description of Artificial Sequence: Synthetic oligonucleotide
cuugggcucagucacgugg

SEQ ID NO: 1869850 - RNA, 19 nt, Artificial Sequence
  Description of Artificial Sequence: Synthetic oligonucleotide
ggaaaauuggucuggauga

SEQ ID NO: 1869851 - RNA, 19 nt, Artificial Sequence
  Description of Artificial Sequence: Synthetic oligonucleotide
ggugagucuagcuuguggg

SEQ ID NO: 1869852 - RNA, 19 nt, Artificial Sequence
  Description of Artificial Sequence: Synthetic oligonucleotide
ugaucaaagauggaaaauu

SEQ ID NO: 1869853 - RNA, 19 nt, Artificial Sequence
  Description of Artificial Sequence: Synthetic oligonucleotide
uacaggagggcccagucga

SEQ ID NO: 1869854 - RNA, 19 nt, Artificial Sequence
  Description of Artificial Sequence: Synthetic oligonucleotide
gaugaucaaagauggaaaa

SEQ ID NO: 1869855 - RNA, 19 nt, Artificial Sequence
  Description of Artificial Sequence: Synthetic oligonucleotide
gagucuaugggacacccac

SEQ ID NO: 1869856 - RNA, 19 nt, Artificial Sequence
  Description of Artificial Sequence: Synthetic oligonucleotide
acugcgguggcuuuguaca

SEQ ID NO: 1869857 - RNA, 19 nt, Artificial Sequence
  Description of Artificial Sequence: Synthetic oligonucleotide
guuccaguacaagagagcc

SEQ ID NO: 1869858 - RNA, 19 nt, Artificial Sequence
  Description of Artificial Sequence: Synthetic oligonucleotide
acuauugcacgauccuggg

SEQ ID NO: 1869859 - RNA, 19 nt, Artificial Sequence
  Description of Artificial Sequence: Synthetic oligonucleotide
aaugaauugggaaggcagu

SEQ ID NO: 1869860 - RNA, 19 nt, Artificial Sequence
  Description of Artificial Sequence: Synthetic oligonucleotide
aggggugaagacaucaucg

SEQ ID NO: 1869861 - RNA, 19 nt, Artificial Sequence
  Description of Artificial Sequence: Synthetic oligonucleotide
uuucuuucguacaggcggc

SEQ ID NO: 1869862 - RNA, 19 nt, Artificial Sequence
  Description of Artificial Sequence: Synthetic oligonucleotide
accacucugacuauugcac

SEQ ID NO: 1869863 - RNA, 19 nt, Artificial Sequence
  Description of Artificial Sequence: Synthetic oligonucleotide
guuggaucccgguuuagcc

SEQ ID NO: 1869864 - RNA, 19 nt, Artificial Sequence
  Description of Artificial Sequence: Synthetic oligonucleotide
augaaaggcucucccuccc

SEQ ID NO: 1869865 - RNA, 19 nt, Artificial Sequence
  Description of Artificial Sequence: Synthetic oligonucleotide
guggaucugagccuaugcg

SEQ ID NO: 1869866 - RNA, 19 nt, Artificial Sequence
  Description of Artificial Sequence: Synthetic oligonucleotide
uggaucuagagauggggca

SEQ ID NO: 1869867 - RNA, 19 nt, Artificial Sequence
  Description of Artificial Sequence: Synthetic oligonucleotide
ugugccugugagcaaaggu

SEQ ID NO: 1869868 - RNA, 19 nt, Artificial Sequence
  Description of Artificial Sequence: Synthetic oligonucleotide
ugcauggcaacuccugccc

SEQ ID NO: 1869869 - RNA, 19 nt, Artificial Sequence
  Description of Artificial Sequence: Synthetic oligonucleotide
ucuaugggacacccacugg

SEQ ID NO: 1869870 - RNA, 19 nt, Artificial Sequence
  Description of Artificial Sequence: Synthetic oligonucleotide
ugggcuugggcucagucac

SEQ ID NO: 1869871 - RNA, 19 nt, Artificial Sequence
  Description of Artificial Sequence: Synthetic oligonucleotide
ucaguuucuuucguacagg

SEQ ID NO: 1869872 - RNA, 19 nt, Artificial Sequence
  Description of Artificial Sequence: Synthetic oligonucleotide
gaguaugugccugugagca

SEQ ID NO: 1869873 - RNA, 19 nt, Artificial Sequence
  Description of Artificial Sequence: Synthetic oligonucleotide
cuggaucuagagauggggc

SEQ ID NO: 1869874 - RNA, 19 nt, Artificial Sequence
  Description of Artificial Sequence: Synthetic oligonucleotide
uacaugguugucgauguca

SEQ ID NO: 1869875 - RNA, 19 nt, Artificial Sequence
  Description of Artificial Sequence: Synthetic oligonucleotide
guacaagagagccuggauc

SEQ ID NO: 1869876 - RNA, 19 nt, Artificial Sequence
  Description of Artificial Sequence: Synthetic oligonucleotide
cuugcuccgcaucauaaug

SEQ ID NO: 1869877 - RNA, 19 nt, Artificial Sequence
  Description of Artificial Sequence: Synthetic oligonucleotide
caguuucuuucguacaggc

SEQ ID NO: 1869878 - RNA, 19 nt, Artificial Sequence
  Description of Artificial Sequence: Synthetic oligonucleotide
uuucguacaggcggcagag

SEQ ID NO: 1869879 - RNA, 19 nt, Artificial Sequence
  Description of Artificial Sequence: Synthetic oligonucleotide
gaugacaggcaaaucugcc

SEQ ID NO: 1869880 - RNA, 19 nt, Artificial Sequence
  Description of Artificial Sequence: Synthetic oligonucleotide
gacaccaugggcuugggcu

SEQ ID NO: 1869881 - RNA, 19 nt, Artificial Sequence
  Description of Artificial Sequence: Synthetic oligonucleotide
uugcuccgcaucauaauga

SEQ ID NO: 1869882 - RNA, 19 nt, Artificial Sequence
  Description of Artificial Sequence: Synthetic oligonucleotide
uucucugggagcguggggc

SEQ ID NO: 1869883 - RNA, 19 nt, Artificial Sequence
  Description of Artificial Sequence: Synthetic oligonucleotide
ugcccaaaacagcacuugc

SEQ ID NO: 1869884 - RNA, 19 nt, Artificial Sequence
  Description of Artificial Sequence: Synthetic oligonucleotide
agaggagacagcugggcca

SEQ ID NO: 1869885 - RNA, 19 nt, Artificial Sequence
  Description of Artificial Sequence: Synthetic oligonucleotide
gucuaugggacacccacug

SEQ ID NO: 1869886 - RNA, 19 nt, Artificial Sequence
  Description of Artificial Sequence: Synthetic oligonucleotide
gaaaauuggucuggaugag

SEQ ID NO: 1869887 - RNA, 19 nt, Artificial Sequence
  Description of Artificial Sequence: Synthetic oligonucleotide
uauucucugggagcguggg

SEQ ID NO: 1869888 - RNA, 19 nt, Artificial Sequence
  Description of Artificial Sequence: Synthetic oligonucleotide
gaccaauccaggucaggag

SEQ ID NO: 1869889 - RNA, 19 nt, Artificial Sequence
  Description of Artificial Sequence: Synthetic oligonucleotide
caacuccugcccaaaacag

SEQ ID NO: 1869890 - RNA, 19 nt, Artificial Sequence
  Description of Artificial Sequence: Synthetic oligonucleotide
aauuccucguucaccaggu

SEQ ID NO: 1869891 - RNA, 19 nt, Artificial Sequence
  Description of Artificial Sequence: Synthetic oligonucleotide
caggucaggaggcaagggg

SEQ ID NO: 1869892 - RNA, 19 nt, Artificial Sequence
  Description of Artificial Sequence: Synthetic oligonucleotide
gagaggagacagcugggcc

SEQ ID NO: 1869893 - RNA, 19 nt, Artificial Sequence
  Description of Artificial Sequence: Synthetic oligonucleotide
cucugauacaggagggccc

SEQ ID NO: 1869894 - RNA, 19 nt, Artificial Sequence
  Description of Artificial Sequence: Synthetic oligonucleotide
agcacccauggccccaucc

SEQ ID NO: 1869895 - RNA, 19 nt, Artificial Sequence
  Description of Artificial Sequence: Synthetic oligonucleotide
ucuacugcccuuuggggau

SEQ ID NO: 1869896 - RNA, 19 nt, Artificial Sequence
  Description of Artificial Sequence: Synthetic oligonucleotide
gggaguaugugccugugag

SEQ ID NO: 1869897 - RNA, 19 nt, Artificial Sequence
  Description of Artificial Sequence: Synthetic oligonucleotide
caagccgugcugcaguggg

SEQ ID NO: 1869898 - RNA, 19 nt, Artificial Sequence
  Description of Artificial Sequence: Synthetic oligonucleotide
cugugggagagucuauggg

SEQ ID NO: 1869899 - RNA, 19 nt, Artificial Sequence
  Description of Artificial Sequence: Synthetic oligonucleotide
aagguucaguuucuuucgu

SEQ ID NO: 1869900 - RNA, 19 nt, Artificial Sequence
  Description of Artificial Sequence: Synthetic oligonucleotide
uugucgaugucaccuugca

SEQ ID NO: 1869901 - RNA, 19 nt, Artificial Sequence
  Description of Artificial Sequence: Synthetic oligonucleotide
guucugccaaaugaauugg

SEQ ID NO: 1869902 - RNA, 19 nt, Artificial Sequence
  Description of Artificial Sequence: Synthetic oligonucleotide
cagucgaggccaaggaagg

SEQ ID NO: 1869903 - RNA, 19 nt, Artificial Sequence
  Description of Artificial Sequence: Synthetic oligonucleotide
ucugauacaggagggccca

SEQ ID NO: 1869904 - RNA, 19 nt, Artificial Sequence
  Description of Artificial Sequence: Synthetic oligonucleotide
gguucaguuucuuucguac

SEQ ID NO: 1869905 - RNA, 19 nt, Artificial Sequence
  Description of Artificial Sequence: Synthetic oligonucleotide
gguuggacagacaccaugg

SEQ ID NO: 1869906 - RNA, 19 nt, Artificial Sequence
  Description of Artificial Sequence: Synthetic oligonucleotide
ggagaggacacuucccagg

SEQ ID NO: 1869907 - RNA, 19 nt, Artificial Sequence
  Description of Artificial Sequence: Synthetic oligonucleotide
ugacuauugcacgauccug

SEQ ID NO: 1869908 - RNA, 19 nt, Artificial Sequence
  Description of Artificial Sequence: Synthetic oligonucleotide
auaaugacaccauccucau

SEQ ID NO: 1869909 - RNA, 19 nt, Artificial Sequence
  Description of Artificial Sequence: Synthetic oligonucleotide
gaucuagagauggggcagg

SEQ ID NO: 1869910 - RNA, 19 nt, Artificial Sequence
  Description of Artificial Sequence: Synthetic oligonucleotide
ugagucuagcuugugggcu

SEQ ID NO: 1869911 - RNA, 19 nt, Artificial Sequence
  Description of Artificial Sequence: Synthetic oligonucleotide
gcuguauucucugggagcg

SEQ ID NO: 1869912 - RNA, 19 nt, Artificial Sequence
  Description of Artificial Sequence: Synthetic oligonucleotide
ggugggugagucuagcuug

SEQ ID NO: 1869913 - RNA, 19 nt, Artificial Sequence
  Description of Artificial Sequence: Synthetic oligonucleotide
uggaucccgguuuagcccu

SEQ ID NO: 1869914 - RNA, 19 nt, Artificial Sequence
  Description of Artificial Sequence: Synthetic oligonucleotide
gauacaggagggcccaguc

SEQ ID NO: 1869915 - RNA, 19 nt, Artificial Sequence
  Description of Artificial Sequence: Synthetic oligonucleotide
cuuuggggaugaaaggcuc

SEQ ID NO: 1869916 - RNA, 19 nt, Artificial Sequence
  Description of Artificial Sequence: Synthetic oligonucleotide
gaauugggaaggcaguucu

SEQ ID NO: 1869917 - RNA, 19 nt, Artificial Sequence
  Description of Artificial Sequence: Synthetic oligonucleotide
uuuagcccuaggaccuugc

SEQ ID NO: 1869918 - RNA, 19 nt, Artificial Sequence
  Description of Artificial Sequence: Synthetic oligonucleotide
ugaagacaucaucggugcc

SEQ ID NO: 1869919 - RNA, 19 nt, Artificial Sequence
  Description of Artificial Sequence: Synthetic oligonucleotide
auugcacgauccugggaag

SEQ ID NO: 1869920 - RNA, 19 nt, Artificial Sequence
  Description of Artificial Sequence: Synthetic oligonucleotide
aguuucuuucguacaggcg

SEQ ID NO: 1869921 - RNA, 19 nt, Artificial Sequence
  Description of Artificial Sequence: Synthetic oligonucleotide
agccuggaucuagagaugg

SEQ ID NO: 1869922 - RNA, 19 nt, Artificial Sequence
  Description of Artificial Sequence: Synthetic oligonucleotide
uugcccuucaauuccucgu

SEQ ID NO: 1869923 - RNA, 19 nt, Artificial Sequence
  Description of Artificial Sequence: Synthetic oligonucleotide
cuagcuugugggcuggcac

SEQ ID NO: 1869924 - RNA, 19 nt, Artificial Sequence
  Description of Artificial Sequence: Synthetic oligonucleotide
ucaggugacuguggggagg

SEQ ID NO: 1869925 - RNA, 19 nt, Artificial Sequence
  Description of Artificial Sequence: Synthetic oligonucleotide
ucccgguuuagcccuagga

SEQ ID NO: 1869926 - RNA, 19 nt, Artificial Sequence
  Description of Artificial Sequence: Synthetic oligonucleotide
ggaucugagccuaugcggg

SEQ ID NO: 1869927 - RNA, 19 nt, Artificial Sequence
  Description of Artificial Sequence: Synthetic oligonucleotide
gagucuagcuugugggcug

SEQ ID NO: 1869928 - RNA, 19 nt, Artificial Sequence
  Description of Artificial Sequence: Synthetic oligonucleotide
uuagcccuaggaccuugcc

SEQ ID NO: 1869929 - RNA, 19 nt, Artificial Sequence
  Description of Artificial Sequence: Synthetic oligonucleotide
ugaggcagcgcuguauucu

SEQ ID NO: 1869930 - RNA, 19 nt, Artificial Sequence
  Description of Artificial Sequence: Synthetic oligonucleotide
uggggcugucacuuggugc

SEQ ID NO: 1869931 - RNA, 19 nt, Artificial Sequence
  Description of Artificial Sequence: Synthetic oligonucleotide
ugcaggggugaagacauca

SEQ ID NO: 1869932 - RNA, 19 nt, Artificial Sequence
  Description of Artificial Sequence: Synthetic oligonucleotide
gcuuuguacaugguugucg

SEQ ID NO: 1869933 - RNA, 19 nt, Artificial Sequence
  Description of Artificial Sequence: Synthetic oligonucleotide
gagagucuaugggacaccc

SEQ ID NO: 1869934 - RNA, 19 nt, Artificial Sequence
  Description of Artificial Sequence: Synthetic oligonucleotide
aggccaaggaagguucagc

SEQ ID NO: 1869935 - RNA, 19 nt, Artificial Sequence
  Description of Artificial Sequence: Synthetic oligonucleotide
ggagggaccacucugacua

SEQ ID NO: 1869936 - RNA, 19 nt, Artificial Sequence
  Description of Artificial Sequence: Synthetic oligonucleotide
aaugaugaucaaagaugga

SEQ ID NO: 1869937 - RNA, 19 nt, Artificial Sequence
  Description of Artificial Sequence: Synthetic oligonucleotide
gagaggacacuucccagga

SEQ ID NO: 1869938 - RNA, 19 nt, Artificial Sequence
  Description of Artificial Sequence: Synthetic oligonucleotide
ugggcucauaggccagugg

SEQ ID NO: 1869939 - RNA, 19 nt, Artificial Sequence
  Description of Artificial Sequence: Synthetic oligonucleotide
gagucagccuuguuggauc

SEQ ID NO: 1869940 - RNA, 19 nt, Artificial Sequence
  Description of Artificial Sequence: Synthetic oligonucleotide
uccuugcuccgcaucauaa

SEQ ID NO: 1869941 - RNA, 19 nt, Artificial Sequence
  Description of Artificial Sequence: Synthetic oligonucleotide
agacaccaugggcuugggc

SEQ ID NO: 1869942 - RNA, 19 nt, Artificial Sequence
  Description of Artificial Sequence: Synthetic oligonucleotide
gggucgauggugaugacag

SEQ ID NO: 1869943 - RNA, 19 nt, Artificial Sequence
  Description of Artificial Sequence: Synthetic oligonucleotide
uuccaguacaagagagccu

SEQ ID NO: 1869944 - RNA, 19 nt, Artificial Sequence
  Description of Artificial Sequence: Synthetic oligonucleotide
ugcauggagaggagacagc

SEQ ID NO: 1869945 - RNA, 19 nt, Artificial Sequence
  Description of Artificial Sequence: Synthetic oligonucleotide
ugaauugggaaggcaguuc

SEQ ID NO: 1869946 - RNA, 19 nt, Artificial Sequence
  Description of Artificial Sequence: Synthetic oligonucleotide
acuccugcccaaaacagca

SEQ ID NO: 1869947 - RNA, 19 nt, Artificial Sequence
  Description of Artificial Sequence: Synthetic oligonucleotide
gacaggcaaaucugccuug

SEQ ID NO: 1869948 - RNA, 19 nt, Artificial Sequence
  Description of Artificial Sequence: Synthetic oligonucleotide
uccgcaucauaaugacacc

SEQ ID NO: 1869949 - RNA, 19 nt, Artificial Sequence
  Description of Artificial Sequence: Synthetic oligonucleotide
ccgguuuagcccuaggacc

SEQ ID NO: 1869950 - RNA, 19 nt, Artificial Sequence
  Description of Artificial Sequence: Synthetic oligonucleotide
ucugagccuaugcgggccc

SEQ ID NO: 1869951 - RNA, 19 nt, Artificial Sequence
  Description of Artificial Sequence: Synthetic oligonucleotide
gggccaagcacccauggcc

SEQ ID NO: 1869952 - RNA, 19 nt, Artificial Sequence
  Description of Artificial Sequence: Synthetic oligonucleotide
cacgauccugggaaggcag

SEQ ID NO: 1869953 - RNA, 19 nt, Artificial Sequence
  Description of Artificial Sequence: Synthetic oligonucleotide
agcgcuguauucucuggga

SEQ ID NO: 1869954 - RNA, 19 nt, Artificial Sequence
  Description of Artificial Sequence: Synthetic oligonucleotide
ccagucgaggccaaggaag

SEQ ID NO: 1869955 - RNA, 19 nt, Artificial Sequence
  Description of Artificial Sequence: Synthetic oligonucleotide
uggcucuacugcccuuugg

SEQ ID NO: 1869956 - RNA, 19 nt, Artificial Sequence
  Description of Artificial Sequence: Synthetic oligonucleotide
cccgagucagccuuguugg

SEQ ID NO: 1869957 - RNA, 19 nt, Artificial Sequence
  Description of Artificial Sequence: Synthetic oligonucleotide
auucucugggagcgugggg

SEQ ID NO: 1869958 - RNA, 19 nt, Artificial Sequence
  Description of Artificial Sequence: Synthetic oligonucleotide
ggcggaagggaguaugugc

SEQ ID NO: 1869959 - RNA, 19 nt, Artificial Sequence
  Description of Artificial Sequence: Synthetic oligonucleotide
uugcacgauccugggaagg

SEQ ID NO: 1869960 - RNA, 19 nt, Artificial Sequence
  Description of Artificial Sequence: Synthetic oligonucleotide
gaagggagggccucaugga

SEQ ID NO: 1869961 - RNA, 19 nt, Artificial Sequence
  Description of Artificial Sequence: Synthetic oligonucleotide
cucuacugcccuuugggga

SEQ ID NO: 1869962 - RNA, 19 nt, Artificial Sequence
  Description of Artificial Sequence: Synthetic oligonucleotide
ucuuucguacaggcggcag

SEQ ID NO: 1869963 - RNA, 19 nt, Artificial Sequence
  Description of Artificial Sequence: Synthetic oligonucleotide
gauggaaaauuggucugga

SEQ ID NO: 1869964 - RNA, 19 nt, Artificial Sequence
  Description of Artificial Sequence: Synthetic oligonucleotide
agcggcagcaacugcggug

SEQ ID NO: 1869965 - RNA, 19 nt, Artificial Sequence
  Description of Artificial Sequence: Synthetic oligonucleotide
aauugggaaggcaguucug

SEQ ID NO: 1869966 - RNA, 19 nt, Artificial Sequence
  Description of Artificial Sequence: Synthetic oligonucleotide
acccaucugucuccccagc

SEQ ID NO: 1869967 - RNA, 19 nt, Artificial Sequence
  Description of Artificial Sequence: Synthetic oligonucleotide
caagagagccuggaucuag

SEQ ID NO: 1869968 - RNA, 19 nt, Artificial Sequence
  Description of Artificial Sequence: Synthetic oligonucleotide
ugcacgauccugggaaggc

SEQ ID NO: 1869969 - RNA, 19 nt, Artificial Sequence
  Description of Artificial Sequence: Synthetic oligonucleotide
cuguggggaggcugggucg

SEQ ID NO: 1869970 - RNA, 19 nt, Artificial Sequence
  Description of Artificial Sequence: Synthetic oligonucleotide
gagagccuggaucuagaga

SEQ ID NO: 1869971 - RNA, 19 nt, Artificial Sequence
  Description of Artificial Sequence: Synthetic oligonucleotide
gaaaggcucucccucccca

SEQ ID NO: 1869972 - RNA, 19 nt, Artificial Sequence
  Description of Artificial Sequence: Synthetic oligonucleotide
uccucugauacaggagggc

SEQ ID NO: 1869973 - RNA, 19 nt, Artificial Sequence
  Description of Artificial Sequence: Synthetic oligonucleotide
gugccugugagcaaagguc

SEQ ID NO: 1869974 - RNA, 19 nt, Artificial Sequence
  Description of Artificial Sequence: Synthetic oligonucleotide
cauggagaggagacagcug

SEQ ID NO: 1869975 - RNA, 19 nt, Artificial Sequence
  Description of Artificial Sequence: Synthetic oligonucleotide
gggugagucuagcuugugg

SEQ ID NO: 1869976 - RNA, 19 nt, Artificial Sequence
  Description of Artificial Sequence: Synthetic oligonucleotide
ugggccaagcacccauggc

SEQ ID NO: 1869977 - RNA, 19 nt, Artificial Sequence
  Description of Artificial Sequence: Synthetic oligonucleotide
ggagccaguggcucuuugg

SEQ ID NO: 1869978 - RNA, 19 nt, Artificial Sequence
  Description of Artificial Sequence: Synthetic oligonucleotide
ucacguggcggaagggagu

SEQ ID NO: 1869979 - RNA, 19 nt, Artificial Sequence
  Description of Artificial Sequence: Synthetic oligonucleotide
ugucgaugucaccuugcau

SEQ ID NO: 1869980 - RNA, 19 nt, Artificial Sequence
  Description of Artificial Sequence: Synthetic oligonucleotide
caccuugcauggcaacucc

SEQ ID NO: 1869981 - RNA, 19 nt, Artificial Sequence
  Description of Artificial Sequence: Synthetic oligonucleotide
ggaucuagagauggggcag

SEQ ID NO: 1869982 - RNA, 19 nt, Artificial Sequence
  Description of Artificial Sequence: Synthetic oligonucleotide
agcuugugggcuggcaccg

SEQ ID NO: 1869983 - RNA, 19 nt, Artificial Sequence
  Description of Artificial Sequence: Synthetic oligonucleotide
ugcccuucaauuccucguu

SEQ ID NO: 1869984 - RNA, 19 nt, Artificial Sequence
  Description of Artificial Sequence: Synthetic oligonucleotide
aacuacacauugauuuauu

SEQ ID NO: 1869985 - RNA, 19 nt, Artificial Sequence
  Description of Artificial Sequence: Synthetic oligonucleotide
guaggaccgcaguggagcc

SEQ ID NO: 1869986 - RNA, 19 nt, Artificial Sequence
  Description of Artificial Sequence: Synthetic oligonucleotide
ucaccuugcauggcaacuc

SEQ ID NO: 1869987 - RNA, 19 nt, Artificial Sequence
  Description of Artificial Sequence: Synthetic oligonucleotide
ggacccagcugccaugcgg

SEQ ID NO: 1869988 - RNA, 19 nt, Artificial Sequence
  Description of Artificial Sequence: Synthetic oligonucleotide
ucaucggugccuggggaug

SEQ ID NO: 1869989 - RNA, 19 nt, Artificial Sequence
  Description of Artificial Sequence: Synthetic oligonucleotide
ccuggaucuagagaugggg

SEQ ID NO: 1869990 - RNA, 19 nt, Artificial Sequence
  Description of Artificial Sequence: Synthetic oligonucleotide
gugggagagucuaugggac

SEQ ID NO: 1869991 - RNA, 19 nt, Artificial Sequence
  Description of Artificial Sequence: Synthetic oligonucleotide
gcucuacugcccuuugggg

SEQ ID NO: 1869992 - RNA, 19 nt, Artificial Sequence
  Description of Artificial Sequence: Synthetic oligonucleotide
ugucaccuugcauggcaac

SEQ ID NO: 1869993 - RNA, 19 nt, Artificial Sequence
  Description of Artificial Sequence: Synthetic oligonucleotide
gucacguggcggaagggag

SEQ ID NO: 1869994 - RNA, 19 nt, Artificial Sequence
  Description of Artificial Sequence: Synthetic oligonucleotide
agagcggcagcaacugcgg

SEQ ID NO: 1869995 - RNA, 19 nt, Artificial Sequence
  Description of Artificial Sequence: Synthetic oligonucleotide
aagagagccuggaucuaga

SEQ ID NO: 1869996 - RNA, 19 nt, Artificial Sequence
  Description of Artificial Sequence: Synthetic oligonucleotide
agggccugccucaccagcc

SEQ ID NO: 1869997 - RNA, 19 nt, Artificial Sequence
  Description of Artificial Sequence: Synthetic oligonucleotide
cacucugacuauugcacga

SEQ ID NO: 1869998 - RNA, 19 nt, Artificial Sequence
  Description of Artificial Sequence: Synthetic oligonucleotide
ggaguaugugccugugagc

SEQ ID NO: 1869999 - RNA, 19 nt, Artificial Sequence
  Description of Artificial Sequence: Synthetic oligonucleotide
gaggcagcgcuguauucuc

SEQ ID NO: 1870000 - RNA, 19 nt, Artificial Sequence
  Description of Artificial Sequence: Synthetic oligonucleotide
ggcaaaucugccuugggcu

SEQ ID NO: 1870001 - RNA, 19 nt, Artificial Sequence
  Description of Artificial Sequence: Synthetic oligonucleotide
cuccccagccacaugccug

SEQ ID NO: 1870002 - RNA, 19 nt, Artificial Sequence
  Description of Artificial Sequence: Synthetic oligonucleotide
agucacguggcggaaggga

SEQ ID NO: 1870003 - RNA, 19 nt, Artificial Sequence
  Description of Artificial Sequence: Synthetic oligonucleotide
agucuagcuugugggcugg

SEQ ID NO: 1870004 - RNA, 19 nt, Artificial Sequence
  Description of Artificial Sequence: Synthetic oligonucleotide
caggcaaaucugccuuggg

SEQ ID NO: 1870005 - RNA, 19 nt, Artificial Sequence
  Description of Artificial Sequence: Synthetic oligonucleotide
ugauacaggagggcccagu

SEQ ID NO: 1870006 - RNA, 19 nt, Artificial Sequence
  Description of Artificial Sequence: Synthetic oligonucleotide
cuuucguacaggcggcaga

SEQ ID NO: 1870007 - RNA, 19 nt, Artificial Sequence
  Description of Artificial Sequence: Synthetic oligonucleotide
agcuguucugccaaaugaa

SEQ ID NO: 1870008 - RNA, 19 nt, Artificial Sequence
  Description of Artificial Sequence: Synthetic oligonucleotide
ccacucugacuauugcacg

SEQ ID NO: 1870009 - RNA, 19 nt, Artificial Sequence
  Description of Artificial Sequence: Synthetic oligonucleotide
guaugugccugugagcaaa

SEQ ID NO: 1870010 - RNA, 19 nt, Artificial Sequence
  Description of Artificial Sequence: Synthetic oligonucleotide
cugguuccaguacaagaga

SEQ ID NO: 1870011 - RNA, 19 nt, Artificial Sequence
  Description of Artificial Sequence: Synthetic oligonucleotide
gcccuuuggggaugaaagg

SEQ ID NO: 1870012 - RNA, 19 nt, Artificial Sequence
  Description of Artificial Sequence: Synthetic oligonucleotide
aguaugugccugugagcaa

SEQ ID NO: 1870013 - RNA, 19 nt, Artificial Sequence
  Description of Artificial Sequence: Synthetic oligonucleotide
gcaaaggucucuucugcca

SEQ ID NO: 1870014 - RNA, 19 nt, Artificial Sequence
  Description of Artificial Sequence: Synthetic oligonucleotide
gcaucauaaugacaccauc

SEQ ID NO: 1870015 - RNA, 19 nt, Artificial Sequence
  Description of Artificial Sequence: Synthetic oligonucleotide
uaugcgggcccgagacaug

SEQ ID NO: 1870016 - RNA, 19 nt, Artificial Sequence
  Description of Artificial Sequence: Synthetic oligonucleotide
agggaguaugugccuguga

SEQ ID NO: 1870017 - RNA, 19 nt, Artificial Sequence
  Description of Artificial Sequence: Synthetic oligonucleotide
caggugacuguggggaggc

SEQ ID NO: 1870018 - RNA, 19 nt, Artificial Sequence
  Description of Artificial Sequence: Synthetic oligonucleotide
gguugucgaugucaccuug

SEQ ID NO: 1870019 - RNA, 19 nt, Artificial Sequence
  Description of Artificial Sequence: Synthetic oligonucleotide
ggcaggaccaauccagguc

SEQ ID NO: 1870020 - RNA, 19 nt, Artificial Sequence
  Description of Artificial Sequence: Synthetic oligonucleotide
cccuuuggggaugaaaggc

SEQ ID NO: 1870021 - RNA, 19 nt, Artificial Sequence
  Description of Artificial Sequence: Synthetic oligonucleotide
cucugacuauugcacgauc

SEQ ID NO: 1870022 - RNA, 19 nt, Artificial Sequence
  Description of Artificial Sequence: Synthetic oligonucleotide
caaggggagcucccagccc

SEQ ID NO: 1870023 - RNA, 19 nt, Artificial Sequence
  Description of Artificial Sequence: Synthetic oligonucleotide
cugcccaaaacagcacuug

SEQ ID NO: 1870024 - RNA, 19 nt, Artificial Sequence
  Description of Artificial Sequence: Synthetic oligonucleotide
uggacccagcugccaugcg

SEQ ID NO: 1870025 - RNA, 19 nt, Artificial Sequence
  Description of Artificial Sequence: Synthetic oligonucleotide
cagccuuguuggaucccgg

SEQ ID NO: 1870026 - RNA, 19 nt, Artificial Sequence
  Description of Artificial Sequence: Synthetic oligonucleotide
aggaccaauccaggucagg

SEQ ID NO: 1870027 - RNA, 19 nt, Artificial Sequence
  Description of Artificial Sequence: Synthetic oligonucleotide
ggcaacuccugcccaaaac

SEQ ID NO: 1870028 - RNA, 19 nt, Artificial Sequence
  Description of Artificial Sequence: Synthetic oligonucleotide
gcaaaucugccuugggcuc

SEQ ID NO: 1870029 - RNA, 19 nt, Artificial Sequence
  Description of Artificial Sequence: Synthetic oligonucleotide
uccacagacucaggugacu

SEQ ID NO: 1870030 - RNA, 19 nt, Artificial Sequence
  Description of Artificial Sequence: Synthetic oligonucleotide
cccgguuuagcccuaggac

SEQ ID NO: 1870031 - RNA, 19 nt, Artificial Sequence
  Description of Artificial Sequence: Synthetic oligonucleotide
uggcggaagggaguaugug

SEQ ID NO: 1870032 - RNA, 19 nt, Artificial Sequence
  Description of Artificial Sequence: Synthetic oligonucleotide
gaagggaguaugugccugu

SEQ ID NO: 1870033 - RNA, 19 nt, Artificial Sequence
  Description of Artificial Sequence: Synthetic oligonucleotide
acacuucccaggaggcagg

SEQ ID NO: 1870034 - RNA, 19 nt, Artificial Sequence
  Description of Artificial Sequence: Synthetic oligonucleotide
gccuaugcgggcccgagac

SEQ ID NO: 1870035 - RNA, 19 nt, Artificial Sequence
  Description of Artificial Sequence: Synthetic oligonucleotide
aagccgugcugcagugggg

SEQ ID NO: 1870036 - RNA, 19 nt, Artificial Sequence
  Description of Artificial Sequence: Synthetic oligonucleotide
ccucugauacaggagggcc

SEQ ID NO: 1870037 - RNA, 19 nt, Artificial Sequence
  Description of Artificial Sequence: Synthetic oligonucleotide
ugguugucgaugucaccuu

SEQ ID NO: 1870038 - RNA, 19 nt, Artificial Sequence
  Description of Artificial Sequence: Synthetic oligonucleotide
aguggcucuuugguuaaaa

SEQ ID NO: 1870039 - RNA, 19 nt, Artificial Sequence
  Description of Artificial Sequence: Synthetic oligonucleotide
gccugcuguccucugauac

SEQ ID NO: 1870040 - RNA, 19 nt, Artificial Sequence
  Description of Artificial Sequence: Synthetic oligonucleotide
aggcaguucuggugggaga

SEQ ID NO: 1870041 - RNA, 19 nt, Artificial Sequence
  Description of Artificial Sequence: Synthetic oligonucleotide
ggaccacucugacuauugc

SEQ ID NO: 1870042 - RNA, 19 nt, Artificial Sequence
  Description of Artificial Sequence: Synthetic oligonucleotide
acuuggugcaggggugaag

SEQ ID NO: 1870043 - RNA, 19 nt, Artificial Sequence
  Description of Artificial Sequence: Synthetic oligonucleotide
ggaagggaguaugugccug

SEQ ID NO: 1870044 - RNA, 19 nt, Artificial Sequence
  Description of Artificial Sequence: Synthetic oligonucleotide
aucccgguuuagcccuagg

SEQ ID NO: 1870045 - RNA, 19 nt, Artificial Sequence
  Description of Artificial Sequence: Synthetic oligonucleotide
cuugugggcuggcaccguc

SEQ ID NO: 1870046 - RNA, 19 nt, Artificial Sequence
  Description of Artificial Sequence: Synthetic oligonucleotide
guuuagcccuaggaccuug

SEQ ID NO: 1870047 - RNA, 19 nt, Artificial Sequence
  Description of Artificial Sequence: Synthetic oligonucleotide
aaaucugccuugggcucau

SEQ ID NO: 1870048 - RNA, 19 nt, Artificial Sequence
  Description of Artificial Sequence: Synthetic oligonucleotide
aaggaagguucagcucccu

SEQ ID NO: 1870049 - RNA, 19 nt, Artificial Sequence
  Description of Artificial Sequence: Synthetic oligonucleotide
acucugacuauugcacgau

SEQ ID NO: 1870050 - RNA, 19 nt, Artificial Sequence
  Description of Artificial Sequence: Synthetic oligonucleotide
cauggagcccugguuccag

SEQ ID NO: 1870051 - RNA, 19 nt, Artificial Sequence
  Description of Artificial Sequence: Synthetic oligonucleotide
cugacuauugcacgauccu

SEQ ID NO: 1870052 - RNA, 19 nt, Artificial Sequence
  Description of Artificial Sequence: Synthetic oligonucleotide
agucuaugggacacccacu

SEQ ID NO: 1870053 - RNA, 19 nt, Artificial Sequence
  Description of Artificial Sequence: Synthetic oligonucleotide
agcaacugcgguggcuuug

SEQ ID NO: 1870054 - RNA, 19 nt, Artificial Sequence
  Description of Artificial Sequence: Synthetic oligonucleotide
gcgcuguauucucugggag

SEQ ID NO: 1870055 - RNA, 19 nt, Artificial Sequence
  Description of Artificial Sequence: Synthetic oligonucleotide
cuuguuggaucccgguuua

SEQ ID NO: 1870056 - RNA, 19 nt, Artificial Sequence
  Description of Artificial Sequence: Synthetic oligonucleotide
cucagucacguggcggaag

SEQ ID NO: 1870057 - RNA, 19 nt, Artificial Sequence
  Description of Artificial Sequence: Synthetic oligonucleotide
ggcucagucacguggcgga

SEQ ID NO: 1870058 - RNA, 19 nt, Artificial Sequence
  Description of Artificial Sequence: Synthetic oligonucleotide
caucaucggugccugggga

SEQ ID NO: 1870059 - RNA, 19 nt, Artificial Sequence
  Description of Artificial Sequence: Synthetic oligonucleotide
ucggugccuggggaugagg

SEQ ID NO: 1870060 - RNA, 19 nt, Artificial Sequence
  Description of Artificial Sequence: Synthetic oligonucleotide
ggugacuguggggaggcug

SEQ ID NO: 1870061 - RNA, 19 nt, Artificial Sequence
  Description of Artificial Sequence: Synthetic oligonucleotide
uucguacaggcggcagagc

SEQ ID NO: 1870062 - RNA, 19 nt, Artificial Sequence
  Description of Artificial Sequence: Synthetic oligonucleotide
uggagcccugguuccagua

SEQ ID NO: 1870063 - RNA, 19 nt, Artificial Sequence
  Description of Artificial Sequence: Synthetic oligonucleotide
agccaguggcucuuugguu

SEQ ID NO: 1870064 - RNA, 19 nt, Artificial Sequence
  Description of Artificial Sequence: Synthetic oligonucleotide
caaaucugccuugggcuca

SEQ ID NO: 1870065 - RNA, 19 nt, Artificial Sequence
  Description of Artificial Sequence: Synthetic oligonucleotide
ggccaagcacccauggccc

SEQ ID NO: 1870066 - RNA, 19 nt, Artificial Sequence
  Description of Artificial Sequence: Synthetic oligonucleotide
ccgcaguggagccaguggc

SEQ ID NO: 1870067 - RNA, 19 nt, Artificial Sequence
  Description of Artificial Sequence: Synthetic oligonucleotide
caggggcaagccgugcugc

SEQ ID NO: 1870068 - RNA, 19 nt, Artificial Sequence
  Description of Artificial Sequence: Synthetic oligonucleotide
cauggcaacuccugcccaa

SEQ ID NO: 1870069 - RNA, 19 nt, Artificial Sequence
  Description of Artificial Sequence: Synthetic oligonucleotide
cugggucacugaggcagcg

SEQ ID NO: 1870070 - RNA, 19 nt, Artificial Sequence
  Description of Artificial Sequence: Synthetic oligonucleotide
ccugggagggaccacucug

SEQ ID NO: 1870071 - RNA, 19 nt, Artificial Sequence
  Description of Artificial Sequence: Synthetic oligonucleotide
gagccuaugcgggcccgag

SEQ ID NO: 1870072 - RNA, 19 nt, Artificial Sequence
  Description of Artificial Sequence: Synthetic oligonucleotide
cacucugugggagagucua

SEQ ID NO: 1870073 - RNA, 19 nt, Artificial Sequence
  Description of Artificial Sequence: Synthetic oligonucleotide
gaccgcaguggagccagug

SEQ ID NO: 1870074 - RNA, 19 nt, Artificial Sequence
  Description of Artificial Sequence: Synthetic oligonucleotide
cgcuguauucucugggagc

SEQ ID NO: 1870075 - RNA, 19 nt, Artificial Sequence
  Description of Artificial Sequence: Synthetic oligonucleotide
gaaggcaguucugguggga

SEQ ID NO: 1870076 - RNA, 19 nt, Artificial Sequence
  Description of Artificial Sequence: Synthetic oligonucleotide
caguacaagagagccugga

SEQ ID NO: 1870077 - RNA, 19 nt, Artificial Sequence
  Description of Artificial Sequence: Synthetic oligonucleotide
gcguggggcugucacuugg

SEQ ID NO: 1870078 - RNA, 19 nt, Artificial Sequence
  Description of Artificial Sequence: Synthetic oligonucleotide
gaucccgguuuagcccuag

SEQ ID NO: 1870079 - RNA, 19 nt, Artificial Sequence
  Description of Artificial Sequence: Synthetic oligonucleotide
gggaccacucugacuauug

SEQ ID NO: 1870080 - RNA, 19 nt, Artificial Sequence
  Description of Artificial Sequence: Synthetic oligonucleotide
auggagcccugguuccagu

SEQ ID NO: 1870081 - RNA, 19 nt, Artificial Sequence
  Description of Artificial Sequence: Synthetic oligonucleotide
caugccugcuguccucuga

SEQ ID NO: 1870082 - RNA, 19 nt, Artificial Sequence
  Description of Artificial Sequence: Synthetic oligonucleotide
aggggcaagccgugcugca

SEQ ID NO: 1870083 - RNA, 19 nt, Artificial Sequence
  Description of Artificial Sequence: Synthetic oligonucleotide
ggcagagcggcagcaacug

SEQ ID NO: 1870084 - RNA, 19 nt, Artificial Sequence
  Description of Artificial Sequence: Synthetic oligonucleotide
ugggugagucuagcuugug

SEQ ID NO: 1870085 - RNA, 19 nt, Artificial Sequence
  Description of Artificial Sequence: Synthetic oligonucleotide
gggacacccacuggccugg

SEQ ID NO: 1870086 - RNA, 19 nt, Artificial Sequence
  Description of Artificial Sequence: Synthetic oligonucleotide
cuggcucuacugcccuuug

SEQ ID NO: 1870087 - RNA, 19 nt, Artificial Sequence
  Description of Artificial Sequence: Synthetic oligonucleotide
agagucuaugggacaccca

SEQ ID NO: 1870088 - RNA, 19 nt, Artificial Sequence
  Description of Artificial Sequence: Synthetic oligonucleotide
uaggaccgcaguggagcca

SEQ ID NO: 1870089 - RNA, 19 nt, Artificial Sequence
  Description of Artificial Sequence: Synthetic oligonucleotide
agucgaggccaaggaaggu

SEQ ID NO: 1870090 - RNA, 19 nt, Artificial Sequence
  Description of Artificial Sequence: Synthetic oligonucleotide
agccuaugcgggcccgaga

SEQ ID NO: 1870091 - RNA, 19 nt, Artificial Sequence
  Description of Artificial Sequence: Synthetic oligonucleotide
ccaguacaagagagccugg

SEQ ID NO: 1870092 - RNA, 19 nt, Artificial Sequence
  Description of Artificial Sequence: Synthetic oligonucleotide
ccauggucacccaucuguc

SEQ ID NO: 1870093 - RNA, 19 nt, Artificial Sequence
  Description of Artificial Sequence: Synthetic oligonucleotide
cugagccuaugcgggcccg

SEQ ID NO: 1870094 - RNA, 19 nt, Artificial Sequence
  Description of Artificial Sequence: Synthetic oligonucleotide
cagucacguggcggaaggg

SEQ ID NO: 1870095 - RNA, 19 nt, Artificial Sequence
  Description of Artificial Sequence: Synthetic oligonucleotide
aguggagccaguggcucuu

SEQ ID NO: 1870096 - RNA, 19 nt, Artificial Sequence
  Description of Artificial Sequence: Synthetic oligonucleotide
ggagagucuaugggacacc

SEQ ID NO: 1870097 - RNA, 19 nt, Artificial Sequence
  Description of Artificial Sequence: Synthetic oligonucleotide
ggcaagccgugcugcagug

SEQ ID NO: 1870098 - RNA, 19 nt, Artificial Sequence
  Description of Artificial Sequence: Synthetic oligonucleotide
ggagggcccagucgaggcc

SEQ ID NO: 1870099 - RNA, 19 nt, Artificial Sequence
  Description of Artificial Sequence: Synthetic oligonucleotide
augucaccuugcauggcaa

SEQ ID NO: 1870100 - RNA, 19 nt, Artificial Sequence
  Description of Artificial Sequence: Synthetic oligonucleotide
uacugcccuuuggggauga

SEQ ID NO: 1870101 - RNA, 19 nt, Artificial Sequence
  Description of Artificial Sequence: Synthetic oligonucleotide
accuugcauggcaacuccu

SEQ ID NO: 1870102 - RNA, 19 nt, Artificial Sequence
  Description of Artificial Sequence: Synthetic oligonucleotide
uacaggcggcagagcggca

SEQ ID NO: 1870103 - RNA, 19 nt, Artificial Sequence
  Description of Artificial Sequence: Synthetic oligonucleotide
aggucucuucugccauggu

SEQ ID NO: 1870104 - RNA, 19 nt, Artificial Sequence
  Description of Artificial Sequence: Synthetic oligonucleotide
gcccaaaacagcacuugca

SEQ ID NO: 1870105 - RNA, 19 nt, Artificial Sequence
  Description of Artificial Sequence: Synthetic oligonucleotide
auggcaacuccugcccaaa

SEQ ID NO: 1870106 - RNA, 19 nt, Artificial Sequence
  Description of Artificial Sequence: Synthetic oligonucleotide
acaagagagccuggaucua

SEQ ID NO: 1870107 - RNA, 19 nt, Artificial Sequence
  Description of Artificial Sequence: Synthetic oligonucleotide
ugccugcuguccucugaua

SEQ ID NO: 1870108 - RNA, 19 nt, Artificial Sequence
  Description of Artificial Sequence: Synthetic oligonucleotide
gcauggagaggagacagcu

SEQ ID NO: 1870109 - RNA, 19 nt, Artificial Sequence
  Description of Artificial Sequence: Synthetic oligonucleotide
acgauccugggaaggcagu

SEQ ID NO: 1870110 - RNA, 19 nt, Artificial Sequence
  Description of Artificial Sequence: Synthetic oligonucleotide
gccuggaucuagagauggg

SEQ ID NO: 1870111 - RNA, 19 nt, Artificial Sequence
  Description of Artificial Sequence: Synthetic oligonucleotide
cccacucugugggagaguc

SEQ ID NO: 1870112 - RNA, 19 nt, Artificial Sequence
  Description of Artificial Sequence: Synthetic oligonucleotide
cuaugcgggcccgagacau

SEQ ID NO: 1870113 - RNA, 19 nt, Artificial Sequence
  Description of Artificial Sequence: Synthetic oligonucleotide
aucggugccuggggaugag

SEQ ID NO: 1870114 - RNA, 19 nt, Artificial Sequence
  Description of Artificial Sequence: Synthetic oligonucleotide
gagauggggcagggccugc

SEQ ID NO: 1870115 - RNA, 19 nt, Artificial Sequence
  Description of Artificial Sequence: Synthetic oligonucleotide
cacagacucaggugacugu

SEQ ID NO: 1870116 - RNA, 19 nt, Artificial Sequence
  Description of Artificial Sequence: Synthetic oligonucleotide
gcggcagagcggcagcaac

SEQ ID NO: 1870117 - RNA, 19 nt, Artificial Sequence
  Description of Artificial Sequence: Synthetic oligonucleotide
ccuuuggggaugaaaggcu

SEQ ID NO: 1870118 - RNA, 19 nt, Artificial Sequence
  Description of Artificial Sequence: Synthetic oligonucleotide
cauccccugggagggacca

SEQ ID NO: 1870119 - RNA, 19 nt, Artificial Sequence
  Description of Artificial Sequence: Synthetic oligonucleotide
gcaagccgugcugcagugg

SEQ ID NO: 1870120 - RNA, 19 nt, Artificial Sequence
  Description of Artificial Sequence: Synthetic oligonucleotide
agggaccacucugacuauu

SEQ ID NO: 1870121 - RNA, 19 nt, Artificial Sequence
  Description of Artificial Sequence: Synthetic oligonucleotide
cagccacaugccugcuguc

SEQ ID NO: 1870122 - RNA, 19 nt, Artificial Sequence
  Description of Artificial Sequence: Synthetic oligonucleotide
cugggucgauggugaugac

SEQ ID NO: 1870123 - RNA, 19 nt, Artificial Sequence
  Description of Artificial Sequence: Synthetic oligonucleotide
ccgcaucauaaugacacca

SEQ ID NO: 1870124 - RNA, 19 nt, Artificial Sequence
  Description of Artificial Sequence: Synthetic oligonucleotide
gcauggcaacuccugccca

SEQ ID NO: 1870125 - RNA, 19 nt, Artificial Sequence
  Description of Artificial Sequence: Synthetic oligonucleotide
gcccagucgaggccaagga

SEQ ID NO: 1870126 - RNA, 19 nt, Artificial Sequence
  Description of Artificial Sequence: Synthetic oligonucleotide
gcccuucaauuccucguuc

SEQ ID NO: 1870127 - RNA, 19 nt, Artificial Sequence
  Description of Artificial Sequence: Synthetic oligonucleotide
ggcuuuguacaugguuguc

SEQ ID NO: 1870128 - RNA, 19 nt, Artificial Sequence
  Description of Artificial Sequence: Synthetic oligonucleotide
caucggugccuggggauga

SEQ ID NO: 1870129 - RNA, 19 nt, Artificial Sequence
  Description of Artificial Sequence: Synthetic oligonucleotide
cuccuugcuccgcaucaua

SEQ ID NO: 1870130 - RNA, 19 nt, Artificial Sequence
  Description of Artificial Sequence: Synthetic oligonucleotide
acucugugggagagucuau

SEQ ID NO: 1870131 - RNA, 19 nt, Artificial Sequence
  Description of Artificial Sequence: Synthetic oligonucleotide
gucgaggccaaggaagguu

SEQ ID NO: 1870132 - RNA, 19 nt, Artificial Sequence
  Description of Artificial Sequence: Synthetic oligonucleotide
cugcccuuuggggaugaaa

SEQ ID NO: 1870133 - RNA, 19 nt, Artificial Sequence
  Description of Artificial Sequence: Synthetic oligonucleotide
gccucaccagcccagcugu

SEQ ID NO: 1870134 - RNA, 19 nt, Artificial Sequence
  Description of Artificial Sequence: Synthetic oligonucleotide
gucuagcuugugggcuggc

SEQ ID NO: 1870135 - RNA, 19 nt, Artificial Sequence
  Description of Artificial Sequence: Synthetic oligonucleotide
ccuaggaccuugcccuuca

SEQ ID NO: 1870136 - RNA, 19 nt, Artificial Sequence
  Description of Artificial Sequence: Synthetic oligonucleotide
cacguggcggaagggagua

SEQ ID NO: 1870137 - RNA, 19 nt, Artificial Sequence
  Description of Artificial Sequence: Synthetic oligonucleotide
gggcuugggcucagucacg

SEQ ID NO: 1870138 - RNA, 19 nt, Artificial Sequence
  Description of Artificial Sequence: Synthetic oligonucleotide
cacccacuggccuggcucu

SEQ ID NO: 1870139 - RNA, 19 nt, Artificial Sequence
  Description of Artificial Sequence: Synthetic oligonucleotide
cucguucaccagguccaca

SEQ ID NO: 1870140 - RNA, 19 nt, Artificial Sequence
  Description of Artificial Sequence: Synthetic oligonucleotide
cguggcggaagggaguaug

SEQ ID NO: 1870141 - RNA, 19 nt, Artificial Sequence
  Description of Artificial Sequence: Synthetic oligonucleotide
guggcggaagggaguaugu

SEQ ID NO: 1870142 - RNA, 19 nt, Artificial Sequence
  Description of Artificial Sequence: Synthetic oligonucleotide
aggagacagcugggccaag

SEQ ID NO: 1870143 - RNA, 19 nt, Artificial Sequence
  Description of Artificial Sequence: Synthetic oligonucleotide
cccgagacaugguggguga

SEQ ID NO: 1870144 - RNA, 19 nt, Artificial Sequence
  Description of Artificial Sequence: Synthetic oligonucleotide
caguggagccaguggcucu

SEQ ID NO: 1870145 - RNA, 19 nt, Artificial Sequence
  Description of Artificial Sequence: Synthetic oligonucleotide
ggacagacaccaugggcuu

SEQ ID NO: 1870146 - RNA, 19 nt, Artificial Sequence
  Description of Artificial Sequence: Synthetic oligonucleotide
gagggaccacucugacuau

SEQ ID NO: 1870147 - RNA, 19 nt, Artificial Sequence
  Description of Artificial Sequence: Synthetic oligonucleotide
ccugccucaccagcccagc

SEQ ID NO: 1870148 - RNA, 19 nt, Artificial Sequence
  Description of Artificial Sequence: Synthetic oligonucleotide
cgguuuagcccuaggaccu

SEQ ID NO: 1870149 - RNA, 19 nt, Artificial Sequence
  Description of Artificial Sequence: Synthetic oligonucleotide
cgauggugaugacaggcaa

SEQ ID NO: 1870150 - RNA, 19 nt, Artificial Sequence
  Description of Artificial Sequence: Synthetic oligonucleotide
cacaugccugcuguccucu

SEQ ID NO: 1870151 - RNA, 19 nt, Artificial Sequence
  Description of Artificial Sequence: Synthetic oligonucleotide
ggagcguggggcugucacu

SEQ ID NO: 1870152 - RNA, 19 nt, Artificial Sequence
  Description of Artificial Sequence: Synthetic oligonucleotide
gggcugucacuuggugcag

SEQ ID NO: 1870153 - RNA, 19 nt, Artificial Sequence
  Description of Artificial Sequence: Synthetic oligonucleotide
aggugacuguggggaggcu

SEQ ID NO: 1870154 - RNA, 19 nt, Artificial Sequence
  Description of Artificial Sequence: Synthetic oligonucleotide
aaucugccuugggcucaua

SEQ ID NO: 1870155 - RNA, 19 nt, Artificial Sequence
  Description of Artificial Sequence: Synthetic oligonucleotide
gccugugagcaaaggucuc

SEQ ID NO: 1870156 - RNA, 19 nt, Artificial Sequence
  Description of Artificial Sequence: Synthetic oligonucleotide
cugugagcaaaggucucuu

SEQ ID NO: 1870157 - RNA, 19 nt, Artificial Sequence
  Description of Artificial Sequence: Synthetic oligonucleotide
gggccucauggagcccugg

SEQ ID NO: 1870158 - RNA, 19 nt, Artificial Sequence
  Description of Artificial Sequence: Synthetic oligonucleotide
cacugaggcagcgcuguau

SEQ ID NO: 1870159 - RNA, 19 nt, Artificial Sequence
  Description of Artificial Sequence: Synthetic oligonucleotide
ggcuugggcucagucacgu

SEQ ID NO: 1870160 - RNA, 19 nt, Artificial Sequence
  Description of Artificial Sequence: Synthetic oligonucleotide
cugcgguggcuuuguacau

SEQ ID NO: 1870161 - RNA, 19 nt, Artificial Sequence
  Description of Artificial Sequence: Synthetic oligonucleotide
cacuuggugcaggggugaa

SEQ ID NO: 1870162 - RNA, 19 nt, Artificial Sequence
  Description of Artificial Sequence: Synthetic oligonucleotide
gcaacugcgguggcuuugu

SEQ ID NO: 1870163 - RNA, 19 nt, Artificial Sequence
  Description of Artificial Sequence: Synthetic oligonucleotide
ggccucauggagcccuggu

SEQ ID NO: 1870164 - RNA, 19 nt, Artificial Sequence
  Description of Artificial Sequence: Synthetic oligonucleotide
ccgagacauggugggugag

SEQ ID NO: 1870165 - RNA, 19 nt, Artificial Sequence
  Description of Artificial Sequence: Synthetic oligonucleotide
ccuaugcgggcccgagaca

SEQ ID NO: 1870166 - RNA, 19 nt, Artificial Sequence
  Description of Artificial Sequence: Synthetic oligonucleotide
acguggcggaagggaguau

SEQ ID NO: 1870167 - RNA, 19 nt, Artificial Sequence
  Description of Artificial Sequence: Synthetic oligonucleotide
cugggagcguggggcuguc

SEQ ID NO: 1870168 - RNA, 19 nt, Artificial Sequence
  Description of Artificial Sequence: Synthetic oligonucleotide
cccuccuuuccugguagga

SEQ ID NO: 1870169 - RNA, 19 nt, Artificial Sequence
  Description of Artificial Sequence: Synthetic oligonucleotide
cuguauucucugggagcgu

SEQ ID NO: 1870170 - RNA, 19 nt, Artificial Sequence
  Description of Artificial Sequence: Synthetic oligonucleotide
cugccucaccagcccagcu

SEQ ID NO: 1870171 - RNA, 19 nt, Artificial Sequence
  Description of Artificial Sequence: Synthetic oligonucleotide
gccucauggagcccugguu

SEQ ID NO: 1870172 - RNA, 19 nt, Artificial Sequence
  Description of Artificial Sequence: Synthetic oligonucleotide
caacugcgguggcuuugua

SEQ ID NO: 1870173 - RNA, 19 nt, Artificial Sequence
  Description of Artificial Sequence: Synthetic oligonucleotide
cccacuggccuggcucuac

SEQ ID NO: 1870174 - RNA, 19 nt, Artificial Sequence
  Description of Artificial Sequence: Synthetic oligonucleotide
acccacuggccuggcucua

SEQ ID NO: 1870175 - RNA, 19 nt, Artificial Sequence
  Description of Artificial Sequence: Synthetic oligonucleotide
gcucagucacguggcggaa

SEQ ID NO: 1870176 - RNA, 19 nt, Artificial Sequence
  Description of Artificial Sequence: Synthetic oligonucleotide
caggaagggagggccucau

SEQ ID NO: 1870177 - RNA, 19 nt, Artificial Sequence
  Description of Artificial Sequence: Synthetic oligonucleotide
cagcaacugcgguggcuuu

SEQ ID NO: 1870178 - RNA, 19 nt, Artificial Sequence
  Description of Artificial Sequence: Synthetic oligonucleotide
gguuuagcccuaggaccuu

SEQ ID NO: 1870179 - RNA, 19 nt, Artificial Sequence
  Description of Artificial Sequence: Synthetic oligonucleotide
cggaagggaguaugugccu

SEQ ID NO: 1870180 - RNA, 19 nt, Artificial Sequence
  Description of Artificial Sequence: Synthetic oligonucleotide
ccacucugugggagagucu

SEQ ID NO: 1870181 - RNA, 19 nt, Artificial Sequence
  Description of Artificial Sequence: Synthetic oligonucleotide
cgagacauggugggugagu

SEQ ID NO: 1870182 - RNA, 19 nt, Artificial Sequence
  Description of Artificial Sequence: Synthetic oligonucleotide
cgagucagccuuguuggau

SEQ ID NO: 1870183 - RNA, 19 nt, Artificial Sequence
  Description of Artificial Sequence: Synthetic oligonucleotide
ggaucccgguuuagcccua

SEQ ID NO: 1870184 - RNA, 19 nt, Artificial Sequence
  Description of Artificial Sequence: Synthetic oligonucleotide
ggcccgagacauggugggu

SEQ ID NO: 1870185 - RNA, 19 nt, Artificial Sequence
  Description of Artificial Sequence: Synthetic oligonucleotide
cggcagcaacugcgguggc

SEQ ID NO: 1870186 - RNA, 19 nt, Artificial Sequence
  Description of Artificial Sequence: Synthetic oligonucleotide
gggguuggacagacaccau

SEQ ID NO: 1870187 - RNA, 19 nt, Artificial Sequence
  Description of Artificial Sequence: Synthetic oligonucleotide
gcuugugggcuggcaccgu

SEQ ID NO: 1870188 - RNA, 19 nt, Artificial Sequence
  Description of Artificial Sequence: Synthetic oligonucleotide
ccaguggaucugagccuau

SEQ ID NO: 1870189 - RNA, 19 nt, Artificial Sequence
  Description of Artificial Sequence: Synthetic oligonucleotide
gcccuaggaccuugcccuu

SEQ ID NO: 1870190 - RNA, 19 nt, Artificial Sequence
  Description of Artificial Sequence: Synthetic oligonucleotide
ggaccgcaguggagccagu

SEQ ID NO: 1870191 - RNA, 19 nt, Artificial Sequence
  Description of Artificial Sequence: Synthetic oligonucleotide
ccccacucugugggagagu

SEQ ID NO: 1870192 - RNA, 19 nt, Artificial Sequence
  Description of Artificial Sequence: Synthetic oligonucleotide
ugauaugacaagcagaucc

SEQ ID NO: 1870193 - RNA, 19 nt, Artificial Sequence
  Description of Artificial Sequence: Synthetic oligonucleotide
acucaaagaagucuggugc

SEQ ID NO: 1870194 - RNA, 19 nt, Artificial Sequence
  Description of Artificial Sequence: Synthetic oligonucleotide
auuccaagcagacacacac

SEQ ID NO: 1870195 - RNA, 19 nt, Artificial Sequence
  Description of Artificial Sequence: Synthetic oligonucleotide
ugucauuccaagcagacac

SEQ ID NO: 1870196 - RNA, 19 nt, Artificial Sequence
  Description of Artificial Sequence: Synthetic oligonucleotide
uucuugaaauuucuggacg

SEQ ID NO: 1870197 - RNA, 19 nt, Artificial Sequence
  Description of Artificial Sequence: Synthetic oligonucleotide
aaguaugacaaauccaacu

SEQ ID NO: 1870198 - RNA, 19 nt, Artificial Sequence
  Description of Artificial Sequence: Synthetic oligonucleotide
aagucuguucgauagagca

SEQ ID NO: 1870199 - RNA, 19 nt, Artificial Sequence
  Description of Artificial Sequence: Synthetic oligonucleotide
aauuucuggacgaauacag

SEQ ID NO: 1870200 - RNA, 19 nt, Artificial Sequence
  Description of Artificial Sequence: Synthetic oligonucleotide
aaaacacacagauuucucu

SEQ ID NO: 1870201 - RNA, 19 nt, Artificial Sequence
  Description of Artificial Sequence: Synthetic oligonucleotide
aguaugacaaauccaacug

SEQ ID NO: 1870202 - RNA, 19 nt, Artificial Sequence
  Description of Artificial Sequence: Synthetic oligonucleotide
cuuaagaugcugaucaaag

SEQ ID NO: 1870203 - RNA, 19 nt, Artificial Sequence
  Description of Artificial Sequence: Synthetic oligonucleotide
ucguucuugaaauuucugg

SEQ ID NO: 1870204 - RNA, 19 nt, Artificial Sequence
  Description of Artificial Sequence: Synthetic oligonucleotide
uguucgauagagcagcuca

SEQ ID NO: 1870205 - RNA, 19 nt, Artificial Sequence
  Description of Artificial Sequence: Synthetic oligonucleotide
cuuguaguaacccuggaac

SEQ ID NO: 1870206 - RNA, 19 nt, Artificial Sequence
  Description of Artificial Sequence: Synthetic oligonucleotide
agcgauguuacucaggucu

SEQ ID NO: 1870207 - RNA, 19 nt, Artificial Sequence
  Description of Artificial Sequence: Synthetic oligonucleotide
acuggaaagugacaacgcc

SEQ ID NO: 1870208 - RNA, 19 nt, Artificial Sequence
  Description of Artificial Sequence: Synthetic oligonucleotide
ugacaaauccaacugggug

SEQ ID NO: 1870209 - RNA, 19 nt, Artificial Sequence
  Description of Artificial Sequence: Synthetic oligonucleotide
ucuccaaccagcuaccugc

SEQ ID NO: 1870210 - RNA, 19 nt, Artificial Sequence
  Description of Artificial Sequence: Synthetic oligonucleotide
ugaaacuaaggucaggcaa

SEQ ID NO: 1870211 - RNA, 19 nt, Artificial Sequence
  Description of Artificial Sequence: Synthetic oligonucleotide
uuucuggacgaauacaggc

SEQ ID NO: 1870212 - RNA, 19 nt, Artificial Sequence
  Description of Artificial Sequence: Synthetic oligonucleotide
aacuuguugaagaucuggc

SEQ ID NO: 1870213 - RNA, 19 nt, Artificial Sequence
  Description of Artificial Sequence: Synthetic oligonucleotide
ucagcuagagggaaacagg

SEQ ID NO: 1870214 - RNA, 19 nt, Artificial Sequence
  Description of Artificial Sequence: Synthetic oligonucleotide
cuuguugaagaucuggccc

SEQ ID NO: 1870215 - RNA, 19 nt, Artificial Sequence
  Description of Artificial Sequence: Synthetic oligonucleotide
aauaauucuguagauucca

SEQ ID NO: 1870216 - RNA, 19 nt, Artificial Sequence
  Description of Artificial Sequence: Synthetic oligonucleotide
ucugcuaguguacuguacc

SEQ ID NO: 1870217 - RNA, 19 nt, Artificial Sequence
  Description of Artificial Sequence: Synthetic oligonucleotide
gaaagacacgaacugcugg

SEQ ID NO: 1870218 - RNA, 19 nt, Artificial Sequence
  Description of Artificial Sequence: Synthetic oligonucleotide
gaacuggaaagugacaacg

SEQ ID NO: 1870219 - RNA, 19 nt, Artificial Sequence
  Description of Artificial Sequence: Synthetic oligonucleotide
aaauccaacugggugaaag

SEQ ID NO: 1870220 - RNA, 19 nt, Artificial Sequence
  Description of Artificial Sequence: Synthetic oligonucleotide
ucaugauaugacaagcaga

SEQ ID NO: 1870221 - RNA, 19 nt, Artificial Sequence
  Description of Artificial Sequence: Synthetic oligonucleotide
uguuacucaggucuggcug

SEQ ID NO: 1870222 - RNA, 19 nt, Artificial Sequence
  Description of Artificial Sequence: Synthetic oligonucleotide
uggaaagugacaacgcccc

SEQ ID NO: 1870223 - RNA, 19 nt, Artificial Sequence
  Description of Artificial Sequence: Synthetic oligonucleotide
aaagacacgaacugcuggu

SEQ ID NO: 1870224 - RNA, 19 nt, Artificial Sequence
  Description of Artificial Sequence: Synthetic oligonucleotide
acgaauacaggcccgcccc

SEQ ID NO: 1870225 - RNA, 19 nt, Artificial Sequence
  Description of Artificial Sequence: Synthetic oligonucleotide
ugagucuaccaucugcucc

SEQ ID NO: 1870226 - RNA, 19 nt, Artificial Sequence
  Description of Artificial Sequence: Synthetic oligonucleotide
guaugacaaauccaacugg

SEQ ID NO: 1870227 - RNA, 19 nt, Artificial Sequence
  Description of Artificial Sequence: Synthetic oligonucleotide
agugacaacgccccgguag

SEQ ID NO: 1870228 - RNA, 19 nt, Artificial Sequence
  Description of Artificial Sequence: Synthetic oligonucleotide
gacaaauccaacuggguga

SEQ ID NO: 1870229 - RNA, 19 nt, Artificial Sequence
  Description of Artificial Sequence: Synthetic oligonucleotide
caugaaacuaaggucaggc

SEQ ID NO: 1870230 - RNA, 19 nt, Artificial Sequence
  Description of Artificial Sequence: Synthetic oligonucleotide
ucuggacgaauacaggccc

SEQ ID NO: 1870231 - RNA, 19 nt, Artificial Sequence
  Description of Artificial Sequence: Synthetic oligonucleotide
ucuugaaauuucuggacga

SEQ ID NO: 1870232 - RNA, 19 nt, Artificial Sequence
  Description of Artificial Sequence: Synthetic oligonucleotide
aaggucaucguucuugaaa

SEQ ID NO: 1870233 - RNA, 19 nt, Artificial Sequence
  Description of Artificial Sequence: Synthetic oligonucleotide
ugcugaucaaagaacugcc

SEQ ID NO: 1870234 - RNA, 19 nt, Artificial Sequence
  Description of Artificial Sequence: Synthetic oligonucleotide
ugaucauugguccucacuu

SEQ ID NO: 1870235 - RNA, 19 nt, Artificial Sequence
  Description of Artificial Sequence: Synthetic oligonucleotide
aacuggaaagugacaacgc

SEQ ID NO: 1870236 - RNA, 19 nt, Artificial Sequence
  Description of Artificial Sequence: Synthetic oligonucleotide
gcuaauuccagcuaggauc

SEQ ID NO: 1870237 - RNA, 19 nt, Artificial Sequence
  Description of Artificial Sequence: Synthetic oligonucleotide
uucuggacgaauacaggcc

SEQ ID NO: 1870238 - RNA, 19 nt, Artificial Sequence
  Description of Artificial Sequence: Synthetic oligonucleotide
ugcaaguaugacaaaucca

SEQ ID NO: 1870239 - RNA, 19 nt, Artificial Sequence
  Description of Artificial Sequence: Synthetic oligonucleotide
uuaagaugcugaucaaaga

SEQ ID NO: 1870240 - RNA, 19 nt, Artificial Sequence
  Description of Artificial Sequence: Synthetic oligonucleotide
ugugacugcacugccauag

SEQ ID NO: 1870241 - RNA, 19 nt, Artificial Sequence
  Description of Artificial Sequence: Synthetic oligonucleotide
uaugacaagcagauccagc

SEQ ID NO: 1870242 - RNA, 19 nt, Artificial Sequence
  Description of Artificial Sequence: Synthetic oligonucleotide
ucagcucaugauaugacaa

SEQ ID NO: 1870243 - RNA, 19 nt, Artificial Sequence
  Description of Artificial Sequence: Synthetic oligonucleotide
cugcaaguaugacaaaucc

SEQ ID NO: 1870244 - RNA, 19 nt, Artificial Sequence
  Description of Artificial Sequence: Synthetic oligonucleotide
cucaugauaugacaagcag

SEQ ID NO: 1870245 - RNA, 19 nt, Artificial Sequence
  Description of Artificial Sequence: Synthetic oligonucleotide
cuggaaagugacaacgccc

SEQ ID NO: 1870246 - RNA, 19 nt, Artificial Sequence
  Description of Artificial Sequence: Synthetic oligonucleotide
uacucaaagaagucuggug

SEQ ID NO: 1870247 - RNA, 19 nt, Artificial Sequence
  Description of Artificial Sequence: Synthetic oligonucleotide
aaagucuguucgauagagc

SEQ ID NO: 1870248 - RNA, 19 nt, Artificial Sequence
  Description of Artificial Sequence: Synthetic oligonucleotide
ggaacuugaaacuuguuga

SEQ ID NO: 1870249 - RNA, 19 nt, Artificial Sequence
  Description of Artificial Sequence: Synthetic oligonucleotide
acagcgauguuacucaggu

SEQ ID NO: 1870250 - RNA, 19 nt, Artificial Sequence
  Description of Artificial Sequence: Synthetic oligonucleotide
aauccaacugggugaaaga

SEQ ID NO: 1870251 - RNA, 19 nt, Artificial Sequence
  Description of Artificial Sequence: Synthetic oligonucleotide
uccuucugaucauuggucc

SEQ ID NO: 1870252 - RNA, 19 nt, Artificial Sequence
  Description of Artificial Sequence: Synthetic oligonucleotide
aaagugacaacgccccggu

SEQ ID NO: 1870253 - RNA, 19 nt, Artificial Sequence
  Description of Artificial Sequence: Synthetic oligonucleotide
gaggucauccaugacaccc

SEQ ID NO: 1870254 - RNA, 19 nt, Artificial Sequence
  Description of Artificial Sequence: Synthetic oligonucleotide
ucaaagaacugcccauggc

SEQ ID NO: 1870255 - RNA, 19 nt, Artificial Sequence
  Description of Artificial Sequence: Synthetic oligonucleotide
aaggucaggcaacaaacaa

SEQ ID NO: 1870256 - RNA, 19 nt, Artificial Sequence
  Description of Artificial Sequence: Synthetic oligonucleotide
aguguacuguacccgcacc

SEQ ID NO: 1870257 - RNA, 19 nt, Artificial Sequence
  Description of Artificial Sequence: Synthetic oligonucleotide
acuauagacacgggcaagg

SEQ ID NO: 1870258 - RNA, 19 nt, Artificial Sequence
  Description of Artificial Sequence: Synthetic oligonucleotide
ugaaagacacgaacugcug

SEQ ID NO: 1870259 - RNA, 19 nt, Artificial Sequence
  Description of Artificial Sequence: Synthetic oligonucleotide
ugaagaucuggcccagugc

SEQ ID NO: 1870260 - RNA, 19 nt, Artificial Sequence
  Description of Artificial Sequence: Synthetic oligonucleotide
gaaaucccggucauaagcc

SEQ ID NO: 1870261 - RNA, 19 nt, Artificial Sequence
  Description of Artificial Sequence: Synthetic oligonucleotide
gaaagugacaacgccccgg

SEQ ID NO: 1870262 - RNA, 19 nt, Artificial Sequence
  Description of Artificial Sequence: Synthetic oligonucleotide
aauacaggcccgccccuuc

SEQ ID NO: 1870263 - RNA, 19 nt, Artificial Sequence
  Description of Artificial Sequence: Synthetic oligonucleotide
acacacaccaaagggaggg

SEQ ID NO: 1870264 - RNA, 19 nt, Artificial Sequence
  Description of Artificial Sequence: Synthetic oligonucleotide
auugucauuccaagcagac

SEQ ID NO: 1870265 - RNA, 19 nt, Artificial Sequence
  Description of Artificial Sequence: Synthetic oligonucleotide
uaacccuggaacuugcggu

SEQ ID NO: 1870266 - RNA, 19 nt, Artificial Sequence
  Description of Artificial Sequence: Synthetic oligonucleotide
gacacgggcaaggaaaucc

SEQ ID NO: 1870267 - RNA, 19 nt, Artificial Sequence
  Description of Artificial Sequence: Synthetic oligonucleotide
uaaggucaggcaacaaaca

SEQ ID NO: 1870268 - RNA, 19 nt, Artificial Sequence
  Description of Artificial Sequence: Synthetic oligonucleotide
ggaaaucccggucauaagc

SEQ ID NO: 1870269 - RNA, 19 nt, Artificial Sequence
  Description of Artificial Sequence: Synthetic oligonucleotide
guucuugaaauuucuggac

SEQ ID NO: 1870270 - RNA, 19 nt, Artificial Sequence
  Description of Artificial Sequence: Synthetic oligonucleotide
uuguaguaacccuggaacu

SEQ ID NO: 1870271 - RNA, 19 nt, Artificial Sequence
  Description of Artificial Sequence: Synthetic oligonucleotide
guaacccuggaacuugcgg

SEQ ID NO: 1870272 - RNA, 19 nt, Artificial Sequence
  Description of Artificial Sequence: Synthetic oligonucleotide
uugccauugucauuccaag

SEQ ID NO: 1870273 - RNA, 19 nt, Artificial Sequence
  Description of Artificial Sequence: Synthetic oligonucleotide
ggaaacagggacaggaugg

SEQ ID NO: 1870274 - RNA, 19 nt, Artificial Sequence
  Description of Artificial Sequence: Synthetic oligonucleotide
uucuuccaugaaacuaagg

SEQ ID NO: 1870275 - RNA, 19 nt, Artificial Sequence
  Description of Artificial Sequence: Synthetic oligonucleotide
ucaucguucuugaaauuuc

SEQ ID NO: 1870276 - RNA, 19 nt, Artificial Sequence
  Description of Artificial Sequence: Synthetic oligonucleotide
uccaacugggugaaagaca

SEQ ID NO: 1870277 - RNA, 19 nt, Artificial Sequence
  Description of Artificial Sequence: Synthetic oligonucleotide
aacccuggaacuugcggug

SEQ ID NO: 1870278 - RNA, 19 nt, Artificial Sequence
  Description of Artificial Sequence: Synthetic oligonucleotide
aagaacugcccauggcuca

SEQ ID NO: 1870279 - RNA, 19 nt, Artificial Sequence
  Description of Artificial Sequence: Synthetic oligonucleotide
aggucaucguucuugaaau

SEQ ID NO: 1870280 - RNA, 19 nt, Artificial Sequence
  Description of Artificial Sequence: Synthetic oligonucleotide
aaaucccggucauaagccu

SEQ ID NO: 1870281 - RNA, 19 nt, Artificial Sequence
  Description of Artificial Sequence: Synthetic oligonucleotide
gaagcugucucugcuagug

SEQ ID NO: 1870282 - RNA, 19 nt, Artificial Sequence
  Description of Artificial Sequence: Synthetic oligonucleotide
gacaauucagccuuuacuu

SEQ ID NO: 1870283 - RNA, 19 nt, Artificial Sequence
  Description of Artificial Sequence: Synthetic oligonucleotide
auccaacugggugaaagac

SEQ ID NO: 1870284 - RNA, 19 nt, Artificial Sequence
  Description of Artificial Sequence: Synthetic oligonucleotide
agugcccagcgguagugcc

SEQ ID NO: 1870285 - RNA, 19 nt, Artificial Sequence
  Description of Artificial Sequence: Synthetic oligonucleotide
ugcuaguguacuguacccg

SEQ ID NO: 1870286 - RNA, 19 nt, Artificial Sequence
  Description of Artificial Sequence: Synthetic oligonucleotide
cuggcgaucuuguaguaac

SEQ ID NO: 1870287 - RNA, 19 nt, Artificial Sequence
  Description of Artificial Sequence: Synthetic oligonucleotide
cagguggacacgucgaccc

SEQ ID NO: 1870288 - RNA, 19 nt, Artificial Sequence
  Description of Artificial Sequence: Synthetic oligonucleotide
guuacucaggucuggcugc

SEQ ID NO: 1870289 - RNA, 19 nt, Artificial Sequence
  Description of Artificial Sequence: Synthetic oligonucleotide
uuacggccaaaggucaucg

SEQ ID NO: 1870290 - RNA, 19 nt, Artificial Sequence
  Description of Artificial Sequence: Synthetic oligonucleotide
gucuguucgauagagcagc

SEQ ID NO: 1870291 - RNA, 19 nt, Artificial Sequence
  Description of Artificial Sequence: Synthetic oligonucleotide
gauagagcagcucagguuu

SEQ ID NO: 1870292 - RNA, 19 nt, Artificial Sequence
  Description of Artificial Sequence: Synthetic oligonucleotide
agacacgaacugcugguuc

SEQ ID NO: 1870293 - RNA, 19 nt, Artificial Sequence
  Description of Artificial Sequence: Synthetic oligonucleotide
uggguagguggccuggaag

SEQ ID NO: 1870294 - RNA, 19 nt, Artificial Sequence
  Description of Artificial Sequence: Synthetic oligonucleotide
ugugugugacugcacugcc

SEQ ID NO: 1870295 - RNA, 19 nt, Artificial Sequence
  Description of Artificial Sequence: Synthetic oligonucleotide
caugauaugacaagcagau

SEQ ID NO: 1870296 - RNA, 19 nt, Artificial Sequence
  Description of Artificial Sequence: Synthetic oligonucleotide
uauagacacgggcaaggaa

SEQ ID NO: 1870297 - RNA, 19 nt, Artificial Sequence
  Description of Artificial Sequence: Synthetic oligonucleotide
gaucaaagaacugcccaug

SEQ ID NO: 1870298 - RNA, 19 nt, Artificial Sequence
  Description of Artificial Sequence: Synthetic oligonucleotide
agaugcugaucaaagaacu

SEQ ID NO: 1870299 - RNA, 19 nt, Artificial Sequence
  Description of Artificial Sequence: Synthetic oligonucleotide
aggugcugcuaauuccagc

SEQ ID NO: 1870300 - RNA, 19 nt, Artificial Sequence
  Description of Artificial Sequence: Synthetic oligonucleotide
cuaccugcaucuugguggg

SEQ ID NO: 1870301 - RNA, 19 nt, Artificial Sequence
  Description of Artificial Sequence: Synthetic oligonucleotide
gacgaauacaggcccgccc

SEQ ID NO: 1870302 - RNA, 19 nt, Artificial Sequence
  Description of Artificial Sequence: Synthetic oligonucleotide
auagacacgggcaaggaaa

SEQ ID NO: 1870303 - RNA, 19 nt, Artificial Sequence
  Description of Artificial Sequence: Synthetic oligonucleotide
aguacucaaagaagucugg

SEQ ID NO: 1870304 - RNA, 19 nt, Artificial Sequence
  Description of Artificial Sequence: Synthetic oligonucleotide
gagggaaacagggacagga

SEQ ID NO: 1870305 - RNA, 19 nt, Artificial Sequence
  Description of Artificial Sequence: Synthetic oligonucleotide
aaucccggucauaagccuc

SEQ ID NO: 1870306 - RNA, 19 nt, Artificial Sequence
  Description of Artificial Sequence: Synthetic oligonucleotide
ugaacuuaagaugcugauc

SEQ ID NO: 1870307 - RNA, 19 nt, Artificial Sequence
  Description of Artificial Sequence: Synthetic oligonucleotide
uucucuccaaccagcuacc

SEQ ID NO: 1870308 - RNA, 19 nt, Artificial Sequence
  Description of Artificial Sequence: Synthetic oligonucleotide
augaaacuaaggucaggca

SEQ ID NO: 1870309 - RNA, 19 nt, Artificial Sequence
  Description of Artificial Sequence: Synthetic oligonucleotide
ucucagcucaugauaugac

SEQ ID NO: 1870310 - RNA, 19 nt, Artificial Sequence
  Description of Artificial Sequence: Synthetic oligonucleotide
acccuuacggccaaagguc

SEQ ID NO: 1870311 - RNA, 19 nt, Artificial Sequence
  Description of Artificial Sequence: Synthetic oligonucleotide
gaacuugaaacuuguugaa

SEQ ID NO: 1870312 - RNA, 19 nt, Artificial Sequence
  Description of Artificial Sequence: Synthetic oligonucleotide
gacacgucgaccccugaac

SEQ ID NO: 1870313 - RNA, 19 nt, Artificial Sequence
  Description of Artificial Sequence: Synthetic oligonucleotide
aaacuaaggucaggcaaca

SEQ ID NO: 1870314 - RNA, 19 nt, Artificial Sequence
  Description of Artificial Sequence: Synthetic oligonucleotide
cagaucguccuccacuacc

SEQ ID NO: 1870315 - RNA, 19 nt, Artificial Sequence
  Description of Artificial Sequence: Synthetic oligonucleotide
gacaccagacuugagguca

SEQ ID NO: 1870316 - RNA, 19 nt, Artificial Sequence
  Description of Artificial Sequence: Synthetic oligonucleotide
agauguccuggucucagcu

SEQ ID NO: 1870317 - RNA, 19 nt, Artificial Sequence
  Description of Artificial Sequence: Synthetic oligonucleotide
aagcagacacacaccaaag

SEQ ID NO: 1870318 - RNA, 19 nt, Artificial Sequence
  Description of Artificial Sequence: Synthetic oligonucleotide
gucauaagccucccgcugc

SEQ ID NO: 1870319 - RNA, 19 nt, Artificial Sequence
  Description of Artificial Sequence: Synthetic oligonucleotide
ugcuaauuccagcuaggau

SEQ ID NO: 1870320 - RNA, 19 nt, Artificial Sequence
  Description of Artificial Sequence: Synthetic oligonucleotide
agggacaggaugguacagc

SEQ ID NO: 1870321 - RNA, 19 nt, Artificial Sequence
  Description of Artificial Sequence: Synthetic oligonucleotide
gacuugaggucauccauga

SEQ ID NO: 1870322 - RNA, 19 nt, Artificial Sequence
  Description of Artificial Sequence: Synthetic oligonucleotide
gauguuacucaggucuggc

SEQ ID NO: 1870323 - RNA, 19 nt, Artificial Sequence
  Description of Artificial Sequence: Synthetic oligonucleotide
acaagcagauccagcaggg

SEQ ID NO: 1870324 - RNA, 19 nt, Artificial Sequence
  Description of Artificial Sequence: Synthetic oligonucleotide
ugacugcacugccauagga

SEQ ID NO: 1870325 - RNA, 19 nt, Artificial Sequence
  Description of Artificial Sequence: Synthetic oligonucleotide
uacuguacccgcaccuccc

SEQ ID NO: 1870326 - RNA, 19 nt, Artificial Sequence
  Description of Artificial Sequence: Synthetic oligonucleotide
gacacgaacugcugguuca

SEQ ID NO: 1870327 - RNA, 19 nt, Artificial Sequence
  Description of Artificial Sequence: Synthetic oligonucleotide
ucagguuugcuugagucua

SEQ ID NO: 1870328 - RNA, 19 nt, Artificial Sequence
  Description of Artificial Sequence: Synthetic oligonucleotide
cugcuaguguacuguaccc

SEQ ID NO: 1870329 - RNA, 19 nt, Artificial Sequence
  Description of Artificial Sequence: Synthetic oligonucleotide
auacaggcccgccccuucc

SEQ ID NO: 1870330 - RNA, 19 nt, Artificial Sequence
  Description of Artificial Sequence: Synthetic oligonucleotide
ugccuggcgaucuuguagu

SEQ ID NO: 1870331 - RNA, 19 nt, Artificial Sequence
  Description of Artificial Sequence: Synthetic oligonucleotide
uugaaacuuguugaagauc

SEQ ID NO: 1870332 - RNA, 19 nt, Artificial Sequence
  Description of Artificial Sequence: Synthetic oligonucleotide
uaguguacuguacccgcac

SEQ ID NO: 1870333 - RNA, 19 nt, Artificial Sequence
  Description of Artificial Sequence: Synthetic oligonucleotide
gaaguacucaaagaagucu

SEQ ID NO: 1870334 - RNA, 19 nt, Artificial Sequence
  Description of Artificial Sequence: Synthetic oligonucleotide
acacccuuacggccaaagg

SEQ ID NO: 1870335 - RNA, 19 nt, Artificial Sequence
  Description of Artificial Sequence: Synthetic oligonucleotide
ugccggaugugugugacug

SEQ ID NO: 1870336 - RNA, 19 nt, Artificial Sequence
  Description of Artificial Sequence: Synthetic oligonucleotide
uaagccucccgcugcaagu

SEQ ID NO: 1870337 - RNA, 19 nt, Artificial Sequence
  Description of Artificial Sequence: Synthetic oligonucleotide
gaacuugcgguggucuggg

SEQ ID NO: 1870338 - RNA, 19 nt, Artificial Sequence
  Description of Artificial Sequence: Synthetic oligonucleotide
gcaaguaugacaaauccaa

SEQ ID NO: 1870339 - RNA, 19 nt, Artificial Sequence
  Description of Artificial Sequence: Synthetic oligonucleotide
uccuggucucagcuagagg

SEQ ID NO: 1870340 - RNA, 19 nt, Artificial Sequence
  Description of Artificial Sequence: Synthetic oligonucleotide
cuugccauugucauuccaa

SEQ ID NO: 1870341 - RNA, 19 nt, Artificial Sequence
  Description of Artificial Sequence: Synthetic oligonucleotide
ucccgcugcaaguaugaca

SEQ ID NO: 1870342 - RNA, 19 nt, Artificial Sequence
  Description of Artificial Sequence: Synthetic oligonucleotide
ugcuuuggggccagagaug

SEQ ID NO: 1870343 - RNA, 19 nt, Artificial Sequence
  Description of Artificial Sequence: Synthetic oligonucleotide
uggcucacacccuuacggc

SEQ ID NO: 1870344 - RNA, 19 nt, Artificial Sequence
  Description of Artificial Sequence: Synthetic oligonucleotide
gugccuggcgaucuuguag

SEQ ID NO: 1870345 - RNA, 19 nt, Artificial Sequence
  Description of Artificial Sequence: Synthetic oligonucleotide
agggccuuagcaaaggccu

SEQ ID NO: 1870346 - RNA, 19 nt, Artificial Sequence
  Description of Artificial Sequence: Synthetic oligonucleotide
acgucgaccccugaacugg

SEQ ID NO: 1870347 - RNA, 19 nt, Artificial Sequence
  Description of Artificial Sequence: Synthetic oligonucleotide
aggaaaucccggucauaag

SEQ ID NO: 1870348 - RNA, 19 nt, Artificial Sequence
  Description of Artificial Sequence: Synthetic oligonucleotide
guacuguacccgcaccucc

SEQ ID NO: 1870349 - RNA, 19 nt, Artificial Sequence
  Description of Artificial Sequence: Synthetic oligonucleotide
caaagaacugcccauggcu

SEQ ID NO: 1870350 - RNA, 19 nt, Artificial Sequence
  Description of Artificial Sequence: Synthetic oligonucleotide
gcuaguguacuguacccgc

SEQ ID NO: 1870351 - RNA, 19 nt, Artificial Sequence
  Description of Artificial Sequence: Synthetic oligonucleotide
uagacacgggcaaggaaau

SEQ ID NO: 1870352 - RNA, 19 nt, Artificial Sequence
  Description of Artificial Sequence: Synthetic oligonucleotide
gugacaacgccccgguagc

SEQ ID NO: 1870353 - RNA, 19 nt, Artificial Sequence
  Description of Artificial Sequence: Synthetic oligonucleotide
acuuaagaugcugaucaaa

SEQ ID NO: 1870354 - RNA, 19 nt, Artificial Sequence
  Description of Artificial Sequence: Synthetic oligonucleotide
cuggacgaauacaggcccg

SEQ ID NO: 1870355 - RNA, 19 nt, Artificial Sequence
  Description of Artificial Sequence: Synthetic oligonucleotide
uggcgaucuuguaguaacc

SEQ ID NO: 1870356 - RNA, 19 nt, Artificial Sequence
  Description of Artificial Sequence: Synthetic oligonucleotide
ggugaaagacacgaacugc

SEQ ID NO: 1870357 - RNA, 19 nt, Artificial Sequence
  Description of Artificial Sequence: Synthetic oligonucleotide
ugucucagcucaugauaug

SEQ ID NO: 1870358 - RNA, 19 nt, Artificial Sequence
  Description of Artificial Sequence: Synthetic oligonucleotide
cacagcgauguuacucagg

SEQ ID NO: 1870359 - RNA, 19 nt, Artificial Sequence
  Description of Artificial Sequence: Synthetic oligonucleotide
accagcuaccugcaucuug

SEQ ID NO: 1870360 - RNA, 19 nt, Artificial Sequence
  Description of Artificial Sequence: Synthetic oligonucleotide
cucagcucaugauaugaca

SEQ ID NO: 1870361 - RNA, 19 nt, Artificial Sequence
  Description of Artificial Sequence: Synthetic oligonucleotide
auguuacucaggucuggcu

SEQ ID NO: 1870362 - RNA, 19 nt, Artificial Sequence
  Description of Artificial Sequence: Synthetic oligonucleotide
ucaggucugcgcauccagu

SEQ ID NO: 1870363 - RNA, 19 nt, Artificial Sequence
  Description of Artificial Sequence: Synthetic oligonucleotide
ugucucugcuaguguacug

SEQ ID NO: 1870364 - RNA, 19 nt, Artificial Sequence
  Description of Artificial Sequence: Synthetic oligonucleotide
acacgucgaccccugaacu

SEQ ID NO: 1870365 - RNA, 19 nt, Artificial Sequence
  Description of Artificial Sequence: Synthetic oligonucleotide
cuugagucuaccaucugcu

SEQ ID NO: 1870366 - RNA, 19 nt, Artificial Sequence
  Description of Artificial Sequence: Synthetic oligonucleotide
agaacugcccauggcucac

SEQ ID NO: 1870367 - RNA, 19 nt, Artificial Sequence
  Description of Artificial Sequence: Synthetic oligonucleotide
acuaccacagcugcuggga

SEQ ID NO: 1870368 - RNA, 19 nt, Artificial Sequence
  Description of Artificial Sequence: Synthetic oligonucleotide
caauucagccuuuacuuua

SEQ ID NO: 1870369 - RNA, 19 nt, Artificial Sequence
  Description of Artificial Sequence: Synthetic oligonucleotide
uggcccagugcccagcggu

SEQ ID NO: 1870370 - RNA, 19 nt, Artificial Sequence
  Description of Artificial Sequence: Synthetic oligonucleotide
gagucuaccaucugcuccu

SEQ ID NO: 1870371 - RNA, 19 nt, Artificial Sequence
  Description of Artificial Sequence: Synthetic oligonucleotide
uacaggcccgccccuuccg

SEQ ID NO: 1870372 - RNA, 19 nt, Artificial Sequence
  Description of Artificial Sequence: Synthetic oligonucleotide
augauaugacaagcagauc

SEQ ID NO: 1870373 - RNA, 19 nt, Artificial Sequence
  Description of Artificial Sequence: Synthetic oligonucleotide
ugccagguggacacgucga

SEQ ID NO: 1870374 - RNA, 19 nt, Artificial Sequence
  Description of Artificial Sequence: Synthetic oligonucleotide
cagacaauucagccuuuac

SEQ ID NO: 1870375 - RNA, 19 nt, Artificial Sequence
  Description of Artificial Sequence: Synthetic oligonucleotide
agucuguucgauagagcag

SEQ ID NO: 1870376 - RNA, 19 nt, Artificial Sequence
  Description of Artificial Sequence: Synthetic oligonucleotide
agcuaccugcaucuuggug

SEQ ID NO: 1870377 - RNA, 19 nt, Artificial Sequence
  Description of Artificial Sequence: Synthetic oligonucleotide
cuaggaucauagccuuccc

SEQ ID NO: 1870378 - RNA, 19 nt, Artificial Sequence
  Description of Artificial Sequence: Synthetic oligonucleotide
gggaaacagggacaggaug

SEQ ID NO: 1870379 - RNA, 19 nt, Artificial Sequence
  Description of Artificial Sequence: Synthetic oligonucleotide
cauugguccucacuuucuc

SEQ ID NO: 1870380 - RNA, 19 nt, Artificial Sequence
  Description of Artificial Sequence: Synthetic oligonucleotide
ggcacuauagacacgggca

SEQ ID NO: 1870381 - RNA, 19 nt, Artificial Sequence
  Description of Artificial Sequence: Synthetic oligonucleotide
uugagucuaccaucugcuc

SEQ ID NO: 1870382 - RNA, 19 nt, Artificial Sequence
  Description of Artificial Sequence: Synthetic oligonucleotide
uggacgaauacaggcccgc

SEQ ID NO: 1870383 - RNA, 19 nt, Artificial Sequence
  Description of Artificial Sequence: Synthetic oligonucleotide
uguacuguacccgcaccuc

SEQ ID NO: 1870384 - RNA, 19 nt, Artificial Sequence
  Description of Artificial Sequence: Synthetic oligonucleotide
aacuugcgguggucugggg

SEQ ID NO: 1870385 - RNA, 19 nt, Artificial Sequence
  Description of Artificial Sequence: Synthetic oligonucleotide
ggcaaggaaaucccgguca

SEQ ID NO: 1870386 - RNA, 19 nt, Artificial Sequence
  Description of Artificial Sequence: Synthetic oligonucleotide
acgggcaaggaaaucccgg

SEQ ID NO: 1870387 - RNA, 19 nt, Artificial Sequence
  Description of Artificial Sequence: Synthetic oligonucleotide
uucugaucauugguccuca

SEQ ID NO: 1870388 - RNA, 19 nt, Artificial Sequence
  Description of Artificial Sequence: Synthetic oligonucleotide
acaggcccgccccuuccgc

SEQ ID NO: 1870389 - RNA, 19 nt, Artificial Sequence
  Description of Artificial Sequence: Synthetic oligonucleotide
acaaauccaacugggugaa

SEQ ID NO: 1870390 - RNA, 19 nt, Artificial Sequence
  Description of Artificial Sequence: Synthetic oligonucleotide
cucugcuaguguacuguac

SEQ ID NO: 1870391 - RNA, 19 nt, Artificial Sequence
  Description of Artificial Sequence: Synthetic oligonucleotide
ucgaccccugaacuggaaa

SEQ ID NO: 1870392 - RNA, 19 nt, Artificial Sequence
  Description of Artificial Sequence: Synthetic oligonucleotide
cauagccuucccagguuug

SEQ ID NO: 1870393 - RNA, 19 nt, Artificial Sequence
  Description of Artificial Sequence: Synthetic oligonucleotide
ugcucaggucugcgcaucc

SEQ ID NO: 1870394 - RNA, 19 nt, Artificial Sequence
  Description of Artificial Sequence: Synthetic oligonucleotide
gaaaggcaggugcugcuaa

SEQ ID NO: 1870395 - RNA, 19 nt, Artificial Sequence
  Description of Artificial Sequence: Synthetic oligonucleotide
acggccaaaggucaucguu

SEQ ID NO: 1870396 - RNA, 19 nt, Artificial Sequence
  Description of Artificial Sequence: Synthetic oligonucleotide
ggcacagcgauguuacuca

SEQ ID NO: 1870397 - RNA, 19 nt, Artificial Sequence
  Description of Artificial Sequence: Synthetic oligonucleotide
ggucauaagccucccgcug

SEQ ID NO: 1870398 - RNA, 19 nt, Artificial Sequence
  Description of Artificial Sequence: Synthetic oligonucleotide
aucguucuugaaauuucug

SEQ ID NO: 1870399 - RNA, 19 nt, Artificial Sequence
  Description of Artificial Sequence: Synthetic oligonucleotide
uuccagcuaggaucauagc

SEQ ID NO: 1870400 - RNA, 19 nt, Artificial Sequence
  Description of Artificial Sequence: Synthetic oligonucleotide
gugaaagacacgaacugcu

SEQ ID NO: 1870401 - RNA, 19 nt, Artificial Sequence
  Description of Artificial Sequence: Synthetic oligonucleotide
gucucagcuagagggaaac

SEQ ID NO: 1870402 - RNA, 19 nt, Artificial Sequence
  Description of Artificial Sequence: Synthetic oligonucleotide
aguaacccuggaacuugcg

SEQ ID NO: 1870403 - RNA, 19 nt, Artificial Sequence
  Description of Artificial Sequence: Synthetic oligonucleotide
ggugcugcuaauuccagcu

SEQ ID NO: 1870404 - RNA, 19 nt, Artificial Sequence
  Description of Artificial Sequence: Synthetic oligonucleotide
ucucugcuaguguacugua

SEQ ID NO: 1870405 - RNA, 19 nt, Artificial Sequence
  Description of Artificial Sequence: Synthetic oligonucleotide
cuugaaacuuguugaagau

SEQ ID NO: 1870406 - RNA, 19 nt, Artificial Sequence
  Description of Artificial Sequence: Synthetic oligonucleotide
agaucuggcccagugccca

SEQ ID NO: 1870407 - RNA, 19 nt, Artificial Sequence
  Description of Artificial Sequence: Synthetic oligonucleotide
caacugggugaaagacacg

SEQ ID NO: 1870408 - RNA, 19 nt, Artificial Sequence
  Description of Artificial Sequence: Synthetic oligonucleotide
cacgucgaccccugaacug

SEQ ID NO: 1870409 - RNA, 19 nt, Artificial Sequence
  Description of Artificial Sequence: Synthetic oligonucleotide
ggaaagugacaacgccccg

SEQ ID NO: 1870410 - RNA, 19 nt, Artificial Sequence
  Description of Artificial Sequence: Synthetic oligonucleotide
uuggggccagagauguccu

SEQ ID NO: 1870411 - RNA, 19 nt, Artificial Sequence
  Description of Artificial Sequence: Synthetic oligonucleotide
auaauucuguagauuccau

SEQ ID NO: 1870412 - RNA, 19 nt, Artificial Sequence
  Description of Artificial Sequence: Synthetic oligonucleotide
ccagucaucccagaaggcc

SEQ ID NO: 1870413 - RNA, 19 nt, Artificial Sequence
  Description of Artificial Sequence: Synthetic oligonucleotide
uagagcagcucagguuugc

SEQ ID NO: 1870414 - RNA, 19 nt, Artificial Sequence
  Description of Artificial Sequence: Synthetic oligonucleotide
agcgguagugccuggcgau

SEQ ID NO: 1870415 - RNA, 19 nt, Artificial Sequence
  Description of Artificial Sequence: Synthetic oligonucleotide
ccggucauaagccucccgc

SEQ ID NO: 1870416 - RNA, 19 nt, Artificial Sequence
  Description of Artificial Sequence: Synthetic oligonucleotide
cuaguguacuguacccgca

SEQ ID NO: 1870417 - RNA, 19 nt, Artificial Sequence
  Description of Artificial Sequence: Synthetic oligonucleotide
cuuacggccaaaggucauc

SEQ ID NO: 1870418 - RNA, 19 nt, Artificial Sequence
  Description of Artificial Sequence: Synthetic oligonucleotide
ggaugguacagcucaggga

SEQ ID NO: 1870419 - RNA, 19 nt, Artificial Sequence
  Description of Artificial Sequence: Synthetic oligonucleotide
ggaaguacucaaagaaguc

SEQ ID NO: 1870420 - RNA, 19 nt, Artificial Sequence
  Description of Artificial Sequence: Synthetic oligonucleotide
accccugaacuggaaagug

SEQ ID NO: 1870421 - RNA, 19 nt, Artificial Sequence
  Description of Artificial Sequence: Synthetic oligonucleotide
caaccagcuaccugcaucu

SEQ ID NO: 1870422 - RNA, 19 nt, Artificial Sequence
  Description of Artificial Sequence: Synthetic oligonucleotide
gcugcuaauuccagcuagg

SEQ ID NO: 1870423 - RNA, 19 nt, Artificial Sequence
  Description of Artificial Sequence: Synthetic oligonucleotide
gaucguccuccacuaccac

SEQ ID NO: 1870424 - RNA, 19 nt, Artificial Sequence
  Description of Artificial Sequence: Synthetic oligonucleotide
gauguccuggucucagcua

SEQ ID NO: 1870425 - RNA, 19 nt, Artificial Sequence
  Description of Artificial Sequence: Synthetic oligonucleotide
acacaccaaagggaggggu

SEQ ID NO: 1870426 - RNA, 19 nt, Artificial Sequence
  Description of Artificial Sequence: Synthetic oligonucleotide
guagguggccuggaaguac

SEQ ID NO: 1870427 - RNA, 19 nt, Artificial Sequence
  Description of Artificial Sequence: Synthetic oligonucleotide
ucagacaauucagccuuua

SEQ ID NO: 1870428 - RNA, 19 nt, Artificial Sequence
  Description of Artificial Sequence: Synthetic oligonucleotide
uggucucagcuagagggaa

SEQ ID NO: 1870429 - RNA, 19 nt, Artificial Sequence
  Description of Artificial Sequence: Synthetic oligonucleotide
cguucuugaaauuucugga

SEQ ID NO: 1870430 - RNA, 19 nt, Artificial Sequence
  Description of Artificial Sequence: Synthetic oligonucleotide
cugcgcauccagucauccc

SEQ ID NO: 1870431 - RNA, 19 nt, Artificial Sequence
  Description of Artificial Sequence: Synthetic oligonucleotide
auagccuucccagguuugu

SEQ ID NO: 1870432 - RNA, 19 nt, Artificial Sequence
  Description of Artificial Sequence: Synthetic oligonucleotide
cccgcugcaaguaugacaa

SEQ ID NO: 1870433 - RNA, 19 nt, Artificial Sequence
  Description of Artificial Sequence: Synthetic oligonucleotide
ggucuguucucagcagugg

SEQ ID NO: 1870434 - RNA, 19 nt, Artificial Sequence
  Description of Artificial Sequence: Synthetic oligonucleotide
ucuccaccuguagcagggg

SEQ ID NO: 1870435 - RNA, 19 nt, Artificial Sequence
  Description of Artificial Sequence: Synthetic oligonucleotide
acacgaacugcugguucag

SEQ ID NO: 1870436 - RNA, 19 nt, Artificial Sequence
  Description of Artificial Sequence: Synthetic oligonucleotide
cacccuuacggccaaaggu

SEQ ID NO: 1870437 - RNA, 19 nt, Artificial Sequence
  Description of Artificial Sequence: Synthetic oligonucleotide
gaucuggcccagugcccag

SEQ ID NO: 1870438 - RNA, 19 nt, Artificial Sequence
  Description of Artificial Sequence: Synthetic oligonucleotide
caucguucuugaaauuucu

SEQ ID NO: 1870439 - RNA, 19 nt, Artificial Sequence
  Description of Artificial Sequence: Synthetic oligonucleotide
ucucagcuagagggaaaca

SEQ ID NO: 1870440 - RNA, 19 nt, Artificial Sequence
  Description of Artificial Sequence: Synthetic oligonucleotide
agcucagguuugcuugagu

SEQ ID NO: 1870441 - RNA, 19 nt, Artificial Sequence
  Description of Artificial Sequence: Synthetic oligonucleotide
agagggaaacagggacagg

SEQ ID NO: 1870442 - RNA, 19 nt, Artificial Sequence
  Description of Artificial Sequence: Synthetic oligonucleotide
cuugaaauuucuggacgaa

SEQ ID NO: 1870443 - RNA, 19 nt, Artificial Sequence
  Description of Artificial Sequence: Synthetic oligonucleotide
aacuaaggucaggcaacaa

SEQ ID NO: 1870444 - RNA, 19 nt, Artificial Sequence
  Description of Artificial Sequence: Synthetic oligonucleotide
cacacaccaaagggagggg

SEQ ID NO: 1870445 - RNA, 19 nt, Artificial Sequence
  Description of Artificial Sequence: Synthetic oligonucleotide
agacacgggcaaggaaauc

SEQ ID NO: 1870446 - RNA, 19 nt, Artificial Sequence
  Description of Artificial Sequence: Synthetic oligonucleotide
ugggaacuugaaacuuguu

SEQ ID NO: 1870447 - RNA, 19 nt, Artificial Sequence
  Description of Artificial Sequence: Synthetic oligonucleotide
gcugcaaguaugacaaauc

SEQ ID NO: 1870448 - RNA, 19 nt, Artificial Sequence
  Description of Artificial Sequence: Synthetic oligonucleotide
ccgguagccagcucugggg

SEQ ID NO: 1870449 - RNA, 19 nt, Artificial Sequence
  Description of Artificial Sequence: Synthetic oligonucleotide
ccaaccagcuaccugcauc

SEQ ID NO: 1870450 - RNA, 19 nt, Artificial Sequence
  Description of Artificial Sequence: Synthetic oligonucleotide
agcugcuuuggggccagag

SEQ ID NO: 1870451 - RNA, 19 nt, Artificial Sequence
  Description of Artificial Sequence: Synthetic oligonucleotide
gcagauccagcagggaaag

SEQ ID NO: 1870452 - RNA, 19 nt, Artificial Sequence
  Description of Artificial Sequence: Synthetic oligonucleotide
agcucuguccacagcucag

SEQ ID NO: 1870453 - RNA, 19 nt, Artificial Sequence
  Description of Artificial Sequence: Synthetic oligonucleotide
agcaguggguagguggccu

SEQ ID NO: 1870454 - RNA, 19 nt, Artificial Sequence
  Description of Artificial Sequence: Synthetic oligonucleotide
ugacaacgccccgguagcc

SEQ ID NO: 1870455 - RNA, 19 nt, Artificial Sequence
  Description of Artificial Sequence: Synthetic oligonucleotide
augacacccagggccuuag

SEQ ID NO: 1870456 - RNA, 19 nt, Artificial Sequence
  Description of Artificial Sequence: Synthetic oligonucleotide
guagugccuggcgaucuug

SEQ ID NO: 1870457 - RNA, 19 nt, Artificial Sequence
  Description of Artificial Sequence: Synthetic oligonucleotide
caucagcagccagccaagg

SEQ ID NO: 1870458 - RNA, 19 nt, Artificial Sequence
  Description of Artificial Sequence: Synthetic oligonucleotide
gaaacagggacaggauggu

SEQ ID NO: 1870459 - RNA, 19 nt, Artificial Sequence
  Description of Artificial Sequence: Synthetic oligonucleotide
cuauagacacgggcaagga

SEQ ID NO: 1870460 - RNA, 19 nt, Artificial Sequence
  Description of Artificial Sequence: Synthetic oligonucleotide
ugacacccagggccuuagc

SEQ ID NO: 1870461 - RNA, 19 nt, Artificial Sequence
  Description of Artificial Sequence: Synthetic oligonucleotide
ugcccauggcucacacccu

SEQ ID NO: 1870462 - RNA, 19 nt, Artificial Sequence
  Description of Artificial Sequence: Synthetic oligonucleotide
agcuaggaucauagccuuc

SEQ ID NO: 1870463 - RNA, 19 nt, Artificial Sequence
  Description of Artificial Sequence: Synthetic oligonucleotide
gucauuccaagcagacaca

SEQ ID NO: 1870464 - RNA, 19 nt, Artificial Sequence
  Description of Artificial Sequence: Synthetic oligonucleotide
uacggccaaaggucaucgu

SEQ ID NO: 1870465 - RNA, 19 nt, Artificial Sequence
  Description of Artificial Sequence: Synthetic oligonucleotide
gguuugcuugagucuacca

SEQ ID NO: 1870466 - RNA, 19 nt, Artificial Sequence
  Description of Artificial Sequence: Synthetic oligonucleotide
cugcuaauuccagcuagga

SEQ ID NO: 1870467 - RNA, 19 nt, Artificial Sequence
  Description of Artificial Sequence: Synthetic oligonucleotide
ggaugugugugacugcacu

SEQ ID NO: 1870468 - RNA, 19 nt, Artificial Sequence
  Description of Artificial Sequence: Synthetic oligonucleotide
uccaaccagcuaccugcau

SEQ ID NO: 1870469 - RNA, 19 nt, Artificial Sequence
  Description of Artificial Sequence: Synthetic oligonucleotide
gcacuauagacacgggcaa

SEQ ID NO: 1870470 - RNA, 19 nt, Artificial Sequence
  Description of Artificial Sequence: Synthetic oligonucleotide
aagugacaacgccccggua

SEQ ID NO: 1870471 - RNA, 19 nt, Artificial Sequence
  Description of Artificial Sequence: Synthetic oligonucleotide
gucaucguucuugaaauuu

SEQ ID NO: 1870472 - RNA, 19 nt, Artificial Sequence
  Description of Artificial Sequence: Synthetic oligonucleotide
cuccagaucguccuccacu

SEQ ID NO: 1870473 - RNA, 19 nt, Artificial Sequence
  Description of Artificial Sequence: Synthetic oligonucleotide
cacccagggccuuagcaaa

SEQ ID NO: 1870474 - RNA, 19 nt, Artificial Sequence
  Description of Artificial Sequence: Synthetic oligonucleotide
aagccucccgcugcaagua

SEQ ID NO: 1870475 - RNA, 19 nt, Artificial Sequence
  Description of Artificial Sequence: Synthetic oligonucleotide
guacucaaagaagucuggu

SEQ ID NO: 1870476 - RNA, 19 nt, Artificial Sequence
  Description of Artificial Sequence: Synthetic oligonucleotide
cuugggcuccagcucuguc

SEQ ID NO: 1870477 - RNA, 19 nt, Artificial Sequence
  Description of Artificial Sequence: Synthetic oligonucleotide
cagacuugaggucauccau

SEQ ID NO: 1870478 - RNA, 19 nt, Artificial Sequence
  Description of Artificial Sequence: Synthetic oligonucleotide
uggcugccggaugugugug

SEQ ID NO: 1870479 - RNA, 19 nt, Artificial Sequence
  Description of Artificial Sequence: Synthetic oligonucleotide
ccagccaaggccaggaaaa

SEQ ID NO: 1870480 - RNA, 19 nt, Artificial Sequence
  Description of Artificial Sequence: Synthetic oligonucleotide
cacgaacugcugguucagc

SEQ ID NO: 1870481 - RNA, 19 nt, Artificial Sequence
  Description of Artificial Sequence: Synthetic oligonucleotide
agugccuggcgaucuugua

SEQ ID NO: 1870482 - RNA, 19 nt, Artificial Sequence
  Description of Artificial Sequence: Synthetic oligonucleotide
agggaaacagggacaggau

SEQ ID NO: 1870483 - RNA, 19 nt, Artificial Sequence
  Description of Artificial Sequence: Synthetic oligonucleotide
accaaagggaggggucugu

SEQ ID NO: 1870484 - RNA, 19 nt, Artificial Sequence
  Description of Artificial Sequence: Synthetic oligonucleotide
uggacacgucgaccccuga

SEQ ID NO: 1870485 - RNA, 19 nt, Artificial Sequence
  Description of Artificial Sequence: Synthetic oligonucleotide
cacacagauuucucuccaa

SEQ ID NO: 1870486 - RNA, 19 nt, Artificial Sequence
  Description of Artificial Sequence: Synthetic oligonucleotide
gggucuguucucagcagug

SEQ ID NO: 1870487 - RNA, 19 nt, Artificial Sequence
  Description of Artificial Sequence: Synthetic oligonucleotide
cuguucgauagagcagcuc

SEQ ID NO: 1870488 - RNA, 19 nt, Artificial Sequence
  Description of Artificial Sequence: Synthetic oligonucleotide
ggccuugggccacuugggc

SEQ ID NO: 1870489 - RNA, 19 nt, Artificial Sequence
  Description of Artificial Sequence: Synthetic oligonucleotide
gcacagcgauguuacucag

SEQ ID NO: 1870490 - RNA, 19 nt, Artificial Sequence
  Description of Artificial Sequence: Synthetic oligonucleotide
gcugucucugcuaguguac

SEQ ID NO: 1870491 - RNA, 19 nt, Artificial Sequence
  Description of Artificial Sequence: Synthetic oligonucleotide
acccagggccuuagcaaag

SEQ ID NO: 1870492 - RNA, 19 nt, Artificial Sequence
  Description of Artificial Sequence: Synthetic oligonucleotide
cucaggucuggcugccgga

SEQ ID NO: 1870493 - RNA, 19 nt, Artificial Sequence
  Description of Artificial Sequence: Synthetic oligonucleotide
gggcaaggaaaucccgguc

SEQ ID NO: 1870494 - RNA, 19 nt, Artificial Sequence
  Description of Artificial Sequence: Synthetic oligonucleotide
guggacacgucgaccccug

SEQ ID NO: 1870495 - RNA, 19 nt, Artificial Sequence
  Description of Artificial Sequence: Synthetic oligonucleotide
uaccugcaucuuggugggg

SEQ ID NO: 1870496 - RNA, 19 nt, Artificial Sequence
  Description of Artificial Sequence: Synthetic oligonucleotide
cggccaaaggucaucguuc

SEQ ID NO: 1870497 - RNA, 19 nt, Artificial Sequence
  Description of Artificial Sequence: Synthetic oligonucleotide
cagcgguagugccuggcga

SEQ ID NO: 1870498 - RNA, 19 nt, Artificial Sequence
  Description of Artificial Sequence: Synthetic oligonucleotide
cuaccacagcugcugggaa

SEQ ID NO: 1870499 - RNA, 19 nt, Artificial Sequence
  Description of Artificial Sequence: Synthetic oligonucleotide
gcaguggguagguggccug

SEQ ID NO: 1870500 - RNA, 19 nt, Artificial Sequence
  Description of Artificial Sequence: Synthetic oligonucleotide
ucccggucauaagccuccc

SEQ ID NO: 1870501 - RNA, 19 nt, Artificial Sequence
  Description of Artificial Sequence: Synthetic oligonucleotide
ggacgaauacaggcccgcc

SEQ ID NO: 1870502 - RNA, 19 nt, Artificial Sequence
  Description of Artificial Sequence: Synthetic oligonucleotide
ccugaacuggaaagugaca

SEQ ID NO: 1870503 - RNA, 19 nt, Artificial Sequence
  Description of Artificial Sequence: Synthetic oligonucleotide
cuggcugccggaugugugu

SEQ ID NO: 1870504 - RNA, 19 nt, Artificial Sequence
  Description of Artificial Sequence: Synthetic oligonucleotide
ggccaaaggucaucguucu

SEQ ID NO: 1870505 - RNA, 19 nt, Artificial Sequence
  Description of Artificial Sequence: Synthetic oligonucleotide
gugcugcuaauuccagcua

SEQ ID NO: 1870506 - RNA, 19 nt, Artificial Sequence
  Description of Artificial Sequence: Synthetic oligonucleotide
agccucccgcugcaaguau

SEQ ID NO: 1870507 - RNA, 19 nt, Artificial Sequence
  Description of Artificial Sequence: Synthetic oligonucleotide
ccuuccgcugcucaggucu

SEQ ID NO: 1870508 - RNA, 19 nt, Artificial Sequence
  Description of Artificial Sequence: Synthetic oligonucleotide
cgauguuacucaggucugg

SEQ ID NO: 1870509 - RNA, 19 nt, Artificial Sequence
  Description of Artificial Sequence: Synthetic oligonucleotide
cccuuacggccaaagguca

SEQ ID NO: 1870510 - RNA, 19 nt, Artificial Sequence
  Description of Artificial Sequence: Synthetic oligonucleotide
gguggccuggaaguacuca

SEQ ID NO: 1870511 - RNA, 19 nt, Artificial Sequence
  Description of Artificial Sequence: Synthetic oligonucleotide
ggacacgucgaccccugaa

SEQ ID NO: 1870512 - RNA, 19 nt, Artificial Sequence
  Description of Artificial Sequence: Synthetic oligonucleotide
gcugccggaugugugugac

SEQ ID NO: 1870513 - RNA, 19 nt, Artificial Sequence
  Description of Artificial Sequence: Synthetic oligonucleotide
aaccagcuaccugcaucuu

SEQ ID NO: 1870514 - RNA, 19 nt, Artificial Sequence
  Description of Artificial Sequence: Synthetic oligonucleotide
gccggaugugugugacugc

SEQ ID NO: 1870515 - RNA, 19 nt, Artificial Sequence
  Description of Artificial Sequence: Synthetic oligonucleotide
cucccgcugcaaguaugac

SEQ ID NO: 1870516 - RNA, 19 nt, Artificial Sequence
  Description of Artificial Sequence: Synthetic oligonucleotide
ggggucuguucucagcagu

SEQ ID NO: 1870517 - RNA, 19 nt, Artificial Sequence
  Description of Artificial Sequence: Synthetic oligonucleotide
cagcuaggaucauagccuu

SEQ ID NO: 1870518 - RNA, 19 nt, Artificial Sequence
  Description of Artificial Sequence: Synthetic oligonucleotide
cucacacccuuacggccaa

SEQ ID NO: 1870519 - RNA, 19 nt, Artificial Sequence
  Description of Artificial Sequence: Synthetic oligonucleotide
ggucugcgcauccagucau

SEQ ID NO: 1870520 - RNA, 19 nt, Artificial Sequence
  Description of Artificial Sequence: Synthetic oligonucleotide
gucugcgcauccagucauc

SEQ ID NO: 1870521 - RNA, 19 nt, Artificial Sequence
  Description of Artificial Sequence: Synthetic oligonucleotide
ccagaucguccuccacuac

SEQ ID NO: 1870522 - RNA, 19 nt, Artificial Sequence
  Description of Artificial Sequence: Synthetic oligonucleotide
gguagguggccuggaagua

SEQ ID NO: 1870523 - RNA, 19 nt, Artificial Sequence
  Description of Artificial Sequence: Synthetic oligonucleotide
gggccacuugggcuccagc

SEQ ID NO: 1870524 - RNA, 19 nt, Artificial Sequence
  Description of Artificial Sequence: Synthetic oligonucleotide
gccuugggccacuugggcu

SEQ ID NO: 1870525 - RNA, 19 nt, Artificial Sequence
  Description of Artificial Sequence: Synthetic oligonucleotide
gaauacaggcccgccccuu

SEQ ID NO: 1870526 - RNA, 19 nt, Artificial Sequence
  Description of Artificial Sequence: Synthetic oligonucleotide
gccucccgcugcaaguaug

SEQ ID NO: 1870527 - RNA, 19 nt, Artificial Sequence
  Description of Artificial Sequence: Synthetic oligonucleotide
cauaagccucccgcugcaa

SEQ ID NO: 1870528 - RNA, 19 nt, Artificial Sequence
  Description of Artificial Sequence: Synthetic oligonucleotide
guugaagaucuggcccagu

SEQ ID NO: 1870529 - RNA, 19 nt, Artificial Sequence
  Description of Artificial Sequence: Synthetic oligonucleotide
ccagaaggccuugggccac

SEQ ID NO: 1870530 - RNA, 19 nt, Artificial Sequence
  Description of Artificial Sequence: Synthetic oligonucleotide
gcagggaaaggcaggugcu

SEQ ID NO: 1870531 - RNA, 19 nt, Artificial Sequence
  Description of Artificial Sequence: Synthetic oligonucleotide
cagcugcugggaacuugaa

SEQ ID NO: 1870532 - RNA, 19 nt, Artificial Sequence
  Description of Artificial Sequence: Synthetic oligonucleotide
gguggacacgucgaccccu

SEQ ID NO: 1870533 - RNA, 19 nt, Artificial Sequence
  Description of Artificial Sequence: Synthetic oligonucleotide
cggaugugugugacugcac

SEQ ID NO: 1870534 - RNA, 19 nt, Artificial Sequence
  Description of Artificial Sequence: Synthetic oligonucleotide
ggugccaccuccagaucgu

SEQ ID NO: 1870535 - RNA, 19 nt, Artificial Sequence
  Description of Artificial Sequence: Synthetic oligonucleotide
caaauccaacugggugaaa

SEQ ID NO: 1870536 - RNA, 19 nt, Artificial Sequence
  Description of Artificial Sequence: Synthetic oligonucleotide
ggucaucguucuugaaauu

SEQ ID NO: 1870537 - RNA, 19 nt, Artificial Sequence
  Description of Artificial Sequence: Synthetic oligonucleotide
ggcccgccccuuccgcugc

SEQ ID NO: 1870538 - RNA, 19 nt, Artificial Sequence
  Description of Artificial Sequence: Synthetic oligonucleotide
gccugucucagcucaugau

SEQ ID NO: 1870539 - RNA, 19 nt, Artificial Sequence
  Description of Artificial Sequence: Synthetic oligonucleotide
gucgaccccugaacuggaa

SEQ ID NO: 1870540 - RNA, 19 nt, Artificial Sequence
  Description of Artificial Sequence: Synthetic oligonucleotide
gcgguagugccuggcgauc

SEQ ID NO: 1870541 - RNA, 19 nt, Artificial Sequence
  Description of Artificial Sequence: Synthetic oligonucleotide
cugccggaugugugugacu

SEQ ID NO: 1870542 - RNA, 19 nt, Artificial Sequence
  Description of Artificial Sequence: Synthetic oligonucleotide
ccuggcgaucuuguaguaa

SEQ ID NO: 1870543 - RNA, 19 nt, Artificial Sequence
  Description of Artificial Sequence: Synthetic oligonucleotide
gguagugccuggcgaucuu

SEQ ID NO: 1870544 - RNA, 19 nt, Artificial Sequence
  Description of Artificial Sequence: Synthetic oligonucleotide
gccuggcgaucuuguagua

SEQ ID NO: 1870545 - RNA, 19 nt, Artificial Sequence
  Description of Artificial Sequence: Synthetic oligonucleotide
cgggcaaggaaaucccggu

SEQ ID NO: 1870546 - RNA, 19 nt, Artificial Sequence
  Description of Artificial Sequence: Synthetic oligonucleotide
cggucauaagccucccgcu

SEQ ID NO: 1870547 - RNA, 19 nt, Artificial Sequence
  Description of Artificial Sequence: Synthetic oligonucleotide
cgcugcaaguaugacaaau

SEQ ID NO: 1870548 - RNA, 19 nt, Artificial Sequence
  Description of Artificial Sequence: Synthetic oligonucleotide
cccauggcucacacccuua

SEQ ID NO: 1870549 - RNA, 19 nt, Artificial Sequence
  Description of Artificial Sequence: Synthetic oligonucleotide
ccuuacggccaaaggucau

SEQ ID NO: 1870550 - RNA, 19 nt, Artificial Sequence
  Description of Artificial Sequence: Synthetic oligonucleotide
ggggcacagcgauguuacu

SEQ ID NO: 1870551 - RNA, 19 nt, Artificial Sequence
  Description of Artificial Sequence: Synthetic oligonucleotide
ggcccagugcccagcggua

SEQ ID NO: 1870552 - RNA, 19 nt, Artificial Sequence
  Description of Artificial Sequence: Synthetic oligonucleotide
ccgccccuuccgcugcuca

SEQ ID NO: 1870553 - RNA, 19 nt, Artificial Sequence
  Description of Artificial Sequence: Synthetic oligonucleotide
cgaauacaggcccgccccu

SEQ ID NO: 1870554 - RNA, 19 nt, Artificial Sequence
  Description of Artificial Sequence: Synthetic oligonucleotide
gggccuuagcaaaggccuu

SEQ ID NO: 1870555 - RNA, 19 nt, Artificial Sequence
  Description of Artificial Sequence: Synthetic oligonucleotide
ccccuuccgcugcucaggu

SEQ ID NO: 1870556 - RNA, 19 nt, Artificial Sequence
  Description of Artificial Sequence: Synthetic oligonucleotide
ccgcugcaaguaugacaaa

SEQ ID NO: 1870557 - RNA, 19 nt, Artificial Sequence
  Description of Artificial Sequence: Synthetic oligonucleotide
cgguagugccuggcgaucu

SEQ ID NO: 1870558 - RNA, 19 nt, Artificial Sequence
  Description of Artificial Sequence: Synthetic oligonucleotide
aaauauccagcauagagac

SEQ ID NO: 1870559 - RNA, 19 nt, Artificial Sequence
  Description of Artificial Sequence: Synthetic oligonucleotide
aaagagauggaagcuaggc

SEQ ID NO: 1870560 - RNA, 19 nt, Artificial Sequence
  Description of Artificial Sequence: Synthetic oligonucleotide
ucauauaggccccacagca

SEQ ID NO: 1870561 - RNA, 19 nt, Artificial Sequence
  Description of Artificial Sequence: Synthetic oligonucleotide
ucccuaaacuuaaauaucc

SEQ ID NO: 1870562 - RNA, 19 nt, Artificial Sequence
  Description of Artificial Sequence: Synthetic oligonucleotide
auugcuauccaccucagcu

SEQ ID NO: 1870563 - RNA, 19 nt, Artificial Sequence
  Description of Artificial Sequence: Synthetic oligonucleotide
aauguuucacucacgcugc

SEQ ID NO: 1870564 - RNA, 19 nt, Artificial Sequence
  Description of Artificial Sequence: Synthetic oligonucleotide
gagaccuuagccuuucugg

SEQ ID NO: 1870565 - RNA, 19 nt, Artificial Sequence
  Description of Artificial Sequence: Synthetic oligonucleotide
aacuuaaauauccagcaua

SEQ ID NO: 1870566 - RNA, 19 nt, Artificial Sequence
  Description of Artificial Sequence: Synthetic oligonucleotide
acuaaggacuugcugaagg

SEQ ID NO: 1870567 - RNA, 19 nt, Artificial Sequence
  Description of Artificial Sequence: Synthetic oligonucleotide
auagacgcgcuccagcucc

SEQ ID NO: 1870568 - RNA, 19 nt, Artificial Sequence
  Description of Artificial Sequence: Synthetic oligonucleotide
gaucgacucauauaggccc

SEQ ID NO: 1870569 - RNA, 19 nt, Artificial Sequence
  Description of Artificial Sequence: Synthetic oligonucleotide
ugcaauguuucacucacgc

SEQ ID NO: 1870570 - RNA, 19 nt, Artificial Sequence
  Description of Artificial Sequence: Synthetic oligonucleotide
ucgacuaaggacuugcuga

SEQ ID NO: 1870571 - RNA, 19 nt, Artificial Sequence
  Description of Artificial Sequence: Synthetic oligonucleotide
aagaaggccgcugaggccg

SEQ ID NO: 1870572 - RNA, 19 nt, Artificial Sequence
  Description of Artificial Sequence: Synthetic oligonucleotide
agugcaagacgcuuuggac

SEQ ID NO: 1870573 - RNA, 19 nt, Artificial Sequence
  Description of Artificial Sequence: Synthetic oligonucleotide
acucauauaggccccacag

SEQ ID NO: 1870574 - RNA, 19 nt, Artificial Sequence
  Description of Artificial Sequence: Synthetic oligonucleotide
uggaucgacucauauaggc

SEQ ID NO: 1870575 - RNA, 19 nt, Artificial Sequence
  Description of Artificial Sequence: Synthetic oligonucleotide
aaguccaguccacuggcac

SEQ ID NO: 1870576 - RNA, 19 nt, Artificial Sequence
  Description of Artificial Sequence: Synthetic oligonucleotide
ugcuuguaguccuggaucg

SEQ ID NO: 1870577 - RNA, 19 nt, Artificial Sequence
  Description of Artificial Sequence: Synthetic oligonucleotide
agaagugggaaguccaguc

SEQ ID NO: 1870578 - RNA, 19 nt, Artificial Sequence
  Description of Artificial Sequence: Synthetic oligonucleotide
ugguacugguaaaagagca

SEQ ID NO: 1870579 - RNA, 19 nt, Artificial Sequence
  Description of Artificial Sequence: Synthetic oligonucleotide
gacgcuuuggaccccacgg

SEQ ID NO: 1870580 - RNA, 19 nt, Artificial Sequence
  Description of Artificial Sequence: Synthetic oligonucleotide
uaagggcuggccaagcuag

SEQ ID NO: 1870581 - RNA, 19 nt, Artificial Sequence
  Description of Artificial Sequence: Synthetic oligonucleotide
cccacuagcguuaagaagg

SEQ ID NO: 1870582 - RNA, 19 nt, Artificial Sequence
  Description of Artificial Sequence: Synthetic oligonucleotide
acuuaaauauccagcauag

SEQ ID NO: 1870583 - RNA, 19 nt, Artificial Sequence
  Description of Artificial Sequence: Synthetic oligonucleotide
acuagcguuaagaaggccg

SEQ ID NO: 1870584 - RNA, 19 nt, Artificial Sequence
  Description of Artificial Sequence: Synthetic oligonucleotide
auauaggccccacagcauc

SEQ ID NO: 1870585 - RNA, 19 nt, Artificial Sequence
  Description of Artificial Sequence: Synthetic oligonucleotide
ugcaagacgcuuuggaccc

SEQ ID NO: 1870586 - RNA, 19 nt, Artificial Sequence
  Description of Artificial Sequence: Synthetic oligonucleotide
ugauuuggaaggcauccug

SEQ ID NO: 1870587 - RNA, 19 nt, Artificial Sequence
  Description of Artificial Sequence: Synthetic oligonucleotide
aagugaagugaggugguac

SEQ ID NO: 1870588 - RNA, 19 nt, Artificial Sequence
  Description of Artificial Sequence: Synthetic oligonucleotide
uuuguaugggugcauugcu

SEQ ID NO: 1870589 - RNA, 19 nt, Artificial Sequence
  Description of Artificial Sequence: Synthetic oligonucleotide
aaacccuggggccacaggu

SEQ ID NO: 1870590 - RNA, 19 nt, Artificial Sequence
  Description of Artificial Sequence: Synthetic oligonucleotide
uuuuguaugggugcauugc

SEQ ID NO: 1870591 - RNA, 19 nt, Artificial Sequence
  Description of Artificial Sequence: Synthetic oligonucleotide
aagcuaggcaaucauccca

SEQ ID NO: 1870592 - RNA, 19 nt, Artificial Sequence
  Description of Artificial Sequence: Synthetic oligonucleotide
cuaaggacuugcugaaggg

SEQ ID NO: 1870593 - RNA, 19 nt, Artificial Sequence
  Description of Artificial Sequence: Synthetic oligonucleotide
guacugguaaaagagcagg

SEQ ID NO: 1870594 - RNA, 19 nt, Artificial Sequence
  Description of Artificial Sequence: Synthetic oligonucleotide
uugccugauggguauaugc

SEQ ID NO: 1870595 - RNA, 19 nt, Artificial Sequence
  Description of Artificial Sequence: Synthetic oligonucleotide
accuuagccuuucuggccg

SEQ ID NO: 1870596 - RNA, 19 nt, Artificial Sequence
  Description of Artificial Sequence: Synthetic oligonucleotide
uaugggugcauugcuaucc

SEQ ID NO: 1870597 - RNA, 19 nt, Artificial Sequence
  Description of Artificial Sequence: Synthetic oligonucleotide
gaguccuagucccagggag

SEQ ID NO: 1870598 - RNA, 19 nt, Artificial Sequence
  Description of Artificial Sequence: Synthetic oligonucleotide
ucagacuaagggcuggcca

SEQ ID NO: 1870599 - RNA, 19 nt, Artificial Sequence
  Description of Artificial Sequence: Synthetic oligonucleotide
cuagcguuaagaaggccgc

SEQ ID NO: 1870600 - RNA, 19 nt, Artificial Sequence
  Description of Artificial Sequence: Synthetic oligonucleotide
ccuggaucgacucauauag

SEQ ID NO: 1870601 - RNA, 19 nt, Artificial Sequence
  Description of Artificial Sequence: Synthetic oligonucleotide
uggaguccuagucccaggg

SEQ ID NO: 1870602 - RNA, 19 nt, Artificial Sequence
  Description of Artificial Sequence: Synthetic oligonucleotide
uacugguaaaagagcaggc

SEQ ID NO: 1870603 - RNA, 19 nt, Artificial Sequence
  Description of Artificial Sequence: Synthetic oligonucleotide
ugccugauggguauaugcc

SEQ ID NO: 1870604 - RNA, 19 nt, Artificial Sequence
  Description of Artificial Sequence: Synthetic oligonucleotide
cugguaaaagagcaggcac

SEQ ID NO: 1870605 - RNA, 19 nt, Artificial Sequence
  Description of Artificial Sequence: Synthetic oligonucleotide
agugaggugguacugguaa

SEQ ID NO: 1870606 - RNA, 19 nt, Artificial Sequence
  Description of Artificial Sequence: Synthetic oligonucleotide
uccagcauagagaccuuag

SEQ ID NO: 1870607 - RNA, 19 nt, Artificial Sequence
  Description of Artificial Sequence: Synthetic oligonucleotide
gugcaagacgcuuuggacc

SEQ ID NO: 1870608 - RNA, 19 nt, Artificial Sequence
  Description of Artificial Sequence: Synthetic oligonucleotide
gaagcuaggcaaucauccc

SEQ ID NO: 1870609 - RNA, 19 nt, Artificial Sequence
  Description of Artificial Sequence: Synthetic oligonucleotide
agugaagugaggugguacu

SEQ ID NO: 1870610 - RNA, 19 nt, Artificial Sequence
  Description of Artificial Sequence: Synthetic oligonucleotide
uguaugggugcauugcuau

SEQ ID NO: 1870611 - RNA, 19 nt, Artificial Sequence
  Description of Artificial Sequence: Synthetic oligonucleotide
uggguauaugccuugcccu

SEQ ID NO: 1870612 - RNA, 19 nt, Artificial Sequence
  Description of Artificial Sequence: Synthetic oligonucleotide
gagccuuuuguaugggugc

SEQ ID NO: 1870613 - RNA, 19 nt, Artificial Sequence
  Description of Artificial Sequence: Synthetic oligonucleotide
caacgggagugcaagacgc

SEQ ID NO: 1870614 - RNA, 19 nt, Artificial Sequence
  Description of Artificial Sequence: Synthetic oligonucleotide
aggcucgucaucaucagac

SEQ ID NO: 1870615 - RNA, 19 nt, Artificial Sequence
  Description of Artificial Sequence: Synthetic oligonucleotide
cacgcugcggcccacaggc

SEQ ID NO: 1870616 - RNA, 19 nt, Artificial Sequence
  Description of Artificial Sequence: Synthetic oligonucleotide
acacaagagggagaagugg

SEQ ID NO: 1870617 - RNA, 19 nt, Artificial Sequence
  Description of Artificial Sequence: Synthetic oligonucleotide
aggaacuggucccuaaacu

SEQ ID NO: 1870618 - RNA, 19 nt, Artificial Sequence
  Description of Artificial Sequence: Synthetic oligonucleotide
ucccagagaugccaacggg

SEQ ID NO: 1870619 - RNA, 19 nt, Artificial Sequence
  Description of Artificial Sequence: Synthetic oligonucleotide
guauuuauuuucucaucca

SEQ ID NO: 1870620 - RNA, 19 nt, Artificial Sequence
  Description of Artificial Sequence: Synthetic oligonucleotide
ggaagcuaggcaaucaucc

SEQ ID NO: 1870621 - RNA, 19 nt, Artificial Sequence
  Description of Artificial Sequence: Synthetic oligonucleotide
uggucccuaaacuuaaaua

SEQ ID NO: 1870622 - RNA, 19 nt, Artificial Sequence
  Description of Artificial Sequence: Synthetic oligonucleotide
uccugaagugaagugaggu

SEQ ID NO: 1870623 - RNA, 19 nt, Artificial Sequence
  Description of Artificial Sequence: Synthetic oligonucleotide
ggcacugucgacuaaggac

SEQ ID NO: 1870624 - RNA, 19 nt, Artificial Sequence
  Description of Artificial Sequence: Synthetic oligonucleotide
cuaggggugcacacaagag

SEQ ID NO: 1870625 - RNA, 19 nt, Artificial Sequence
  Description of Artificial Sequence: Synthetic oligonucleotide
cuggcuauagacgcgcucc

SEQ ID NO: 1870626 - RNA, 19 nt, Artificial Sequence
  Description of Artificial Sequence: Synthetic oligonucleotide
gauggguauaugccuugcc

SEQ ID NO: 1870627 - RNA, 19 nt, Artificial Sequence
  Description of Artificial Sequence: Synthetic oligonucleotide
cucauauaggccccacagc

SEQ ID NO: 1870628 - RNA, 19 nt, Artificial Sequence
  Description of Artificial Sequence: Synthetic oligonucleotide
agggguggauccuggaguc

SEQ ID NO: 1870629 - RNA, 19 nt, Artificial Sequence
  Description of Artificial Sequence: Synthetic oligonucleotide
gaccuuagccuuucuggcc

SEQ ID NO: 1870630 - RNA, 19 nt, Artificial Sequence
  Description of Artificial Sequence: Synthetic oligonucleotide
cacagcaucuccuugcgca

SEQ ID NO: 1870631 - RNA, 19 nt, Artificial Sequence
  Description of Artificial Sequence: Synthetic oligonucleotide
ggcauugugugucuggggc

SEQ ID NO: 1870632 - RNA, 19 nt, Artificial Sequence
  Description of Artificial Sequence: Synthetic oligonucleotide
aagcuaggggugcacacaa

SEQ ID NO: 1870633 - RNA, 19 nt, Artificial Sequence
  Description of Artificial Sequence: Synthetic oligonucleotide
acaggccggcaucaggugg

SEQ ID NO: 1870634 - RNA, 19 nt, Artificial Sequence
  Description of Artificial Sequence: Synthetic oligonucleotide
gagcuguccgagugaaggg

SEQ ID NO: 1870635 - RNA, 19 nt, Artificial Sequence
  Description of Artificial Sequence: Synthetic oligonucleotide
gcggaguccagguuaaccg

SEQ ID NO: 1870636 - RNA, 19 nt, Artificial Sequence
  Description of Artificial Sequence: Synthetic oligonucleotide
uggaagcuaggcaaucauc

SEQ ID NO: 1870637 - RNA, 19 nt, Artificial Sequence
  Description of Artificial Sequence: Synthetic oligonucleotide
agguuaaccgggcggcgcg

SEQ ID NO: 1870638 - RNA, 19 nt, Artificial Sequence
  Description of Artificial Sequence: Synthetic oligonucleotide
uguuucacucacgcugcgg

SEQ ID NO: 1870639 - RNA, 19 nt, Artificial Sequence
  Description of Artificial Sequence: Synthetic oligonucleotide
aggugguacugguaaaaga

SEQ ID NO: 1870640 - RNA, 19 nt, Artificial Sequence
  Description of Artificial Sequence: Synthetic oligonucleotide
gucccagagaugccaacgg

SEQ ID NO: 1870641 - RNA, 19 nt, Artificial Sequence
  Description of Artificial Sequence: Synthetic oligonucleotide
uccgagugaagggaggaug

SEQ ID NO: 1870642 - RNA, 19 nt, Artificial Sequence
  Description of Artificial Sequence: Synthetic oligonucleotide
aucgacucauauaggcccc

SEQ ID NO: 1870643 - RNA, 19 nt, Artificial Sequence
  Description of Artificial Sequence: Synthetic oligonucleotide
cccacggucagacuaaggg

SEQ ID NO: 1870644 - RNA, 19 nt, Artificial Sequence
  Description of Artificial Sequence: Synthetic oligonucleotide
auagagaccuuagccuuuc

SEQ ID NO: 1870645 - RNA, 19 nt, Artificial Sequence
  Description of Artificial Sequence: Synthetic oligonucleotide
uagugcggaguccagguua

SEQ ID NO: 1870646 - RNA, 19 nt, Artificial Sequence
  Description of Artificial Sequence: Synthetic oligonucleotide
ucaggucuuggcacagaug

SEQ ID NO: 1870647 - RNA, 19 nt, Artificial Sequence
  Description of Artificial Sequence: Synthetic oligonucleotide
agagggagaagugggaagu

SEQ ID NO: 1870648 - RNA, 19 nt, Artificial Sequence
  Description of Artificial Sequence: Synthetic oligonucleotide
agagcaggcacugucgacu

SEQ ID NO: 1870649 - RNA, 19 nt, Artificial Sequence
  Description of Artificial Sequence: Synthetic oligonucleotide
cugucgacuaaggacuugc

SEQ ID NO: 1870650 - RNA, 19 nt, Artificial Sequence
  Description of Artificial Sequence: Synthetic oligonucleotide
uaugccuugcccuccugaa

SEQ ID NO: 1870651 - RNA, 19 nt, Artificial Sequence
  Description of Artificial Sequence: Synthetic oligonucleotide
gguaggagcuguccgagug

SEQ ID NO: 1870652 - RNA, 19 nt, Artificial Sequence
  Description of Artificial Sequence: Synthetic oligonucleotide
gaggugguacugguaaaag

SEQ ID NO: 1870653 - RNA, 19 nt, Artificial Sequence
  Description of Artificial Sequence: Synthetic oligonucleotide
cuggaucgacucauauagg

SEQ ID NO: 1870654 - RNA, 19 nt, Artificial Sequence
  Description of Artificial Sequence: Synthetic oligonucleotide
gggagggaaacccuggggc

SEQ ID NO: 1870655 - RNA, 19 nt, Artificial Sequence
  Description of Artificial Sequence: Synthetic oligonucleotide
uuguaugggugcauugcua

SEQ ID NO: 1870656 - RNA, 19 nt, Artificial Sequence
  Description of Artificial Sequence: Synthetic oligonucleotide
uuagccuuucuggccgugg

SEQ ID NO: 1870657 - RNA, 19 nt, Artificial Sequence
  Description of Artificial Sequence: Synthetic oligonucleotide
caucuccuugcgcagcgcg

SEQ ID NO: 1870658 - RNA, 19 nt, Artificial Sequence
  Description of Artificial Sequence: Synthetic oligonucleotide
uugaccacuuugccugaug

SEQ ID NO: 1870659 - RNA, 19 nt, Artificial Sequence
  Description of Artificial Sequence: Synthetic oligonucleotide
aacacgggcggcacggcuc

SEQ ID NO: 1870660 - RNA, 19 nt, Artificial Sequence
  Description of Artificial Sequence: Synthetic oligonucleotide
ugcggaguccagguuaacc

SEQ ID NO: 1870661 - RNA, 19 nt, Artificial Sequence
  Description of Artificial Sequence: Synthetic oligonucleotide
gcugauuuggaaggcaucc

SEQ ID NO: 1870662 - RNA, 19 nt, Artificial Sequence
  Description of Artificial Sequence: Synthetic oligonucleotide
agucccagggagggaaacc

SEQ ID NO: 1870663 - RNA, 19 nt, Artificial Sequence
  Description of Artificial Sequence: Synthetic oligonucleotide
uucauggcccggccgacac

SEQ ID NO: 1870664 - RNA, 19 nt, Artificial Sequence
  Description of Artificial Sequence: Synthetic oligonucleotide
agcuaggcaaucaucccag

SEQ ID NO: 1870665 - RNA, 19 nt, Artificial Sequence
  Description of Artificial Sequence: Synthetic oligonucleotide
uauagacgcgcuccagcuc

SEQ ID NO: 1870666 - RNA, 19 nt, Artificial Sequence
  Description of Artificial Sequence: Synthetic oligonucleotide
auaugccuugcccuccuga

SEQ ID NO: 1870667 - RNA, 19 nt, Artificial Sequence
  Description of Artificial Sequence: Synthetic oligonucleotide
acgggcauugugugucugg

SEQ ID NO: 1870668 - RNA, 19 nt, Artificial Sequence
  Description of Artificial Sequence: Synthetic oligonucleotide
ugaggugguacugguaaaa

SEQ ID NO: 1870669 - RNA, 19 nt, Artificial Sequence
  Description of Artificial Sequence: Synthetic oligonucleotide
auggaagcuaggcaaucau

SEQ ID NO: 1870670 - RNA, 19 nt, Artificial Sequence
  Description of Artificial Sequence: Synthetic oligonucleotide
agacgcuuuggaccccacg

SEQ ID NO: 1870671 - RNA, 19 nt, Artificial Sequence
  Description of Artificial Sequence: Synthetic oligonucleotide
uugcuauccaccucagcuu

SEQ ID NO: 1870672 - RNA, 19 nt, Artificial Sequence
  Description of Artificial Sequence: Synthetic oligonucleotide
uggaccccugcaauguuuc

SEQ ID NO: 1870673 - RNA, 19 nt, Artificial Sequence
  Description of Artificial Sequence: Synthetic oligonucleotide
acuaagggcuggccaagcu

SEQ ID NO: 1870674 - RNA, 19 nt, Artificial Sequence
  Description of Artificial Sequence: Synthetic oligonucleotide
aguccuagucccagggagg

SEQ ID NO: 1870675 - RNA, 19 nt, Artificial Sequence
  Description of Artificial Sequence: Synthetic oligonucleotide
caggccggcaucagguggg

SEQ ID NO: 1870676 - RNA, 19 nt, Artificial Sequence
  Description of Artificial Sequence: Synthetic oligonucleotide
guggcagcaaaagacaaaa

SEQ ID NO: 1870677 - RNA, 19 nt, Artificial Sequence
  Description of Artificial Sequence: Synthetic oligonucleotide
uggguaggagcuguccgag

SEQ ID NO: 1870678 - RNA, 19 nt, Artificial Sequence
  Description of Artificial Sequence: Synthetic oligonucleotide
caggcacugucgacuaagg

SEQ ID NO: 1870679 - RNA, 19 nt, Artificial Sequence
  Description of Artificial Sequence: Synthetic oligonucleotide
ugauggguauaugccuugc

SEQ ID NO: 1870680 - RNA, 19 nt, Artificial Sequence
  Description of Artificial Sequence: Synthetic oligonucleotide
ugucgacuaaggacuugcu

SEQ ID NO: 1870681 - RNA, 19 nt, Artificial Sequence
  Description of Artificial Sequence: Synthetic oligonucleotide
aacuggucccuaaacuuaa

SEQ ID NO: 1870682 - RNA, 19 nt, Artificial Sequence
  Description of Artificial Sequence: Synthetic oligonucleotide
uccuggaucgacucauaua

SEQ ID NO: 1870683 - RNA, 19 nt, Artificial Sequence
  Description of Artificial Sequence: Synthetic oligonucleotide
uguccgagugaagggagga

SEQ ID NO: 1870684 - RNA, 19 nt, Artificial Sequence
  Description of Artificial Sequence: Synthetic oligonucleotide
acacggacugugaugccac

SEQ ID NO: 1870685 - RNA, 19 nt, Artificial Sequence
  Description of Artificial Sequence: Synthetic oligonucleotide
gcuauagacgcgcuccagc

SEQ ID NO: 1870686 - RNA, 19 nt, Artificial Sequence
  Description of Artificial Sequence: Synthetic oligonucleotide
cuguccgagugaagggagg

SEQ ID NO: 1870687 - RNA, 19 nt, Artificial Sequence
  Description of Artificial Sequence: Synthetic oligonucleotide
cugcaauguuucacucacg

SEQ ID NO: 1870688 - RNA, 19 nt, Artificial Sequence
  Description of Artificial Sequence: Synthetic oligonucleotide
cauugugugucuggggcac

SEQ ID NO: 1870689 - RNA, 19 nt, Artificial Sequence
  Description of Artificial Sequence: Synthetic oligonucleotide
agcguuaagaaggccgcug

SEQ ID NO: 1870690 - RNA, 19 nt, Artificial Sequence
  Description of Artificial Sequence: Synthetic oligonucleotide
gaccguccggaacacgggc

SEQ ID NO: 1870691 - RNA, 19 nt, Artificial Sequence
  Description of Artificial Sequence: Synthetic oligonucleotide
uccugcaaccacuggucac

SEQ ID NO: 1870692 - RNA, 19 nt, Artificial Sequence
  Description of Artificial Sequence: Synthetic oligonucleotide
gguacugguaaaagagcag

SEQ ID NO: 1870693 - RNA, 19 nt, Artificial Sequence
  Description of Artificial Sequence: Synthetic oligonucleotide
agcucgucguggaugcggc

SEQ ID NO: 1870694 - RNA, 19 nt, Artificial Sequence
  Description of Artificial Sequence: Synthetic oligonucleotide
uggcuauagacgcgcucca

SEQ ID NO: 1870695 - RNA, 19 nt, Artificial Sequence
  Description of Artificial Sequence: Synthetic oligonucleotide
uuggaccccacggucagac

SEQ ID NO: 1870696 - RNA, 19 nt, Artificial Sequence
  Description of Artificial Sequence: Synthetic oligonucleotide
ggagggaaacccuggggcc

SEQ ID NO: 1870697 - RNA, 19 nt, Artificial Sequence
  Description of Artificial Sequence: Synthetic oligonucleotide
uuugccugauggguauaug

SEQ ID NO: 1870698 - RNA, 19 nt, Artificial Sequence
  Description of Artificial Sequence: Synthetic oligonucleotide
ggaucgacucauauaggcc

SEQ ID NO: 1870699 - RNA, 19 nt, Artificial Sequence
  Description of Artificial Sequence: Synthetic oligonucleotide
agcgccgguggcgugacgg

SEQ ID NO: 1870700 - RNA, 19 nt, Artificial Sequence
  Description of Artificial Sequence: Synthetic oligonucleotide
gaggccgcgcgguagcggc

SEQ ID NO: 1870701 - RNA, 19 nt, Artificial Sequence
  Description of Artificial Sequence: Synthetic oligonucleotide
gacuaaggacuugcugaag

SEQ ID NO: 1870702 - RNA, 19 nt, Artificial Sequence
  Description of Artificial Sequence: Synthetic oligonucleotide
gguggcgugacggggaccg

SEQ ID NO: 1870703 - RNA, 19 nt, Artificial Sequence
  Description of Artificial Sequence: Synthetic oligonucleotide
ugcagagccugaguuggca

SEQ ID NO: 1870704 - RNA, 19 nt, Artificial Sequence
  Description of Artificial Sequence: Synthetic oligonucleotide
gacucauauaggccccaca

SEQ ID NO: 1870705 - RNA, 19 nt, Artificial Sequence
  Description of Artificial Sequence: Synthetic oligonucleotide
cuggaguccuagucccagg

SEQ ID NO: 1870706 - RNA, 19 nt, Artificial Sequence
  Description of Artificial Sequence: Synthetic oligonucleotide
ugcaaccacuggucacggg

SEQ ID NO: 1870707 - RNA, 19 nt, Artificial Sequence
  Description of Artificial Sequence: Synthetic oligonucleotide
gucacgggcauuguguguc

SEQ ID NO: 1870708 - RNA, 19 nt, Artificial Sequence
  Description of Artificial Sequence: Synthetic oligonucleotide
auccugcaaccacugguca

SEQ ID NO: 1870709 - RNA, 19 nt, Artificial Sequence
  Description of Artificial Sequence: Synthetic oligonucleotide
caucagacaggccggcauc

SEQ ID NO: 1870710 - RNA, 19 nt, Artificial Sequence
  Description of Artificial Sequence: Synthetic oligonucleotide
uagggaugccccugagcca

SEQ ID NO: 1870711 - RNA, 19 nt, Artificial Sequence
  Description of Artificial Sequence: Synthetic oligonucleotide
gggaccguccggaacacgg

SEQ ID NO: 1870712 - RNA, 19 nt, Artificial Sequence
  Description of Artificial Sequence: Synthetic oligonucleotide
cuauagacgcgcuccagcu

SEQ ID NO: 1870713 - RNA, 19 nt, Artificial Sequence
  Description of Artificial Sequence: Synthetic oligonucleotide
cuccgcugagggcagcccg

SEQ ID NO: 1870714 - RNA, 19 nt, Artificial Sequence
  Description of Artificial Sequence: Synthetic oligonucleotide
gaccccugcaauguuucac

SEQ ID NO: 1870715 - RNA, 19 nt, Artificial Sequence
  Description of Artificial Sequence: Synthetic oligonucleotide
ccaacgggagugcaagacg

SEQ ID NO: 1870716 - RNA, 19 nt, Artificial Sequence
  Description of Artificial Sequence: Synthetic oligonucleotide
ccacggucagacuaagggc

SEQ ID NO: 1870717 - RNA, 19 nt, Artificial Sequence
  Description of Artificial Sequence: Synthetic oligonucleotide
ucacucacgcugcggccca

SEQ ID NO: 1870718 - RNA, 19 nt, Artificial Sequence
  Description of Artificial Sequence: Synthetic oligonucleotide
aggcacugucgacuaagga

SEQ ID NO: 1870719 - RNA, 19 nt, Artificial Sequence
  Description of Artificial Sequence: Synthetic oligonucleotide
acgcuuuggaccccacggu

SEQ ID NO: 1870720 - RNA, 19 nt, Artificial Sequence
  Description of Artificial Sequence: Synthetic oligonucleotide
ugcccuccugaagugaagu

SEQ ID NO: 1870721 - RNA, 19 nt, Artificial Sequence
  Description of Artificial Sequence: Synthetic oligonucleotide
agcccguucauggcccggc

SEQ ID NO: 1870722 - RNA, 19 nt, Artificial Sequence
  Description of Artificial Sequence: Synthetic oligonucleotide
cuuaaauauccagcauaga

SEQ ID NO: 1870723 - RNA, 19 nt, Artificial Sequence
  Description of Artificial Sequence: Synthetic oligonucleotide
ccgacacggacugugaugc

SEQ ID NO: 1870724 - RNA, 19 nt, Artificial Sequence
  Description of Artificial Sequence: Synthetic oligonucleotide
gcugcgcuggcuauagacg

SEQ ID NO: 1870725 - RNA, 19 nt, Artificial Sequence
  Description of Artificial Sequence: Synthetic oligonucleotide
uuaaccgggcggcgcgcgc

SEQ ID NO: 1870726 - RNA, 19 nt, Artificial Sequence
  Description of Artificial Sequence: Synthetic oligonucleotide
gcuaggggugcacacaaga

SEQ ID NO: 1870727 - RNA, 19 nt, Artificial Sequence
  Description of Artificial Sequence: Synthetic oligonucleotide
ccugcaaccacuggucacg

SEQ ID NO: 1870728 - RNA, 19 nt, Artificial Sequence
  Description of Artificial Sequence: Synthetic oligonucleotide
gggugcauugcuauccacc

SEQ ID NO: 1870729 - RNA, 19 nt, Artificial Sequence
  Description of Artificial Sequence: Synthetic oligonucleotide
agggaaacccuggggccac

SEQ ID NO: 1870730 - RNA, 19 nt, Artificial Sequence
  Description of Artificial Sequence: Synthetic oligonucleotide
agguccuggcacaagcuca

SEQ ID NO: 1870731 - RNA, 19 nt, Artificial Sequence
  Description of Artificial Sequence: Synthetic oligonucleotide
gguagggaugccccugagc

SEQ ID NO: 1870732 - RNA, 19 nt, Artificial Sequence
  Description of Artificial Sequence: Synthetic oligonucleotide
guaugggugcauugcuauc

SEQ ID NO: 1870733 - RNA, 19 nt, Artificial Sequence
  Description of Artificial Sequence: Synthetic oligonucleotide
gacuaagggcuggccaagc

SEQ ID NO: 1870734 - RNA, 19 nt, Artificial Sequence
  Description of Artificial Sequence: Synthetic oligonucleotide
cagguccuggcacaagcuc

SEQ ID NO: 1870735 - RNA, 19 nt, Artificial Sequence
  Description of Artificial Sequence: Synthetic oligonucleotide
guaggagcuguccgaguga

SEQ ID NO: 1870736 - RNA, 19 nt, Artificial Sequence
  Description of Artificial Sequence: Synthetic oligonucleotide
caucaucagacaggccggc

SEQ ID NO: 1870737 - RNA, 19 nt, Artificial Sequence
  Description of Artificial Sequence: Synthetic oligonucleotide
gguauaugccuugcccucc

SEQ ID NO: 1870738 - RNA, 19 nt, Artificial Sequence
  Description of Artificial Sequence: Synthetic oligonucleotide
aucuccuugcgcagcgcgg

SEQ ID NO: 1870739 - RNA, 19 nt, Artificial Sequence
  Description of Artificial Sequence: Synthetic oligonucleotide
ugggugcauugcuauccac

SEQ ID NO: 1870740 - RNA, 19 nt, Artificial Sequence
  Description of Artificial Sequence: Synthetic oligonucleotide
cucgucguggaugcggcug

SEQ ID NO: 1870741 - RNA, 19 nt, Artificial Sequence
  Description of Artificial Sequence: Synthetic oligonucleotide
acggcucagcucgucgugg

SEQ ID NO: 1870742 - RNA, 19 nt, Artificial Sequence
  Description of Artificial Sequence: Synthetic oligonucleotide
gagggaaacccuggggcca

SEQ ID NO: 1870743 - RNA, 19 nt, Artificial Sequence
  Description of Artificial Sequence: Synthetic oligonucleotide
cuccggagggagcccagcc

SEQ ID NO: 1870744 - RNA, 19 nt, Artificial Sequence
  Description of Artificial Sequence: Synthetic oligonucleotide
guuaaccgggcggcgcgcg

SEQ ID NO: 1870745 - RNA, 19 nt, Artificial Sequence
  Description of Artificial Sequence: Synthetic oligonucleotide
gcaggccgcgcuuuguucc

SEQ ID NO: 1870746 - RNA, 19 nt, Artificial Sequence
  Description of Artificial Sequence: Synthetic oligonucleotide
cagguuaaccgggcggcgc

SEQ ID NO: 1870747 - RNA, 19 nt, Artificial Sequence
  Description of Artificial Sequence: Synthetic oligonucleotide
uggauccuggaguccuagu

SEQ ID NO: 1870748 - RNA, 19 nt, Artificial Sequence
  Description of Artificial Sequence: Synthetic oligonucleotide
gagaugccaacgggagugc

SEQ ID NO: 1870749 - RNA, 19 nt, Artificial Sequence
  Description of Artificial Sequence: Synthetic oligonucleotide
ccacagguagggaugcccc

SEQ ID NO: 1870750 - RNA, 19 nt, Artificial Sequence
  Description of Artificial Sequence: Synthetic oligonucleotide
aacgggagugcaagacgcu

SEQ ID NO: 1870751 - RNA, 19 nt, Artificial Sequence
  Description of Artificial Sequence: Synthetic oligonucleotide
aagacgcuuuggaccccac

SEQ ID NO: 1870752 - RNA, 19 nt, Artificial Sequence
  Description of Artificial Sequence: Synthetic oligonucleotide
cacagaugcuuguaguccu

SEQ ID NO: 1870753 - RNA, 19 nt, Artificial Sequence
  Description of Artificial Sequence: Synthetic oligonucleotide
gaggcucgucaucaucaga

SEQ ID NO: 1870754 - RNA, 19 nt, Artificial Sequence
  Description of Artificial Sequence: Synthetic oligonucleotide
gcuggcgucaggaggcucg

SEQ ID NO: 1870755 - RNA, 19 nt, Artificial Sequence
  Description of Artificial Sequence: Synthetic oligonucleotide
uagagaccuuagccuuucu

SEQ ID NO: 1870756 - RNA, 19 nt, Artificial Sequence
  Description of Artificial Sequence: Synthetic oligonucleotide
cuaagggcuggccaagcua

SEQ ID NO: 1870757 - RNA, 19 nt, Artificial Sequence
  Description of Artificial Sequence: Synthetic oligonucleotide
agguagggaugccccugag

SEQ ID NO: 1870758 - RNA, 19 nt, Artificial Sequence
  Description of Artificial Sequence: Synthetic oligonucleotide
ugaggccgcgcgguagcgg

SEQ ID NO: 1870759 - RNA, 19 nt, Artificial Sequence
  Description of Artificial Sequence: Synthetic oligonucleotide
uagacgcgcuccagcuccc

SEQ ID NO: 1870760 - RNA, 19 nt, Artificial Sequence
  Description of Artificial Sequence: Synthetic oligonucleotide
ucgacucauauaggcccca

SEQ ID NO: 1870761 - RNA, 19 nt, Artificial Sequence
  Description of Artificial Sequence: Synthetic oligonucleotide
ucacgggcauugugugucu

SEQ ID NO: 1870762 - RNA, 19 nt, Artificial Sequence
  Description of Artificial Sequence: Synthetic oligonucleotide
uugcgcagcgcggcuagug

SEQ ID NO: 1870763 - RNA, 19 nt, Artificial Sequence
  Description of Artificial Sequence: Synthetic oligonucleotide
gcaggcacugucgacuaag

SEQ ID NO: 1870764 - RNA, 19 nt, Artificial Sequence
  Description of Artificial Sequence: Synthetic oligonucleotide
gaugccaacgggagugcaa

SEQ ID NO: 1870765 - RNA, 19 nt, Artificial Sequence
  Description of Artificial Sequence: Synthetic oligonucleotide
ccacuagcguuaagaaggc

SEQ ID NO: 1870766 - RNA, 19 nt, Artificial Sequence
  Description of Artificial Sequence: Synthetic oligonucleotide
ugacagguccuggcacaag

SEQ ID NO: 1870767 - RNA, 19 nt, Artificial Sequence
  Description of Artificial Sequence: Synthetic oligonucleotide
ugccaacgggagugcaaga

SEQ ID NO: 1870768 - RNA, 19 nt, Artificial Sequence
  Description of Artificial Sequence: Synthetic oligonucleotide
acacgggcggcacggcuca

SEQ ID NO: 1870769 - RNA, 19 nt, Artificial Sequence
  Description of Artificial Sequence: Synthetic oligonucleotide
acugucgacuaaggacuug

SEQ ID NO: 1870770 - RNA, 19 nt, Artificial Sequence
  Description of Artificial Sequence: Synthetic oligonucleotide
ccccacuagcguuaagaag

SEQ ID NO: 1870771 - RNA, 19 nt, Artificial Sequence
  Description of Artificial Sequence: Synthetic oligonucleotide
cacggacugugaugccacc

SEQ ID NO: 1870772 - RNA, 19 nt, Artificial Sequence
  Description of Artificial Sequence: Synthetic oligonucleotide
uagcguuaagaaggccgcu

SEQ ID NO: 1870773 - RNA, 19 nt, Artificial Sequence
  Description of Artificial Sequence: Synthetic oligonucleotide
caagcuaggggugcacaca

SEQ ID NO: 1870774 - RNA, 19 nt, Artificial Sequence
  Description of Artificial Sequence: Synthetic oligonucleotide
cacuagcguuaagaaggcc

SEQ ID NO: 1870775 - RNA, 19 nt, Artificial Sequence
  Description of Artificial Sequence: Synthetic oligonucleotide
gccgacacggacugugaug

SEQ ID NO: 1870776 - RNA, 19 nt, Artificial Sequence
  Description of Artificial Sequence: Synthetic oligonucleotide
acggacugugaugccaccu

SEQ ID NO: 1870777 - RNA, 19 nt, Artificial Sequence
  Description of Artificial Sequence: Synthetic oligonucleotide
uggcccggccgacacggac

SEQ ID NO: 1870778 - RNA, 19 nt, Artificial Sequence
  Description of Artificial Sequence: Synthetic oligonucleotide
gaaguccaguccacuggca

SEQ ID NO: 1870779 - RNA, 19 nt, Artificial Sequence
  Description of Artificial Sequence: Synthetic oligonucleotide
uaaccgggcggcgcgcgcc

SEQ ID NO: 1870780 - RNA, 19 nt, Artificial Sequence
  Description of Artificial Sequence: Synthetic oligonucleotide
aggcugauuuggaaggcau

SEQ ID NO: 1870781 - RNA, 19 nt, Artificial Sequence
  Description of Artificial Sequence: Synthetic oligonucleotide
gcacugucgacuaaggacu

SEQ ID NO: 1870782 - RNA, 19 nt, Artificial Sequence
  Description of Artificial Sequence: Synthetic oligonucleotide
cacggcucagcucgucgug

SEQ ID NO: 1870783 - RNA, 19 nt, Artificial Sequence
  Description of Artificial Sequence: Synthetic oligonucleotide
gguccuggcacaagcucag

SEQ ID NO: 1870784 - RNA, 19 nt, Artificial Sequence
  Description of Artificial Sequence: Synthetic oligonucleotide
ccaagcuaggggugcacac

SEQ ID NO: 1870785 - RNA, 19 nt, Artificial Sequence
  Description of Artificial Sequence: Synthetic oligonucleotide
aucaucagacaggccggca

SEQ ID NO: 1870786 - RNA, 19 nt, Artificial Sequence
  Description of Artificial Sequence: Synthetic oligonucleotide
ccggccagagcgcagcccg

SEQ ID NO: 1870787 - RNA, 19 nt, Artificial Sequence
  Description of Artificial Sequence: Synthetic oligonucleotide
gugcauugcuauccaccuc

SEQ ID NO: 1870788 - RNA, 19 nt, Artificial Sequence
  Description of Artificial Sequence: Synthetic oligonucleotide
cggaguccagguuaaccgg

SEQ ID NO: 1870789 - RNA, 19 nt, Artificial Sequence
  Description of Artificial Sequence: Synthetic oligonucleotide
agugcggaguccagguuaa

SEQ ID NO: 1870790 - RNA, 19 nt, Artificial Sequence
  Description of Artificial Sequence: Synthetic oligonucleotide
gagaagugggaaguccagu

SEQ ID NO: 1870791 - RNA, 19 nt, Artificial Sequence
  Description of Artificial Sequence: Synthetic oligonucleotide
aagugaggugguacuggua

SEQ ID NO: 1870792 - RNA, 19 nt, Artificial Sequence
  Description of Artificial Sequence: Synthetic oligonucleotide
gcuguccgagugaagggag

SEQ ID NO: 1870793 - RNA, 19 nt, Artificial Sequence
  Description of Artificial Sequence: Synthetic oligonucleotide
gcauugugugucuggggca

SEQ ID NO: 1870794 - RNA, 19 nt, Artificial Sequence
  Description of Artificial Sequence: Synthetic oligonucleotide
gagcaggcacugucgacua

SEQ ID NO: 1870795 - RNA, 19 nt, Artificial Sequence
  Description of Artificial Sequence: Synthetic oligonucleotide
cccuaaacuuaaauaucca

SEQ ID NO: 1870796 - RNA, 19 nt, Artificial Sequence
  Description of Artificial Sequence: Synthetic oligonucleotide
gaagugaagugagguggua

SEQ ID NO: 1870797 - RNA, 19 nt, Artificial Sequence
  Description of Artificial Sequence: Synthetic oligonucleotide
agcgcggcuagugcggagu

SEQ ID NO: 1870798 - RNA, 19 nt, Artificial Sequence
  Description of Artificial Sequence: Synthetic oligonucleotide
gugaggugguacugguaaa

SEQ ID NO: 1870799 - RNA, 19 nt, Artificial Sequence
  Description of Artificial Sequence: Synthetic oligonucleotide
ggagugcaagacgcuuugg

SEQ ID NO: 1870800 - RNA, 19 nt, Artificial Sequence
  Description of Artificial Sequence: Synthetic oligonucleotide
uuuggaccccacggucaga

SEQ ID NO: 1870801 - RNA, 19 nt, Artificial Sequence
  Description of Artificial Sequence: Synthetic oligonucleotide
aaccgggcggcgcgcgccu

SEQ ID NO: 1870802 - RNA, 19 nt, Artificial Sequence
  Description of Artificial Sequence: Synthetic oligonucleotide
guauaugccuugcccuccu

SEQ ID NO: 1870803 - RNA, 19 nt, Artificial Sequence
  Description of Artificial Sequence: Synthetic oligonucleotide
ggcgccuccgcugagggca

SEQ ID NO: 1870804 - RNA, 19 nt, Artificial Sequence
  Description of Artificial Sequence: Synthetic oligonucleotide
cauauaggccccacagcau

SEQ ID NO: 1870805 - RNA, 19 nt, Artificial Sequence
  Description of Artificial Sequence: Synthetic oligonucleotide
ggaccccacggucagacua

SEQ ID NO: 1870806 - RNA, 19 nt, Artificial Sequence
  Description of Artificial Sequence: Synthetic oligonucleotide
gccaacgggagugcaagac

SEQ ID NO: 1870807 - RNA, 19 nt, Artificial Sequence
  Description of Artificial Sequence: Synthetic oligonucleotide
ggacuugcugaagggcaag

SEQ ID NO: 1870808 - RNA, 19 nt, Artificial Sequence
  Description of Artificial Sequence: Synthetic oligonucleotide
auugugugucuggggcaca

SEQ ID NO: 1870809 - RNA, 19 nt, Artificial Sequence
  Description of Artificial Sequence: Synthetic oligonucleotide
ggaccguccggaacacggg

SEQ ID NO: 1870810 - RNA, 19 nt, Artificial Sequence
  Description of Artificial Sequence: Synthetic oligonucleotide
ggcucgucaucaucagaca

SEQ ID NO: 1870811 - RNA, 19 nt, Artificial Sequence
  Description of Artificial Sequence: Synthetic oligonucleotide
ccgagugaagggaggauga

SEQ ID NO: 1870812 - RNA, 19 nt, Artificial Sequence
  Description of Artificial Sequence: Synthetic oligonucleotide
gcugaggccgcgcgguagc

SEQ ID NO: 1870813 - RNA, 19 nt, Artificial Sequence
  Description of Artificial Sequence: Synthetic oligonucleotide
uggaccccacggucagacu

SEQ ID NO: 1870814 - RNA, 19 nt, Artificial Sequence
  Description of Artificial Sequence: Synthetic oligonucleotide
gagccugaguuggcagcgc

SEQ ID NO: 1870815 - RNA, 19 nt, Artificial Sequence
  Description of Artificial Sequence: Synthetic oligonucleotide
ggcuauagacgcgcuccag

SEQ ID NO: 1870816 - RNA, 19 nt, Artificial Sequence
  Description of Artificial Sequence: Synthetic oligonucleotide
acgggagugcaagacgcuu

SEQ ID NO: 1870817 - RNA, 19 nt, Artificial Sequence
  Description of Artificial Sequence: Synthetic oligonucleotide
uccuagucccagggaggga

SEQ ID NO: 1870818 - RNA, 19 nt, Artificial Sequence
  Description of Artificial Sequence: Synthetic oligonucleotide
agcuaggggugcacacaag

SEQ ID NO: 1870819 - RNA, 19 nt, Artificial Sequence
  Description of Artificial Sequence: Synthetic oligonucleotide
gacgcgcuccagcucccuc

SEQ ID NO: 1870820 - RNA, 19 nt, Artificial Sequence
  Description of Artificial Sequence: Synthetic oligonucleotide
ggaguccuagucccaggga

SEQ ID NO: 1870821 - RNA, 19 nt, Artificial Sequence
  Description of Artificial Sequence: Synthetic oligonucleotide
gcuuuggaccccacgguca

SEQ ID NO: 1870822 - RNA, 19 nt, Artificial Sequence
  Description of Artificial Sequence: Synthetic oligonucleotide
cugaggccgcgcgguagcg

SEQ ID NO: 1870823 - RNA, 19 nt, Artificial Sequence
  Description of Artificial Sequence: Synthetic oligonucleotide
cuggucccuaaacuuaaau

SEQ ID NO: 1870824 - RNA, 19 nt, Artificial Sequence
  Description of Artificial Sequence: Synthetic oligonucleotide
gaccccacggucagacuaa

SEQ ID NO: 1870825 - RNA, 19 nt, Artificial Sequence
  Description of Artificial Sequence: Synthetic oligonucleotide
guagcggcgggagcccggc

SEQ ID NO: 1870826 - RNA, 19 nt, Artificial Sequence
  Description of Artificial Sequence: Synthetic oligonucleotide
uggcgugacggggaccguc

SEQ ID NO: 1870827 - RNA, 19 nt, Artificial Sequence
  Description of Artificial Sequence: Synthetic oligonucleotide
gcccuccugaagugaagug

SEQ ID NO: 1870828 - RNA, 19 nt, Artificial Sequence
  Description of Artificial Sequence: Synthetic oligonucleotide
cauagagaccuuagccuuu

SEQ ID NO: 1870829 - RNA, 19 nt, Artificial Sequence
  Description of Artificial Sequence: Synthetic oligonucleotide
cacuuugccugauggguau

SEQ ID NO: 1870830 - RNA, 19 nt, Artificial Sequence
  Description of Artificial Sequence: Synthetic oligonucleotide
gcuggcuauagacgcgcuc

SEQ ID NO: 1870831 - RNA, 19 nt, Artificial Sequence
  Description of Artificial Sequence: Synthetic oligonucleotide
ccggagggagcccagccac

SEQ ID NO: 1870832 - RNA, 19 nt, Artificial Sequence
  Description of Artificial Sequence: Synthetic oligonucleotide
gccugaguuggcagcgccg

SEQ ID NO: 1870833 - RNA, 19 nt, Artificial Sequence
  Description of Artificial Sequence: Synthetic oligonucleotide
accccacggucagacuaag

SEQ ID NO: 1870834 - RNA, 19 nt, Artificial Sequence
  Description of Artificial Sequence: Synthetic oligonucleotide
cuagucccagggagggaaa

SEQ ID NO: 1870835 - RNA, 19 nt, Artificial Sequence
  Description of Artificial Sequence: Synthetic oligonucleotide
ggcgugacggggaccgucc

SEQ ID NO: 1870836 - RNA, 19 nt, Artificial Sequence
  Description of Artificial Sequence: Synthetic oligonucleotide
ccacuggucacgggcauug

SEQ ID NO: 1870837 - RNA, 19 nt, Artificial Sequence
  Description of Artificial Sequence: Synthetic oligonucleotide
ccagagcgcagcccgcgcc

SEQ ID NO: 1870838 - RNA, 19 nt, Artificial Sequence
  Description of Artificial Sequence: Synthetic oligonucleotide
cugauuuggaaggcauccu

SEQ ID NO: 1870839 - RNA, 19 nt, Artificial Sequence
  Description of Artificial Sequence: Synthetic oligonucleotide
guccuggaucgacucauau

SEQ ID NO: 1870840 - RNA, 19 nt, Artificial Sequence
  Description of Artificial Sequence: Synthetic oligonucleotide
acuggucccuaaacuuaaa

SEQ ID NO: 1870841 - RNA, 19 nt, Artificial Sequence
  Description of Artificial Sequence: Synthetic oligonucleotide
cccguucauggcccggccg

SEQ ID NO: 1870842 - RNA, 19 nt, Artificial Sequence
  Description of Artificial Sequence: Synthetic oligonucleotide
gcagcccguucauggcccg

SEQ ID NO: 1870843 - RNA, 19 nt, Artificial Sequence
  Description of Artificial Sequence: Synthetic oligonucleotide
cagcucccuccaugagccc

SEQ ID NO: 1870844 - RNA, 19 nt, Artificial Sequence
  Description of Artificial Sequence: Synthetic oligonucleotide
uccuugcgcagcgcggcua

SEQ ID NO: 1870845 - RNA, 19 nt, Artificial Sequence
  Description of Artificial Sequence: Synthetic oligonucleotide
gcgcuggcuauagacgcgc

SEQ ID NO: 1870846 - RNA, 19 nt, Artificial Sequence
  Description of Artificial Sequence: Synthetic oligonucleotide
cccuccugaagugaaguga

SEQ ID NO: 1870847 - RNA, 19 nt, Artificial Sequence
  Description of Artificial Sequence: Synthetic oligonucleotide
gcggcuagugcggagucca

SEQ ID NO: 1870848 - RNA, 19 nt, Artificial Sequence
  Description of Artificial Sequence: Synthetic oligonucleotide
cuccuggcgccuccgcuga

SEQ ID NO: 1870849 - RNA, 19 nt, Artificial Sequence
  Description of Artificial Sequence: Synthetic oligonucleotide
guucauggcccggccgaca

SEQ ID NO: 1870850 - RNA, 19 nt, Artificial Sequence
  Description of Artificial Sequence: Synthetic oligonucleotide
ccggcaucagguggguagg

SEQ ID NO: 1870851 - RNA, 19 nt, Artificial Sequence
  Description of Artificial Sequence: Synthetic oligonucleotide
cacgggcauugugugucug

SEQ ID NO: 1870852 - RNA, 19 nt, Artificial Sequence
  Description of Artificial Sequence: Synthetic oligonucleotide
cgggcauugugugucuggg

SEQ ID NO: 1870853 - RNA, 19 nt, Artificial Sequence
  Description of Artificial Sequence: Synthetic oligonucleotide
cggaacacgggcggcacgg

SEQ ID NO: 1870854 - RNA, 19 nt, Artificial Sequence
  Description of Artificial Sequence: Synthetic oligonucleotide
gguagcggcgggagcccgg

SEQ ID NO: 1870855 - RNA, 19 nt, Artificial Sequence
  Description of Artificial Sequence: Synthetic oligonucleotide
agccuccggagggagccca

SEQ ID NO: 1870856 - RNA, 19 nt, Artificial Sequence
  Description of Artificial Sequence: Synthetic oligonucleotide
ccagguuaaccgggcggcg

SEQ ID NO: 1870857 - RNA, 19 nt, Artificial Sequence
  Description of Artificial Sequence: Synthetic oligonucleotide
gguuaaccgggcggcgcgc

SEQ ID NO: 1870858 - RNA, 19 nt, Artificial Sequence
  Description of Artificial Sequence: Synthetic oligonucleotide
acgcugcggcccacaggcc

SEQ ID NO: 1870859 - RNA, 19 nt, Artificial Sequence
  Description of Artificial Sequence: Synthetic oligonucleotide
ggucuuggcacagaugcuu

SEQ ID NO: 1870860 - RNA, 19 nt, Artificial Sequence
  Description of Artificial Sequence: Synthetic oligonucleotide
cgcagcgcggcuagugcgg

SEQ ID NO: 1870861 - RNA, 19 nt, Artificial Sequence
  Description of Artificial Sequence: Synthetic oligonucleotide
gcgugacggggaccguccg

SEQ ID NO: 1870862 - RNA, 19 nt, Artificial Sequence
  Description of Artificial Sequence: Synthetic oligonucleotide
ccuagucccagggagggaa

SEQ ID NO: 1870863 - RNA, 19 nt, Artificial Sequence
  Description of Artificial Sequence: Synthetic oligonucleotide
ccacagcaucuccuugcgc

SEQ ID NO: 1870864 - RNA, 19 nt, Artificial Sequence
  Description of Artificial Sequence: Synthetic oligonucleotide
cagcgcggcuagugcggag

SEQ ID NO: 1870865 - RNA, 19 nt, Artificial Sequence
  Description of Artificial Sequence: Synthetic oligonucleotide
ccccugcaauguuucacuc

SEQ ID NO: 1870866 - RNA, 19 nt, Artificial Sequence
  Description of Artificial Sequence: Synthetic oligonucleotide
cuuugccugauggguauau

SEQ ID NO: 1870867 - RNA, 19 nt, Artificial Sequence
  Description of Artificial Sequence: Synthetic oligonucleotide
cgcuuuggaccccacgguc

SEQ ID NO: 1870868 - RNA, 19 nt, Artificial Sequence
  Description of Artificial Sequence: Synthetic oligonucleotide
cguggaugcggcugcgcug

SEQ ID NO: 1870869 - RNA, 19 nt, Artificial Sequence
  Description of Artificial Sequence: Synthetic oligonucleotide
cgacuaaggacuugcugaa

SEQ ID NO: 1870870 - RNA, 19 nt, Artificial Sequence
  Description of Artificial Sequence: Synthetic oligonucleotide
ccccacggucagacuaagg

SEQ ID NO: 1870871 - RNA, 19 nt, Artificial Sequence
  Description of Artificial Sequence: Synthetic oligonucleotide
gcccggccgacacggacug

SEQ ID NO: 1870872 - RNA, 19 nt, Artificial Sequence
  Description of Artificial Sequence: Synthetic oligonucleotide
ccacuuugccugaugggua

SEQ ID NO: 1870873 - RNA, 19 nt, Artificial Sequence
  Description of Artificial Sequence: Synthetic oligonucleotide
gcgccgguggcgugacggg

SEQ ID NO: 1870874 - RNA, 19 nt, Artificial Sequence
  Description of Artificial Sequence: Synthetic oligonucleotide
gugggaaguccaguccacu

SEQ ID NO: 1870875 - RNA, 19 nt, Artificial Sequence
  Description of Artificial Sequence: Synthetic oligonucleotide
cuggaccccugcaauguuu

SEQ ID NO: 1870876 - RNA, 19 nt, Artificial Sequence
  Description of Artificial Sequence: Synthetic oligonucleotide
gagcccggccagagcgcag

SEQ ID NO: 1870877 - RNA, 19 nt, Artificial Sequence
  Description of Artificial Sequence: Synthetic oligonucleotide
gcgcgcgccugcugcagag

SEQ ID NO: 1870878 - RNA, 19 nt, Artificial Sequence
  Description of Artificial Sequence: Synthetic oligonucleotide
cgugacggggaccguccgg

SEQ ID NO: 1870879 - RNA, 19 nt, Artificial Sequence
  Description of Artificial Sequence: Synthetic oligonucleotide
ccggccgacacggacugug

SEQ ID NO: 1870880 - RNA, 19 nt, Artificial Sequence
  Description of Artificial Sequence: Synthetic oligonucleotide
gccaagcuaggggugcaca

SEQ ID NO: 1870881 - RNA, 19 nt, Artificial Sequence
  Description of Artificial Sequence: Synthetic oligonucleotide
gcggcgggagcccggccag

SEQ ID NO: 1870882 - RNA, 19 nt, Artificial Sequence
  Description of Artificial Sequence: Synthetic oligonucleotide
ccggaacacgggcggcacg

SEQ ID NO: 1870883 - RNA, 19 nt, Artificial Sequence
  Description of Artificial Sequence: Synthetic oligonucleotide
gcccguucauggcccggcc

SEQ ID NO: 1870884 - RNA, 19 nt, Artificial Sequence
  Description of Artificial Sequence: Synthetic oligonucleotide
ggccgcgcgguagcggcgg

SEQ ID NO: 1870885 - RNA, 19 nt, Artificial Sequence
  Description of Artificial Sequence: Synthetic oligonucleotide
ggucacgggcauugugugu

SEQ ID NO: 1870886 - RNA, 19 nt, Artificial Sequence
  Description of Artificial Sequence: Synthetic oligonucleotide
aggccgcgcgguagcggcg

SEQ ID NO: 1870887 - RNA, 19 nt, Artificial Sequence
  Description of Artificial Sequence: Synthetic oligonucleotide
ggggaccguccggaacacg

SEQ ID NO: 1870888 - RNA, 19 nt, Artificial Sequence
  Description of Artificial Sequence: Synthetic oligonucleotide
ggagcccggccagagcgca

SEQ ID NO: 1870889 - RNA, 19 nt, Artificial Sequence
  Description of Artificial Sequence: Synthetic oligonucleotide
cagccuccggagggagccc

SEQ ID NO: 1870890 - RNA, 19 nt, Artificial Sequence
  Description of Artificial Sequence: Synthetic oligonucleotide
cuagugcggaguccagguu

SEQ ID NO: 1870891 - RNA, 19 nt, Artificial Sequence
  Description of Artificial Sequence: Synthetic oligonucleotide
cacugucgacuaaggacuu

SEQ ID NO: 1870892 - RNA, 19 nt, Artificial Sequence
  Description of Artificial Sequence: Synthetic oligonucleotide
gcaucuccuugcgcagcgc

SEQ ID NO: 1870893 - RNA, 19 nt, Artificial Sequence
  Description of Artificial Sequence: Synthetic oligonucleotide
gugcggaguccagguuaac

SEQ ID NO: 1870894 - RNA, 19 nt, Artificial Sequence
  Description of Artificial Sequence: Synthetic oligonucleotide
gggagcccggccagagcgc

SEQ ID NO: 1870895 - RNA, 19 nt, Artificial Sequence
  Description of Artificial Sequence: Synthetic oligonucleotide
gcuaggcaaucaucccagu

SEQ ID NO: 1870896 - RNA, 19 nt, Artificial Sequence
  Description of Artificial Sequence: Synthetic oligonucleotide
ggcagcgccgguggcguga

SEQ ID NO: 1870897 - RNA, 19 nt, Artificial Sequence
  Description of Artificial Sequence: Synthetic oligonucleotide
cgacacggacugugaugcc

SEQ ID NO: 1870898 - RNA, 19 nt, Artificial Sequence
  Description of Artificial Sequence: Synthetic oligonucleotide
ccgguggcgugacggggac

SEQ ID NO: 1870899 - RNA, 19 nt, Artificial Sequence
  Description of Artificial Sequence: Synthetic oligonucleotide
cagcgccgguggcgugacg

SEQ ID NO: 1870900 - RNA, 19 nt, Artificial Sequence
  Description of Artificial Sequence: Synthetic oligonucleotide
cacucacgcugcggcccac

SEQ ID NO: 1870901 - RNA, 19 nt, Artificial Sequence
  Description of Artificial Sequence: Synthetic oligonucleotide
gccgguggcgugacgggga

SEQ ID NO: 1870902 - RNA, 19 nt, Artificial Sequence
  Description of Artificial Sequence: Synthetic oligonucleotide
gcgcggcuagugcggaguc

SEQ ID NO: 1870903 - RNA, 19 nt, Artificial Sequence
  Description of Artificial Sequence: Synthetic oligonucleotide
ggguaggagcuguccgagu

SEQ ID NO: 1870904 - RNA, 19 nt, Artificial Sequence
  Description of Artificial Sequence: Synthetic oligonucleotide
gcgucaggaggcucgucau

SEQ ID NO: 1870905 - RNA, 19 nt, Artificial Sequence
  Description of Artificial Sequence: Synthetic oligonucleotide
gcucaggucuuggcacaga

SEQ ID NO: 1870906 - RNA, 19 nt, Artificial Sequence
  Description of Artificial Sequence: Synthetic oligonucleotide
cgacucauauaggccccac

SEQ ID NO: 1870907 - RNA, 19 nt, Artificial Sequence
  Description of Artificial Sequence: Synthetic oligonucleotide
ggccgacacggacugugau

SEQ ID NO: 1870908 - RNA, 19 nt, Artificial Sequence
  Description of Artificial Sequence: Synthetic oligonucleotide
ccuuuuguaugggugcauu

SEQ ID NO: 1870909 - RNA, 19 nt, Artificial Sequence
  Description of Artificial Sequence: Synthetic oligonucleotide
gcagcgcggcuagugcgga

SEQ ID NO: 1870910 - RNA, 19 nt, Artificial Sequence
  Description of Artificial Sequence: Synthetic oligonucleotide
gccgcgcgguagcggcggg

SEQ ID NO: 1870911 - RNA, 19 nt, Artificial Sequence
  Description of Artificial Sequence: Synthetic oligonucleotide
gcccgcaggccgcgcuuug

SEQ ID NO: 1870912 - RNA, 19 nt, Artificial Sequence
  Description of Artificial Sequence: Synthetic oligonucleotide
cgucguggaugcggcugcg

SEQ ID NO: 1870913 - RNA, 19 nt, Artificial Sequence
  Description of Artificial Sequence: Synthetic oligonucleotide
cgccgguggcgugacgggg

SEQ ID NO: 1870914 - RNA, 19 nt, Artificial Sequence
  Description of Artificial Sequence: Synthetic oligonucleotide
ccaccuggaccccugcaau

SEQ ID NO: 1870915 - RNA, 19 nt, Artificial Sequence
  Description of Artificial Sequence: Synthetic oligonucleotide
gcagcgccgguggcgugac

SEQ ID NO: 1870916 - RNA, 19 nt, Artificial Sequence
  Description of Artificial Sequence: Synthetic oligonucleotide
accgggcggcgcgcgccug

SEQ ID NO: 1870917 - RNA, 19 nt, Artificial Sequence
  Description of Artificial Sequence: Synthetic oligonucleotide
cgcggcuagugcggagucc

SEQ ID NO: 1870918 - RNA, 19 nt, Artificial Sequence
  Description of Artificial Sequence: Synthetic oligonucleotide
ggcccggccgacacggacu

SEQ ID NO: 1870919 - RNA, 19 nt, Artificial Sequence
  Description of Artificial Sequence: Synthetic oligonucleotide
gccgcugaggccgcgcggu

SEQ ID NO: 1870920 - RNA, 19 nt, Artificial Sequence
  Description of Artificial Sequence: Synthetic oligonucleotide
cgcgccuccuggcgccucc

SEQ ID NO: 1870921 - RNA, 19 nt, Artificial Sequence
  Description of Artificial Sequence: Synthetic oligonucleotide
gcggcgcgcgccugcugca

SEQ ID NO: 1870922 - RNA, 19 nt, Artificial Sequence
  Description of Artificial Sequence: Synthetic oligonucleotide
gcucgucguggaugcggcu

SEQ ID NO: 1870923 - RNA, 19 nt, Artificial Sequence
  Description of Artificial Sequence: Synthetic oligonucleotide
ccuuagccuuucuggccgu

SEQ ID NO: 1870924 - RNA, 19 nt, Artificial Sequence
  Description of Artificial Sequence: Synthetic oligonucleotide
ggaugcggcugcgcuggcu

SEQ ID NO: 1870925 - RNA, 19 nt, Artificial Sequence
  Description of Artificial Sequence: Synthetic oligonucleotide
cuugcgcagcgcggcuagu

SEQ ID NO: 1870926 - RNA, 19 nt, Artificial Sequence
  Description of Artificial Sequence: Synthetic oligonucleotide
cgcgcuccagcucccucca

SEQ ID NO: 1870927 - RNA, 19 nt, Artificial Sequence
  Description of Artificial Sequence: Synthetic oligonucleotide
cggccgacacggacuguga

SEQ ID NO: 1870928 - RNA, 19 nt, Artificial Sequence
  Description of Artificial Sequence: Synthetic oligonucleotide
cgggagugcaagacgcuuu

SEQ ID NO: 1870929 - RNA, 19 nt, Artificial Sequence
  Description of Artificial Sequence: Synthetic oligonucleotide
cggggaccguccggaacac

SEQ ID NO: 1870930 - RNA, 19 nt, Artificial Sequence
  Description of Artificial Sequence: Synthetic oligonucleotide
cgcgcgccugcugcagagc

SEQ ID NO: 1870931 - RNA, 19 nt, Artificial Sequence
  Description of Artificial Sequence: Synthetic oligonucleotide
guggcgugacggggaccgu

SEQ ID NO: 1870932 - RNA, 19 nt, Artificial Sequence
  Description of Artificial Sequence: Synthetic oligonucleotide
ccuggaccccugcaauguu

SEQ ID NO: 1870933 - RNA, 19 nt, Artificial Sequence
  Description of Artificial Sequence: Synthetic oligonucleotide
cgguggcgugacggggacc

SEQ ID NO: 1870934 - RNA, 19 nt, Artificial Sequence
  Description of Artificial Sequence: Synthetic oligonucleotide
ccgcaggccgcgcuuuguu

SEQ ID NO: 1870935 - RNA, 19 nt, Artificial Sequence
  Description of Artificial Sequence: Synthetic oligonucleotide
ccgcugaggccgcgcggua

SEQ ID NO: 1870936 - RNA, 19 nt, Artificial Sequence
  Description of Artificial Sequence: Synthetic oligonucleotide
ccgcgcgguagcggcggga

SEQ ID NO: 1870937 - RNA, 19 nt, Artificial Sequence
  Description of Artificial Sequence: Synthetic oligonucleotide
cgccuccgcugagggcagc

SEQ ID NO: 1870938 - RNA, 19 nt, Artificial Sequence
  Description of Artificial Sequence: Synthetic oligonucleotide
gcggcacggcucagcucgu

SEQ ID NO: 1870939 - RNA, 19 nt, Artificial Sequence
  Description of Artificial Sequence: Synthetic oligonucleotide
ccgcgccuccuggcgccuc

SEQ ID NO: 1870940 - RNA, 19 nt, Artificial Sequence
  Description of Artificial Sequence: Synthetic oligonucleotide
ccgcugagggcagcccguu

SEQ ID NO: 1870941 - RNA, 19 nt, Artificial Sequence
  Description of Artificial Sequence: Synthetic oligonucleotide
ccgcccgcaggccgcgcuu

SEQ ID NO: 1870942 - RNA, 19 nt, Artificial Sequence
  Description of Artificial Sequence: Synthetic oligonucleotide
cggcgggagcccggccaga

SEQ ID NO: 1870943 - RNA, 19 nt, Artificial Sequence
  Description of Artificial Sequence: Synthetic oligonucleotide
cccggccgacacggacugu

SEQ ID NO: 1870944 - RNA, 19 nt, Artificial Sequence
  Description of Artificial Sequence: Synthetic oligonucleotide
cgcccgcaggccgcgcuuu

SEQ ID NO: 1870945 - RNA, 19 nt, Artificial Sequence
  Description of Artificial Sequence: Synthetic oligonucleotide
aaauauuaagaacucaugg

SEQ ID NO: 1870946 - RNA, 19 nt, Artificial Sequence
  Description of Artificial Sequence: Synthetic oligonucleotide
ucuucaaauauuaagaacu

SEQ ID NO: 1870947 - RNA, 19 nt, Artificial Sequence
  Description of Artificial Sequence: Synthetic oligonucleotide
auauuaagaacucauggcg

SEQ ID NO: 1870948 - RNA, 19 nt, Artificial Sequence
  Description of Artificial Sequence: Synthetic oligonucleotide
aauaaagccaaccacaaau

SEQ ID NO: 1870949 - RNA, 19 nt, Artificial Sequence
  Description of Artificial Sequence: Synthetic oligonucleotide
agaaacucggguuucaugc

SEQ ID NO: 1870950 - RNA, 19 nt, Artificial Sequence
  Description of Artificial Sequence: Synthetic oligonucleotide
uguguuuccuauaucagcg

SEQ ID NO: 1870951 - RNA, 19 nt, Artificial Sequence
  Description of Artificial Sequence: Synthetic oligonucleotide
agugaaaucauucagaaua

SEQ ID NO: 1870952 - RNA, 19 nt, Artificial Sequence
  Description of Artificial Sequence: Synthetic oligonucleotide
gaaguuuugaggcaagugg

SEQ ID NO: 1870953 - RNA, 19 nt, Artificial Sequence
  Description of Artificial Sequence: Synthetic oligonucleotide
aucgacaugaguuuugagc

SEQ ID NO: 1870954 - RNA, 19 nt, Artificial Sequence
  Description of Artificial Sequence: Synthetic oligonucleotide
gaagcuauuuuaaagaugc

SEQ ID NO: 1870955 - RNA, 19 nt, Artificial Sequence
  Description of Artificial Sequence: Synthetic oligonucleotide
gaaaucauucagaauaucg

SEQ ID NO: 1870956 - RNA, 19 nt, Artificial Sequence
  Description of Artificial Sequence: Synthetic oligonucleotide
auagacagagauuagucuc

SEQ ID NO: 1870957 - RNA, 19 nt, Artificial Sequence
  Description of Artificial Sequence: Synthetic oligonucleotide
gaaaccagugacuuguggg

SEQ ID NO: 1870958 - RNA, 19 nt, Artificial Sequence
  Description of Artificial Sequence: Synthetic oligonucleotide
ucuaacagcacuauggcau

SEQ ID NO: 1870959 - RNA, 19 nt, Artificial Sequence
  Description of Artificial Sequence: Synthetic oligonucleotide
ucuaacugaacuccugggg

SEQ ID NO: 1870960 - RNA, 19 nt, Artificial Sequence
  Description of Artificial Sequence: Synthetic oligonucleotide
uuucuaacugaacuccugg

SEQ ID NO: 1870961 - RNA, 19 nt, Artificial Sequence
  Description of Artificial Sequence: Synthetic oligonucleotide
ugcuaugaaaacauucucc

SEQ ID NO: 1870962 - RNA, 19 nt, Artificial Sequence
  Description of Artificial Sequence: Synthetic oligonucleotide
ucauuaaacagcaagccua

SEQ ID NO: 1870963 - RNA, 19 nt, Artificial Sequence
  Description of Artificial Sequence: Synthetic oligonucleotide
guuuccaaaacacuggccc

SEQ ID NO: 1870964 - RNA, 19 nt, Artificial Sequence
  Description of Artificial Sequence: Synthetic oligonucleotide
ucaaaugaagaaacucggg

SEQ ID NO: 1870965 - RNA, 19 nt, Artificial Sequence
  Description of Artificial Sequence: Synthetic oligonucleotide
agcuuuucuauacaucucg

SEQ ID NO: 1870966 - RNA, 19 nt, Artificial Sequence
  Description of Artificial Sequence: Synthetic oligonucleotide
uaaacagcaagccuacuca

SEQ ID NO: 1870967 - RNA, 19 nt, Artificial Sequence
  Description of Artificial Sequence: Synthetic oligonucleotide
uguacuguuggccaaggug

SEQ ID NO: 1870968 - RNA, 19 nt, Artificial Sequence
  Description of Artificial Sequence: Synthetic oligonucleotide
ucgacaugaguuuugagca

SEQ ID NO: 1870969 - RNA, 19 nt, Artificial Sequence
  Description of Artificial Sequence: Synthetic oligonucleotide
aacaguuuccaaaacacug

SEQ ID NO: 1870970 - RNA, 19 nt, Artificial Sequence
  Description of Artificial Sequence: Synthetic oligonucleotide
ucaaguaagcuucccaggc

SEQ ID NO: 1870971 - RNA, 19 nt, Artificial Sequence
  Description of Artificial Sequence: Synthetic oligonucleotide
uuaguugcuaugaaaacau

SEQ ID NO: 1870972 - RNA, 19 nt, Artificial Sequence
  Description of Artificial Sequence: Synthetic oligonucleotide
aaguaagcuucccaggcag

SEQ ID NO: 1870973 - RNA, 19 nt, Artificial Sequence
  Description of Artificial Sequence: Synthetic oligonucleotide
ugucuucucauuaaacagc

SEQ ID NO: 1870974 - RNA, 19 nt, Artificial Sequence
  Description of Artificial Sequence: Synthetic oligonucleotide
uauaucagcgaauuuccug

SEQ ID NO: 1870975 - RNA, 19 nt, Artificial Sequence
  Description of Artificial Sequence: Synthetic oligonucleotide
uucuugaggacuauuguac

SEQ ID NO: 1870976 - RNA, 19 nt, Artificial Sequence
  Description of Artificial Sequence: Synthetic oligonucleotide
uauuaagaacucauggcgu

SEQ ID NO: 1870977 - RNA, 19 nt, Artificial Sequence
  Description of Artificial Sequence: Synthetic oligonucleotide
ugacuugugggacacuagg

SEQ ID NO: 1870978 - RNA, 19 nt, Artificial Sequence
  Description of Artificial Sequence: Synthetic oligonucleotide
aagccaaccacaaauccac

SEQ ID NO: 1870979 - RNA, 19 nt, Artificial Sequence
  Description of Artificial Sequence: Synthetic oligonucleotide
aaugaucagacaggucugc

SEQ ID NO: 1870980 - RNA, 19 nt, Artificial Sequence
  Description of Artificial Sequence: Synthetic oligonucleotide
cuuccaggcgguuagacgc

SEQ ID NO: 1870981 - RNA, 19 nt, Artificial Sequence
  Description of Artificial Sequence: Synthetic oligonucleotide
auaucagcgaauuuccugu

SEQ ID NO: 1870982 - RNA, 19 nt, Artificial Sequence
  Description of Artificial Sequence: Synthetic oligonucleotide
caaauauuaagaacucaug

SEQ ID NO: 1870983 - RNA, 19 nt, Artificial Sequence
  Description of Artificial Sequence: Synthetic oligonucleotide
uugccaaucacuucuugag

SEQ ID NO: 1870984 - RNA, 19 nt, Artificial Sequence
  Description of Artificial Sequence: Synthetic oligonucleotide
gaucuaacagcacuauggc

SEQ ID NO: 1870985 - RNA, 19 nt, Artificial Sequence
  Description of Artificial Sequence: Synthetic oligonucleotide
aaaccagugacuuguggga

SEQ ID NO: 1870986 - RNA, 19 nt, Artificial Sequence
  Description of Artificial Sequence: Synthetic oligonucleotide
acucaaguaagcuucccag

SEQ ID NO: 1870987 - RNA, 19 nt, Artificial Sequence
  Description of Artificial Sequence: Synthetic oligonucleotide
uugcuuugaaaccagugac

SEQ ID NO: 1870988 - RNA, 19 nt, Artificial Sequence
  Description of Artificial Sequence: Synthetic oligonucleotide
ucucauuaaacagcaagcc

SEQ ID NO: 1870989 - RNA, 19 nt, Artificial Sequence
  Description of Artificial Sequence: Synthetic oligonucleotide
caaugagcaggcaugcucg

SEQ ID NO: 1870990 - RNA, 19 nt, Artificial Sequence
  Description of Artificial Sequence: Synthetic oligonucleotide
ugguauaguuuccaguggc

SEQ ID NO: 1870991 - RNA, 19 nt, Artificial Sequence
  Description of Artificial Sequence: Synthetic oligonucleotide
aaauccacagugcuccuca

SEQ ID NO: 1870992 - RNA, 19 nt, Artificial Sequence
  Description of Artificial Sequence: Synthetic oligonucleotide
acuauuguacuguuggcca

SEQ ID NO: 1870993 - RNA, 19 nt, Artificial Sequence
  Description of Artificial Sequence: Synthetic oligonucleotide
acggaguggagacggaucc

SEQ ID NO: 1870994 - RNA, 19 nt, Artificial Sequence
  Description of Artificial Sequence: Synthetic oligonucleotide
ucgauguaaaggcaagccc

SEQ ID NO: 1870995 - RNA, 19 nt, Artificial Sequence
  Description of Artificial Sequence: Synthetic oligonucleotide
uagacagagauuagucucc

SEQ ID NO: 1870996 - RNA, 19 nt, Artificial Sequence
  Description of Artificial Sequence: Synthetic oligonucleotide
cacaaauccacagugcucc

SEQ ID NO: 1870997 - RNA, 19 nt, Artificial Sequence
  Description of Artificial Sequence: Synthetic oligonucleotide
ugucuucaaauauuaagaa

SEQ ID NO: 1870998 - RNA, 19 nt, Artificial Sequence
  Description of Artificial Sequence: Synthetic oligonucleotide
ugaaaccagugacuugugg

SEQ ID NO: 1870999 - RNA, 19 nt, Artificial Sequence
  Description of Artificial Sequence: Synthetic oligonucleotide
uguugcuuugaaaccagug

SEQ ID NO: 1871000 - RNA, 19 nt, Artificial Sequence
  Description of Artificial Sequence: Synthetic oligonucleotide
ggucaaaugaagaaacucg

SEQ ID NO: 1871001 - RNA, 19 nt, Artificial Sequence
  Description of Artificial Sequence: Synthetic oligonucleotide
uucuaacugaacuccuggg

SEQ ID NO: 1871002 - RNA, 19 nt, Artificial Sequence
  Description of Artificial Sequence: Synthetic oligonucleotide
ucgggagccggaaauaaag

SEQ ID NO: 1871003 - RNA, 19 nt, Artificial Sequence
  Description of Artificial Sequence: Synthetic oligonucleotide
uccuauaucagcgaauuuc

SEQ ID NO: 1871004 - RNA, 19 nt, Artificial Sequence
  Description of Artificial Sequence: Synthetic oligonucleotide
agcacuauggcaucaguca

SEQ ID NO: 1871005 - RNA, 19 nt, Artificial Sequence
  Description of Artificial Sequence: Synthetic oligonucleotide
uauuccccggccuacaaug

SEQ ID NO: 1871006 - RNA, 19 nt, Artificial Sequence
  Description of Artificial Sequence: Synthetic oligonucleotide
uuuacuagaucugcccagg

SEQ ID NO: 1871007 - RNA, 19 nt, Artificial Sequence
  Description of Artificial Sequence: Synthetic oligonucleotide
agauagacagagauuaguc

SEQ ID NO: 1871008 - RNA, 19 nt, Artificial Sequence
  Description of Artificial Sequence: Synthetic oligonucleotide
agccugagaaguuuugagg

SEQ ID NO: 1871009 - RNA, 19 nt, Artificial Sequence
  Description of Artificial Sequence: Synthetic oligonucleotide
acaacgugcacacggagug

SEQ ID NO: 1871010 - RNA, 19 nt, Artificial Sequence
  Description of Artificial Sequence: Synthetic oligonucleotide
agauuagucuccuucuucu

SEQ ID NO: 1871011 - RNA, 19 nt, Artificial Sequence
  Description of Artificial Sequence: Synthetic oligonucleotide
uggggucaaaugaagaaac

SEQ ID NO: 1871012 - RNA, 19 nt, Artificial Sequence
  Description of Artificial Sequence: Synthetic oligonucleotide
gacaucagaaccccgcuug

SEQ ID NO: 1871013 - RNA, 19 nt, Artificial Sequence
  Description of Artificial Sequence: Synthetic oligonucleotide
agagugaaaucauucagaa

SEQ ID NO: 1871014 - RNA, 19 nt, Artificial Sequence
  Description of Artificial Sequence: Synthetic oligonucleotide
cuuucacaacuccugagcc

SEQ ID NO: 1871015 - RNA, 19 nt, Artificial Sequence
  Description of Artificial Sequence: Synthetic oligonucleotide
gaacucauggcguuucgcc

SEQ ID NO: 1871016 - RNA, 19 nt, Artificial Sequence
  Description of Artificial Sequence: Synthetic oligonucleotide
ucggguuucaugcuuacuc

SEQ ID NO: 1871017 - RNA, 19 nt, Artificial Sequence
  Description of Artificial Sequence: Synthetic oligonucleotide
cuuuucuauacaucucggc

SEQ ID NO: 1871018 - RNA, 19 nt, Artificial Sequence
  Description of Artificial Sequence: Synthetic oligonucleotide
augaugacaucagaacccc

SEQ ID NO: 1871019 - RNA, 19 nt, Artificial Sequence
  Description of Artificial Sequence: Synthetic oligonucleotide
aagaaacucggguuucaug

SEQ ID NO: 1871020 - RNA, 19 nt, Artificial Sequence
  Description of Artificial Sequence: Synthetic oligonucleotide
ugccaaucacuucuugagg

SEQ ID NO: 1871021 - RNA, 19 nt, Artificial Sequence
  Description of Artificial Sequence: Synthetic oligonucleotide
gagacaucagcagauagac

SEQ ID NO: 1871022 - RNA, 19 nt, Artificial Sequence
  Description of Artificial Sequence: Synthetic oligonucleotide
ugcucgugcaccaaagcug

SEQ ID NO: 1871023 - RNA, 19 nt, Artificial Sequence
  Description of Artificial Sequence: Synthetic oligonucleotide
ugagcaugcagaugcuggg

SEQ ID NO: 1871024 - RNA, 19 nt, Artificial Sequence
  Description of Artificial Sequence: Synthetic oligonucleotide
aaccacaaauccacagugc

SEQ ID NO: 1871025 - RNA, 19 nt, Artificial Sequence
  Description of Artificial Sequence: Synthetic oligonucleotide
uuucaugcuuacucgggag

SEQ ID NO: 1871026 - RNA, 19 nt, Artificial Sequence
  Description of Artificial Sequence: Synthetic oligonucleotide
acacuaggcauccucagug

SEQ ID NO: 1871027 - RNA, 19 nt, Artificial Sequence
  Description of Artificial Sequence: Synthetic oligonucleotide
aagcccacuuccugcaaac

SEQ ID NO: 1871028 - RNA, 19 nt, Artificial Sequence
  Description of Artificial Sequence: Synthetic oligonucleotide
gacuauuguacuguuggcc

SEQ ID NO: 1871029 - RNA, 19 nt, Artificial Sequence
  Description of Artificial Sequence: Synthetic oligonucleotide
ugcaccaaagcugaguucu

SEQ ID NO: 1871030 - RNA, 19 nt, Artificial Sequence
  Description of Artificial Sequence: Synthetic oligonucleotide
uccauuacauccagaguga

SEQ ID NO: 1871031 - RNA, 19 nt, Artificial Sequence
  Description of Artificial Sequence: Synthetic oligonucleotide
ucugcaucagccugagaag

SEQ ID NO: 1871032 - RNA, 19 nt, Artificial Sequence
  Description of Artificial Sequence: Synthetic oligonucleotide
gaugacaucagaaccccgc

SEQ ID NO: 1871033 - RNA, 19 nt, Artificial Sequence
  Description of Artificial Sequence: Synthetic oligonucleotide
uuuccaaaacacuggcccc

SEQ ID NO: 1871034 - RNA, 19 nt, Artificial Sequence
  Description of Artificial Sequence: Synthetic oligonucleotide
cauuaaacagcaagccuac

SEQ ID NO: 1871035 - RNA, 19 nt, Artificial Sequence
  Description of Artificial Sequence: Synthetic oligonucleotide
cucaaguaagcuucccagg

SEQ ID NO: 1871036 - RNA, 19 nt, Artificial Sequence
  Description of Artificial Sequence: Synthetic oligonucleotide
agcuauuuuaaagaugcca

SEQ ID NO: 1871037 - RNA, 19 nt, Artificial Sequence
  Description of Artificial Sequence: Synthetic oligonucleotide
aacucauggcguuucgcca

SEQ ID NO: 1871038 - RNA, 19 nt, Artificial Sequence
  Description of Artificial Sequence: Synthetic oligonucleotide
aauaucgacaugaguuuug

SEQ ID NO: 1871039 - RNA, 19 nt, Artificial Sequence
  Description of Artificial Sequence: Synthetic oligonucleotide
acagcaagccuacucaagu

SEQ ID NO: 1871040 - RNA, 19 nt, Artificial Sequence
  Description of Artificial Sequence: Synthetic oligonucleotide
uauacaucucggcugcuuc

SEQ ID NO: 1871041 - RNA, 19 nt, Artificial Sequence
  Description of Artificial Sequence: Synthetic oligonucleotide
ugcuuugaaaccagugacu

SEQ ID NO: 1871042 - RNA, 19 nt, Artificial Sequence
  Description of Artificial Sequence: Synthetic oligonucleotide
ugcucucgaucuaacagca

SEQ ID NO: 1871043 - RNA, 19 nt, Artificial Sequence
  Description of Artificial Sequence: Synthetic oligonucleotide
agccugguaccacaugggc

SEQ ID NO: 1871044 - RNA, 19 nt, Artificial Sequence
  Description of Artificial Sequence: Synthetic oligonucleotide
cgaucuaacagcacuaugg

SEQ ID NO: 1871045 - RNA, 19 nt, Artificial Sequence
  Description of Artificial Sequence: Synthetic oligonucleotide
cuugcaauuuguccuugcc

SEQ ID NO: 1871046 - RNA, 19 nt, Artificial Sequence
  Description of Artificial Sequence: Synthetic oligonucleotide
uguaaaggcaagcccacuu

SEQ ID NO: 1871047 - RNA, 19 nt, Artificial Sequence
  Description of Artificial Sequence: Synthetic oligonucleotide
aaccagugacuugugggac

SEQ ID NO: 1871048 - RNA, 19 nt, Artificial Sequence
  Description of Artificial Sequence: Synthetic oligonucleotide
uccugcaaaccuuucacaa

SEQ ID NO: 1871049 - RNA, 19 nt, Artificial Sequence
  Description of Artificial Sequence: Synthetic oligonucleotide
aggcaagcccacuuccugc

SEQ ID NO: 1871050 - RNA, 19 nt, Artificial Sequence
  Description of Artificial Sequence: Synthetic oligonucleotide
cagaauaucgacaugaguu

SEQ ID NO: 1871051 - RNA, 19 nt, Artificial Sequence
  Description of Artificial Sequence: Synthetic oligonucleotide
cugcucucgaucuaacagc

SEQ ID NO: 1871052 - RNA, 19 nt, Artificial Sequence
  Description of Artificial Sequence: Synthetic oligonucleotide
ugcucgauguaaaggcaag

SEQ ID NO: 1871053 - RNA, 19 nt, Artificial Sequence
  Description of Artificial Sequence: Synthetic oligonucleotide
ccuauaucagcgaauuucc

SEQ ID NO: 1871054 - RNA, 19 nt, Artificial Sequence
  Description of Artificial Sequence: Synthetic oligonucleotide
aaacacuggccccacuggu

SEQ ID NO: 1871055 - RNA, 19 nt, Artificial Sequence
  Description of Artificial Sequence: Synthetic oligonucleotide
acgacauccucaaugauca

SEQ ID NO: 1871056 - RNA, 19 nt, Artificial Sequence
  Description of Artificial Sequence: Synthetic oligonucleotide
gauagacagagauuagucu

SEQ ID NO: 1871057 - RNA, 19 nt, Artificial Sequence
  Description of Artificial Sequence: Synthetic oligonucleotide
aacaccauugugauuaguu

SEQ ID NO: 1871058 - RNA, 19 nt, Artificial Sequence
  Description of Artificial Sequence: Synthetic oligonucleotide
aagcuauuuuaaagaugcc

SEQ ID NO: 1871059 - RNA, 19 nt, Artificial Sequence
  Description of Artificial Sequence: Synthetic oligonucleotide
caagccuacucaaguaagc

SEQ ID NO: 1871060 - RNA, 19 nt, Artificial Sequence
  Description of Artificial Sequence: Synthetic oligonucleotide
caaaacacuggccccacug

SEQ ID NO: 1871061 - RNA, 19 nt, Artificial Sequence
  Description of Artificial Sequence: Synthetic oligonucleotide
cucgauguaaaggcaagcc

SEQ ID NO: 1871062 - RNA, 19 nt, Artificial Sequence
  Description of Artificial Sequence: Synthetic oligonucleotide
auuaagaacucauggcguu

SEQ ID NO: 1871063 - RNA, 19 nt, Artificial Sequence
  Description of Artificial Sequence: Synthetic oligonucleotide
cuugaggacuauuguacug

SEQ ID NO: 1871064 - RNA, 19 nt, Artificial Sequence
  Description of Artificial Sequence: Synthetic oligonucleotide
ggaaauaaagccaaccaca

SEQ ID NO: 1871065 - RNA, 19 nt, Artificial Sequence
  Description of Artificial Sequence: Synthetic oligonucleotide
acuaggcauccucaguguc

SEQ ID NO: 1871066 - RNA, 19 nt, Artificial Sequence
  Description of Artificial Sequence: Synthetic oligonucleotide
aaccagcagagcucauuuc

SEQ ID NO: 1871067 - RNA, 19 nt, Artificial Sequence
  Description of Artificial Sequence: Synthetic oligonucleotide
uuuccuauaucagcgaauu

SEQ ID NO: 1871068 - RNA, 19 nt, Artificial Sequence
  Description of Artificial Sequence: Synthetic oligonucleotide
aaacagcaagccuacucaa

SEQ ID NO: 1871069 - RNA, 19 nt, Artificial Sequence
  Description of Artificial Sequence: Synthetic oligonucleotide
uugaggacuauuguacugu

SEQ ID NO: 1871070 - RNA, 19 nt, Artificial Sequence
  Description of Artificial Sequence: Synthetic oligonucleotide
gcaugcucgauguaaaggc

SEQ ID NO: 1871071 - RNA, 19 nt, Artificial Sequence
  Description of Artificial Sequence: Synthetic oligonucleotide
uuccugucuucaaauauua

SEQ ID NO: 1871072 - RNA, 19 nt, Artificial Sequence
  Description of Artificial Sequence: Synthetic oligonucleotide
ucgaucuaacagcacuaug

SEQ ID NO: 1871073 - RNA, 19 nt, Artificial Sequence
  Description of Artificial Sequence: Synthetic oligonucleotide
uuucacaacuccugagccu

SEQ ID NO: 1871074 - RNA, 19 nt, Artificial Sequence
  Description of Artificial Sequence: Synthetic oligonucleotide
aagccuacucaaguaagcu

SEQ ID NO: 1871075 - RNA, 19 nt, Artificial Sequence
  Description of Artificial Sequence: Synthetic oligonucleotide
uucuuugcaugcuuucuuc

SEQ ID NO: 1871076 - RNA, 19 nt, Artificial Sequence
  Description of Artificial Sequence: Synthetic oligonucleotide
aaccccgcuugccaaucac

SEQ ID NO: 1871077 - RNA, 19 nt, Artificial Sequence
  Description of Artificial Sequence: Synthetic oligonucleotide
agaacucauggcguuucgc

SEQ ID NO: 1871078 - RNA, 19 nt, Artificial Sequence
  Description of Artificial Sequence: Synthetic oligonucleotide
uauuguacuguuggccaag

SEQ ID NO: 1871079 - RNA, 19 nt, Artificial Sequence
  Description of Artificial Sequence: Synthetic oligonucleotide
agcucauuucugcaaugag

SEQ ID NO: 1871080 - RNA, 19 nt, Artificial Sequence
  Description of Artificial Sequence: Synthetic oligonucleotide
ucaugcuuacucgggagcc

SEQ ID NO: 1871081 - RNA, 19 nt, Artificial Sequence
  Description of Artificial Sequence: Synthetic oligonucleotide
agaaguuuugaggcaagug

SEQ ID NO: 1871082 - RNA, 19 nt, Artificial Sequence
  Description of Artificial Sequence: Synthetic oligonucleotide
acaugaguuuugagcaugc

SEQ ID NO: 1871083 - RNA, 19 nt, Artificial Sequence
  Description of Artificial Sequence: Synthetic oligonucleotide
auccacagugcuccucagc

SEQ ID NO: 1871084 - RNA, 19 nt, Artificial Sequence
  Description of Artificial Sequence: Synthetic oligonucleotide
uuccaguggccaaggaacc

SEQ ID NO: 1871085 - RNA, 19 nt, Artificial Sequence
  Description of Artificial Sequence: Synthetic oligonucleotide
gcauuuacuagaucugccc

SEQ ID NO: 1871086 - RNA, 19 nt, Artificial Sequence
  Description of Artificial Sequence: Synthetic oligonucleotide
cacuauggcaucagucacc

SEQ ID NO: 1871087 - RNA, 19 nt, Artificial Sequence
  Description of Artificial Sequence: Synthetic oligonucleotide
aucuaacagcacuauggca

SEQ ID NO: 1871088 - RNA, 19 nt, Artificial Sequence
  Description of Artificial Sequence: Synthetic oligonucleotide
ucugcucgugcaccaaagc

SEQ ID NO: 1871089 - RNA, 19 nt, Artificial Sequence
  Description of Artificial Sequence: Synthetic oligonucleotide
caaggaaccagcagagcuc

SEQ ID NO: 1871090 - RNA, 19 nt, Artificial Sequence
  Description of Artificial Sequence: Synthetic oligonucleotide
ucugcccuggauuaaucuc

SEQ ID NO: 1871091 - RNA, 19 nt, Artificial Sequence
  Description of Artificial Sequence: Synthetic oligonucleotide
aucagaaccccgcuugcca

SEQ ID NO: 1871092 - RNA, 19 nt, Artificial Sequence
  Description of Artificial Sequence: Synthetic oligonucleotide
gauguaaaggcaagcccac

SEQ ID NO: 1871093 - RNA, 19 nt, Artificial Sequence
  Description of Artificial Sequence: Synthetic oligonucleotide
uaacugaacuccugggguc

SEQ ID NO: 1871094 - RNA, 19 nt, Artificial Sequence
  Description of Artificial Sequence: Synthetic oligonucleotide
uuacucgggagccggaaau

SEQ ID NO: 1871095 - RNA, 19 nt, Artificial Sequence
  Description of Artificial Sequence: Synthetic oligonucleotide
agcaagccuacucaaguaa

SEQ ID NO: 1871096 - RNA, 19 nt, Artificial Sequence
  Description of Artificial Sequence: Synthetic oligonucleotide
accuuucacaacuccugag

SEQ ID NO: 1871097 - RNA, 19 nt, Artificial Sequence
  Description of Artificial Sequence: Synthetic oligonucleotide
uacuagaucugcccaggaa

SEQ ID NO: 1871098 - RNA, 19 nt, Artificial Sequence
  Description of Artificial Sequence: Synthetic oligonucleotide
uccaaguauuccccggccu

SEQ ID NO: 1871099 - RNA, 19 nt, Artificial Sequence
  Description of Artificial Sequence: Synthetic oligonucleotide
cauuuacuagaucugccca

SEQ ID NO: 1871100 - RNA, 19 nt, Artificial Sequence
  Description of Artificial Sequence: Synthetic oligonucleotide
cuuugaaaccagugacuug

SEQ ID NO: 1871101 - RNA, 19 nt, Artificial Sequence
  Description of Artificial Sequence: Synthetic oligonucleotide
cagccugagaaguuuugag

SEQ ID NO: 1871102 - RNA, 19 nt, Artificial Sequence
  Description of Artificial Sequence: Synthetic oligonucleotide
gacggauccccugagcuug

SEQ ID NO: 1871103 - RNA, 19 nt, Artificial Sequence
  Description of Artificial Sequence: Synthetic oligonucleotide
aacugcugcuuugguauag

SEQ ID NO: 1871104 - RNA, 19 nt, Artificial Sequence
  Description of Artificial Sequence: Synthetic oligonucleotide
cacaugggcauuuacuaga

SEQ ID NO: 1871105 - RNA, 19 nt, Artificial Sequence
  Description of Artificial Sequence: Synthetic oligonucleotide
uaucgacaugaguuuugag

SEQ ID NO: 1871106 - RNA, 19 nt, Artificial Sequence
  Description of Artificial Sequence: Synthetic oligonucleotide
acuauggcaucagucaccu

SEQ ID NO: 1871107 - RNA, 19 nt, Artificial Sequence
  Description of Artificial Sequence: Synthetic oligonucleotide
uggacaacgugcacacgga

SEQ ID NO: 1871108 - RNA, 19 nt, Artificial Sequence
  Description of Artificial Sequence: Synthetic oligonucleotide
cucggcugcuuccaggcgg

SEQ ID NO: 1871109 - RNA, 19 nt, Artificial Sequence
  Description of Artificial Sequence: Synthetic oligonucleotide
uuacuagaucugcccagga

SEQ ID NO: 1871110 - RNA, 19 nt, Artificial Sequence
  Description of Artificial Sequence: Synthetic oligonucleotide
cagcauuuuggacaacgug

SEQ ID NO: 1871111 - RNA, 19 nt, Artificial Sequence
  Description of Artificial Sequence: Synthetic oligonucleotide
uugugggacacuaggcauc

SEQ ID NO: 1871112 - RNA, 19 nt, Artificial Sequence
  Description of Artificial Sequence: Synthetic oligonucleotide
gacgcuccaaguauucccc

SEQ ID NO: 1871113 - RNA, 19 nt, Artificial Sequence
  Description of Artificial Sequence: Synthetic oligonucleotide
aacugaacuccugggguca

SEQ ID NO: 1871114 - RNA, 19 nt, Artificial Sequence
  Description of Artificial Sequence: Synthetic oligonucleotide
gaaugaaccucuucacucu

SEQ ID NO: 1871115 - RNA, 19 nt, Artificial Sequence
  Description of Artificial Sequence: Synthetic oligonucleotide
guuucaugcuuacucggga

SEQ ID NO: 1871116 - RNA, 19 nt, Artificial Sequence
  Description of Artificial Sequence: Synthetic oligonucleotide
aaggugauccccuccuguu

SEQ ID NO: 1871117 - RNA, 19 nt, Artificial Sequence
  Description of Artificial Sequence: Synthetic oligonucleotide
accaucucggcaucaauuu

SEQ ID NO: 1871118 - RNA, 19 nt, Artificial Sequence
  Description of Artificial Sequence: Synthetic oligonucleotide
aguaagcuucccaggcagc

SEQ ID NO: 1871119 - RNA, 19 nt, Artificial Sequence
  Description of Artificial Sequence: Synthetic oligonucleotide
gggagccggaaauaaagcc

SEQ ID NO: 1871120 - RNA, 19 nt, Artificial Sequence
  Description of Artificial Sequence: Synthetic oligonucleotide
ugcccaggaagcuauuuua

SEQ ID NO: 1871121 - RNA, 19 nt, Artificial Sequence
  Description of Artificial Sequence: Synthetic oligonucleotide
uaagaacucauggcguuuc

SEQ ID NO: 1871122 - RNA, 19 nt, Artificial Sequence
  Description of Artificial Sequence: Synthetic oligonucleotide
ugaagaaacucggguuuca

SEQ ID NO: 1871123 - RNA, 19 nt, Artificial Sequence
  Description of Artificial Sequence: Synthetic oligonucleotide
aagaugccaccuucauacu

SEQ ID NO: 1871124 - RNA, 19 nt, Artificial Sequence
  Description of Artificial Sequence: Synthetic oligonucleotide
auaucgacaugaguuuuga

SEQ ID NO: 1871125 - RNA, 19 nt, Artificial Sequence
  Description of Artificial Sequence: Synthetic oligonucleotide
uuacauccagagugaaauc

SEQ ID NO: 1871126 - RNA, 19 nt, Artificial Sequence
  Description of Artificial Sequence: Synthetic oligonucleotide
ugggucccaaggcaucugc

SEQ ID NO: 1871127 - RNA, 19 nt, Artificial Sequence
  Description of Artificial Sequence: Synthetic oligonucleotide
acucggguuucaugcuuac

SEQ ID NO: 1871128 - RNA, 19 nt, Artificial Sequence
  Description of Artificial Sequence: Synthetic oligonucleotide
ggguuucaugcuuacucgg

SEQ ID NO: 1871129 - RNA, 19 nt, Artificial Sequence
  Description of Artificial Sequence: Synthetic oligonucleotide
ccuuucacaacuccugagc

SEQ ID NO: 1871130 - RNA, 19 nt, Artificial Sequence
  Description of Artificial Sequence: Synthetic oligonucleotide
gggaacaccauugugauua

SEQ ID NO: 1871131 - RNA, 19 nt, Artificial Sequence
  Description of Artificial Sequence: Synthetic oligonucleotide
aguggagacggauccccug

SEQ ID NO: 1871132 - RNA, 19 nt, Artificial Sequence
  Description of Artificial Sequence: Synthetic oligonucleotide
caaggcaucugcuagcugu

SEQ ID NO: 1871133 - RNA, 19 nt, Artificial Sequence
  Description of Artificial Sequence: Synthetic oligonucleotide
aucagcgaauuuccugucu

SEQ ID NO: 1871134 - RNA, 19 nt, Artificial Sequence
  Description of Artificial Sequence: Synthetic oligonucleotide
uccccggccuacaaugaug

SEQ ID NO: 1871135 - RNA, 19 nt, Artificial Sequence
  Description of Artificial Sequence: Synthetic oligonucleotide
caauuuguccuugccuccc

SEQ ID NO: 1871136 - RNA, 19 nt, Artificial Sequence
  Description of Artificial Sequence: Synthetic oligonucleotide
uucgccagagcugccaacu

SEQ ID NO: 1871137 - RNA, 19 nt, Artificial Sequence
  Description of Artificial Sequence: Synthetic oligonucleotide
gguuucaugcuuacucggg

SEQ ID NO: 1871138 - RNA, 19 nt, Artificial Sequence
  Description of Artificial Sequence: Synthetic oligonucleotide
agagauuagucuccuucuu

SEQ ID NO: 1871139 - RNA, 19 nt, Artificial Sequence
  Description of Artificial Sequence: Synthetic oligonucleotide
uggguggacgccaggcagc

SEQ ID NO: 1871140 - RNA, 19 nt, Artificial Sequence
  Description of Artificial Sequence: Synthetic oligonucleotide
aucucuccuucuacaagac

SEQ ID NO: 1871141 - RNA, 19 nt, Artificial Sequence
  Description of Artificial Sequence: Synthetic oligonucleotide
gagacggauccccugagcu

SEQ ID NO: 1871142 - RNA, 19 nt, Artificial Sequence
  Description of Artificial Sequence: Synthetic oligonucleotide
aguuuugagcaugcagaug

SEQ ID NO: 1871143 - RNA, 19 nt, Artificial Sequence
  Description of Artificial Sequence: Synthetic oligonucleotide
augcuuacucgggagccgg

SEQ ID NO: 1871144 - RNA, 19 nt, Artificial Sequence
  Description of Artificial Sequence: Synthetic oligonucleotide
gagccugguaccacauggg

SEQ ID NO: 1871145 - RNA, 19 nt, Artificial Sequence
  Description of Artificial Sequence: Synthetic oligonucleotide
gccaaucacuucuugagga

SEQ ID NO: 1871146 - RNA, 19 nt, Artificial Sequence
  Description of Artificial Sequence: Synthetic oligonucleotide
gugcacacggaguggagac

SEQ ID NO: 1871147 - RNA, 19 nt, Artificial Sequence
  Description of Artificial Sequence: Synthetic oligonucleotide
ucccaggcagcuuuucuau

SEQ ID NO: 1871148 - RNA, 19 nt, Artificial Sequence
  Description of Artificial Sequence: Synthetic oligonucleotide
uuuggacaacgugcacacg

SEQ ID NO: 1871149 - RNA, 19 nt, Artificial Sequence
  Description of Artificial Sequence: Synthetic oligonucleotide
caugcucgauguaaaggca

SEQ ID NO: 1871150 - RNA, 19 nt, Artificial Sequence
  Description of Artificial Sequence: Synthetic oligonucleotide
gcaaugagcaggcaugcuc

SEQ ID NO: 1871151 - RNA, 19 nt, Artificial Sequence
  Description of Artificial Sequence: Synthetic oligonucleotide
caugcagaugcuggguccc

SEQ ID NO: 1871152 - RNA, 19 nt, Artificial Sequence
  Description of Artificial Sequence: Synthetic oligonucleotide
ggcgguuagacgcuccaag

SEQ ID NO: 1871153 - RNA, 19 nt, Artificial Sequence
  Description of Artificial Sequence: Synthetic oligonucleotide
gcugcuuccaggcgguuag

SEQ ID NO: 1871154 - RNA, 19 nt, Artificial Sequence
  Description of Artificial Sequence: Synthetic oligonucleotide
ugcacacggaguggagacg

SEQ ID NO: 1871155 - RNA, 19 nt, Artificial Sequence
  Description of Artificial Sequence: Synthetic oligonucleotide
uacaucucggcugcuucca

SEQ ID NO: 1871156 - RNA, 19 nt, Artificial Sequence
  Description of Artificial Sequence: Synthetic oligonucleotide
uaucagcgaauuuccuguc

SEQ ID NO: 1871157 - RNA, 19 nt, Artificial Sequence
  Description of Artificial Sequence: Synthetic oligonucleotide
cugcaaaccuuucacaacu

SEQ ID NO: 1871158 - RNA, 19 nt, Artificial Sequence
  Description of Artificial Sequence: Synthetic oligonucleotide
uuguacuguuggccaaggu

SEQ ID NO: 1871159 - RNA, 19 nt, Artificial Sequence
  Description of Artificial Sequence: Synthetic oligonucleotide
cucauuaaacagcaagccu

SEQ ID NO: 1871160 - RNA, 19 nt, Artificial Sequence
  Description of Artificial Sequence: Synthetic oligonucleotide
caugcuuacucgggagccg

SEQ ID NO: 1871161 - RNA, 19 nt, Artificial Sequence
  Description of Artificial Sequence: Synthetic oligonucleotide
gcuuuucuauacaucucgg

SEQ ID NO: 1871162 - RNA, 19 nt, Artificial Sequence
  Description of Artificial Sequence: Synthetic oligonucleotide
gcuuccaggcgguuagacg

SEQ ID NO: 1871163 - RNA, 19 nt, Artificial Sequence
  Description of Artificial Sequence: Synthetic oligonucleotide
agugacuugugggacacua

SEQ ID NO: 1871164 - RNA, 19 nt, Artificial Sequence
  Description of Artificial Sequence: Synthetic oligonucleotide
cucaaugaucagacagguc

SEQ ID NO: 1871165 - RNA, 19 nt, Artificial Sequence
  Description of Artificial Sequence: Synthetic oligonucleotide
ugaggacuauuguacuguu

SEQ ID NO: 1871166 - RNA, 19 nt, Artificial Sequence
  Description of Artificial Sequence: Synthetic oligonucleotide
uacuguuggccaaggugau

SEQ ID NO: 1871167 - RNA, 19 nt, Artificial Sequence
  Description of Artificial Sequence: Synthetic oligonucleotide
gguauaguuuccaguggcc

SEQ ID NO: 1871168 - RNA, 19 nt, Artificial Sequence
  Description of Artificial Sequence: Synthetic oligonucleotide
gcaauuuguccuugccucc

SEQ ID NO: 1871169 - RNA, 19 nt, Artificial Sequence
  Description of Artificial Sequence: Synthetic oligonucleotide
gaguuuugagcaugcagau

SEQ ID NO: 1871170 - RNA, 19 nt, Artificial Sequence
  Description of Artificial Sequence: Synthetic oligonucleotide
cacuguugcuuugaaacca

SEQ ID NO: 1871171 - RNA, 19 nt, Artificial Sequence
  Description of Artificial Sequence: Synthetic oligonucleotide
caaguaagcuucccaggca

SEQ ID NO: 1871172 - RNA, 19 nt, Artificial Sequence
  Description of Artificial Sequence: Synthetic oligonucleotide
ggacuauuguacuguuggc

SEQ ID NO: 1871173 - RNA, 19 nt, Artificial Sequence
  Description of Artificial Sequence: Synthetic oligonucleotide
gagcucauuucugcaauga

SEQ ID NO: 1871174 - RNA, 19 nt, Artificial Sequence
  Description of Artificial Sequence: Synthetic oligonucleotide
gagccggaaauaaagccaa

SEQ ID NO: 1871175 - RNA, 19 nt, Artificial Sequence
  Description of Artificial Sequence: Synthetic oligonucleotide
uaguugcuaugaaaacauu

SEQ ID NO: 1871176 - RNA, 19 nt, Artificial Sequence
  Description of Artificial Sequence: Synthetic oligonucleotide
gccuacaaugaugacauca

SEQ ID NO: 1871177 - RNA, 19 nt, Artificial Sequence
  Description of Artificial Sequence: Synthetic oligonucleotide
ucgugcaccaaagcugagu

SEQ ID NO: 1871178 - RNA, 19 nt, Artificial Sequence
  Description of Artificial Sequence: Synthetic oligonucleotide
cucagugucuucucauuaa

SEQ ID NO: 1871179 - RNA, 19 nt, Artificial Sequence
  Description of Artificial Sequence: Synthetic oligonucleotide
cggaaauaaagccaaccac

SEQ ID NO: 1871180 - RNA, 19 nt, Artificial Sequence
  Description of Artificial Sequence: Synthetic oligonucleotide
aguauuccccggccuacaa

SEQ ID NO: 1871181 - RNA, 19 nt, Artificial Sequence
  Description of Artificial Sequence: Synthetic oligonucleotide
cacggaguggagacggauc

SEQ ID NO: 1871182 - RNA, 19 nt, Artificial Sequence
  Description of Artificial Sequence: Synthetic oligonucleotide
ugacgacauccucaaugau

SEQ ID NO: 1871183 - RNA, 19 nt, Artificial Sequence
  Description of Artificial Sequence: Synthetic oligonucleotide
gaaacucggguuucaugcu

SEQ ID NO: 1871184 - RNA, 19 nt, Artificial Sequence
  Description of Artificial Sequence: Synthetic oligonucleotide
agaaccccgcuugccaauc

SEQ ID NO: 1871185 - RNA, 19 nt, Artificial Sequence
  Description of Artificial Sequence: Synthetic oligonucleotide
uuccaggcgguuagacgcu

SEQ ID NO: 1871186 - RNA, 19 nt, Artificial Sequence
  Description of Artificial Sequence: Synthetic oligonucleotide
uuccuauaucagcgaauuu

SEQ ID NO: 1871187 - RNA, 19 nt, Artificial Sequence
  Description of Artificial Sequence: Synthetic oligonucleotide
ggacacuaggcauccucag

SEQ ID NO: 1871188 - RNA, 19 nt, Artificial Sequence
  Description of Artificial Sequence: Synthetic oligonucleotide
uccucagugucuucucauu

SEQ ID NO: 1871189 - RNA, 19 nt, Artificial Sequence
  Description of Artificial Sequence: Synthetic oligonucleotide
ggagccggaaauaaagcca

SEQ ID NO: 1871190 - RNA, 19 nt, Artificial Sequence
  Description of Artificial Sequence: Synthetic oligonucleotide
gaaccagcagagcucauuu

SEQ ID NO: 1871191 - RNA, 19 nt, Artificial Sequence
  Description of Artificial Sequence: Synthetic oligonucleotide
cuauuguacuguuggccaa

SEQ ID NO: 1871192 - RNA, 19 nt, Artificial Sequence
  Description of Artificial Sequence: Synthetic oligonucleotide
ggcguuucgccagagcugc

SEQ ID NO: 1871193 - RNA, 19 nt, Artificial Sequence
  Description of Artificial Sequence: Synthetic oligonucleotide
cuccuguuucuaacugaac

SEQ ID NO: 1871194 - RNA, 19 nt, Artificial Sequence
  Description of Artificial Sequence: Synthetic oligonucleotide
ccuacucaaguaagcuucc

SEQ ID NO: 1871195 - RNA, 19 nt, Artificial Sequence
  Description of Artificial Sequence: Synthetic oligonucleotide
cauggcguuucgccagagc

SEQ ID NO: 1871196 - RNA, 19 nt, Artificial Sequence
  Description of Artificial Sequence: Synthetic oligonucleotide
gcacacggaguggagacgg

SEQ ID NO: 1871197 - RNA, 19 nt, Artificial Sequence
  Description of Artificial Sequence: Synthetic oligonucleotide
gcaagccuacucaaguaag

SEQ ID NO: 1871198 - RNA, 19 nt, Artificial Sequence
  Description of Artificial Sequence: Synthetic oligonucleotide
uccaguggccaaggaacca

SEQ ID NO: 1871199 - RNA, 19 nt, Artificial Sequence
  Description of Artificial Sequence: Synthetic oligonucleotide
guaccacaugggcauuuac

SEQ ID NO: 1871200 - RNA, 19 nt, Artificial Sequence
  Description of Artificial Sequence: Synthetic oligonucleotide
agccaucccaacugcugcu

SEQ ID NO: 1871201 - RNA, 19 nt, Artificial Sequence
  Description of Artificial Sequence: Synthetic oligonucleotide
uuucgccagagcugccaac

SEQ ID NO: 1871202 - RNA, 19 nt, Artificial Sequence
  Description of Artificial Sequence: Synthetic oligonucleotide
gccggaaauaaagccaacc

SEQ ID NO: 1871203 - RNA, 19 nt, Artificial Sequence
  Description of Artificial Sequence: Synthetic oligonucleotide
gcacuauggcaucagucac

SEQ ID NO: 1871204 - RNA, 19 nt, Artificial Sequence
  Description of Artificial Sequence: Synthetic oligonucleotide
guuggccaaggugaucccc

SEQ ID NO: 1871205 - RNA, 19 nt, Artificial Sequence
  Description of Artificial Sequence: Synthetic oligonucleotide
cuggugacgacauccucaa

SEQ ID NO: 1871206 - RNA, 19 nt, Artificial Sequence
  Description of Artificial Sequence: Synthetic oligonucleotide
gugacuugugggacacuag

SEQ ID NO: 1871207 - RNA, 19 nt, Artificial Sequence
  Description of Artificial Sequence: Synthetic oligonucleotide
ggaguggagacggaucccc

SEQ ID NO: 1871208 - RNA, 19 nt, Artificial Sequence
  Description of Artificial Sequence: Synthetic oligonucleotide
ggacaacgugcacacggag

SEQ ID NO: 1871209 - RNA, 19 nt, Artificial Sequence
  Description of Artificial Sequence: Synthetic oligonucleotide
gcuccaaguauuccccggc

SEQ ID NO: 1871210 - RNA, 19 nt, Artificial Sequence
  Description of Artificial Sequence: Synthetic oligonucleotide
ccaaucacuucuugaggac

SEQ ID NO: 1871211 - RNA, 19 nt, Artificial Sequence
  Description of Artificial Sequence: Synthetic oligonucleotide
cggguuucaugcuuacucg

SEQ ID NO: 1871212 - RNA, 19 nt, Artificial Sequence
  Description of Artificial Sequence: Synthetic oligonucleotide
aacucggguuucaugcuua

SEQ ID NO: 1871213 - RNA, 19 nt, Artificial Sequence
  Description of Artificial Sequence: Synthetic oligonucleotide
auccccugagcuugcaauu

SEQ ID NO: 1871214 - RNA, 19 nt, Artificial Sequence
  Description of Artificial Sequence: Synthetic oligonucleotide
ggauuaaucucuccuucua

SEQ ID NO: 1871215 - RNA, 19 nt, Artificial Sequence
  Description of Artificial Sequence: Synthetic oligonucleotide
ccggaaauaaagccaacca

SEQ ID NO: 1871216 - RNA, 19 nt, Artificial Sequence
  Description of Artificial Sequence: Synthetic oligonucleotide
caacgugcacacggagugg

SEQ ID NO: 1871217 - RNA, 19 nt, Artificial Sequence
  Description of Artificial Sequence: Synthetic oligonucleotide
guggacgccaggcagcucu

SEQ ID NO: 1871218 - RNA, 19 nt, Artificial Sequence
  Description of Artificial Sequence: Synthetic oligonucleotide
cuccugaaugaaccucuuc

SEQ ID NO: 1871219 - RNA, 19 nt, Artificial Sequence
  Description of Artificial Sequence: Synthetic oligonucleotide
aucagccugagaaguuuug

SEQ ID NO: 1871220 - RNA, 19 nt, Artificial Sequence
  Description of Artificial Sequence: Synthetic oligonucleotide
ucccaacugcugcuuuggu

SEQ ID NO: 1871221 - RNA, 19 nt, Artificial Sequence
  Description of Artificial Sequence: Synthetic oligonucleotide
caaguggguggacgccagg

SEQ ID NO: 1871222 - RNA, 19 nt, Artificial Sequence
  Description of Artificial Sequence: Synthetic oligonucleotide
uuccccggccuacaaugau

SEQ ID NO: 1871223 - RNA, 19 nt, Artificial Sequence
  Description of Artificial Sequence: Synthetic oligonucleotide
agacaggucugcccuggau

SEQ ID NO: 1871224 - RNA, 19 nt, Artificial Sequence
  Description of Artificial Sequence: Synthetic oligonucleotide
cuugugggacacuaggcau

SEQ ID NO: 1871225 - RNA, 19 nt, Artificial Sequence
  Description of Artificial Sequence: Synthetic oligonucleotide
ggaacaccauugugauuag

SEQ ID NO: 1871226 - RNA, 19 nt, Artificial Sequence
  Description of Artificial Sequence: Synthetic oligonucleotide
augcucgauguaaaggcaa

SEQ ID NO: 1871227 - RNA, 19 nt, Artificial Sequence
  Description of Artificial Sequence: Synthetic oligonucleotide
gguuagacgcuccaaguau

SEQ ID NO: 1871228 - RNA, 19 nt, Artificial Sequence
  Description of Artificial Sequence: Synthetic oligonucleotide
gauccccuccuguuucuaa

SEQ ID NO: 1871229 - RNA, 19 nt, Artificial Sequence
  Description of Artificial Sequence: Synthetic oligonucleotide
caugggcauuuacuagauc

SEQ ID NO: 1871230 - RNA, 19 nt, Artificial Sequence
  Description of Artificial Sequence: Synthetic oligonucleotide
acaugggcauuuacuagau

SEQ ID NO: 1871231 - RNA, 19 nt, Artificial Sequence
  Description of Artificial Sequence: Synthetic oligonucleotide
cagauagacagagauuagu

SEQ ID NO: 1871232 - RNA, 19 nt, Artificial Sequence
  Description of Artificial Sequence: Synthetic oligonucleotide
gacaacgugcacacggagu

SEQ ID NO: 1871233 - RNA, 19 nt, Artificial Sequence
  Description of Artificial Sequence: Synthetic oligonucleotide
gcuugcaauuuguccuugc

SEQ ID NO: 1871234 - RNA, 19 nt, Artificial Sequence
  Description of Artificial Sequence: Synthetic oligonucleotide
caaauccacagugcuccuc

SEQ ID NO: 1871235 - RNA, 19 nt, Artificial Sequence
  Description of Artificial Sequence: Synthetic oligonucleotide
cuauaucagcgaauuuccu

SEQ ID NO: 1871236 - RNA, 19 nt, Artificial Sequence
  Description of Artificial Sequence: Synthetic oligonucleotide
ucccugcucucgaucuaac

SEQ ID NO: 1871237 - RNA, 19 nt, Artificial Sequence
  Description of Artificial Sequence: Synthetic oligonucleotide
uggacgccaggcagcucug

SEQ ID NO: 1871238 - RNA, 19 nt, Artificial Sequence
  Description of Artificial Sequence: Synthetic oligonucleotide
ucauggcguuucgccagag

SEQ ID NO: 1871239 - RNA, 19 nt, Artificial Sequence
  Description of Artificial Sequence: Synthetic oligonucleotide
agccggaaauaaagccaac

SEQ ID NO: 1871240 - RNA, 19 nt, Artificial Sequence
  Description of Artificial Sequence: Synthetic oligonucleotide
acucgggagccggaaauaa

SEQ ID NO: 1871241 - RNA, 19 nt, Artificial Sequence
  Description of Artificial Sequence: Synthetic oligonucleotide
caggcaugcucgauguaaa

SEQ ID NO: 1871242 - RNA, 19 nt, Artificial Sequence
  Description of Artificial Sequence: Synthetic oligonucleotide
agacaucagcagauagaca

SEQ ID NO: 1871243 - RNA, 19 nt, Artificial Sequence
  Description of Artificial Sequence: Synthetic oligonucleotide
ggagacggauccccugagc

SEQ ID NO: 1871244 - RNA, 19 nt, Artificial Sequence
  Description of Artificial Sequence: Synthetic oligonucleotide
agcuugcaauuuguccuug

SEQ ID NO: 1871245 - RNA, 19 nt, Artificial Sequence
  Description of Artificial Sequence: Synthetic oligonucleotide
cuugccucccugcucucga

SEQ ID NO: 1871246 - RNA, 19 nt, Artificial Sequence
  Description of Artificial Sequence: Synthetic oligonucleotide
cauccucaaugaucagaca

SEQ ID NO: 1871247 - RNA, 19 nt, Artificial Sequence
  Description of Artificial Sequence: Synthetic oligonucleotide
guuucgccagagcugccaa

SEQ ID NO: 1871248 - RNA, 19 nt, Artificial Sequence
  Description of Artificial Sequence: Synthetic oligonucleotide
guaagcuucccaggcagcu

SEQ ID NO: 1871249 - RNA, 19 nt, Artificial Sequence
  Description of Artificial Sequence: Synthetic oligonucleotide
cucuccccaccaucucggc

SEQ ID NO: 1871250 - RNA, 19 nt, Artificial Sequence
  Description of Artificial Sequence: Synthetic oligonucleotide
cuuacucgggagccggaaa

SEQ ID NO: 1871251 - RNA, 19 nt, Artificial Sequence
  Description of Artificial Sequence: Synthetic oligonucleotide
cugcucgugcaccaaagcu

SEQ ID NO: 1871252 - RNA, 19 nt, Artificial Sequence
  Description of Artificial Sequence: Synthetic oligonucleotide
gaaccccgcuugccaauca

SEQ ID NO: 1871253 - RNA, 19 nt, Artificial Sequence
  Description of Artificial Sequence: Synthetic oligonucleotide
uacucgggagccggaaaua

SEQ ID NO: 1871254 - RNA, 19 nt, Artificial Sequence
  Description of Artificial Sequence: Synthetic oligonucleotide
ccaaggaaccagcagagcu

SEQ ID NO: 1871255 - RNA, 19 nt, Artificial Sequence
  Description of Artificial Sequence: Synthetic oligonucleotide
uccccugagcuugcaauuu

SEQ ID NO: 1871256 - RNA, 19 nt, Artificial Sequence
  Description of Artificial Sequence: Synthetic oligonucleotide
ggcaagcccacuuccugca

SEQ ID NO: 1871257 - RNA, 19 nt, Artificial Sequence
  Description of Artificial Sequence: Synthetic oligonucleotide
aucacuucuugaggacuau

SEQ ID NO: 1871258 - RNA, 19 nt, Artificial Sequence
  Description of Artificial Sequence: Synthetic oligonucleotide
caaucacuucuugaggacu

SEQ ID NO: 1871259 - RNA, 19 nt, Artificial Sequence
  Description of Artificial Sequence: Synthetic oligonucleotide
cucgugcaccaaagcugag

SEQ ID NO: 1871260 - RNA, 19 nt, Artificial Sequence
  Description of Artificial Sequence: Synthetic oligonucleotide
acggauccccugagcuugc

SEQ ID NO: 1871261 - RNA, 19 nt, Artificial Sequence
  Description of Artificial Sequence: Synthetic oligonucleotide
cagcaagccuacucaagua

SEQ ID NO: 1871262 - RNA, 19 nt, Artificial Sequence
  Description of Artificial Sequence: Synthetic oligonucleotide
acacggaguggagacggau

SEQ ID NO: 1871263 - RNA, 19 nt, Artificial Sequence
  Description of Artificial Sequence: Synthetic oligonucleotide
gcucgugcaccaaagcuga

SEQ ID NO: 1871264 - RNA, 19 nt, Artificial Sequence
  Description of Artificial Sequence: Synthetic oligonucleotide
auuccccggccuacaauga

SEQ ID NO: 1871265 - RNA, 19 nt, Artificial Sequence
  Description of Artificial Sequence: Synthetic oligonucleotide
gaagaaacucggguuucau

SEQ ID NO: 1871266 - RNA, 19 nt, Artificial Sequence
  Description of Artificial Sequence: Synthetic oligonucleotide
ccaacuccuccauuacauc

SEQ ID NO: 1871267 - RNA, 19 nt, Artificial Sequence
  Description of Artificial Sequence: Synthetic oligonucleotide
ccaguggccaaggaaccag

SEQ ID NO: 1871268 - RNA, 19 nt, Artificial Sequence
  Description of Artificial Sequence: Synthetic oligonucleotide
ugguaccacaugggcauuu

SEQ ID NO: 1871269 - RNA, 19 nt, Artificial Sequence
  Description of Artificial Sequence: Synthetic oligonucleotide
gcaggcaugcucgauguaa

SEQ ID NO: 1871270 - RNA, 19 nt, Artificial Sequence
  Description of Artificial Sequence: Synthetic oligonucleotide
cucgggagccggaaauaaa

SEQ ID NO: 1871271 - RNA, 19 nt, Artificial Sequence
  Description of Artificial Sequence: Synthetic oligonucleotide
aggucugcccuggauuaau

SEQ ID NO: 1871272 - RNA, 19 nt, Artificial Sequence
  Description of Artificial Sequence: Synthetic oligonucleotide
cucgagaaucuccagcauu

SEQ ID NO: 1871273 - RNA, 19 nt, Artificial Sequence
  Description of Artificial Sequence: Synthetic oligonucleotide
cacagugcuccucagccau

SEQ ID NO: 1871274 - RNA, 19 nt, Artificial Sequence
  Description of Artificial Sequence: Synthetic oligonucleotide
cgggagccggaaauaaagc

SEQ ID NO: 1871275 - RNA, 19 nt, Artificial Sequence
  Description of Artificial Sequence: Synthetic oligonucleotide
caccaucucggcaucaauu

SEQ ID NO: 1871276 - RNA, 19 nt, Artificial Sequence
  Description of Artificial Sequence: Synthetic oligonucleotide
gcgaauuuccugucuucaa

SEQ ID NO: 1871277 - RNA, 19 nt, Artificial Sequence
  Description of Artificial Sequence: Synthetic oligonucleotide
cucauggcguuucgccaga

SEQ ID NO: 1871278 - RNA, 19 nt, Artificial Sequence
  Description of Artificial Sequence: Synthetic oligonucleotide
uggugacgacauccucaau

SEQ ID NO: 1871279 - RNA, 19 nt, Artificial Sequence
  Description of Artificial Sequence: Synthetic oligonucleotide
caggcgguuagacgcucca

SEQ ID NO: 1871280 - RNA, 19 nt, Artificial Sequence
  Description of Artificial Sequence: Synthetic oligonucleotide
ugauccccuccuguuucua

SEQ ID NO: 1871281 - RNA, 19 nt, Artificial Sequence
  Description of Artificial Sequence: Synthetic oligonucleotide
agccaaccacaaauccaca

SEQ ID NO: 1871282 - RNA, 19 nt, Artificial Sequence
  Description of Artificial Sequence: Synthetic oligonucleotide
uccaggcgguuagacgcuc

SEQ ID NO: 1871283 - RNA, 19 nt, Artificial Sequence
  Description of Artificial Sequence: Synthetic oligonucleotide
uugaggcaaguggguggac

SEQ ID NO: 1871284 - RNA, 19 nt, Artificial Sequence
  Description of Artificial Sequence: Synthetic oligonucleotide
accccgcuugccaaucacu

SEQ ID NO: 1871285 - RNA, 19 nt, Artificial Sequence
  Description of Artificial Sequence: Synthetic oligonucleotide
acgugcacacggaguggag

SEQ ID NO: 1871286 - RNA, 19 nt, Artificial Sequence
  Description of Artificial Sequence: Synthetic oligonucleotide
gccugguaccacaugggca

SEQ ID NO: 1871287 - RNA, 19 nt, Artificial Sequence
  Description of Artificial Sequence: Synthetic oligonucleotide
guauuccccggccuacaau

SEQ ID NO: 1871288 - RNA, 19 nt, Artificial Sequence
  Description of Artificial Sequence: Synthetic oligonucleotide
ccccggccuacaaugauga

SEQ ID NO: 1871289 - RNA, 19 nt, Artificial Sequence
  Description of Artificial Sequence: Synthetic oligonucleotide
gcgguuagacgcuccaagu

SEQ ID NO: 1871290 - RNA, 19 nt, Artificial Sequence
  Description of Artificial Sequence: Synthetic oligonucleotide
cuguugcuuugaaaccagu

SEQ ID NO: 1871291 - RNA, 19 nt, Artificial Sequence
  Description of Artificial Sequence: Synthetic oligonucleotide
agcaggcaugcucgaugua

SEQ ID NO: 1871292 - RNA, 19 nt, Artificial Sequence
  Description of Artificial Sequence: Synthetic oligonucleotide
ccccuccuguuucuaacug

SEQ ID NO: 1871293 - RNA, 19 nt, Artificial Sequence
  Description of Artificial Sequence: Synthetic oligonucleotide
ccaaggugauccccuccug

SEQ ID NO: 1871294 - RNA, 19 nt, Artificial Sequence
  Description of Artificial Sequence: Synthetic oligonucleotide
gccaacuccuccauuacau

SEQ ID NO: 1871295 - RNA, 19 nt, Artificial Sequence
  Description of Artificial Sequence: Synthetic oligonucleotide
cagcagauagacagagauu

SEQ ID NO: 1871296 - RNA, 19 nt, Artificial Sequence
  Description of Artificial Sequence: Synthetic oligonucleotide
ccccugagcuugcaauuug

SEQ ID NO: 1871297 - RNA, 19 nt, Artificial Sequence
  Description of Artificial Sequence: Synthetic oligonucleotide
ccaaguauuccccggccua

SEQ ID NO: 1871298 - RNA, 19 nt, Artificial Sequence
  Description of Artificial Sequence: Synthetic oligonucleotide
ccaggcgguuagacgcucc

SEQ ID NO: 1871299 - RNA, 19 nt, Artificial Sequence
  Description of Artificial Sequence: Synthetic oligonucleotide
cacacggaguggagacgga

SEQ ID NO: 1871300 - RNA, 19 nt, Artificial Sequence
  Description of Artificial Sequence: Synthetic oligonucleotide
cucccugcucucgaucuaa

SEQ ID NO: 1871301 - RNA, 19 nt, Artificial Sequence
  Description of Artificial Sequence: Synthetic oligonucleotide
gugauccccuccuguuucu

SEQ ID NO: 1871302 - RNA, 19 nt, Artificial Sequence
  Description of Artificial Sequence: Synthetic oligonucleotide
cccuggauuaaucucuccu

SEQ ID NO: 1871303 - RNA, 19 nt, Artificial Sequence
  Description of Artificial Sequence: Synthetic oligonucleotide
cucgaucuaacagcacuau

SEQ ID NO: 1871304 - RNA, 19 nt, Artificial Sequence
  Description of Artificial Sequence: Synthetic oligonucleotide
ggccccacuggugacgaca

SEQ ID NO: 1871305 - RNA, 19 nt, Artificial Sequence
  Description of Artificial Sequence: Synthetic oligonucleotide
ccucagugucuucucauua

SEQ ID NO: 1871306 - RNA, 19 nt, Artificial Sequence
  Description of Artificial Sequence: Synthetic oligonucleotide
cggccuacaaugaugacau

SEQ ID NO: 1871307 - RNA, 19 nt, Artificial Sequence
  Description of Artificial Sequence: Synthetic oligonucleotide
aggcgguuagacgcuccaa

SEQ ID NO: 1871308 - RNA, 19 nt, Artificial Sequence
  Description of Artificial Sequence: Synthetic oligonucleotide
ggggucaaaugaagaaacu

SEQ ID NO: 1871309 - RNA, 19 nt, Artificial Sequence
  Description of Artificial Sequence: Synthetic oligonucleotide
cuauacaucucggcugcuu

SEQ ID NO: 1871310 - RNA, 19 nt, Artificial Sequence
  Description of Artificial Sequence: Synthetic oligonucleotide
ccuugccucccugcucucg

SEQ ID NO: 1871311 - RNA, 19 nt, Artificial Sequence
  Description of Artificial Sequence: Synthetic oligonucleotide
cagacaggucugcccugga

SEQ ID NO: 1871312 - RNA, 19 nt, Artificial Sequence
  Description of Artificial Sequence: Synthetic oligonucleotide
gccucccugcucucgaucu

SEQ ID NO: 1871313 - RNA, 19 nt, Artificial Sequence
  Description of Artificial Sequence: Synthetic oligonucleotide
ggauccccugagcuugcaa

SEQ ID NO: 1871314 - RNA, 19 nt, Artificial Sequence
  Description of Artificial Sequence: Synthetic oligonucleotide
gguaccacaugggcauuua

SEQ ID NO: 1871315 - RNA, 19 nt, Artificial Sequence
  Description of Artificial Sequence: Synthetic oligonucleotide
ccaaggcaucugcuagcug

SEQ ID NO: 1871316 - RNA, 19 nt, Artificial Sequence
  Description of Artificial Sequence: Synthetic oligonucleotide
gcugaguucuuugcaugcu

SEQ ID NO: 1871317 - RNA, 19 nt, Artificial Sequence
  Description of Artificial Sequence: Synthetic oligonucleotide
gcuuacucgggagccggaa

SEQ ID NO: 1871318 - RNA, 19 nt, Artificial Sequence
  Description of Artificial Sequence: Synthetic oligonucleotide
gcucucgaucuaacagcac

SEQ ID NO: 1871319 - RNA, 19 nt, Artificial Sequence
  Description of Artificial Sequence: Synthetic oligonucleotide
ggaaccagcagagcucauu

SEQ ID NO: 1871320 - RNA, 19 nt, Artificial Sequence
  Description of Artificial Sequence: Synthetic oligonucleotide
ccauuacauccagagugaa

SEQ ID NO: 1871321 - RNA, 19 nt, Artificial Sequence
  Description of Artificial Sequence: Synthetic oligonucleotide
cacaacuccugagccuggu

SEQ ID NO: 1871322 - RNA, 19 nt, Artificial Sequence
  Description of Artificial Sequence: Synthetic oligonucleotide
gcaagcccacuuccugcaa

SEQ ID NO: 1871323 - RNA, 19 nt, Artificial Sequence
  Description of Artificial Sequence: Synthetic oligonucleotide
cgguuagacgcuccaagua

SEQ ID NO: 1871324 - RNA, 19 nt, Artificial Sequence
  Description of Artificial Sequence: Synthetic oligonucleotide
cucggguuucaugcuuacu

SEQ ID NO: 1871325 - RNA, 19 nt, Artificial Sequence
  Description of Artificial Sequence: Synthetic oligonucleotide
cccggccuacaaugaugac

SEQ ID NO: 1871326 - RNA, 19 nt, Artificial Sequence
  Description of Artificial Sequence: Synthetic oligonucleotide
cugcuuccaggcgguuaga

SEQ ID NO: 1871327 - RNA, 19 nt, Artificial Sequence
  Description of Artificial Sequence: Synthetic oligonucleotide
cggaguggagacggauccc

SEQ ID NO: 1871328 - RNA, 19 nt, Artificial Sequence
  Description of Artificial Sequence: Synthetic oligonucleotide
cguuucgccagagcugcca

SEQ ID NO: 1871329 - RNA, 19 nt, Artificial Sequence
  Description of Artificial Sequence: Synthetic oligonucleotide
gcccuccuucugaagaacu

SEQ ID NO: 1871330 - RNA, 19 nt, Artificial Sequence
  Description of Artificial Sequence: Synthetic oligonucleotide
gcguuucgccagagcugcc

SEQ ID NO: 1871331 - RNA, 19 nt, Artificial Sequence
  Description of Artificial Sequence: Synthetic oligonucleotide
ccaucucggcaucaauuuu

SEQ ID NO: 1871332 - RNA, 19 nt, Artificial Sequence
  Description of Artificial Sequence: Synthetic oligonucleotide
gguggacgccaggcagcuc

SEQ ID NO: 1871333 - RNA, 19 nt, Artificial Sequence
  Description of Artificial Sequence: Synthetic oligonucleotide
cgacaugaguuuugagcau

SEQ ID NO: 1871334 - RNA, 19 nt, Artificial Sequence
  Description of Artificial Sequence: Synthetic oligonucleotide
ccccacuggugacgacauc

SEQ ID NO: 1871335 - RNA, 19 nt, Artificial Sequence
  Description of Artificial Sequence: Synthetic oligonucleotide
cagugacuugugggacacu

SEQ ID NO: 1871336 - RNA, 19 nt, Artificial Sequence
  Description of Artificial Sequence: Synthetic oligonucleotide
ccucccugcucucgaucua

SEQ ID NO: 1871337 - RNA, 19 nt, Artificial Sequence
  Description of Artificial Sequence: Synthetic oligonucleotide
gccaucccaacugcugcuu

SEQ ID NO: 1871338 - RNA, 19 nt, Artificial Sequence
  Description of Artificial Sequence: Synthetic oligonucleotide
cgagaaucuccagcauuuu

SEQ ID NO: 1871339 - RNA, 19 nt, Artificial Sequence
  Description of Artificial Sequence: Synthetic oligonucleotide
aaaauuguggaccccaggc

SEQ ID NO: 1871340 - RNA, 19 nt, Artificial Sequence
  Description of Artificial Sequence: Synthetic oligonucleotide
aauguugcuguuucgaggg

SEQ ID NO: 1871341 - RNA, 19 nt, Artificial Sequence
  Description of Artificial Sequence: Synthetic oligonucleotide
gaaaguauaaaacaggcuc

SEQ ID NO: 1871342 - RNA, 19 nt, Artificial Sequence
  Description of Artificial Sequence: Synthetic oligonucleotide
uuaacuacaguacuggagc

SEQ ID NO: 1871343 - RNA, 19 nt, Artificial Sequence
  Description of Artificial Sequence: Synthetic oligonucleotide
ugauuugucgaacucaggg

SEQ ID NO: 1871344 - RNA, 19 nt, Artificial Sequence
  Description of Artificial Sequence: Synthetic oligonucleotide
aaauuguggaccccaggcc

SEQ ID NO: 1871345 - RNA, 19 nt, Artificial Sequence
  Description of Artificial Sequence: Synthetic oligonucleotide
uuuaacuacaguacuggag

SEQ ID NO: 1871346 - RNA, 19 nt, Artificial Sequence
  Description of Artificial Sequence: Synthetic oligonucleotide
aaaccaugggcccagauca

SEQ ID NO: 1871347 - RNA, 19 nt, Artificial Sequence
  Description of Artificial Sequence: Synthetic oligonucleotide
uauaaaacaggcucugucc

SEQ ID NO: 1871348 - RNA, 19 nt, Artificial Sequence
  Description of Artificial Sequence: Synthetic oligonucleotide
aggaagaaaauuguggacc

SEQ ID NO: 1871349 - RNA, 19 nt, Artificial Sequence
  Description of Artificial Sequence: Synthetic oligonucleotide
aggaaaguauaaaacaggc

SEQ ID NO: 1871350 - RNA, 19 nt, Artificial Sequence
  Description of Artificial Sequence: Synthetic oligonucleotide
aaggaaaguauaaaacagg

SEQ ID NO: 1871351 - RNA, 19 nt, Artificial Sequence
  Description of Artificial Sequence: Synthetic oligonucleotide
gauuugucgaacucagggg

SEQ ID NO: 1871352 - RNA, 19 nt, Artificial Sequence
  Description of Artificial Sequence: Synthetic oligonucleotide
agcagucguagucugagcc

SEQ ID NO: 1871353 - RNA, 19 nt, Artificial Sequence
  Description of Artificial Sequence: Synthetic oligonucleotide
cagaaagucaaaaccagcc

SEQ ID NO: 1871354 - RNA, 19 nt, Artificial Sequence
  Description of Artificial Sequence: Synthetic oligonucleotide
aagacuugcuccaagcugg

SEQ ID NO: 1871355 - RNA, 19 nt, Artificial Sequence
  Description of Artificial Sequence: Synthetic oligonucleotide
aauuguggaccccaggcca

SEQ ID NO: 1871356 - RNA, 19 nt, Artificial Sequence
  Description of Artificial Sequence: Synthetic oligonucleotide
uugguuauggggcucuggg

SEQ ID NO: 1871357 - RNA, 19 nt, Artificial Sequence
  Description of Artificial Sequence: Synthetic oligonucleotide
uaagacuugcuccaagcug

SEQ ID NO: 1871358 - RNA, 19 nt, Artificial Sequence
  Description of Artificial Sequence: Synthetic oligonucleotide
acuacaguacuggagcucc

SEQ ID NO: 1871359 - RNA, 19 nt, Artificial Sequence
  Description of Artificial Sequence: Synthetic oligonucleotide
aaaguauaaaacaggcucu

SEQ ID NO: 1871360 - RNA, 19 nt, Artificial Sequence
  Description of Artificial Sequence: Synthetic oligonucleotide
aacagaaagucaaaaccag

SEQ ID NO: 1871361 - RNA, 19 nt, Artificial Sequence
  Description of Artificial Sequence: Synthetic oligonucleotide
ucuaagacuugcuccaagc

SEQ ID NO: 1871362 - RNA, 19 nt, Artificial Sequence
  Description of Artificial Sequence: Synthetic oligonucleotide
aagaaaggagacagggccc

SEQ ID NO: 1871363 - RNA, 19 nt, Artificial Sequence
  Description of Artificial Sequence: Synthetic oligonucleotide
aaaccagccuucuaagacu

SEQ ID NO: 1871364 - RNA, 19 nt, Artificial Sequence
  Description of Artificial Sequence: Synthetic oligonucleotide
aacaaggccuacucucugg

SEQ ID NO: 1871365 - RNA, 19 nt, Artificial Sequence
  Description of Artificial Sequence: Synthetic oligonucleotide
cuuggucuggaucaggcgg

SEQ ID NO: 1871366 - RNA, 19 nt, Artificial Sequence
  Description of Artificial Sequence: Synthetic oligonucleotide
uuucagugggcguugguag

SEQ ID NO: 1871367 - RNA, 19 nt, Artificial Sequence
  Description of Artificial Sequence: Synthetic oligonucleotide
ucaaaaccagccuucuaag

SEQ ID NO: 1871368 - RNA, 19 nt, Artificial Sequence
  Description of Artificial Sequence: Synthetic oligonucleotide
agcauucaagggaagagcc

SEQ ID NO: 1871369 - RNA, 19 nt, Artificial Sequence
  Description of Artificial Sequence: Synthetic oligonucleotide
uaaaggaagucacuuccca

SEQ ID NO: 1871370 - RNA, 19 nt, Artificial Sequence
  Description of Artificial Sequence: Synthetic oligonucleotide
acaggguaaaggcaagagg

SEQ ID NO: 1871371 - RNA, 19 nt, Artificial Sequence
  Description of Artificial Sequence: Synthetic oligonucleotide
gucacuucccaugagaugc

SEQ ID NO: 1871372 - RNA, 19 nt, Artificial Sequence
  Description of Artificial Sequence: Synthetic oligonucleotide
gaaaauuguggaccccagg

SEQ ID NO: 1871373 - RNA, 19 nt, Artificial Sequence
  Description of Artificial Sequence: Synthetic oligonucleotide
guagucugagccuugggag

SEQ ID NO: 1871374 - RNA, 19 nt, Artificial Sequence
  Description of Artificial Sequence: Synthetic oligonucleotide
uaguucugggcaauguugc

SEQ ID NO: 1871375 - RNA, 19 nt, Artificial Sequence
  Description of Artificial Sequence: Synthetic oligonucleotide
aaggccuacucucuggacu

SEQ ID NO: 1871376 - RNA, 19 nt, Artificial Sequence
  Description of Artificial Sequence: Synthetic oligonucleotide
uccauccagaacaaggccu

SEQ ID NO: 1871377 - RNA, 19 nt, Artificial Sequence
  Description of Artificial Sequence: Synthetic oligonucleotide
ucucuggacucccuguggg

SEQ ID NO: 1871378 - RNA, 19 nt, Artificial Sequence
  Description of Artificial Sequence: Synthetic oligonucleotide
uccccauucacugaguagc

SEQ ID NO: 1871379 - RNA, 19 nt, Artificial Sequence
  Description of Artificial Sequence: Synthetic oligonucleotide
gcugagaucagccugguug

SEQ ID NO: 1871380 - RNA, 19 nt, Artificial Sequence
  Description of Artificial Sequence: Synthetic oligonucleotide
aaguauaaaacaggcucug

SEQ ID NO: 1871381 - RNA, 19 nt, Artificial Sequence
  Description of Artificial Sequence: Synthetic oligonucleotide
ucgcccuacacauacgugc

SEQ ID NO: 1871382 - RNA, 19 nt, Artificial Sequence
  Description of Artificial Sequence: Synthetic oligonucleotide
gaaggugugguagucugcg

SEQ ID NO: 1871383 - RNA, 19 nt, Artificial Sequence
  Description of Artificial Sequence: Synthetic oligonucleotide
agaaagucaaaaccagccu

SEQ ID NO: 1871384 - RNA, 19 nt, Artificial Sequence
  Description of Artificial Sequence: Synthetic oligonucleotide
ugaagguagccccauggcu

SEQ ID NO: 1871385 - RNA, 19 nt, Artificial Sequence
  Description of Artificial Sequence: Synthetic oligonucleotide
aaggcaagaggaagaaagg

SEQ ID NO: 1871386 - RNA, 19 nt, Artificial Sequence
  Description of Artificial Sequence: Synthetic oligonucleotide
gaugaguggguaaggaaag

SEQ ID NO: 1871387 - RNA, 19 nt, Artificial Sequence
  Description of Artificial Sequence: Synthetic oligonucleotide
uuugacuugcucagacuug

SEQ ID NO: 1871388 - RNA, 19 nt, Artificial Sequence
  Description of Artificial Sequence: Synthetic oligonucleotide
ucccaugagaugcugagau

SEQ ID NO: 1871389 - RNA, 19 nt, Artificial Sequence
  Description of Artificial Sequence: Synthetic oligonucleotide
cuugcucagacuuggguug

SEQ ID NO: 1871390 - RNA, 19 nt, Artificial Sequence
  Description of Artificial Sequence: Synthetic oligonucleotide
uacacauacgugcuuugac

SEQ ID NO: 1871391 - RNA, 19 nt, Artificial Sequence
  Description of Artificial Sequence: Synthetic oligonucleotide
uccgcauccccauucacug

SEQ ID NO: 1871392 - RNA, 19 nt, Artificial Sequence
  Description of Artificial Sequence: Synthetic oligonucleotide
gaagguagccccauggcug

SEQ ID NO: 1871393 - RNA, 19 nt, Artificial Sequence
  Description of Artificial Sequence: Synthetic oligonucleotide
acacauacgugcuuugacu

SEQ ID NO: 1871394 - RNA, 19 nt, Artificial Sequence
  Description of Artificial Sequence: Synthetic oligonucleotide
aaaggaagucacuucccau

SEQ ID NO: 1871395 - RNA, 19 nt, Artificial Sequence
  Description of Artificial Sequence: Synthetic oligonucleotide
gguaaggaaaguauaaaac

SEQ ID NO: 1871396 - RNA, 19 nt, Artificial Sequence
  Description of Artificial Sequence: Synthetic oligonucleotide
cagaacaaggccuacucuc

SEQ ID NO: 1871397 - RNA, 19 nt, Artificial Sequence
  Description of Artificial Sequence: Synthetic oligonucleotide
uucuaagacuugcuccaag

SEQ ID NO: 1871398 - RNA, 19 nt, Artificial Sequence
  Description of Artificial Sequence: Synthetic oligonucleotide
gucaaaaccagccuucuaa

SEQ ID NO: 1871399 - RNA, 19 nt, Artificial Sequence
  Description of Artificial Sequence: Synthetic oligonucleotide
aacuacaguacuggagcuc

SEQ ID NO: 1871400 - RNA, 19 nt, Artificial Sequence
  Description of Artificial Sequence: Synthetic oligonucleotide
ggaagaaaauuguggaccc

SEQ ID NO: 1871401 - RNA, 19 nt, Artificial Sequence
  Description of Artificial Sequence: Synthetic oligonucleotide
gagacauccggggacgugg

SEQ ID NO: 1871402 - RNA, 19 nt, Artificial Sequence
  Description of Artificial Sequence: Synthetic oligonucleotide
gaaaccaugggcccagauc

SEQ ID NO: 1871403 - RNA, 19 nt, Artificial Sequence
  Description of Artificial Sequence: Synthetic oligonucleotide
uuggguugcucaguggagg

SEQ ID NO: 1871404 - RNA, 19 nt, Artificial Sequence
  Description of Artificial Sequence: Synthetic oligonucleotide
gaguacugcagagaguccc

SEQ ID NO: 1871405 - RNA, 19 nt, Artificial Sequence
  Description of Artificial Sequence: Synthetic oligonucleotide
ugcgccugaagguagcccc

SEQ ID NO: 1871406 - RNA, 19 nt, Artificial Sequence
  Description of Artificial Sequence: Synthetic oligonucleotide
ugggcaauguugcuguuuc

SEQ ID NO: 1871407 - RNA, 19 nt, Artificial Sequence
  Description of Artificial Sequence: Synthetic oligonucleotide
cagcaguugaggcugggcg

SEQ ID NO: 1871408 - RNA, 19 nt, Artificial Sequence
  Description of Artificial Sequence: Synthetic oligonucleotide
ugguuauggggcucugggg

SEQ ID NO: 1871409 - RNA, 19 nt, Artificial Sequence
  Description of Artificial Sequence: Synthetic oligonucleotide
cagcccuugguuauggggc

SEQ ID NO: 1871410 - RNA, 19 nt, Artificial Sequence
  Description of Artificial Sequence: Synthetic oligonucleotide
caguccacgggucagcacc

SEQ ID NO: 1871411 - RNA, 19 nt, Artificial Sequence
  Description of Artificial Sequence: Synthetic oligonucleotide
ucuugggauggcauugcca

SEQ ID NO: 1871412 - RNA, 19 nt, Artificial Sequence
  Description of Artificial Sequence: Synthetic oligonucleotide
ugggcagcccugcaguggg

SEQ ID NO: 1871413 - RNA, 19 nt, Artificial Sequence
  Description of Artificial Sequence: Synthetic oligonucleotide
guaguucugggcaauguug

SEQ ID NO: 1871414 - RNA, 19 nt, Artificial Sequence
  Description of Artificial Sequence: Synthetic oligonucleotide
aaaggagacagggcccagg

SEQ ID NO: 1871415 - RNA, 19 nt, Artificial Sequence
  Description of Artificial Sequence: Synthetic oligonucleotide
cuucucgcccuacacauac

SEQ ID NO: 1871416 - RNA, 19 nt, Artificial Sequence
  Description of Artificial Sequence: Synthetic oligonucleotide
acgugcuuugacuugcuca

SEQ ID NO: 1871417 - RNA, 19 nt, Artificial Sequence
  Description of Artificial Sequence: Synthetic oligonucleotide
agugggcguugguagaggg

SEQ ID NO: 1871418 - RNA, 19 nt, Artificial Sequence
  Description of Artificial Sequence: Synthetic oligonucleotide
cauacgugcuuugacuugc

SEQ ID NO: 1871419 - RNA, 19 nt, Artificial Sequence
  Description of Artificial Sequence: Synthetic oligonucleotide
aguacuggagcuccccuga

SEQ ID NO: 1871420 - RNA, 19 nt, Artificial Sequence
  Description of Artificial Sequence: Synthetic oligonucleotide
cuguuucgagggauggugg

SEQ ID NO: 1871421 - RNA, 19 nt, Artificial Sequence
  Description of Artificial Sequence: Synthetic oligonucleotide
aagguagccccauggcugu

SEQ ID NO: 1871422 - RNA, 19 nt, Artificial Sequence
  Description of Artificial Sequence: Synthetic oligonucleotide
acgggucagcaccauggcc

SEQ ID NO: 1871423 - RNA, 19 nt, Artificial Sequence
  Description of Artificial Sequence: Synthetic oligonucleotide
acauccggggacgugguac

SEQ ID NO: 1871424 - RNA, 19 nt, Artificial Sequence
  Description of Artificial Sequence: Synthetic oligonucleotide
uaacuacaguacuggagcu

SEQ ID NO: 1871425 - RNA, 19 nt, Artificial Sequence
  Description of Artificial Sequence: Synthetic oligonucleotide
augguggaugauuugucga

SEQ ID NO: 1871426 - RNA, 19 nt, Artificial Sequence
  Description of Artificial Sequence: Synthetic oligonucleotide
guagcagucguagucugag

SEQ ID NO: 1871427 - RNA, 19 nt, Artificial Sequence
  Description of Artificial Sequence: Synthetic oligonucleotide
guagucugcgugcuguagc

SEQ ID NO: 1871428 - RNA, 19 nt, Artificial Sequence
  Description of Artificial Sequence: Synthetic oligonucleotide
uguuucgagggauggugga

SEQ ID NO: 1871429 - RNA, 19 nt, Artificial Sequence
  Description of Artificial Sequence: Synthetic oligonucleotide
uugguagagggugugcggc

SEQ ID NO: 1871430 - RNA, 19 nt, Artificial Sequence
  Description of Artificial Sequence: Synthetic oligonucleotide
gagggagccagcauucaag

SEQ ID NO: 1871431 - RNA, 19 nt, Artificial Sequence
  Description of Artificial Sequence: Synthetic oligonucleotide
acauacgugcuuugacuug

SEQ ID NO: 1871432 - RNA, 19 nt, Artificial Sequence
  Description of Artificial Sequence: Synthetic oligonucleotide
ugguggaugauuugucgaa

SEQ ID NO: 1871433 - RNA, 19 nt, Artificial Sequence
  Description of Artificial Sequence: Synthetic oligonucleotide
ugggauggcauugccacug

SEQ ID NO: 1871434 - RNA, 19 nt, Artificial Sequence
  Description of Artificial Sequence: Synthetic oligonucleotide
gagaguuugcugccugccc

SEQ ID NO: 1871435 - RNA, 19 nt, Artificial Sequence
  Description of Artificial Sequence: Synthetic oligonucleotide
ugguagagggugugcggcg

SEQ ID NO: 1871436 - RNA, 19 nt, Artificial Sequence
  Description of Artificial Sequence: Synthetic oligonucleotide
caagggaagagccgggcac

SEQ ID NO: 1871437 - RNA, 19 nt, Artificial Sequence
  Description of Artificial Sequence: Synthetic oligonucleotide
ggcaacagaaagucaaaac

SEQ ID NO: 1871438 - RNA, 19 nt, Artificial Sequence
  Description of Artificial Sequence: Synthetic oligonucleotide
agucacuucccaugagaug

SEQ ID NO: 1871439 - RNA, 19 nt, Artificial Sequence
  Description of Artificial Sequence: Synthetic oligonucleotide
aagucacuucccaugagau

SEQ ID NO: 1871440 - RNA, 19 nt, Artificial Sequence
  Description of Artificial Sequence: Synthetic oligonucleotide
cugaagguagccccauggc

SEQ ID NO: 1871441 - RNA, 19 nt, Artificial Sequence
  Description of Artificial Sequence: Synthetic oligonucleotide
agcucacucagacagggua

SEQ ID NO: 1871442 - RNA, 19 nt, Artificial Sequence
  Description of Artificial Sequence: Synthetic oligonucleotide
gaaagucaaaaccagccuu

SEQ ID NO: 1871443 - RNA, 19 nt, Artificial Sequence
  Description of Artificial Sequence: Synthetic oligonucleotide
guaaaggaagucacuuccc

SEQ ID NO: 1871444 - RNA, 19 nt, Artificial Sequence
  Description of Artificial Sequence: Synthetic oligonucleotide
gaagaaaauuguggacccc

SEQ ID NO: 1871445 - RNA, 19 nt, Artificial Sequence
  Description of Artificial Sequence: Synthetic oligonucleotide
acaggcucuguccuggcga

SEQ ID NO: 1871446 - RNA, 19 nt, Artificial Sequence
  Description of Artificial Sequence: Synthetic oligonucleotide
cuccauccagaacaaggcc

SEQ ID NO: 1871447 - RNA, 19 nt, Artificial Sequence
  Description of Artificial Sequence: Synthetic oligonucleotide
cuuggguugcucaguggag

SEQ ID NO: 1871448 - RNA, 19 nt, Artificial Sequence
  Description of Artificial Sequence: Synthetic oligonucleotide
agcaugaaggugugguagu

SEQ ID NO: 1871449 - RNA, 19 nt, Artificial Sequence
  Description of Artificial Sequence: Synthetic oligonucleotide
cacugaguagcagucguag

SEQ ID NO: 1871450 - RNA, 19 nt, Artificial Sequence
  Description of Artificial Sequence: Synthetic oligonucleotide
uggguugcucaguggaggc

SEQ ID NO: 1871451 - RNA, 19 nt, Artificial Sequence
  Description of Artificial Sequence: Synthetic oligonucleotide
cagcauucaagggaagagc

SEQ ID NO: 1871452 - RNA, 19 nt, Artificial Sequence
  Description of Artificial Sequence: Synthetic oligonucleotide
aaggaggaugaguggguaa

SEQ ID NO: 1871453 - RNA, 19 nt, Artificial Sequence
  Description of Artificial Sequence: Synthetic oligonucleotide
guguccucggagcaugaag

SEQ ID NO: 1871454 - RNA, 19 nt, Artificial Sequence
  Description of Artificial Sequence: Synthetic oligonucleotide
gacgugguaccuccucucc

SEQ ID NO: 1871455 - RNA, 19 nt, Artificial Sequence
  Description of Artificial Sequence: Synthetic oligonucleotide
ugacaccuccucaccaugu

SEQ ID NO: 1871456 - RNA, 19 nt, Artificial Sequence
  Description of Artificial Sequence: Synthetic oligonucleotide
aguacugcagagagucccg

SEQ ID NO: 1871457 - RNA, 19 nt, Artificial Sequence
  Description of Artificial Sequence: Synthetic oligonucleotide
uucgagggaugguggauga

SEQ ID NO: 1871458 - RNA, 19 nt, Artificial Sequence
  Description of Artificial Sequence: Synthetic oligonucleotide
aacuccgcuccauccagaa

SEQ ID NO: 1871459 - RNA, 19 nt, Artificial Sequence
  Description of Artificial Sequence: Synthetic oligonucleotide
ugggagaguuugcugccug

SEQ ID NO: 1871460 - RNA, 19 nt, Artificial Sequence
  Description of Artificial Sequence: Synthetic oligonucleotide
ucagugggcguugguagag

SEQ ID NO: 1871461 - RNA, 19 nt, Artificial Sequence
  Description of Artificial Sequence: Synthetic oligonucleotide
ugugcggcgggaugguggc

SEQ ID NO: 1871462 - RNA, 19 nt, Artificial Sequence
  Description of Artificial Sequence: Synthetic oligonucleotide
ccauguuuggcugcuaugg

SEQ ID NO: 1871463 - RNA, 19 nt, Artificial Sequence
  Description of Artificial Sequence: Synthetic oligonucleotide
agaaaauuguggaccccag

SEQ ID NO: 1871464 - RNA, 19 nt, Artificial Sequence
  Description of Artificial Sequence: Synthetic oligonucleotide
uucagugggcguugguaga

SEQ ID NO: 1871465 - RNA, 19 nt, Artificial Sequence
  Description of Artificial Sequence: Synthetic oligonucleotide
uggcgaggugcguaaagga

SEQ ID NO: 1871466 - RNA, 19 nt, Artificial Sequence
  Description of Artificial Sequence: Synthetic oligonucleotide
aggaugaguggguaaggaa

SEQ ID NO: 1871467 - RNA, 19 nt, Artificial Sequence
  Description of Artificial Sequence: Synthetic oligonucleotide
caaugacuuucuugggaug

SEQ ID NO: 1871468 - RNA, 19 nt, Artificial Sequence
  Description of Artificial Sequence: Synthetic oligonucleotide
agaaaggagacagggccca

SEQ ID NO: 1871469 - RNA, 19 nt, Artificial Sequence
  Description of Artificial Sequence: Synthetic oligonucleotide
gagccuugggaggggaugg

SEQ ID NO: 1871470 - RNA, 19 nt, Artificial Sequence
  Description of Artificial Sequence: Synthetic oligonucleotide
gcaauguugcuguuucgag

SEQ ID NO: 1871471 - RNA, 19 nt, Artificial Sequence
  Description of Artificial Sequence: Synthetic oligonucleotide
uacaguacuggagcucccc

SEQ ID NO: 1871472 - RNA, 19 nt, Artificial Sequence
  Description of Artificial Sequence: Synthetic oligonucleotide
uucaagggaagagccgggc

SEQ ID NO: 1871473 - RNA, 19 nt, Artificial Sequence
  Description of Artificial Sequence: Synthetic oligonucleotide
accaugggcccagaucagc

SEQ ID NO: 1871474 - RNA, 19 nt, Artificial Sequence
  Description of Artificial Sequence: Synthetic oligonucleotide
cuuucucuggccccugcug

SEQ ID NO: 1871475 - RNA, 19 nt, Artificial Sequence
  Description of Artificial Sequence: Synthetic oligonucleotide
agaucagccccaacuccgc

SEQ ID NO: 1871476 - RNA, 19 nt, Artificial Sequence
  Description of Artificial Sequence: Synthetic oligonucleotide
gaagagggagccagcauuc

SEQ ID NO: 1871477 - RNA, 19 nt, Artificial Sequence
  Description of Artificial Sequence: Synthetic oligonucleotide
aguauaaaacaggcucugu

SEQ ID NO: 1871478 - RNA, 19 nt, Artificial Sequence
  Description of Artificial Sequence: Synthetic oligonucleotide
cuggcgaggugcguaaagg

SEQ ID NO: 1871479 - RNA, 19 nt, Artificial Sequence
  Description of Artificial Sequence: Synthetic oligonucleotide
uugucuuucagugggcguu

SEQ ID NO: 1871480 - RNA, 19 nt, Artificial Sequence
  Description of Artificial Sequence: Synthetic oligonucleotide
aggugcguaaaggaaguca

SEQ ID NO: 1871481 - RNA, 19 nt, Artificial Sequence
  Description of Artificial Sequence: Synthetic oligonucleotide
gguaaaggcaagaggaaga

SEQ ID NO: 1871482 - RNA, 19 nt, Artificial Sequence
  Description of Artificial Sequence: Synthetic oligonucleotide
aagggaagagccgggcaca

SEQ ID NO: 1871483 - RNA, 19 nt, Artificial Sequence
  Description of Artificial Sequence: Synthetic oligonucleotide
ugguugucuuucagugggc

SEQ ID NO: 1871484 - RNA, 19 nt, Artificial Sequence
  Description of Artificial Sequence: Synthetic oligonucleotide
ggugcguaaaggaagucac

SEQ ID NO: 1871485 - RNA, 19 nt, Artificial Sequence
  Description of Artificial Sequence: Synthetic oligonucleotide
gguaccuccucuccaccgg

SEQ ID NO: 1871486 - RNA, 19 nt, Artificial Sequence
  Description of Artificial Sequence: Synthetic oligonucleotide
uacugcagagagucccggc

SEQ ID NO: 1871487 - RNA, 19 nt, Artificial Sequence
  Description of Artificial Sequence: Synthetic oligonucleotide
guuguggcaggcccagccc

SEQ ID NO: 1871488 - RNA, 19 nt, Artificial Sequence
  Description of Artificial Sequence: Synthetic oligonucleotide
gguugucuuucagugggcg

SEQ ID NO: 1871489 - RNA, 19 nt, Artificial Sequence
  Description of Artificial Sequence: Synthetic oligonucleotide
caggccugcaagcaaugac

SEQ ID NO: 1871490 - RNA, 19 nt, Artificial Sequence
  Description of Artificial Sequence: Synthetic oligonucleotide
ggguaaaggcaagaggaag

SEQ ID NO: 1871491 - RNA, 19 nt, Artificial Sequence
  Description of Artificial Sequence: Synthetic oligonucleotide
acaguacuggagcuccccu

SEQ ID NO: 1871492 - RNA, 19 nt, Artificial Sequence
  Description of Artificial Sequence: Synthetic oligonucleotide
auucaagggaagagccggg

SEQ ID NO: 1871493 - RNA, 19 nt, Artificial Sequence
  Description of Artificial Sequence: Synthetic oligonucleotide
uggcaacagaaagucaaaa

SEQ ID NO: 1871494 - RNA, 19 nt, Artificial Sequence
  Description of Artificial Sequence: Synthetic oligonucleotide
cuugguuauggggcucugg

SEQ ID NO: 1871495 - RNA, 19 nt, Artificial Sequence
  Description of Artificial Sequence: Synthetic oligonucleotide
agggugugcggcgggaugg

SEQ ID NO: 1871496 - RNA, 19 nt, Artificial Sequence
  Description of Artificial Sequence: Synthetic oligonucleotide
agaucagccugguugucuu

SEQ ID NO: 1871497 - RNA, 19 nt, Artificial Sequence
  Description of Artificial Sequence: Synthetic oligonucleotide
aggccugcaagcaaugacu

SEQ ID NO: 1871498 - RNA, 19 nt, Artificial Sequence
  Description of Artificial Sequence: Synthetic oligonucleotide
ccacgggucagcaccaugg

SEQ ID NO: 1871499 - RNA, 19 nt, Artificial Sequence
  Description of Artificial Sequence: Synthetic oligonucleotide
ugucuuucagugggcguug

SEQ ID NO: 1871500 - RNA, 19 nt, Artificial Sequence
  Description of Artificial Sequence: Synthetic oligonucleotide
guugcuguuucgagggaug

SEQ ID NO: 1871501 - RNA, 19 nt, Artificial Sequence
  Description of Artificial Sequence: Synthetic oligonucleotide
ugaaaccaugggcccagau

SEQ ID NO: 1871502 - RNA, 19 nt, Artificial Sequence
  Description of Artificial Sequence: Synthetic oligonucleotide
agcccagcaguugaggcug

SEQ ID NO: 1871503 - RNA, 19 nt, Artificial Sequence
  Description of Artificial Sequence: Synthetic oligonucleotide
aguggguaaggaaaguaua

SEQ ID NO: 1871504 - RNA, 19 nt, Artificial Sequence
  Description of Artificial Sequence: Synthetic oligonucleotide
guagccccauggcuguggg

SEQ ID NO: 1871505 - RNA, 19 nt, Artificial Sequence
  Description of Artificial Sequence: Synthetic oligonucleotide
uccucggagcaugaaggug

SEQ ID NO: 1871506 - RNA, 19 nt, Artificial Sequence
  Description of Artificial Sequence: Synthetic oligonucleotide
ucuuucagugggcguuggu

SEQ ID NO: 1871507 - RNA, 19 nt, Artificial Sequence
  Description of Artificial Sequence: Synthetic oligonucleotide
cgugcuuugacuugcucag

SEQ ID NO: 1871508 - RNA, 19 nt, Artificial Sequence
  Description of Artificial Sequence: Synthetic oligonucleotide
cucuguccuggcgaggugc

SEQ ID NO: 1871509 - RNA, 19 nt, Artificial Sequence
  Description of Artificial Sequence: Synthetic oligonucleotide
gcuguuucgagggauggug

SEQ ID NO: 1871510 - RNA, 19 nt, Artificial Sequence
  Description of Artificial Sequence: Synthetic oligonucleotide
guugaggcugggcgcuugg

SEQ ID NO: 1871511 - RNA, 19 nt, Artificial Sequence
  Description of Artificial Sequence: Synthetic oligonucleotide
ucacucagacaggguaaag

SEQ ID NO: 1871512 - RNA, 19 nt, Artificial Sequence
  Description of Artificial Sequence: Synthetic oligonucleotide
ggaugaguggguaaggaaa

SEQ ID NO: 1871513 - RNA, 19 nt, Artificial Sequence
  Description of Artificial Sequence: Synthetic oligonucleotide
guuuggcugcuaugguggc

SEQ ID NO: 1871514 - RNA, 19 nt, Artificial Sequence
  Description of Artificial Sequence: Synthetic oligonucleotide
cuacucucuggacucccug

SEQ ID NO: 1871515 - RNA, 19 nt, Artificial Sequence
  Description of Artificial Sequence: Synthetic oligonucleotide
ugcccuaccugcaccuccu

SEQ ID NO: 1871516 - RNA, 19 nt, Artificial Sequence
  Description of Artificial Sequence: Synthetic oligonucleotide
ucacugaguagcagucgua

SEQ ID NO: 1871517 - RNA, 19 nt, Artificial Sequence
  Description of Artificial Sequence: Synthetic oligonucleotide
ggaugauuugucgaacuca

SEQ ID NO: 1871518 - RNA, 19 nt, Artificial Sequence
  Description of Artificial Sequence: Synthetic oligonucleotide
gguugcucaguggaggcag

SEQ ID NO: 1871519 - RNA, 19 nt, Artificial Sequence
  Description of Artificial Sequence: Synthetic oligonucleotide
uccacgggucagcaccaug

SEQ ID NO: 1871520 - RNA, 19 nt, Artificial Sequence
  Description of Artificial Sequence: Synthetic oligonucleotide
uagcagucguagucugagc

SEQ ID NO: 1871521 - RNA, 19 nt, Artificial Sequence
  Description of Artificial Sequence: Synthetic oligonucleotide
aguuugcugccugcccuac

SEQ ID NO: 1871522 - RNA, 19 nt, Artificial Sequence
  Description of Artificial Sequence: Synthetic oligonucleotide
gucguagucugagccuugg

SEQ ID NO: 1871523 - RNA, 19 nt, Artificial Sequence
  Description of Artificial Sequence: Synthetic oligonucleotide
aaccagccuucuaagacuu

SEQ ID NO: 1871524 - RNA, 19 nt, Artificial Sequence
  Description of Artificial Sequence: Synthetic oligonucleotide
agagggagccagcauucaa

SEQ ID NO: 1871525 - RNA, 19 nt, Artificial Sequence
  Description of Artificial Sequence: Synthetic oligonucleotide
agcaggaccagaggaagaa

SEQ ID NO: 1871526 - RNA, 19 nt, Artificial Sequence
  Description of Artificial Sequence: Synthetic oligonucleotide
gugugcggcgggauggugg

SEQ ID NO: 1871527 - RNA, 19 nt, Artificial Sequence
  Description of Artificial Sequence: Synthetic oligonucleotide
agcccuugguuauggggcu

SEQ ID NO: 1871528 - RNA, 19 nt, Artificial Sequence
  Description of Artificial Sequence: Synthetic oligonucleotide
uguccgcauccccauucac

SEQ ID NO: 1871529 - RNA, 19 nt, Artificial Sequence
  Description of Artificial Sequence: Synthetic oligonucleotide
uugggauggcauugccacu

SEQ ID NO: 1871530 - RNA, 19 nt, Artificial Sequence
  Description of Artificial Sequence: Synthetic oligonucleotide
augguguccucggagcaug

SEQ ID NO: 1871531 - RNA, 19 nt, Artificial Sequence
  Description of Artificial Sequence: Synthetic oligonucleotide
ucccuguggggugggagag

SEQ ID NO: 1871532 - RNA, 19 nt, Artificial Sequence
  Description of Artificial Sequence: Synthetic oligonucleotide
cugcccuaccugcaccucc

SEQ ID NO: 1871533 - RNA, 19 nt, Artificial Sequence
  Description of Artificial Sequence: Synthetic oligonucleotide
aucaggcggcgguaguucu

SEQ ID NO: 1871534 - RNA, 19 nt, Artificial Sequence
  Description of Artificial Sequence: Synthetic oligonucleotide
uugccacuggcaacagaaa

SEQ ID NO: 1871535 - RNA, 19 nt, Artificial Sequence
  Description of Artificial Sequence: Synthetic oligonucleotide
gaggugcgccugaagguag

SEQ ID NO: 1871536 - RNA, 19 nt, Artificial Sequence
  Description of Artificial Sequence: Synthetic oligonucleotide
gcauucaagggaagagccg

SEQ ID NO: 1871537 - RNA, 19 nt, Artificial Sequence
  Description of Artificial Sequence: Synthetic oligonucleotide
uugggaggggauggugucc

SEQ ID NO: 1871538 - RNA, 19 nt, Artificial Sequence
  Description of Artificial Sequence: Synthetic oligonucleotide
uacgugcuuugacuugcuc

SEQ ID NO: 1871539 - RNA, 19 nt, Artificial Sequence
  Description of Artificial Sequence: Synthetic oligonucleotide
cucgcuguccgcaucccca

SEQ ID NO: 1871540 - RNA, 19 nt, Artificial Sequence
  Description of Artificial Sequence: Synthetic oligonucleotide
gcgaggugcguaaaggaag

SEQ ID NO: 1871541 - RNA, 19 nt, Artificial Sequence
  Description of Artificial Sequence: Synthetic oligonucleotide
cucgcccuacacauacgug

SEQ ID NO: 1871542 - RNA, 19 nt, Artificial Sequence
  Description of Artificial Sequence: Synthetic oligonucleotide
cuaagacuugcuccaagcu

SEQ ID NO: 1871543 - RNA, 19 nt, Artificial Sequence
  Description of Artificial Sequence: Synthetic oligonucleotide
gaucaggcggcgguaguuc

SEQ ID NO: 1871544 - RNA, 19 nt, Artificial Sequence
  Description of Artificial Sequence: Synthetic oligonucleotide
ccaugagaugcugagauca

SEQ ID NO: 1871545 - RNA, 19 nt, Artificial Sequence
  Description of Artificial Sequence: Synthetic oligonucleotide
ugguggcaggagacauccg

SEQ ID NO: 1871546 - RNA, 19 nt, Artificial Sequence
  Description of Artificial Sequence: Synthetic oligonucleotide
caaggccuacucucuggac

SEQ ID NO: 1871547 - RNA, 19 nt, Artificial Sequence
  Description of Artificial Sequence: Synthetic oligonucleotide
cucggagcaugaaggugug

SEQ ID NO: 1871548 - RNA, 19 nt, Artificial Sequence
  Description of Artificial Sequence: Synthetic oligonucleotide
cacgggucagcaccauggc

SEQ ID NO: 1871549 - RNA, 19 nt, Artificial Sequence
  Description of Artificial Sequence: Synthetic oligonucleotide
caggcggcgguaguucugg

SEQ ID NO: 1871550 - RNA, 19 nt, Artificial Sequence
  Description of Artificial Sequence: Synthetic oligonucleotide
ggcauugccacuggcaaca

SEQ ID NO: 1871551 - RNA, 19 nt, Artificial Sequence
  Description of Artificial Sequence: Synthetic oligonucleotide
aucucucuucucgcccuac

SEQ ID NO: 1871552 - RNA, 19 nt, Artificial Sequence
  Description of Artificial Sequence: Synthetic oligonucleotide
agcuccccugaaaccaugg

SEQ ID NO: 1871553 - RNA, 19 nt, Artificial Sequence
  Description of Artificial Sequence: Synthetic oligonucleotide
ggaagucacuucccaugag

SEQ ID NO: 1871554 - RNA, 19 nt, Artificial Sequence
  Description of Artificial Sequence: Synthetic oligonucleotide
ggaggaugaguggguaagg

SEQ ID NO: 1871555 - RNA, 19 nt, Artificial Sequence
  Description of Artificial Sequence: Synthetic oligonucleotide
cugagaucagccugguugu

SEQ ID NO: 1871556 - RNA, 19 nt, Artificial Sequence
  Description of Artificial Sequence: Synthetic oligonucleotide
gugguaccuccucuccacc

SEQ ID NO: 1871557 - RNA, 19 nt, Artificial Sequence
  Description of Artificial Sequence: Synthetic oligonucleotide
agacaggguaaaggcaaga

SEQ ID NO: 1871558 - RNA, 19 nt, Artificial Sequence
  Description of Artificial Sequence: Synthetic oligonucleotide
ggcaauguugcuguuucga

SEQ ID NO: 1871559 - RNA, 19 nt, Artificial Sequence
  Description of Artificial Sequence: Synthetic oligonucleotide
cuuucagugggcguuggua

SEQ ID NO: 1871560 - RNA, 19 nt, Artificial Sequence
  Description of Artificial Sequence: Synthetic oligonucleotide
ccagccuucuaagacuugc

SEQ ID NO: 1871561 - RNA, 19 nt, Artificial Sequence
  Description of Artificial Sequence: Synthetic oligonucleotide
aggaccagaggaagaaaau

SEQ ID NO: 1871562 - RNA, 19 nt, Artificial Sequence
  Description of Artificial Sequence: Synthetic oligonucleotide
ggaggggaugguguccucg

SEQ ID NO: 1871563 - RNA, 19 nt, Artificial Sequence
  Description of Artificial Sequence: Synthetic oligonucleotide
acucccuguggggugggag

SEQ ID NO: 1871564 - RNA, 19 nt, Artificial Sequence
  Description of Artificial Sequence: Synthetic oligonucleotide
ggagaguuugcugccugcc

SEQ ID NO: 1871565 - RNA, 19 nt, Artificial Sequence
  Description of Artificial Sequence: Synthetic oligonucleotide
aggguaaaggcaagaggaa

SEQ ID NO: 1871566 - RNA, 19 nt, Artificial Sequence
  Description of Artificial Sequence: Synthetic oligonucleotide
ucggagcaugaaggugugg

SEQ ID NO: 1871567 - RNA, 19 nt, Artificial Sequence
  Description of Artificial Sequence: Synthetic oligonucleotide
agagucccggcugcucuuc

SEQ ID NO: 1871568 - RNA, 19 nt, Artificial Sequence
  Description of Artificial Sequence: Synthetic oligonucleotide
aggugcgccugaagguagc

SEQ ID NO: 1871569 - RNA, 19 nt, Artificial Sequence
  Description of Artificial Sequence: Synthetic oligonucleotide
auguugcuguuucgaggga

SEQ ID NO: 1871570 - RNA, 19 nt, Artificial Sequence
  Description of Artificial Sequence: Synthetic oligonucleotide
cuacacauacgugcuuuga

SEQ ID NO: 1871571 - RNA, 19 nt, Artificial Sequence
  Description of Artificial Sequence: Synthetic oligonucleotide
caggcucaguccacggguc

SEQ ID NO: 1871572 - RNA, 19 nt, Artificial Sequence
  Description of Artificial Sequence: Synthetic oligonucleotide
aggcucaguccacggguca

SEQ ID NO: 1871573 - RNA, 19 nt, Artificial Sequence
  Description of Artificial Sequence: Synthetic oligonucleotide
cacuuucucuggccccugc

SEQ ID NO: 1871574 - RNA, 19 nt, Artificial Sequence
  Description of Artificial Sequence: Synthetic oligonucleotide
ggaggcaguccccacuuuc

SEQ ID NO: 1871575 - RNA, 19 nt, Artificial Sequence
  Description of Artificial Sequence: Synthetic oligonucleotide
ugguguccucggagcauga

SEQ ID NO: 1871576 - RNA, 19 nt, Artificial Sequence
  Description of Artificial Sequence: Synthetic oligonucleotide
ccacuggcaacagaaaguc

SEQ ID NO: 1871577 - RNA, 19 nt, Artificial Sequence
  Description of Artificial Sequence: Synthetic oligonucleotide
agucccggcugcucuucug

SEQ ID NO: 1871578 - RNA, 19 nt, Artificial Sequence
  Description of Artificial Sequence: Synthetic oligonucleotide
gguagucugcgugcuguag

SEQ ID NO: 1871579 - RNA, 19 nt, Artificial Sequence
  Description of Artificial Sequence: Synthetic oligonucleotide
gggcaauguugcuguuucg

SEQ ID NO: 1871580 - RNA, 19 nt, Artificial Sequence
  Description of Artificial Sequence: Synthetic oligonucleotide
cacauacgugcuuugacuu

SEQ ID NO: 1871581 - RNA, 19 nt, Artificial Sequence
  Description of Artificial Sequence: Synthetic oligonucleotide
gcuccccugaaaccauggg

SEQ ID NO: 1871582 - RNA, 19 nt, Artificial Sequence
  Description of Artificial Sequence: Synthetic oligonucleotide
cugcuaugguggcaggaga

SEQ ID NO: 1871583 - RNA, 19 nt, Artificial Sequence
  Description of Artificial Sequence: Synthetic oligonucleotide
gggagaguuugcugccugc

SEQ ID NO: 1871584 - RNA, 19 nt, Artificial Sequence
  Description of Artificial Sequence: Synthetic oligonucleotide
uuauggggcucugggguuu

SEQ ID NO: 1871585 - RNA, 19 nt, Artificial Sequence
  Description of Artificial Sequence: Synthetic oligonucleotide
gcggcgguaguucugggca

SEQ ID NO: 1871586 - RNA, 19 nt, Artificial Sequence
  Description of Artificial Sequence: Synthetic oligonucleotide
ggcccguuguggcaggccc

SEQ ID NO: 1871587 - RNA, 19 nt, Artificial Sequence
  Description of Artificial Sequence: Synthetic oligonucleotide
aggcccagcccuugguuau

SEQ ID NO: 1871588 - RNA, 19 nt, Artificial Sequence
  Description of Artificial Sequence: Synthetic oligonucleotide
gaguuugcugccugcccua

SEQ ID NO: 1871589 - RNA, 19 nt, Artificial Sequence
  Description of Artificial Sequence: Synthetic oligonucleotide
uauggggcucugggguuug

SEQ ID NO: 1871590 - RNA, 19 nt, Artificial Sequence
  Description of Artificial Sequence: Synthetic oligonucleotide
gagaucagccugguugucu

SEQ ID NO: 1871591 - RNA, 19 nt, Artificial Sequence
  Description of Artificial Sequence: Synthetic oligonucleotide
guaccuccucuccaccgga

SEQ ID NO: 1871592 - RNA, 19 nt, Artificial Sequence
  Description of Artificial Sequence: Synthetic oligonucleotide
cccagaucagccccaacuc

SEQ ID NO: 1871593 - RNA, 19 nt, Artificial Sequence
  Description of Artificial Sequence: Synthetic oligonucleotide
guggggcccguuguggcag

SEQ ID NO: 1871594 - RNA, 19 nt, Artificial Sequence
  Description of Artificial Sequence: Synthetic oligonucleotide
cacuggcaacagaaaguca

SEQ ID NO: 1871595 - RNA, 19 nt, Artificial Sequence
  Description of Artificial Sequence: Synthetic oligonucleotide
cagugggcguugguagagg

SEQ ID NO: 1871596 - RNA, 19 nt, Artificial Sequence
  Description of Artificial Sequence: Synthetic oligonucleotide
uugcucaguggaggcaguc

SEQ ID NO: 1871597 - RNA, 19 nt, Artificial Sequence
  Description of Artificial Sequence: Synthetic oligonucleotide
ucgcuguccgcauccccau

SEQ ID NO: 1871598 - RNA, 19 nt, Artificial Sequence
  Description of Artificial Sequence: Synthetic oligonucleotide
cguuguggcaggcccagcc

SEQ ID NO: 1871599 - RNA, 19 nt, Artificial Sequence
  Description of Artificial Sequence: Synthetic oligonucleotide
ucccggcugcucuucuggu

SEQ ID NO: 1871600 - RNA, 19 nt, Artificial Sequence
  Description of Artificial Sequence: Synthetic oligonucleotide
cauccccauucacugagua

SEQ ID NO: 1871601 - RNA, 19 nt, Artificial Sequence
  Description of Artificial Sequence: Synthetic oligonucleotide
uggccacgccaggaggugc

SEQ ID NO: 1871602 - RNA, 19 nt, Artificial Sequence
  Description of Artificial Sequence: Synthetic oligonucleotide
cauguuuggcugcuauggu

SEQ ID NO: 1871603 - RNA, 19 nt, Artificial Sequence
  Description of Artificial Sequence: Synthetic oligonucleotide
ggacgugguaccuccucuc

SEQ ID NO: 1871604 - RNA, 19 nt, Artificial Sequence
  Description of Artificial Sequence: Synthetic oligonucleotide
gaggcaguccccacuuucu

SEQ ID NO: 1871605 - RNA, 19 nt, Artificial Sequence
  Description of Artificial Sequence: Synthetic oligonucleotide
gaggugcguaaaggaaguc

SEQ ID NO: 1871606 - RNA, 19 nt, Artificial Sequence
  Description of Artificial Sequence: Synthetic oligonucleotide
ggucgcuggcugcagguga

SEQ ID NO: 1871607 - RNA, 19 nt, Artificial Sequence
  Description of Artificial Sequence: Synthetic oligonucleotide
gagccgggcacaugggccu

SEQ ID NO: 1871608 - RNA, 19 nt, Artificial Sequence
  Description of Artificial Sequence: Synthetic oligonucleotide
cacuggaguacugcagaga

SEQ ID NO: 1871609 - RNA, 19 nt, Artificial Sequence
  Description of Artificial Sequence: Synthetic oligonucleotide
cgugguaccuccucuccac

SEQ ID NO: 1871610 - RNA, 19 nt, Artificial Sequence
  Description of Artificial Sequence: Synthetic oligonucleotide
agucguagucugagccuug

SEQ ID NO: 1871611 - RNA, 19 nt, Artificial Sequence
  Description of Artificial Sequence: Synthetic oligonucleotide
ccggggacgugguaccucc

SEQ ID NO: 1871612 - RNA, 19 nt, Artificial Sequence
  Description of Artificial Sequence: Synthetic oligonucleotide
cucacucagacaggguaaa

SEQ ID NO: 1871613 - RNA, 19 nt, Artificial Sequence
  Description of Artificial Sequence: Synthetic oligonucleotide
ugcugagaucagccugguu

SEQ ID NO: 1871614 - RNA, 19 nt, Artificial Sequence
  Description of Artificial Sequence: Synthetic oligonucleotide
ccccaacuccgcuccaucc

SEQ ID NO: 1871615 - RNA, 19 nt, Artificial Sequence
  Description of Artificial Sequence: Synthetic oligonucleotide
aggcggcgguaguucuggg

SEQ ID NO: 1871616 - RNA, 19 nt, Artificial Sequence
  Description of Artificial Sequence: Synthetic oligonucleotide
agccaggccugcaagcaau

SEQ ID NO: 1871617 - RNA, 19 nt, Artificial Sequence
  Description of Artificial Sequence: Synthetic oligonucleotide
cuguccgcauccccauuca

SEQ ID NO: 1871618 - RNA, 19 nt, Artificial Sequence
  Description of Artificial Sequence: Synthetic oligonucleotide
gugcgccugaagguagccc

SEQ ID NO: 1871619 - RNA, 19 nt, Artificial Sequence
  Description of Artificial Sequence: Synthetic oligonucleotide
gucgcuggcugcaggugac

SEQ ID NO: 1871620 - RNA, 19 nt, Artificial Sequence
  Description of Artificial Sequence: Synthetic oligonucleotide
ccuaccugcaccuccugaa

SEQ ID NO: 1871621 - RNA, 19 nt, Artificial Sequence
  Description of Artificial Sequence: Synthetic oligonucleotide
auacgugcuuugacuugcu

SEQ ID NO: 1871622 - RNA, 19 nt, Artificial Sequence
  Description of Artificial Sequence: Synthetic oligonucleotide
guuauggggcucugggguu

SEQ ID NO: 1871623 - RNA, 19 nt, Artificial Sequence
  Description of Artificial Sequence: Synthetic oligonucleotide
ccucggagcaugaaggugu

SEQ ID NO: 1871624 - RNA, 19 nt, Artificial Sequence
  Description of Artificial Sequence: Synthetic oligonucleotide
aggucgcuggcugcaggug

SEQ ID NO: 1871625 - RNA, 19 nt, Artificial Sequence
  Description of Artificial Sequence: Synthetic oligonucleotide
ccuggcgaggugcguaaag

SEQ ID NO: 1871626 - RNA, 19 nt, Artificial Sequence
  Description of Artificial Sequence: Synthetic oligonucleotide
gguaguucugggcaauguu

SEQ ID NO: 1871627 - RNA, 19 nt, Artificial Sequence
  Description of Artificial Sequence: Synthetic oligonucleotide
uggaggcaguccccacuuu

SEQ ID NO: 1871628 - RNA, 19 nt, Artificial Sequence
  Description of Artificial Sequence: Synthetic oligonucleotide
caacuccgcuccauccaga

SEQ ID NO: 1871629 - RNA, 19 nt, Artificial Sequence
  Description of Artificial Sequence: Synthetic oligonucleotide
agacauccggggacguggu

SEQ ID NO: 1871630 - RNA, 19 nt, Artificial Sequence
  Description of Artificial Sequence: Synthetic oligonucleotide
gccagcauucaagggaaga

SEQ ID NO: 1871631 - RNA, 19 nt, Artificial Sequence
  Description of Artificial Sequence: Synthetic oligonucleotide
cauggcugugggcagcccu

SEQ ID NO: 1871632 - RNA, 19 nt, Artificial Sequence
  Description of Artificial Sequence: Synthetic oligonucleotide
ggccacgccaggaggugcg

SEQ ID NO: 1871633 - RNA, 19 nt, Artificial Sequence
  Description of Artificial Sequence: Synthetic oligonucleotide
cagagagucccggcugcuc

SEQ ID NO: 1871634 - RNA, 19 nt, Artificial Sequence
  Description of Artificial Sequence: Synthetic oligonucleotide
cuaugguggcaggagacau

SEQ ID NO: 1871635 - RNA, 19 nt, Artificial Sequence
  Description of Artificial Sequence: Synthetic oligonucleotide
ggcguugguagagggugug

SEQ ID NO: 1871636 - RNA, 19 nt, Artificial Sequence
  Description of Artificial Sequence: Synthetic oligonucleotide
ggcgaggugcguaaaggaa

SEQ ID NO: 1871637 - RNA, 19 nt, Artificial Sequence
  Description of Artificial Sequence: Synthetic oligonucleotide
gaugguguccucggagcau

SEQ ID NO: 1871638 - RNA, 19 nt, Artificial Sequence
  Description of Artificial Sequence: Synthetic oligonucleotide
gacaccuccucaccauguu

SEQ ID NO: 1871639 - RNA, 19 nt, Artificial Sequence
  Description of Artificial Sequence: Synthetic oligonucleotide
cccaugagaugcugagauc

SEQ ID NO: 1871640 - RNA, 19 nt, Artificial Sequence
  Description of Artificial Sequence: Synthetic oligonucleotide
guccuggcgaggugcguaa

SEQ ID NO: 1871641 - RNA, 19 nt, Artificial Sequence
  Description of Artificial Sequence: Synthetic oligonucleotide
guccgcauccccauucacu

SEQ ID NO: 1871642 - RNA, 19 nt, Artificial Sequence
  Description of Artificial Sequence: Synthetic oligonucleotide
ccccacuuucucuggcccc

SEQ ID NO: 1871643 - RNA, 19 nt, Artificial Sequence
  Description of Artificial Sequence: Synthetic oligonucleotide
aggagacauccggggacgu

SEQ ID NO: 1871644 - RNA, 19 nt, Artificial Sequence
  Description of Artificial Sequence: Synthetic oligonucleotide
agccagcauucaagggaag

SEQ ID NO: 1871645 - RNA, 19 nt, Artificial Sequence
  Description of Artificial Sequence: Synthetic oligonucleotide
ggagacauccggggacgug

SEQ ID NO: 1871646 - RNA, 19 nt, Artificial Sequence
  Description of Artificial Sequence: Synthetic oligonucleotide
ucgagggaugguggaugau

SEQ ID NO: 1871647 - RNA, 19 nt, Artificial Sequence
  Description of Artificial Sequence: Synthetic oligonucleotide
ggugacaccuccucaccau

SEQ ID NO: 1871648 - RNA, 19 nt, Artificial Sequence
  Description of Artificial Sequence: Synthetic oligonucleotide
ucgcuggcugcaggugaca

SEQ ID NO: 1871649 - RNA, 19 nt, Artificial Sequence
  Description of Artificial Sequence: Synthetic oligonucleotide
ggugcgccugaagguagcc

SEQ ID NO: 1871650 - RNA, 19 nt, Artificial Sequence
  Description of Artificial Sequence: Synthetic oligonucleotide
gccacuggcaacagaaagu

SEQ ID NO: 1871651 - RNA, 19 nt, Artificial Sequence
  Description of Artificial Sequence: Synthetic oligonucleotide
ggaccccaggccagguggg

SEQ ID NO: 1871652 - RNA, 19 nt, Artificial Sequence
  Description of Artificial Sequence: Synthetic oligonucleotide
ggaggugcgccugaaggua

SEQ ID NO: 1871653 - RNA, 19 nt, Artificial Sequence
  Description of Artificial Sequence: Synthetic oligonucleotide
ggggacgugguaccuccuc

SEQ ID NO: 1871654 - RNA, 19 nt, Artificial Sequence
  Description of Artificial Sequence: Synthetic oligonucleotide
gguggggcccguuguggca

SEQ ID NO: 1871655 - RNA, 19 nt, Artificial Sequence
  Description of Artificial Sequence: Synthetic oligonucleotide
ggucuggaucaggcggcgg

SEQ ID NO: 1871656 - RNA, 19 nt, Artificial Sequence
  Description of Artificial Sequence: Synthetic oligonucleotide
auggggcucugggguuugg

SEQ ID NO: 1871657 - RNA, 19 nt, Artificial Sequence
  Description of Artificial Sequence: Synthetic oligonucleotide
caccauguuuggcugcuau

SEQ ID NO: 1871658 - RNA, 19 nt, Artificial Sequence
  Description of Artificial Sequence: Synthetic oligonucleotide
gcccagcccuugguuaugg

SEQ ID NO: 1871659 - RNA, 19 nt, Artificial Sequence
  Description of Artificial Sequence: Synthetic oligonucleotide
gugcguaaaggaagucacu

SEQ ID NO: 1871660 - RNA, 19 nt, Artificial Sequence
  Description of Artificial Sequence: Synthetic oligonucleotide
gggacgugguaccuccucu

SEQ ID NO: 1871661 - RNA, 19 nt, Artificial Sequence
  Description of Artificial Sequence: Synthetic oligonucleotide
gccuacucucuggacuccc

SEQ ID NO: 1871662 - RNA, 19 nt, Artificial Sequence
  Description of Artificial Sequence: Synthetic oligonucleotide
cacgccaggaggugcgccu

SEQ ID NO: 1871663 - RNA, 19 nt, Artificial Sequence
  Description of Artificial Sequence: Synthetic oligonucleotide
auccggggacgugguaccu

SEQ ID NO: 1871664 - RNA, 19 nt, Artificial Sequence
  Description of Artificial Sequence: Synthetic oligonucleotide
uccuggcgaggugcguaaa

SEQ ID NO: 1871665 - RNA, 19 nt, Artificial Sequence
  Description of Artificial Sequence: Synthetic oligonucleotide
ccucgcuguccgcaucccc

SEQ ID NO: 1871666 - RNA, 19 nt, Artificial Sequence
  Description of Artificial Sequence: Synthetic oligonucleotide
agccccaacuccgcuccau

SEQ ID NO: 1871667 - RNA, 19 nt, Artificial Sequence
  Description of Artificial Sequence: Synthetic oligonucleotide
gcguugguagagggugugc

SEQ ID NO: 1871668 - RNA, 19 nt, Artificial Sequence
  Description of Artificial Sequence: Synthetic oligonucleotide
gugugguagucugcgugcu

SEQ ID NO: 1871669 - RNA, 19 nt, Artificial Sequence
  Description of Artificial Sequence: Synthetic oligonucleotide
agguagccccauggcugug

SEQ ID NO: 1871670 - RNA, 19 nt, Artificial Sequence
  Description of Artificial Sequence: Synthetic oligonucleotide
gcgguaguucugggcaaug

SEQ ID NO: 1871671 - RNA, 19 nt, Artificial Sequence
  Description of Artificial Sequence: Synthetic oligonucleotide
ggccuacucucuggacucc

SEQ ID NO: 1871672 - RNA, 19 nt, Artificial Sequence
  Description of Artificial Sequence: Synthetic oligonucleotide
cagucguagucugagccuu

SEQ ID NO: 1871673 - RNA, 19 nt, Artificial Sequence
  Description of Artificial Sequence: Synthetic oligonucleotide
gagucccggcugcucuucu

SEQ ID NO: 1871674 - RNA, 19 nt, Artificial Sequence
  Description of Artificial Sequence: Synthetic oligonucleotide
cccguuguggcaggcccag

SEQ ID NO: 1871675 - RNA, 19 nt, Artificial Sequence
  Description of Artificial Sequence: Synthetic oligonucleotide
ccagaacaaggccuacucu

SEQ ID NO: 1871676 - RNA, 19 nt, Artificial Sequence
  Description of Artificial Sequence: Synthetic oligonucleotide
gggaagagccgggcacaug

SEQ ID NO: 1871677 - RNA, 19 nt, Artificial Sequence
  Description of Artificial Sequence: Synthetic oligonucleotide
gcaguugaggcugggcgcu

SEQ ID NO: 1871678 - RNA, 19 nt, Artificial Sequence
  Description of Artificial Sequence: Synthetic oligonucleotide
ggugugcggcgggauggug

SEQ ID NO: 1871679 - RNA, 19 nt, Artificial Sequence
  Description of Artificial Sequence: Synthetic oligonucleotide
gugggcguugguagagggu

SEQ ID NO: 1871680 - RNA, 19 nt, Artificial Sequence
  Description of Artificial Sequence: Synthetic oligonucleotide
gacucccugugggguggga

SEQ ID NO: 1871681 - RNA, 19 nt, Artificial Sequence
  Description of Artificial Sequence: Synthetic oligonucleotide
cgaggugcguaaaggaagu

SEQ ID NO: 1871682 - RNA, 19 nt, Artificial Sequence
  Description of Artificial Sequence: Synthetic oligonucleotide
ggacucccugugggguggg

SEQ ID NO: 1871683 - RNA, 19 nt, Artificial Sequence
  Description of Artificial Sequence: Synthetic oligonucleotide
gcgggaugguggccacgcc

SEQ ID NO: 1871684 - RNA, 19 nt, Artificial Sequence
  Description of Artificial Sequence: Synthetic oligonucleotide
ggggcccucgcuguccgca

SEQ ID NO: 1871685 - RNA, 19 nt, Artificial Sequence
  Description of Artificial Sequence: Synthetic oligonucleotide
cccuaccugcaccuccuga

SEQ ID NO: 1871686 - RNA, 19 nt, Artificial Sequence
  Description of Artificial Sequence: Synthetic oligonucleotide
gccagguggggcccguugu

SEQ ID NO: 1871687 - RNA, 19 nt, Artificial Sequence
  Description of Artificial Sequence: Synthetic oligonucleotide
gguguccucggagcaugaa

SEQ ID NO: 1871688 - RNA, 19 nt, Artificial Sequence
  Description of Artificial Sequence: Synthetic oligonucleotide
ggccaggucgcuggcugca

SEQ ID NO: 1871689 - RNA, 19 nt, Artificial Sequence
  Description of Artificial Sequence: Synthetic oligonucleotide
gcccuaccugcaccuccug

SEQ ID NO: 1871690 - RNA, 19 nt, Artificial Sequence
  Description of Artificial Sequence: Synthetic oligonucleotide
gugcggcgggaugguggcc

SEQ ID NO: 1871691 - RNA, 19 nt, Artificial Sequence
  Description of Artificial Sequence: Synthetic oligonucleotide
ggccugcaagcaaugacuu

SEQ ID NO: 1871692 - RNA, 19 nt, Artificial Sequence
  Description of Artificial Sequence: Synthetic oligonucleotide
ccgggcacaugggccuugg

SEQ ID NO: 1871693 - RNA, 19 nt, Artificial Sequence
  Description of Artificial Sequence: Synthetic oligonucleotide
cggagcaugaagguguggu

SEQ ID NO: 1871694 - RNA, 19 nt, Artificial Sequence
  Description of Artificial Sequence: Synthetic oligonucleotide
gggaggggaugguguccuc

SEQ ID NO: 1871695 - RNA, 19 nt, Artificial Sequence
  Description of Artificial Sequence: Synthetic oligonucleotide
ggaucaggcggcgguaguu

SEQ ID NO: 1871696 - RNA, 19 nt, Artificial Sequence
  Description of Artificial Sequence: Synthetic oligonucleotide
ccuacucucuggacucccu

SEQ ID NO: 1871697 - RNA, 19 nt, Artificial Sequence
  Description of Artificial Sequence: Synthetic oligonucleotide
ccaggccagguggggcccg

SEQ ID NO: 1871698 - RNA, 19 nt, Artificial Sequence
  Description of Artificial Sequence: Synthetic oligonucleotide
cgcccuacacauacgugcu

SEQ ID NO: 1871699 - RNA, 19 nt, Artificial Sequence
  Description of Artificial Sequence: Synthetic oligonucleotide
gcccuugguuauggggcuc

SEQ ID NO: 1871700 - RNA, 19 nt, Artificial Sequence
  Description of Artificial Sequence: Synthetic oligonucleotide
gcccguuguggcaggccca

SEQ ID NO: 1871701 - RNA, 19 nt, Artificial Sequence
  Description of Artificial Sequence: Synthetic oligonucleotide
gccugcaagcaaugacuuu

SEQ ID NO: 1871702 - RNA, 19 nt, Artificial Sequence
  Description of Artificial Sequence: Synthetic oligonucleotide
cccucgcuguccgcauccc

SEQ ID NO: 1871703 - RNA, 19 nt, Artificial Sequence
  Description of Artificial Sequence: Synthetic oligonucleotide
cccuacacauacgugcuuu

SEQ ID NO: 1871704 - RNA, 19 nt, Artificial Sequence
  Description of Artificial Sequence: Synthetic oligonucleotide
ggggcccguuguggcaggc

SEQ ID NO: 1871705 - RNA, 19 nt, Artificial Sequence
  Description of Artificial Sequence: Synthetic oligonucleotide
ggcgguaguucugggcaau

SEQ ID NO: 1871706 - RNA, 19 nt, Artificial Sequence
  Description of Artificial Sequence: Synthetic oligonucleotide
gccgggcacaugggccuug

SEQ ID NO: 1871707 - RNA, 19 nt, Artificial Sequence
  Description of Artificial Sequence: Synthetic oligonucleotide
gggcguugguagagggugu

SEQ ID NO: 1871708 - RNA, 19 nt, Artificial Sequence
  Description of Artificial Sequence: Synthetic oligonucleotide
gccaggaggugcgccugaa

SEQ ID NO: 1871709 - RNA, 19 nt, Artificial Sequence
  Description of Artificial Sequence: Synthetic oligonucleotide
cuguggggugggagaguuu

SEQ ID NO: 1871710 - RNA, 19 nt, Artificial Sequence
  Description of Artificial Sequence: Synthetic oligonucleotide
ccguuguggcaggcccagc

SEQ ID NO: 1871711 - RNA, 19 nt, Artificial Sequence
  Description of Artificial Sequence: Synthetic oligonucleotide
cuguccuggcgaggugcgu

SEQ ID NO: 1871712 - RNA, 19 nt, Artificial Sequence
  Description of Artificial Sequence: Synthetic oligonucleotide
gcccuacacauacgugcuu

SEQ ID NO: 1871713 - RNA, 19 nt, Artificial Sequence
  Description of Artificial Sequence: Synthetic oligonucleotide
guccacgggucagcaccau

SEQ ID NO: 1871714 - RNA, 19 nt, Artificial Sequence
  Description of Artificial Sequence: Synthetic oligonucleotide
cggcgguaguucugggcaa

SEQ ID NO: 1871715 - RNA, 19 nt, Artificial Sequence
  Description of Artificial Sequence: Synthetic oligonucleotide
gggugugcggcgggauggu

SEQ ID NO: 1871716 - RNA, 19 nt, Artificial Sequence
  Description of Artificial Sequence: Synthetic oligonucleotide
cgguaguucugggcaaugu

SEQ ID NO: 1871717 - RNA, 19 nt, Artificial Sequence
  Description of Artificial Sequence: Synthetic oligonucleotide
cggcgggaugguggccacg

SEQ ID NO: 1871718 - RNA, 19 nt, Artificial Sequence
  Description of Artificial Sequence: Synthetic oligonucleotide
cccuguggggugggagagu

SEQ ID NO: 1871719 - RNA, 19 nt, Artificial Sequence
  Description of Artificial Sequence: Synthetic oligonucleotide
cggggacgugguaccuccu

SEQ ID NO: 1871720 - RNA, 19 nt, Artificial Sequence
  Description of Artificial Sequence: Synthetic oligonucleotide
cgcuguccgcauccccauu

SEQ ID NO: 1871721 - RNA, 19 nt, Artificial Sequence
  Description of Artificial Sequence: Synthetic oligonucleotide
aggugaguggaucaggagc

SEQ ID NO: 1871722 - RNA, 19 nt, Artificial Sequence
  Description of Artificial Sequence: Synthetic oligonucleotide
acuuguguguuccugcccc

SEQ ID NO: 1871723 - RNA, 19 nt, Artificial Sequence
  Description of Artificial Sequence: Synthetic oligonucleotide
uggaucaggagcugcaacg

SEQ ID NO: 1871724 - RNA, 19 nt, Artificial Sequence
  Description of Artificial Sequence: Synthetic oligonucleotide
uaaggagaggcuuuccaag

SEQ ID NO: 1871725 - RNA, 19 nt, Artificial Sequence
  Description of Artificial Sequence: Synthetic oligonucleotide
uguacuuguguguuccugc

SEQ ID NO: 1871726 - RNA, 19 nt, Artificial Sequence
  Description of Artificial Sequence: Synthetic oligonucleotide
gagacgagagacugggcgg

SEQ ID NO: 1871727 - RNA, 19 nt, Artificial Sequence
  Description of Artificial Sequence: Synthetic oligonucleotide
acacaugggauggugaggg

SEQ ID NO: 1871728 - RNA, 19 nt, Artificial Sequence
  Description of Artificial Sequence: Synthetic oligonucleotide
ggagacgagagacugggcg

SEQ ID NO: 1871729 - RNA, 19 nt, Artificial Sequence
  Description of Artificial Sequence: Synthetic oligonucleotide
gagaggagggaaucugagg

SEQ ID NO: 1871730 - RNA, 19 nt, Artificial Sequence
  Description of Artificial Sequence: Synthetic oligonucleotide
caaagugagggcuggcggg

SEQ ID NO: 1871731 - RNA, 19 nt, Artificial Sequence
  Description of Artificial Sequence: Synthetic oligonucleotide
ugucuggagagauggagac

SEQ ID NO: 1871732 - RNA, 19 nt, Artificial Sequence
  Description of Artificial Sequence: Synthetic oligonucleotide
caaggaccgggacacaugg

SEQ ID NO: 1871733 - RNA, 19 nt, Artificial Sequence
  Description of Artificial Sequence: Synthetic oligonucleotide
ucaggugaguggaucagga

SEQ ID NO: 1871734 - RNA, 19 nt, Artificial Sequence
  Description of Artificial Sequence: Synthetic oligonucleotide
gacggaggggcccuggacg

SEQ ID NO: 1871735 - RNA, 19 nt, Artificial Sequence
  Description of Artificial Sequence: Synthetic oligonucleotide
auggagacgagagacuggg

SEQ ID NO: 1871736 - RNA, 19 nt, Artificial Sequence
  Description of Artificial Sequence: Synthetic oligonucleotide
aaagugagggcuggcgggg

SEQ ID NO: 1871737 - RNA, 19 nt, Artificial Sequence
  Description of Artificial Sequence: Synthetic oligonucleotide
ggaagaacaaggaaagcag

SEQ ID NO: 1871738 - RNA, 19 nt, Artificial Sequence
  Description of Artificial Sequence: Synthetic oligonucleotide
aaaacagaagcgcgaccgu

SEQ ID NO: 1871739 - RNA, 19 nt, Artificial Sequence
  Description of Artificial Sequence: Synthetic oligonucleotide
ugcaacgacggcagugagg

SEQ ID NO: 1871740 - RNA, 19 nt, Artificial Sequence
  Description of Artificial Sequence: Synthetic oligonucleotide
uucagcaguucucuuccgc

SEQ ID NO: 1871741 - RNA, 19 nt, Artificial Sequence
  Description of Artificial Sequence: Synthetic oligonucleotide
uuggcgcucagcucggccg

SEQ ID NO: 1871742 - RNA, 19 nt, Artificial Sequence
  Description of Artificial Sequence: Synthetic oligonucleotide
agcuccguucuccuccucc

SEQ ID NO: 1871743 - RNA, 19 nt, Artificial Sequence
  Description of Artificial Sequence: Synthetic oligonucleotide
agugucuggagagauggag

SEQ ID NO: 1871744 - RNA, 19 nt, Artificial Sequence
  Description of Artificial Sequence: Synthetic oligonucleotide
gcaacgacggcagugaggg

SEQ ID NO: 1871745 - RNA, 19 nt, Artificial Sequence
  Description of Artificial Sequence: Synthetic oligonucleotide
uccccaagcccacuggcag

SEQ ID NO: 1871746 - RNA, 19 nt, Artificial Sequence
  Description of Artificial Sequence: Synthetic oligonucleotide
uucuccgacauggugccgg

SEQ ID NO: 1871747 - RNA, 19 nt, Artificial Sequence
  Description of Artificial Sequence: Synthetic oligonucleotide
ucugcaagaggcggcagag

SEQ ID NO: 1871748 - RNA, 19 nt, Artificial Sequence
  Description of Artificial Sequence: Synthetic oligonucleotide
acgcucuucuccgacaugg

SEQ ID NO: 1871749 - RNA, 19 nt, Artificial Sequence
  Description of Artificial Sequence: Synthetic oligonucleotide
agauggagacgagagacug

SEQ ID NO: 1871750 - RNA, 19 nt, Artificial Sequence
  Description of Artificial Sequence: Synthetic oligonucleotide
acagaagcgcgaccguuuc

SEQ ID NO: 1871751 - RNA, 19 nt, Artificial Sequence
  Description of Artificial Sequence: Synthetic oligonucleotide
ucuuccguucuuuccggcc

SEQ ID NO: 1871752 - RNA, 19 nt, Artificial Sequence
  Description of Artificial Sequence: Synthetic oligonucleotide
augccgacgccccauuuuc

SEQ ID NO: 1871753 - RNA, 19 nt, Artificial Sequence
  Description of Artificial Sequence: Synthetic oligonucleotide
gaacuuggcgcgguggcgg

SEQ ID NO: 1871754 - RNA, 19 nt, Artificial Sequence
  Description of Artificial Sequence: Synthetic oligonucleotide
aggaccgggacacauggga

SEQ ID NO: 1871755 - RNA, 19 nt, Artificial Sequence
  Description of Artificial Sequence: Synthetic oligonucleotide
agacccgcagggcugcggc

SEQ ID NO: 1871756 - RNA, 19 nt, Artificial Sequence
  Description of Artificial Sequence: Synthetic oligonucleotide
gagaggcuuuccaaggacc

SEQ ID NO: 1871757 - RNA, 19 nt, Artificial Sequence
  Description of Artificial Sequence: Synthetic oligonucleotide
agggcggaggagcaguguc

SEQ ID NO: 1871758 - RNA, 19 nt, Artificial Sequence
  Description of Artificial Sequence: Synthetic oligonucleotide
cacagggccuucauccucc

SEQ ID NO: 1871759 - RNA, 19 nt, Artificial Sequence
  Description of Artificial Sequence: Synthetic oligonucleotide
gcaaagugagggcuggcgg

SEQ ID NO: 1871760 - RNA, 19 nt, Artificial Sequence
  Description of Artificial Sequence: Synthetic oligonucleotide
ugggcggaaggacaagggu

SEQ ID NO: 1871761 - RNA, 19 nt, Artificial Sequence
  Description of Artificial Sequence: Synthetic oligonucleotide
gagggaaucugagggagac

SEQ ID NO: 1871762 - RNA, 19 nt, Artificial Sequence
  Description of Artificial Sequence: Synthetic oligonucleotide
gaccgggacacaugggaug

SEQ ID NO: 1871763 - RNA, 19 nt, Artificial Sequence
  Description of Artificial Sequence: Synthetic oligonucleotide
guaaggagaggcuuuccaa

SEQ ID NO: 1871764 - RNA, 19 nt, Artificial Sequence
  Description of Artificial Sequence: Synthetic oligonucleotide
accgggacacaugggaugg

SEQ ID NO: 1871765 - RNA, 19 nt, Artificial Sequence
  Description of Artificial Sequence: Synthetic oligonucleotide
agcucaggugaguggauca

SEQ ID NO: 1871766 - RNA, 19 nt, Artificial Sequence
  Description of Artificial Sequence: Synthetic oligonucleotide
ugaguggaucaggagcugc

SEQ ID NO: 1871767 - RNA, 19 nt, Artificial Sequence
  Description of Artificial Sequence: Synthetic oligonucleotide
cugggcggaaggacaaggg

SEQ ID NO: 1871768 - RNA, 19 nt, Artificial Sequence
  Description of Artificial Sequence: Synthetic oligonucleotide
acggaggggcccuggacgg

SEQ ID NO: 1871769 - RNA, 19 nt, Artificial Sequence
  Description of Artificial Sequence: Synthetic oligonucleotide
agacggaggggcccuggac

SEQ ID NO: 1871770 - RNA, 19 nt, Artificial Sequence
  Description of Artificial Sequence: Synthetic oligonucleotide
aggacaagggucacagcuc

SEQ ID NO: 1871771 - RNA, 19 nt, Artificial Sequence
  Description of Artificial Sequence: Synthetic oligonucleotide
gaucaggagcugcaacgac

SEQ ID NO: 1871772 - RNA, 19 nt, Artificial Sequence
  Description of Artificial Sequence: Synthetic oligonucleotide
cuccacuacuucuuucuuc

SEQ ID NO: 1871773 - RNA, 19 nt, Artificial Sequence
  Description of Artificial Sequence: Synthetic oligonucleotide
uggagagauggagacgaga

SEQ ID NO: 1871774 - RNA, 19 nt, Artificial Sequence
  Description of Artificial Sequence: Synthetic oligonucleotide
aggagaggcuuuccaagga

SEQ ID NO: 1871775 - RNA, 19 nt, Artificial Sequence
  Description of Artificial Sequence: Synthetic oligonucleotide
caagggucacagcucuggg

SEQ ID NO: 1871776 - RNA, 19 nt, Artificial Sequence
  Description of Artificial Sequence: Synthetic oligonucleotide
ucuccgacauggugccggg

SEQ ID NO: 1871777 - RNA, 19 nt, Artificial Sequence
  Description of Artificial Sequence: Synthetic oligonucleotide
ucggcaagcuggcucucug

SEQ ID NO: 1871778 - RNA, 19 nt, Artificial Sequence
  Description of Artificial Sequence: Synthetic oligonucleotide
aaacagaagcgcgaccguu

SEQ ID NO: 1871779 - RNA, 19 nt, Artificial Sequence
  Description of Artificial Sequence: Synthetic oligonucleotide
gaggcuuuccaaggaccgg

SEQ ID NO: 1871780 - RNA, 19 nt, Artificial Sequence
  Description of Artificial Sequence: Synthetic oligonucleotide
ggcgcugucugagaggagg

SEQ ID NO: 1871781 - RNA, 19 nt, Artificial Sequence
  Description of Artificial Sequence: Synthetic oligonucleotide
gaaggacaagggucacagc

SEQ ID NO: 1871782 - RNA, 19 nt, Artificial Sequence
  Description of Artificial Sequence: Synthetic oligonucleotide
ggucgcucggucucgcucg

SEQ ID NO: 1871783 - RNA, 19 nt, Artificial Sequence
  Description of Artificial Sequence: Synthetic oligonucleotide
cuucagcaguucucuuccg

SEQ ID NO: 1871784 - RNA, 19 nt, Artificial Sequence
  Description of Artificial Sequence: Synthetic oligonucleotide
agcgcgaccguuucuuuau

SEQ ID NO: 1871785 - RNA, 19 nt, Artificial Sequence
  Description of Artificial Sequence: Synthetic oligonucleotide
uucuuccguucuuuccggc

SEQ ID NO: 1871786 - RNA, 19 nt, Artificial Sequence
  Description of Artificial Sequence: Synthetic oligonucleotide
acggcagugagggcggagg

SEQ ID NO: 1871787 - RNA, 19 nt, Artificial Sequence
  Description of Artificial Sequence: Synthetic oligonucleotide
caggugaguggaucaggag

SEQ ID NO: 1871788 - RNA, 19 nt, Artificial Sequence
  Description of Artificial Sequence: Synthetic oligonucleotide
uggggugccgaggguaagg

SEQ ID NO: 1871789 - RNA, 19 nt, Artificial Sequence
  Description of Artificial Sequence: Synthetic oligonucleotide
cuuggccccaaccccggcc

SEQ ID NO: 1871790 - RNA, 19 nt, Artificial Sequence
  Description of Artificial Sequence: Synthetic oligonucleotide
ggagcugcaacgacggcag

SEQ ID NO: 1871791 - RNA, 19 nt, Artificial Sequence
  Description of Artificial Sequence: Synthetic oligonucleotide
aacagaagcgcgaccguuu

SEQ ID NO: 1871792 - RNA, 19 nt, Artificial Sequence
  Description of Artificial Sequence: Synthetic oligonucleotide
gagcgggagggugaugcgg

SEQ ID NO: 1871793 - RNA, 19 nt, Artificial Sequence
  Description of Artificial Sequence: Synthetic oligonucleotide
ggucccggggccgagacgg

SEQ ID NO: 1871794 - RNA, 19 nt, Artificial Sequence
  Description of Artificial Sequence: Synthetic oligonucleotide
ggcaaagugagggcuggcg

SEQ ID NO: 1871795 - RNA, 19 nt, Artificial Sequence
  Description of Artificial Sequence: Synthetic oligonucleotide
gcugcggccguccggaggg

SEQ ID NO: 1871796 - RNA, 19 nt, Artificial Sequence
  Description of Artificial Sequence: Synthetic oligonucleotide
ucucuuccgcacagggccu

SEQ ID NO: 1871797 - RNA, 19 nt, Artificial Sequence
  Description of Artificial Sequence: Synthetic oligonucleotide
uccacgcucuucuccgaca

SEQ ID NO: 1871798 - RNA, 19 nt, Artificial Sequence
  Description of Artificial Sequence: Synthetic oligonucleotide
uucuuuccggccagccuuc

SEQ ID NO: 1871799 - RNA, 19 nt, Artificial Sequence
  Description of Artificial Sequence: Synthetic oligonucleotide
agcgggagggugaugcggg

SEQ ID NO: 1871800 - RNA, 19 nt, Artificial Sequence
  Description of Artificial Sequence: Synthetic oligonucleotide
aagcgcgaccguuucuuua

SEQ ID NO: 1871801 - RNA, 19 nt, Artificial Sequence
  Description of Artificial Sequence: Synthetic oligonucleotide
gucuggagagauggagacg

SEQ ID NO: 1871802 - RNA, 19 nt, Artificial Sequence
  Description of Artificial Sequence: Synthetic oligonucleotide
cuuccguucuuuccggcca

SEQ ID NO: 1871803 - RNA, 19 nt, Artificial Sequence
  Description of Artificial Sequence: Synthetic oligonucleotide
cuguacuuguguguuccug

SEQ ID NO: 1871804 - RNA, 19 nt, Artificial Sequence
  Description of Artificial Sequence: Synthetic oligonucleotide
gaccguuucuuuauuaaau

SEQ ID NO: 1871805 - RNA, 19 nt, Artificial Sequence
  Description of Artificial Sequence: Synthetic oligonucleotide
agcugcaacgacggcagug

SEQ ID NO: 1871806 - RNA, 19 nt, Artificial Sequence
  Description of Artificial Sequence: Synthetic oligonucleotide
agccgagacccgcagggcu

SEQ ID NO: 1871807 - RNA, 19 nt, Artificial Sequence
  Description of Artificial Sequence: Synthetic oligonucleotide
cacuggcaggggcucaugc

SEQ ID NO: 1871808 - RNA, 19 nt, Artificial Sequence
  Description of Artificial Sequence: Synthetic oligonucleotide
ugaugcgggcgguggccgg

SEQ ID NO: 1871809 - RNA, 19 nt, Artificial Sequence
  Description of Artificial Sequence: Synthetic oligonucleotide
agaagcgcgaccguuucuu

SEQ ID NO: 1871810 - RNA, 19 nt, Artificial Sequence
  Description of Artificial Sequence: Synthetic oligonucleotide
uggcgcucagcucggccgc

SEQ ID NO: 1871811 - RNA, 19 nt, Artificial Sequence
  Description of Artificial Sequence: Synthetic oligonucleotide
cauccucagcaguuucuuc

SEQ ID NO: 1871812 - RNA, 19 nt, Artificial Sequence
  Description of Artificial Sequence: Synthetic oligonucleotide
ugggucccgagccgagacc

SEQ ID NO: 1871813 - RNA, 19 nt, Artificial Sequence
  Description of Artificial Sequence: Synthetic oligonucleotide
agacgagagacugggcgga

SEQ ID NO: 1871814 - RNA, 19 nt, Artificial Sequence
  Description of Artificial Sequence: Synthetic oligonucleotide
gaguggaucaggagcugca

SEQ ID NO: 1871815 - RNA, 19 nt, Artificial Sequence
  Description of Artificial Sequence: Synthetic oligonucleotide
cugagggagacccagggau

SEQ ID NO: 1871816 - RNA, 19 nt, Artificial Sequence
  Description of Artificial Sequence: Synthetic oligonucleotide
cucggucucgcucgccgcc

SEQ ID NO: 1871817 - RNA, 19 nt, Artificial Sequence
  Description of Artificial Sequence: Synthetic oligonucleotide
uccggucgcggucgcucgg

SEQ ID NO: 1871818 - RNA, 19 nt, Artificial Sequence
  Description of Artificial Sequence: Synthetic oligonucleotide
cuggagagauggagacgag

SEQ ID NO: 1871819 - RNA, 19 nt, Artificial Sequence
  Description of Artificial Sequence: Synthetic oligonucleotide
auccuccuccuccuccucu

SEQ ID NO: 1871820 - RNA, 19 nt, Artificial Sequence
  Description of Artificial Sequence: Synthetic oligonucleotide
gcggccggaacuuggcgcg

SEQ ID NO: 1871821 - RNA, 19 nt, Artificial Sequence
  Description of Artificial Sequence: Synthetic oligonucleotide
aggaccugaggggccuccc

SEQ ID NO: 1871822 - RNA, 19 nt, Artificial Sequence
  Description of Artificial Sequence: Synthetic oligonucleotide
gugaugcgggcgguggccg

SEQ ID NO: 1871823 - RNA, 19 nt, Artificial Sequence
  Description of Artificial Sequence: Synthetic oligonucleotide
gccgaggguaaggagaggc

SEQ ID NO: 1871824 - RNA, 19 nt, Artificial Sequence
  Description of Artificial Sequence: Synthetic oligonucleotide
ugccgacgccccauuuucu

SEQ ID NO: 1871825 - RNA, 19 nt, Artificial Sequence
  Description of Artificial Sequence: Synthetic oligonucleotide
cuggcgcugucugagagga

SEQ ID NO: 1871826 - RNA, 19 nt, Artificial Sequence
  Description of Artificial Sequence: Synthetic oligonucleotide
ggaacuuggcgcgguggcg

SEQ ID NO: 1871827 - RNA, 19 nt, Artificial Sequence
  Description of Artificial Sequence: Synthetic oligonucleotide
cuccggucgcggucgcucg

SEQ ID NO: 1871828 - RNA, 19 nt, Artificial Sequence
  Description of Artificial Sequence: Synthetic oligonucleotide
gucgcggucgcucggucuc

SEQ ID NO: 1871829 - RNA, 19 nt, Artificial Sequence
  Description of Artificial Sequence: Synthetic oligonucleotide
aguggaucaggagcugcaa

SEQ ID NO: 1871830 - RNA, 19 nt, Artificial Sequence
  Description of Artificial Sequence: Synthetic oligonucleotide
cugcaacgacggcagugag

SEQ ID NO: 1871831 - RNA, 19 nt, Artificial Sequence
  Description of Artificial Sequence: Synthetic oligonucleotide
ggcggaaggacaaggguca

SEQ ID NO: 1871832 - RNA, 19 nt, Artificial Sequence
  Description of Artificial Sequence: Synthetic oligonucleotide
acgagagacugggcggaag

SEQ ID NO: 1871833 - RNA, 19 nt, Artificial Sequence
  Description of Artificial Sequence: Synthetic oligonucleotide
ggagacccagggaucaggc

SEQ ID NO: 1871834 - RNA, 19 nt, Artificial Sequence
  Description of Artificial Sequence: Synthetic oligonucleotide
caaccccggccccaccccg

SEQ ID NO: 1871835 - RNA, 19 nt, Artificial Sequence
  Description of Artificial Sequence: Synthetic oligonucleotide
cgagccgagacccgcaggg

SEQ ID NO: 1871836 - RNA, 19 nt, Artificial Sequence
  Description of Artificial Sequence: Synthetic oligonucleotide
cuccacgcucuucuccgac

SEQ ID NO: 1871837 - RNA, 19 nt, Artificial Sequence
  Description of Artificial Sequence: Synthetic oligonucleotide
gacggcggaggguggccgc

SEQ ID NO: 1871838 - RNA, 19 nt, Artificial Sequence
  Description of Artificial Sequence: Synthetic oligonucleotide
caguucucuuccgcacagg

SEQ ID NO: 1871839 - RNA, 19 nt, Artificial Sequence
  Description of Artificial Sequence: Synthetic oligonucleotide
gggagacccagggaucagg

SEQ ID NO: 1871840 - RNA, 19 nt, Artificial Sequence
  Description of Artificial Sequence: Synthetic oligonucleotide
ucaugccgacgccccauuu

SEQ ID NO: 1871841 - RNA, 19 nt, Artificial Sequence
  Description of Artificial Sequence: Synthetic oligonucleotide
gaugcgggcgguggccggc

SEQ ID NO: 1871842 - RNA, 19 nt, Artificial Sequence
  Description of Artificial Sequence: Synthetic oligonucleotide
uccuccuccuccuccucuu

SEQ ID NO: 1871843 - RNA, 19 nt, Artificial Sequence
  Description of Artificial Sequence: Synthetic oligonucleotide
uuccgcacagggccuucau

SEQ ID NO: 1871844 - RNA, 19 nt, Artificial Sequence
  Description of Artificial Sequence: Synthetic oligonucleotide
ggacaagggucacagcucu

SEQ ID NO: 1871845 - RNA, 19 nt, Artificial Sequence
  Description of Artificial Sequence: Synthetic oligonucleotide
ggaucaggagcugcaacga

SEQ ID NO: 1871846 - RNA, 19 nt, Artificial Sequence
  Description of Artificial Sequence: Synthetic oligonucleotide
ggaucaggcaggagaaaga

SEQ ID NO: 1871847 - RNA, 19 nt, Artificial Sequence
  Description of Artificial Sequence: Synthetic oligonucleotide
acggccgcucggcaagcug

SEQ ID NO: 1871848 - RNA, 19 nt, Artificial Sequence
  Description of Artificial Sequence: Synthetic oligonucleotide
gggcggaaggacaaggguc

SEQ ID NO: 1871849 - RNA, 19 nt, Artificial Sequence
  Description of Artificial Sequence: Synthetic oligonucleotide
gcgaccguuucuuuauuaa

SEQ ID NO: 1871850 - RNA, 19 nt, Artificial Sequence
  Description of Artificial Sequence: Synthetic oligonucleotide
gggucccgagccgagaccc

SEQ ID NO: 1871851 - RNA, 19 nt, Artificial Sequence
  Description of Artificial Sequence: Synthetic oligonucleotide
gggagcucaggugagugga

SEQ ID NO: 1871852 - RNA, 19 nt, Artificial Sequence
  Description of Artificial Sequence: Synthetic oligonucleotide
ugccgaggguaaggagagg

SEQ ID NO: 1871853 - RNA, 19 nt, Artificial Sequence
  Description of Artificial Sequence: Synthetic oligonucleotide
gcugcaacgacggcaguga

SEQ ID NO: 1871854 - RNA, 19 nt, Artificial Sequence
  Description of Artificial Sequence: Synthetic oligonucleotide
agcgacggccgcucggcaa

SEQ ID NO: 1871855 - RNA, 19 nt, Artificial Sequence
  Description of Artificial Sequence: Synthetic oligonucleotide
agacugggcggaaggacaa

SEQ ID NO: 1871856 - RNA, 19 nt, Artificial Sequence
  Description of Artificial Sequence: Synthetic oligonucleotide
auccccaagcccacuggca

SEQ ID NO: 1871857 - RNA, 19 nt, Artificial Sequence
  Description of Artificial Sequence: Synthetic oligonucleotide
gccuggcgcugucugagag

SEQ ID NO: 1871858 - RNA, 19 nt, Artificial Sequence
  Description of Artificial Sequence: Synthetic oligonucleotide
gccgacgccccauuuucug

SEQ ID NO: 1871859 - RNA, 19 nt, Artificial Sequence
  Description of Artificial Sequence: Synthetic oligonucleotide
ccuggcgcugucugagagg

SEQ ID NO: 1871860 - RNA, 19 nt, Artificial Sequence
  Description of Artificial Sequence: Synthetic oligonucleotide
uccggagggcgggcgggcg

SEQ ID NO: 1871861 - RNA, 19 nt, Artificial Sequence
  Description of Artificial Sequence: Synthetic oligonucleotide
gacggcagugagggcggag

SEQ ID NO: 1871862 - RNA, 19 nt, Artificial Sequence
  Description of Artificial Sequence: Synthetic oligonucleotide
cagggcugcggccguccgg

SEQ ID NO: 1871863 - RNA, 19 nt, Artificial Sequence
  Description of Artificial Sequence: Synthetic oligonucleotide
gagccgagacccgcagggc

SEQ ID NO: 1871864 - RNA, 19 nt, Artificial Sequence
  Description of Artificial Sequence: Synthetic oligonucleotide
uggcgcugucugagaggag

SEQ ID NO: 1871865 - RNA, 19 nt, Artificial Sequence
  Description of Artificial Sequence: Synthetic oligonucleotide
ccaaggaccgggacacaug

SEQ ID NO: 1871866 - RNA, 19 nt, Artificial Sequence
  Description of Artificial Sequence: Synthetic oligonucleotide
gcucaggugaguggaucag

SEQ ID NO: 1871867 - RNA, 19 nt, Artificial Sequence
  Description of Artificial Sequence: Synthetic oligonucleotide
gcuuuccaaggaccgggac

SEQ ID NO: 1871868 - RNA, 19 nt, Artificial Sequence
  Description of Artificial Sequence: Synthetic oligonucleotide
ggcagcgacggccgcucgg

SEQ ID NO: 1871869 - RNA, 19 nt, Artificial Sequence
  Description of Artificial Sequence: Synthetic oligonucleotide
acagggccuucauccuccu

SEQ ID NO: 1871870 - RNA, 19 nt, Artificial Sequence
  Description of Artificial Sequence: Synthetic oligonucleotide
gcgacggccgcucggcaag

SEQ ID NO: 1871871 - RNA, 19 nt, Artificial Sequence
  Description of Artificial Sequence: Synthetic oligonucleotide
ucgcggucgcucggucucg

SEQ ID NO: 1871872 - RNA, 19 nt, Artificial Sequence
  Description of Artificial Sequence: Synthetic oligonucleotide
cuuuccggccagccuucuc

SEQ ID NO: 1871873 - RNA, 19 nt, Artificial Sequence
  Description of Artificial Sequence: Synthetic oligonucleotide
cuggacggcggaggguggc

SEQ ID NO: 1871874 - RNA, 19 nt, Artificial Sequence
  Description of Artificial Sequence: Synthetic oligonucleotide
cugagaggcuggggugccg

SEQ ID NO: 1871875 - RNA, 19 nt, Artificial Sequence
  Description of Artificial Sequence: Synthetic oligonucleotide
cuccguucuccuccuccuc

SEQ ID NO: 1871876 - RNA, 19 nt, Artificial Sequence
  Description of Artificial Sequence: Synthetic oligonucleotide
ggcggaggagcagugucug

SEQ ID NO: 1871877 - RNA, 19 nt, Artificial Sequence
  Description of Artificial Sequence: Synthetic oligonucleotide
ccggccagccuucuccucc

SEQ ID NO: 1871878 - RNA, 19 nt, Artificial Sequence
  Description of Artificial Sequence: Synthetic oligonucleotide
cuucuccgacauggugccg

SEQ ID NO: 1871879 - RNA, 19 nt, Artificial Sequence
  Description of Artificial Sequence: Synthetic oligonucleotide
gacgccccauuuucugucu

SEQ ID NO: 1871880 - RNA, 19 nt, Artificial Sequence
  Description of Artificial Sequence: Synthetic oligonucleotide
cacgcucuucuccgacaug

SEQ ID NO: 1871881 - RNA, 19 nt, Artificial Sequence
  Description of Artificial Sequence: Synthetic oligonucleotide
caacgacggcagugagggc

SEQ ID NO: 1871882 - RNA, 19 nt, Artificial Sequence
  Description of Artificial Sequence: Synthetic oligonucleotide
ggcugcggccguccggagg

SEQ ID NO: 1871883 - RNA, 19 nt, Artificial Sequence
  Description of Artificial Sequence: Synthetic oligonucleotide
gucccgagccgagacccgc

SEQ ID NO: 1871884 - RNA, 19 nt, Artificial Sequence
  Description of Artificial Sequence: Synthetic oligonucleotide
uucggggcuuggccccaac

SEQ ID NO: 1871885 - RNA, 19 nt, Artificial Sequence
  Description of Artificial Sequence: Synthetic oligonucleotide
gucgcucggucucgcucgc

SEQ ID NO: 1871886 - RNA, 19 nt, Artificial Sequence
  Description of Artificial Sequence: Synthetic oligonucleotide
ggggcucaugccgacgccc

SEQ ID NO: 1871887 - RNA, 19 nt, Artificial Sequence
  Description of Artificial Sequence: Synthetic oligonucleotide
gcgcugucugagaggaggg

SEQ ID NO: 1871888 - RNA, 19 nt, Artificial Sequence
  Description of Artificial Sequence: Synthetic oligonucleotide
cauccuccuccuccuccuc

SEQ ID NO: 1871889 - RNA, 19 nt, Artificial Sequence
  Description of Artificial Sequence: Synthetic oligonucleotide
gcggaggagcagugucugg

SEQ ID NO: 1871890 - RNA, 19 nt, Artificial Sequence
  Description of Artificial Sequence: Synthetic oligonucleotide
ucgccauccucagcaguuu

SEQ ID NO: 1871891 - RNA, 19 nt, Artificial Sequence
  Description of Artificial Sequence: Synthetic oligonucleotide
gaccugaggggccucccau

SEQ ID NO: 1871892 - RNA, 19 nt, Artificial Sequence
  Description of Artificial Sequence: Synthetic oligonucleotide
ggagaaagaagggcaggcu

SEQ ID NO: 1871893 - RNA, 19 nt, Artificial Sequence
  Description of Artificial Sequence: Synthetic oligonucleotide
agaggcgcgcggggugggg

SEQ ID NO: 1871894 - RNA, 19 nt, Artificial Sequence
  Description of Artificial Sequence: Synthetic oligonucleotide
ggacggcggaggguggccg

SEQ ID NO: 1871895 - RNA, 19 nt, Artificial Sequence
  Description of Artificial Sequence: Synthetic oligonucleotide
gcagcgacggccgcucggc

SEQ ID NO: 1871896 - RNA, 19 nt, Artificial Sequence
  Description of Artificial Sequence: Synthetic oligonucleotide
augcgggcgguggccggcg

SEQ ID NO: 1871897 - RNA, 19 nt, Artificial Sequence
  Description of Artificial Sequence: Synthetic oligonucleotide
ggccggcgcgcuccggucg

SEQ ID NO: 1871898 - RNA, 19 nt, Artificial Sequence
  Description of Artificial Sequence: Synthetic oligonucleotide
cccuggacggcggagggug

SEQ ID NO: 1871899 - RNA, 19 nt, Artificial Sequence
  Description of Artificial Sequence: Synthetic oligonucleotide
cuggggugccgaggguaag

SEQ ID NO: 1871900 - RNA, 19 nt, Artificial Sequence
  Description of Artificial Sequence: Synthetic oligonucleotide
acccagggaucaggcagga

SEQ ID NO: 1871901 - RNA, 19 nt, Artificial Sequence
  Description of Artificial Sequence: Synthetic oligonucleotide
ggcagcuucggggcuuggc

SEQ ID NO: 1871902 - RNA, 19 nt, Artificial Sequence
  Description of Artificial Sequence: Synthetic oligonucleotide
gggcucaugccgacgcccc

SEQ ID NO: 1871903 - RNA, 19 nt, Artificial Sequence
  Description of Artificial Sequence: Synthetic oligonucleotide
gaagcgcgaccguuucuuu

SEQ ID NO: 1871904 - RNA, 19 nt, Artificial Sequence
  Description of Artificial Sequence: Synthetic oligonucleotide
ggaaucugagggagaccca

SEQ ID NO: 1871905 - RNA, 19 nt, Artificial Sequence
  Description of Artificial Sequence: Synthetic oligonucleotide
cgcucggucucgcucgccg

SEQ ID NO: 1871906 - RNA, 19 nt, Artificial Sequence
  Description of Artificial Sequence: Synthetic oligonucleotide
uggccggcgcgcuccgguc

SEQ ID NO: 1871907 - RNA, 19 nt, Artificial Sequence
  Description of Artificial Sequence: Synthetic oligonucleotide
ggagggaaucugagggaga

SEQ ID NO: 1871908 - RNA, 19 nt, Artificial Sequence
  Description of Artificial Sequence: Synthetic oligonucleotide
gacgagagacugggcggaa

SEQ ID NO: 1871909 - RNA, 19 nt, Artificial Sequence
  Description of Artificial Sequence: Synthetic oligonucleotide
gcaggggcucaugccgacg

SEQ ID NO: 1871910 - RNA, 19 nt, Artificial Sequence
  Description of Artificial Sequence: Synthetic oligonucleotide
gccgagacccgcagggcug

SEQ ID NO: 1871911 - RNA, 19 nt, Artificial Sequence
  Description of Artificial Sequence: Synthetic oligonucleotide
gcagggcugcggccguccg

SEQ ID NO: 1871912 - RNA, 19 nt, Artificial Sequence
  Description of Artificial Sequence: Synthetic oligonucleotide
ccuggacggcggagggugg

SEQ ID NO: 1871913 - RNA, 19 nt, Artificial Sequence
  Description of Artificial Sequence: Synthetic oligonucleotide
caugccgacgccccauuuu

SEQ ID NO: 1871914 - RNA, 19 nt, Artificial Sequence
  Description of Artificial Sequence: Synthetic oligonucleotide
ggaccugaggggccuccca

SEQ ID NO: 1871915 - RNA, 19 nt, Artificial Sequence
  Description of Artificial Sequence: Synthetic oligonucleotide
gggcuguacuuguguguuc

SEQ ID NO: 1871916 - RNA, 19 nt, Artificial Sequence
  Description of Artificial Sequence: Synthetic oligonucleotide
aggggcccuggacggcgga

SEQ ID NO: 1871917 - RNA, 19 nt, Artificial Sequence
  Description of Artificial Sequence: Synthetic oligonucleotide
cgaccguuucuuuauuaaa

SEQ ID NO: 1871918 - RNA, 19 nt, Artificial Sequence
  Description of Artificial Sequence: Synthetic oligonucleotide
cgacgccccauuuucuguc

SEQ ID NO: 1871919 - RNA, 19 nt, Artificial Sequence
  Description of Artificial Sequence: Synthetic oligonucleotide
ggucccgagccgagacccg

SEQ ID NO: 1871920 - RNA, 19 nt, Artificial Sequence
  Description of Artificial Sequence: Synthetic oligonucleotide
ucgcucggucucgcucgcc

SEQ ID NO: 1871921 - RNA, 19 nt, Artificial Sequence
  Description of Artificial Sequence: Synthetic oligonucleotide
cagggccuucauccuccuc

SEQ ID NO: 1871922 - RNA, 19 nt, Artificial Sequence
  Description of Artificial Sequence: Synthetic oligonucleotide
ggcuuuccaaggaccggga

SEQ ID NO: 1871923 - RNA, 19 nt, Artificial Sequence
  Description of Artificial Sequence: Synthetic oligonucleotide
ccgcucggcaagcuggcuc

SEQ ID NO: 1871924 - RNA, 19 nt, Artificial Sequence
  Description of Artificial Sequence: Synthetic oligonucleotide
ggccgcggccggaacuugg

SEQ ID NO: 1871925 - RNA, 19 nt, Artificial Sequence
  Description of Artificial Sequence: Synthetic oligonucleotide
gcuccguucuccuccuccu

SEQ ID NO: 1871926 - RNA, 19 nt, Artificial Sequence
  Description of Artificial Sequence: Synthetic oligonucleotide
gcgggagggugaugcgggc

SEQ ID NO: 1871927 - RNA, 19 nt, Artificial Sequence
  Description of Artificial Sequence: Synthetic oligonucleotide
cgagcgggagggugaugcg

SEQ ID NO: 1871928 - RNA, 19 nt, Artificial Sequence
  Description of Artificial Sequence: Synthetic oligonucleotide
cggaggguggccgcggccg

SEQ ID NO: 1871929 - RNA, 19 nt, Artificial Sequence
  Description of Artificial Sequence: Synthetic oligonucleotide
gccggaacuuggcgcggug

SEQ ID NO: 1871930 - RNA, 19 nt, Artificial Sequence
  Description of Artificial Sequence: Synthetic oligonucleotide
ggcggaggguggccgcggc

SEQ ID NO: 1871931 - RNA, 19 nt, Artificial Sequence
  Description of Artificial Sequence: Synthetic oligonucleotide
guccggagggcgggcgggc

SEQ ID NO: 1871932 - RNA, 19 nt, Artificial Sequence
  Description of Artificial Sequence: Synthetic oligonucleotide
gcuuggccccaaccccggc

SEQ ID NO: 1871933 - RNA, 19 nt, Artificial Sequence
  Description of Artificial Sequence: Synthetic oligonucleotide
gcuccggucgcggucgcuc

SEQ ID NO: 1871934 - RNA, 19 nt, Artificial Sequence
  Description of Artificial Sequence: Synthetic oligonucleotide
gggcaaagugagggcuggc

SEQ ID NO: 1871935 - RNA, 19 nt, Artificial Sequence
  Description of Artificial Sequence: Synthetic oligonucleotide
gugccggggccggggcugg

SEQ ID NO: 1871936 - RNA, 19 nt, Artificial Sequence
  Description of Artificial Sequence: Synthetic oligonucleotide
ggcucaugccgacgcccca

SEQ ID NO: 1871937 - RNA, 19 nt, Artificial Sequence
  Description of Artificial Sequence: Synthetic oligonucleotide
guggccggcgcgcuccggu

SEQ ID NO: 1871938 - RNA, 19 nt, Artificial Sequence
  Description of Artificial Sequence: Synthetic oligonucleotide
gcggccguccggagggcgg

SEQ ID NO: 1871939 - RNA, 19 nt, Artificial Sequence
  Description of Artificial Sequence: Synthetic oligonucleotide
cagaagcgcgaccguuucu

SEQ ID NO: 1871940 - RNA, 19 nt, Artificial Sequence
  Description of Artificial Sequence: Synthetic oligonucleotide
gagggcggaggagcagugu

SEQ ID NO: 1871941 - RNA, 19 nt, Artificial Sequence
  Description of Artificial Sequence: Synthetic oligonucleotide
cgggacacaugggauggug

SEQ ID NO: 1871942 - RNA, 19 nt, Artificial Sequence
  Description of Artificial Sequence: Synthetic oligonucleotide
cccggccuggcgcugucug

SEQ ID NO: 1871943 - RNA, 19 nt, Artificial Sequence
  Description of Artificial Sequence: Synthetic oligonucleotide
gguggccgcggccggaacu

SEQ ID NO: 1871944 - RNA, 19 nt, Artificial Sequence
  Description of Artificial Sequence: Synthetic oligonucleotide
ccgagacccgcagggcugc

SEQ ID NO: 1871945 - RNA, 19 nt, Artificial Sequence
  Description of Artificial Sequence: Synthetic oligonucleotide
gccgcggccggaacuuggc

SEQ ID NO: 1871946 - RNA, 19 nt, Artificial Sequence
  Description of Artificial Sequence: Synthetic oligonucleotide
ggugggucccgagccgaga

SEQ ID NO: 1871947 - RNA, 19 nt, Artificial Sequence
  Description of Artificial Sequence: Synthetic oligonucleotide
ggggugggucccgagccga

SEQ ID NO: 1871948 - RNA, 19 nt, Artificial Sequence
  Description of Artificial Sequence: Synthetic oligonucleotide
gggugggucccgagccgag

SEQ ID NO: 1871949 - RNA, 19 nt, Artificial Sequence
  Description of Artificial Sequence: Synthetic oligonucleotide
ccguccggagggcgggcgg

SEQ ID NO: 1871950 - RNA, 19 nt, Artificial Sequence
  Description of Artificial Sequence: Synthetic oligonucleotide
cgccccauuuucugucuuc

SEQ ID NO: 1871951 - RNA, 19 nt, Artificial Sequence
  Description of Artificial Sequence: Synthetic oligonucleotide
gcuggggugccgaggguaa

SEQ ID NO: 1871952 - RNA, 19 nt, Artificial Sequence
  Description of Artificial Sequence: Synthetic oligonucleotide
cgcgcuccggucgcggucg

SEQ ID NO: 1871953 - RNA, 19 nt, Artificial Sequence
  Description of Artificial Sequence: Synthetic oligonucleotide
gcggaaggacaagggucac

SEQ ID NO: 1871954 - RNA, 19 nt, Artificial Sequence
  Description of Artificial Sequence: Synthetic oligonucleotide
gggccgagacggaggggcc

SEQ ID NO: 1871955 - RNA, 19 nt, Artificial Sequence
  Description of Artificial Sequence: Synthetic oligonucleotide
ggucgcggucgcucggucu

SEQ ID NO: 1871956 - RNA, 19 nt, Artificial Sequence
  Description of Artificial Sequence: Synthetic oligonucleotide
gggaggcagggaagaacaa

SEQ ID NO: 1871957 - RNA, 19 nt, Artificial Sequence
  Description of Artificial Sequence: Synthetic oligonucleotide
ggaccgggacacaugggau

SEQ ID NO: 1871958 - RNA, 19 nt, Artificial Sequence
  Description of Artificial Sequence: Synthetic oligonucleotide
ggccuggcgcugucugaga

SEQ ID NO: 1871959 - RNA, 19 nt, Artificial Sequence
  Description of Artificial Sequence: Synthetic oligonucleotide
cagcgacggccgcucggca

SEQ ID NO: 1871960 - RNA, 19 nt, Artificial Sequence
  Description of Artificial Sequence: Synthetic oligonucleotide
cugcggccguccggagggc

SEQ ID NO: 1871961 - RNA, 19 nt, Artificial Sequence
  Description of Artificial Sequence: Synthetic oligonucleotide
cggucgcucggucucgcuc

SEQ ID NO: 1871962 - RNA, 19 nt, Artificial Sequence
  Description of Artificial Sequence: Synthetic oligonucleotide
ccgaggguaaggagaggcu

SEQ ID NO: 1871963 - RNA, 19 nt, Artificial Sequence
  Description of Artificial Sequence: Synthetic oligonucleotide
cucggcaagcuggcucucu

SEQ ID NO: 1871964 - RNA, 19 nt, Artificial Sequence
  Description of Artificial Sequence: Synthetic oligonucleotide
gcggcagcgacggccgcuc

SEQ ID NO: 1871965 - RNA, 19 nt, Artificial Sequence
  Description of Artificial Sequence: Synthetic oligonucleotide
cucaugccgacgccccauu

SEQ ID NO: 1871966 - RNA, 19 nt, Artificial Sequence
  Description of Artificial Sequence: Synthetic oligonucleotide
cguccggagggcgggcggg

SEQ ID NO: 1871967 - RNA, 19 nt, Artificial Sequence
  Description of Artificial Sequence: Synthetic oligonucleotide
gcgcgcuccggucgcgguc

SEQ ID NO: 1871968 - RNA, 19 nt, Artificial Sequence
  Description of Artificial Sequence: Synthetic oligonucleotide
cgcgaccguuucuuuauua

SEQ ID NO: 1871969 - RNA, 19 nt, Artificial Sequence
  Description of Artificial Sequence: Synthetic oligonucleotide
guggccgcggccggaacuu

SEQ ID NO: 1871970 - RNA, 19 nt, Artificial Sequence
  Description of Artificial Sequence: Synthetic oligonucleotide
ggcggggagccgggguccc

SEQ ID NO: 1871971 - RNA, 19 nt, Artificial Sequence
  Description of Artificial Sequence: Synthetic oligonucleotide
ccgacgccccauuuucugu

SEQ ID NO: 1871972 - RNA, 19 nt, Artificial Sequence
  Description of Artificial Sequence: Synthetic oligonucleotide
ccacgcucuucuccgacau

SEQ ID NO: 1871973 - RNA, 19 nt, Artificial Sequence
  Description of Artificial Sequence: Synthetic oligonucleotide
cgcucggcaagcuggcucu

SEQ ID NO: 1871974 - RNA, 19 nt, Artificial Sequence
  Description of Artificial Sequence: Synthetic oligonucleotide
gcggggagccggggucccg

SEQ ID NO: 1871975 - RNA, 19 nt, Artificial Sequence
  Description of Artificial Sequence: Synthetic oligonucleotide
ccacuggcaggggcucaug

SEQ ID NO: 1871976 - RNA, 19 nt, Artificial Sequence
  Description of Artificial Sequence: Synthetic oligonucleotide
gcgcucagcucggccgcug

SEQ ID NO: 1871977 - RNA, 19 nt, Artificial Sequence
  Description of Artificial Sequence: Synthetic oligonucleotide
cggucucgcucgccgcccc

SEQ ID NO: 1871978 - RNA, 19 nt, Artificial Sequence
  Description of Artificial Sequence: Synthetic oligonucleotide
gcucaugccgacgccccau

SEQ ID NO: 1871979 - RNA, 19 nt, Artificial Sequence
  Description of Artificial Sequence: Synthetic oligonucleotide
ccggccuggcgcugucuga

SEQ ID NO: 1871980 - RNA, 19 nt, Artificial Sequence
  Description of Artificial Sequence: Synthetic oligonucleotide
ccucgccauccucagcagu

SEQ ID NO: 1871981 - RNA, 19 nt, Artificial Sequence
  Description of Artificial Sequence: Synthetic oligonucleotide
gcucggcaagcuggcucuc

SEQ ID NO: 1871982 - RNA, 19 nt, Artificial Sequence
  Description of Artificial Sequence: Synthetic oligonucleotide
gccgagacggaggggcccu

SEQ ID NO: 1871983 - RNA, 19 nt, Artificial Sequence
  Description of Artificial Sequence: Synthetic oligonucleotide
cgaggguaaggagaggcuu

SEQ ID NO: 1871984 - RNA, 19 nt, Artificial Sequence
  Description of Artificial Sequence: Synthetic oligonucleotide
cggccguccggagggcggg

SEQ ID NO: 1871985 - RNA, 19 nt, Artificial Sequence
  Description of Artificial Sequence: Synthetic oligonucleotide
ggccguccggagggcgggc

SEQ ID NO: 1871986 - RNA, 19 nt, Artificial Sequence
  Description of Artificial Sequence: Synthetic oligonucleotide
gcgcuccggucgcggucgc

SEQ ID NO: 1871987 - RNA, 19 nt, Artificial Sequence
  Description of Artificial Sequence: Synthetic oligonucleotide
cccaccccggccuggcgcu

SEQ ID NO: 1871988 - RNA, 19 nt, Artificial Sequence
  Description of Artificial Sequence: Synthetic oligonucleotide
cgagacccgcagggcugcg

SEQ ID NO: 1871989 - RNA, 19 nt, Artificial Sequence
  Description of Artificial Sequence: Synthetic oligonucleotide
cggccggaacuuggcgcgg

SEQ ID NO: 1871990 - RNA, 19 nt, Artificial Sequence
  Description of Artificial Sequence: Synthetic oligonucleotide
ggccggaacuuggcgcggu

SEQ ID NO: 1871991 - RNA, 19 nt, Artificial Sequence
  Description of Artificial Sequence: Synthetic oligonucleotide
ccgagacggaggggcccug

SEQ ID NO: 1871992 - RNA, 19 nt, Artificial Sequence
  Description of Artificial Sequence: Synthetic oligonucleotide
cgcggucgcucggucucgc

SEQ ID NO: 1871993 - RNA, 19 nt, Artificial Sequence
  Description of Artificial Sequence: Synthetic oligonucleotide
cgacggccgcucggcaagc

SEQ ID NO: 1871994 - RNA, 19 nt, Artificial Sequence
  Description of Artificial Sequence: Synthetic oligonucleotide
gcggucgcucggucucgcu

SEQ ID NO: 1871995 - RNA, 19 nt, Artificial Sequence
  Description of Artificial Sequence: Synthetic oligonucleotide
ccggcgcgcuccggucgcg

SEQ ID NO: 1871996 - RNA, 19 nt, Artificial Sequence
  Description of Artificial Sequence: Synthetic oligonucleotide
gcgcgaccguuucuuuauu

SEQ ID NO: 1871997 - RNA, 19 nt, Artificial Sequence
  Description of Artificial Sequence: Synthetic oligonucleotide
cggucgcggucgcucgguc

SEQ ID NO: 1871998 - RNA, 19 nt, Artificial Sequence
  Description of Artificial Sequence: Synthetic oligonucleotide
cggcgcgcuccggucgcgg

SEQ ID NO: 1871999 - RNA, 19 nt, Artificial Sequence
  Description of Artificial Sequence: Synthetic oligonucleotide
caccccggccuggcgcugu

SEQ ID NO: 1872000 - RNA, 19 nt, Artificial Sequence
  Description of Artificial Sequence: Synthetic oligonucleotide
gcccuggacggcggagggu

SEQ ID NO: 1872001 - RNA, 19 nt, Artificial Sequence
  Description of Artificial Sequence: Synthetic oligonucleotide
gccgcucggcaagcuggcu

SEQ ID NO: 1872002 - RNA, 19 nt, Artificial Sequence
  Description of Artificial Sequence: Synthetic oligonucleotide
ccgggacacaugggauggu

SEQ ID NO: 1872003 - RNA, 19 nt, Artificial Sequence
  Description of Artificial Sequence: Synthetic oligonucleotide
gggcgguggccggcgcgcu

SEQ ID NO: 1872004 - RNA, 19 nt, Artificial Sequence
  Description of Artificial Sequence: Synthetic oligonucleotide
cgacggcagugagggcgga

SEQ ID NO: 1872005 - RNA, 19 nt, Artificial Sequence
  Description of Artificial Sequence: Synthetic oligonucleotide
cgcuccggucgcggucgcu

SEQ ID NO: 1872006 - RNA, 19 nt, Artificial Sequence
  Description of Artificial Sequence: Synthetic oligonucleotide
ccgcugccuccacgcucuu

SEQ ID NO: 1872007 - RNA, 19 nt, Artificial Sequence
  Description of Artificial Sequence: Synthetic oligonucleotide
aauuuauccagccaguggc

SEQ ID NO: 1872008 - RNA, 19 nt, Artificial Sequence
  Description of Artificial Sequence: Synthetic oligonucleotide
auaugcaacaaucacaggc

SEQ ID NO: 1872009 - RNA, 19 nt, Artificial Sequence
  Description of Artificial Sequence: Synthetic oligonucleotide
uuuccaaccaaacagaaag

SEQ ID NO: 1872010 - RNA, 19 nt, Artificial Sequence
  Description of Artificial Sequence: Synthetic oligonucleotide
aacaauuagcaucacuggc

SEQ ID NO: 1872011 - RNA, 19 nt, Artificial Sequence
  Description of Artificial Sequence: Synthetic oligonucleotide
aaauuaacuccuuuccaag

SEQ ID NO: 1872012 - RNA, 19 nt, Artificial Sequence
  Description of Artificial Sequence: Synthetic oligonucleotide
uuuacgagaaaucucucug

SEQ ID NO: 1872013 - RNA, 19 nt, Artificial Sequence
  Description of Artificial Sequence: Synthetic oligonucleotide
agaugcuacaaccaucccc

SEQ ID NO: 1872014 - RNA, 19 nt, Artificial Sequence
  Description of Artificial Sequence: Synthetic oligonucleotide
uugaccaucacaaaauuaa

SEQ ID NO: 1872015 - RNA, 19 nt, Artificial Sequence
  Description of Artificial Sequence: Synthetic oligonucleotide
uuauauuaccauaugcaac

SEQ ID NO: 1872016 - RNA, 19 nt, Artificial Sequence
  Description of Artificial Sequence: Synthetic oligonucleotide
auuaccauaugcaacaauc

SEQ ID NO: 1872017 - RNA, 19 nt, Artificial Sequence
  Description of Artificial Sequence: Synthetic oligonucleotide
uaauuuauccagccagugg

SEQ ID NO: 1872018 - RNA, 19 nt, Artificial Sequence
  Description of Artificial Sequence: Synthetic oligonucleotide
ugagcuaagaugaggacca

SEQ ID NO: 1872019 - RNA, 19 nt, Artificial Sequence
  Description of Artificial Sequence: Synthetic oligonucleotide
agaacaauuagcaucacug

SEQ ID NO: 1872020 - RNA, 19 nt, Artificial Sequence
  Description of Artificial Sequence: Synthetic oligonucleotide
gaacaauuagcaucacugg

SEQ ID NO: 1872021 - RNA, 19 nt, Artificial Sequence
  Description of Artificial Sequence: Synthetic oligonucleotide
acaauuagcaucacuggcc

SEQ ID NO: 1872022 - RNA, 19 nt, Artificial Sequence
  Description of Artificial Sequence: Synthetic oligonucleotide
gugagugucagccagaaac

SEQ ID NO: 1872023 - RNA, 19 nt, Artificial Sequence
  Description of Artificial Sequence: Synthetic oligonucleotide
ucuuaucuccccaagcaag

SEQ ID NO: 1872024 - RNA, 19 nt, Artificial Sequence
  Description of Artificial Sequence: Synthetic oligonucleotide
augauugccaaugaccacc

SEQ ID NO: 1872025 - RNA, 19 nt, Artificial Sequence
  Description of Artificial Sequence: Synthetic oligonucleotide
uaugcaacaaucacaggcu

SEQ ID NO: 1872026 - RNA, 19 nt, Artificial Sequence
  Description of Artificial Sequence: Synthetic oligonucleotide
uuugauuuauauuaccaua

SEQ ID NO: 1872027 - RNA, 19 nt, Artificial Sequence
  Description of Artificial Sequence: Synthetic oligonucleotide
cuuggagagagcauagucc

SEQ ID NO: 1872028 - RNA, 19 nt, Artificial Sequence
  Description of Artificial Sequence: Synthetic oligonucleotide
ugguagaugaaauauucac

SEQ ID NO: 1872029 - RNA, 19 nt, Artificial Sequence
  Description of Artificial Sequence: Synthetic oligonucleotide
aauuaacuccuuuccaaga

SEQ ID NO: 1872030 - RNA, 19 nt, Artificial Sequence
  Description of Artificial Sequence: Synthetic oligonucleotide
aaagaugacuaggugguag

SEQ ID NO: 1872031 - RNA, 19 nt, Artificial Sequence
  Description of Artificial Sequence: Synthetic oligonucleotide
uuuugcgaaguuuccaacc

SEQ ID NO: 1872032 - RNA, 19 nt, Artificial Sequence
  Description of Artificial Sequence: Synthetic oligonucleotide
uccauugcgacgcuguuga

SEQ ID NO: 1872033 - RNA, 19 nt, Artificial Sequence
  Description of Artificial Sequence: Synthetic oligonucleotide
uucaguuuacgagaaaucu

SEQ ID NO: 1872034 - RNA, 19 nt, Artificial Sequence
  Description of Artificial Sequence: Synthetic oligonucleotide
uuugcgaaguuuccaacca

SEQ ID NO: 1872035 - RNA, 19 nt, Artificial Sequence
  Description of Artificial Sequence: Synthetic oligonucleotide
auuuugcgaaguuuccaac

SEQ ID NO: 1872036 - RNA, 19 nt, Artificial Sequence
  Description of Artificial Sequence: Synthetic oligonucleotide
auuuacucaucugauagug

SEQ ID NO: 1872037 - RNA, 19 nt, Artificial Sequence
  Description of Artificial Sequence: Synthetic oligonucleotide
auugcgacgcuguugacca

SEQ ID NO: 1872038 - RNA, 19 nt, Artificial Sequence
  Description of Artificial Sequence: Synthetic oligonucleotide
gaugacuuccgguugcagc

SEQ ID NO: 1872039 - RNA, 19 nt, Artificial Sequence
  Description of Artificial Sequence: Synthetic oligonucleotide
uuuugugaagccucccgag

SEQ ID NO: 1872040 - RNA, 19 nt, Artificial Sequence
  Description of Artificial Sequence: Synthetic oligonucleotide
agcaucacuggcccgauag

SEQ ID NO: 1872041 - RNA, 19 nt, Artificial Sequence
  Description of Artificial Sequence: Synthetic oligonucleotide
uucaccucaggccaauggc

SEQ ID NO: 1872042 - RNA, 19 nt, Artificial Sequence
  Description of Artificial Sequence: Synthetic oligonucleotide
uaccauaugcaacaaucac

SEQ ID NO: 1872043 - RNA, 19 nt, Artificial Sequence
  Description of Artificial Sequence: Synthetic oligonucleotide
ucaguuuacgagaaaucuc

SEQ ID NO: 1872044 - RNA, 19 nt, Artificial Sequence
  Description of Artificial Sequence: Synthetic oligonucleotide
caccagaacaauuagcauc

SEQ ID NO: 1872045 - RNA, 19 nt, Artificial Sequence
  Description of Artificial Sequence: Synthetic oligonucleotide
caauuagcaucacuggccc

SEQ ID NO: 1872046 - RNA, 19 nt, Artificial Sequence
  Description of Artificial Sequence: Synthetic oligonucleotide
aagaugacuaggugguaga

SEQ ID NO: 1872047 - RNA, 19 nt, Artificial Sequence
  Description of Artificial Sequence: Synthetic oligonucleotide
uaucuuccgaaaccguugc

SEQ ID NO: 1872048 - RNA, 19 nt, Artificial Sequence
  Description of Artificial Sequence: Synthetic oligonucleotide
uccaggauggagcaccuca

SEQ ID NO: 1872049 - RNA, 19 nt, Artificial Sequence
  Description of Artificial Sequence: Synthetic oligonucleotide
cuuccgaaaccguugcacg

SEQ ID NO: 1872050 - RNA, 19 nt, Artificial Sequence
  Description of Artificial Sequence: Synthetic oligonucleotide
aagugagcuaagaugagga

SEQ ID NO: 1872051 - RNA, 19 nt, Artificial Sequence
  Description of Artificial Sequence: Synthetic oligonucleotide
caugccugaauaucuuccg

SEQ ID NO: 1872052 - RNA, 19 nt, Artificial Sequence
  Description of Artificial Sequence: Synthetic oligonucleotide
gaugacaacugugaguuuc

SEQ ID NO: 1872053 - RNA, 19 nt, Artificial Sequence
  Description of Artificial Sequence: Synthetic oligonucleotide
augaagaugacuuccgguu

SEQ ID NO: 1872054 - RNA, 19 nt, Artificial Sequence
  Description of Artificial Sequence: Synthetic oligonucleotide
caugauaaagcugggguug

SEQ ID NO: 1872055 - RNA, 19 nt, Artificial Sequence
  Description of Artificial Sequence: Synthetic oligonucleotide
gaucccugcaccucucggg

SEQ ID NO: 1872056 - RNA, 19 nt, Artificial Sequence
  Description of Artificial Sequence: Synthetic oligonucleotide
uguauuuacucaucugaua

SEQ ID NO: 1872057 - RNA, 19 nt, Artificial Sequence
  Description of Artificial Sequence: Synthetic oligonucleotide
ucgggagcaauucaguuua

SEQ ID NO: 1872058 - RNA, 19 nt, Artificial Sequence
  Description of Artificial Sequence: Synthetic oligonucleotide
uuugugaagccucccgaga

SEQ ID NO: 1872059 - RNA, 19 nt, Artificial Sequence
  Description of Artificial Sequence: Synthetic oligonucleotide
ugucugaaaggcucucucc

SEQ ID NO: 1872060 - RNA, 19 nt, Artificial Sequence
  Description of Artificial Sequence: Synthetic oligonucleotide
uccacuucccuucaucaaa

SEQ ID NO: 1872061 - RNA, 19 nt, Artificial Sequence
  Description of Artificial Sequence: Synthetic oligonucleotide
aaagcugggguuguuucug

SEQ ID NO: 1872062 - RNA, 19 nt, Artificial Sequence
  Description of Artificial Sequence: Synthetic oligonucleotide
uagugucuucaccucaggc

SEQ ID NO: 1872063 - RNA, 19 nt, Artificial Sequence
  Description of Artificial Sequence: Synthetic oligonucleotide
gagaacagccuuucugagc

SEQ ID NO: 1872064 - RNA, 19 nt, Artificial Sequence
  Description of Artificial Sequence: Synthetic oligonucleotide
auucaguuuacgagaaauc

SEQ ID NO: 1872065 - RNA, 19 nt, Artificial Sequence
  Description of Artificial Sequence: Synthetic oligonucleotide
ucaugugcauuuugcgaag

SEQ ID NO: 1872066 - RNA, 19 nt, Artificial Sequence
  Description of Artificial Sequence: Synthetic oligonucleotide
uccguaauuuauccagcca

SEQ ID NO: 1872067 - RNA, 19 nt, Artificial Sequence
  Description of Artificial Sequence: Synthetic oligonucleotide
gacaacugugaguuucagc

SEQ ID NO: 1872068 - RNA, 19 nt, Artificial Sequence
  Description of Artificial Sequence: Synthetic oligonucleotide
ugaguuucagcagcaacac

SEQ ID NO: 1872069 - RNA, 19 nt, Artificial Sequence
  Description of Artificial Sequence: Synthetic oligonucleotide
gugagcuaagaugaggacc

SEQ ID NO: 1872070 - RNA, 19 nt, Artificial Sequence
  Description of Artificial Sequence: Synthetic oligonucleotide
ugcaacaaucacaggcucu

SEQ ID NO: 1872071 - RNA, 19 nt, Artificial Sequence
  Description of Artificial Sequence: Synthetic oligonucleotide
gaugcuacaaccauccccu

SEQ ID NO: 1872072 - RNA, 19 nt, Artificial Sequence
  Description of Artificial Sequence: Synthetic oligonucleotide
gcuacaaccauccccuucc

SEQ ID NO: 1872073 - RNA, 19 nt, Artificial Sequence
  Description of Artificial Sequence: Synthetic oligonucleotide
gaugaugacaacugugagu

SEQ ID NO: 1872074 - RNA, 19 nt, Artificial Sequence
  Description of Artificial Sequence: Synthetic oligonucleotide
uccccuuccauugcgacgc

SEQ ID NO: 1872075 - RNA, 19 nt, Artificial Sequence
  Description of Artificial Sequence: Synthetic oligonucleotide
ugcgaaguuuccaaccaaa

SEQ ID NO: 1872076 - RNA, 19 nt, Artificial Sequence
  Description of Artificial Sequence: Synthetic oligonucleotide
agacugcccaugauaaagc

SEQ ID NO: 1872077 - RNA, 19 nt, Artificial Sequence
  Description of Artificial Sequence: Synthetic oligonucleotide
uggcacugaaagaugacua

SEQ ID NO: 1872078 - RNA, 19 nt, Artificial Sequence
  Description of Artificial Sequence: Synthetic oligonucleotide
accauaugcaacaaucaca

SEQ ID NO: 1872079 - RNA, 19 nt, Artificial Sequence
  Description of Artificial Sequence: Synthetic oligonucleotide
aaggggacguuccuuuccu

SEQ ID NO: 1872080 - RNA, 19 nt, Artificial Sequence
  Description of Artificial Sequence: Synthetic oligonucleotide
augaggaccacaaggaaga

SEQ ID NO: 1872081 - RNA, 19 nt, Artificial Sequence
  Description of Artificial Sequence: Synthetic oligonucleotide
gaaguccuaugucuuuggc

SEQ ID NO: 1872082 - RNA, 19 nt, Artificial Sequence
  Description of Artificial Sequence: Synthetic oligonucleotide
auagagcggguagugcugc

SEQ ID NO: 1872083 - RNA, 19 nt, Artificial Sequence
  Description of Artificial Sequence: Synthetic oligonucleotide
uauuaccauaugcaacaau

SEQ ID NO: 1872084 - RNA, 19 nt, Artificial Sequence
  Description of Artificial Sequence: Synthetic oligonucleotide
gaaggggacguuccuuucc

SEQ ID NO: 1872085 - RNA, 19 nt, Artificial Sequence
  Description of Artificial Sequence: Synthetic oligonucleotide
aaaaggggagccgcugcuc

SEQ ID NO: 1872086 - RNA, 19 nt, Artificial Sequence
  Description of Artificial Sequence: Synthetic oligonucleotide
gaugacuaggugguagaug

SEQ ID NO: 1872087 - RNA, 19 nt, Artificial Sequence
  Description of Artificial Sequence: Synthetic oligonucleotide
aucacuggcccgauagagc

SEQ ID NO: 1872088 - RNA, 19 nt, Artificial Sequence
  Description of Artificial Sequence: Synthetic oligonucleotide
aguggccucuuaucucccc

SEQ ID NO: 1872089 - RNA, 19 nt, Artificial Sequence
  Description of Artificial Sequence: Synthetic oligonucleotide
ugccugaauaucuuccgaa

SEQ ID NO: 1872090 - RNA, 19 nt, Artificial Sequence
  Description of Artificial Sequence: Synthetic oligonucleotide
uccucaaaugggagguagc

SEQ ID NO: 1872091 - RNA, 19 nt, Artificial Sequence
  Description of Artificial Sequence: Synthetic oligonucleotide
agggcagacgcuccaagug

SEQ ID NO: 1872092 - RNA, 19 nt, Artificial Sequence
  Description of Artificial Sequence: Synthetic oligonucleotide
uuugccacucccuccguaa

SEQ ID NO: 1872093 - RNA, 19 nt, Artificial Sequence
  Description of Artificial Sequence: Synthetic oligonucleotide
ccguaauuuauccagccag

SEQ ID NO: 1872094 - RNA, 19 nt, Artificial Sequence
  Description of Artificial Sequence: Synthetic oligonucleotide
guuccuuuccuccggagga

SEQ ID NO: 1872095 - RNA, 19 nt, Artificial Sequence
  Description of Artificial Sequence: Synthetic oligonucleotide
aggaagaccgcugcugcac

SEQ ID NO: 1872096 - RNA, 19 nt, Artificial Sequence
  Description of Artificial Sequence: Synthetic oligonucleotide
caguuuacgagaaaucucu

SEQ ID NO: 1872097 - RNA, 19 nt, Artificial Sequence
  Description of Artificial Sequence: Synthetic oligonucleotide
ggagcaauucaguuuacga

SEQ ID NO: 1872098 - RNA, 19 nt, Artificial Sequence
  Description of Artificial Sequence: Synthetic oligonucleotide
aacagccuuucugagcuga

SEQ ID NO: 1872099 - RNA, 19 nt, Artificial Sequence
  Description of Artificial Sequence: Synthetic oligonucleotide
caauggcacugaaagauga

SEQ ID NO: 1872100 - RNA, 19 nt, Artificial Sequence
  Description of Artificial Sequence: Synthetic oligonucleotide
cauugcgacgcuguugacc

SEQ ID NO: 1872101 - RNA, 19 nt, Artificial Sequence
  Description of Artificial Sequence: Synthetic oligonucleotide
ggugguagaugaaauauuc

SEQ ID NO: 1872102 - RNA, 19 nt, Artificial Sequence
  Description of Artificial Sequence: Synthetic oligonucleotide
ugcugcaccguauguggcc

SEQ ID NO: 1872103 - RNA, 19 nt, Artificial Sequence
  Description of Artificial Sequence: Synthetic oligonucleotide
gauagagcggguagugcug

SEQ ID NO: 1872104 - RNA, 19 nt, Artificial Sequence
  Description of Artificial Sequence: Synthetic oligonucleotide
cauuuugcgaaguuuccaa

SEQ ID NO: 1872105 - RNA, 19 nt, Artificial Sequence
  Description of Artificial Sequence: Synthetic oligonucleotide
aaggaagaccgcugcugca

SEQ ID NO: 1872106 - RNA, 19 nt, Artificial Sequence
  Description of Artificial Sequence: Synthetic oligonucleotide
cauaguccuuggaugucag

SEQ ID NO: 1872107 - RNA, 19 nt, Artificial Sequence
  Description of Artificial Sequence: Synthetic oligonucleotide
ggcacugaaagaugacuag

SEQ ID NO: 1872108 - RNA, 19 nt, Artificial Sequence
  Description of Artificial Sequence: Synthetic oligonucleotide
caucacuggcccgauagag

SEQ ID NO: 1872109 - RNA, 19 nt, Artificial Sequence
  Description of Artificial Sequence: Synthetic oligonucleotide
uuccgaaaccguugcacgu

SEQ ID NO: 1872110 - RNA, 19 nt, Artificial Sequence
  Description of Artificial Sequence: Synthetic oligonucleotide
guagcacuuggagagagca

SEQ ID NO: 1872111 - RNA, 19 nt, Artificial Sequence
  Description of Artificial Sequence: Synthetic oligonucleotide
gguagaugaaauauucaca

SEQ ID NO: 1872112 - RNA, 19 nt, Artificial Sequence
  Description of Artificial Sequence: Synthetic oligonucleotide
caacugugaguuucagcag

SEQ ID NO: 1872113 - RNA, 19 nt, Artificial Sequence
  Description of Artificial Sequence: Synthetic oligonucleotide
caugauugccaaugaccac

SEQ ID NO: 1872114 - RNA, 19 nt, Artificial Sequence
  Description of Artificial Sequence: Synthetic oligonucleotide
acgagaaaucucucugagu

SEQ ID NO: 1872115 - RNA, 19 nt, Artificial Sequence
  Description of Artificial Sequence: Synthetic oligonucleotide
agcacggagaugaugacaa

SEQ ID NO: 1872116 - RNA, 19 nt, Artificial Sequence
  Description of Artificial Sequence: Synthetic oligonucleotide
ggaaguccuaugucuuugg

SEQ ID NO: 1872117 - RNA, 19 nt, Artificial Sequence
  Description of Artificial Sequence: Synthetic oligonucleotide
aguuuacgagaaaucucuc

SEQ ID NO: 1872118 - RNA, 19 nt, Artificial Sequence
  Description of Artificial Sequence: Synthetic oligonucleotide
gaaaccguugcacgucauc

SEQ ID NO: 1872119 - RNA, 19 nt, Artificial Sequence
  Description of Artificial Sequence: Synthetic oligonucleotide
agagcagaugcuacaacca

SEQ ID NO: 1872120 - RNA, 19 nt, Artificial Sequence
  Description of Artificial Sequence: Synthetic oligonucleotide
ugcccaugauaaagcuggg

SEQ ID NO: 1872121 - RNA, 19 nt, Artificial Sequence
  Description of Artificial Sequence: Synthetic oligonucleotide
aguggugcuccacuucccu

SEQ ID NO: 1872122 - RNA, 19 nt, Artificial Sequence
  Description of Artificial Sequence: Synthetic oligonucleotide
cccuccguaauuuauccag

SEQ ID NO: 1872123 - RNA, 19 nt, Artificial Sequence
  Description of Artificial Sequence: Synthetic oligonucleotide
uccccaagcaagugagugu

SEQ ID NO: 1872124 - RNA, 19 nt, Artificial Sequence
  Description of Artificial Sequence: Synthetic oligonucleotide
cacgucaucugcccaggcc

SEQ ID NO: 1872125 - RNA, 19 nt, Artificial Sequence
  Description of Artificial Sequence: Synthetic oligonucleotide
ggacgggacgcucaccucg

SEQ ID NO: 1872126 - RNA, 19 nt, Artificial Sequence
  Description of Artificial Sequence: Synthetic oligonucleotide
cugccuaucgccaugggcu

SEQ ID NO: 1872127 - RNA, 19 nt, Artificial Sequence
  Description of Artificial Sequence: Synthetic oligonucleotide
uugcgaaguuuccaaccaa

SEQ ID NO: 1872128 - RNA, 19 nt, Artificial Sequence
  Description of Artificial Sequence: Synthetic oligonucleotide
gaagcacggagaugaugac

SEQ ID NO: 1872129 - RNA, 19 nt, Artificial Sequence
  Description of Artificial Sequence: Synthetic oligonucleotide
augccugaauaucuuccga

SEQ ID NO: 1872130 - RNA, 19 nt, Artificial Sequence
  Description of Artificial Sequence: Synthetic oligonucleotide
guccucaaaugggagguag

SEQ ID NO: 1872131 - RNA, 19 nt, Artificial Sequence
  Description of Artificial Sequence: Synthetic oligonucleotide
ccuuuccaagagaacagcc

SEQ ID NO: 1872132 - RNA, 19 nt, Artificial Sequence
  Description of Artificial Sequence: Synthetic oligonucleotide
gaccaucacaaaauuaacu

SEQ ID NO: 1872133 - RNA, 19 nt, Artificial Sequence
  Description of Artificial Sequence: Synthetic oligonucleotide
gcacugaaagaugacuagg

SEQ ID NO: 1872134 - RNA, 19 nt, Artificial Sequence
  Description of Artificial Sequence: Synthetic oligonucleotide
gagcggguagugcugcagc

SEQ ID NO: 1872135 - RNA, 19 nt, Artificial Sequence
  Description of Artificial Sequence: Synthetic oligonucleotide
ugacaacugugaguuucag

SEQ ID NO: 1872136 - RNA, 19 nt, Artificial Sequence
  Description of Artificial Sequence: Synthetic oligonucleotide
aacugaaggacgggacgcu

SEQ ID NO: 1872137 - RNA, 19 nt, Artificial Sequence
  Description of Artificial Sequence: Synthetic oligonucleotide
aucccugcaccucucggga

SEQ ID NO: 1872138 - RNA, 19 nt, Artificial Sequence
  Description of Artificial Sequence: Synthetic oligonucleotide
gucagacugcccaugauaa

SEQ ID NO: 1872139 - RNA, 19 nt, Artificial Sequence
  Description of Artificial Sequence: Synthetic oligonucleotide
agguagcacuuggagagag

SEQ ID NO: 1872140 - RNA, 19 nt, Artificial Sequence
  Description of Artificial Sequence: Synthetic oligonucleotide
gggacguuccuuuccuccg

SEQ ID NO: 1872141 - RNA, 19 nt, Artificial Sequence
  Description of Artificial Sequence: Synthetic oligonucleotide
gacuaggugguagaugaaa

SEQ ID NO: 1872142 - RNA, 19 nt, Artificial Sequence
  Description of Artificial Sequence: Synthetic oligonucleotide
gacgcuccaagugagcuaa

SEQ ID NO: 1872143 - RNA, 19 nt, Artificial Sequence
  Description of Artificial Sequence: Synthetic oligonucleotide
ucgccaugggcuagugucu

SEQ ID NO: 1872144 - RNA, 19 nt, Artificial Sequence
  Description of Artificial Sequence: Synthetic oligonucleotide
ucuuuggcuuugauuuaua

SEQ ID NO: 1872145 - RNA, 19 nt, Artificial Sequence
  Description of Artificial Sequence: Synthetic oligonucleotide
uucugccuaucgccauggg

SEQ ID NO: 1872146 - RNA, 19 nt, Artificial Sequence
  Description of Artificial Sequence: Synthetic oligonucleotide
ucguuuuauucuguauuua

SEQ ID NO: 1872147 - RNA, 19 nt, Artificial Sequence
  Description of Artificial Sequence: Synthetic oligonucleotide
auuucuccucgaaggggac

SEQ ID NO: 1872148 - RNA, 19 nt, Artificial Sequence
  Description of Artificial Sequence: Synthetic oligonucleotide
accgcugcugcaccguaug

SEQ ID NO: 1872149 - RNA, 19 nt, Artificial Sequence
  Description of Artificial Sequence: Synthetic oligonucleotide
agagagcauaguccuugga

SEQ ID NO: 1872150 - RNA, 19 nt, Artificial Sequence
  Description of Artificial Sequence: Synthetic oligonucleotide
uggcuaccaugccugaaua

SEQ ID NO: 1872151 - RNA, 19 nt, Artificial Sequence
  Description of Artificial Sequence: Synthetic oligonucleotide
uaccaugccugaauaucuu

SEQ ID NO: 1872152 - RNA, 19 nt, Artificial Sequence
  Description of Artificial Sequence: Synthetic oligonucleotide
cuaccaugccugaauaucu

SEQ ID NO: 1872153 - RNA, 19 nt, Artificial Sequence
  Description of Artificial Sequence: Synthetic oligonucleotide
cucccgagaaaggacauca

SEQ ID NO: 1872154 - RNA, 19 nt, Artificial Sequence
  Description of Artificial Sequence: Synthetic oligonucleotide
cacugaaagaugacuaggu

SEQ ID NO: 1872155 - RNA, 19 nt, Artificial Sequence
  Description of Artificial Sequence: Synthetic oligonucleotide
gccaaugaccaccuucagc

SEQ ID NO: 1872156 - RNA, 19 nt, Artificial Sequence
  Description of Artificial Sequence: Synthetic oligonucleotide
ggcagaaaaggggagccgc

SEQ ID NO: 1872157 - RNA, 19 nt, Artificial Sequence
  Description of Artificial Sequence: Synthetic oligonucleotide
gccacucagaaccaggcga

SEQ ID NO: 1872158 - RNA, 19 nt, Artificial Sequence
  Description of Artificial Sequence: Synthetic oligonucleotide
agcggguagugcugcagca

SEQ ID NO: 1872159 - RNA, 19 nt, Artificial Sequence
  Description of Artificial Sequence: Synthetic oligonucleotide
uccgaaaccguugcacguc

SEQ ID NO: 1872160 - RNA, 19 nt, Artificial Sequence
  Description of Artificial Sequence: Synthetic oligonucleotide
acugugaguuucagcagca

SEQ ID NO: 1872161 - RNA, 19 nt, Artificial Sequence
  Description of Artificial Sequence: Synthetic oligonucleotide
gacgggacgcucaccucgg

SEQ ID NO: 1872162 - RNA, 19 nt, Artificial Sequence
  Description of Artificial Sequence: Synthetic oligonucleotide
uaucgccaugggcuagugu

SEQ ID NO: 1872163 - RNA, 19 nt, Artificial Sequence
  Description of Artificial Sequence: Synthetic oligonucleotide
accucucgggagcaauuca

SEQ ID NO: 1872164 - RNA, 19 nt, Artificial Sequence
  Description of Artificial Sequence: Synthetic oligonucleotide
ugacuaggugguagaugaa

SEQ ID NO: 1872165 - RNA, 19 nt, Artificial Sequence
  Description of Artificial Sequence: Synthetic oligonucleotide
gggagcaauucaguuuacg

SEQ ID NO: 1872166 - RNA, 19 nt, Artificial Sequence
  Description of Artificial Sequence: Synthetic oligonucleotide
gcuaccaugccugaauauc

SEQ ID NO: 1872167 - RNA, 19 nt, Artificial Sequence
  Description of Artificial Sequence: Synthetic oligonucleotide
cucaguggugcuccacuuc

SEQ ID NO: 1872168 - RNA, 19 nt, Artificial Sequence
  Description of Artificial Sequence: Synthetic oligonucleotide
gaaaaggggagccgcugcu

SEQ ID NO: 1872169 - RNA, 19 nt, Artificial Sequence
  Description of Artificial Sequence: Synthetic oligonucleotide
cucuuaucuccccaagcaa

SEQ ID NO: 1872170 - RNA, 19 nt, Artificial Sequence
  Description of Artificial Sequence: Synthetic oligonucleotide
aggggacguuccuuuccuc

SEQ ID NO: 1872171 - RNA, 19 nt, Artificial Sequence
  Description of Artificial Sequence: Synthetic oligonucleotide
ucuccccaagcaagugagu

SEQ ID NO: 1872172 - RNA, 19 nt, Artificial Sequence
  Description of Artificial Sequence: Synthetic oligonucleotide
aggacgggacgcucaccuc

SEQ ID NO: 1872173 - RNA, 19 nt, Artificial Sequence
  Description of Artificial Sequence: Synthetic oligonucleotide
ccacucagaaccaggcgag

SEQ ID NO: 1872174 - RNA, 19 nt, Artificial Sequence
  Description of Artificial Sequence: Synthetic oligonucleotide
acguuccuuuccuccggag

SEQ ID NO: 1872175 - RNA, 19 nt, Artificial Sequence
  Description of Artificial Sequence: Synthetic oligonucleotide
ggaucccugcaccucucgg

SEQ ID NO: 1872176 - RNA, 19 nt, Artificial Sequence
  Description of Artificial Sequence: Synthetic oligonucleotide
gcuagugucuucaccucag

SEQ ID NO: 1872177 - RNA, 19 nt, Artificial Sequence
  Description of Artificial Sequence: Synthetic oligonucleotide
aagaccgcugcugcaccgu

SEQ ID NO: 1872178 - RNA, 19 nt, Artificial Sequence
  Description of Artificial Sequence: Synthetic oligonucleotide
cagaugcuacaaccauccc

SEQ ID NO: 1872179 - RNA, 19 nt, Artificial Sequence
  Description of Artificial Sequence: Synthetic oligonucleotide
caguggugcuccacuuccc

SEQ ID NO: 1872180 - RNA, 19 nt, Artificial Sequence
  Description of Artificial Sequence: Synthetic oligonucleotide
ccucucgggagcaauucag

SEQ ID NO: 1872181 - RNA, 19 nt, Artificial Sequence
  Description of Artificial Sequence: Synthetic oligonucleotide
guuuccaaccaaacagaaa

SEQ ID NO: 1872182 - RNA, 19 nt, Artificial Sequence
  Description of Artificial Sequence: Synthetic oligonucleotide
caugggcuagugucuucac

SEQ ID NO: 1872183 - RNA, 19 nt, Artificial Sequence
  Description of Artificial Sequence: Synthetic oligonucleotide
ccucuuaucuccccaagca

SEQ ID NO: 1872184 - RNA, 19 nt, Artificial Sequence
  Description of Artificial Sequence: Synthetic oligonucleotide
ugcgacgcuguugaccauc

SEQ ID NO: 1872185 - RNA, 19 nt, Artificial Sequence
  Description of Artificial Sequence: Synthetic oligonucleotide
agaugacuaggugguagau

SEQ ID NO: 1872186 - RNA, 19 nt, Artificial Sequence
  Description of Artificial Sequence: Synthetic oligonucleotide
guguguggccacucagaac

SEQ ID NO: 1872187 - RNA, 19 nt, Artificial Sequence
  Description of Artificial Sequence: Synthetic oligonucleotide
gacguuccuuuccuccgga

SEQ ID NO: 1872188 - RNA, 19 nt, Artificial Sequence
  Description of Artificial Sequence: Synthetic oligonucleotide
uggccucuuaucuccccaa

SEQ ID NO: 1872189 - RNA, 19 nt, Artificial Sequence
  Description of Artificial Sequence: Synthetic oligonucleotide
ugccuaucgccaugggcua

SEQ ID NO: 1872190 - RNA, 19 nt, Artificial Sequence
  Description of Artificial Sequence: Synthetic oligonucleotide
gaauaucuuccgaaaccgu

SEQ ID NO: 1872191 - RNA, 19 nt, Artificial Sequence
  Description of Artificial Sequence: Synthetic oligonucleotide
cacuggcccgauagagcgg

SEQ ID NO: 1872192 - RNA, 19 nt, Artificial Sequence
  Description of Artificial Sequence: Synthetic oligonucleotide
ugcaccguauguggccagc

SEQ ID NO: 1872193 - RNA, 19 nt, Artificial Sequence
  Description of Artificial Sequence: Synthetic oligonucleotide
auuugccacucccuccgua

SEQ ID NO: 1872194 - RNA, 19 nt, Artificial Sequence
  Description of Artificial Sequence: Synthetic oligonucleotide
ggaagaccgcugcugcacc

SEQ ID NO: 1872195 - RNA, 19 nt, Artificial Sequence
  Description of Artificial Sequence: Synthetic oligonucleotide
augucagacugcccaugau

SEQ ID NO: 1872196 - RNA, 19 nt, Artificial Sequence
  Description of Artificial Sequence: Synthetic oligonucleotide
ucccgagaaaggacaucau

SEQ ID NO: 1872197 - RNA, 19 nt, Artificial Sequence
  Description of Artificial Sequence: Synthetic oligonucleotide
ugccacucccuccguaauu

SEQ ID NO: 1872198 - RNA, 19 nt, Artificial Sequence
  Description of Artificial Sequence: Synthetic oligonucleotide
agacgcuccaagugagcua

SEQ ID NO: 1872199 - RNA, 19 nt, Artificial Sequence
  Description of Artificial Sequence: Synthetic oligonucleotide
acgcucaccucggggacuc

SEQ ID NO: 1872200 - RNA, 19 nt, Artificial Sequence
  Description of Artificial Sequence: Synthetic oligonucleotide
acccuguccucaaauggga

SEQ ID NO: 1872201 - RNA, 19 nt, Artificial Sequence
  Description of Artificial Sequence: Synthetic oligonucleotide
aggugguagaugaaauauu

SEQ ID NO: 1872202 - RNA, 19 nt, Artificial Sequence
  Description of Artificial Sequence: Synthetic oligonucleotide
ggcagacgcuccaagugag

SEQ ID NO: 1872203 - RNA, 19 nt, Artificial Sequence
  Description of Artificial Sequence: Synthetic oligonucleotide
cguuccuuuccuccggagg

SEQ ID NO: 1872204 - RNA, 19 nt, Artificial Sequence
  Description of Artificial Sequence: Synthetic oligonucleotide
agugagugucagccagaaa

SEQ ID NO: 1872205 - RNA, 19 nt, Artificial Sequence
  Description of Artificial Sequence: Synthetic oligonucleotide
uuagcaucacuggcccgau

SEQ ID NO: 1872206 - RNA, 19 nt, Artificial Sequence
  Description of Artificial Sequence: Synthetic oligonucleotide
gcaauucaguuuacgagaa

SEQ ID NO: 1872207 - RNA, 19 nt, Artificial Sequence
  Description of Artificial Sequence: Synthetic oligonucleotide
gggcagacgcuccaaguga

SEQ ID NO: 1872208 - RNA, 19 nt, Artificial Sequence
  Description of Artificial Sequence: Synthetic oligonucleotide
ggcuagugucuucaccuca

SEQ ID NO: 1872209 - RNA, 19 nt, Artificial Sequence
  Description of Artificial Sequence: Synthetic oligonucleotide
gccugaauaucuuccgaaa

SEQ ID NO: 1872210 - RNA, 19 nt, Artificial Sequence
  Description of Artificial Sequence: Synthetic oligonucleotide
gcgaaguuuccaaccaaac

SEQ ID NO: 1872211 - RNA, 19 nt, Artificial Sequence
  Description of Artificial Sequence: Synthetic oligonucleotide
ggccucuuaucuccccaag

SEQ ID NO: 1872212 - RNA, 19 nt, Artificial Sequence
  Description of Artificial Sequence: Synthetic oligonucleotide
cuguccucaaaugggaggu

SEQ ID NO: 1872213 - RNA, 19 nt, Artificial Sequence
  Description of Artificial Sequence: Synthetic oligonucleotide
cuuccgguugcagccacca

SEQ ID NO: 1872214 - RNA, 19 nt, Artificial Sequence
  Description of Artificial Sequence: Synthetic oligonucleotide
cucagaaccaggcgaggcu

SEQ ID NO: 1872215 - RNA, 19 nt, Artificial Sequence
  Description of Artificial Sequence: Synthetic oligonucleotide
cuccggaggagcugcaucu

SEQ ID NO: 1872216 - RNA, 19 nt, Artificial Sequence
  Description of Artificial Sequence: Synthetic oligonucleotide
caccucucgggagcaauuc

SEQ ID NO: 1872217 - RNA, 19 nt, Artificial Sequence
  Description of Artificial Sequence: Synthetic oligonucleotide
caacaaucacaggcucuuc

SEQ ID NO: 1872218 - RNA, 19 nt, Artificial Sequence
  Description of Artificial Sequence: Synthetic oligonucleotide
gagguagcacuuggagaga

SEQ ID NO: 1872219 - RNA, 19 nt, Artificial Sequence
  Description of Artificial Sequence: Synthetic oligonucleotide
cuggaucccugcaccucuc

SEQ ID NO: 1872220 - RNA, 19 nt, Artificial Sequence
  Description of Artificial Sequence: Synthetic oligonucleotide
agcaccucacaggcgcugu

SEQ ID NO: 1872221 - RNA, 19 nt, Artificial Sequence
  Description of Artificial Sequence: Synthetic oligonucleotide
gggcagaaaaggggagccg

SEQ ID NO: 1872222 - RNA, 19 nt, Artificial Sequence
  Description of Artificial Sequence: Synthetic oligonucleotide
uguccucaaaugggaggua

SEQ ID NO: 1872223 - RNA, 19 nt, Artificial Sequence
  Description of Artificial Sequence: Synthetic oligonucleotide
cugcaccguauguggccag

SEQ ID NO: 1872224 - RNA, 19 nt, Artificial Sequence
  Description of Artificial Sequence: Synthetic oligonucleotide
gguagcacuuggagagagc

SEQ ID NO: 1872225 - RNA, 19 nt, Artificial Sequence
  Description of Artificial Sequence: Synthetic oligonucleotide
caaaugggagguagcacuu

SEQ ID NO: 1872226 - RNA, 19 nt, Artificial Sequence
  Description of Artificial Sequence: Synthetic oligonucleotide
gagcuaagaugaggaccac

SEQ ID NO: 1872227 - RNA, 19 nt, Artificial Sequence
  Description of Artificial Sequence: Synthetic oligonucleotide
ccccaagcaagugaguguc

SEQ ID NO: 1872228 - RNA, 19 nt, Artificial Sequence
  Description of Artificial Sequence: Synthetic oligonucleotide
cuacaaccauccccuucca

SEQ ID NO: 1872229 - RNA, 19 nt, Artificial Sequence
  Description of Artificial Sequence: Synthetic oligonucleotide
cuaucgccaugggcuagug

SEQ ID NO: 1872230 - RNA, 19 nt, Artificial Sequence
  Description of Artificial Sequence: Synthetic oligonucleotide
ccucaaaugggagguagca

SEQ ID NO: 1872231 - RNA, 19 nt, Artificial Sequence
  Description of Artificial Sequence: Synthetic oligonucleotide
ccguugcacgucaucugcc

SEQ ID NO: 1872232 - RNA, 19 nt, Artificial Sequence
  Description of Artificial Sequence: Synthetic oligonucleotide
cucucgggagcaauucagu

SEQ ID NO: 1872233 - RNA, 19 nt, Artificial Sequence
  Description of Artificial Sequence: Synthetic oligonucleotide
uagcaucacuggcccgaua

SEQ ID NO: 1872234 - RNA, 19 nt, Artificial Sequence
  Description of Artificial Sequence: Synthetic oligonucleotide
cagacgcuccaagugagcu

SEQ ID NO: 1872235 - RNA, 19 nt, Artificial Sequence
  Description of Artificial Sequence: Synthetic oligonucleotide
uggcccgauagagcgggua

SEQ ID NO: 1872236 - RNA, 19 nt, Artificial Sequence
  Description of Artificial Sequence: Synthetic oligonucleotide
cccgauagagcggguagug

SEQ ID NO: 1872237 - RNA, 19 nt, Artificial Sequence
  Description of Artificial Sequence: Synthetic oligonucleotide
ccgauagagcggguagugc

SEQ ID NO: 1872238 - RNA, 19 nt, Artificial Sequence
  Description of Artificial Sequence: Synthetic oligonucleotide
gcggguagugcugcagcag

SEQ ID NO: 1872239 - RNA, 19 nt, Artificial Sequence
  Description of Artificial Sequence: Synthetic oligonucleotide
augcuacaaccauccccuu

SEQ ID NO: 1872240 - RNA, 19 nt, Artificial Sequence
  Description of Artificial Sequence: Synthetic oligonucleotide
gcaucacuggcccgauaga

SEQ ID NO: 1872241 - RNA, 19 nt, Artificial Sequence
  Description of Artificial Sequence: Synthetic oligonucleotide
uccggaggagcugcaucuu

SEQ ID NO: 1872242 - RNA, 19 nt, Artificial Sequence
  Description of Artificial Sequence: Synthetic oligonucleotide
gcugcaccguauguggcca

SEQ ID NO: 1872243 - RNA, 19 nt, Artificial Sequence
  Description of Artificial Sequence: Synthetic oligonucleotide
cguaauuuauccagccagu

SEQ ID NO: 1872244 - RNA, 19 nt, Artificial Sequence
  Description of Artificial Sequence: Synthetic oligonucleotide
uccuccggaggagcugcau

SEQ ID NO: 1872245 - RNA, 19 nt, Artificial Sequence
  Description of Artificial Sequence: Synthetic oligonucleotide
gcagacgcuccaagugagc

SEQ ID NO: 1872246 - RNA, 19 nt, Artificial Sequence
  Description of Artificial Sequence: Synthetic oligonucleotide
ccuccggaggagcugcauc

SEQ ID NO: 1872247 - RNA, 19 nt, Artificial Sequence
  Description of Artificial Sequence: Synthetic oligonucleotide
gcacggagaugaugacaac

SEQ ID NO: 1872248 - RNA, 19 nt, Artificial Sequence
  Description of Artificial Sequence: Synthetic oligonucleotide
auccucucaugugcauuuu

SEQ ID NO: 1872249 - RNA, 19 nt, Artificial Sequence
  Description of Artificial Sequence: Synthetic oligonucleotide
ccaugauaaagcugggguu

SEQ ID NO: 1872250 - RNA, 19 nt, Artificial Sequence
  Description of Artificial Sequence: Synthetic oligonucleotide
uugcgacgcuguugaccau

SEQ ID NO: 1872251 - RNA, 19 nt, Artificial Sequence
  Description of Artificial Sequence: Synthetic oligonucleotide
ccaugggcuagugucuuca

SEQ ID NO: 1872252 - RNA, 19 nt, Artificial Sequence
  Description of Artificial Sequence: Synthetic oligonucleotide
ccgaaaccguugcacguca

SEQ ID NO: 1872253 - RNA, 19 nt, Artificial Sequence
  Description of Artificial Sequence: Synthetic oligonucleotide
gccuaucgccaugggcuag

SEQ ID NO: 1872254 - RNA, 19 nt, Artificial Sequence
  Description of Artificial Sequence: Synthetic oligonucleotide
gacgcucaccucggggacu

SEQ ID NO: 1872255 - RNA, 19 nt, Artificial Sequence
  Description of Artificial Sequence: Synthetic oligonucleotide
gauugccaaugaccaccuu

SEQ ID NO: 1872256 - RNA, 19 nt, Artificial Sequence
  Description of Artificial Sequence: Synthetic oligonucleotide
cuuccauugcgacgcuguu

SEQ ID NO: 1872257 - RNA, 19 nt, Artificial Sequence
  Description of Artificial Sequence: Synthetic oligonucleotide
acgcuccaagugagcuaag

SEQ ID NO: 1872258 - RNA, 19 nt, Artificial Sequence
  Description of Artificial Sequence: Synthetic oligonucleotide
cgagaaaggacaucauauu

SEQ ID NO: 1872259 - RNA, 19 nt, Artificial Sequence
  Description of Artificial Sequence: Synthetic oligonucleotide
gcgacgcuguugaccauca

SEQ ID NO: 1872260 - RNA, 19 nt, Artificial Sequence
  Description of Artificial Sequence: Synthetic oligonucleotide
gcaccguauguggccagca

SEQ ID NO: 1872261 - RNA, 19 nt, Artificial Sequence
  Description of Artificial Sequence: Synthetic oligonucleotide
cauuugccacucccuccgu

SEQ ID NO: 1872262 - RNA, 19 nt, Artificial Sequence
  Description of Artificial Sequence: Synthetic oligonucleotide
ccauugcgacgcuguugac

SEQ ID NO: 1872263 - RNA, 19 nt, Artificial Sequence
  Description of Artificial Sequence: Synthetic oligonucleotide
ccucccgagaaaggacauc

SEQ ID NO: 1872264 - RNA, 19 nt, Artificial Sequence
  Description of Artificial Sequence: Synthetic oligonucleotide
ggccucaguggugcuccac

SEQ ID NO: 1872265 - RNA, 19 nt, Artificial Sequence
  Description of Artificial Sequence: Synthetic oligonucleotide
gccacucccuccguaauuu

SEQ ID NO: 1872266 - RNA, 19 nt, Artificial Sequence
  Description of Artificial Sequence: Synthetic oligonucleotide
gcccgauagagcggguagu

SEQ ID NO: 1872267 - RNA, 19 nt, Artificial Sequence
  Description of Artificial Sequence: Synthetic oligonucleotide
ggagcaccucacaggcgcu

SEQ ID NO: 1872268 - RNA, 19 nt, Artificial Sequence
  Description of Artificial Sequence: Synthetic oligonucleotide
ccacucccuccguaauuua

SEQ ID NO: 1872269 - RNA, 19 nt, Artificial Sequence
  Description of Artificial Sequence: Synthetic oligonucleotide
ccucaguggugcuccacuu

SEQ ID NO: 1872270 - RNA, 19 nt, Artificial Sequence
  Description of Artificial Sequence: Synthetic oligonucleotide
ccuaucgccaugggcuagu

SEQ ID NO: 1872271 - RNA, 19 nt, Artificial Sequence
  Description of Artificial Sequence: Synthetic oligonucleotide
cgacgcuguugaccaucac

SEQ ID NO: 1872272 - RNA, 19 nt, Artificial Sequence
  Description of Artificial Sequence: Synthetic oligonucleotide
cuggcccgauagagcgggu

SEQ ID NO: 1872273 - RNA, 19 nt, Artificial Sequence
  Description of Artificial Sequence: Synthetic oligonucleotide
gccucccgagaaaggacau

SEQ ID NO: 1872274 - RNA, 19 nt, Artificial Sequence
  Description of Artificial Sequence: Synthetic oligonucleotide
gcaccucucgggagcaauu

SEQ ID NO: 1872275 - RNA, 19 nt, Artificial Sequence
  Description of Artificial Sequence: Synthetic oligonucleotide
ccgcugcugcaccguaugu

SEQ ID NO: 1872276 - RNA, 19 nt, Artificial Sequence
  Description of Artificial Sequence: Synthetic oligonucleotide
cgaaaccguugcacgucau

SEQ ID NO: 1872277 - RNA, 19 nt, Artificial Sequence
  Description of Artificial Sequence: Synthetic oligonucleotide
cgcucaccucggggacucc

SEQ ID NO: 1872278 - RNA, 19 nt, Artificial Sequence
  Description of Artificial Sequence: Synthetic oligonucleotide
cccuucacacuggcuggau

SEQ ID NO: 1872279 - RNA, 19 nt, Artificial Sequence
  Description of Artificial Sequence: Synthetic oligonucleotide
cgccaugggcuagugucuu

SEQ ID NO: 1872280 - RNA, 19 nt, Artificial Sequence
  Description of Artificial Sequence: Synthetic oligonucleotide
aaugaaauaauuaauaucu

SEQ ID NO: 1872281 - RNA, 19 nt, Artificial Sequence
  Description of Artificial Sequence: Synthetic oligonucleotide
aauaauuaauaucuuaucu

SEQ ID NO: 1872282 - RNA, 19 nt, Artificial Sequence
  Description of Artificial Sequence: Synthetic oligonucleotide
uuuuauuaaagcuuaauga

SEQ ID NO: 1872283 - RNA, 19 nt, Artificial Sequence
  Description of Artificial Sequence: Synthetic oligonucleotide
uggaugaucaccaucaggg

SEQ ID NO: 1872284 - RNA, 19 nt, Artificial Sequence
  Description of Artificial Sequence: Synthetic oligonucleotide
aaguguuucccucugaagg

SEQ ID NO: 1872285 - RNA, 19 nt, Artificial Sequence
  Description of Artificial Sequence: Synthetic oligonucleotide
uggugaauugacaaaaugg

SEQ ID NO: 1872286 - RNA, 19 nt, Artificial Sequence
  Description of Artificial Sequence: Synthetic oligonucleotide
uucucuaacagcaacgggg

SEQ ID NO: 1872287 - RNA, 19 nt, Artificial Sequence
  Description of Artificial Sequence: Synthetic oligonucleotide
uuagauucugcaaauuugg

SEQ ID NO: 1872288 - RNA, 19 nt, Artificial Sequence
  Description of Artificial Sequence: Synthetic oligonucleotide
cauaacaaaauuaugggac

SEQ ID NO: 1872289 - RNA, 19 nt, Artificial Sequence
  Description of Artificial Sequence: Synthetic oligonucleotide
uuuacauucaaaggaaugg

SEQ ID NO: 1872290 - RNA, 19 nt, Artificial Sequence
  Description of Artificial Sequence: Synthetic oligonucleotide
uuuauuaaagcuuaaugaa

SEQ ID NO: 1872291 - RNA, 19 nt, Artificial Sequence
  Description of Artificial Sequence: Synthetic oligonucleotide
gauguagaaauauuuguag

SEQ ID NO: 1872292 - RNA, 19 nt, Artificial Sequence
  Description of Artificial Sequence: Synthetic oligonucleotide
gaagaaauggguaaaggcg

SEQ ID NO: 1872293 - RNA, 19 nt, Artificial Sequence
  Description of Artificial Sequence: Synthetic oligonucleotide
aaaauggcuccacacaggg

SEQ ID NO: 1872294 - RNA, 19 nt, Artificial Sequence
  Description of Artificial Sequence: Synthetic oligonucleotide
aaacagguggccccgaagc

SEQ ID NO: 1872295 - RNA, 19 nt, Artificial Sequence
  Description of Artificial Sequence: Synthetic oligonucleotide
aaauuuggguuuuaaagcu

SEQ ID NO: 1872296 - RNA, 19 nt, Artificial Sequence
  Description of Artificial Sequence: Synthetic oligonucleotide
uuauggaugaucaccauca

SEQ ID NO: 1872297 - RNA, 19 nt, Artificial Sequence
  Description of Artificial Sequence: Synthetic oligonucleotide
accauaacaaaauuauggg

SEQ ID NO: 1872298 - RNA, 19 nt, Artificial Sequence
  Description of Artificial Sequence: Synthetic oligonucleotide
uacaguaggaagaaauggg

SEQ ID NO: 1872299 - RNA, 19 nt, Artificial Sequence
  Description of Artificial Sequence: Synthetic oligonucleotide
auguagaaauauuuguagc

SEQ ID NO: 1872300 - RNA, 19 nt, Artificial Sequence
  Description of Artificial Sequence: Synthetic oligonucleotide
caggaauucaggaagaagc

SEQ ID NO: 1872301 - RNA, 19 nt, Artificial Sequence
  Description of Artificial Sequence: Synthetic oligonucleotide
ugaauugacaaaauggcuc

SEQ ID NO: 1872302 - RNA, 19 nt, Artificial Sequence
  Description of Artificial Sequence: Synthetic oligonucleotide
augagcagaacauagucgg

SEQ ID NO: 1872303 - RNA, 19 nt, Artificial Sequence
  Description of Artificial Sequence: Synthetic oligonucleotide
aaauauuuguagcuggggu

SEQ ID NO: 1872304 - RNA, 19 nt, Artificial Sequence
  Description of Artificial Sequence: Synthetic oligonucleotide
uguagaaauauuuguagcu

SEQ ID NO: 1872305 - RNA, 19 nt, Artificial Sequence
  Description of Artificial Sequence: Synthetic oligonucleotide
uaaaguuuuauuaaagcuu

SEQ ID NO: 1872306 - RNA, 19 nt, Artificial Sequence
  Description of Artificial Sequence: Synthetic oligonucleotide
uccauuuaaaguuuuauua

SEQ ID NO: 1872307 - RNA, 19 nt, Artificial Sequence
  Description of Artificial Sequence: Synthetic oligonucleotide
aggauuaucaccaagagaa

SEQ ID NO: 1872308 - RNA, 19 nt, Artificial Sequence
  Description of Artificial Sequence: Synthetic oligonucleotide
gaauugacaaaauggcucc

SEQ ID NO: 1872309 - RNA, 19 nt, Artificial Sequence
  Description of Artificial Sequence: Synthetic oligonucleotide
uccacaccaagacuuaugg

SEQ ID NO: 1872310 - RNA, 19 nt, Artificial Sequence
  Description of Artificial Sequence: Synthetic oligonucleotide
aguguuucccucugaaggc

SEQ ID NO: 1872311 - RNA, 19 nt, Artificial Sequence
  Description of Artificial Sequence: Synthetic oligonucleotide
uccagauuuaccauaacaa

SEQ ID NO: 1872312 - RNA, 19 nt, Artificial Sequence
  Description of Artificial Sequence: Synthetic oligonucleotide
agacuuauggaugaucacc

SEQ ID NO: 1872313 - RNA, 19 nt, Artificial Sequence
  Description of Artificial Sequence: Synthetic oligonucleotide
gaauggauauuuuaggaga

SEQ ID NO: 1872314 - RNA, 19 nt, Artificial Sequence
  Description of Artificial Sequence: Synthetic oligonucleotide
uugauguagaaauauuugu

SEQ ID NO: 1872315 - RNA, 19 nt, Artificial Sequence
  Description of Artificial Sequence: Synthetic oligonucleotide
aaggcguaaauacugacau

SEQ ID NO: 1872316 - RNA, 19 nt, Artificial Sequence
  Description of Artificial Sequence: Synthetic oligonucleotide
uaugggacaguucugaaau

SEQ ID NO: 1872317 - RNA, 19 nt, Artificial Sequence
  Description of Artificial Sequence: Synthetic oligonucleotide
aguucugaaauuucuuuag

SEQ ID NO: 1872318 - RNA, 19 nt, Artificial Sequence
  Description of Artificial Sequence: Synthetic oligonucleotide
ucuaaaguccuccagugaa

SEQ ID NO: 1872319 - RNA, 19 nt, Artificial Sequence
  Description of Artificial Sequence: Synthetic oligonucleotide
uggguaaaggcguaaauac

SEQ ID NO: 1872320 - RNA, 19 nt, Artificial Sequence
  Description of Artificial Sequence: Synthetic oligonucleotide
aauauuuguagcugggguu

SEQ ID NO: 1872321 - RNA, 19 nt, Artificial Sequence
  Description of Artificial Sequence: Synthetic oligonucleotide
gaguaaaucuccaaguggc

SEQ ID NO: 1872322 - RNA, 19 nt, Artificial Sequence
  Description of Artificial Sequence: Synthetic oligonucleotide
gaugcguggaauauaaccc

SEQ ID NO: 1872323 - RNA, 19 nt, Artificial Sequence
  Description of Artificial Sequence: Synthetic oligonucleotide
aauacaguuggugaauuga

SEQ ID NO: 1872324 - RNA, 19 nt, Artificial Sequence
  Description of Artificial Sequence: Synthetic oligonucleotide
aauacugacauggaguaaa

SEQ ID NO: 1872325 - RNA, 19 nt, Artificial Sequence
  Description of Artificial Sequence: Synthetic oligonucleotide
uuuccacucucauugauga

SEQ ID NO: 1872326 - RNA, 19 nt, Artificial Sequence
  Description of Artificial Sequence: Synthetic oligonucleotide
augcguggaauauaacccc

SEQ ID NO: 1872327 - RNA, 19 nt, Artificial Sequence
  Description of Artificial Sequence: Synthetic oligonucleotide
ugaagaagugaugaggagc

SEQ ID NO: 1872328 - RNA, 19 nt, Artificial Sequence
  Description of Artificial Sequence: Synthetic oligonucleotide
ugauguagaaauauuugua

SEQ ID NO: 1872329 - RNA, 19 nt, Artificial Sequence
  Description of Artificial Sequence: Synthetic oligonucleotide
aauuaugggacaguucuga

SEQ ID NO: 1872330 - RNA, 19 nt, Artificial Sequence
  Description of Artificial Sequence: Synthetic oligonucleotide
gaugagcagaacauagucg

SEQ ID NO: 1872331 - RNA, 19 nt, Artificial Sequence
  Description of Artificial Sequence: Synthetic oligonucleotide
ucuugacacacauucgugc

SEQ ID NO: 1872332 - RNA, 19 nt, Artificial Sequence
  Description of Artificial Sequence: Synthetic oligonucleotide
auugaugauuucaggacgc

SEQ ID NO: 1872333 - RNA, 19 nt, Artificial Sequence
  Description of Artificial Sequence: Synthetic oligonucleotide
cuugacacacauucgugcg

SEQ ID NO: 1872334 - RNA, 19 nt, Artificial Sequence
  Description of Artificial Sequence: Synthetic oligonucleotide
uggauucccucccugaugc

SEQ ID NO: 1872335 - RNA, 19 nt, Artificial Sequence
  Description of Artificial Sequence: Synthetic oligonucleotide
cuucccaucuucuaaaguc

SEQ ID NO: 1872336 - RNA, 19 nt, Artificial Sequence
  Description of Artificial Sequence: Synthetic oligonucleotide
gaugauuucaggacgcacc

SEQ ID NO: 1872337 - RNA, 19 nt, Artificial Sequence
  Description of Artificial Sequence: Synthetic oligonucleotide
uuaccauaacaaaauuaug

SEQ ID NO: 1872338 - RNA, 19 nt, Artificial Sequence
  Description of Artificial Sequence: Synthetic oligonucleotide
uagauucugcaaauuuggg

SEQ ID NO: 1872339 - RNA, 19 nt, Artificial Sequence
  Description of Artificial Sequence: Synthetic oligonucleotide
uuuguaucagauagcuuca

SEQ ID NO: 1872340 - RNA, 19 nt, Artificial Sequence
  Description of Artificial Sequence: Synthetic oligonucleotide
gaaauauuuguagcugggg

SEQ ID NO: 1872341 - RNA, 19 nt, Artificial Sequence
  Description of Artificial Sequence: Synthetic oligonucleotide
agcaacggggaaaacaugc

SEQ ID NO: 1872342 - RNA, 19 nt, Artificial Sequence
  Description of Artificial Sequence: Synthetic oligonucleotide
cauggaguaaaucuccaag

SEQ ID NO: 1872343 - RNA, 19 nt, Artificial Sequence
  Description of Artificial Sequence: Synthetic oligonucleotide
auucuugacacacauucgu

SEQ ID NO: 1872344 - RNA, 19 nt, Artificial Sequence
  Description of Artificial Sequence: Synthetic oligonucleotide
uuuuaggagagaugagcag

SEQ ID NO: 1872345 - RNA, 19 nt, Artificial Sequence
  Description of Artificial Sequence: Synthetic oligonucleotide
gaaggcaucaccugucagc

SEQ ID NO: 1872346 - RNA, 19 nt, Artificial Sequence
  Description of Artificial Sequence: Synthetic oligonucleotide
uuuaggagagaugagcaga

SEQ ID NO: 1872347 - RNA, 19 nt, Artificial Sequence
  Description of Artificial Sequence: Synthetic oligonucleotide
ggcguaaauacugacaugg

SEQ ID NO: 1872348 - RNA, 19 nt, Artificial Sequence
  Description of Artificial Sequence: Synthetic oligonucleotide
uuuuaacuccaguacaaaa

SEQ ID NO: 1872349 - RNA, 19 nt, Artificial Sequence
  Description of Artificial Sequence: Synthetic oligonucleotide
aguaggaagaaauggguaa

SEQ ID NO: 1872350 - RNA, 19 nt, Artificial Sequence
  Description of Artificial Sequence: Synthetic oligonucleotide
uuucucuaacagcaacggg

SEQ ID NO: 1872351 - RNA, 19 nt, Artificial Sequence
  Description of Artificial Sequence: Synthetic oligonucleotide
aaaacaugcuuccggcuga

SEQ ID NO: 1872352 - RNA, 19 nt, Artificial Sequence
  Description of Artificial Sequence: Synthetic oligonucleotide
uagucggccaugcugcugg

SEQ ID NO: 1872353 - RNA, 19 nt, Artificial Sequence
  Description of Artificial Sequence: Synthetic oligonucleotide
acggggaaaacaugcuucc

SEQ ID NO: 1872354 - RNA, 19 nt, Artificial Sequence
  Description of Artificial Sequence: Synthetic oligonucleotide
ucucuaacagcaacgggga

SEQ ID NO: 1872355 - RNA, 19 nt, Artificial Sequence
  Description of Artificial Sequence: Synthetic oligonucleotide
agauucugcaaauuugggu

SEQ ID NO: 1872356 - RNA, 19 nt, Artificial Sequence
  Description of Artificial Sequence: Synthetic oligonucleotide
cacggugguaguuacacag

SEQ ID NO: 1872357 - RNA, 19 nt, Artificial Sequence
  Description of Artificial Sequence: Synthetic oligonucleotide
agaacauagucggccaugc

SEQ ID NO: 1872358 - RNA, 19 nt, Artificial Sequence
  Description of Artificial Sequence: Synthetic oligonucleotide
ggugaauugacaaaauggc

SEQ ID NO: 1872359 - RNA, 19 nt, Artificial Sequence
  Description of Artificial Sequence: Synthetic oligonucleotide
aauguguccggcugaagaa

SEQ ID NO: 1872360 - RNA, 19 nt, Artificial Sequence
  Description of Artificial Sequence: Synthetic oligonucleotide
ggaguaaaucuccaagugg

SEQ ID NO: 1872361 - RNA, 19 nt, Artificial Sequence
  Description of Artificial Sequence: Synthetic oligonucleotide
uucaugucacagcucaucu

SEQ ID NO: 1872362 - RNA, 19 nt, Artificial Sequence
  Description of Artificial Sequence: Synthetic oligonucleotide
aaacugaagcacagcaaac

SEQ ID NO: 1872363 - RNA, 19 nt, Artificial Sequence
  Description of Artificial Sequence: Synthetic oligonucleotide
uaucagauagcuucauccu

SEQ ID NO: 1872364 - RNA, 19 nt, Artificial Sequence
  Description of Artificial Sequence: Synthetic oligonucleotide
ggaauggauauuuuaggag

SEQ ID NO: 1872365 - RNA, 19 nt, Artificial Sequence
  Description of Artificial Sequence: Synthetic oligonucleotide
aacagguggccccgaagcg

SEQ ID NO: 1872366 - RNA, 19 nt, Artificial Sequence
  Description of Artificial Sequence: Synthetic oligonucleotide
aacagcaacggggaaaaca

SEQ ID NO: 1872367 - RNA, 19 nt, Artificial Sequence
  Description of Artificial Sequence: Synthetic oligonucleotide
uuacauucaaaggaaugga

SEQ ID NO: 1872368 - RNA, 19 nt, Artificial Sequence
  Description of Artificial Sequence: Synthetic oligonucleotide
guuucucuaacagcaacgg

SEQ ID NO: 1872369 - RNA, 19 nt, Artificial Sequence
  Description of Artificial Sequence: Synthetic oligonucleotide
caagacuuauggaugauca

SEQ ID NO: 1872370 - RNA, 19 nt, Artificial Sequence
  Description of Artificial Sequence: Synthetic oligonucleotide
ugacaaaauggcuccacac

SEQ ID NO: 1872371 - RNA, 19 nt, Artificial Sequence
  Description of Artificial Sequence: Synthetic oligonucleotide
auggaugaucaccaucagg

SEQ ID NO: 1872372 - RNA, 19 nt, Artificial Sequence
  Description of Artificial Sequence: Synthetic oligonucleotide
ggaugcguggaauauaacc

SEQ ID NO: 1872373 - RNA, 19 nt, Artificial Sequence
  Description of Artificial Sequence: Synthetic oligonucleotide
agaaauauuuguagcuggg

SEQ ID NO: 1872374 - RNA, 19 nt, Artificial Sequence
  Description of Artificial Sequence: Synthetic oligonucleotide
aguuucucuaacagcaacg

SEQ ID NO: 1872375 - RNA, 19 nt, Artificial Sequence
  Description of Artificial Sequence: Synthetic oligonucleotide
cauucuugacacacauucg

SEQ ID NO: 1872376 - RNA, 19 nt, Artificial Sequence
  Description of Artificial Sequence: Synthetic oligonucleotide
uucuugacacacauucgug

SEQ ID NO: 1872377 - RNA, 19 nt, Artificial Sequence
  Description of Artificial Sequence: Synthetic oligonucleotide
aauggguaaaggcguaaau

SEQ ID NO: 1872378 - RNA, 19 nt, Artificial Sequence
  Description of Artificial Sequence: Synthetic oligonucleotide
agcgaagcgacaucuucac

SEQ ID NO: 1872379 - RNA, 19 nt, Artificial Sequence
  Description of Artificial Sequence: Synthetic oligonucleotide
gggguuuccacucucauug

SEQ ID NO: 1872380 - RNA, 19 nt, Artificial Sequence
  Description of Artificial Sequence: Synthetic oligonucleotide
aggagagaugagcagaaca

SEQ ID NO: 1872381 - RNA, 19 nt, Artificial Sequence
  Description of Artificial Sequence: Synthetic oligonucleotide
aagaaaaggaugcguggaa

SEQ ID NO: 1872382 - RNA, 19 nt, Artificial Sequence
  Description of Artificial Sequence: Synthetic oligonucleotide
uugacaaaauggcuccaca

SEQ ID NO: 1872383 - RNA, 19 nt, Artificial Sequence
  Description of Artificial Sequence: Synthetic oligonucleotide
gaauucaggaagaagccca

SEQ ID NO: 1872384 - RNA, 19 nt, Artificial Sequence
  Description of Artificial Sequence: Synthetic oligonucleotide
caaaauggcuccacacagg

SEQ ID NO: 1872385 - RNA, 19 nt, Artificial Sequence
  Description of Artificial Sequence: Synthetic oligonucleotide
gauucugcaaauuuggguu

SEQ ID NO: 1872386 - RNA, 19 nt, Artificial Sequence
  Description of Artificial Sequence: Synthetic oligonucleotide
uuucauccccugaacaacu

SEQ ID NO: 1872387 - RNA, 19 nt, Artificial Sequence
  Description of Artificial Sequence: Synthetic oligonucleotide
agauuuaccauaacaaaau

SEQ ID NO: 1872388 - RNA, 19 nt, Artificial Sequence
  Description of Artificial Sequence: Synthetic oligonucleotide
uuaggagagaugagcagaa

SEQ ID NO: 1872389 - RNA, 19 nt, Artificial Sequence
  Description of Artificial Sequence: Synthetic oligonucleotide
auuuuaggagagaugagca

SEQ ID NO: 1872390 - RNA, 19 nt, Artificial Sequence
  Description of Artificial Sequence: Synthetic oligonucleotide
aggaacagcacaggaauuc

SEQ ID NO: 1872391 - RNA, 19 nt, Artificial Sequence
  Description of Artificial Sequence: Synthetic oligonucleotide
aguuacacagggccacugg

SEQ ID NO: 1872392 - RNA, 19 nt, Artificial Sequence
  Description of Artificial Sequence: Synthetic oligonucleotide
cauccccugaacaacuugc

SEQ ID NO: 1872393 - RNA, 19 nt, Artificial Sequence
  Description of Artificial Sequence: Synthetic oligonucleotide
auugacaaaauggcuccac

SEQ ID NO: 1872394 - RNA, 19 nt, Artificial Sequence
  Description of Artificial Sequence: Synthetic oligonucleotide
uuuccaaguccaauguguc

SEQ ID NO: 1872395 - RNA, 19 nt, Artificial Sequence
  Description of Artificial Sequence: Synthetic oligonucleotide
aagcccaggauuaucacca

SEQ ID NO: 1872396 - RNA, 19 nt, Artificial Sequence
  Description of Artificial Sequence: Synthetic oligonucleotide
auacaguuggugaauugac

SEQ ID NO: 1872397 - RNA, 19 nt, Artificial Sequence
  Description of Artificial Sequence: Synthetic oligonucleotide
cucaucuugaaaguguuuc

SEQ ID NO: 1872398 - RNA, 19 nt, Artificial Sequence
  Description of Artificial Sequence: Synthetic oligonucleotide
aggaagaaauggguaaagg

SEQ ID NO: 1872399 - RNA, 19 nt, Artificial Sequence
  Description of Artificial Sequence: Synthetic oligonucleotide
aaaaggaugcguggaauau

SEQ ID NO: 1872400 - RNA, 19 nt, Artificial Sequence
  Description of Artificial Sequence: Synthetic oligonucleotide
uagaagccugguuuccugg

SEQ ID NO: 1872401 - RNA, 19 nt, Artificial Sequence
  Description of Artificial Sequence: Synthetic oligonucleotide
uccagaacacgccuucaug

SEQ ID NO: 1872402 - RNA, 19 nt, Artificial Sequence
  Description of Artificial Sequence: Synthetic oligonucleotide
aaaacccuuuccaagucca

SEQ ID NO: 1872403 - RNA, 19 nt, Artificial Sequence
  Description of Artificial Sequence: Synthetic oligonucleotide
uaaaggcguaaauacugac

SEQ ID NO: 1872404 - RNA, 19 nt, Artificial Sequence
  Description of Artificial Sequence: Synthetic oligonucleotide
ggauccaagaaaaggaugc

SEQ ID NO: 1872405 - RNA, 19 nt, Artificial Sequence
  Description of Artificial Sequence: Synthetic oligonucleotide
uucuaaaguccuccaguga

SEQ ID NO: 1872406 - RNA, 19 nt, Artificial Sequence
  Description of Artificial Sequence: Synthetic oligonucleotide
uccagugaauaugaucucc

SEQ ID NO: 1872407 - RNA, 19 nt, Artificial Sequence
  Description of Artificial Sequence: Synthetic oligonucleotide
gguggugucacuguucugg

SEQ ID NO: 1872408 - RNA, 19 nt, Artificial Sequence
  Description of Artificial Sequence: Synthetic oligonucleotide
uguagcugggguuuccacu

SEQ ID NO: 1872409 - RNA, 19 nt, Artificial Sequence
  Description of Artificial Sequence: Synthetic oligonucleotide
aguccaauguguccggcug

SEQ ID NO: 1872410 - RNA, 19 nt, Artificial Sequence
  Description of Artificial Sequence: Synthetic oligonucleotide
cuuauggaugaucaccauc

SEQ ID NO: 1872411 - RNA, 19 nt, Artificial Sequence
  Description of Artificial Sequence: Synthetic oligonucleotide
cauucgugcgagcagggag

SEQ ID NO: 1872412 - RNA, 19 nt, Artificial Sequence
  Description of Artificial Sequence: Synthetic oligonucleotide
uucuuuagauucugcaaau

SEQ ID NO: 1872413 - RNA, 19 nt, Artificial Sequence
  Description of Artificial Sequence: Synthetic oligonucleotide
uucacggugguaguuacac

SEQ ID NO: 1872414 - RNA, 19 nt, Artificial Sequence
  Description of Artificial Sequence: Synthetic oligonucleotide
aaggcuugaguuucucuaa

SEQ ID NO: 1872415 - RNA, 19 nt, Artificial Sequence
  Description of Artificial Sequence: Synthetic oligonucleotide
ucgggauucacagcagagg

SEQ ID NO: 1872416 - RNA, 19 nt, Artificial Sequence
  Description of Artificial Sequence: Synthetic oligonucleotide
aauucaggaagaagcccag

SEQ ID NO: 1872417 - RNA, 19 nt, Artificial Sequence
  Description of Artificial Sequence: Synthetic oligonucleotide
uuaugggacaguucugaaa

SEQ ID NO: 1872418 - RNA, 19 nt, Artificial Sequence
  Description of Artificial Sequence: Synthetic oligonucleotide
gaaggaacagcacaggaau

SEQ ID NO: 1872419 - RNA, 19 nt, Artificial Sequence
  Description of Artificial Sequence: Synthetic oligonucleotide
gacuuauggaugaucacca

SEQ ID NO: 1872420 - RNA, 19 nt, Artificial Sequence
  Description of Artificial Sequence: Synthetic oligonucleotide
cuuugcaagcuccacacca

SEQ ID NO: 1872421 - RNA, 19 nt, Artificial Sequence
  Description of Artificial Sequence: Synthetic oligonucleotide
aguuggugaauugacaaaa

SEQ ID NO: 1872422 - RNA, 19 nt, Artificial Sequence
  Description of Artificial Sequence: Synthetic oligonucleotide
gauuaucaccaagagaaaa

SEQ ID NO: 1872423 - RNA, 19 nt, Artificial Sequence
  Description of Artificial Sequence: Synthetic oligonucleotide
acacauucgugcgagcagg

SEQ ID NO: 1872424 - RNA, 19 nt, Artificial Sequence
  Description of Artificial Sequence: Synthetic oligonucleotide
ugacacacauucgugcgag

SEQ ID NO: 1872425 - RNA, 19 nt, Artificial Sequence
  Description of Artificial Sequence: Synthetic oligonucleotide
aacuugcucagcauugaug

SEQ ID NO: 1872426 - RNA, 19 nt, Artificial Sequence
  Description of Artificial Sequence: Synthetic oligonucleotide
gagcagaacauagucggcc

SEQ ID NO: 1872427 - RNA, 19 nt, Artificial Sequence
  Description of Artificial Sequence: Synthetic oligonucleotide
agcuucgucagcaugucuc

SEQ ID NO: 1872428 - RNA, 19 nt, Artificial Sequence
  Description of Artificial Sequence: Synthetic oligonucleotide
uuacacagggccacuggac

SEQ ID NO: 1872429 - RNA, 19 nt, Artificial Sequence
  Description of Artificial Sequence: Synthetic oligonucleotide
uaugaucuccaaaacccuu

SEQ ID NO: 1872430 - RNA, 19 nt, Artificial Sequence
  Description of Artificial Sequence: Synthetic oligonucleotide
ggggaaaacaugcuuccgg

SEQ ID NO: 1872431 - RNA, 19 nt, Artificial Sequence
  Description of Artificial Sequence: Synthetic oligonucleotide
cagaguagguagaagccug

SEQ ID NO: 1872432 - RNA, 19 nt, Artificial Sequence
  Description of Artificial Sequence: Synthetic oligonucleotide
acccuuuccaaguccaaug

SEQ ID NO: 1872433 - RNA, 19 nt, Artificial Sequence
  Description of Artificial Sequence: Synthetic oligonucleotide
gaaaguguuucccucugaa

SEQ ID NO: 1872434 - RNA, 19 nt, Artificial Sequence
  Description of Artificial Sequence: Synthetic oligonucleotide
agcauugauguagaaauau

SEQ ID NO: 1872435 - RNA, 19 nt, Artificial Sequence
  Description of Artificial Sequence: Synthetic oligonucleotide
ugaaggcaucaccugucag

SEQ ID NO: 1872436 - RNA, 19 nt, Artificial Sequence
  Description of Artificial Sequence: Synthetic oligonucleotide
aaauuaugggacaguucug

SEQ ID NO: 1872437 - RNA, 19 nt, Artificial Sequence
  Description of Artificial Sequence: Synthetic oligonucleotide
uugacacacauucgugcga

SEQ ID NO: 1872438 - RNA, 19 nt, Artificial Sequence
  Description of Artificial Sequence: Synthetic oligonucleotide
acaaaauuaugggacaguu

SEQ ID NO: 1872439 - RNA, 19 nt, Artificial Sequence
  Description of Artificial Sequence: Synthetic oligonucleotide
gcuugaguuucucuaacag

SEQ ID NO: 1872440 - RNA, 19 nt, Artificial Sequence
  Description of Artificial Sequence: Synthetic oligonucleotide
uccaaguggcucaaguuuu

SEQ ID NO: 1872441 - RNA, 19 nt, Artificial Sequence
  Description of Artificial Sequence: Synthetic oligonucleotide
ugagcagaacauagucggc

SEQ ID NO: 1872442 - RNA, 19 nt, Artificial Sequence
  Description of Artificial Sequence: Synthetic oligonucleotide
ucuucccaucuucuaaagu

SEQ ID NO: 1872443 - RNA, 19 nt, Artificial Sequence
  Description of Artificial Sequence: Synthetic oligonucleotide
gagagcuccucccagagua

SEQ ID NO: 1872444 - RNA, 19 nt, Artificial Sequence
  Description of Artificial Sequence: Synthetic oligonucleotide
acgccuucaugucacagcu

SEQ ID NO: 1872445 - RNA, 19 nt, Artificial Sequence
  Description of Artificial Sequence: Synthetic oligonucleotide
ugaacaacuugcucagcau

SEQ ID NO: 1872446 - RNA, 19 nt, Artificial Sequence
  Description of Artificial Sequence: Synthetic oligonucleotide
acuggacugagggaacucg

SEQ ID NO: 1872447 - RNA, 19 nt, Artificial Sequence
  Description of Artificial Sequence: Synthetic oligonucleotide
cgaagcgacaucuucacgg

SEQ ID NO: 1872448 - RNA, 19 nt, Artificial Sequence
  Description of Artificial Sequence: Synthetic oligonucleotide
agauagcuucauccuuuac

SEQ ID NO: 1872449 - RNA, 19 nt, Artificial Sequence
  Description of Artificial Sequence: Synthetic oligonucleotide
auuuguagcugggguuucc

SEQ ID NO: 1872450 - RNA, 19 nt, Artificial Sequence
  Description of Artificial Sequence: Synthetic oligonucleotide
acaggaauucaggaagaag

SEQ ID NO: 1872451 - RNA, 19 nt, Artificial Sequence
  Description of Artificial Sequence: Synthetic oligonucleotide
caccuugccacugggaucc

SEQ ID NO: 1872452 - RNA, 19 nt, Artificial Sequence
  Description of Artificial Sequence: Synthetic oligonucleotide
acaguaggaagaaaugggu

SEQ ID NO: 1872453 - RNA, 19 nt, Artificial Sequence
  Description of Artificial Sequence: Synthetic oligonucleotide
ugcucagcauugauguaga

SEQ ID NO: 1872454 - RNA, 19 nt, Artificial Sequence
  Description of Artificial Sequence: Synthetic oligonucleotide
auucgugcgagcagggagg

SEQ ID NO: 1872455 - RNA, 19 nt, Artificial Sequence
  Description of Artificial Sequence: Synthetic oligonucleotide
cuccagauuuaccauaaca

SEQ ID NO: 1872456 - RNA, 19 nt, Artificial Sequence
  Description of Artificial Sequence: Synthetic oligonucleotide
ugggccauucuugacacac

SEQ ID NO: 1872457 - RNA, 19 nt, Artificial Sequence
  Description of Artificial Sequence: Synthetic oligonucleotide
gagcagagaaggaacagca

SEQ ID NO: 1872458 - RNA, 19 nt, Artificial Sequence
  Description of Artificial Sequence: Synthetic oligonucleotide
ccaagaaaaggaugcgugg

SEQ ID NO: 1872459 - RNA, 19 nt, Artificial Sequence
  Description of Artificial Sequence: Synthetic oligonucleotide
ucccucugaaggcaucacc

SEQ ID NO: 1872460 - RNA, 19 nt, Artificial Sequence
  Description of Artificial Sequence: Synthetic oligonucleotide
gggaaaacaugcuuccggc

SEQ ID NO: 1872461 - RNA, 19 nt, Artificial Sequence
  Description of Artificial Sequence: Synthetic oligonucleotide
auuucaggacgcaccuugc

SEQ ID NO: 1872462 - RNA, 19 nt, Artificial Sequence
  Description of Artificial Sequence: Synthetic oligonucleotide
cuggacugagggaacucgg

SEQ ID NO: 1872463 - RNA, 19 nt, Artificial Sequence
  Description of Artificial Sequence: Synthetic oligonucleotide
aagcgaagcgacaucuuca

SEQ ID NO: 1872464 - RNA, 19 nt, Artificial Sequence
  Description of Artificial Sequence: Synthetic oligonucleotide
cuuuccaaguccaaugugu

SEQ ID NO: 1872465 - RNA, 19 nt, Artificial Sequence
  Description of Artificial Sequence: Synthetic oligonucleotide
aaauggguaaaggcguaaa

SEQ ID NO: 1872466 - RNA, 19 nt, Artificial Sequence
  Description of Artificial Sequence: Synthetic oligonucleotide
cucgggauucacagcagag

SEQ ID NO: 1872467 - RNA, 19 nt, Artificial Sequence
  Description of Artificial Sequence: Synthetic oligonucleotide
guagaagccugguuuccug

SEQ ID NO: 1872468 - RNA, 19 nt, Artificial Sequence
  Description of Artificial Sequence: Synthetic oligonucleotide
agggcuugaaggcuugagu

SEQ ID NO: 1872469 - RNA, 19 nt, Artificial Sequence
  Description of Artificial Sequence: Synthetic oligonucleotide
cacgccuucaugucacagc

SEQ ID NO: 1872470 - RNA, 19 nt, Artificial Sequence
  Description of Artificial Sequence: Synthetic oligonucleotide
acagcaacggggaaaacau

SEQ ID NO: 1872471 - RNA, 19 nt, Artificial Sequence
  Description of Artificial Sequence: Synthetic oligonucleotide
gagcaggaaacugaagcac

SEQ ID NO: 1872472 - RNA, 19 nt, Artificial Sequence
  Description of Artificial Sequence: Synthetic oligonucleotide
aucagauagcuucauccuu

SEQ ID NO: 1872473 - RNA, 19 nt, Artificial Sequence
  Description of Artificial Sequence: Synthetic oligonucleotide
ugcuggaugcacagaccag

SEQ ID NO: 1872474 - RNA, 19 nt, Artificial Sequence
  Description of Artificial Sequence: Synthetic oligonucleotide
ugaugauuucaggacgcac

SEQ ID NO: 1872475 - RNA, 19 nt, Artificial Sequence
  Description of Artificial Sequence: Synthetic oligonucleotide
ucuccugagcuucuuucau

SEQ ID NO: 1872476 - RNA, 19 nt, Artificial Sequence
  Description of Artificial Sequence: Synthetic oligonucleotide
ucuccaaguggcucaaguu

SEQ ID NO: 1872477 - RNA, 19 nt, Artificial Sequence
  Description of Artificial Sequence: Synthetic oligonucleotide
acauucaaaggaauggaua

SEQ ID NO: 1872478 - RNA, 19 nt, Artificial Sequence
  Description of Artificial Sequence: Synthetic oligonucleotide
cucccugaugcuuuucuuc

SEQ ID NO: 1872479 - RNA, 19 nt, Artificial Sequence
  Description of Artificial Sequence: Synthetic oligonucleotide
auuaugggacaguucugaa

SEQ ID NO: 1872480 - RNA, 19 nt, Artificial Sequence
  Description of Artificial Sequence: Synthetic oligonucleotide
uuccggcugaggcugaguc

SEQ ID NO: 1872481 - RNA, 19 nt, Artificial Sequence
  Description of Artificial Sequence: Synthetic oligonucleotide
cacacauucgugcgagcag

SEQ ID NO: 1872482 - RNA, 19 nt, Artificial Sequence
  Description of Artificial Sequence: Synthetic oligonucleotide
auaugaucuccaaaacccu

SEQ ID NO: 1872483 - RNA, 19 nt, Artificial Sequence
  Description of Artificial Sequence: Synthetic oligonucleotide
agaguagguagaagccugg

SEQ ID NO: 1872484 - RNA, 19 nt, Artificial Sequence
  Description of Artificial Sequence: Synthetic oligonucleotide
gacgcaccuugccacuggg

SEQ ID NO: 1872485 - RNA, 19 nt, Artificial Sequence
  Description of Artificial Sequence: Synthetic oligonucleotide
uccggcugaagaagugaug

SEQ ID NO: 1872486 - RNA, 19 nt, Artificial Sequence
  Description of Artificial Sequence: Synthetic oligonucleotide
gcaugucucuuccacagug

SEQ ID NO: 1872487 - RNA, 19 nt, Artificial Sequence
  Description of Artificial Sequence: Synthetic oligonucleotide
cuucaugucacagcucauc

SEQ ID NO: 1872488 - RNA, 19 nt, Artificial Sequence
  Description of Artificial Sequence: Synthetic oligonucleotide
gcaagcuccacaccaagac

SEQ ID NO: 1872489 - RNA, 19 nt, Artificial Sequence
  Description of Artificial Sequence: Synthetic oligonucleotide
cguaaauacugacauggag

SEQ ID NO: 1872490 - RNA, 19 nt, Artificial Sequence
  Description of Artificial Sequence: Synthetic oligonucleotide
uuuguagcugggguuucca

SEQ ID NO: 1872491 - RNA, 19 nt, Artificial Sequence
  Description of Artificial Sequence: Synthetic oligonucleotide
aaaggaugcguggaauaua

SEQ ID NO: 1872492 - RNA, 19 nt, Artificial Sequence
  Description of Artificial Sequence: Synthetic oligonucleotide
aaacaugcuuccggcugag

SEQ ID NO: 1872493 - RNA, 19 nt, Artificial Sequence
  Description of Artificial Sequence: Synthetic oligonucleotide
ggguuuuaaagcuuugcaa

SEQ ID NO: 1872494 - RNA, 19 nt, Artificial Sequence
  Description of Artificial Sequence: Synthetic oligonucleotide
auccaagaaaaggaugcgu

SEQ ID NO: 1872495 - RNA, 19 nt, Artificial Sequence
  Description of Artificial Sequence: Synthetic oligonucleotide
acauggaguaaaucuccaa

SEQ ID NO: 1872496 - RNA, 19 nt, Artificial Sequence
  Description of Artificial Sequence: Synthetic oligonucleotide
cacauucgugcgagcaggg

SEQ ID NO: 1872497 - RNA, 19 nt, Artificial Sequence
  Description of Artificial Sequence: Synthetic oligonucleotide
caaacagguggccccgaag

SEQ ID NO: 1872498 - RNA, 19 nt, Artificial Sequence
  Description of Artificial Sequence: Synthetic oligonucleotide
acugagggaacucgggauu

SEQ ID NO: 1872499 - RNA, 19 nt, Artificial Sequence
  Description of Artificial Sequence: Synthetic oligonucleotide
acacacauucgugcgagca

SEQ ID NO: 1872500 - RNA, 19 nt, Artificial Sequence
  Description of Artificial Sequence: Synthetic oligonucleotide
guaaaggcguaaauacuga

SEQ ID NO: 1872501 - RNA, 19 nt, Artificial Sequence
  Description of Artificial Sequence: Synthetic oligonucleotide
cagaacacgccuucauguc

SEQ ID NO: 1872502 - RNA, 19 nt, Artificial Sequence
  Description of Artificial Sequence: Synthetic oligonucleotide
caagaaaaggaugcgugga

SEQ ID NO: 1872503 - RNA, 19 nt, Artificial Sequence
  Description of Artificial Sequence: Synthetic oligonucleotide
cuccacacagggcuugaag

SEQ ID NO: 1872504 - RNA, 19 nt, Artificial Sequence
  Description of Artificial Sequence: Synthetic oligonucleotide
cuccacaccaagacuuaug

SEQ ID NO: 1872505 - RNA, 19 nt, Artificial Sequence
  Description of Artificial Sequence: Synthetic oligonucleotide
agaagccugguuuccuggu

SEQ ID NO: 1872506 - RNA, 19 nt, Artificial Sequence
  Description of Artificial Sequence: Synthetic oligonucleotide
ugcacagaccagcuucguc

SEQ ID NO: 1872507 - RNA, 19 nt, Artificial Sequence
  Description of Artificial Sequence: Synthetic oligonucleotide
uugaugauuucaggacgca

SEQ ID NO: 1872508 - RNA, 19 nt, Artificial Sequence
  Description of Artificial Sequence: Synthetic oligonucleotide
caggauuaucaccaagaga

SEQ ID NO: 1872509 - RNA, 19 nt, Artificial Sequence
  Description of Artificial Sequence: Synthetic oligonucleotide
ggauucacagcagaggguc

SEQ ID NO: 1872510 - RNA, 19 nt, Artificial Sequence
  Description of Artificial Sequence: Synthetic oligonucleotide
ccauaacaaaauuauggga

SEQ ID NO: 1872511 - RNA, 19 nt, Artificial Sequence
  Description of Artificial Sequence: Synthetic oligonucleotide
acucgggauucacagcaga

SEQ ID NO: 1872512 - RNA, 19 nt, Artificial Sequence
  Description of Artificial Sequence: Synthetic oligonucleotide
ggauauuuuaggagagaug

SEQ ID NO: 1872513 - RNA, 19 nt, Artificial Sequence
  Description of Artificial Sequence: Synthetic oligonucleotide
caccaagacuuauggauga

SEQ ID NO: 1872514 - RNA, 19 nt, Artificial Sequence
  Description of Artificial Sequence: Synthetic oligonucleotide
aacccuuuccaaguccaau

SEQ ID NO: 1872515 - RNA, 19 nt, Artificial Sequence
  Description of Artificial Sequence: Synthetic oligonucleotide
cuuuagauucugcaaauuu

SEQ ID NO: 1872516 - RNA, 19 nt, Artificial Sequence
  Description of Artificial Sequence: Synthetic oligonucleotide
aggcguaaauacugacaug

SEQ ID NO: 1872517 - RNA, 19 nt, Artificial Sequence
  Description of Artificial Sequence: Synthetic oligonucleotide
cccagaguagguagaagcc

SEQ ID NO: 1872518 - RNA, 19 nt, Artificial Sequence
  Description of Artificial Sequence: Synthetic oligonucleotide
uccucccagaguagguaga

SEQ ID NO: 1872519 - RNA, 19 nt, Artificial Sequence
  Description of Artificial Sequence: Synthetic oligonucleotide
uccccugaacaacuugcuc

SEQ ID NO: 1872520 - RNA, 19 nt, Artificial Sequence
  Description of Artificial Sequence: Synthetic oligonucleotide
gguaguuacacagggccac

SEQ ID NO: 1872521 - RNA, 19 nt, Artificial Sequence
  Description of Artificial Sequence: Synthetic oligonucleotide
ucaugucacagcucaucuu

SEQ ID NO: 1872522 - RNA, 19 nt, Artificial Sequence
  Description of Artificial Sequence: Synthetic oligonucleotide
auggauauuuuaggagaga

SEQ ID NO: 1872523 - RNA, 19 nt, Artificial Sequence
  Description of Artificial Sequence: Synthetic oligonucleotide
aggaagaagcccaggauua

SEQ ID NO: 1872524 - RNA, 19 nt, Artificial Sequence
  Description of Artificial Sequence: Synthetic oligonucleotide
acaacuugcucagcauuga

SEQ ID NO: 1872525 - RNA, 19 nt, Artificial Sequence
  Description of Artificial Sequence: Synthetic oligonucleotide
cgggauucacagcagaggg

SEQ ID NO: 1872526 - RNA, 19 nt, Artificial Sequence
  Description of Artificial Sequence: Synthetic oligonucleotide
gaagcgacaucuucacggu

SEQ ID NO: 1872527 - RNA, 19 nt, Artificial Sequence
  Description of Artificial Sequence: Synthetic oligonucleotide
guaggaagaaauggguaaa

SEQ ID NO: 1872528 - RNA, 19 nt, Artificial Sequence
  Description of Artificial Sequence: Synthetic oligonucleotide
cacugggccauucuugaca

SEQ ID NO: 1872529 - RNA, 19 nt, Artificial Sequence
  Description of Artificial Sequence: Synthetic oligonucleotide
cagaacauagucggccaug

SEQ ID NO: 1872530 - RNA, 19 nt, Artificial Sequence
  Description of Artificial Sequence: Synthetic oligonucleotide
aacacgccuucaugucaca

SEQ ID NO: 1872531 - RNA, 19 nt, Artificial Sequence
  Description of Artificial Sequence: Synthetic oligonucleotide
gugaauugacaaaauggcu

SEQ ID NO: 1872532 - RNA, 19 nt, Artificial Sequence
  Description of Artificial Sequence: Synthetic oligonucleotide
caguaggaagaaaugggua

SEQ ID NO: 1872533 - RNA, 19 nt, Artificial Sequence
  Description of Artificial Sequence: Synthetic oligonucleotide
acggugguaguuacacagg

SEQ ID NO: 1872534 - RNA, 19 nt, Artificial Sequence
  Description of Artificial Sequence: Synthetic oligonucleotide
auucaaaggaauggauauu

SEQ ID NO: 1872535 - RNA, 19 nt, Artificial Sequence
  Description of Artificial Sequence: Synthetic oligonucleotide
guggccccgaagcgaagcg

SEQ ID NO: 1872536 - RNA, 19 nt, Artificial Sequence
  Description of Artificial Sequence: Synthetic oligonucleotide
gacacacauucgugcgagc

SEQ ID NO: 1872537 - RNA, 19 nt, Artificial Sequence
  Description of Artificial Sequence: Synthetic oligonucleotide
gcuuuucuuccagaacacg

SEQ ID NO: 1872538 - RNA, 19 nt, Artificial Sequence
  Description of Artificial Sequence: Synthetic oligonucleotide
ccagauuuaccauaacaaa

SEQ ID NO: 1872539 - RNA, 19 nt, Artificial Sequence
  Description of Artificial Sequence: Synthetic oligonucleotide
ggaacucgggauucacagc

SEQ ID NO: 1872540 - RNA, 19 nt, Artificial Sequence
  Description of Artificial Sequence: Synthetic oligonucleotide
uauuuguagcugggguuuc

SEQ ID NO: 1872541 - RNA, 19 nt, Artificial Sequence
  Description of Artificial Sequence: Synthetic oligonucleotide
uucauccccugaacaacuu

SEQ ID NO: 1872542 - RNA, 19 nt, Artificial Sequence
  Description of Artificial Sequence: Synthetic oligonucleotide
gagagaugagcagaacaua

SEQ ID NO: 1872543 - RNA, 19 nt, Artificial Sequence
  Description of Artificial Sequence: Synthetic oligonucleotide
gggauccaagaaaaggaug

SEQ ID NO: 1872544 - RNA, 19 nt, Artificial Sequence
  Description of Artificial Sequence: Synthetic oligonucleotide
ugggguuuccacucucauu

SEQ ID NO: 1872545 - RNA, 19 nt, Artificial Sequence
  Description of Artificial Sequence: Synthetic oligonucleotide
agcaugucucuuccacagu

SEQ ID NO: 1872546 - RNA, 19 nt, Artificial Sequence
  Description of Artificial Sequence: Synthetic oligonucleotide
aaggaacagcacaggaauu

SEQ ID NO: 1872547 - RNA, 19 nt, Artificial Sequence
  Description of Artificial Sequence: Synthetic oligonucleotide
uucgugcgagcagggaggc

SEQ ID NO: 1872548 - RNA, 19 nt, Artificial Sequence
  Description of Artificial Sequence: Synthetic oligonucleotide
gacugagggaacucgggau

SEQ ID NO: 1872549 - RNA, 19 nt, Artificial Sequence
  Description of Artificial Sequence: Synthetic oligonucleotide
aaucuccaaguggcucaag

SEQ ID NO: 1872550 - RNA, 19 nt, Artificial Sequence
  Description of Artificial Sequence: Synthetic oligonucleotide
augaucuccaaaacccuuu

SEQ ID NO: 1872551 - RNA, 19 nt, Artificial Sequence
  Description of Artificial Sequence: Synthetic oligonucleotide
uuguaucagauagcuucau

SEQ ID NO: 1872552 - RNA, 19 nt, Artificial Sequence
  Description of Artificial Sequence: Synthetic oligonucleotide
acagguggccccgaagcga

SEQ ID NO: 1872553 - RNA, 19 nt, Artificial Sequence
  Description of Artificial Sequence: Synthetic oligonucleotide
gcuugaaggcuugaguuuc

SEQ ID NO: 1872554 - RNA, 19 nt, Artificial Sequence
  Description of Artificial Sequence: Synthetic oligonucleotide
aggaugcguggaauauaac

SEQ ID NO: 1872555 - RNA, 19 nt, Artificial Sequence
  Description of Artificial Sequence: Synthetic oligonucleotide
cagcaaacagguggccccg

SEQ ID NO: 1872556 - RNA, 19 nt, Artificial Sequence
  Description of Artificial Sequence: Synthetic oligonucleotide
caguuggugaauugacaaa

SEQ ID NO: 1872557 - RNA, 19 nt, Artificial Sequence
  Description of Artificial Sequence: Synthetic oligonucleotide
cagcaacggggaaaacaug

SEQ ID NO: 1872558 - RNA, 19 nt, Artificial Sequence
  Description of Artificial Sequence: Synthetic oligonucleotide
acacgccuucaugucacag

SEQ ID NO: 1872559 - RNA, 19 nt, Artificial Sequence
  Description of Artificial Sequence: Synthetic oligonucleotide
cugagggaacucgggauuc

SEQ ID NO: 1872560 - RNA, 19 nt, Artificial Sequence
  Description of Artificial Sequence: Synthetic oligonucleotide
aucuucacggugguaguua

SEQ ID NO: 1872561 - RNA, 19 nt, Artificial Sequence
  Description of Artificial Sequence: Synthetic oligonucleotide
ggugguaguuacacagggc

SEQ ID NO: 1872562 - RNA, 19 nt, Artificial Sequence
  Description of Artificial Sequence: Synthetic oligonucleotide
agaaauggguaaaggcgua

SEQ ID NO: 1872563 - RNA, 19 nt, Artificial Sequence
  Description of Artificial Sequence: Synthetic oligonucleotide
cacagcagaggguccgcuc

SEQ ID NO: 1872564 - RNA, 19 nt, Artificial Sequence
  Description of Artificial Sequence: Synthetic oligonucleotide
ccaaguccaauguguccgg

SEQ ID NO: 1872565 - RNA, 19 nt, Artificial Sequence
  Description of Artificial Sequence: Synthetic oligonucleotide
aaacccuuuccaaguccaa

SEQ ID NO: 1872566 - RNA, 19 nt, Artificial Sequence
  Description of Artificial Sequence: Synthetic oligonucleotide
ggacugagggaacucggga

SEQ ID NO: 1872567 - RNA, 19 nt, Artificial Sequence
  Description of Artificial Sequence: Synthetic oligonucleotide
cggugguaguuacacaggg

SEQ ID NO: 1872568 - RNA, 19 nt, Artificial Sequence
  Description of Artificial Sequence: Synthetic oligonucleotide
ucacuucagccuggguaca

SEQ ID NO: 1872569 - RNA, 19 nt, Artificial Sequence
  Description of Artificial Sequence: Synthetic oligonucleotide
guccaauguguccggcuga

SEQ ID NO: 1872570 - RNA, 19 nt, Artificial Sequence
  Description of Artificial Sequence: Synthetic oligonucleotide
ggaacagcacaggaauuca

SEQ ID NO: 1872571 - RNA, 19 nt, Artificial Sequence
  Description of Artificial Sequence: Synthetic oligonucleotide
auacugacauggaguaaau

SEQ ID NO: 1872572 - RNA, 19 nt, Artificial Sequence
  Description of Artificial Sequence: Synthetic oligonucleotide
augggacaguucugaaauu

SEQ ID NO: 1872573 - RNA, 19 nt, Artificial Sequence
  Description of Artificial Sequence: Synthetic oligonucleotide
cuaaaguccuccagugaau

SEQ ID NO: 1872574 - RNA, 19 nt, Artificial Sequence
  Description of Artificial Sequence: Synthetic oligonucleotide
auccccugaacaacuugcu

SEQ ID NO: 1872575 - RNA, 19 nt, Artificial Sequence
  Description of Artificial Sequence: Synthetic oligonucleotide
ccaaaacccuuuccaaguc

SEQ ID NO: 1872576 - RNA, 19 nt, Artificial Sequence
  Description of Artificial Sequence: Synthetic oligonucleotide
ccuuuccaaguccaaugug

SEQ ID NO: 1872577 - RNA, 19 nt, Artificial Sequence
  Description of Artificial Sequence: Synthetic oligonucleotide
ggagagaugagcagaacau

SEQ ID NO: 1872578 - RNA, 19 nt, Artificial Sequence
  Description of Artificial Sequence: Synthetic oligonucleotide
ggacgcaccuugccacugg

SEQ ID NO: 1872579 - RNA, 19 nt, Artificial Sequence
  Description of Artificial Sequence: Synthetic oligonucleotide
gcgaagcgacaucuucacg

SEQ ID NO: 1872580 - RNA, 19 nt, Artificial Sequence
  Description of Artificial Sequence: Synthetic oligonucleotide
acauucgugcgagcaggga

SEQ ID NO: 1872581 - RNA, 19 nt, Artificial Sequence
  Description of Artificial Sequence: Synthetic oligonucleotide
agggaacucgggauucaca

SEQ ID NO: 1872582 - RNA, 19 nt, Artificial Sequence
  Description of Artificial Sequence: Synthetic oligonucleotide
agaccagcuucgucagcau

SEQ ID NO: 1872583 - RNA, 19 nt, Artificial Sequence
  Description of Artificial Sequence: Synthetic oligonucleotide
ccugucagccucuccugag

SEQ ID NO: 1872584 - RNA, 19 nt, Artificial Sequence
  Description of Artificial Sequence: Synthetic oligonucleotide
cagcauugauguagaaaua

SEQ ID NO: 1872585 - RNA, 19 nt, Artificial Sequence
  Description of Artificial Sequence: Synthetic oligonucleotide
caagcuccacaccaagacu

SEQ ID NO: 1872586 - RNA, 19 nt, Artificial Sequence
  Description of Artificial Sequence: Synthetic oligonucleotide
cacucucauugaugauuuc

SEQ ID NO: 1872587 - RNA, 19 nt, Artificial Sequence
  Description of Artificial Sequence: Synthetic oligonucleotide
gccugagcagagaaggaac

SEQ ID NO: 1872588 - RNA, 19 nt, Artificial Sequence
  Description of Artificial Sequence: Synthetic oligonucleotide
ggguacaguaggaagaaau

SEQ ID NO: 1872589 - RNA, 19 nt, Artificial Sequence
  Description of Artificial Sequence: Synthetic oligonucleotide
ggaaaacaugcuuccggcu

SEQ ID NO: 1872590 - RNA, 19 nt, Artificial Sequence
  Description of Artificial Sequence: Synthetic oligonucleotide
gaacauagucggccaugcu

SEQ ID NO: 1872591 - RNA, 19 nt, Artificial Sequence
  Description of Artificial Sequence: Synthetic oligonucleotide
ugauuucaggacgcaccuu

SEQ ID NO: 1872592 - RNA, 19 nt, Artificial Sequence
  Description of Artificial Sequence: Synthetic oligonucleotide
ccaagacuuauggaugauc

SEQ ID NO: 1872593 - RNA, 19 nt, Artificial Sequence
  Description of Artificial Sequence: Synthetic oligonucleotide
ccagaacacgccuucaugu

SEQ ID NO: 1872594 - RNA, 19 nt, Artificial Sequence
  Description of Artificial Sequence: Synthetic oligonucleotide
gggcaagccacuugcagcu

SEQ ID NO: 1872595 - RNA, 19 nt, Artificial Sequence
  Description of Artificial Sequence: Synthetic oligonucleotide
accaagacuuauggaugau

SEQ ID NO: 1872596 - RNA, 19 nt, Artificial Sequence
  Description of Artificial Sequence: Synthetic oligonucleotide
ccggcugaagaagugauga

SEQ ID NO: 1872597 - RNA, 19 nt, Artificial Sequence
  Description of Artificial Sequence: Synthetic oligonucleotide
uggccccgaagcgaagcga

SEQ ID NO: 1872598 - RNA, 19 nt, Artificial Sequence
  Description of Artificial Sequence: Synthetic oligonucleotide
aggacgcaccuugccacug

SEQ ID NO: 1872599 - RNA, 19 nt, Artificial Sequence
  Description of Artificial Sequence: Synthetic oligonucleotide
gggcuugaaggcuugaguu

SEQ ID NO: 1872600 - RNA, 19 nt, Artificial Sequence
  Description of Artificial Sequence: Synthetic oligonucleotide
cagguggccccgaagcgaa

SEQ ID NO: 1872601 - RNA, 19 nt, Artificial Sequence
  Description of Artificial Sequence: Synthetic oligonucleotide
cuugaaggcuugaguuucu

SEQ ID NO: 1872602 - RNA, 19 nt, Artificial Sequence
  Description of Artificial Sequence: Synthetic oligonucleotide
ugcuuccggcugaggcuga

SEQ ID NO: 1872603 - RNA, 19 nt, Artificial Sequence
  Description of Artificial Sequence: Synthetic oligonucleotide
cuugcucagcauugaugua

SEQ ID NO: 1872604 - RNA, 19 nt, Artificial Sequence
  Description of Artificial Sequence: Synthetic oligonucleotide
ccugguggugucacuguuc

SEQ ID NO: 1872605 - RNA, 19 nt, Artificial Sequence
  Description of Artificial Sequence: Synthetic oligonucleotide
gguggccccgaagcgaagc

SEQ ID NO: 1872606 - RNA, 19 nt, Artificial Sequence
  Description of Artificial Sequence: Synthetic oligonucleotide
cacuggacugagggaacuc

SEQ ID NO: 1872607 - RNA, 19 nt, Artificial Sequence
  Description of Artificial Sequence: Synthetic oligonucleotide
cagggccacuggacugagg

SEQ ID NO: 1872608 - RNA, 19 nt, Artificial Sequence
  Description of Artificial Sequence: Synthetic oligonucleotide
cacagggccacuggacuga

SEQ ID NO: 1872609 - RNA, 19 nt, Artificial Sequence
  Description of Artificial Sequence: Synthetic oligonucleotide
gauucccucccugaugcuu

SEQ ID NO: 1872610 - RNA, 19 nt, Artificial Sequence
  Description of Artificial Sequence: Synthetic oligonucleotide
ggauuaucaccaagagaaa

SEQ ID NO: 1872611 - RNA, 19 nt, Artificial Sequence
  Description of Artificial Sequence: Synthetic oligonucleotide
gaguagguagaagccuggu

SEQ ID NO: 1872612 - RNA, 19 nt, Artificial Sequence
  Description of Artificial Sequence: Synthetic oligonucleotide
ggguaaaggcguaaauacu

SEQ ID NO: 1872613 - RNA, 19 nt, Artificial Sequence
  Description of Artificial Sequence: Synthetic oligonucleotide
cucuaacagcaacggggaa

SEQ ID NO: 1872614 - RNA, 19 nt, Artificial Sequence
  Description of Artificial Sequence: Synthetic oligonucleotide
augcacagaccagcuucgu

SEQ ID NO: 1872615 - RNA, 19 nt, Artificial Sequence
  Description of Artificial Sequence: Synthetic oligonucleotide
ggccauucuugacacacau

SEQ ID NO: 1872616 - RNA, 19 nt, Artificial Sequence
  Description of Artificial Sequence: Synthetic oligonucleotide
uucccucccugaugcuuuu

SEQ ID NO: 1872617 - RNA, 19 nt, Artificial Sequence
  Description of Artificial Sequence: Synthetic oligonucleotide
caacggggaaaacaugcuu

SEQ ID NO: 1872618 - RNA, 19 nt, Artificial Sequence
  Description of Artificial Sequence: Synthetic oligonucleotide
gcuucgucagcaugucucu

SEQ ID NO: 1872619 - RNA, 19 nt, Artificial Sequence
  Description of Artificial Sequence: Synthetic oligonucleotide
agucggccaugcugcugga

SEQ ID NO: 1872620 - RNA, 19 nt, Artificial Sequence
  Description of Artificial Sequence: Synthetic oligonucleotide
agcaaacagguggccccga

SEQ ID NO: 1872621 - RNA, 19 nt, Artificial Sequence
  Description of Artificial Sequence: Synthetic oligonucleotide
ggguuuccacucucauuga

SEQ ID NO: 1872622 - RNA, 19 nt, Artificial Sequence
  Description of Artificial Sequence: Synthetic oligonucleotide
gcguaaauacugacaugga

SEQ ID NO: 1872623 - RNA, 19 nt, Artificial Sequence
  Description of Artificial Sequence: Synthetic oligonucleotide
agcuccacaccaagacuua

SEQ ID NO: 1872624 - RNA, 19 nt, Artificial Sequence
  Description of Artificial Sequence: Synthetic oligonucleotide
ggccccgaagcgaagcgac

SEQ ID NO: 1872625 - RNA, 19 nt, Artificial Sequence
  Description of Artificial Sequence: Synthetic oligonucleotide
guaguuacacagggccacu

SEQ ID NO: 1872626 - RNA, 19 nt, Artificial Sequence
  Description of Artificial Sequence: Synthetic oligonucleotide
ucgugcgagcagggaggcc

SEQ ID NO: 1872627 - RNA, 19 nt, Artificial Sequence
  Description of Artificial Sequence: Synthetic oligonucleotide
ugcgagcagggaggccuga

SEQ ID NO: 1872628 - RNA, 19 nt, Artificial Sequence
  Description of Artificial Sequence: Synthetic oligonucleotide
ggcuugaaggcuugaguuu

SEQ ID NO: 1872629 - RNA, 19 nt, Artificial Sequence
  Description of Artificial Sequence: Synthetic oligonucleotide
gguagaagccugguuuccu

SEQ ID NO: 1872630 - RNA, 19 nt, Artificial Sequence
  Description of Artificial Sequence: Synthetic oligonucleotide
caacuugcucagcauugau

SEQ ID NO: 1872631 - RNA, 19 nt, Artificial Sequence
  Description of Artificial Sequence: Synthetic oligonucleotide
ccacaccaagacuuaugga

SEQ ID NO: 1872632 - RNA, 19 nt, Artificial Sequence
  Description of Artificial Sequence: Synthetic oligonucleotide
ccugaacaacuugcucagc

SEQ ID NO: 1872633 - RNA, 19 nt, Artificial Sequence
  Description of Artificial Sequence: Synthetic oligonucleotide
gugcgagcagggaggccug

SEQ ID NO: 1872634 - RNA, 19 nt, Artificial Sequence
  Description of Artificial Sequence: Synthetic oligonucleotide
gcugggguuuccacucuca

SEQ ID NO: 1872635 - RNA, 19 nt, Artificial Sequence
  Description of Artificial Sequence: Synthetic oligonucleotide
acgcaccuugccacuggga

SEQ ID NO: 1872636 - RNA, 19 nt, Artificial Sequence
  Description of Artificial Sequence: Synthetic oligonucleotide
gcaaacagguggccccgaa

SEQ ID NO: 1872637 - RNA, 19 nt, Artificial Sequence
  Description of Artificial Sequence: Synthetic oligonucleotide
cugggccauucuugacaca

SEQ ID NO: 1872638 - RNA, 19 nt, Artificial Sequence
  Description of Artificial Sequence: Synthetic oligonucleotide
gcaacggggaaaacaugcu

SEQ ID NO: 1872639 - RNA, 19 nt, Artificial Sequence
  Description of Artificial Sequence: Synthetic oligonucleotide
cugggguuuccacucucau

SEQ ID NO: 1872640 - RNA, 19 nt, Artificial Sequence
  Description of Artificial Sequence: Synthetic oligonucleotide
cccgaagcgaagcgacauc

SEQ ID NO: 1872641 - RNA, 19 nt, Artificial Sequence
  Description of Artificial Sequence: Synthetic oligonucleotide
ccacucucauugaugauuu

SEQ ID NO: 1872642 - RNA, 19 nt, Artificial Sequence
  Description of Artificial Sequence: Synthetic oligonucleotide
ccagaguagguagaagccu

SEQ ID NO: 1872643 - RNA, 19 nt, Artificial Sequence
  Description of Artificial Sequence: Synthetic oligonucleotide
caggacgcaccuugccacu

SEQ ID NO: 1872644 - RNA, 19 nt, Artificial Sequence
  Description of Artificial Sequence: Synthetic oligonucleotide
gggauucacagcagagggu

SEQ ID NO: 1872645 - RNA, 19 nt, Artificial Sequence
  Description of Artificial Sequence: Synthetic oligonucleotide
gcgagcagggaggccugag

SEQ ID NO: 1872646 - RNA, 19 nt, Artificial Sequence
  Description of Artificial Sequence: Synthetic oligonucleotide
gcgacaucuucacgguggu

SEQ ID NO: 1872647 - RNA, 19 nt, Artificial Sequence
  Description of Artificial Sequence: Synthetic oligonucleotide
agguggccccgaagcgaag

SEQ ID NO: 1872648 - RNA, 19 nt, Artificial Sequence
  Description of Artificial Sequence: Synthetic oligonucleotide
ggaagaagcccaggauuau

SEQ ID NO: 1872649 - RNA, 19 nt, Artificial Sequence
  Description of Artificial Sequence: Synthetic oligonucleotide
ccgaagcgaagcgacaucu

SEQ ID NO: 1872650 - RNA, 19 nt, Artificial Sequence
  Description of Artificial Sequence: Synthetic oligonucleotide
ggccaugcugcuggaugca

SEQ ID NO: 1872651 - RNA, 19 nt, Artificial Sequence
  Description of Artificial Sequence: Synthetic oligonucleotide
cagcuucgucagcaugucu

SEQ ID NO: 1872652 - RNA, 19 nt, Artificial Sequence
  Description of Artificial Sequence: Synthetic oligonucleotide
gucacuguucuggguggau

SEQ ID NO: 1872653 - RNA, 19 nt, Artificial Sequence
  Description of Artificial Sequence: Synthetic oligonucleotide
cgugcgagcagggaggccu

SEQ ID NO: 1872654 - RNA, 19 nt, Artificial Sequence
  Description of Artificial Sequence: Synthetic oligonucleotide
ggauucccucccugaugcu

SEQ ID NO: 1872655 - RNA, 19 nt, Artificial Sequence
  Description of Artificial Sequence: Synthetic oligonucleotide
cgcaccuugccacugggau

SEQ ID NO: 1872656 - RNA, 19 nt, Artificial Sequence
  Description of Artificial Sequence: Synthetic oligonucleotide
cuuccggcugaggcugagu

SEQ ID NO: 1872657 - RNA, 19 nt, Artificial Sequence
  Description of Artificial Sequence: Synthetic oligonucleotide
gccccgaagcgaagcgaca

SEQ ID NO: 1872658 - RNA, 19 nt, Artificial Sequence
  Description of Artificial Sequence: Synthetic oligonucleotide
gcuccacacagggcuugaa

SEQ ID NO: 1872659 - RNA, 19 nt, Artificial Sequence
  Description of Artificial Sequence: Synthetic oligonucleotide
ccacuggacugagggaacu

SEQ ID NO: 1872660 - RNA, 19 nt, Artificial Sequence
  Description of Artificial Sequence: Synthetic oligonucleotide
ccccgaagcgaagcgacau

SEQ ID NO: 1872661 - RNA, 19 nt, Artificial Sequence
  Description of Artificial Sequence: Synthetic oligonucleotide
cacuugcagcugccucuuu

SEQ ID NO: 1872662 - RNA, 19 nt, Artificial Sequence
  Description of Artificial Sequence: Synthetic oligonucleotide
aaugccaagguacugaccg

SEQ ID NO: 1872663 - RNA, 19 nt, Artificial Sequence
  Description of Artificial Sequence: Synthetic oligonucleotide
uuauugaaguugcaguagc

SEQ ID NO: 1872664 - RNA, 19 nt, Artificial Sequence
  Description of Artificial Sequence: Synthetic oligonucleotide
aggcaaaugggcuuccugc

SEQ ID NO: 1872665 - RNA, 19 nt, Artificial Sequence
  Description of Artificial Sequence: Synthetic oligonucleotide
uacuuauugaaguugcagu

SEQ ID NO: 1872666 - RNA, 19 nt, Artificial Sequence
  Description of Artificial Sequence: Synthetic oligonucleotide
cuuugcaccccacugagcc

SEQ ID NO: 1872667 - RNA, 19 nt, Artificial Sequence
  Description of Artificial Sequence: Synthetic oligonucleotide
aguugcaguagcugcagcg

SEQ ID NO: 1872668 - RNA, 19 nt, Artificial Sequence
  Description of Artificial Sequence: Synthetic oligonucleotide
caccaaagaacacagaguc

SEQ ID NO: 1872669 - RNA, 19 nt, Artificial Sequence
  Description of Artificial Sequence: Synthetic oligonucleotide
aguuggagaccucauacug

SEQ ID NO: 1872670 - RNA, 19 nt, Artificial Sequence
  Description of Artificial Sequence: Synthetic oligonucleotide
augcccaccaugcuggccc

SEQ ID NO: 1872671 - RNA, 19 nt, Artificial Sequence
  Description of Artificial Sequence: Synthetic oligonucleotide
accuguugauuccugcugc

SEQ ID NO: 1872672 - RNA, 19 nt, Artificial Sequence
  Description of Artificial Sequence: Synthetic oligonucleotide
acaaccuguugauuccugc

SEQ ID NO: 1872673 - RNA, 19 nt, Artificial Sequence
  Description of Artificial Sequence: Synthetic oligonucleotide
gauguacuuauugaaguug

SEQ ID NO: 1872674 - RNA, 19 nt, Artificial Sequence
  Description of Artificial Sequence: Synthetic oligonucleotide
uuuauacacauggaugccc

SEQ ID NO: 1872675 - RNA, 19 nt, Artificial Sequence
  Description of Artificial Sequence: Synthetic oligonucleotide
ucauacuggcgaaagccag

SEQ ID NO: 1872676 - RNA, 19 nt, Artificial Sequence
  Description of Artificial Sequence: Synthetic oligonucleotide
uuggagaccucauacuggc

SEQ ID NO: 1872677 - RNA, 19 nt, Artificial Sequence
  Description of Artificial Sequence: Synthetic oligonucleotide
auagccaaaaccuccucca

SEQ ID NO: 1872678 - RNA, 19 nt, Artificial Sequence
  Description of Artificial Sequence: Synthetic oligonucleotide
uacacauggaugcccacca

SEQ ID NO: 1872679 - RNA, 19 nt, Artificial Sequence
  Description of Artificial Sequence: Synthetic oligonucleotide
acuuauugaaguugcagua

SEQ ID NO: 1872680 - RNA, 19 nt, Artificial Sequence
  Description of Artificial Sequence: Synthetic oligonucleotide
acagaguccacccuuugca

SEQ ID NO: 1872681 - RNA, 19 nt, Artificial Sequence
  Description of Artificial Sequence: Synthetic oligonucleotide
aguaacagugaguccagca

SEQ ID NO: 1872682 - RNA, 19 nt, Artificial Sequence
  Description of Artificial Sequence: Synthetic oligonucleotide
uuuuauacacauggaugcc

SEQ ID NO: 1872683 - RNA, 19 nt, Artificial Sequence
  Description of Artificial Sequence: Synthetic oligonucleotide
cuuauugaaguugcaguag

SEQ ID NO: 1872684 - RNA, 19 nt, Artificial Sequence
  Description of Artificial Sequence: Synthetic oligonucleotide
guaacagugaguccagcac

SEQ ID NO: 1872685 - RNA, 19 nt, Artificial Sequence
  Description of Artificial Sequence: Synthetic oligonucleotide
uguugcccuacguugcagg

SEQ ID NO: 1872686 - RNA, 19 nt, Artificial Sequence
  Description of Artificial Sequence: Synthetic oligonucleotide
cuccgugucauccagggac

SEQ ID NO: 1872687 - RNA, 19 nt, Artificial Sequence
  Description of Artificial Sequence: Synthetic oligonucleotide
uguacuuauugaaguugca

SEQ ID NO: 1872688 - RNA, 19 nt, Artificial Sequence
  Description of Artificial Sequence: Synthetic oligonucleotide
aguccagcacagcuagacc

SEQ ID NO: 1872689 - RNA, 19 nt, Artificial Sequence
  Description of Artificial Sequence: Synthetic oligonucleotide
guacuuauugaaguugcag

SEQ ID NO: 1872690 - RNA, 19 nt, Artificial Sequence
  Description of Artificial Sequence: Synthetic oligonucleotide
aagcgucucgggcugagug

SEQ ID NO: 1872691 - RNA, 19 nt, Artificial Sequence
  Description of Artificial Sequence: Synthetic oligonucleotide
aguccgucccagcaucugc

SEQ ID NO: 1872692 - RNA, 19 nt, Artificial Sequence
  Description of Artificial Sequence: Synthetic oligonucleotide
acagcuagacccucccagg

SEQ ID NO: 1872693 - RNA, 19 nt, Artificial Sequence
  Description of Artificial Sequence: Synthetic oligonucleotide
cuugcuccgaacacguccc

SEQ ID NO: 1872694 - RNA, 19 nt, Artificial Sequence
  Description of Artificial Sequence: Synthetic oligonucleotide
guacugaccgcacugccag

SEQ ID NO: 1872695 - RNA, 19 nt, Artificial Sequence
  Description of Artificial Sequence: Synthetic oligonucleotide
aaacagcaucaccucuuuc

SEQ ID NO: 1872696 - RNA, 19 nt, Artificial Sequence
  Description of Artificial Sequence: Synthetic oligonucleotide
ugaggacuggccagacucg

SEQ ID NO: 1872697 - RNA, 19 nt, Artificial Sequence
  Description of Artificial Sequence: Synthetic oligonucleotide
uccgcaaagcgucucgggc

SEQ ID NO: 1872698 - RNA, 19 nt, Artificial Sequence
  Description of Artificial Sequence: Synthetic oligonucleotide
aacagugaguccagcacag

SEQ ID NO: 1872699 - RNA, 19 nt, Artificial Sequence
  Description of Artificial Sequence: Synthetic oligonucleotide
gaacacgucccacaggguc

SEQ ID NO: 1872700 - RNA, 19 nt, Artificial Sequence
  Description of Artificial Sequence: Synthetic oligonucleotide
agagguggucaucacaggu

SEQ ID NO: 1872701 - RNA, 19 nt, Artificial Sequence
  Description of Artificial Sequence: Synthetic oligonucleotide
cugguguugcccuacguug

SEQ ID NO: 1872702 - RNA, 19 nt, Artificial Sequence
  Description of Artificial Sequence: Synthetic oligonucleotide
accucauacuggcgaaagc

SEQ ID NO: 1872703 - RNA, 19 nt, Artificial Sequence
  Description of Artificial Sequence: Synthetic oligonucleotide
agguacugaccgcacugcc

SEQ ID NO: 1872704 - RNA, 19 nt, Artificial Sequence
  Description of Artificial Sequence: Synthetic oligonucleotide
aguaaguccgguugugggu

SEQ ID NO: 1872705 - RNA, 19 nt, Artificial Sequence
  Description of Artificial Sequence: Synthetic oligonucleotide
caaauuguccaugggcucc

SEQ ID NO: 1872706 - RNA, 19 nt, Artificial Sequence
  Description of Artificial Sequence: Synthetic oligonucleotide
caaaugggcuuccugcgcc

SEQ ID NO: 1872707 - RNA, 19 nt, Artificial Sequence
  Description of Artificial Sequence: Synthetic oligonucleotide
agcaucucgaaggaugguc

SEQ ID NO: 1872708 - RNA, 19 nt, Artificial Sequence
  Description of Artificial Sequence: Synthetic oligonucleotide
agggcgacacacuuccgcg

SEQ ID NO: 1872709 - RNA, 19 nt, Artificial Sequence
  Description of Artificial Sequence: Synthetic oligonucleotide
agcgcuucucgcaauaggg

SEQ ID NO: 1872710 - RNA, 19 nt, Artificial Sequence
  Description of Artificial Sequence: Synthetic oligonucleotide
cagagugugaggacuggcc

SEQ ID NO: 1872711 - RNA, 19 nt, Artificial Sequence
  Description of Artificial Sequence: Synthetic oligonucleotide
guuggagaccucauacugg

SEQ ID NO: 1872712 - RNA, 19 nt, Artificial Sequence
  Description of Artificial Sequence: Synthetic oligonucleotide
agagugugaggacuggcca

SEQ ID NO: 1872713 - RNA, 19 nt, Artificial Sequence
  Description of Artificial Sequence: Synthetic oligonucleotide
gcugguacaucucagcagc

SEQ ID NO: 1872714 - RNA, 19 nt, Artificial Sequence
  Description of Artificial Sequence: Synthetic oligonucleotide
acguugcaggaacagcugg

SEQ ID NO: 1872715 - RNA, 19 nt, Artificial Sequence
  Description of Artificial Sequence: Synthetic oligonucleotide
ugggguuagccuccaaugu

SEQ ID NO: 1872716 - RNA, 19 nt, Artificial Sequence
  Description of Artificial Sequence: Synthetic oligonucleotide
ugcccuacguugcaggaac

SEQ ID NO: 1872717 - RNA, 19 nt, Artificial Sequence
  Description of Artificial Sequence: Synthetic oligonucleotide
gcacaaauuguccaugggc

SEQ ID NO: 1872718 - RNA, 19 nt, Artificial Sequence
  Description of Artificial Sequence: Synthetic oligonucleotide
aacuccgugccaacaacuc

SEQ ID NO: 1872719 - RNA, 19 nt, Artificial Sequence
  Description of Artificial Sequence: Synthetic oligonucleotide
cacagcuagacccucccag

SEQ ID NO: 1872720 - RNA, 19 nt, Artificial Sequence
  Description of Artificial Sequence: Synthetic oligonucleotide
ucacagguccgcaaagcgu

SEQ ID NO: 1872721 - RNA, 19 nt, Artificial Sequence
  Description of Artificial Sequence: Synthetic oligonucleotide
cauacuggcgaaagccagc

SEQ ID NO: 1872722 - RNA, 19 nt, Artificial Sequence
  Description of Artificial Sequence: Synthetic oligonucleotide
uuugcaccccacugagccg

SEQ ID NO: 1872723 - RNA, 19 nt, Artificial Sequence
  Description of Artificial Sequence: Synthetic oligonucleotide
uacguugcaggaacagcug

SEQ ID NO: 1872724 - RNA, 19 nt, Artificial Sequence
  Description of Artificial Sequence: Synthetic oligonucleotide
ugcagaccgauggacaacc

SEQ ID NO: 1872725 - RNA, 19 nt, Artificial Sequence
  Description of Artificial Sequence: Synthetic oligonucleotide
caagguacugaccgcacug

SEQ ID NO: 1872726 - RNA, 19 nt, Artificial Sequence
  Description of Artificial Sequence: Synthetic oligonucleotide
ugcgccacggccuccaaga

SEQ ID NO: 1872727 - RNA, 19 nt, Artificial Sequence
  Description of Artificial Sequence: Synthetic oligonucleotide
cuccagcuugcucagggcg

SEQ ID NO: 1872728 - RNA, 19 nt, Artificial Sequence
  Description of Artificial Sequence: Synthetic oligonucleotide
uguauccgugcuucccggg

SEQ ID NO: 1872729 - RNA, 19 nt, Artificial Sequence
  Description of Artificial Sequence: Synthetic oligonucleotide
uagccaaaaccuccuccag

SEQ ID NO: 1872730 - RNA, 19 nt, Artificial Sequence
  Description of Artificial Sequence: Synthetic oligonucleotide
agccccauagccaaaaccu

SEQ ID NO: 1872731 - RNA, 19 nt, Artificial Sequence
  Description of Artificial Sequence: Synthetic oligonucleotide
gugggguuagccuccaaug

SEQ ID NO: 1872732 - RNA, 19 nt, Artificial Sequence
  Description of Artificial Sequence: Synthetic oligonucleotide
agcaucugcagcuccgugu

SEQ ID NO: 1872733 - RNA, 19 nt, Artificial Sequence
  Description of Artificial Sequence: Synthetic oligonucleotide
ucucgaaggaugguccugc

SEQ ID NO: 1872734 - RNA, 19 nt, Artificial Sequence
  Description of Artificial Sequence: Synthetic oligonucleotide
aacaaacuccgugccaaca

SEQ ID NO: 1872735 - RNA, 19 nt, Artificial Sequence
  Description of Artificial Sequence: Synthetic oligonucleotide
cugccaguaaguccgguug

SEQ ID NO: 1872736 - RNA, 19 nt, Artificial Sequence
  Description of Artificial Sequence: Synthetic oligonucleotide
cuggggcucaaacugcugc

SEQ ID NO: 1872737 - RNA, 19 nt, Artificial Sequence
  Description of Artificial Sequence: Synthetic oligonucleotide
aguugucuggcuccagugu

SEQ ID NO: 1872738 - RNA, 19 nt, Artificial Sequence
  Description of Artificial Sequence: Synthetic oligonucleotide
ggcaaaugggcuuccugcg

SEQ ID NO: 1872739 - RNA, 19 nt, Artificial Sequence
  Description of Artificial Sequence: Synthetic oligonucleotide
guacugagcgccccguucc

SEQ ID NO: 1872740 - RNA, 19 nt, Artificial Sequence
  Description of Artificial Sequence: Synthetic oligonucleotide
ugaccgcacugccaguaag

SEQ ID NO: 1872741 - RNA, 19 nt, Artificial Sequence
  Description of Artificial Sequence: Synthetic oligonucleotide
ucgaaggaugguccugccc

SEQ ID NO: 1872742 - RNA, 19 nt, Artificial Sequence
  Description of Artificial Sequence: Synthetic oligonucleotide
ccgaacacgucccacaggg

SEQ ID NO: 1872743 - RNA, 19 nt, Artificial Sequence
  Description of Artificial Sequence: Synthetic oligonucleotide
uauccgugcuucccgggug

SEQ ID NO: 1872744 - RNA, 19 nt, Artificial Sequence
  Description of Artificial Sequence: Synthetic oligonucleotide
aagacagcagccagagugu

SEQ ID NO: 1872745 - RNA, 19 nt, Artificial Sequence
  Description of Artificial Sequence: Synthetic oligonucleotide
aaacuccgugccaacaacu

SEQ ID NO: 1872746 - RNA, 19 nt, Artificial Sequence
  Description of Artificial Sequence: Synthetic oligonucleotide
uccgaacacgucccacagg

SEQ ID NO: 1872747 - RNA, 19 nt, Artificial Sequence
  Description of Artificial Sequence: Synthetic oligonucleotide
ugagggaguccugugcugc

SEQ ID NO: 1872748 - RNA, 19 nt, Artificial Sequence
  Description of Artificial Sequence: Synthetic oligonucleotide
agaccgauggacaaccugu

SEQ ID NO: 1872749 - RNA, 19 nt, Artificial Sequence
  Description of Artificial Sequence: Synthetic oligonucleotide
uccagcuugcucagggcga

SEQ ID NO: 1872750 - RNA, 19 nt, Artificial Sequence
  Description of Artificial Sequence: Synthetic oligonucleotide
gaguccagcacagcuagac

SEQ ID NO: 1872751 - RNA, 19 nt, Artificial Sequence
  Description of Artificial Sequence: Synthetic oligonucleotide
caggcaguuccgcaaggcg

SEQ ID NO: 1872752 - RNA, 19 nt, Artificial Sequence
  Description of Artificial Sequence: Synthetic oligonucleotide
uggagaccucauacuggcg

SEQ ID NO: 1872753 - RNA, 19 nt, Artificial Sequence
  Description of Artificial Sequence: Synthetic oligonucleotide
acugcagaccgauggacaa

SEQ ID NO: 1872754 - RNA, 19 nt, Artificial Sequence
  Description of Artificial Sequence: Synthetic oligonucleotide
uugcaguagcugcagcgcu

SEQ ID NO: 1872755 - RNA, 19 nt, Artificial Sequence
  Description of Artificial Sequence: Synthetic oligonucleotide
agacccucccaggagcacc

SEQ ID NO: 1872756 - RNA, 19 nt, Artificial Sequence
  Description of Artificial Sequence: Synthetic oligonucleotide
ggcgaaagccagcaucucg

SEQ ID NO: 1872757 - RNA, 19 nt, Artificial Sequence
  Description of Artificial Sequence: Synthetic oligonucleotide
aaauuguccaugggcucca

SEQ ID NO: 1872758 - RNA, 19 nt, Artificial Sequence
  Description of Artificial Sequence: Synthetic oligonucleotide
aacacgucccacaggguca

SEQ ID NO: 1872759 - RNA, 19 nt, Artificial Sequence
  Description of Artificial Sequence: Synthetic oligonucleotide
caaacuccgugccaacaac

SEQ ID NO: 1872760 - RNA, 19 nt, Artificial Sequence
  Description of Artificial Sequence: Synthetic oligonucleotide
guugcaguagcugcagcgc

SEQ ID NO: 1872761 - RNA, 19 nt, Artificial Sequence
  Description of Artificial Sequence: Synthetic oligonucleotide
uacugagcgccccguuccg

SEQ ID NO: 1872762 - RNA, 19 nt, Artificial Sequence
  Description of Artificial Sequence: Synthetic oligonucleotide
guccaugggcuccaggccc

SEQ ID NO: 1872763 - RNA, 19 nt, Artificial Sequence
  Description of Artificial Sequence: Synthetic oligonucleotide
cuguauccgugcuucccgg

SEQ ID NO: 1872764 - RNA, 19 nt, Artificial Sequence
  Description of Artificial Sequence: Synthetic oligonucleotide
gcuugcuccgaacacgucc

SEQ ID NO: 1872765 - RNA, 19 nt, Artificial Sequence
  Description of Artificial Sequence: Synthetic oligonucleotide
cacauggaugcccaccaug

SEQ ID NO: 1872766 - RNA, 19 nt, Artificial Sequence
  Description of Artificial Sequence: Synthetic oligonucleotide
aacugguguugcccuacgu

SEQ ID NO: 1872767 - RNA, 19 nt, Artificial Sequence
  Description of Artificial Sequence: Synthetic oligonucleotide
cacagaguccacccuuugc

SEQ ID NO: 1872768 - RNA, 19 nt, Artificial Sequence
  Description of Artificial Sequence: Synthetic oligonucleotide
cucgggcugagugaguccg

SEQ ID NO: 1872769 - RNA, 19 nt, Artificial Sequence
  Description of Artificial Sequence: Synthetic oligonucleotide
acugguguugcccuacguu

SEQ ID NO: 1872770 - RNA, 19 nt, Artificial Sequence
  Description of Artificial Sequence: Synthetic oligonucleotide
cagccccauagccaaaacc

SEQ ID NO: 1872771 - RNA, 19 nt, Artificial Sequence
  Description of Artificial Sequence: Synthetic oligonucleotide
cagcaacaaacuccgugcc

SEQ ID NO: 1872772 - RNA, 19 nt, Artificial Sequence
  Description of Artificial Sequence: Synthetic oligonucleotide
gaaggaugguccugcccug

SEQ ID NO: 1872773 - RNA, 19 nt, Artificial Sequence
  Description of Artificial Sequence: Synthetic oligonucleotide
uccgugucauccagggacu

SEQ ID NO: 1872774 - RNA, 19 nt, Artificial Sequence
  Description of Artificial Sequence: Synthetic oligonucleotide
cuacguugcaggaacagcu

SEQ ID NO: 1872775 - RNA, 19 nt, Artificial Sequence
  Description of Artificial Sequence: Synthetic oligonucleotide
agguccgcaaagcgucucg

SEQ ID NO: 1872776 - RNA, 19 nt, Artificial Sequence
  Description of Artificial Sequence: Synthetic oligonucleotide
cuccccggggcacaaauug

SEQ ID NO: 1872777 - RNA, 19 nt, Artificial Sequence
  Description of Artificial Sequence: Synthetic oligonucleotide
cagggcgacacacuuccgc

SEQ ID NO: 1872778 - RNA, 19 nt, Artificial Sequence
  Description of Artificial Sequence: Synthetic oligonucleotide
ucccugcuugcuccgaaca

SEQ ID NO: 1872779 - RNA, 19 nt, Artificial Sequence
  Description of Artificial Sequence: Synthetic oligonucleotide
ugccaguaaguccgguugu

SEQ ID NO: 1872780 - RNA, 19 nt, Artificial Sequence
  Description of Artificial Sequence: Synthetic oligonucleotide
uugcaccccacugagccgc

SEQ ID NO: 1872781 - RNA, 19 nt, Artificial Sequence
  Description of Artificial Sequence: Synthetic oligonucleotide
agcuugcucagggcgacac

SEQ ID NO: 1872782 - RNA, 19 nt, Artificial Sequence
  Description of Artificial Sequence: Synthetic oligonucleotide
caaugccaagguacugacc

SEQ ID NO: 1872783 - RNA, 19 nt, Artificial Sequence
  Description of Artificial Sequence: Synthetic oligonucleotide
aguuccgcaaggcgcccuc

SEQ ID NO: 1872784 - RNA, 19 nt, Artificial Sequence
  Description of Artificial Sequence: Synthetic oligonucleotide
caucacagguccgcaaagc

SEQ ID NO: 1872785 - RNA, 19 nt, Artificial Sequence
  Description of Artificial Sequence: Synthetic oligonucleotide
aaagagugaggugccccgu

SEQ ID NO: 1872786 - RNA, 19 nt, Artificial Sequence
  Description of Artificial Sequence: Synthetic oligonucleotide
ugguacaucucagcagcca

SEQ ID NO: 1872787 - RNA, 19 nt, Artificial Sequence
  Description of Artificial Sequence: Synthetic oligonucleotide
auacuggcgaaagccagca

SEQ ID NO: 1872788 - RNA, 19 nt, Artificial Sequence
  Description of Artificial Sequence: Synthetic oligonucleotide
cuccgaacacgucccacag

SEQ ID NO: 1872789 - RNA, 19 nt, Artificial Sequence
  Description of Artificial Sequence: Synthetic oligonucleotide
ggagaccucauacuggcga

SEQ ID NO: 1872790 - RNA, 19 nt, Artificial Sequence
  Description of Artificial Sequence: Synthetic oligonucleotide
acccuuugcaccccacuga

SEQ ID NO: 1872791 - RNA, 19 nt, Artificial Sequence
  Description of Artificial Sequence: Synthetic oligonucleotide
agcgucugcgccucaguca

SEQ ID NO: 1872792 - RNA, 19 nt, Artificial Sequence
  Description of Artificial Sequence: Synthetic oligonucleotide
gcuagacccucccaggagc

SEQ ID NO: 1872793 - RNA, 19 nt, Artificial Sequence
  Description of Artificial Sequence: Synthetic oligonucleotide
accgcacugccaguaaguc

SEQ ID NO: 1872794 - RNA, 19 nt, Artificial Sequence
  Description of Artificial Sequence: Synthetic oligonucleotide
gacacacuuccgcgugccg

SEQ ID NO: 1872795 - RNA, 19 nt, Artificial Sequence
  Description of Artificial Sequence: Synthetic oligonucleotide
ugagugaguccgucccagc

SEQ ID NO: 1872796 - RNA, 19 nt, Artificial Sequence
  Description of Artificial Sequence: Synthetic oligonucleotide
ggcugagugaguccguccc

SEQ ID NO: 1872797 - RNA, 19 nt, Artificial Sequence
  Description of Artificial Sequence: Synthetic oligonucleotide
cacccuuugcaccccacug

SEQ ID NO: 1872798 - RNA, 19 nt, Artificial Sequence
  Description of Artificial Sequence: Synthetic oligonucleotide
cagaccgauggacaaccug

SEQ ID NO: 1872799 - RNA, 19 nt, Artificial Sequence
  Description of Artificial Sequence: Synthetic oligonucleotide
accggagaccccugugguc

SEQ ID NO: 1872800 - RNA, 19 nt, Artificial Sequence
  Description of Artificial Sequence: Synthetic oligonucleotide
cacacuuccgcgugccgug

SEQ ID NO: 1872801 - RNA, 19 nt, Artificial Sequence
  Description of Artificial Sequence: Synthetic oligonucleotide
gggguuagccuccaaugug

SEQ ID NO: 1872802 - RNA, 19 nt, Artificial Sequence
  Description of Artificial Sequence: Synthetic oligonucleotide
aagagugaggugccccguu

SEQ ID NO: 1872803 - RNA, 19 nt, Artificial Sequence
  Description of Artificial Sequence: Synthetic oligonucleotide
ccaaaagcugccagccugg

SEQ ID NO: 1872804 - RNA, 19 nt, Artificial Sequence
  Description of Artificial Sequence: Synthetic oligonucleotide
guccgcaaagcgucucggg

SEQ ID NO: 1872805 - RNA, 19 nt, Artificial Sequence
  Description of Artificial Sequence: Synthetic oligonucleotide
agugaggugccccguucca

SEQ ID NO: 1872806 - RNA, 19 nt, Artificial Sequence
  Description of Artificial Sequence: Synthetic oligonucleotide
ucagggcgacacacuuccg

SEQ ID NO: 1872807 - RNA, 19 nt, Artificial Sequence
  Description of Artificial Sequence: Synthetic oligonucleotide
gucaucacagguccgcaaa

SEQ ID NO: 1872808 - RNA, 19 nt, Artificial Sequence
  Description of Artificial Sequence: Synthetic oligonucleotide
aucugcaggcaaaugggcu

SEQ ID NO: 1872809 - RNA, 19 nt, Artificial Sequence
  Description of Artificial Sequence: Synthetic oligonucleotide
uuguggguacugagcgccc

SEQ ID NO: 1872810 - RNA, 19 nt, Artificial Sequence
  Description of Artificial Sequence: Synthetic oligonucleotide
caaugugacuucugaaucu

SEQ ID NO: 1872811 - RNA, 19 nt, Artificial Sequence
  Description of Artificial Sequence: Synthetic oligonucleotide
cugagugaguccgucccag

SEQ ID NO: 1872812 - RNA, 19 nt, Artificial Sequence
  Description of Artificial Sequence: Synthetic oligonucleotide
ugaguccgucccagcaucu

SEQ ID NO: 1872813 - RNA, 19 nt, Artificial Sequence
  Description of Artificial Sequence: Synthetic oligonucleotide
acugccaguaaguccgguu

SEQ ID NO: 1872814 - RNA, 19 nt, Artificial Sequence
  Description of Artificial Sequence: Synthetic oligonucleotide
gagaccucauacuggcgaa

SEQ ID NO: 1872815 - RNA, 19 nt, Artificial Sequence
  Description of Artificial Sequence: Synthetic oligonucleotide
gucuguauccgugcuuccc

SEQ ID NO: 1872816 - RNA, 19 nt, Artificial Sequence
  Description of Artificial Sequence: Synthetic oligonucleotide
guggguacugagcgccccg

SEQ ID NO: 1872817 - RNA, 19 nt, Artificial Sequence
  Description of Artificial Sequence: Synthetic oligonucleotide
gugaguccgucccagcauc

SEQ ID NO: 1872818 - RNA, 19 nt, Artificial Sequence
  Description of Artificial Sequence: Synthetic oligonucleotide
gacaaccuguugauuccug

SEQ ID NO: 1872819 - RNA, 19 nt, Artificial Sequence
  Description of Artificial Sequence: Synthetic oligonucleotide
ccccauagccaaaaccucc

SEQ ID NO: 1872820 - RNA, 19 nt, Artificial Sequence
  Description of Artificial Sequence: Synthetic oligonucleotide
agcgucucgggcugaguga

SEQ ID NO: 1872821 - RNA, 19 nt, Artificial Sequence
  Description of Artificial Sequence: Synthetic oligonucleotide
gacugcagaccgauggaca

SEQ ID NO: 1872822 - RNA, 19 nt, Artificial Sequence
  Description of Artificial Sequence: Synthetic oligonucleotide
caacaaacuccgugccaac

SEQ ID NO: 1872823 - RNA, 19 nt, Artificial Sequence
  Description of Artificial Sequence: Synthetic oligonucleotide
ucucgggcugagugagucc

SEQ ID NO: 1872824 - RNA, 19 nt, Artificial Sequence
  Description of Artificial Sequence: Synthetic oligonucleotide
aacacagaguccacccuuu

SEQ ID NO: 1872825 - RNA, 19 nt, Artificial Sequence
  Description of Artificial Sequence: Synthetic oligonucleotide
ugucuggcuccagugucug

SEQ ID NO: 1872826 - RNA, 19 nt, Artificial Sequence
  Description of Artificial Sequence: Synthetic oligonucleotide
uccccggggcacaaauugu

SEQ ID NO: 1872827 - RNA, 19 nt, Artificial Sequence
  Description of Artificial Sequence: Synthetic oligonucleotide
caacugguguugcccuacg

SEQ ID NO: 1872828 - RNA, 19 nt, Artificial Sequence
  Description of Artificial Sequence: Synthetic oligonucleotide
guugcaggaacagcugguc

SEQ ID NO: 1872829 - RNA, 19 nt, Artificial Sequence
  Description of Artificial Sequence: Synthetic oligonucleotide
cucgaaggaugguccugcc

SEQ ID NO: 1872830 - RNA, 19 nt, Artificial Sequence
  Description of Artificial Sequence: Synthetic oligonucleotide
guugcccuacguugcagga

SEQ ID NO: 1872831 - RNA, 19 nt, Artificial Sequence
  Description of Artificial Sequence: Synthetic oligonucleotide
aggagcaccggagaccccu

SEQ ID NO: 1872832 - RNA, 19 nt, Artificial Sequence
  Description of Artificial Sequence: Synthetic oligonucleotide
uugcucagggcgacacacu

SEQ ID NO: 1872833 - RNA, 19 nt, Artificial Sequence
  Description of Artificial Sequence: Synthetic oligonucleotide
gucaccaggcaguuccgca

SEQ ID NO: 1872834 - RNA, 19 nt, Artificial Sequence
  Description of Artificial Sequence: Synthetic oligonucleotide
gcaaaugggcuuccugcgc

SEQ ID NO: 1872835 - RNA, 19 nt, Artificial Sequence
  Description of Artificial Sequence: Synthetic oligonucleotide
agcaccggagaccccugug

SEQ ID NO: 1872836 - RNA, 19 nt, Artificial Sequence
  Description of Artificial Sequence: Synthetic oligonucleotide
ugcagcgcuucucgcaaua

SEQ ID NO: 1872837 - RNA, 19 nt, Artificial Sequence
  Description of Artificial Sequence: Synthetic oligonucleotide
acacacuuccgcgugccgu

SEQ ID NO: 1872838 - RNA, 19 nt, Artificial Sequence
  Description of Artificial Sequence: Synthetic oligonucleotide
cagucaccaggcaguuccg

SEQ ID NO: 1872839 - RNA, 19 nt, Artificial Sequence
  Description of Artificial Sequence: Synthetic oligonucleotide
caaaguuggagaccucaua

SEQ ID NO: 1872840 - RNA, 19 nt, Artificial Sequence
  Description of Artificial Sequence: Synthetic oligonucleotide
gcuccagugucuguauccg

SEQ ID NO: 1872841 - RNA, 19 nt, Artificial Sequence
  Description of Artificial Sequence: Synthetic oligonucleotide
cgugccguggccaaacagc

SEQ ID NO: 1872842 - RNA, 19 nt, Artificial Sequence
  Description of Artificial Sequence: Synthetic oligonucleotide
agugaguccagcacagcua

SEQ ID NO: 1872843 - RNA, 19 nt, Artificial Sequence
  Description of Artificial Sequence: Synthetic oligonucleotide
gcaaagagugaggugcccc

SEQ ID NO: 1872844 - RNA, 19 nt, Artificial Sequence
  Description of Artificial Sequence: Synthetic oligonucleotide
aguccacccuuugcacccc

SEQ ID NO: 1872845 - RNA, 19 nt, Artificial Sequence
  Description of Artificial Sequence: Synthetic oligonucleotide
uccagggacugcagaccga

SEQ ID NO: 1872846 - RNA, 19 nt, Artificial Sequence
  Description of Artificial Sequence: Synthetic oligonucleotide
uuccgcaaggcgcccuccu

SEQ ID NO: 1872847 - RNA, 19 nt, Artificial Sequence
  Description of Artificial Sequence: Synthetic oligonucleotide
ccagugucuguauccgugc

SEQ ID NO: 1872848 - RNA, 19 nt, Artificial Sequence
  Description of Artificial Sequence: Synthetic oligonucleotide
ugagcgccccguuccgggc

SEQ ID NO: 1872849 - RNA, 19 nt, Artificial Sequence
  Description of Artificial Sequence: Synthetic oligonucleotide
cuccaaugugacuucugaa

SEQ ID NO: 1872850 - RNA, 19 nt, Artificial Sequence
  Description of Artificial Sequence: Synthetic oligonucleotide
ggcaguuccgcaaggcgcc

SEQ ID NO: 1872851 - RNA, 19 nt, Artificial Sequence
  Description of Artificial Sequence: Synthetic oligonucleotide
gccguggccaaacagcauc

SEQ ID NO: 1872852 - RNA, 19 nt, Artificial Sequence
  Description of Artificial Sequence: Synthetic oligonucleotide
ugccagccuggaaccuggg

SEQ ID NO: 1872853 - RNA, 19 nt, Artificial Sequence
  Description of Artificial Sequence: Synthetic oligonucleotide
cagugcgcagccccauagc

SEQ ID NO: 1872854 - RNA, 19 nt, Artificial Sequence
  Description of Artificial Sequence: Synthetic oligonucleotide
gcaacaaacuccgugccaa

SEQ ID NO: 1872855 - RNA, 19 nt, Artificial Sequence
  Description of Artificial Sequence: Synthetic oligonucleotide
aacugcugccagugcugau

SEQ ID NO: 1872856 - RNA, 19 nt, Artificial Sequence
  Description of Artificial Sequence: Synthetic oligonucleotide
ggcugaagugggguuagcc

SEQ ID NO: 1872857 - RNA, 19 nt, Artificial Sequence
  Description of Artificial Sequence: Synthetic oligonucleotide
ggcgacacacuuccgcgug

SEQ ID NO: 1872858 - RNA, 19 nt, Artificial Sequence
  Description of Artificial Sequence: Synthetic oligonucleotide
aaagcgucucgggcugagu

SEQ ID NO: 1872859 - RNA, 19 nt, Artificial Sequence
  Description of Artificial Sequence: Synthetic oligonucleotide
ccguuccgggcaaaguugg

SEQ ID NO: 1872860 - RNA, 19 nt, Artificial Sequence
  Description of Artificial Sequence: Synthetic oligonucleotide
agaccccugugguccagca

SEQ ID NO: 1872861 - RNA, 19 nt, Artificial Sequence
  Description of Artificial Sequence: Synthetic oligonucleotide
ccgauggacaaccuguuga

SEQ ID NO: 1872862 - RNA, 19 nt, Artificial Sequence
  Description of Artificial Sequence: Synthetic oligonucleotide
uugcuccgaacacguccca

SEQ ID NO: 1872863 - RNA, 19 nt, Artificial Sequence
  Description of Artificial Sequence: Synthetic oligonucleotide
agcuccccggggcacaaau

SEQ ID NO: 1872864 - RNA, 19 nt, Artificial Sequence
  Description of Artificial Sequence: Synthetic oligonucleotide
gcgucugcgccucagucac

SEQ ID NO: 1872865 - RNA, 19 nt, Artificial Sequence
  Description of Artificial Sequence: Synthetic oligonucleotide
uccgcaaggcgcccuccuc

SEQ ID NO: 1872866 - RNA, 19 nt, Artificial Sequence
  Description of Artificial Sequence: Synthetic oligonucleotide
gugaggugccccguuccag

SEQ ID NO: 1872867 - RNA, 19 nt, Artificial Sequence
  Description of Artificial Sequence: Synthetic oligonucleotide
ggguuagccuccaauguga

SEQ ID NO: 1872868 - RNA, 19 nt, Artificial Sequence
  Description of Artificial Sequence: Synthetic oligonucleotide
cucccugcuugcuccgaac

SEQ ID NO: 1872869 - RNA, 19 nt, Artificial Sequence
  Description of Artificial Sequence: Synthetic oligonucleotide
gucucgggcugagugaguc

SEQ ID NO: 1872870 - RNA, 19 nt, Artificial Sequence
  Description of Artificial Sequence: Synthetic oligonucleotide
cagcuccgugucauccagg

SEQ ID NO: 1872871 - RNA, 19 nt, Artificial Sequence
  Description of Artificial Sequence: Synthetic oligonucleotide
gggaguccugugcugcugc

SEQ ID NO: 1872872 - RNA, 19 nt, Artificial Sequence
  Description of Artificial Sequence: Synthetic oligonucleotide
cagugaguccagcacagcu

SEQ ID NO: 1872873 - RNA, 19 nt, Artificial Sequence
  Description of Artificial Sequence: Synthetic oligonucleotide
caguaacagugaguccagc

SEQ ID NO: 1872874 - RNA, 19 nt, Artificial Sequence
  Description of Artificial Sequence: Synthetic oligonucleotide
ccuacguugcaggaacagc

SEQ ID NO: 1872875 - RNA, 19 nt, Artificial Sequence
  Description of Artificial Sequence: Synthetic oligonucleotide
gugccguggccaaacagca

SEQ ID NO: 1872876 - RNA, 19 nt, Artificial Sequence
  Description of Artificial Sequence: Synthetic oligonucleotide
ggaggaucaguaacaguga

SEQ ID NO: 1872877 - RNA, 19 nt, Artificial Sequence
  Description of Artificial Sequence: Synthetic oligonucleotide
aguccgguuguggguacug

SEQ ID NO: 1872878 - RNA, 19 nt, Artificial Sequence
  Description of Artificial Sequence: Synthetic oligonucleotide
ugcuccgaacacgucccac

SEQ ID NO: 1872879 - RNA, 19 nt, Artificial Sequence
  Description of Artificial Sequence: Synthetic oligonucleotide
cagcgucugcgccucaguc

SEQ ID NO: 1872880 - RNA, 19 nt, Artificial Sequence
  Description of Artificial Sequence: Synthetic oligonucleotide
ccggagaccccuguggucc

SEQ ID NO: 1872881 - RNA, 19 nt, Artificial Sequence
  Description of Artificial Sequence: Synthetic oligonucleotide
uggggcugaagugggguua

SEQ ID NO: 1872882 - RNA, 19 nt, Artificial Sequence
  Description of Artificial Sequence: Synthetic oligonucleotide
caaagcgucucgggcugag

SEQ ID NO: 1872883 - RNA, 19 nt, Artificial Sequence
  Description of Artificial Sequence: Synthetic oligonucleotide
gcuggcccagccuuccaag

SEQ ID NO: 1872884 - RNA, 19 nt, Artificial Sequence
  Description of Artificial Sequence: Synthetic oligonucleotide
acacuuccgcgugccgugg

SEQ ID NO: 1872885 - RNA, 19 nt, Artificial Sequence
  Description of Artificial Sequence: Synthetic oligonucleotide
acgucccacagggucagcu

SEQ ID NO: 1872886 - RNA, 19 nt, Artificial Sequence
  Description of Artificial Sequence: Synthetic oligonucleotide
uccgugccaacaacuccuu

SEQ ID NO: 1872887 - RNA, 19 nt, Artificial Sequence
  Description of Artificial Sequence: Synthetic oligonucleotide
acugaccgcacugccagua

SEQ ID NO: 1872888 - RNA, 19 nt, Artificial Sequence
  Description of Artificial Sequence: Synthetic oligonucleotide
uugcccuacguugcaggaa

SEQ ID NO: 1872889 - RNA, 19 nt, Artificial Sequence
  Description of Artificial Sequence: Synthetic oligonucleotide
aaguccgguuguggguacu

SEQ ID NO: 1872890 - RNA, 19 nt, Artificial Sequence
  Description of Artificial Sequence: Synthetic oligonucleotide
cagcuagacccucccagga

SEQ ID NO: 1872891 - RNA, 19 nt, Artificial Sequence
  Description of Artificial Sequence: Synthetic oligonucleotide
cccguuccgggcaaaguug

SEQ ID NO: 1872892 - RNA, 19 nt, Artificial Sequence
  Description of Artificial Sequence: Synthetic oligonucleotide
cgugccaacaacuccuuca

SEQ ID NO: 1872893 - RNA, 19 nt, Artificial Sequence
  Description of Artificial Sequence: Synthetic oligonucleotide
ugcuugcuccgaacacguc

SEQ ID NO: 1872894 - RNA, 19 nt, Artificial Sequence
  Description of Artificial Sequence: Synthetic oligonucleotide
gguccgcaaagcgucucgg

SEQ ID NO: 1872895 - RNA, 19 nt, Artificial Sequence
  Description of Artificial Sequence: Synthetic oligonucleotide
uggguacugagcgccccgu

SEQ ID NO: 1872896 - RNA, 19 nt, Artificial Sequence
  Description of Artificial Sequence: Synthetic oligonucleotide
uacuggcgaaagccagcau

SEQ ID NO: 1872897 - RNA, 19 nt, Artificial Sequence
  Description of Artificial Sequence: Synthetic oligonucleotide
gguacugaccgcacugcca

SEQ ID NO: 1872898 - RNA, 19 nt, Artificial Sequence
  Description of Artificial Sequence: Synthetic oligonucleotide
agcagcgucugcgccucag

SEQ ID NO: 1872899 - RNA, 19 nt, Artificial Sequence
  Description of Artificial Sequence: Synthetic oligonucleotide
guguugcccuacguugcag

SEQ ID NO: 1872900 - RNA, 19 nt, Artificial Sequence
  Description of Artificial Sequence: Synthetic oligonucleotide
uacugaccgcacugccagu

SEQ ID NO: 1872901 - RNA, 19 nt, Artificial Sequence
  Description of Artificial Sequence: Synthetic oligonucleotide
gguggucaucacagguccg

SEQ ID NO: 1872902 - RNA, 19 nt, Artificial Sequence
  Description of Artificial Sequence: Synthetic oligonucleotide
ggacugcagaccgauggac

SEQ ID NO: 1872903 - RNA, 19 nt, Artificial Sequence
  Description of Artificial Sequence: Synthetic oligonucleotide
cugcagaccgauggacaac

SEQ ID NO: 1872904 - RNA, 19 nt, Artificial Sequence
  Description of Artificial Sequence: Synthetic oligonucleotide
cccggggcacaaauugucc

SEQ ID NO: 1872905 - RNA, 19 nt, Artificial Sequence
  Description of Artificial Sequence: Synthetic oligonucleotide
uggccagacucgggguucc

SEQ ID NO: 1872906 - RNA, 19 nt, Artificial Sequence
  Description of Artificial Sequence: Synthetic oligonucleotide
guuagccuccaaugugacu

SEQ ID NO: 1872907 - RNA, 19 nt, Artificial Sequence
  Description of Artificial Sequence: Synthetic oligonucleotide
ugccguggccaaacagcau

SEQ ID NO: 1872908 - RNA, 19 nt, Artificial Sequence
  Description of Artificial Sequence: Synthetic oligonucleotide
ucgggcugagugaguccgu

SEQ ID NO: 1872909 - RNA, 19 nt, Artificial Sequence
  Description of Artificial Sequence: Synthetic oligonucleotide
guauccgugcuucccgggu

SEQ ID NO: 1872910 - RNA, 19 nt, Artificial Sequence
  Description of Artificial Sequence: Synthetic oligonucleotide
agggaguccugugcugcug

SEQ ID NO: 1872911 - RNA, 19 nt, Artificial Sequence
  Description of Artificial Sequence: Synthetic oligonucleotide
gguguugcccuacguugca

SEQ ID NO: 1872912 - RNA, 19 nt, Artificial Sequence
  Description of Artificial Sequence: Synthetic oligonucleotide
ccgcacugccaguaagucc

SEQ ID NO: 1872913 - RNA, 19 nt, Artificial Sequence
  Description of Artificial Sequence: Synthetic oligonucleotide
ugcccaccaugcuggccca

SEQ ID NO: 1872914 - RNA, 19 nt, Artificial Sequence
  Description of Artificial Sequence: Synthetic oligonucleotide
gagaccccugugguccagc

SEQ ID NO: 1872915 - RNA, 19 nt, Artificial Sequence
  Description of Artificial Sequence: Synthetic oligonucleotide
gguuagccuccaaugugac

SEQ ID NO: 1872916 - RNA, 19 nt, Artificial Sequence
  Description of Artificial Sequence: Synthetic oligonucleotide
cugcuugcuccgaacacgu

SEQ ID NO: 1872917 - RNA, 19 nt, Artificial Sequence
  Description of Artificial Sequence: Synthetic oligonucleotide
ucccggguguggccuccag

SEQ ID NO: 1872918 - RNA, 19 nt, Artificial Sequence
  Description of Artificial Sequence: Synthetic oligonucleotide
aucagugcgcagccccaua

SEQ ID NO: 1872919 - RNA, 19 nt, Artificial Sequence
  Description of Artificial Sequence: Synthetic oligonucleotide
ugccccguuccagggucag

SEQ ID NO: 1872920 - RNA, 19 nt, Artificial Sequence
  Description of Artificial Sequence: Synthetic oligonucleotide
gugcuucccggguguggcc

SEQ ID NO: 1872921 - RNA, 19 nt, Artificial Sequence
  Description of Artificial Sequence: Synthetic oligonucleotide
ccaaaaccuccuccagcag

SEQ ID NO: 1872922 - RNA, 19 nt, Artificial Sequence
  Description of Artificial Sequence: Synthetic oligonucleotide
uuccgcgugccguggccaa

SEQ ID NO: 1872923 - RNA, 19 nt, Artificial Sequence
  Description of Artificial Sequence: Synthetic oligonucleotide
cacuuccgcgugccguggc

SEQ ID NO: 1872924 - RNA, 19 nt, Artificial Sequence
  Description of Artificial Sequence: Synthetic oligonucleotide
gggcugagugaguccgucc

SEQ ID NO: 1872925 - RNA, 19 nt, Artificial Sequence
  Description of Artificial Sequence: Synthetic oligonucleotide
gcgucucgggcugagugag

SEQ ID NO: 1872926 - RNA, 19 nt, Artificial Sequence
  Description of Artificial Sequence: Synthetic oligonucleotide
gcgcuucucgcaauagggc

SEQ ID NO: 1872927 - RNA, 19 nt, Artificial Sequence
  Description of Artificial Sequence: Synthetic oligonucleotide
caucucgaaggaugguccu

SEQ ID NO: 1872928 - RNA, 19 nt, Artificial Sequence
  Description of Artificial Sequence: Synthetic oligonucleotide
gcgugccguggccaaacag

SEQ ID NO: 1872929 - RNA, 19 nt, Artificial Sequence
  Description of Artificial Sequence: Synthetic oligonucleotide
ccuuugcaccccacugagc

SEQ ID NO: 1872930 - RNA, 19 nt, Artificial Sequence
  Description of Artificial Sequence: Synthetic oligonucleotide
ggggcugaagugggguuag

SEQ ID NO: 1872931 - RNA, 19 nt, Artificial Sequence
  Description of Artificial Sequence: Synthetic oligonucleotide
gaccgcacugccaguaagu

SEQ ID NO: 1872932 - RNA, 19 nt, Artificial Sequence
  Description of Artificial Sequence: Synthetic oligonucleotide
ccuuccaaguccaacuggu

SEQ ID NO: 1872933 - RNA, 19 nt, Artificial Sequence
  Description of Artificial Sequence: Synthetic oligonucleotide
ccgcaaggcgcccuccucc

SEQ ID NO: 1872934 - RNA, 19 nt, Artificial Sequence
  Description of Artificial Sequence: Synthetic oligonucleotide
acagguccgcaaagcgucu

SEQ ID NO: 1872935 - RNA, 19 nt, Artificial Sequence
  Description of Artificial Sequence: Synthetic oligonucleotide
gagcgccccguuccgggca

SEQ ID NO: 1872936 - RNA, 19 nt, Artificial Sequence
  Description of Artificial Sequence: Synthetic oligonucleotide
ccagagugugaggacuggc

SEQ ID NO: 1872937 - RNA, 19 nt, Artificial Sequence
  Description of Artificial Sequence: Synthetic oligonucleotide
gagggaguccugugcugcu

SEQ ID NO: 1872938 - RNA, 19 nt, Artificial Sequence
  Description of Artificial Sequence: Synthetic oligonucleotide
uccgugcuucccgggugug

SEQ ID NO: 1872939 - RNA, 19 nt, Artificial Sequence
  Description of Artificial Sequence: Synthetic oligonucleotide
gguguggccuccagcuccc

SEQ ID NO: 1872940 - RNA, 19 nt, Artificial Sequence
  Description of Artificial Sequence: Synthetic oligonucleotide
gcugagugaguccguccca

SEQ ID NO: 1872941 - RNA, 19 nt, Artificial Sequence
  Description of Artificial Sequence: Synthetic oligonucleotide
gugugaggacuggccagac

SEQ ID NO: 1872942 - RNA, 19 nt, Artificial Sequence
  Description of Artificial Sequence: Synthetic oligonucleotide
gcagcgcuucucgcaauag

SEQ ID NO: 1872943 - RNA, 19 nt, Artificial Sequence
  Description of Artificial Sequence: Synthetic oligonucleotide
cauggaugcccaccaugcu

SEQ ID NO: 1872944 - RNA, 19 nt, Artificial Sequence
  Description of Artificial Sequence: Synthetic oligonucleotide
ccaacugguguugcccuac

SEQ ID NO: 1872945 - RNA, 19 nt, Artificial Sequence
  Description of Artificial Sequence: Synthetic oligonucleotide
gcgacacacuuccgcgugc

SEQ ID NO: 1872946 - RNA, 19 nt, Artificial Sequence
  Description of Artificial Sequence: Synthetic oligonucleotide
ccccggggcacaaauuguc

SEQ ID NO: 1872947 - RNA, 19 nt, Artificial Sequence
  Description of Artificial Sequence: Synthetic oligonucleotide
caggaggaucaguaacagu

SEQ ID NO: 1872948 - RNA, 19 nt, Artificial Sequence
  Description of Artificial Sequence: Synthetic oligonucleotide
ugguccugcccugcuggua

SEQ ID NO: 1872949 - RNA, 19 nt, Artificial Sequence
  Description of Artificial Sequence: Synthetic oligonucleotide
cuggaaccuggggcugaag

SEQ ID NO: 1872950 - RNA, 19 nt, Artificial Sequence
  Description of Artificial Sequence: Synthetic oligonucleotide
cgaaggaugguccugcccu

SEQ ID NO: 1872951 - RNA, 19 nt, Artificial Sequence
  Description of Artificial Sequence: Synthetic oligonucleotide
agguccgggucaggggcug

SEQ ID NO: 1872952 - RNA, 19 nt, Artificial Sequence
  Description of Artificial Sequence: Synthetic oligonucleotide
ccauagccaaaaccuccuc

SEQ ID NO: 1872953 - RNA, 19 nt, Artificial Sequence
  Description of Artificial Sequence: Synthetic oligonucleotide
cugaccgcacugccaguaa

SEQ ID NO: 1872954 - RNA, 19 nt, Artificial Sequence
  Description of Artificial Sequence: Synthetic oligonucleotide
cagguccgcaaagcgucuc

SEQ ID NO: 1872955 - RNA, 19 nt, Artificial Sequence
  Description of Artificial Sequence: Synthetic oligonucleotide
cgcaaagcgucucgggcug

SEQ ID NO: 1872956 - RNA, 19 nt, Artificial Sequence
  Description of Artificial Sequence: Synthetic oligonucleotide
cgugcuucccggguguggc

SEQ ID NO: 1872957 - RNA, 19 nt, Artificial Sequence
  Description of Artificial Sequence: Synthetic oligonucleotide
ccggggcacaaauugucca

SEQ ID NO: 1872958 - RNA, 19 nt, Artificial Sequence
  Description of Artificial Sequence: Synthetic oligonucleotide
ggcgcccuccuccacgcca

SEQ ID NO: 1872959 - RNA, 19 nt, Artificial Sequence
  Description of Artificial Sequence: Synthetic oligonucleotide
gccccauagccaaaaccuc

SEQ ID NO: 1872960 - RNA, 19 nt, Artificial Sequence
  Description of Artificial Sequence: Synthetic oligonucleotide
agcgccccguuccgggcaa

SEQ ID NO: 1872961 - RNA, 19 nt, Artificial Sequence
  Description of Artificial Sequence: Synthetic oligonucleotide
caccggagaccccuguggu

SEQ ID NO: 1872962 - RNA, 19 nt, Artificial Sequence
  Description of Artificial Sequence: Synthetic oligonucleotide
caggcccaaugccaaggua

SEQ ID NO: 1872963 - RNA, 19 nt, Artificial Sequence
  Description of Artificial Sequence: Synthetic oligonucleotide
gaccgauggacaaccuguu

SEQ ID NO: 1872964 - RNA, 19 nt, Artificial Sequence
  Description of Artificial Sequence: Synthetic oligonucleotide
ccguggccaaacagcauca

SEQ ID NO: 1872965 - RNA, 19 nt, Artificial Sequence
  Description of Artificial Sequence: Synthetic oligonucleotide
gcacagcuagacccuccca

SEQ ID NO: 1872966 - RNA, 19 nt, Artificial Sequence
  Description of Artificial Sequence: Synthetic oligonucleotide
cgugucauccagggacugc

SEQ ID NO: 1872967 - RNA, 19 nt, Artificial Sequence
  Description of Artificial Sequence: Synthetic oligonucleotide
uucccggguguggccucca

SEQ ID NO: 1872968 - RNA, 19 nt, Artificial Sequence
  Description of Artificial Sequence: Synthetic oligonucleotide
gagcaccggagaccccugu

SEQ ID NO: 1872969 - RNA, 19 nt, Artificial Sequence
  Description of Artificial Sequence: Synthetic oligonucleotide
gcccugcugcaccugggca

SEQ ID NO: 1872970 - RNA, 19 nt, Artificial Sequence
  Description of Artificial Sequence: Synthetic oligonucleotide
uccgcgugccguggccaaa

SEQ ID NO: 1872971 - RNA, 19 nt, Artificial Sequence
  Description of Artificial Sequence: Synthetic oligonucleotide
accucccugcuugcuccga

SEQ ID NO: 1872972 - RNA, 19 nt, Artificial Sequence
  Description of Artificial Sequence: Synthetic oligonucleotide
gcucagggcgacacacuuc

SEQ ID NO: 1872973 - RNA, 19 nt, Artificial Sequence
  Description of Artificial Sequence: Synthetic oligonucleotide
ggagcaccggagaccccug

SEQ ID NO: 1872974 - RNA, 19 nt, Artificial Sequence
  Description of Artificial Sequence: Synthetic oligonucleotide
ccgcaaagcgucucgggcu

SEQ ID NO: 1872975 - RNA, 19 nt, Artificial Sequence
  Description of Artificial Sequence: Synthetic oligonucleotide
gguccgggucaggggcugg

SEQ ID NO: 1872976 - RNA, 19 nt, Artificial Sequence
  Description of Artificial Sequence: Synthetic oligonucleotide
gcaaggcgcccuccuccac

SEQ ID NO: 1872977 - RNA, 19 nt, Artificial Sequence
  Description of Artificial Sequence: Synthetic oligonucleotide
ccacaucagugcgcagccc

SEQ ID NO: 1872978 - RNA, 19 nt, Artificial Sequence
  Description of Artificial Sequence: Synthetic oligonucleotide
ccgugcuucccgggugugg

SEQ ID NO: 1872979 - RNA, 19 nt, Artificial Sequence
  Description of Artificial Sequence: Synthetic oligonucleotide
gggcgacacacuuccgcgu

SEQ ID NO: 1872980 - RNA, 19 nt, Artificial Sequence
  Description of Artificial Sequence: Synthetic oligonucleotide
cacgucccacagggucagc

SEQ ID NO: 1872981 - RNA, 19 nt, Artificial Sequence
  Description of Artificial Sequence: Synthetic oligonucleotide
cagguccgggucaggggcu

SEQ ID NO: 1872982 - RNA, 19 nt, Artificial Sequence
  Description of Artificial Sequence: Synthetic oligonucleotide
ccaagguacugaccgcacu

SEQ ID NO: 1872983 - RNA, 19 nt, Artificial Sequence
  Description of Artificial Sequence: Synthetic oligonucleotide
gcgccacggccuccaagac

SEQ ID NO: 1872984 - RNA, 19 nt, Artificial Sequence
  Description of Artificial Sequence: Synthetic oligonucleotide
cacugagccgcagcagcgu

SEQ ID NO: 1872985 - RNA, 19 nt, Artificial Sequence
  Description of Artificial Sequence: Synthetic oligonucleotide
cuucaccucccugcuugcu

SEQ ID NO: 1872986 - RNA, 19 nt, Artificial Sequence
  Description of Artificial Sequence: Synthetic oligonucleotide
cgggcaaaguuggagaccu

SEQ ID NO: 1872987 - RNA, 19 nt, Artificial Sequence
  Description of Artificial Sequence: Synthetic oligonucleotide
cguugcaggaacagcuggu

SEQ ID NO: 1872988 - RNA, 19 nt, Artificial Sequence
  Description of Artificial Sequence: Synthetic oligonucleotide
ccgugucauccagggacug

SEQ ID NO: 1872989 - RNA, 19 nt, Artificial Sequence
  Description of Artificial Sequence: Synthetic oligonucleotide
gugccccguuccaggguca

SEQ ID NO: 1872990 - RNA, 19 nt, Artificial Sequence
  Description of Artificial Sequence: Synthetic oligonucleotide
gcugggagggugcccugcu

SEQ ID NO: 1872991 - RNA, 19 nt, Artificial Sequence
  Description of Artificial Sequence: Synthetic oligonucleotide
cguggccaaacagcaucac

SEQ ID NO: 1872992 - RNA, 19 nt, Artificial Sequence
  Description of Artificial Sequence: Synthetic oligonucleotide
cagggucagcuggggcuca

SEQ ID NO: 1872993 - RNA, 19 nt, Artificial Sequence
  Description of Artificial Sequence: Synthetic oligonucleotide
gcaaagcgucucgggcuga

SEQ ID NO: 1872994 - RNA, 19 nt, Artificial Sequence
  Description of Artificial Sequence: Synthetic oligonucleotide
caucagugcgcagccccau

SEQ ID NO: 1872995 - RNA, 19 nt, Artificial Sequence
  Description of Artificial Sequence: Synthetic oligonucleotide
ccgcgugccguggccaaac

SEQ ID NO: 1872996 - RNA, 19 nt, Artificial Sequence
  Description of Artificial Sequence: Synthetic oligonucleotide
gcagcgucugcgccucagu

SEQ ID NO: 1872997 - RNA, 19 nt, Artificial Sequence
  Description of Artificial Sequence: Synthetic oligonucleotide
cagcaucucgaaggauggu

SEQ ID NO: 1872998 - RNA, 19 nt, Artificial Sequence
  Description of Artificial Sequence: Synthetic oligonucleotide
gcccuacguugcaggaaca

SEQ ID NO: 1872999 - RNA, 19 nt, Artificial Sequence
  Description of Artificial Sequence: Synthetic oligonucleotide
cagcagcaacaaacuccgu

SEQ ID NO: 1873000 - RNA, 19 nt, Artificial Sequence
  Description of Artificial Sequence: Synthetic oligonucleotide
cgcaaggcgcccuccucca

SEQ ID NO: 1873001 - RNA, 19 nt, Artificial Sequence
  Description of Artificial Sequence: Synthetic oligonucleotide
cgucugcgccucagucacc

SEQ ID NO: 1873002 - RNA, 19 nt, Artificial Sequence
  Description of Artificial Sequence: Synthetic oligonucleotide
cugcagcgcuucucgcaau

SEQ ID NO: 1873003 - RNA, 19 nt, Artificial Sequence
  Description of Artificial Sequence: Synthetic oligonucleotide
cguuccgggcaaaguugga

SEQ ID NO: 1873004 - RNA, 19 nt, Artificial Sequence
  Description of Artificial Sequence: Synthetic oligonucleotide
ccccguuccgggcaaaguu

SEQ ID NO: 1873005 - RNA, 19 nt, Artificial Sequence
  Description of Artificial Sequence: Synthetic oligonucleotide
ccacccuuugcaccccacu

SEQ ID NO: 1873006 - RNA, 19 nt, Artificial Sequence
  Description of Artificial Sequence: Synthetic oligonucleotide
gccccguuccagggucagc

SEQ ID NO: 1873007 - RNA, 19 nt, Artificial Sequence
  Description of Artificial Sequence: Synthetic oligonucleotide
caguuccgcaaggcgcccu

SEQ ID NO: 1873008 - RNA, 19 nt, Artificial Sequence
  Description of Artificial Sequence: Synthetic oligonucleotide
gcaggcaaaugggcuuccu

SEQ ID NO: 1873009 - RNA, 19 nt, Artificial Sequence
  Description of Artificial Sequence: Synthetic oligonucleotide
gcagaccgauggacaaccu

SEQ ID NO: 1873010 - RNA, 19 nt, Artificial Sequence
  Description of Artificial Sequence: Synthetic oligonucleotide
cagcagcgucugcgccuca

SEQ ID NO: 1873011 - RNA, 19 nt, Artificial Sequence
  Description of Artificial Sequence: Synthetic oligonucleotide
cgcagccccauagccaaaa

SEQ ID NO: 1873012 - RNA, 19 nt, Artificial Sequence
  Description of Artificial Sequence: Synthetic oligonucleotide
cgccccguuccgggcaaag

SEQ ID NO: 1873013 - RNA, 19 nt, Artificial Sequence
  Description of Artificial Sequence: Synthetic oligonucleotide
cgcgugccguggccaaaca

SEQ ID NO: 1873014 - RNA, 19 nt, Artificial Sequence
  Description of Artificial Sequence: Synthetic oligonucleotide
gcuccccggggcacaaauu

SEQ ID NO: 1873015 - RNA, 19 nt, Artificial Sequence
  Description of Artificial Sequence: Synthetic oligonucleotide
gcgccccguuccgggcaaa

SEQ ID NO: 1873016 - RNA, 19 nt, Artificial Sequence
  Description of Artificial Sequence: Synthetic oligonucleotide
auuagaaugacuuguauag

SEQ ID NO: 1873017 - RNA, 19 nt, Artificial Sequence
  Description of Artificial Sequence: Synthetic oligonucleotide
aauacugucaggaaaacag

SEQ ID NO: 1873018 - RNA, 19 nt, Artificial Sequence
  Description of Artificial Sequence: Synthetic oligonucleotide
aaauguaugggcucccacc

SEQ ID NO: 1873019 - RNA, 19 nt, Artificial Sequence
  Description of Artificial Sequence: Synthetic oligonucleotide
aauguucugaccugcugcc

SEQ ID NO: 1873020 - RNA, 19 nt, Artificial Sequence
  Description of Artificial Sequence: Synthetic oligonucleotide
acauuagacaagcacaggg

SEQ ID NO: 1873021 - RNA, 19 nt, Artificial Sequence
  Description of Artificial Sequence: Synthetic oligonucleotide
uuuagugucucccagcccc

SEQ ID NO: 1873022 - RNA, 19 nt, Artificial Sequence
  Description of Artificial Sequence: Synthetic oligonucleotide
uauagcucccuucugaggc

SEQ ID NO: 1873023 - RNA, 19 nt, Artificial Sequence
  Description of Artificial Sequence: Synthetic oligonucleotide
aauccuucggucccaaagg

SEQ ID NO: 1873024 - RNA, 19 nt, Artificial Sequence
  Description of Artificial Sequence: Synthetic oligonucleotide
aagucacaggcacaggggc

SEQ ID NO: 1873025 - RNA, 19 nt, Artificial Sequence
  Description of Artificial Sequence: Synthetic oligonucleotide
ugaaauuccaggucagagg

SEQ ID NO: 1873026 - RNA, 19 nt, Artificial Sequence
  Description of Artificial Sequence: Synthetic oligonucleotide
cucauuuuaacacgcaugc

SEQ ID NO: 1873027 - RNA, 19 nt, Artificial Sequence
  Description of Artificial Sequence: Synthetic oligonucleotide
uugaaacagaacuaaauuc

SEQ ID NO: 1873028 - RNA, 19 nt, Artificial Sequence
  Description of Artificial Sequence: Synthetic oligonucleotide
uucuaguuucccuugagcc

SEQ ID NO: 1873029 - RNA, 19 nt, Artificial Sequence
  Description of Artificial Sequence: Synthetic oligonucleotide
ugaaggacagcuuuugacc

SEQ ID NO: 1873030 - RNA, 19 nt, Artificial Sequence
  Description of Artificial Sequence: Synthetic oligonucleotide
aaugugagacgcuuucuag

SEQ ID NO: 1873031 - RNA, 19 nt, Artificial Sequence
  Description of Artificial Sequence: Synthetic oligonucleotide
cagacauugaaauuccagg

SEQ ID NO: 1873032 - RNA, 19 nt, Artificial Sequence
  Description of Artificial Sequence: Synthetic oligonucleotide
aagugguacagaugcacac

SEQ ID NO: 1873033 - RNA, 19 nt, Artificial Sequence
  Description of Artificial Sequence: Synthetic oligonucleotide
agaugugccgagcagacgg

SEQ ID NO: 1873034 - RNA, 19 nt, Artificial Sequence
  Description of Artificial Sequence: Synthetic oligonucleotide
uuugacacgucuuaguuuc

SEQ ID NO: 1873035 - RNA, 19 nt, Artificial Sequence
  Description of Artificial Sequence: Synthetic oligonucleotide
agaagucacaggcacaggg

SEQ ID NO: 1873036 - RNA, 19 nt, Artificial Sequence
  Description of Artificial Sequence: Synthetic oligonucleotide
aauguaugggcucccaccu

SEQ ID NO: 1873037 - RNA, 19 nt, Artificial Sequence
  Description of Artificial Sequence: Synthetic oligonucleotide
aacuguucagagcagacau

SEQ ID NO: 1873038 - RNA, 19 nt, Artificial Sequence
  Description of Artificial Sequence: Synthetic oligonucleotide
gaaugacuuguauagcucc

SEQ ID NO: 1873039 - RNA, 19 nt, Artificial Sequence
  Description of Artificial Sequence: Synthetic oligonucleotide
cuugcagccagaaauggag

SEQ ID NO: 1873040 - RNA, 19 nt, Artificial Sequence
  Description of Artificial Sequence: Synthetic oligonucleotide
uguauguucaauguucuga

SEQ ID NO: 1873041 - RNA, 19 nt, Artificial Sequence
  Description of Artificial Sequence: Synthetic oligonucleotide
aacuaaauuccuggauucc

SEQ ID NO: 1873042 - RNA, 19 nt, Artificial Sequence
  Description of Artificial Sequence: Synthetic oligonucleotide
uucagagcagacauuagac

SEQ ID NO: 1873043 - RNA, 19 nt, Artificial Sequence
  Description of Artificial Sequence: Synthetic oligonucleotide
cauuagacaagcacagggg

SEQ ID NO: 1873044 - RNA, 19 nt, Artificial Sequence
  Description of Artificial Sequence: Synthetic oligonucleotide
aaugacuuguauagcuccc

SEQ ID NO: 1873045 - RNA, 19 nt, Artificial Sequence
  Description of Artificial Sequence: Synthetic oligonucleotide
ucugguggcauuagaauga

SEQ ID NO: 1873046 - RNA, 19 nt, Artificial Sequence
  Description of Artificial Sequence: Synthetic oligonucleotide
auguucaauguucugaccu

SEQ ID NO: 1873047 - RNA, 19 nt, Artificial Sequence
  Description of Artificial Sequence: Synthetic oligonucleotide
gaauguaccucucccagug

SEQ ID NO: 1873048 - RNA, 19 nt, Artificial Sequence
  Description of Artificial Sequence: Synthetic oligonucleotide
uagacagaucccaaguuca

SEQ ID NO: 1873049 - RNA, 19 nt, Artificial Sequence
  Description of Artificial Sequence: Synthetic oligonucleotide
acaccuacacgguaggccg

SEQ ID NO: 1873050 - RNA, 19 nt, Artificial Sequence
  Description of Artificial Sequence: Synthetic oligonucleotide
uuauuuuguccuccgguug

SEQ ID NO: 1873051 - RNA, 19 nt, Artificial Sequence
  Description of Artificial Sequence: Synthetic oligonucleotide
ugguacuuuaauccuucgg

SEQ ID NO: 1873052 - RNA, 19 nt, Artificial Sequence
  Description of Artificial Sequence: Synthetic oligonucleotide
aaugguugugggcaaguga

SEQ ID NO: 1873053 - RNA, 19 nt, Artificial Sequence
  Description of Artificial Sequence: Synthetic oligonucleotide
uugaaauuccaggucagag

SEQ ID NO: 1873054 - RNA, 19 nt, Artificial Sequence
  Description of Artificial Sequence: Synthetic oligonucleotide
cuuuuagugucucccagcc

SEQ ID NO: 1873055 - RNA, 19 nt, Artificial Sequence
  Description of Artificial Sequence: Synthetic oligonucleotide
aguugaaccuguuccccgc

SEQ ID NO: 1873056 - RNA, 19 nt, Artificial Sequence
  Description of Artificial Sequence: Synthetic oligonucleotide
auuagacaagcacaggggu

SEQ ID NO: 1873057 - RNA, 19 nt, Artificial Sequence
  Description of Artificial Sequence: Synthetic oligonucleotide
agaacuaaauuccuggauu

SEQ ID NO: 1873058 - RNA, 19 nt, Artificial Sequence
  Description of Artificial Sequence: Synthetic oligonucleotide
ugggauuuucccaaaggga

SEQ ID NO: 1873059 - RNA, 19 nt, Artificial Sequence
  Description of Artificial Sequence: Synthetic oligonucleotide
gaacuaaauuccuggauuc

SEQ ID NO: 1873060 - RNA, 19 nt, Artificial Sequence
  Description of Artificial Sequence: Synthetic oligonucleotide
uugaaggacagcuuuugac

SEQ ID NO: 1873061 - RNA, 19 nt, Artificial Sequence
  Description of Artificial Sequence: Synthetic oligonucleotide
acugggcucuuugagaacc

SEQ ID NO: 1873062 - RNA, 19 nt, Artificial Sequence
  Description of Artificial Sequence: Synthetic oligonucleotide
aagugacaggcucuuuuag

SEQ ID NO: 1873063 - RNA, 19 nt, Artificial Sequence
  Description of Artificial Sequence: Synthetic oligonucleotide
uccugauaaaugugagacg

SEQ ID NO: 1873064 - RNA, 19 nt, Artificial Sequence
  Description of Artificial Sequence: Synthetic oligonucleotide
gaaauuccaggucagaggu

SEQ ID NO: 1873065 - RNA, 19 nt, Artificial Sequence
  Description of Artificial Sequence: Synthetic oligonucleotide
aagaugucagggucaaccu

SEQ ID NO: 1873066 - RNA, 19 nt, Artificial Sequence
  Description of Artificial Sequence: Synthetic oligonucleotide
guaggaauguaccucuccc

SEQ ID NO: 1873067 - RNA, 19 nt, Artificial Sequence
  Description of Artificial Sequence: Synthetic oligonucleotide
ucuuuuagugucucccagc

SEQ ID NO: 1873068 - RNA, 19 nt, Artificial Sequence
  Description of Artificial Sequence: Synthetic oligonucleotide
aaauuccuggauuccuucu

SEQ ID NO: 1873069 - RNA, 19 nt, Artificial Sequence
  Description of Artificial Sequence: Synthetic oligonucleotide
uguaugggcucccaccuca

SEQ ID NO: 1873070 - RNA, 19 nt, Artificial Sequence
  Description of Artificial Sequence: Synthetic oligonucleotide
aacuugcagccagaaaugg

SEQ ID NO: 1873071 - RNA, 19 nt, Artificial Sequence
  Description of Artificial Sequence: Synthetic oligonucleotide
guccugauaaaugugagac

SEQ ID NO: 1873072 - RNA, 19 nt, Artificial Sequence
  Description of Artificial Sequence: Synthetic oligonucleotide
gacauugaaauuccagguc

SEQ ID NO: 1873073 - RNA, 19 nt, Artificial Sequence
  Description of Artificial Sequence: Synthetic oligonucleotide
agucacauguggugggugg

SEQ ID NO: 1873074 - RNA, 19 nt, Artificial Sequence
  Description of Artificial Sequence: Synthetic oligonucleotide
gugacaggcucuuuuagug

SEQ ID NO: 1873075 - RNA, 19 nt, Artificial Sequence
  Description of Artificial Sequence: Synthetic oligonucleotide
gacacgucuuaguuucugg

SEQ ID NO: 1873076 - RNA, 19 nt, Artificial Sequence
  Description of Artificial Sequence: Synthetic oligonucleotide
acgcaugcauuuuaaaaca

SEQ ID NO: 1873077 - RNA, 19 nt, Artificial Sequence
  Description of Artificial Sequence: Synthetic oligonucleotide
cucugguggcauuagaaug

SEQ ID NO: 1873078 - RNA, 19 nt, Artificial Sequence
  Description of Artificial Sequence: Synthetic oligonucleotide
agacauuagacaagcacag

SEQ ID NO: 1873079 - RNA, 19 nt, Artificial Sequence
  Description of Artificial Sequence: Synthetic oligonucleotide
ucaacaauacugucaggaa

SEQ ID NO: 1873080 - RNA, 19 nt, Artificial Sequence
  Description of Artificial Sequence: Synthetic oligonucleotide
uugugggcaagugacaggc

SEQ ID NO: 1873081 - RNA, 19 nt, Artificial Sequence
  Description of Artificial Sequence: Synthetic oligonucleotide
ugaacuguucagagcagac

SEQ ID NO: 1873082 - RNA, 19 nt, Artificial Sequence
  Description of Artificial Sequence: Synthetic oligonucleotide
acacgaccccguuugacac

SEQ ID NO: 1873083 - RNA, 19 nt, Artificial Sequence
  Description of Artificial Sequence: Synthetic oligonucleotide
ggagucucauuuuaacacg

SEQ ID NO: 1873084 - RNA, 19 nt, Artificial Sequence
  Description of Artificial Sequence: Synthetic oligonucleotide
uccgguuggagucucauuu

SEQ ID NO: 1873085 - RNA, 19 nt, Artificial Sequence
  Description of Artificial Sequence: Synthetic oligonucleotide
uuagaaugacuuguauagc

SEQ ID NO: 1873086 - RNA, 19 nt, Artificial Sequence
  Description of Artificial Sequence: Synthetic oligonucleotide
uuaacacgcaugcauuuua

SEQ ID NO: 1873087 - RNA, 19 nt, Artificial Sequence
  Description of Artificial Sequence: Synthetic oligonucleotide
ugagacgcuuucuaguuuc

SEQ ID NO: 1873088 - RNA, 19 nt, Artificial Sequence
  Description of Artificial Sequence: Synthetic oligonucleotide
ugucucugcagugagcacc

SEQ ID NO: 1873089 - RNA, 19 nt, Artificial Sequence
  Description of Artificial Sequence: Synthetic oligonucleotide
uauguucaauguucugacc

SEQ ID NO: 1873090 - RNA, 19 nt, Artificial Sequence
  Description of Artificial Sequence: Synthetic oligonucleotide
uagacaagcacagggguga

SEQ ID NO: 1873091 - RNA, 19 nt, Artificial Sequence
  Description of Artificial Sequence: Synthetic oligonucleotide
cauugaaauuccaggucag

SEQ ID NO: 1873092 - RNA, 19 nt, Artificial Sequence
  Description of Artificial Sequence: Synthetic oligonucleotide
ccuggauuccuucugaggg

SEQ ID NO: 1873093 - RNA, 19 nt, Artificial Sequence
  Description of Artificial Sequence: Synthetic oligonucleotide
agaaugacuuguauagcuc

SEQ ID NO: 1873094 - RNA, 19 nt, Artificial Sequence
  Description of Artificial Sequence: Synthetic oligonucleotide
guuggagucucauuuuaac

SEQ ID NO: 1873095 - RNA, 19 nt, Artificial Sequence
  Description of Artificial Sequence: Synthetic oligonucleotide
acacgcaugcauuuuaaaa

SEQ ID NO: 1873096 - RNA, 19 nt, Artificial Sequence
  Description of Artificial Sequence: Synthetic oligonucleotide
guagacagaucccaaguuc

SEQ ID NO: 1873097 - RNA, 19 nt, Artificial Sequence
  Description of Artificial Sequence: Synthetic oligonucleotide
uaaauguaugggcucccac

SEQ ID NO: 1873098 - RNA, 19 nt, Artificial Sequence
  Description of Artificial Sequence: Synthetic oligonucleotide
uguugaaggacagcuuuug

SEQ ID NO: 1873099 - RNA, 19 nt, Artificial Sequence
  Description of Artificial Sequence: Synthetic oligonucleotide
agcacaggggugaaaauuc

SEQ ID NO: 1873100 - RNA, 19 nt, Artificial Sequence
  Description of Artificial Sequence: Synthetic oligonucleotide
uggcauuagaaugacuugu

SEQ ID NO: 1873101 - RNA, 19 nt, Artificial Sequence
  Description of Artificial Sequence: Synthetic oligonucleotide
agagcauuugaaacagaac

SEQ ID NO: 1873102 - RNA, 19 nt, Artificial Sequence
  Description of Artificial Sequence: Synthetic oligonucleotide
acagacauugaaauuccag

SEQ ID NO: 1873103 - RNA, 19 nt, Artificial Sequence
  Description of Artificial Sequence: Synthetic oligonucleotide
uguaccucucccagugaag

SEQ ID NO: 1873104 - RNA, 19 nt, Artificial Sequence
  Description of Artificial Sequence: Synthetic oligonucleotide
uguagacagaucccaaguu

SEQ ID NO: 1873105 - RNA, 19 nt, Artificial Sequence
  Description of Artificial Sequence: Synthetic oligonucleotide
agugacaggcucuuuuagu

SEQ ID NO: 1873106 - RNA, 19 nt, Artificial Sequence
  Description of Artificial Sequence: Synthetic oligonucleotide
uaguuuuauuuuguccucc

SEQ ID NO: 1873107 - RNA, 19 nt, Artificial Sequence
  Description of Artificial Sequence: Synthetic oligonucleotide
uuuuagugucucccagccc

SEQ ID NO: 1873108 - RNA, 19 nt, Artificial Sequence
  Description of Artificial Sequence: Synthetic oligonucleotide
guacuuuaauccuucgguc

SEQ ID NO: 1873109 - RNA, 19 nt, Artificial Sequence
  Description of Artificial Sequence: Synthetic oligonucleotide
gacaccuacacgguaggcc

SEQ ID NO: 1873110 - RNA, 19 nt, Artificial Sequence
  Description of Artificial Sequence: Synthetic oligonucleotide
uacaggugacugcacgaag

SEQ ID NO: 1873111 - RNA, 19 nt, Artificial Sequence
  Description of Artificial Sequence: Synthetic oligonucleotide
uaggaauguaccucuccca

SEQ ID NO: 1873112 - RNA, 19 nt, Artificial Sequence
  Description of Artificial Sequence: Synthetic oligonucleotide
ugagcacccggguacuuag

SEQ ID NO: 1873113 - RNA, 19 nt, Artificial Sequence
  Description of Artificial Sequence: Synthetic oligonucleotide
ugugagacgcuuucuaguu

SEQ ID NO: 1873114 - RNA, 19 nt, Artificial Sequence
  Description of Artificial Sequence: Synthetic oligonucleotide
acagcuuuugacccacuca

SEQ ID NO: 1873115 - RNA, 19 nt, Artificial Sequence
  Description of Artificial Sequence: Synthetic oligonucleotide
gagcagacauuagacaagc

SEQ ID NO: 1873116 - RNA, 19 nt, Artificial Sequence
  Description of Artificial Sequence: Synthetic oligonucleotide
ugcucugguggcauuagaa

SEQ ID NO: 1873117 - RNA, 19 nt, Artificial Sequence
  Description of Artificial Sequence: Synthetic oligonucleotide
cuuggaguggugucucugc

SEQ ID NO: 1873118 - RNA, 19 nt, Artificial Sequence
  Description of Artificial Sequence: Synthetic oligonucleotide
ugauaaaugugagacgcuu

SEQ ID NO: 1873119 - RNA, 19 nt, Artificial Sequence
  Description of Artificial Sequence: Synthetic oligonucleotide
acuaaauuccuggauuccu

SEQ ID NO: 1873120 - RNA, 19 nt, Artificial Sequence
  Description of Artificial Sequence: Synthetic oligonucleotide
caaagggaaacagccauug

SEQ ID NO: 1873121 - RNA, 19 nt, Artificial Sequence
  Description of Artificial Sequence: Synthetic oligonucleotide
augugagacgcuuucuagu

SEQ ID NO: 1873122 - RNA, 19 nt, Artificial Sequence
  Description of Artificial Sequence: Synthetic oligonucleotide
agcacccggguacuuaggg

SEQ ID NO: 1873123 - RNA, 19 nt, Artificial Sequence
  Description of Artificial Sequence: Synthetic oligonucleotide
ggagaagucacauguggug

SEQ ID NO: 1873124 - RNA, 19 nt, Artificial Sequence
  Description of Artificial Sequence: Synthetic oligonucleotide
acaauacugucaggaaaac

SEQ ID NO: 1873125 - RNA, 19 nt, Artificial Sequence
  Description of Artificial Sequence: Synthetic oligonucleotide
gagucucauuuuaacacgc

SEQ ID NO: 1873126 - RNA, 19 nt, Artificial Sequence
  Description of Artificial Sequence: Synthetic oligonucleotide
gcagacauuagacaagcac

SEQ ID NO: 1873127 - RNA, 19 nt, Artificial Sequence
  Description of Artificial Sequence: Synthetic oligonucleotide
aaaaugguugugggcaagu

SEQ ID NO: 1873128 - RNA, 19 nt, Artificial Sequence
  Description of Artificial Sequence: Synthetic oligonucleotide
cugacucugguccaagaug

SEQ ID NO: 1873129 - RNA, 19 nt, Artificial Sequence
  Description of Artificial Sequence: Synthetic oligonucleotide
cuuaguuucugggauuuuc

SEQ ID NO: 1873130 - RNA, 19 nt, Artificial Sequence
  Description of Artificial Sequence: Synthetic oligonucleotide
cucuuuuagugucucccag

SEQ ID NO: 1873131 - RNA, 19 nt, Artificial Sequence
  Description of Artificial Sequence: Synthetic oligonucleotide
gguacuuagggcucugccc

SEQ ID NO: 1873132 - RNA, 19 nt, Artificial Sequence
  Description of Artificial Sequence: Synthetic oligonucleotide
ugggugguacuuuaauccu

SEQ ID NO: 1873133 - RNA, 19 nt, Artificial Sequence
  Description of Artificial Sequence: Synthetic oligonucleotide
ugaaccuguuccccgcuga

SEQ ID NO: 1873134 - RNA, 19 nt, Artificial Sequence
  Description of Artificial Sequence: Synthetic oligonucleotide
cuuucuaguuucccuugag

SEQ ID NO: 1873135 - RNA, 19 nt, Artificial Sequence
  Description of Artificial Sequence: Synthetic oligonucleotide
uuguccuccgguuggaguc

SEQ ID NO: 1873136 - RNA, 19 nt, Artificial Sequence
  Description of Artificial Sequence: Synthetic oligonucleotide
ucccaccucacaaaauggu

SEQ ID NO: 1873137 - RNA, 19 nt, Artificial Sequence
  Description of Artificial Sequence: Synthetic oligonucleotide
ugagccagugggaggcagg

SEQ ID NO: 1873138 - RNA, 19 nt, Artificial Sequence
  Description of Artificial Sequence: Synthetic oligonucleotide
ggaacuugcagccagaaau

SEQ ID NO: 1873139 - RNA, 19 nt, Artificial Sequence
  Description of Artificial Sequence: Synthetic oligonucleotide
uuguauguucaauguucug

SEQ ID NO: 1873140 - RNA, 19 nt, Artificial Sequence
  Description of Artificial Sequence: Synthetic oligonucleotide
aaaauggaacuugcagcca

SEQ ID NO: 1873141 - RNA, 19 nt, Artificial Sequence
  Description of Artificial Sequence: Synthetic oligonucleotide
acaaggaaagguggagcac

SEQ ID NO: 1873142 - RNA, 19 nt, Artificial Sequence
  Description of Artificial Sequence: Synthetic oligonucleotide
uacacgguaggccggggcu

SEQ ID NO: 1873143 - RNA, 19 nt, Artificial Sequence
  Description of Artificial Sequence: Synthetic oligonucleotide
acgucuuaguuucugggau

SEQ ID NO: 1873144 - RNA, 19 nt, Artificial Sequence
  Description of Artificial Sequence: Synthetic oligonucleotide
ugagaaccagcugucugag

SEQ ID NO: 1873145 - RNA, 19 nt, Artificial Sequence
  Description of Artificial Sequence: Synthetic oligonucleotide
ucaccaucucaugaaguug

SEQ ID NO: 1873146 - RNA, 19 nt, Artificial Sequence
  Description of Artificial Sequence: Synthetic oligonucleotide
uaacacgcaugcauuuuaa

SEQ ID NO: 1873147 - RNA, 19 nt, Artificial Sequence
  Description of Artificial Sequence: Synthetic oligonucleotide
gcaggcuugacagacauug

SEQ ID NO: 1873148 - RNA, 19 nt, Artificial Sequence
  Description of Artificial Sequence: Synthetic oligonucleotide
aacacgcaugcauuuuaaa

SEQ ID NO: 1873149 - RNA, 19 nt, Artificial Sequence
  Description of Artificial Sequence: Synthetic oligonucleotide
gguacuuuaauccuucggu

SEQ ID NO: 1873150 - RNA, 19 nt, Artificial Sequence
  Description of Artificial Sequence: Synthetic oligonucleotide
guggcauuagaaugacuug

SEQ ID NO: 1873151 - RNA, 19 nt, Artificial Sequence
  Description of Artificial Sequence: Synthetic oligonucleotide
aggagguaggaauguaccu

SEQ ID NO: 1873152 - RNA, 19 nt, Artificial Sequence
  Description of Artificial Sequence: Synthetic oligonucleotide
uugaacuguucagagcaga

SEQ ID NO: 1873153 - RNA, 19 nt, Artificial Sequence
  Description of Artificial Sequence: Synthetic oligonucleotide
gcuuacaggugacugcacg

SEQ ID NO: 1873154 - RNA, 19 nt, Artificial Sequence
  Description of Artificial Sequence: Synthetic oligonucleotide
ggaaagguggagcaccuug

SEQ ID NO: 1873155 - RNA, 19 nt, Artificial Sequence
  Description of Artificial Sequence: Synthetic oligonucleotide
ugccaagaugugccgagca

SEQ ID NO: 1873156 - RNA, 19 nt, Artificial Sequence
  Description of Artificial Sequence: Synthetic oligonucleotide
gauuccuucugagggguug

SEQ ID NO: 1873157 - RNA, 19 nt, Artificial Sequence
  Description of Artificial Sequence: Synthetic oligonucleotide
auugaaacacagguccuga

SEQ ID NO: 1873158 - RNA, 19 nt, Artificial Sequence
  Description of Artificial Sequence: Synthetic oligonucleotide
cauuuuguauguucaaugu

SEQ ID NO: 1873159 - RNA, 19 nt, Artificial Sequence
  Description of Artificial Sequence: Synthetic oligonucleotide
uggaguggugucucugcag

SEQ ID NO: 1873160 - RNA, 19 nt, Artificial Sequence
  Description of Artificial Sequence: Synthetic oligonucleotide
uaaaugugagacgcuuucu

SEQ ID NO: 1873161 - RNA, 19 nt, Artificial Sequence
  Description of Artificial Sequence: Synthetic oligonucleotide
gucacucaccaucucauga

SEQ ID NO: 1873162 - RNA, 19 nt, Artificial Sequence
  Description of Artificial Sequence: Synthetic oligonucleotide
aacagcaacaagggcuuga

SEQ ID NO: 1873163 - RNA, 19 nt, Artificial Sequence
  Description of Artificial Sequence: Synthetic oligonucleotide
gacuuguauagcucccuuc

SEQ ID NO: 1873164 - RNA, 19 nt, Artificial Sequence
  Description of Artificial Sequence: Synthetic oligonucleotide
uuccuggauuccuucugag

SEQ ID NO: 1873165 - RNA, 19 nt, Artificial Sequence
  Description of Artificial Sequence: Synthetic oligonucleotide
aagaugugccgagcagacg

SEQ ID NO: 1873166 - RNA, 19 nt, Artificial Sequence
  Description of Artificial Sequence: Synthetic oligonucleotide
aggggccagacaccuacac

SEQ ID NO: 1873167 - RNA, 19 nt, Artificial Sequence
  Description of Artificial Sequence: Synthetic oligonucleotide
uccuucggucccaaaggug

SEQ ID NO: 1873168 - RNA, 19 nt, Artificial Sequence
  Description of Artificial Sequence: Synthetic oligonucleotide
aagcacaggggugaaaauu

SEQ ID NO: 1873169 - RNA, 19 nt, Artificial Sequence
  Description of Artificial Sequence: Synthetic oligonucleotide
ucauuuuaacacgcaugca

SEQ ID NO: 1873170 - RNA, 19 nt, Artificial Sequence
  Description of Artificial Sequence: Synthetic oligonucleotide
caccaucucaugaaguuga

SEQ ID NO: 1873171 - RNA, 19 nt, Artificial Sequence
  Description of Artificial Sequence: Synthetic oligonucleotide
cauugaaacacagguccug

SEQ ID NO: 1873172 - RNA, 19 nt, Artificial Sequence
  Description of Artificial Sequence: Synthetic oligonucleotide
uccgaggaggccuguagac

SEQ ID NO: 1873173 - RNA, 19 nt, Artificial Sequence
  Description of Artificial Sequence: Synthetic oligonucleotide
agacgcuuucuaguuuccc

SEQ ID NO: 1873174 - RNA, 19 nt, Artificial Sequence
  Description of Artificial Sequence: Synthetic oligonucleotide
cuuacaggugacugcacga

SEQ ID NO: 1873175 - RNA, 19 nt, Artificial Sequence
  Description of Artificial Sequence: Synthetic oligonucleotide
gacugcacgaagugguaca

SEQ ID NO: 1873176 - RNA, 19 nt, Artificial Sequence
  Description of Artificial Sequence: Synthetic oligonucleotide
aaccuguuccccgcugagg

SEQ ID NO: 1873177 - RNA, 19 nt, Artificial Sequence
  Description of Artificial Sequence: Synthetic oligonucleotide
aggcucuuuuagugucucc

SEQ ID NO: 1873178 - RNA, 19 nt, Artificial Sequence
  Description of Artificial Sequence: Synthetic oligonucleotide
uucccuugagccaguggga

SEQ ID NO: 1873179 - RNA, 19 nt, Artificial Sequence
  Description of Artificial Sequence: Synthetic oligonucleotide
gugguacuuuaauccuucg

SEQ ID NO: 1873180 - RNA, 19 nt, Artificial Sequence
  Description of Artificial Sequence: Synthetic oligonucleotide
gaagugguacagaugcaca

SEQ ID NO: 1873181 - RNA, 19 nt, Artificial Sequence
  Description of Artificial Sequence: Synthetic oligonucleotide
cacucaccaucucaugaag

SEQ ID NO: 1873182 - RNA, 19 nt, Artificial Sequence
  Description of Artificial Sequence: Synthetic oligonucleotide
gcucccaccucacaaaaug

SEQ ID NO: 1873183 - RNA, 19 nt, Artificial Sequence
  Description of Artificial Sequence: Synthetic oligonucleotide
gaaccuguuccccgcugag

SEQ ID NO: 1873184 - RNA, 19 nt, Artificial Sequence
  Description of Artificial Sequence: Synthetic oligonucleotide
cucccagugaaggccaacg

SEQ ID NO: 1873185 - RNA, 19 nt, Artificial Sequence
  Description of Artificial Sequence: Synthetic oligonucleotide
ucccuugagccagugggag

SEQ ID NO: 1873186 - RNA, 19 nt, Artificial Sequence
  Description of Artificial Sequence: Synthetic oligonucleotide
uugaaccuguuccccgcug

SEQ ID NO: 1873187 - RNA, 19 nt, Artificial Sequence
  Description of Artificial Sequence: Synthetic oligonucleotide
auccuucggucccaaaggu

SEQ ID NO: 1873188 - RNA, 19 nt, Artificial Sequence
  Description of Artificial Sequence: Synthetic oligonucleotide
auguaccucucccagugaa

SEQ ID NO: 1873189 - RNA, 19 nt, Artificial Sequence
  Description of Artificial Sequence: Synthetic oligonucleotide
gcuuuugacccacucaaca

SEQ ID NO: 1873190 - RNA, 19 nt, Artificial Sequence
  Description of Artificial Sequence: Synthetic oligonucleotide
agggcuugaacuguucaga

SEQ ID NO: 1873191 - RNA, 19 nt, Artificial Sequence
  Description of Artificial Sequence: Synthetic oligonucleotide
uuacaggugacugcacgaa

SEQ ID NO: 1873192 - RNA, 19 nt, Artificial Sequence
  Description of Artificial Sequence: Synthetic oligonucleotide
ugacacgucuuaguuucug

SEQ ID NO: 1873193 - RNA, 19 nt, Artificial Sequence
  Description of Artificial Sequence: Synthetic oligonucleotide
aagucacauguggugggug

SEQ ID NO: 1873194 - RNA, 19 nt, Artificial Sequence
  Description of Artificial Sequence: Synthetic oligonucleotide
cagcuuuugacccacucaa

SEQ ID NO: 1873195 - RNA, 19 nt, Artificial Sequence
  Description of Artificial Sequence: Synthetic oligonucleotide
uguggugggugguacuuua

SEQ ID NO: 1873196 - RNA, 19 nt, Artificial Sequence
  Description of Artificial Sequence: Synthetic oligonucleotide
aauggaacuugcagccaga

SEQ ID NO: 1873197 - RNA, 19 nt, Artificial Sequence
  Description of Artificial Sequence: Synthetic oligonucleotide
acaugccgcuuacagguga

SEQ ID NO: 1873198 - RNA, 19 nt, Artificial Sequence
  Description of Artificial Sequence: Synthetic oligonucleotide
ugguugugggcaagugaca

SEQ ID NO: 1873199 - RNA, 19 nt, Artificial Sequence
  Description of Artificial Sequence: Synthetic oligonucleotide
gguccaagaugucaggguc

SEQ ID NO: 1873200 - RNA, 19 nt, Artificial Sequence
  Description of Artificial Sequence: Synthetic oligonucleotide
aggugacugcacgaagugg

SEQ ID NO: 1873201 - RNA, 19 nt, Artificial Sequence
  Description of Artificial Sequence: Synthetic oligonucleotide
ugugccgagcagacgggcu

SEQ ID NO: 1873202 - RNA, 19 nt, Artificial Sequence
  Description of Artificial Sequence: Synthetic oligonucleotide
agacaccuacacgguaggc

SEQ ID NO: 1873203 - RNA, 19 nt, Artificial Sequence
  Description of Artificial Sequence: Synthetic oligonucleotide
ugacuuguauagcucccuu

SEQ ID NO: 1873204 - RNA, 19 nt, Artificial Sequence
  Description of Artificial Sequence: Synthetic oligonucleotide
uggugggugguacuuuaau

SEQ ID NO: 1873205 - RNA, 19 nt, Artificial Sequence
  Description of Artificial Sequence: Synthetic oligonucleotide
uugaaacacagguccugau

SEQ ID NO: 1873206 - RNA, 19 nt, Artificial Sequence
  Description of Artificial Sequence: Synthetic oligonucleotide
uggaacuugcagccagaaa

SEQ ID NO: 1873207 - RNA, 19 nt, Artificial Sequence
  Description of Artificial Sequence: Synthetic oligonucleotide
acaggugacugcacgaagu

SEQ ID NO: 1873208 - RNA, 19 nt, Artificial Sequence
  Description of Artificial Sequence: Synthetic oligonucleotide
ggcucuuuuagugucuccc

SEQ ID NO: 1873209 - RNA, 19 nt, Artificial Sequence
  Description of Artificial Sequence: Synthetic oligonucleotide
caggugacugcacgaagug

SEQ ID NO: 1873210 - RNA, 19 nt, Artificial Sequence
  Description of Artificial Sequence: Synthetic oligonucleotide
gacgcuuucuaguuucccu

SEQ ID NO: 1873211 - RNA, 19 nt, Artificial Sequence
  Description of Artificial Sequence: Synthetic oligonucleotide
ugccgcuuacaggugacug

SEQ ID NO: 1873212 - RNA, 19 nt, Artificial Sequence
  Description of Artificial Sequence: Synthetic oligonucleotide
ccuuucuggugucucaacc

SEQ ID NO: 1873213 - RNA, 19 nt, Artificial Sequence
  Description of Artificial Sequence: Synthetic oligonucleotide
cacgucuuaguuucuggga

SEQ ID NO: 1873214 - RNA, 19 nt, Artificial Sequence
  Description of Artificial Sequence: Synthetic oligonucleotide
ggugggugguacuuuaauc

SEQ ID NO: 1873215 - RNA, 19 nt, Artificial Sequence
  Description of Artificial Sequence: Synthetic oligonucleotide
acgcuuucuaguuucccuu

SEQ ID NO: 1873216 - RNA, 19 nt, Artificial Sequence
  Description of Artificial Sequence: Synthetic oligonucleotide
gggcuugaacuguucagag

SEQ ID NO: 1873217 - RNA, 19 nt, Artificial Sequence
  Description of Artificial Sequence: Synthetic oligonucleotide
gcaacaaggaaagguggag

SEQ ID NO: 1873218 - RNA, 19 nt, Artificial Sequence
  Description of Artificial Sequence: Synthetic oligonucleotide
cacacgaccccguuugaca

SEQ ID NO: 1873219 - RNA, 19 nt, Artificial Sequence
  Description of Artificial Sequence: Synthetic oligonucleotide
uaugggcucccaccucaca

SEQ ID NO: 1873220 - RNA, 19 nt, Artificial Sequence
  Description of Artificial Sequence: Synthetic oligonucleotide
uggugucucugcagugagc

SEQ ID NO: 1873221 - RNA, 19 nt, Artificial Sequence
  Description of Artificial Sequence: Synthetic oligonucleotide
agacagaucccaaguucag

SEQ ID NO: 1873222 - RNA, 19 nt, Artificial Sequence
  Description of Artificial Sequence: Synthetic oligonucleotide
gggcaacaaggaaaggugg

SEQ ID NO: 1873223 - RNA, 19 nt, Artificial Sequence
  Description of Artificial Sequence: Synthetic oligonucleotide
cuacacgguaggccggggc

SEQ ID NO: 1873224 - RNA, 19 nt, Artificial Sequence
  Description of Artificial Sequence: Synthetic oligonucleotide
gagaagucacaggcacagg

SEQ ID NO: 1873225 - RNA, 19 nt, Artificial Sequence
  Description of Artificial Sequence: Synthetic oligonucleotide
ccuguagacagaucccaag

SEQ ID NO: 1873226 - RNA, 19 nt, Artificial Sequence
  Description of Artificial Sequence: Synthetic oligonucleotide
aaaggugacuccagacuuu

SEQ ID NO: 1873227 - RNA, 19 nt, Artificial Sequence
  Description of Artificial Sequence: Synthetic oligonucleotide
gacagaucccaaguucaga

SEQ ID NO: 1873228 - RNA, 19 nt, Artificial Sequence
  Description of Artificial Sequence: Synthetic oligonucleotide
caugccgcuuacaggugac

SEQ ID NO: 1873229 - RNA, 19 nt, Artificial Sequence
  Description of Artificial Sequence: Synthetic oligonucleotide
acuccagacuuuauucaca

SEQ ID NO: 1873230 - RNA, 19 nt, Artificial Sequence
  Description of Artificial Sequence: Synthetic oligonucleotide
ggcuugaacuguucagagc

SEQ ID NO: 1873231 - RNA, 19 nt, Artificial Sequence
  Description of Artificial Sequence: Synthetic oligonucleotide
cuucggucccaaaggugac

SEQ ID NO: 1873232 - RNA, 19 nt, Artificial Sequence
  Description of Artificial Sequence: Synthetic oligonucleotide
gcugccaagaugugccgag

SEQ ID NO: 1873233 - RNA, 19 nt, Artificial Sequence
  Description of Artificial Sequence: Synthetic oligonucleotide
gguguggcucuuuccgagg

SEQ ID NO: 1873234 - RNA, 19 nt, Artificial Sequence
  Description of Artificial Sequence: Synthetic oligonucleotide
gaggccucugacucugguc

SEQ ID NO: 1873235 - RNA, 19 nt, Artificial Sequence
  Description of Artificial Sequence: Synthetic oligonucleotide
ucggucccaaaggugacuc

SEQ ID NO: 1873236 - RNA, 19 nt, Artificial Sequence
  Description of Artificial Sequence: Synthetic oligonucleotide
cacgaccccguuugacacg

SEQ ID NO: 1873237 - RNA, 19 nt, Artificial Sequence
  Description of Artificial Sequence: Synthetic oligonucleotide
uuccuucugagggguuggg

SEQ ID NO: 1873238 - RNA, 19 nt, Artificial Sequence
  Description of Artificial Sequence: Synthetic oligonucleotide
caauacugucaggaaaaca

SEQ ID NO: 1873239 - RNA, 19 nt, Artificial Sequence
  Description of Artificial Sequence: Synthetic oligonucleotide
ugugggcaagugacaggcu

SEQ ID NO: 1873240 - RNA, 19 nt, Artificial Sequence
  Description of Artificial Sequence: Synthetic oligonucleotide
agaggugcggguggcuggg

SEQ ID NO: 1873241 - RNA, 19 nt, Artificial Sequence
  Description of Artificial Sequence: Synthetic oligonucleotide
aggguguggcucuuuccga

SEQ ID NO: 1873242 - RNA, 19 nt, Artificial Sequence
  Description of Artificial Sequence: Synthetic oligonucleotide
ggggccagacaccuacacg

SEQ ID NO: 1873243 - RNA, 19 nt, Artificial Sequence
  Description of Artificial Sequence: Synthetic oligonucleotide
caagugacaggcucuuuua

SEQ ID NO: 1873244 - RNA, 19 nt, Artificial Sequence
  Description of Artificial Sequence: Synthetic oligonucleotide
acucaccaucucaugaagu

SEQ ID NO: 1873245 - RNA, 19 nt, Artificial Sequence
  Description of Artificial Sequence: Synthetic oligonucleotide
accuacacgguaggccggg

SEQ ID NO: 1873246 - RNA, 19 nt, Artificial Sequence
  Description of Artificial Sequence: Synthetic oligonucleotide
caccuacacgguaggccgg

SEQ ID NO: 1873247 - RNA, 19 nt, Artificial Sequence
  Description of Artificial Sequence: Synthetic oligonucleotide
gagacgcuuucuaguuucc

SEQ ID NO: 1873248 - RNA, 19 nt, Artificial Sequence
  Description of Artificial Sequence: Synthetic oligonucleotide
gagccagugggaggcaggc

SEQ ID NO: 1873249 - RNA, 19 nt, Artificial Sequence
  Description of Artificial Sequence: Synthetic oligonucleotide
acaggggugaaaauuccua

SEQ ID NO: 1873250 - RNA, 19 nt, Artificial Sequence
  Description of Artificial Sequence: Synthetic oligonucleotide
gguccugauaaaugugaga

SEQ ID NO: 1873251 - RNA, 19 nt, Artificial Sequence
  Description of Artificial Sequence: Synthetic oligonucleotide
uuaauccuucggucccaaa

SEQ ID NO: 1873252 - RNA, 19 nt, Artificial Sequence
  Description of Artificial Sequence: Synthetic oligonucleotide
gucaggaaaacagagcauu

SEQ ID NO: 1873253 - RNA, 19 nt, Artificial Sequence
  Description of Artificial Sequence: Synthetic oligonucleotide
caaaggugacuccagacuu

SEQ ID NO: 1873254 - RNA, 19 nt, Artificial Sequence
  Description of Artificial Sequence: Synthetic oligonucleotide
cuguagacagaucccaagu

SEQ ID NO: 1873255 - RNA, 19 nt, Artificial Sequence
  Description of Artificial Sequence: Synthetic oligonucleotide
gguggcauuagaaugacuu

SEQ ID NO: 1873256 - RNA, 19 nt, Artificial Sequence
  Description of Artificial Sequence: Synthetic oligonucleotide
ugcacacgaccccguuuga

SEQ ID NO: 1873257 - RNA, 19 nt, Artificial Sequence
  Description of Artificial Sequence: Synthetic oligonucleotide
ccacucaacaauacuguca

SEQ ID NO: 1873258 - RNA, 19 nt, Artificial Sequence
  Description of Artificial Sequence: Synthetic oligonucleotide
ggugucucaaccuguugaa

SEQ ID NO: 1873259 - RNA, 19 nt, Artificial Sequence
  Description of Artificial Sequence: Synthetic oligonucleotide
ugagggcccagcugcuuuc

SEQ ID NO: 1873260 - RNA, 19 nt, Artificial Sequence
  Description of Artificial Sequence: Synthetic oligonucleotide
cccaaaggugacuccagac

SEQ ID NO: 1873261 - RNA, 19 nt, Artificial Sequence
  Description of Artificial Sequence: Synthetic oligonucleotide
cugguggcauuagaaugac

SEQ ID NO: 1873262 - RNA, 19 nt, Artificial Sequence
  Description of Artificial Sequence: Synthetic oligonucleotide
cuaaauguaugggcuccca

SEQ ID NO: 1873263 - RNA, 19 nt, Artificial Sequence
  Description of Artificial Sequence: Synthetic oligonucleotide
uucggucccaaaggugacu

SEQ ID NO: 1873264 - RNA, 19 nt, Artificial Sequence
  Description of Artificial Sequence: Synthetic oligonucleotide
guuugacacgucuuaguuu

SEQ ID NO: 1873265 - RNA, 19 nt, Artificial Sequence
  Description of Artificial Sequence: Synthetic oligonucleotide
cccuaaauguaugggcucc

SEQ ID NO: 1873266 - RNA, 19 nt, Artificial Sequence
  Description of Artificial Sequence: Synthetic oligonucleotide
gccgcuuacaggugacugc

SEQ ID NO: 1873267 - RNA, 19 nt, Artificial Sequence
  Description of Artificial Sequence: Synthetic oligonucleotide
auuccaggucagaggugcg

SEQ ID NO: 1873268 - RNA, 19 nt, Artificial Sequence
  Description of Artificial Sequence: Synthetic oligonucleotide
cuaaauuccuggauuccuu

SEQ ID NO: 1873269 - RNA, 19 nt, Artificial Sequence
  Description of Artificial Sequence: Synthetic oligonucleotide
gguggagcaccuugcuggc

SEQ ID NO: 1873270 - RNA, 19 nt, Artificial Sequence
  Description of Artificial Sequence: Synthetic oligonucleotide
uucugaggcccuggggcca

SEQ ID NO: 1873271 - RNA, 19 nt, Artificial Sequence
  Description of Artificial Sequence: Synthetic oligonucleotide
caccucacaaaaugguugu

SEQ ID NO: 1873272 - RNA, 19 nt, Artificial Sequence
  Description of Artificial Sequence: Synthetic oligonucleotide
acgaccccguuugacacgu

SEQ ID NO: 1873273 - RNA, 19 nt, Artificial Sequence
  Description of Artificial Sequence: Synthetic oligonucleotide
cacaugccgcuuacaggug

SEQ ID NO: 1873274 - RNA, 19 nt, Artificial Sequence
  Description of Artificial Sequence: Synthetic oligonucleotide
aggccaacggggcccauuu

SEQ ID NO: 1873275 - RNA, 19 nt, Artificial Sequence
  Description of Artificial Sequence: Synthetic oligonucleotide
cuuuaauccuucgguccca

SEQ ID NO: 1873276 - RNA, 19 nt, Artificial Sequence
  Description of Artificial Sequence: Synthetic oligonucleotide
ugccgagcagacgggcucc

SEQ ID NO: 1873277 - RNA, 19 nt, Artificial Sequence
  Description of Artificial Sequence: Synthetic oligonucleotide
cacccggguacuuagggcu

SEQ ID NO: 1873278 - RNA, 19 nt, Artificial Sequence
  Description of Artificial Sequence: Synthetic oligonucleotide
uguccuccgguuggagucu

SEQ ID NO: 1873279 - RNA, 19 nt, Artificial Sequence
  Description of Artificial Sequence: Synthetic oligonucleotide
cgcaugcauuuuaaaacag

SEQ ID NO: 1873280 - RNA, 19 nt, Artificial Sequence
  Description of Artificial Sequence: Synthetic oligonucleotide
aguugcucugguggcauua

SEQ ID NO: 1873281 - RNA, 19 nt, Artificial Sequence
  Description of Artificial Sequence: Synthetic oligonucleotide
ccacaugccgcuuacaggu

SEQ ID NO: 1873282 - RNA, 19 nt, Artificial Sequence
  Description of Artificial Sequence: Synthetic oligonucleotide
ggcaacaaggaaaggugga

SEQ ID NO: 1873283 - RNA, 19 nt, Artificial Sequence
  Description of Artificial Sequence: Synthetic oligonucleotide
cagccagaaauggagaagu

SEQ ID NO: 1873284 - RNA, 19 nt, Artificial Sequence
  Description of Artificial Sequence: Synthetic oligonucleotide
gaccccguuugacacgucu

SEQ ID NO: 1873285 - RNA, 19 nt, Artificial Sequence
  Description of Artificial Sequence: Synthetic oligonucleotide
accaguugcucugguggca

SEQ ID NO: 1873286 - RNA, 19 nt, Artificial Sequence
  Description of Artificial Sequence: Synthetic oligonucleotide
cagaucccaaguucagaaa

SEQ ID NO: 1873287 - RNA, 19 nt, Artificial Sequence
  Description of Artificial Sequence: Synthetic oligonucleotide
agaugcacacgaccccguu

SEQ ID NO: 1873288 - RNA, 19 nt, Artificial Sequence
  Description of Artificial Sequence: Synthetic oligonucleotide
ucacaugugguggguggua

SEQ ID NO: 1873289 - RNA, 19 nt, Artificial Sequence
  Description of Artificial Sequence: Synthetic oligonucleotide
acaggcucuuuuagugucu

SEQ ID NO: 1873290 - RNA, 19 nt, Artificial Sequence
  Description of Artificial Sequence: Synthetic oligonucleotide
gggugaaaauuccuauuua

SEQ ID NO: 1873291 - RNA, 19 nt, Artificial Sequence
  Description of Artificial Sequence: Synthetic oligonucleotide
gugccgagcagacgggcuc

SEQ ID NO: 1873292 - RNA, 19 nt, Artificial Sequence
  Description of Artificial Sequence: Synthetic oligonucleotide
gagcacccggguacuuagg

SEQ ID NO: 1873293 - RNA, 19 nt, Artificial Sequence
  Description of Artificial Sequence: Synthetic oligonucleotide
cugauaaaugugagacgcu

SEQ ID NO: 1873294 - RNA, 19 nt, Artificial Sequence
  Description of Artificial Sequence: Synthetic oligonucleotide
cugccaagaugugccgagc

SEQ ID NO: 1873295 - RNA, 19 nt, Artificial Sequence
  Description of Artificial Sequence: Synthetic oligonucleotide
cacugggcucuuugagaac

SEQ ID NO: 1873296 - RNA, 19 nt, Artificial Sequence
  Description of Artificial Sequence: Synthetic oligonucleotide
aguuucccuugagccagug

SEQ ID NO: 1873297 - RNA, 19 nt, Artificial Sequence
  Description of Artificial Sequence: Synthetic oligonucleotide
cucugacucugguccaaga

SEQ ID NO: 1873298 - RNA, 19 nt, Artificial Sequence
  Description of Artificial Sequence: Synthetic oligonucleotide
ucucugcagugagcacccg

SEQ ID NO: 1873299 - RNA, 19 nt, Artificial Sequence
  Description of Artificial Sequence: Synthetic oligonucleotide
uccccgcugaggccucuga

SEQ ID NO: 1873300 - RNA, 19 nt, Artificial Sequence
  Description of Artificial Sequence: Synthetic oligonucleotide
ccuaaauguaugggcuccc

SEQ ID NO: 1873301 - RNA, 19 nt, Artificial Sequence
  Description of Artificial Sequence: Synthetic oligonucleotide
caggcucuuuuagugucuc

SEQ ID NO: 1873302 - RNA, 19 nt, Artificial Sequence
  Description of Artificial Sequence: Synthetic oligonucleotide
auguucugaccugcugcca

SEQ ID NO: 1873303 - RNA, 19 nt, Artificial Sequence
  Description of Artificial Sequence: Synthetic oligonucleotide
gaagucacauguggugggu

SEQ ID NO: 1873304 - RNA, 19 nt, Artificial Sequence
  Description of Artificial Sequence: Synthetic oligonucleotide
ucucccagugaaggccaac

SEQ ID NO: 1873305 - RNA, 19 nt, Artificial Sequence
  Description of Artificial Sequence: Synthetic oligonucleotide
gcacccggguacuuagggc

SEQ ID NO: 1873306 - RNA, 19 nt, Artificial Sequence
  Description of Artificial Sequence: Synthetic oligonucleotide
acccggguacuuagggcuc

SEQ ID NO: 1873307 - RNA, 19 nt, Artificial Sequence
  Description of Artificial Sequence: Synthetic oligonucleotide
caggggugaaaauuccuau

SEQ ID NO: 1873308 - RNA, 19 nt, Artificial Sequence
  Description of Artificial Sequence: Synthetic oligonucleotide
agcagacauuagacaagca

SEQ ID NO: 1873309 - RNA, 19 nt, Artificial Sequence
  Description of Artificial Sequence: Synthetic oligonucleotide
gcacaggggugaaaauucc

SEQ ID NO: 1873310 - RNA, 19 nt, Artificial Sequence
  Description of Artificial Sequence: Synthetic oligonucleotide
gaugcacacgaccccguuu

SEQ ID NO: 1873311 - RNA, 19 nt, Artificial Sequence
  Description of Artificial Sequence: Synthetic oligonucleotide
cacaggggugaaaauuccu

SEQ ID NO: 1873312 - RNA, 19 nt, Artificial Sequence
  Description of Artificial Sequence: Synthetic oligonucleotide
acgaagugguacagaugca

SEQ ID NO: 1873313 - RNA, 19 nt, Artificial Sequence
  Description of Artificial Sequence: Synthetic oligonucleotide
uguuccccgcugaggccuc

SEQ ID NO: 1873314 - RNA, 19 nt, Artificial Sequence
  Description of Artificial Sequence: Synthetic oligonucleotide
uccuccgguuggagucuca

SEQ ID NO: 1873315 - RNA, 19 nt, Artificial Sequence
  Description of Artificial Sequence: Synthetic oligonucleotide
ggcauuagaaugacuugua

SEQ ID NO: 1873316 - RNA, 19 nt, Artificial Sequence
  Description of Artificial Sequence: Synthetic oligonucleotide
guaggccggggcuuggagu

SEQ ID NO: 1873317 - RNA, 19 nt, Artificial Sequence
  Description of Artificial Sequence: Synthetic oligonucleotide
ccccuaaauguaugggcuc

SEQ ID NO: 1873318 - RNA, 19 nt, Artificial Sequence
  Description of Artificial Sequence: Synthetic oligonucleotide
ggccuguagacagauccca

SEQ ID NO: 1873319 - RNA, 19 nt, Artificial Sequence
  Description of Artificial Sequence: Synthetic oligonucleotide
aaggccaacggggcccauu

SEQ ID NO: 1873320 - RNA, 19 nt, Artificial Sequence
  Description of Artificial Sequence: Synthetic oligonucleotide
guugaaccuguuccccgcu

SEQ ID NO: 1873321 - RNA, 19 nt, Artificial Sequence
  Description of Artificial Sequence: Synthetic oligonucleotide
ccaaaggugacuccagacu

SEQ ID NO: 1873322 - RNA, 19 nt, Artificial Sequence
  Description of Artificial Sequence: Synthetic oligonucleotide
ccaagaugugccgagcaga

SEQ ID NO: 1873323 - RNA, 19 nt, Artificial Sequence
  Description of Artificial Sequence: Synthetic oligonucleotide
ggaauguaccucucccagu

SEQ ID NO: 1873324 - RNA, 19 nt, Artificial Sequence
  Description of Artificial Sequence: Synthetic oligonucleotide
ccgcugaggccucugacuc

SEQ ID NO: 1873325 - RNA, 19 nt, Artificial Sequence
  Description of Artificial Sequence: Synthetic oligonucleotide
cacgguaggccggggcuug

SEQ ID NO: 1873326 - RNA, 19 nt, Artificial Sequence
  Description of Artificial Sequence: Synthetic oligonucleotide
guaugggcucccaccucac

SEQ ID NO: 1873327 - RNA, 19 nt, Artificial Sequence
  Description of Artificial Sequence: Synthetic oligonucleotide
gcaagugacaggcucuuuu

SEQ ID NO: 1873328 - RNA, 19 nt, Artificial Sequence
  Description of Artificial Sequence: Synthetic oligonucleotide
cccguuugacacgucuuag

SEQ ID NO: 1873329 - RNA, 19 nt, Artificial Sequence
  Description of Artificial Sequence: Synthetic oligonucleotide
ccaucucaugaaguugaac

SEQ ID NO: 1873330 - RNA, 19 nt, Artificial Sequence
  Description of Artificial Sequence: Synthetic oligonucleotide
accaucucaugaaguugaa

SEQ ID NO: 1873331 - RNA, 19 nt, Artificial Sequence
  Description of Artificial Sequence: Synthetic oligonucleotide
gacaagcacaggggugaaa

SEQ ID NO: 1873332 - RNA, 19 nt, Artificial Sequence
  Description of Artificial Sequence: Synthetic oligonucleotide
gaggugcggguggcugggg

SEQ ID NO: 1873333 - RNA, 19 nt, Artificial Sequence
  Description of Artificial Sequence: Synthetic oligonucleotide
gcucugguggcauuagaau

SEQ ID NO: 1873334 - RNA, 19 nt, Artificial Sequence
  Description of Artificial Sequence: Synthetic oligonucleotide
agacaagcacaggggugaa

SEQ ID NO: 1873335 - RNA, 19 nt, Artificial Sequence
  Description of Artificial Sequence: Synthetic oligonucleotide
cuguugaaggacagcuuuu

SEQ ID NO: 1873336 - RNA, 19 nt, Artificial Sequence
  Description of Artificial Sequence: Synthetic oligonucleotide
augccgcuuacaggugacu

SEQ ID NO: 1873337 - RNA, 19 nt, Artificial Sequence
  Description of Artificial Sequence: Synthetic oligonucleotide
auguggugggugguacuuu

SEQ ID NO: 1873338 - RNA, 19 nt, Artificial Sequence
  Description of Artificial Sequence: Synthetic oligonucleotide
cuuucuggucacucaccau

SEQ ID NO: 1873339 - RNA, 19 nt, Artificial Sequence
  Description of Artificial Sequence: Synthetic oligonucleotide
ccuguugaaggacagcuuu

SEQ ID NO: 1873340 - RNA, 19 nt, Artificial Sequence
  Description of Artificial Sequence: Synthetic oligonucleotide
acgguaggccggggcuugg

SEQ ID NO: 1873341 - RNA, 19 nt, Artificial Sequence
  Description of Artificial Sequence: Synthetic oligonucleotide
aggccggggcuuggagugg

SEQ ID NO: 1873342 - RNA, 19 nt, Artificial Sequence
  Description of Artificial Sequence: Synthetic oligonucleotide
gugacugcacgaaguggua

SEQ ID NO: 1873343 - RNA, 19 nt, Artificial Sequence
  Description of Artificial Sequence: Synthetic oligonucleotide
acacgguaggccggggcuu

SEQ ID NO: 1873344 - RNA, 19 nt, Artificial Sequence
  Description of Artificial Sequence: Synthetic oligonucleotide
caagcacaggggugaaaau

SEQ ID NO: 1873345 - RNA, 19 nt, Artificial Sequence
  Description of Artificial Sequence: Synthetic oligonucleotide
aggaaagguggagcaccuu

SEQ ID NO: 1873346 - RNA, 19 nt, Artificial Sequence
  Description of Artificial Sequence: Synthetic oligonucleotide
gagggguugggaggaggua

SEQ ID NO: 1873347 - RNA, 19 nt, Artificial Sequence
  Description of Artificial Sequence: Synthetic oligonucleotide
gugagcacccggguacuua

SEQ ID NO: 1873348 - RNA, 19 nt, Artificial Sequence
  Description of Artificial Sequence: Synthetic oligonucleotide
gggcucccaccucacaaaa

SEQ ID NO: 1873349 - RNA, 19 nt, Artificial Sequence
  Description of Artificial Sequence: Synthetic oligonucleotide
gcacacgaccccguuugac

SEQ ID NO: 1873350 - RNA, 19 nt, Artificial Sequence
  Description of Artificial Sequence: Synthetic oligonucleotide
gguugggaggagguaggaa

SEQ ID NO: 1873351 - RNA, 19 nt, Artificial Sequence
  Description of Artificial Sequence: Synthetic oligonucleotide
ccgcuuacaggugacugca

SEQ ID NO: 1873352 - RNA, 19 nt, Artificial Sequence
  Description of Artificial Sequence: Synthetic oligonucleotide
agugagcacccggguacuu

SEQ ID NO: 1873353 - RNA, 19 nt, Artificial Sequence
  Description of Artificial Sequence: Synthetic oligonucleotide
ugcggguggcuggggugga

SEQ ID NO: 1873354 - RNA, 19 nt, Artificial Sequence
  Description of Artificial Sequence: Synthetic oligonucleotide
guggugggugguacuuuaa

SEQ ID NO: 1873355 - RNA, 19 nt, Artificial Sequence
  Description of Artificial Sequence: Synthetic oligonucleotide
aggugacuccagacuuuau

SEQ ID NO: 1873356 - RNA, 19 nt, Artificial Sequence
  Description of Artificial Sequence: Synthetic oligonucleotide
cuuuccgaggaggccugua

SEQ ID NO: 1873357 - RNA, 19 nt, Artificial Sequence
  Description of Artificial Sequence: Synthetic oligonucleotide
cugcagugagcacccgggu

SEQ ID NO: 1873358 - RNA, 19 nt, Artificial Sequence
  Description of Artificial Sequence: Synthetic oligonucleotide
cugagggcccagcugcuuu

SEQ ID NO: 1873359 - RNA, 19 nt, Artificial Sequence
  Description of Artificial Sequence: Synthetic oligonucleotide
cguuugacacgucuuaguu

SEQ ID NO: 1873360 - RNA, 19 nt, Artificial Sequence
  Description of Artificial Sequence: Synthetic oligonucleotide
ccuacacgguaggccgggg

SEQ ID NO: 1873361 - RNA, 19 nt, Artificial Sequence
  Description of Artificial Sequence: Synthetic oligonucleotide
gccuguagacagaucccaa

SEQ ID NO: 1873362 - RNA, 19 nt, Artificial Sequence
  Description of Artificial Sequence: Synthetic oligonucleotide
gagcaccuugcuggcugaa

SEQ ID NO: 1873363 - RNA, 19 nt, Artificial Sequence
  Description of Artificial Sequence: Synthetic oligonucleotide
cccaccucacaaaaugguu

SEQ ID NO: 1873364 - RNA, 19 nt, Artificial Sequence
  Description of Artificial Sequence: Synthetic oligonucleotide
ccagcugucugagggccca

SEQ ID NO: 1873365 - RNA, 19 nt, Artificial Sequence
  Description of Artificial Sequence: Synthetic oligonucleotide
cgcuuacaggugacugcac

SEQ ID NO: 1873366 - RNA, 19 nt, Artificial Sequence
  Description of Artificial Sequence: Synthetic oligonucleotide
cccgcugaggccucugacu

SEQ ID NO: 1873367 - RNA, 19 nt, Artificial Sequence
  Description of Artificial Sequence: Synthetic oligonucleotide
ccaagaugucagggucaac

SEQ ID NO: 1873368 - RNA, 19 nt, Artificial Sequence
  Description of Artificial Sequence: Synthetic oligonucleotide
gggugguacuuuaauccuu

SEQ ID NO: 1873369 - RNA, 19 nt, Artificial Sequence
  Description of Artificial Sequence: Synthetic oligonucleotide
cuccgguuggagucucauu

SEQ ID NO: 1873370 - RNA, 19 nt, Artificial Sequence
  Description of Artificial Sequence: Synthetic oligonucleotide
cgguuggagucucauuuua

SEQ ID NO: 1873371 - RNA, 19 nt, Artificial Sequence
  Description of Artificial Sequence: Synthetic oligonucleotide
ggccagacaccuacacggu

SEQ ID NO: 1873372 - RNA, 19 nt, Artificial Sequence
  Description of Artificial Sequence: Synthetic oligonucleotide
gccucugacucugguccaa

SEQ ID NO: 1873373 - RNA, 19 nt, Artificial Sequence
  Description of Artificial Sequence: Synthetic oligonucleotide
ccgagcagacgggcucccc

SEQ ID NO: 1873374 - RNA, 19 nt, Artificial Sequence
  Description of Artificial Sequence: Synthetic oligonucleotide
ccggguacuuagggcucug

SEQ ID NO: 1873375 - RNA, 19 nt, Artificial Sequence
  Description of Artificial Sequence: Synthetic oligonucleotide
caguugcucugguggcauu

SEQ ID NO: 1873376 - RNA, 19 nt, Artificial Sequence
  Description of Artificial Sequence: Synthetic oligonucleotide
cgucuuaguuucugggauu

SEQ ID NO: 1873377 - RNA, 19 nt, Artificial Sequence
  Description of Artificial Sequence: Synthetic oligonucleotide
gggcaagugacaggcucuu

SEQ ID NO: 1873378 - RNA, 19 nt, Artificial Sequence
  Description of Artificial Sequence: Synthetic oligonucleotide
ccgguuggagucucauuuu

SEQ ID NO: 1873379 - RNA, 19 nt, Artificial Sequence
  Description of Artificial Sequence: Synthetic oligonucleotide
ggcucccaccucacaaaau

SEQ ID NO: 1873380 - RNA, 19 nt, Artificial Sequence
  Description of Artificial Sequence: Synthetic oligonucleotide
ggauuccuucugagggguu

SEQ ID NO: 1873381 - RNA, 19 nt, Artificial Sequence
  Description of Artificial Sequence: Synthetic oligonucleotide
ggcaagugacaggcucuuu

SEQ ID NO: 1873382 - RNA, 19 nt, Artificial Sequence
  Description of Artificial Sequence: Synthetic oligonucleotide
gaaggccaacggggcccau

SEQ ID NO: 1873383 - RNA, 19 nt, Artificial Sequence
  Description of Artificial Sequence: Synthetic oligonucleotide
ggccggggcuuggaguggu

SEQ ID NO: 1873384 - RNA, 19 nt, Artificial Sequence
  Description of Artificial Sequence: Synthetic oligonucleotide
cccggguacuuagggcucu

SEQ ID NO: 1873385 - RNA, 19 nt, Artificial Sequence
  Description of Artificial Sequence: Synthetic oligonucleotide
guggagcacugggcucuuu

SEQ ID NO: 1873386 - RNA, 19 nt, Artificial Sequence
  Description of Artificial Sequence: Synthetic oligonucleotide
cgaccccguuugacacguc

SEQ ID NO: 1873387 - RNA, 19 nt, Artificial Sequence
  Description of Artificial Sequence: Synthetic oligonucleotide
aaaagcaaugagaacaucc

SEQ ID NO: 1873388 - RNA, 19 nt, Artificial Sequence
  Description of Artificial Sequence: Synthetic oligonucleotide
auuguagaaguccacacgc

SEQ ID NO: 1873389 - RNA, 19 nt, Artificial Sequence
  Description of Artificial Sequence: Synthetic oligonucleotide
ugaaccauaauuauuaaaa

SEQ ID NO: 1873390 - RNA, 19 nt, Artificial Sequence
  Description of Artificial Sequence: Synthetic oligonucleotide
auagcgucuggacauaucc

SEQ ID NO: 1873391 - RNA, 19 nt, Artificial Sequence
  Description of Artificial Sequence: Synthetic oligonucleotide
agaaacuccgacuugaucu

SEQ ID NO: 1873392 - RNA, 19 nt, Artificial Sequence
  Description of Artificial Sequence: Synthetic oligonucleotide
aaaugugacuugcauacag

SEQ ID NO: 1873393 - RNA, 19 nt, Artificial Sequence
  Description of Artificial Sequence: Synthetic oligonucleotide
uacagcuaggauuugaacc

SEQ ID NO: 1873394 - RNA, 19 nt, Artificial Sequence
  Description of Artificial Sequence: Synthetic oligonucleotide
ucugagaggagaaucauac

SEQ ID NO: 1873395 - RNA, 19 nt, Artificial Sequence
  Description of Artificial Sequence: Synthetic oligonucleotide
ugucauagcuuucuuacag

SEQ ID NO: 1873396 - RNA, 19 nt, Artificial Sequence
  Description of Artificial Sequence: Synthetic oligonucleotide
guuggaacgaaacuuagug

SEQ ID NO: 1873397 - RNA, 19 nt, Artificial Sequence
  Description of Artificial Sequence: Synthetic oligonucleotide
ugucgaagaucucagaaca

SEQ ID NO: 1873398 - RNA, 19 nt, Artificial Sequence
  Description of Artificial Sequence: Synthetic oligonucleotide
uuugacuugggaaaagaga

SEQ ID NO: 1873399 - RNA, 19 nt, Artificial Sequence
  Description of Artificial Sequence: Synthetic oligonucleotide
ucuccgaucguacucagag

SEQ ID NO: 1873400 - RNA, 19 nt, Artificial Sequence
  Description of Artificial Sequence: Synthetic oligonucleotide
cugaaugugaacagggucc

SEQ ID NO: 1873401 - RNA, 19 nt, Artificial Sequence
  Description of Artificial Sequence: Synthetic oligonucleotide
agauuggucuucuaugaac

SEQ ID NO: 1873402 - RNA, 19 nt, Artificial Sequence
  Description of Artificial Sequence: Synthetic oligonucleotide
cuagcuguuguucucagcc

SEQ ID NO: 1873403 - RNA, 19 nt, Artificial Sequence
  Description of Artificial Sequence: Synthetic oligonucleotide
acagauucgguauugcuug

SEQ ID NO: 1873404 - RNA, 19 nt, Artificial Sequence
  Description of Artificial Sequence: Synthetic oligonucleotide
uuuccuugugacuugguca

SEQ ID NO: 1873405 - RNA, 19 nt, Artificial Sequence
  Description of Artificial Sequence: Synthetic oligonucleotide
uggccuuuaguccagacgu

SEQ ID NO: 1873406 - RNA, 19 nt, Artificial Sequence
  Description of Artificial Sequence: Synthetic oligonucleotide
ucagccgugagauauuuca

SEQ ID NO: 1873407 - RNA, 19 nt, Artificial Sequence
  Description of Artificial Sequence: Synthetic oligonucleotide
gaucucagaacaaagcagc

SEQ ID NO: 1873408 - RNA, 19 nt, Artificial Sequence
  Description of Artificial Sequence: Synthetic oligonucleotide
cucaaaaucagccucccac

SEQ ID NO: 1873409 - RNA, 19 nt, Artificial Sequence
  Description of Artificial Sequence: Synthetic oligonucleotide
uuugugguuaaguuguuaa

SEQ ID NO: 1873410 - RNA, 19 nt, Artificial Sequence
  Description of Artificial Sequence: Synthetic oligonucleotide
uggaacgaaacuuagugau

SEQ ID NO: 1873411 - RNA, 19 nt, Artificial Sequence
  Description of Artificial Sequence: Synthetic oligonucleotide
cacacaagucuucagauug

SEQ ID NO: 1873412 - RNA, 19 nt, Artificial Sequence
  Description of Artificial Sequence: Synthetic oligonucleotide
uuugagacagauucgguau

SEQ ID NO: 1873413 - RNA, 19 nt, Artificial Sequence
  Description of Artificial Sequence: Synthetic oligonucleotide
acagcuaggauuugaacca

SEQ ID NO: 1873414 - RNA, 19 nt, Artificial Sequence
  Description of Artificial Sequence: Synthetic oligonucleotide
uuaaguuguuaacucuuca

SEQ ID NO: 1873415 - RNA, 19 nt, Artificial Sequence
  Description of Artificial Sequence: Synthetic oligonucleotide
cucauauuucuguaguccc

SEQ ID NO: 1873416 - RNA, 19 nt, Artificial Sequence
  Description of Artificial Sequence: Synthetic oligonucleotide
ugugaguaaugaaaguuuc

SEQ ID NO: 1873417 - RNA, 19 nt, Artificial Sequence
  Description of Artificial Sequence: Synthetic oligonucleotide
aaucauaccuucugugagu

SEQ ID NO: 1873418 - RNA, 19 nt, Artificial Sequence
  Description of Artificial Sequence: Synthetic oligonucleotide
gaguaaugaaaguuucuug

SEQ ID NO: 1873419 - RNA, 19 nt, Artificial Sequence
  Description of Artificial Sequence: Synthetic oligonucleotide
aacacggugaacucauacu

SEQ ID NO: 1873420 - RNA, 19 nt, Artificial Sequence
  Description of Artificial Sequence: Synthetic oligonucleotide
uccaggauacuucagacuu

SEQ ID NO: 1873421 - RNA, 19 nt, Artificial Sequence
  Description of Artificial Sequence: Synthetic oligonucleotide
ugugguuaaguuguuaacu

SEQ ID NO: 1873422 - RNA, 19 nt, Artificial Sequence
  Description of Artificial Sequence: Synthetic oligonucleotide
acccacaaaucuccgaucg

SEQ ID NO: 1873423 - RNA, 19 nt, Artificial Sequence
  Description of Artificial Sequence: Synthetic oligonucleotide
auuugaaccauaauuauua

SEQ ID NO: 1873424 - RNA, 19 nt, Artificial Sequence
  Description of Artificial Sequence: Synthetic oligonucleotide
uguagaaguccacacgcac

SEQ ID NO: 1873425 - RNA, 19 nt, Artificial Sequence
  Description of Artificial Sequence: Synthetic oligonucleotide
ucgucucacaacaacauau

SEQ ID NO: 1873426 - RNA, 19 nt, Artificial Sequence
  Description of Artificial Sequence: Synthetic oligonucleotide
agagagucgugucuaggac

SEQ ID NO: 1873427 - RNA, 19 nt, Artificial Sequence
  Description of Artificial Sequence: Synthetic oligonucleotide
uggaagcaccucaugauug

SEQ ID NO: 1873428 - RNA, 19 nt, Artificial Sequence
  Description of Artificial Sequence: Synthetic oligonucleotide
auuucuguagucccuguca

SEQ ID NO: 1873429 - RNA, 19 nt, Artificial Sequence
  Description of Artificial Sequence: Synthetic oligonucleotide
auguccaacauugacagca

SEQ ID NO: 1873430 - RNA, 19 nt, Artificial Sequence
  Description of Artificial Sequence: Synthetic oligonucleotide
ucuggacauauccuguuga

SEQ ID NO: 1873431 - RNA, 19 nt, Artificial Sequence
  Description of Artificial Sequence: Synthetic oligonucleotide
uucuguauuccauucugga

SEQ ID NO: 1873432 - RNA, 19 nt, Artificial Sequence
  Description of Artificial Sequence: Synthetic oligonucleotide
acgaaacuuagugaugucg

SEQ ID NO: 1873433 - RNA, 19 nt, Artificial Sequence
  Description of Artificial Sequence: Synthetic oligonucleotide
agcaccucaugauuggguc

SEQ ID NO: 1873434 - RNA, 19 nt, Artificial Sequence
  Description of Artificial Sequence: Synthetic oligonucleotide
uucaaguucuaaaggucug

SEQ ID NO: 1873435 - RNA, 19 nt, Artificial Sequence
  Description of Artificial Sequence: Synthetic oligonucleotide
caugauugggucccugucg

SEQ ID NO: 1873436 - RNA, 19 nt, Artificial Sequence
  Description of Artificial Sequence: Synthetic oligonucleotide
cuugcauacaguguuuggc

SEQ ID NO: 1873437 - RNA, 19 nt, Artificial Sequence
  Description of Artificial Sequence: Synthetic oligonucleotide
aacgaaacuuagugauguc

SEQ ID NO: 1873438 - RNA, 19 nt, Artificial Sequence
  Description of Artificial Sequence: Synthetic oligonucleotide
aaucccagaguaguguuug

SEQ ID NO: 1873439 - RNA, 19 nt, Artificial Sequence
  Description of Artificial Sequence: Synthetic oligonucleotide
uguuuggccucauauuucu

SEQ ID NO: 1873440 - RNA, 19 nt, Artificial Sequence
  Description of Artificial Sequence: Synthetic oligonucleotide
uuguuggaacgaaacuuag

SEQ ID NO: 1873441 - RNA, 19 nt, Artificial Sequence
  Description of Artificial Sequence: Synthetic oligonucleotide
augugacuugcauacagug

SEQ ID NO: 1873442 - RNA, 19 nt, Artificial Sequence
  Description of Artificial Sequence: Synthetic oligonucleotide
agccgugagauauuucagg

SEQ ID NO: 1873443 - RNA, 19 nt, Artificial Sequence
  Description of Artificial Sequence: Synthetic oligonucleotide
aacccgguaaggcauggug

SEQ ID NO: 1873444 - RNA, 19 nt, Artificial Sequence
  Description of Artificial Sequence: Synthetic oligonucleotide
uuggaacgaaacuuaguga

SEQ ID NO: 1873445 - RNA, 19 nt, Artificial Sequence
  Description of Artificial Sequence: Synthetic oligonucleotide
uguugggaauccaggauac

SEQ ID NO: 1873446 - RNA, 19 nt, Artificial Sequence
  Description of Artificial Sequence: Synthetic oligonucleotide
guaggcauugggcaacacg

SEQ ID NO: 1873447 - RNA, 19 nt, Artificial Sequence
  Description of Artificial Sequence: Synthetic oligonucleotide
uauggcucaaaaucagccu

SEQ ID NO: 1873448 - RNA, 19 nt, Artificial Sequence
  Description of Artificial Sequence: Synthetic oligonucleotide
ucauauuucuguagucccu

SEQ ID NO: 1873449 - RNA, 19 nt, Artificial Sequence
  Description of Artificial Sequence: Synthetic oligonucleotide
gaaacuccgacuugaucug

SEQ ID NO: 1873450 - RNA, 19 nt, Artificial Sequence
  Description of Artificial Sequence: Synthetic oligonucleotide
aacccacaaaucuccgauc

SEQ ID NO: 1873451 - RNA, 19 nt, Artificial Sequence
  Description of Artificial Sequence: Synthetic oligonucleotide
ggauacuucagacuugagc

SEQ ID NO: 1873452 - RNA, 19 nt, Artificial Sequence
  Description of Artificial Sequence: Synthetic oligonucleotide
uugggcaacacggugaacu

SEQ ID NO: 1873453 - RNA, 19 nt, Artificial Sequence
  Description of Artificial Sequence: Synthetic oligonucleotide
uuuaguccagacgugguac

SEQ ID NO: 1873454 - RNA, 19 nt, Artificial Sequence
  Description of Artificial Sequence: Synthetic oligonucleotide
cauauggcucaaaaucagc

SEQ ID NO: 1873455 - RNA, 19 nt, Artificial Sequence
  Description of Artificial Sequence: Synthetic oligonucleotide
uugcuuguuggaacgaaac

SEQ ID NO: 1873456 - RNA, 19 nt, Artificial Sequence
  Description of Artificial Sequence: Synthetic oligonucleotide
aaaucuccgaucguacuca

SEQ ID NO: 1873457 - RNA, 19 nt, Artificial Sequence
  Description of Artificial Sequence: Synthetic oligonucleotide
acauauccuguugaaacuc

SEQ ID NO: 1873458 - RNA, 19 nt, Artificial Sequence
  Description of Artificial Sequence: Synthetic oligonucleotide
ugguaccugaaugugaaca

SEQ ID NO: 1873459 - RNA, 19 nt, Artificial Sequence
  Description of Artificial Sequence: Synthetic oligonucleotide
gcuuuguggggcuagagag

SEQ ID NO: 1873460 - RNA, 19 nt, Artificial Sequence
  Description of Artificial Sequence: Synthetic oligonucleotide
gaugaauucugucuucaaa

SEQ ID NO: 1873461 - RNA, 19 nt, Artificial Sequence
  Description of Artificial Sequence: Synthetic oligonucleotide
uuguugggaauccaggaua

SEQ ID NO: 1873462 - RNA, 19 nt, Artificial Sequence
  Description of Artificial Sequence: Synthetic oligonucleotide
uguuccagccaaaacccac

SEQ ID NO: 1873463 - RNA, 19 nt, Artificial Sequence
  Description of Artificial Sequence: Synthetic oligonucleotide
ugaguaaugaaaguuucuu

SEQ ID NO: 1873464 - RNA, 19 nt, Artificial Sequence
  Description of Artificial Sequence: Synthetic oligonucleotide
uucgguauugcuuguugga

SEQ ID NO: 1873465 - RNA, 19 nt, Artificial Sequence
  Description of Artificial Sequence: Synthetic oligonucleotide
ugucuaucccuagucgugg

SEQ ID NO: 1873466 - RNA, 19 nt, Artificial Sequence
  Description of Artificial Sequence: Synthetic oligonucleotide
agcgucuggacauauccug

SEQ ID NO: 1873467 - RNA, 19 nt, Artificial Sequence
  Description of Artificial Sequence: Synthetic oligonucleotide
uguuggaacgaaacuuagu

SEQ ID NO: 1873468 - RNA, 19 nt, Artificial Sequence
  Description of Artificial Sequence: Synthetic oligonucleotide
cacaacaacauauggcuca

SEQ ID NO: 1873469 - RNA, 19 nt, Artificial Sequence
  Description of Artificial Sequence: Synthetic oligonucleotide
ugcuuguuggaacgaaacu

SEQ ID NO: 1873470 - RNA, 19 nt, Artificial Sequence
  Description of Artificial Sequence: Synthetic oligonucleotide
aacauugacagcagcucug

SEQ ID NO: 1873471 - RNA, 19 nt, Artificial Sequence
  Description of Artificial Sequence: Synthetic oligonucleotide
gugguuaaguuguuaacuc

SEQ ID NO: 1873472 - RNA, 19 nt, Artificial Sequence
  Description of Artificial Sequence: Synthetic oligonucleotide
uguggcaugucuaucccua

SEQ ID NO: 1873473 - RNA, 19 nt, Artificial Sequence
  Description of Artificial Sequence: Synthetic oligonucleotide
uccgacuugaucuguggcu

SEQ ID NO: 1873474 - RNA, 19 nt, Artificial Sequence
  Description of Artificial Sequence: Synthetic oligonucleotide
uccacgucuggaauagugu

SEQ ID NO: 1873475 - RNA, 19 nt, Artificial Sequence
  Description of Artificial Sequence: Synthetic oligonucleotide
agucgugucuaggacaauc

SEQ ID NO: 1873476 - RNA, 19 nt, Artificial Sequence
  Description of Artificial Sequence: Synthetic oligonucleotide
ucucgucucacaacaacau

SEQ ID NO: 1873477 - RNA, 19 nt, Artificial Sequence
  Description of Artificial Sequence: Synthetic oligonucleotide
uucauuugcuucuacccuu

SEQ ID NO: 1873478 - RNA, 19 nt, Artificial Sequence
  Description of Artificial Sequence: Synthetic oligonucleotide
uugugguuaaguuguuaac

SEQ ID NO: 1873479 - RNA, 19 nt, Artificial Sequence
  Description of Artificial Sequence: Synthetic oligonucleotide
agcagucucgucucacaac

SEQ ID NO: 1873480 - RNA, 19 nt, Artificial Sequence
  Description of Artificial Sequence: Synthetic oligonucleotide
uuacagcuaggauuugaac

SEQ ID NO: 1873481 - RNA, 19 nt, Artificial Sequence
  Description of Artificial Sequence: Synthetic oligonucleotide
guggcaguccgccacuugg

SEQ ID NO: 1873482 - RNA, 19 nt, Artificial Sequence
  Description of Artificial Sequence: Synthetic oligonucleotide
uuccuugugacuuggucau

SEQ ID NO: 1873483 - RNA, 19 nt, Artificial Sequence
  Description of Artificial Sequence: Synthetic oligonucleotide
aaugugacuugcauacagu

SEQ ID NO: 1873484 - RNA, 19 nt, Artificial Sequence
  Description of Artificial Sequence: Synthetic oligonucleotide
caaaucuccgaucguacuc

SEQ ID NO: 1873485 - RNA, 19 nt, Artificial Sequence
  Description of Artificial Sequence: Synthetic oligonucleotide
agaaaguggcucuuccccu

SEQ ID NO: 1873486 - RNA, 19 nt, Artificial Sequence
  Description of Artificial Sequence: Synthetic oligonucleotide
agacgugguaccugaaugu

SEQ ID NO: 1873487 - RNA, 19 nt, Artificial Sequence
  Description of Artificial Sequence: Synthetic oligonucleotide
ggaucauguaggcauuggg

SEQ ID NO: 1873488 - RNA, 19 nt, Artificial Sequence
  Description of Artificial Sequence: Synthetic oligonucleotide
ucuaucccuagucguggcc

SEQ ID NO: 1873489 - RNA, 19 nt, Artificial Sequence
  Description of Artificial Sequence: Synthetic oligonucleotide
uuaguccagacgugguacc

SEQ ID NO: 1873490 - RNA, 19 nt, Artificial Sequence
  Description of Artificial Sequence: Synthetic oligonucleotide
aaucuccgaucguacucag

SEQ ID NO: 1873491 - RNA, 19 nt, Artificial Sequence
  Description of Artificial Sequence: Synthetic oligonucleotide
uaggacaaucacucucucc

SEQ ID NO: 1873492 - RNA, 19 nt, Artificial Sequence
  Description of Artificial Sequence: Synthetic oligonucleotide
cacaaaucuccgaucguac

SEQ ID NO: 1873493 - RNA, 19 nt, Artificial Sequence
  Description of Artificial Sequence: Synthetic oligonucleotide
augauugggucccugucga

SEQ ID NO: 1873494 - RNA, 19 nt, Artificial Sequence
  Description of Artificial Sequence: Synthetic oligonucleotide
agcaaugagaacauccaga

SEQ ID NO: 1873495 - RNA, 19 nt, Artificial Sequence
  Description of Artificial Sequence: Synthetic oligonucleotide
ucaaguucuaaaggucuga

SEQ ID NO: 1873496 - RNA, 19 nt, Artificial Sequence
  Description of Artificial Sequence: Synthetic oligonucleotide
cacggugaacucauacucc

SEQ ID NO: 1873497 - RNA, 19 nt, Artificial Sequence
  Description of Artificial Sequence: Synthetic oligonucleotide
gauugggucccugucgaag

SEQ ID NO: 1873498 - RNA, 19 nt, Artificial Sequence
  Description of Artificial Sequence: Synthetic oligonucleotide
ucccugucgaagaucucag

SEQ ID NO: 1873499 - RNA, 19 nt, Artificial Sequence
  Description of Artificial Sequence: Synthetic oligonucleotide
ucacaacaacauauggcuc

SEQ ID NO: 1873500 - RNA, 19 nt, Artificial Sequence
  Description of Artificial Sequence: Synthetic oligonucleotide
ggugcauggccuuuagucc

SEQ ID NO: 1873501 - RNA, 19 nt, Artificial Sequence
  Description of Artificial Sequence: Synthetic oligonucleotide
acuccgacuugaucugugg

SEQ ID NO: 1873502 - RNA, 19 nt, Artificial Sequence
  Description of Artificial Sequence: Synthetic oligonucleotide
aaagucuggugcccaggca

SEQ ID NO: 1873503 - RNA, 19 nt, Artificial Sequence
  Description of Artificial Sequence: Synthetic oligonucleotide
ucuuacagcuaggauuuga

SEQ ID NO: 1873504 - RNA, 19 nt, Artificial Sequence
  Description of Artificial Sequence: Synthetic oligonucleotide
acggugaacucauacuccu

SEQ ID NO: 1873505 - RNA, 19 nt, Artificial Sequence
  Description of Artificial Sequence: Synthetic oligonucleotide
gccgugagauauuucaggg

SEQ ID NO: 1873506 - RNA, 19 nt, Artificial Sequence
  Description of Artificial Sequence: Synthetic oligonucleotide
auugggucccugucgaaga

SEQ ID NO: 1873507 - RNA, 19 nt, Artificial Sequence
  Description of Artificial Sequence: Synthetic oligonucleotide
ccagaguaguguuuguugg

SEQ ID NO: 1873508 - RNA, 19 nt, Artificial Sequence
  Description of Artificial Sequence: Synthetic oligonucleotide
uagcuuucuuacagcuagg

SEQ ID NO: 1873509 - RNA, 19 nt, Artificial Sequence
  Description of Artificial Sequence: Synthetic oligonucleotide
acuuagugaugucgaaacu

SEQ ID NO: 1873510 - RNA, 19 nt, Artificial Sequence
  Description of Artificial Sequence: Synthetic oligonucleotide
cuuguuggaacgaaacuua

SEQ ID NO: 1873511 - RNA, 19 nt, Artificial Sequence
  Description of Artificial Sequence: Synthetic oligonucleotide
agccauagcgucuggacau

SEQ ID NO: 1873512 - RNA, 19 nt, Artificial Sequence
  Description of Artificial Sequence: Synthetic oligonucleotide
guaccugaaugugaacagg

SEQ ID NO: 1873513 - RNA, 19 nt, Artificial Sequence
  Description of Artificial Sequence: Synthetic oligonucleotide
uggaucauguaggcauugg

SEQ ID NO: 1873514 - RNA, 19 nt, Artificial Sequence
  Description of Artificial Sequence: Synthetic oligonucleotide
gucgaaacugggagcaugg

SEQ ID NO: 1873515 - RNA, 19 nt, Artificial Sequence
  Description of Artificial Sequence: Synthetic oligonucleotide
cuagucguggccuucaugu

SEQ ID NO: 1873516 - RNA, 19 nt, Artificial Sequence
  Description of Artificial Sequence: Synthetic oligonucleotide
ucuacccuucuguauucca

SEQ ID NO: 1873517 - RNA, 19 nt, Artificial Sequence
  Description of Artificial Sequence: Synthetic oligonucleotide
gaacgaaacuuagugaugu

SEQ ID NO: 1873518 - RNA, 19 nt, Artificial Sequence
  Description of Artificial Sequence: Synthetic oligonucleotide
ggaagcaccucaugauugg

SEQ ID NO: 1873519 - RNA, 19 nt, Artificial Sequence
  Description of Artificial Sequence: Synthetic oligonucleotide
aaaaugugacuugcauaca

SEQ ID NO: 1873520 - RNA, 19 nt, Artificial Sequence
  Description of Artificial Sequence: Synthetic oligonucleotide
caucaggccauaaauccca

SEQ ID NO: 1873521 - RNA, 19 nt, Artificial Sequence
  Description of Artificial Sequence: Synthetic oligonucleotide
cugagaggagaaucauacc

SEQ ID NO: 1873522 - RNA, 19 nt, Artificial Sequence
  Description of Artificial Sequence: Synthetic oligonucleotide
ugucgaaacugggagcaug

SEQ ID NO: 1873523 - RNA, 19 nt, Artificial Sequence
  Description of Artificial Sequence: Synthetic oligonucleotide
caaguucuaaaggucugag

SEQ ID NO: 1873524 - RNA, 19 nt, Artificial Sequence
  Description of Artificial Sequence: Synthetic oligonucleotide
ucgugucuaggacaaucac

SEQ ID NO: 1873525 - RNA, 19 nt, Artificial Sequence
  Description of Artificial Sequence: Synthetic oligonucleotide
gaagcaccucaugauuggg

SEQ ID NO: 1873526 - RNA, 19 nt, Artificial Sequence
  Description of Artificial Sequence: Synthetic oligonucleotide
ugaagcccuuuccuuguga

SEQ ID NO: 1873527 - RNA, 19 nt, Artificial Sequence
  Description of Artificial Sequence: Synthetic oligonucleotide
agcuuuguggggcuagaga

SEQ ID NO: 1873528 - RNA, 19 nt, Artificial Sequence
  Description of Artificial Sequence: Synthetic oligonucleotide
agugaugucgaaacuggga

SEQ ID NO: 1873529 - RNA, 19 nt, Artificial Sequence
  Description of Artificial Sequence: Synthetic oligonucleotide
gcaugucuaucccuagucg

SEQ ID NO: 1873530 - RNA, 19 nt, Artificial Sequence
  Description of Artificial Sequence: Synthetic oligonucleotide
agaguaguguuuguuggga

SEQ ID NO: 1873531 - RNA, 19 nt, Artificial Sequence
  Description of Artificial Sequence: Synthetic oligonucleotide
augugcuagcuguuguucu

SEQ ID NO: 1873532 - RNA, 19 nt, Artificial Sequence
  Description of Artificial Sequence: Synthetic oligonucleotide
ugugcuagcuguuguucuc

SEQ ID NO: 1873533 - RNA, 19 nt, Artificial Sequence
  Description of Artificial Sequence: Synthetic oligonucleotide
auccaggauacuucagacu

SEQ ID NO: 1873534 - RNA, 19 nt, Artificial Sequence
  Description of Artificial Sequence: Synthetic oligonucleotide
ugaugugagccacuuuguu

SEQ ID NO: 1873535 - RNA, 19 nt, Artificial Sequence
  Description of Artificial Sequence: Synthetic oligonucleotide
gggcagcaaagccauagcg

SEQ ID NO: 1873536 - RNA, 19 nt, Artificial Sequence
  Description of Artificial Sequence: Synthetic oligonucleotide
ugaugaauucugucuucaa

SEQ ID NO: 1873537 - RNA, 19 nt, Artificial Sequence
  Description of Artificial Sequence: Synthetic oligonucleotide
ugcauggccuuuaguccag

SEQ ID NO: 1873538 - RNA, 19 nt, Artificial Sequence
  Description of Artificial Sequence: Synthetic oligonucleotide
ucaggguuuugagacagau

SEQ ID NO: 1873539 - RNA, 19 nt, Artificial Sequence
  Description of Artificial Sequence: Synthetic oligonucleotide
gacuugcauacaguguuug

SEQ ID NO: 1873540 - RNA, 19 nt, Artificial Sequence
  Description of Artificial Sequence: Synthetic oligonucleotide
uugggaauccaggauacuu

SEQ ID NO: 1873541 - RNA, 19 nt, Artificial Sequence
  Description of Artificial Sequence: Synthetic oligonucleotide
guuaaguuguuaacucuuc

SEQ ID NO: 1873542 - RNA, 19 nt, Artificial Sequence
  Description of Artificial Sequence: Synthetic oligonucleotide
auauuucuguagucccugu

SEQ ID NO: 1873543 - RNA, 19 nt, Artificial Sequence
  Description of Artificial Sequence: Synthetic oligonucleotide
gacgugguaccugaaugug

SEQ ID NO: 1873544 - RNA, 19 nt, Artificial Sequence
  Description of Artificial Sequence: Synthetic oligonucleotide
guaguguuuguugggaauc

SEQ ID NO: 1873545 - RNA, 19 nt, Artificial Sequence
  Description of Artificial Sequence: Synthetic oligonucleotide
aggccauaaaucccagagu

SEQ ID NO: 1873546 - RNA, 19 nt, Artificial Sequence
  Description of Artificial Sequence: Synthetic oligonucleotide
auagaaaaugugacuugca

SEQ ID NO: 1873547 - RNA, 19 nt, Artificial Sequence
  Description of Artificial Sequence: Synthetic oligonucleotide
agauauuucagggcagcaa

SEQ ID NO: 1873548 - RNA, 19 nt, Artificial Sequence
  Description of Artificial Sequence: Synthetic oligonucleotide
uggcaaaguuugugggugc

SEQ ID NO: 1873549 - RNA, 19 nt, Artificial Sequence
  Description of Artificial Sequence: Synthetic oligonucleotide
uagcgucuggacauauccu

SEQ ID NO: 1873550 - RNA, 19 nt, Artificial Sequence
  Description of Artificial Sequence: Synthetic oligonucleotide
uaccuucugugaguaauga

SEQ ID NO: 1873551 - RNA, 19 nt, Artificial Sequence
  Description of Artificial Sequence: Synthetic oligonucleotide
aaguccacacgcacugcag

SEQ ID NO: 1873552 - RNA, 19 nt, Artificial Sequence
  Description of Artificial Sequence: Synthetic oligonucleotide
uauugcuuguuggaacgaa

SEQ ID NO: 1873553 - RNA, 19 nt, Artificial Sequence
  Description of Artificial Sequence: Synthetic oligonucleotide
agagcagucucgucucaca

SEQ ID NO: 1873554 - RNA, 19 nt, Artificial Sequence
  Description of Artificial Sequence: Synthetic oligonucleotide
uuggccucauauuucugua

SEQ ID NO: 1873555 - RNA, 19 nt, Artificial Sequence
  Description of Artificial Sequence: Synthetic oligonucleotide
gagacagauucgguauugc

SEQ ID NO: 1873556 - RNA, 19 nt, Artificial Sequence
  Description of Artificial Sequence: Synthetic oligonucleotide
cauguaggcauugggcaac

SEQ ID NO: 1873557 - RNA, 19 nt, Artificial Sequence
  Description of Artificial Sequence: Synthetic oligonucleotide
gugcauggccuuuagucca

SEQ ID NO: 1873558 - RNA, 19 nt, Artificial Sequence
  Description of Artificial Sequence: Synthetic oligonucleotide
ucaacccgguaaggcaugg

SEQ ID NO: 1873559 - RNA, 19 nt, Artificial Sequence
  Description of Artificial Sequence: Synthetic oligonucleotide
uggcaugucuaucccuagu

SEQ ID NO: 1873560 - RNA, 19 nt, Artificial Sequence
  Description of Artificial Sequence: Synthetic oligonucleotide
augucuaucccuagucgug

SEQ ID NO: 1873561 - RNA, 19 nt, Artificial Sequence
  Description of Artificial Sequence: Synthetic oligonucleotide
cuccgacuugaucuguggc

SEQ ID NO: 1873562 - RNA, 19 nt, Artificial Sequence
  Description of Artificial Sequence: Synthetic oligonucleotide
uugaagcccuuuccuugug

SEQ ID NO: 1873563 - RNA, 19 nt, Artificial Sequence
  Description of Artificial Sequence: Synthetic oligonucleotide
cagccgugagauauuucag

SEQ ID NO: 1873564 - RNA, 19 nt, Artificial Sequence
  Description of Artificial Sequence: Synthetic oligonucleotide
uggcaguccgccacuuggc

SEQ ID NO: 1873565 - RNA, 19 nt, Artificial Sequence
  Description of Artificial Sequence: Synthetic oligonucleotide
auccacgucuggaauagug

SEQ ID NO: 1873566 - RNA, 19 nt, Artificial Sequence
  Description of Artificial Sequence: Synthetic oligonucleotide
gcagucucgucucacaaca

SEQ ID NO: 1873567 - RNA, 19 nt, Artificial Sequence
  Description of Artificial Sequence: Synthetic oligonucleotide
agcuuucuuacagcuagga

SEQ ID NO: 1873568 - RNA, 19 nt, Artificial Sequence
  Description of Artificial Sequence: Synthetic oligonucleotide
caugugcuagcuguuguuc

SEQ ID NO: 1873569 - RNA, 19 nt, Artificial Sequence
  Description of Artificial Sequence: Synthetic oligonucleotide
uagucguggccuucaugug

SEQ ID NO: 1873570 - RNA, 19 nt, Artificial Sequence
  Description of Artificial Sequence: Synthetic oligonucleotide
aacuccgacuugaucugug

SEQ ID NO: 1873571 - RNA, 19 nt, Artificial Sequence
  Description of Artificial Sequence: Synthetic oligonucleotide
auaccuucugugaguaaug

SEQ ID NO: 1873572 - RNA, 19 nt, Artificial Sequence
  Description of Artificial Sequence: Synthetic oligonucleotide
ucucagaacaaagcagcuu

SEQ ID NO: 1873573 - RNA, 19 nt, Artificial Sequence
  Description of Artificial Sequence: Synthetic oligonucleotide
cuccgaucguacucagagc

SEQ ID NO: 1873574 - RNA, 19 nt, Artificial Sequence
  Description of Artificial Sequence: Synthetic oligonucleotide
cagaaacuccgacuugauc

SEQ ID NO: 1873575 - RNA, 19 nt, Artificial Sequence
  Description of Artificial Sequence: Synthetic oligonucleotide
gauuugaaccauaauuauu

SEQ ID NO: 1873576 - RNA, 19 nt, Artificial Sequence
  Description of Artificial Sequence: Synthetic oligonucleotide
agagucgugucuaggacaa

SEQ ID NO: 1873577 - RNA, 19 nt, Artificial Sequence
  Description of Artificial Sequence: Synthetic oligonucleotide
agcccuuuccuugugacuu

SEQ ID NO: 1873578 - RNA, 19 nt, Artificial Sequence
  Description of Artificial Sequence: Synthetic oligonucleotide
ugggcaacacggugaacuc

SEQ ID NO: 1873579 - RNA, 19 nt, Artificial Sequence
  Description of Artificial Sequence: Synthetic oligonucleotide
ggcaugucuaucccuaguc

SEQ ID NO: 1873580 - RNA, 19 nt, Artificial Sequence
  Description of Artificial Sequence: Synthetic oligonucleotide
guaccauccacgucuggaa

SEQ ID NO: 1873581 - RNA, 19 nt, Artificial Sequence
  Description of Artificial Sequence: Synthetic oligonucleotide
cauguccaacauugacagc

SEQ ID NO: 1873582 - RNA, 19 nt, Artificial Sequence
  Description of Artificial Sequence: Synthetic oligonucleotide
caugucuaucccuagucgu

SEQ ID NO: 1873583 - RNA, 19 nt, Artificial Sequence
  Description of Artificial Sequence: Synthetic oligonucleotide
aaacuccgacuugaucugu

SEQ ID NO: 1873584 - RNA, 19 nt, Artificial Sequence
  Description of Artificial Sequence: Synthetic oligonucleotide
aucauaccuucugugagua

SEQ ID NO: 1873585 - RNA, 19 nt, Artificial Sequence
  Description of Artificial Sequence: Synthetic oligonucleotide
cccagaguaguguuuguug

SEQ ID NO: 1873586 - RNA, 19 nt, Artificial Sequence
  Description of Artificial Sequence: Synthetic oligonucleotide
aguguuuguugggaaucca

SEQ ID NO: 1873587 - RNA, 19 nt, Artificial Sequence
  Description of Artificial Sequence: Synthetic oligonucleotide
gaucguacucagagcaguc

SEQ ID NO: 1873588 - RNA, 19 nt, Artificial Sequence
  Description of Artificial Sequence: Synthetic oligonucleotide
gggaaaagagagucguguc

SEQ ID NO: 1873589 - RNA, 19 nt, Artificial Sequence
  Description of Artificial Sequence: Synthetic oligonucleotide
ggaaaagagagucgugucu

SEQ ID NO: 1873590 - RNA, 19 nt, Artificial Sequence
  Description of Artificial Sequence: Synthetic oligonucleotide
aucguacucagagcagucu

SEQ ID NO: 1873591 - RNA, 19 nt, Artificial Sequence
  Description of Artificial Sequence: Synthetic oligonucleotide
gucuaucccuagucguggc

SEQ ID NO: 1873592 - RNA, 19 nt, Artificial Sequence
  Description of Artificial Sequence: Synthetic oligonucleotide
guagagucuuggucagaac

SEQ ID NO: 1873593 - RNA, 19 nt, Artificial Sequence
  Description of Artificial Sequence: Synthetic oligonucleotide
auugcuuguuggaacgaaa

SEQ ID NO: 1873594 - RNA, 19 nt, Artificial Sequence
  Description of Artificial Sequence: Synthetic oligonucleotide
ggaacgaaacuuagugaug

SEQ ID NO: 1873595 - RNA, 19 nt, Artificial Sequence
  Description of Artificial Sequence: Synthetic oligonucleotide
gucccugucgaagaucuca

SEQ ID NO: 1873596 - RNA, 19 nt, Artificial Sequence
  Description of Artificial Sequence: Synthetic oligonucleotide
cugucauagcuuucuuaca

SEQ ID NO: 1873597 - RNA, 19 nt, Artificial Sequence
  Description of Artificial Sequence: Synthetic oligonucleotide
cucaacccgguaaggcaug

SEQ ID NO: 1873598 - RNA, 19 nt, Artificial Sequence
  Description of Artificial Sequence: Synthetic oligonucleotide
acucaacccgguaaggcau

SEQ ID NO: 1873599 - RNA, 19 nt, Artificial Sequence
  Description of Artificial Sequence: Synthetic oligonucleotide
cuuuaguccagacguggua

SEQ ID NO: 1873600 - RNA, 19 nt, Artificial Sequence
  Description of Artificial Sequence: Synthetic oligonucleotide
gucgugucuaggacaauca

SEQ ID NO: 1873601 - RNA, 19 nt, Artificial Sequence
  Description of Artificial Sequence: Synthetic oligonucleotide
guccagacgugguaccuga

SEQ ID NO: 1873602 - RNA, 19 nt, Artificial Sequence
  Description of Artificial Sequence: Synthetic oligonucleotide
cuagagagacaaagagaaa

SEQ ID NO: 1873603 - RNA, 19 nt, Artificial Sequence
  Description of Artificial Sequence: Synthetic oligonucleotide
ggucagaaccaacuucauc

SEQ ID NO: 1873604 - RNA, 19 nt, Artificial Sequence
  Description of Artificial Sequence: Synthetic oligonucleotide
cacacgcacugcagguacc

SEQ ID NO: 1873605 - RNA, 19 nt, Artificial Sequence
  Description of Artificial Sequence: Synthetic oligonucleotide
uugggucccugucgaagau

SEQ ID NO: 1873606 - RNA, 19 nt, Artificial Sequence
  Description of Artificial Sequence: Synthetic oligonucleotide
guucucagccgugagauau

SEQ ID NO: 1873607 - RNA, 19 nt, Artificial Sequence
  Description of Artificial Sequence: Synthetic oligonucleotide
cuucagauuggucuucuau

SEQ ID NO: 1873608 - RNA, 19 nt, Artificial Sequence
  Description of Artificial Sequence: Synthetic oligonucleotide
aguccagacgugguaccug

SEQ ID NO: 1873609 - RNA, 19 nt, Artificial Sequence
  Description of Artificial Sequence: Synthetic oligonucleotide
ucauaccuucugugaguaa

SEQ ID NO: 1873610 - RNA, 19 nt, Artificial Sequence
  Description of Artificial Sequence: Synthetic oligonucleotide
guguuuggccucauauuuc

SEQ ID NO: 1873611 - RNA, 19 nt, Artificial Sequence
  Description of Artificial Sequence: Synthetic oligonucleotide
gcauggggcauguggauca

SEQ ID NO: 1873612 - RNA, 19 nt, Artificial Sequence
  Description of Artificial Sequence: Synthetic oligonucleotide
ccgugagauauuucagggc

SEQ ID NO: 1873613 - RNA, 19 nt, Artificial Sequence
  Description of Artificial Sequence: Synthetic oligonucleotide
gagucuuggucagaaccaa

SEQ ID NO: 1873614 - RNA, 19 nt, Artificial Sequence
  Description of Artificial Sequence: Synthetic oligonucleotide
cauaccuucugugaguaau

SEQ ID NO: 1873615 - RNA, 19 nt, Artificial Sequence
  Description of Artificial Sequence: Synthetic oligonucleotide
agguaccauccacgucugg

SEQ ID NO: 1873616 - RNA, 19 nt, Artificial Sequence
  Description of Artificial Sequence: Synthetic oligonucleotide
uucucagccgugagauauu

SEQ ID NO: 1873617 - RNA, 19 nt, Artificial Sequence
  Description of Artificial Sequence: Synthetic oligonucleotide
cuugaagcccuuuccuugu

SEQ ID NO: 1873618 - RNA, 19 nt, Artificial Sequence
  Description of Artificial Sequence: Synthetic oligonucleotide
ucucagccgugagauauuu

SEQ ID NO: 1873619 - RNA, 19 nt, Artificial Sequence
  Description of Artificial Sequence: Synthetic oligonucleotide
auugggcaacacggugaac

SEQ ID NO: 1873620 - RNA, 19 nt, Artificial Sequence
  Description of Artificial Sequence: Synthetic oligonucleotide
cgaaacuuagugaugucga

SEQ ID NO: 1873621 - RNA, 19 nt, Artificial Sequence
  Description of Artificial Sequence: Synthetic oligonucleotide
gguagagucuuggucagaa

SEQ ID NO: 1873622 - RNA, 19 nt, Artificial Sequence
  Description of Artificial Sequence: Synthetic oligonucleotide
ugauugggucccugucgaa

SEQ ID NO: 1873623 - RNA, 19 nt, Artificial Sequence
  Description of Artificial Sequence: Synthetic oligonucleotide
uaucccuagucguggccuu

SEQ ID NO: 1873624 - RNA, 19 nt, Artificial Sequence
  Description of Artificial Sequence: Synthetic oligonucleotide
ucccagaguaguguuuguu

SEQ ID NO: 1873625 - RNA, 19 nt, Artificial Sequence
  Description of Artificial Sequence: Synthetic oligonucleotide
aucccagaguaguguuugu

SEQ ID NO: 1873626 - RNA, 19 nt, Artificial Sequence
  Description of Artificial Sequence: Synthetic oligonucleotide
gagaggagaaucauaccuu

SEQ ID NO: 1873627 - RNA, 19 nt, Artificial Sequence
  Description of Artificial Sequence: Synthetic oligonucleotide
ggcaugguggcaguccgcc

SEQ ID NO: 1873628 - RNA, 19 nt, Artificial Sequence
  Description of Artificial Sequence: Synthetic oligonucleotide
acgugguaccugaauguga

SEQ ID NO: 1873629 - RNA, 19 nt, Artificial Sequence
  Description of Artificial Sequence: Synthetic oligonucleotide
cagauuggucuucuaugaa

SEQ ID NO: 1873630 - RNA, 19 nt, Artificial Sequence
  Description of Artificial Sequence: Synthetic oligonucleotide
gugaguaaugaaaguuucu

SEQ ID NO: 1873631 - RNA, 19 nt, Artificial Sequence
  Description of Artificial Sequence: Synthetic oligonucleotide
ucccuagucguggccuuca

SEQ ID NO: 1873632 - RNA, 19 nt, Artificial Sequence
  Description of Artificial Sequence: Synthetic oligonucleotide
cucagccgugagauauuuc

SEQ ID NO: 1873633 - RNA, 19 nt, Artificial Sequence
  Description of Artificial Sequence: Synthetic oligonucleotide
gcuaggauuugaaccauaa

SEQ ID NO: 1873634 - RNA, 19 nt, Artificial Sequence
  Description of Artificial Sequence: Synthetic oligonucleotide
uccagacgugguaccugaa

SEQ ID NO: 1873635 - RNA, 19 nt, Artificial Sequence
  Description of Artificial Sequence: Synthetic oligonucleotide
auauccuguugaaacucuu

SEQ ID NO: 1873636 - RNA, 19 nt, Artificial Sequence
  Description of Artificial Sequence: Synthetic oligonucleotide
cgucucacaacaacauaug

SEQ ID NO: 1873637 - RNA, 19 nt, Artificial Sequence
  Description of Artificial Sequence: Synthetic oligonucleotide
ccugucgaagaucucagaa

SEQ ID NO: 1873638 - RNA, 19 nt, Artificial Sequence
  Description of Artificial Sequence: Synthetic oligonucleotide
aucccuagucguggccuuc

SEQ ID NO: 1873639 - RNA, 19 nt, Artificial Sequence
  Description of Artificial Sequence: Synthetic oligonucleotide
uccacacgcacugcaggua

SEQ ID NO: 1873640 - RNA, 19 nt, Artificial Sequence
  Description of Artificial Sequence: Synthetic oligonucleotide
ccaggauacuucagacuug

SEQ ID NO: 1873641 - RNA, 19 nt, Artificial Sequence
  Description of Artificial Sequence: Synthetic oligonucleotide
ccauucuggaagcaccuca

SEQ ID NO: 1873642 - RNA, 19 nt, Artificial Sequence
  Description of Artificial Sequence: Synthetic oligonucleotide
cagcuuuguggggcuagag

SEQ ID NO: 1873643 - RNA, 19 nt, Artificial Sequence
  Description of Artificial Sequence: Synthetic oligonucleotide
ccacucaacccgguaaggc

SEQ ID NO: 1873644 - RNA, 19 nt, Artificial Sequence
  Description of Artificial Sequence: Synthetic oligonucleotide
cuuugugguuaaguuguua

SEQ ID NO: 1873645 - RNA, 19 nt, Artificial Sequence
  Description of Artificial Sequence: Synthetic oligonucleotide
aggauacuucagacuugag

SEQ ID NO: 1873646 - RNA, 19 nt, Artificial Sequence
  Description of Artificial Sequence: Synthetic oligonucleotide
guauuccauucuggaagca

SEQ ID NO: 1873647 - RNA, 19 nt, Artificial Sequence
  Description of Artificial Sequence: Synthetic oligonucleotide
gcuucuacccuucuguauu

SEQ ID NO: 1873648 - RNA, 19 nt, Artificial Sequence
  Description of Artificial Sequence: Synthetic oligonucleotide
ccacacgcacugcagguac

SEQ ID NO: 1873649 - RNA, 19 nt, Artificial Sequence
  Description of Artificial Sequence: Synthetic oligonucleotide
gguuaaguuguuaacucuu

SEQ ID NO: 1873650 - RNA, 19 nt, Artificial Sequence
  Description of Artificial Sequence: Synthetic oligonucleotide
ggggcuagagagacaaaga

SEQ ID NO: 1873651 - RNA, 19 nt, Artificial Sequence
  Description of Artificial Sequence: Synthetic oligonucleotide
aguccgccacuuggcaaag

SEQ ID NO: 1873652 - RNA, 19 nt, Artificial Sequence
  Description of Artificial Sequence: Synthetic oligonucleotide
guccacacgcacugcaggu

SEQ ID NO: 1873653 - RNA, 19 nt, Artificial Sequence
  Description of Artificial Sequence: Synthetic oligonucleotide
guaaggcaugguggcaguc

SEQ ID NO: 1873654 - RNA, 19 nt, Artificial Sequence
  Description of Artificial Sequence: Synthetic oligonucleotide
ccauaaaucccagaguagu

SEQ ID NO: 1873655 - RNA, 19 nt, Artificial Sequence
  Description of Artificial Sequence: Synthetic oligonucleotide
cuuggucauuguccauaga

SEQ ID NO: 1873656 - RNA, 19 nt, Artificial Sequence
  Description of Artificial Sequence: Synthetic oligonucleotide
cuaucccuagucguggccu

SEQ ID NO: 1873657 - RNA, 19 nt, Artificial Sequence
  Description of Artificial Sequence: Synthetic oligonucleotide
ccgaucguacucagagcag

SEQ ID NO: 1873658 - RNA, 19 nt, Artificial Sequence
  Description of Artificial Sequence: Synthetic oligonucleotide
ggcagcaaagccauagcgu

SEQ ID NO: 1873659 - RNA, 19 nt, Artificial Sequence
  Description of Artificial Sequence: Synthetic oligonucleotide
ggcaguccgccacuuggca

SEQ ID NO: 1873660 - RNA, 19 nt, Artificial Sequence
  Description of Artificial Sequence: Synthetic oligonucleotide
gagcauggggcauguggau

SEQ ID NO: 1873661 - RNA, 19 nt, Artificial Sequence
  Description of Artificial Sequence: Synthetic oligonucleotide
ggcaaaguuugugggugca

SEQ ID NO: 1873662 - RNA, 19 nt, Artificial Sequence
  Description of Artificial Sequence: Synthetic oligonucleotide
ccuagucguggccuucaug

SEQ ID NO: 1873663 - RNA, 19 nt, Artificial Sequence
  Description of Artificial Sequence: Synthetic oligonucleotide
gucguggccuucaugugcu

SEQ ID NO: 1873664 - RNA, 19 nt, Artificial Sequence
  Description of Artificial Sequence: Synthetic oligonucleotide
gguggcaguccgccacuug

SEQ ID NO: 1873665 - RNA, 19 nt, Artificial Sequence
  Description of Artificial Sequence: Synthetic oligonucleotide
agguagagucuuggucaga

SEQ ID NO: 1873666 - RNA, 19 nt, Artificial Sequence
  Description of Artificial Sequence: Synthetic oligonucleotide
agcuaggauuugaaccaua

SEQ ID NO: 1873667 - RNA, 19 nt, Artificial Sequence
  Description of Artificial Sequence: Synthetic oligonucleotide
aucuccgaucguacucaga

SEQ ID NO: 1873668 - RNA, 19 nt, Artificial Sequence
  Description of Artificial Sequence: Synthetic oligonucleotide
cacucucuccagguuggca

SEQ ID NO: 1873669 - RNA, 19 nt, Artificial Sequence
  Description of Artificial Sequence: Synthetic oligonucleotide
cgguaaggcaugguggcag

SEQ ID NO: 1873670 - RNA, 19 nt, Artificial Sequence
  Description of Artificial Sequence: Synthetic oligonucleotide
cccacucaacccgguaagg

SEQ ID NO: 1873671 - RNA, 19 nt, Artificial Sequence
  Description of Artificial Sequence: Synthetic oligonucleotide
cagucucgucucacaacaa

SEQ ID NO: 1873672 - RNA, 19 nt, Artificial Sequence
  Description of Artificial Sequence: Synthetic oligonucleotide
uugugggugcauggccuuu

SEQ ID NO: 1873673 - RNA, 19 nt, Artificial Sequence
  Description of Artificial Sequence: Synthetic oligonucleotide
augucgaaacugggagcau

SEQ ID NO: 1873674 - RNA, 19 nt, Artificial Sequence
  Description of Artificial Sequence: Synthetic oligonucleotide
ggccuuuaguccagacgug

SEQ ID NO: 1873675 - RNA, 19 nt, Artificial Sequence
  Description of Artificial Sequence: Synthetic oligonucleotide
gguaaggcaugguggcagu

SEQ ID NO: 1873676 - RNA, 19 nt, Artificial Sequence
  Description of Artificial Sequence: Synthetic oligonucleotide
ccacaaaucuccgaucgua

SEQ ID NO: 1873677 - RNA, 19 nt, Artificial Sequence
  Description of Artificial Sequence: Synthetic oligonucleotide
cagauucgguauugcuugu

SEQ ID NO: 1873678 - RNA, 19 nt, Artificial Sequence
  Description of Artificial Sequence: Synthetic oligonucleotide
guugggaauccaggauacu

SEQ ID NO: 1873679 - RNA, 19 nt, Artificial Sequence
  Description of Artificial Sequence: Synthetic oligonucleotide
ucguggccuucaugugcua

SEQ ID NO: 1873680 - RNA, 19 nt, Artificial Sequence
  Description of Artificial Sequence: Synthetic oligonucleotide
auacaguguuuggccucau

SEQ ID NO: 1873681 - RNA, 19 nt, Artificial Sequence
  Description of Artificial Sequence: Synthetic oligonucleotide
cggugaacucauacuccug

SEQ ID NO: 1873682 - RNA, 19 nt, Artificial Sequence
  Description of Artificial Sequence: Synthetic oligonucleotide
ccuuuaguccagacguggu

SEQ ID NO: 1873683 - RNA, 19 nt, Artificial Sequence
  Description of Artificial Sequence: Synthetic oligonucleotide
cccugucauagcuuucuua

SEQ ID NO: 1873684 - RNA, 19 nt, Artificial Sequence
  Description of Artificial Sequence: Synthetic oligonucleotide
guagucccugucauagcuu

SEQ ID NO: 1873685 - RNA, 19 nt, Artificial Sequence
  Description of Artificial Sequence: Synthetic oligonucleotide
gccuuccauguggucacac

SEQ ID NO: 1873686 - RNA, 19 nt, Artificial Sequence
  Description of Artificial Sequence: Synthetic oligonucleotide
gcgucuggacauauccugu

SEQ ID NO: 1873687 - RNA, 19 nt, Artificial Sequence
  Description of Artificial Sequence: Synthetic oligonucleotide
gcaaaguuugugggugcau

SEQ ID NO: 1873688 - RNA, 19 nt, Artificial Sequence
  Description of Artificial Sequence: Synthetic oligonucleotide
cugggagcauggggcaugu

SEQ ID NO: 1873689 - RNA, 19 nt, Artificial Sequence
  Description of Artificial Sequence: Synthetic oligonucleotide
cgaucguacucagagcagu

SEQ ID NO: 1873690 - RNA, 19 nt, Artificial Sequence
  Description of Artificial Sequence: Synthetic oligonucleotide
cccacaaaucuccgaucgu

SEQ ID NO: 1873691 - RNA, 19 nt, Artificial Sequence
  Description of Artificial Sequence: Synthetic oligonucleotide
gccauagcgucuggacaua

SEQ ID NO: 1873692 - RNA, 19 nt, Artificial Sequence
  Description of Artificial Sequence: Synthetic oligonucleotide
ccgacuugaucuguggcuu

SEQ ID NO: 1873693 - RNA, 19 nt, Artificial Sequence
  Description of Artificial Sequence: Synthetic oligonucleotide
gagucgugucuaggacaau

SEQ ID NO: 1873694 - RNA, 19 nt, Artificial Sequence
  Description of Artificial Sequence: Synthetic oligonucleotide
caacccgguaaggcauggu

SEQ ID NO: 1873695 - RNA, 19 nt, Artificial Sequence
  Description of Artificial Sequence: Synthetic oligonucleotide
guccgccacuuggcaaagu

SEQ ID NO: 1873696 - RNA, 19 nt, Artificial Sequence
  Description of Artificial Sequence: Synthetic oligonucleotide
cccuagucguggccuucau

SEQ ID NO: 1873697 - RNA, 19 nt, Artificial Sequence
  Description of Artificial Sequence: Synthetic oligonucleotide
aacacuugaagcuaggcgg

SEQ ID NO: 1873698 - RNA, 19 nt, Artificial Sequence
  Description of Artificial Sequence: Synthetic oligonucleotide
aaaggcaaaacacagccac

SEQ ID NO: 1873699 - RNA, 19 nt, Artificial Sequence
  Description of Artificial Sequence: Synthetic oligonucleotide
gaagauguagccaagaagg

SEQ ID NO: 1873700 - RNA, 19 nt, Artificial Sequence
  Description of Artificial Sequence: Synthetic oligonucleotide
uucaaagucaaacaagaag

SEQ ID NO: 1873701 - RNA, 19 nt, Artificial Sequence
  Description of Artificial Sequence: Synthetic oligonucleotide
ugaaaggcaaaacacagcc

SEQ ID NO: 1873702 - RNA, 19 nt, Artificial Sequence
  Description of Artificial Sequence: Synthetic oligonucleotide
ugagcuuggagucugagcc

SEQ ID NO: 1873703 - RNA, 19 nt, Artificial Sequence
  Description of Artificial Sequence: Synthetic oligonucleotide
uuagugaaaggcaaaacac

SEQ ID NO: 1873704 - RNA, 19 nt, Artificial Sequence
  Description of Artificial Sequence: Synthetic oligonucleotide
uuuaccacaguguucuugg

SEQ ID NO: 1873705 - RNA, 19 nt, Artificial Sequence
  Description of Artificial Sequence: Synthetic oligonucleotide
agacaauacagucagaaga

SEQ ID NO: 1873706 - RNA, 19 nt, Artificial Sequence
  Description of Artificial Sequence: Synthetic oligonucleotide
ucagcuaccaccaagggau

SEQ ID NO: 1873707 - RNA, 19 nt, Artificial Sequence
  Description of Artificial Sequence: Synthetic oligonucleotide
aagucaaacaagaagaagu

SEQ ID NO: 1873708 - RNA, 19 nt, Artificial Sequence
  Description of Artificial Sequence: Synthetic oligonucleotide
acagucagaagauguagcc

SEQ ID NO: 1873709 - RNA, 19 nt, Artificial Sequence
  Description of Artificial Sequence: Synthetic oligonucleotide
aguagagcugagcagaagg

SEQ ID NO: 1873710 - RNA, 19 nt, Artificial Sequence
  Description of Artificial Sequence: Synthetic oligonucleotide
gacuagacaauacagucag

SEQ ID NO: 1873711 - RNA, 19 nt, Artificial Sequence
  Description of Artificial Sequence: Synthetic oligonucleotide
guagguacagucuucagag

SEQ ID NO: 1873712 - RNA, 19 nt, Artificial Sequence
  Description of Artificial Sequence: Synthetic oligonucleotide
uuaaagccaaguuugguca

SEQ ID NO: 1873713 - RNA, 19 nt, Artificial Sequence
  Description of Artificial Sequence: Synthetic oligonucleotide
auuagaguagagcugagca

SEQ ID NO: 1873714 - RNA, 19 nt, Artificial Sequence
  Description of Artificial Sequence: Synthetic oligonucleotide
aagucccugauguuagugc

SEQ ID NO: 1873715 - RNA, 19 nt, Artificial Sequence
  Description of Artificial Sequence: Synthetic oligonucleotide
gaucuuaaagccaaguuug

SEQ ID NO: 1873716 - RNA, 19 nt, Artificial Sequence
  Description of Artificial Sequence: Synthetic oligonucleotide
ugggccaugucacauacgg

SEQ ID NO: 1873717 - RNA, 19 nt, Artificial Sequence
  Description of Artificial Sequence: Synthetic oligonucleotide
acuuuggaugagcagagac

SEQ ID NO: 1873718 - RNA, 19 nt, Artificial Sequence
  Description of Artificial Sequence: Synthetic oligonucleotide
gaacacuugaagcuaggcg

SEQ ID NO: 1873719 - RNA, 19 nt, Artificial Sequence
  Description of Artificial Sequence: Synthetic oligonucleotide
ucgauuugccuccucaagg

SEQ ID NO: 1873720 - RNA, 19 nt, Artificial Sequence
  Description of Artificial Sequence: Synthetic oligonucleotide
uuuaacagguguccuuugg

SEQ ID NO: 1873721 - RNA, 19 nt, Artificial Sequence
  Description of Artificial Sequence: Synthetic oligonucleotide
gauacgauccacugggugc

SEQ ID NO: 1873722 - RNA, 19 nt, Artificial Sequence
  Description of Artificial Sequence: Synthetic oligonucleotide
aaagagaugcugcuuccag

SEQ ID NO: 1873723 - RNA, 19 nt, Artificial Sequence
  Description of Artificial Sequence: Synthetic oligonucleotide
ugaucuuaaagccaaguuu

SEQ ID NO: 1873724 - RNA, 19 nt, Artificial Sequence
  Description of Artificial Sequence: Synthetic oligonucleotide
uuggugauagaggagaaag

SEQ ID NO: 1873725 - RNA, 19 nt, Artificial Sequence
  Description of Artificial Sequence: Synthetic oligonucleotide
agucccugauguuagugcc

SEQ ID NO: 1873726 - RNA, 19 nt, Artificial Sequence
  Description of Artificial Sequence: Synthetic oligonucleotide
cuuaaagccaaguuugguc

SEQ ID NO: 1873727 - RNA, 19 nt, Artificial Sequence
  Description of Artificial Sequence: Synthetic oligonucleotide
aucuuuggcgauacgaucc

SEQ ID NO: 1873728 - RNA, 19 nt, Artificial Sequence
  Description of Artificial Sequence: Synthetic oligonucleotide
ucuugguacaggagggugg

SEQ ID NO: 1873729 - RNA, 19 nt, Artificial Sequence
  Description of Artificial Sequence: Synthetic oligonucleotide
uagugaaaggcaaaacaca

SEQ ID NO: 1873730 - RNA, 19 nt, Artificial Sequence
  Description of Artificial Sequence: Synthetic oligonucleotide
agaguugggcuuugggucc

SEQ ID NO: 1873731 - RNA, 19 nt, Artificial Sequence
  Description of Artificial Sequence: Synthetic oligonucleotide
uguccuuuggucaccugcg

SEQ ID NO: 1873732 - RNA, 19 nt, Artificial Sequence
  Description of Artificial Sequence: Synthetic oligonucleotide
aaagccuuggugauagagg

SEQ ID NO: 1873733 - RNA, 19 nt, Artificial Sequence
  Description of Artificial Sequence: Synthetic oligonucleotide
uuagaguagagcugagcag

SEQ ID NO: 1873734 - RNA, 19 nt, Artificial Sequence
  Description of Artificial Sequence: Synthetic oligonucleotide
ggauucauccuccagaggc

SEQ ID NO: 1873735 - RNA, 19 nt, Artificial Sequence
  Description of Artificial Sequence: Synthetic oligonucleotide
ugauagauaacaccuguuu

SEQ ID NO: 1873736 - RNA, 19 nt, Artificial Sequence
  Description of Artificial Sequence: Synthetic oligonucleotide
ucuacuuguuucugaaagc

SEQ ID NO: 1873737 - RNA, 19 nt, Artificial Sequence
  Description of Artificial Sequence: Synthetic oligonucleotide
aagucaaagcagugcacag

SEQ ID NO: 1873738 - RNA, 19 nt, Artificial Sequence
  Description of Artificial Sequence: Synthetic oligonucleotide
ugcgcuuguagagacaggg

SEQ ID NO: 1873739 - RNA, 19 nt, Artificial Sequence
  Description of Artificial Sequence: Synthetic oligonucleotide
agugaaaggcaaaacacag

SEQ ID NO: 1873740 - RNA, 19 nt, Artificial Sequence
  Description of Artificial Sequence: Synthetic oligonucleotide
aaacaagaagaaguggcug

SEQ ID NO: 1873741 - RNA, 19 nt, Artificial Sequence
  Description of Artificial Sequence: Synthetic oligonucleotide
cagagacuagacaauacag

SEQ ID NO: 1873742 - RNA, 19 nt, Artificial Sequence
  Description of Artificial Sequence: Synthetic oligonucleotide
aagucagcuaccaccaagg

SEQ ID NO: 1873743 - RNA, 19 nt, Artificial Sequence
  Description of Artificial Sequence: Synthetic oligonucleotide
acugauagauaacaccugu

SEQ ID NO: 1873744 - RNA, 19 nt, Artificial Sequence
  Description of Artificial Sequence: Synthetic oligonucleotide
uccauuagaguagagcuga

SEQ ID NO: 1873745 - RNA, 19 nt, Artificial Sequence
  Description of Artificial Sequence: Synthetic oligonucleotide
ucacauacggugacccugg

SEQ ID NO: 1873746 - RNA, 19 nt, Artificial Sequence
  Description of Artificial Sequence: Synthetic oligonucleotide
uagacaauacagucagaag

SEQ ID NO: 1873747 - RNA, 19 nt, Artificial Sequence
  Description of Artificial Sequence: Synthetic oligonucleotide
gcaaaacacagccacaucc

SEQ ID NO: 1873748 - RNA, 19 nt, Artificial Sequence
  Description of Artificial Sequence: Synthetic oligonucleotide
ggcgauacgauccacuggg

SEQ ID NO: 1873749 - RNA, 19 nt, Artificial Sequence
  Description of Artificial Sequence: Synthetic oligonucleotide
caaguuuggucacagcccc

SEQ ID NO: 1873750 - RNA, 19 nt, Artificial Sequence
  Description of Artificial Sequence: Synthetic oligonucleotide
gagaguugggcuuuggguc

SEQ ID NO: 1873751 - RNA, 19 nt, Artificial Sequence
  Description of Artificial Sequence: Synthetic oligonucleotide
acugcuauuuccuuucuau

SEQ ID NO: 1873752 - RNA, 19 nt, Artificial Sequence
  Description of Artificial Sequence: Synthetic oligonucleotide
uagaguagagcugagcaga

SEQ ID NO: 1873753 - RNA, 19 nt, Artificial Sequence
  Description of Artificial Sequence: Synthetic oligonucleotide
uuugccuccucaaggaagu

SEQ ID NO: 1873754 - RNA, 19 nt, Artificial Sequence
  Description of Artificial Sequence: Synthetic oligonucleotide
aagcuaggcggcaaucucc

SEQ ID NO: 1873755 - RNA, 19 nt, Artificial Sequence
  Description of Artificial Sequence: Synthetic oligonucleotide
gauguagccaagaaggcuc

SEQ ID NO: 1873756 - RNA, 19 nt, Artificial Sequence
  Description of Artificial Sequence: Synthetic oligonucleotide
uuuggaugagcagagacua

SEQ ID NO: 1873757 - RNA, 19 nt, Artificial Sequence
  Description of Artificial Sequence: Synthetic oligonucleotide
uggcuuguagcuuggguag

SEQ ID NO: 1873758 - RNA, 19 nt, Artificial Sequence
  Description of Artificial Sequence: Synthetic oligonucleotide
aaacacagccacauccacg

SEQ ID NO: 1873759 - RNA, 19 nt, Artificial Sequence
  Description of Artificial Sequence: Synthetic oligonucleotide
aagcagugcacaggguucc

SEQ ID NO: 1873760 - RNA, 19 nt, Artificial Sequence
  Description of Artificial Sequence: Synthetic oligonucleotide
uucaguacucgauuugccu

SEQ ID NO: 1873761 - RNA, 19 nt, Artificial Sequence
  Description of Artificial Sequence: Synthetic oligonucleotide
ugauguuagugcccauuag

SEQ ID NO: 1873762 - RNA, 19 nt, Artificial Sequence
  Description of Artificial Sequence: Synthetic oligonucleotide
acggauucauccuccagag

SEQ ID NO: 1873763 - RNA, 19 nt, Artificial Sequence
  Description of Artificial Sequence: Synthetic oligonucleotide
ugcccauuagugaaaggca

SEQ ID NO: 1873764 - RNA, 19 nt, Artificial Sequence
  Description of Artificial Sequence: Synthetic oligonucleotide
uguggccaagagauggcgg

SEQ ID NO: 1873765 - RNA, 19 nt, Artificial Sequence
  Description of Artificial Sequence: Synthetic oligonucleotide
ugcuauuuccuuucuauuu

SEQ ID NO: 1873766 - RNA, 19 nt, Artificial Sequence
  Description of Artificial Sequence: Synthetic oligonucleotide
ggugauagaggagaaagcc

SEQ ID NO: 1873767 - RNA, 19 nt, Artificial Sequence
  Description of Artificial Sequence: Synthetic oligonucleotide
ucaguacucgauuugccuc

SEQ ID NO: 1873768 - RNA, 19 nt, Artificial Sequence
  Description of Artificial Sequence: Synthetic oligonucleotide
agggaugcaggcuucuguc

SEQ ID NO: 1873769 - RNA, 19 nt, Artificial Sequence
  Description of Artificial Sequence: Synthetic oligonucleotide
uccuuucuauuucuuugcc

SEQ ID NO: 1873770 - RNA, 19 nt, Artificial Sequence
  Description of Artificial Sequence: Synthetic oligonucleotide
agucuugaagcugaaggag

SEQ ID NO: 1873771 - RNA, 19 nt, Artificial Sequence
  Description of Artificial Sequence: Synthetic oligonucleotide
guuagugcccauuagugaa

SEQ ID NO: 1873772 - RNA, 19 nt, Artificial Sequence
  Description of Artificial Sequence: Synthetic oligonucleotide
gucaaacaagaagaagugg

SEQ ID NO: 1873773 - RNA, 19 nt, Artificial Sequence
  Description of Artificial Sequence: Synthetic oligonucleotide
uuuggcgauacgauccacu

SEQ ID NO: 1873774 - RNA, 19 nt, Artificial Sequence
  Description of Artificial Sequence: Synthetic oligonucleotide
uacucgauuugccuccuca

SEQ ID NO: 1873775 - RNA, 19 nt, Artificial Sequence
  Description of Artificial Sequence: Synthetic oligonucleotide
uccgaacacuugaagcuag

SEQ ID NO: 1873776 - RNA, 19 nt, Artificial Sequence
  Description of Artificial Sequence: Synthetic oligonucleotide
agagccuuuaauguggcca

SEQ ID NO: 1873777 - RNA, 19 nt, Artificial Sequence
  Description of Artificial Sequence: Synthetic oligonucleotide
gguuccgaacacuugaagc

SEQ ID NO: 1873778 - RNA, 19 nt, Artificial Sequence
  Description of Artificial Sequence: Synthetic oligonucleotide
uuggcgauacgauccacug

SEQ ID NO: 1873779 - RNA, 19 nt, Artificial Sequence
  Description of Artificial Sequence: Synthetic oligonucleotide
aaaaggcccgaauguccuc

SEQ ID NO: 1873780 - RNA, 19 nt, Artificial Sequence
  Description of Artificial Sequence: Synthetic oligonucleotide
uuccagagccuuuaaugug

SEQ ID NO: 1873781 - RNA, 19 nt, Artificial Sequence
  Description of Artificial Sequence: Synthetic oligonucleotide
gaagaaguggcuguugguc

SEQ ID NO: 1873782 - RNA, 19 nt, Artificial Sequence
  Description of Artificial Sequence: Synthetic oligonucleotide
ucagcuacuuugagcagac

SEQ ID NO: 1873783 - RNA, 19 nt, Artificial Sequence
  Description of Artificial Sequence: Synthetic oligonucleotide
cuuucuauuucuuugcccu

SEQ ID NO: 1873784 - RNA, 19 nt, Artificial Sequence
  Description of Artificial Sequence: Synthetic oligonucleotide
gugcccauuagugaaaggc

SEQ ID NO: 1873785 - RNA, 19 nt, Artificial Sequence
  Description of Artificial Sequence: Synthetic oligonucleotide
uucagaguucugagcuugg

SEQ ID NO: 1873786 - RNA, 19 nt, Artificial Sequence
  Description of Artificial Sequence: Synthetic oligonucleotide
uccuuguagaugaucuuaa

SEQ ID NO: 1873787 - RNA, 19 nt, Artificial Sequence
  Description of Artificial Sequence: Synthetic oligonucleotide
uucugucggagaucuuugg

SEQ ID NO: 1873788 - RNA, 19 nt, Artificial Sequence
  Description of Artificial Sequence: Synthetic oligonucleotide
uacuuguuucugaaagccu

SEQ ID NO: 1873789 - RNA, 19 nt, Artificial Sequence
  Description of Artificial Sequence: Synthetic oligonucleotide
gucaccugcgcuuguagag

SEQ ID NO: 1873790 - RNA, 19 nt, Artificial Sequence
  Description of Artificial Sequence: Synthetic oligonucleotide
cuucaguacucgauuugcc

SEQ ID NO: 1873791 - RNA, 19 nt, Artificial Sequence
  Description of Artificial Sequence: Synthetic oligonucleotide
gauguuagugcccauuagu

SEQ ID NO: 1873792 - RNA, 19 nt, Artificial Sequence
  Description of Artificial Sequence: Synthetic oligonucleotide
gcuuccagagccuuuaaug

SEQ ID NO: 1873793 - RNA, 19 nt, Artificial Sequence
  Description of Artificial Sequence: Synthetic oligonucleotide
augaucuuaaagccaaguu

SEQ ID NO: 1873794 - RNA, 19 nt, Artificial Sequence
  Description of Artificial Sequence: Synthetic oligonucleotide
ggccaugucacauacggug

SEQ ID NO: 1873795 - RNA, 19 nt, Artificial Sequence
  Description of Artificial Sequence: Synthetic oligonucleotide
caguacucgauuugccucc

SEQ ID NO: 1873796 - RNA, 19 nt, Artificial Sequence
  Description of Artificial Sequence: Synthetic oligonucleotide
gagucacugauagauaaca

SEQ ID NO: 1873797 - RNA, 19 nt, Artificial Sequence
  Description of Artificial Sequence: Synthetic oligonucleotide
uuuuaacagguguccuuug

SEQ ID NO: 1873798 - RNA, 19 nt, Artificial Sequence
  Description of Artificial Sequence: Synthetic oligonucleotide
gagaucuuuggcgauacga

SEQ ID NO: 1873799 - RNA, 19 nt, Artificial Sequence
  Description of Artificial Sequence: Synthetic oligonucleotide
uggcgauacgauccacugg

SEQ ID NO: 1873800 - RNA, 19 nt, Artificial Sequence
  Description of Artificial Sequence: Synthetic oligonucleotide
uucagcuacuuugagcaga

SEQ ID NO: 1873801 - RNA, 19 nt, Artificial Sequence
  Description of Artificial Sequence: Synthetic oligonucleotide
acacuugaagcuaggcggc

SEQ ID NO: 1873802 - RNA, 19 nt, Artificial Sequence
  Description of Artificial Sequence: Synthetic oligonucleotide
ugugagggccuuuggaggu

SEQ ID NO: 1873803 - RNA, 19 nt, Artificial Sequence
  Description of Artificial Sequence: Synthetic oligonucleotide
uggaugagcagagacuaga

SEQ ID NO: 1873804 - RNA, 19 nt, Artificial Sequence
  Description of Artificial Sequence: Synthetic oligonucleotide
uguagagacagggcugaag

SEQ ID NO: 1873805 - RNA, 19 nt, Artificial Sequence
  Description of Artificial Sequence: Synthetic oligonucleotide
ucuuuggcgauacgaucca

SEQ ID NO: 1873806 - RNA, 19 nt, Artificial Sequence
  Description of Artificial Sequence: Synthetic oligonucleotide
aaagccucagggucuuccu

SEQ ID NO: 1873807 - RNA, 19 nt, Artificial Sequence
  Description of Artificial Sequence: Synthetic oligonucleotide
uggacggaggcccacggcu

SEQ ID NO: 1873808 - RNA, 19 nt, Artificial Sequence
  Description of Artificial Sequence: Synthetic oligonucleotide
ucuuaaagccaaguuuggu

SEQ ID NO: 1873809 - RNA, 19 nt, Artificial Sequence
  Description of Artificial Sequence: Synthetic oligonucleotide
ugacuggcggagcagucgc

SEQ ID NO: 1873810 - RNA, 19 nt, Artificial Sequence
  Description of Artificial Sequence: Synthetic oligonucleotide
agucagcuaccaccaaggg

SEQ ID NO: 1873811 - RNA, 19 nt, Artificial Sequence
  Description of Artificial Sequence: Synthetic oligonucleotide
accagguucuggcuuguag

SEQ ID NO: 1873812 - RNA, 19 nt, Artificial Sequence
  Description of Artificial Sequence: Synthetic oligonucleotide
acauccacggauucauccu

SEQ ID NO: 1873813 - RNA, 19 nt, Artificial Sequence
  Description of Artificial Sequence: Synthetic oligonucleotide
gggaauuucugggaaagag

SEQ ID NO: 1873814 - RNA, 19 nt, Artificial Sequence
  Description of Artificial Sequence: Synthetic oligonucleotide
gccgaagucagcuaccacc

SEQ ID NO: 1873815 - RNA, 19 nt, Artificial Sequence
  Description of Artificial Sequence: Synthetic oligonucleotide
gauagauaacaccuguuuu

SEQ ID NO: 1873816 - RNA, 19 nt, Artificial Sequence
  Description of Artificial Sequence: Synthetic oligonucleotide
gaaagccucagggucuucc

SEQ ID NO: 1873817 - RNA, 19 nt, Artificial Sequence
  Description of Artificial Sequence: Synthetic oligonucleotide
cucgauuugccuccucaag

SEQ ID NO: 1873818 - RNA, 19 nt, Artificial Sequence
  Description of Artificial Sequence: Synthetic oligonucleotide
acauacggugacccugggg

SEQ ID NO: 1873819 - RNA, 19 nt, Artificial Sequence
  Description of Artificial Sequence: Synthetic oligonucleotide
agauguagccaagaaggcu

SEQ ID NO: 1873820 - RNA, 19 nt, Artificial Sequence
  Description of Artificial Sequence: Synthetic oligonucleotide
cagaguucugagcuuggag

SEQ ID NO: 1873821 - RNA, 19 nt, Artificial Sequence
  Description of Artificial Sequence: Synthetic oligonucleotide
uguagucuugaagcugaag

SEQ ID NO: 1873822 - RNA, 19 nt, Artificial Sequence
  Description of Artificial Sequence: Synthetic oligonucleotide
gaagcuaggcggcaaucuc

SEQ ID NO: 1873823 - RNA, 19 nt, Artificial Sequence
  Description of Artificial Sequence: Synthetic oligonucleotide
agcagagacuagacaauac

SEQ ID NO: 1873824 - RNA, 19 nt, Artificial Sequence
  Description of Artificial Sequence: Synthetic oligonucleotide
guuccgaacacuugaagcu

SEQ ID NO: 1873825 - RNA, 19 nt, Artificial Sequence
  Description of Artificial Sequence: Synthetic oligonucleotide
guagagacagggcugaagu

SEQ ID NO: 1873826 - RNA, 19 nt, Artificial Sequence
  Description of Artificial Sequence: Synthetic oligonucleotide
uguugucgcuggacggagg

SEQ ID NO: 1873827 - RNA, 19 nt, Artificial Sequence
  Description of Artificial Sequence: Synthetic oligonucleotide
cauuagugaaaggcaaaac

SEQ ID NO: 1873828 - RNA, 19 nt, Artificial Sequence
  Description of Artificial Sequence: Synthetic oligonucleotide
ugaagcuaggcggcaaucu

SEQ ID NO: 1873829 - RNA, 19 nt, Artificial Sequence
  Description of Artificial Sequence: Synthetic oligonucleotide
uuagugcccauuagugaaa

SEQ ID NO: 1873830 - RNA, 19 nt, Artificial Sequence
  Description of Artificial Sequence: Synthetic oligonucleotide
agagucacugauagauaac

SEQ ID NO: 1873831 - RNA, 19 nt, Artificial Sequence
  Description of Artificial Sequence: Synthetic oligonucleotide
caaagucaaacaagaagaa

SEQ ID NO: 1873832 - RNA, 19 nt, Artificial Sequence
  Description of Artificial Sequence: Synthetic oligonucleotide
gagcccuccccuuuuaaca

SEQ ID NO: 1873833 - RNA, 19 nt, Artificial Sequence
  Description of Artificial Sequence: Synthetic oligonucleotide
agcccuccccuuuuaacag

SEQ ID NO: 1873834 - RNA, 19 nt, Artificial Sequence
  Description of Artificial Sequence: Synthetic oligonucleotide
cuugguacaggaggguggc

SEQ ID NO: 1873835 - RNA, 19 nt, Artificial Sequence
  Description of Artificial Sequence: Synthetic oligonucleotide
caauacagucagaagaugu

SEQ ID NO: 1873836 - RNA, 19 nt, Artificial Sequence
  Description of Artificial Sequence: Synthetic oligonucleotide
cagagucacugauagauaa

SEQ ID NO: 1873837 - RNA, 19 nt, Artificial Sequence
  Description of Artificial Sequence: Synthetic oligonucleotide
cauacggugacccuggggu

SEQ ID NO: 1873838 - RNA, 19 nt, Artificial Sequence
  Description of Artificial Sequence: Synthetic oligonucleotide
uacucgaggaggcccaguc

SEQ ID NO: 1873839 - RNA, 19 nt, Artificial Sequence
  Description of Artificial Sequence: Synthetic oligonucleotide
agcggcugcugacuucagc

SEQ ID NO: 1873840 - RNA, 19 nt, Artificial Sequence
  Description of Artificial Sequence: Synthetic oligonucleotide
agacuagacaauacaguca

SEQ ID NO: 1873841 - RNA, 19 nt, Artificial Sequence
  Description of Artificial Sequence: Synthetic oligonucleotide
ccaaguuuggucacagccc

SEQ ID NO: 1873842 - RNA, 19 nt, Artificial Sequence
  Description of Artificial Sequence: Synthetic oligonucleotide
auguagccaagaaggcucc

SEQ ID NO: 1873843 - RNA, 19 nt, Artificial Sequence
  Description of Artificial Sequence: Synthetic oligonucleotide
guagagcugagcagaaggc

SEQ ID NO: 1873844 - RNA, 19 nt, Artificial Sequence
  Description of Artificial Sequence: Synthetic oligonucleotide
uuucuauuucuuugcccuc

SEQ ID NO: 1873845 - RNA, 19 nt, Artificial Sequence
  Description of Artificial Sequence: Synthetic oligonucleotide
auagaggagaaagccucag

SEQ ID NO: 1873846 - RNA, 19 nt, Artificial Sequence
  Description of Artificial Sequence: Synthetic oligonucleotide
uguguugucgcuggacgga

SEQ ID NO: 1873847 - RNA, 19 nt, Artificial Sequence
  Description of Artificial Sequence: Synthetic oligonucleotide
gucacauacggugacccug

SEQ ID NO: 1873848 - RNA, 19 nt, Artificial Sequence
  Description of Artificial Sequence: Synthetic oligonucleotide
uggguccuacucgaggagg

SEQ ID NO: 1873849 - RNA, 19 nt, Artificial Sequence
  Description of Artificial Sequence: Synthetic oligonucleotide
uagagcugagcagaaggcu

SEQ ID NO: 1873850 - RNA, 19 nt, Artificial Sequence
  Description of Artificial Sequence: Synthetic oligonucleotide
auacggugacccugggguc

SEQ ID NO: 1873851 - RNA, 19 nt, Artificial Sequence
  Description of Artificial Sequence: Synthetic oligonucleotide
guagcuuggguagguacag

SEQ ID NO: 1873852 - RNA, 19 nt, Artificial Sequence
  Description of Artificial Sequence: Synthetic oligonucleotide
cacagccgaagucagcuac

SEQ ID NO: 1873853 - RNA, 19 nt, Artificial Sequence
  Description of Artificial Sequence: Synthetic oligonucleotide
cagaaacuuuggaugagca

SEQ ID NO: 1873854 - RNA, 19 nt, Artificial Sequence
  Description of Artificial Sequence: Synthetic oligonucleotide
gguagguacagucuucaga

SEQ ID NO: 1873855 - RNA, 19 nt, Artificial Sequence
  Description of Artificial Sequence: Synthetic oligonucleotide
uccuacucgaggaggccca

SEQ ID NO: 1873856 - RNA, 19 nt, Artificial Sequence
  Description of Artificial Sequence: Synthetic oligonucleotide
ucagagucacugccaggug

SEQ ID NO: 1873857 - RNA, 19 nt, Artificial Sequence
  Description of Artificial Sequence: Synthetic oligonucleotide
gugaaaggcaaaacacagc

SEQ ID NO: 1873858 - RNA, 19 nt, Artificial Sequence
  Description of Artificial Sequence: Synthetic oligonucleotide
gguggcaccagguucuggc

SEQ ID NO: 1873859 - RNA, 19 nt, Artificial Sequence
  Description of Artificial Sequence: Synthetic oligonucleotide
cuggaagaggcguugggca

SEQ ID NO: 1873860 - RNA, 19 nt, Artificial Sequence
  Description of Artificial Sequence: Synthetic oligonucleotide
ugagcccuccccuuuuaac

SEQ ID NO: 1873861 - RNA, 19 nt, Artificial Sequence
  Description of Artificial Sequence: Synthetic oligonucleotide
aggaagucccugauguuag

SEQ ID NO: 1873862 - RNA, 19 nt, Artificial Sequence
  Description of Artificial Sequence: Synthetic oligonucleotide
agugcccauuagugaaagg

SEQ ID NO: 1873863 - RNA, 19 nt, Artificial Sequence
  Description of Artificial Sequence: Synthetic oligonucleotide
cacggauucauccuccaga

SEQ ID NO: 1873864 - RNA, 19 nt, Artificial Sequence
  Description of Artificial Sequence: Synthetic oligonucleotide
caagucaaagcagugcaca

SEQ ID NO: 1873865 - RNA, 19 nt, Artificial Sequence
  Description of Artificial Sequence: Synthetic oligonucleotide
agcuaccaccaagggaugc

SEQ ID NO: 1873866 - RNA, 19 nt, Artificial Sequence
  Description of Artificial Sequence: Synthetic oligonucleotide
auccacggauucauccucc

SEQ ID NO: 1873867 - RNA, 19 nt, Artificial Sequence
  Description of Artificial Sequence: Synthetic oligonucleotide
agcagucgcuggccgauuc

SEQ ID NO: 1873868 - RNA, 19 nt, Artificial Sequence
  Description of Artificial Sequence: Synthetic oligonucleotide
cccgaauguccucaaagcg

SEQ ID NO: 1873869 - RNA, 19 nt, Artificial Sequence
  Description of Artificial Sequence: Synthetic oligonucleotide
caaacaagaagaaguggcu

SEQ ID NO: 1873870 - RNA, 19 nt, Artificial Sequence
  Description of Artificial Sequence: Synthetic oligonucleotide
agaucuuuggcgauacgau

SEQ ID NO: 1873871 - RNA, 19 nt, Artificial Sequence
  Description of Artificial Sequence: Synthetic oligonucleotide
acagccgaagucagcuacc

SEQ ID NO: 1873872 - RNA, 19 nt, Artificial Sequence
  Description of Artificial Sequence: Synthetic oligonucleotide
agggucuuccuggaagagg

SEQ ID NO: 1873873 - RNA, 19 nt, Artificial Sequence
  Description of Artificial Sequence: Synthetic oligonucleotide
gauucauccuccagaggca

SEQ ID NO: 1873874 - RNA, 19 nt, Artificial Sequence
  Description of Artificial Sequence: Synthetic oligonucleotide
gcuccauuagaguagagcu

SEQ ID NO: 1873875 - RNA, 19 nt, Artificial Sequence
  Description of Artificial Sequence: Synthetic oligonucleotide
uuggguagguacagucuuc

SEQ ID NO: 1873876 - RNA, 19 nt, Artificial Sequence
  Description of Artificial Sequence: Synthetic oligonucleotide
auacgauccacugggugca

SEQ ID NO: 1873877 - RNA, 19 nt, Artificial Sequence
  Description of Artificial Sequence: Synthetic oligonucleotide
gcagagacuagacaauaca

SEQ ID NO: 1873878 - RNA, 19 nt, Artificial Sequence
  Description of Artificial Sequence: Synthetic oligonucleotide
ggcggcaaucuccacagcc

SEQ ID NO: 1873879 - RNA, 19 nt, Artificial Sequence
  Description of Artificial Sequence: Synthetic oligonucleotide
cgaauguccucaaagcggc

SEQ ID NO: 1873880 - RNA, 19 nt, Artificial Sequence
  Description of Artificial Sequence: Synthetic oligonucleotide
gaugaucuuaaagccaagu

SEQ ID NO: 1873881 - RNA, 19 nt, Artificial Sequence
  Description of Artificial Sequence: Synthetic oligonucleotide
ugcccucagagucacugau

SEQ ID NO: 1873882 - RNA, 19 nt, Artificial Sequence
  Description of Artificial Sequence: Synthetic oligonucleotide
aguguucuugguacaggag

SEQ ID NO: 1873883 - RNA, 19 nt, Artificial Sequence
  Description of Artificial Sequence: Synthetic oligonucleotide
ucccugauguuagugccca

SEQ ID NO: 1873884 - RNA, 19 nt, Artificial Sequence
  Description of Artificial Sequence: Synthetic oligonucleotide
cuggcuuguagcuugggua

SEQ ID NO: 1873885 - RNA, 19 nt, Artificial Sequence
  Description of Artificial Sequence: Synthetic oligonucleotide
ccuuuaauguggccaagag

SEQ ID NO: 1873886 - RNA, 19 nt, Artificial Sequence
  Description of Artificial Sequence: Synthetic oligonucleotide
agcagaaacuuuggaugag

SEQ ID NO: 1873887 - RNA, 19 nt, Artificial Sequence
  Description of Artificial Sequence: Synthetic oligonucleotide
ggcccgaauguccucaaag

SEQ ID NO: 1873888 - RNA, 19 nt, Artificial Sequence
  Description of Artificial Sequence: Synthetic oligonucleotide
gccgccucgacccauucgg

SEQ ID NO: 1873889 - RNA, 19 nt, Artificial Sequence
  Description of Artificial Sequence: Synthetic oligonucleotide
aggcaaaacacagccacau

SEQ ID NO: 1873890 - RNA, 19 nt, Artificial Sequence
  Description of Artificial Sequence: Synthetic oligonucleotide
uguuggucagguccuugua

SEQ ID NO: 1873891 - RNA, 19 nt, Artificial Sequence
  Description of Artificial Sequence: Synthetic oligonucleotide
ugucacauacggugacccu

SEQ ID NO: 1873892 - RNA, 19 nt, Artificial Sequence
  Description of Artificial Sequence: Synthetic oligonucleotide
cuugcggcccuugacuggc

SEQ ID NO: 1873893 - RNA, 19 nt, Artificial Sequence
  Description of Artificial Sequence: Synthetic oligonucleotide
cauccacggauucauccuc

SEQ ID NO: 1873894 - RNA, 19 nt, Artificial Sequence
  Description of Artificial Sequence: Synthetic oligonucleotide
caggguuccgaacacuuga

SEQ ID NO: 1873895 - RNA, 19 nt, Artificial Sequence
  Description of Artificial Sequence: Synthetic oligonucleotide
cuucagcuacuuugagcag

SEQ ID NO: 1873896 - RNA, 19 nt, Artificial Sequence
  Description of Artificial Sequence: Synthetic oligonucleotide
uggccaagagauggcggcg

SEQ ID NO: 1873897 - RNA, 19 nt, Artificial Sequence
  Description of Artificial Sequence: Synthetic oligonucleotide
uagccaagaaggcuccauu

SEQ ID NO: 1873898 - RNA, 19 nt, Artificial Sequence
  Description of Artificial Sequence: Synthetic oligonucleotide
cuuguagagacagggcuga

SEQ ID NO: 1873899 - RNA, 19 nt, Artificial Sequence
  Description of Artificial Sequence: Synthetic oligonucleotide
ugcuuccagagccuuuaau

SEQ ID NO: 1873900 - RNA, 19 nt, Artificial Sequence
  Description of Artificial Sequence: Synthetic oligonucleotide
ucaccugcgcuuguagaga

SEQ ID NO: 1873901 - RNA, 19 nt, Artificial Sequence
  Description of Artificial Sequence: Synthetic oligonucleotide
ugcggcccuugacuggcgg

SEQ ID NO: 1873902 - RNA, 19 nt, Artificial Sequence
  Description of Artificial Sequence: Synthetic oligonucleotide
gaggagaaagccucagggu

SEQ ID NO: 1873903 - RNA, 19 nt, Artificial Sequence
  Description of Artificial Sequence: Synthetic oligonucleotide
agccgaagucagcuaccac

SEQ ID NO: 1873904 - RNA, 19 nt, Artificial Sequence
  Description of Artificial Sequence: Synthetic oligonucleotide
ugacccugggguccagaga

SEQ ID NO: 1873905 - RNA, 19 nt, Artificial Sequence
  Description of Artificial Sequence: Synthetic oligonucleotide
gcuucaguacucgauuugc

SEQ ID NO: 1873906 - RNA, 19 nt, Artificial Sequence
  Description of Artificial Sequence: Synthetic oligonucleotide
gaugcaggcuucugucgga

SEQ ID NO: 1873907 - RNA, 19 nt, Artificial Sequence
  Description of Artificial Sequence: Synthetic oligonucleotide
ggcuccauuagaguagagc

SEQ ID NO: 1873908 - RNA, 19 nt, Artificial Sequence
  Description of Artificial Sequence: Synthetic oligonucleotide
gccgauucuguguugucgc

SEQ ID NO: 1873909 - RNA, 19 nt, Artificial Sequence
  Description of Artificial Sequence: Synthetic oligonucleotide
aggcuucugucggagaucu

SEQ ID NO: 1873910 - RNA, 19 nt, Artificial Sequence
  Description of Artificial Sequence: Synthetic oligonucleotide
uucaggccugagaguuggg

SEQ ID NO: 1873911 - RNA, 19 nt, Artificial Sequence
  Description of Artificial Sequence: Synthetic oligonucleotide
guucugagcuuggagucug

SEQ ID NO: 1873912 - RNA, 19 nt, Artificial Sequence
  Description of Artificial Sequence: Synthetic oligonucleotide
gucgcuggccgauucugug

SEQ ID NO: 1873913 - RNA, 19 nt, Artificial Sequence
  Description of Artificial Sequence: Synthetic oligonucleotide
uccacggauucauccucca

SEQ ID NO: 1873914 - RNA, 19 nt, Artificial Sequence
  Description of Artificial Sequence: Synthetic oligonucleotide
aguucugagcuuggagucu

SEQ ID NO: 1873915 - RNA, 19 nt, Artificial Sequence
  Description of Artificial Sequence: Synthetic oligonucleotide
gaguagagcugagcagaag

SEQ ID NO: 1873916 - RNA, 19 nt, Artificial Sequence
  Description of Artificial Sequence: Synthetic oligonucleotide
caccugcgcuuguagagac

SEQ ID NO: 1873917 - RNA, 19 nt, Artificial Sequence
  Description of Artificial Sequence: Synthetic oligonucleotide
ucgcuggccgauucugugu

SEQ ID NO: 1873918 - RNA, 19 nt, Artificial Sequence
  Description of Artificial Sequence: Synthetic oligonucleotide
aaguggcuguuggucaggu

SEQ ID NO: 1873919 - RNA, 19 nt, Artificial Sequence
  Description of Artificial Sequence: Synthetic oligonucleotide
gacggaggcccacggcugc

SEQ ID NO: 1873920 - RNA, 19 nt, Artificial Sequence
  Description of Artificial Sequence: Synthetic oligonucleotide
cugauguuagugcccauua

SEQ ID NO: 1873921 - RNA, 19 nt, Artificial Sequence
  Description of Artificial Sequence: Synthetic oligonucleotide
ggccgauucuguguugucg

SEQ ID NO: 1873922 - RNA, 19 nt, Artificial Sequence
  Description of Artificial Sequence: Synthetic oligonucleotide
gcagaaacuuuggaugagc

SEQ ID NO: 1873923 - RNA, 19 nt, Artificial Sequence
  Description of Artificial Sequence: Synthetic oligonucleotide
caaaaggcccgaauguccu

SEQ ID NO: 1873924 - RNA, 19 nt, Artificial Sequence
  Description of Artificial Sequence: Synthetic oligonucleotide
aggcguugggcagcacugc

SEQ ID NO: 1873925 - RNA, 19 nt, Artificial Sequence
  Description of Artificial Sequence: Synthetic oligonucleotide
agagcugagcagaaggcuu

SEQ ID NO: 1873926 - RNA, 19 nt, Artificial Sequence
  Description of Artificial Sequence: Synthetic oligonucleotide
acccauucgggcuccucga

SEQ ID NO: 1873927 - RNA, 19 nt, Artificial Sequence
  Description of Artificial Sequence: Synthetic oligonucleotide
guccuacucgaggaggccc

SEQ ID NO: 1873928 - RNA, 19 nt, Artificial Sequence
  Description of Artificial Sequence: Synthetic oligonucleotide
guccuuuggucaccugcgc

SEQ ID NO: 1873929 - RNA, 19 nt, Artificial Sequence
  Description of Artificial Sequence: Synthetic oligonucleotide
ggguuccgaacacuugaag

SEQ ID NO: 1873930 - RNA, 19 nt, Artificial Sequence
  Description of Artificial Sequence: Synthetic oligonucleotide
ggcaccagguucuggcuug

SEQ ID NO: 1873931 - RNA, 19 nt, Artificial Sequence
  Description of Artificial Sequence: Synthetic oligonucleotide
gcggcaaucuccacagccg

SEQ ID NO: 1873932 - RNA, 19 nt, Artificial Sequence
  Description of Artificial Sequence: Synthetic oligonucleotide
caaagcagugcacaggguu

SEQ ID NO: 1873933 - RNA, 19 nt, Artificial Sequence
  Description of Artificial Sequence: Synthetic oligonucleotide
gccuccucaaggaaguccc

SEQ ID NO: 1873934 - RNA, 19 nt, Artificial Sequence
  Description of Artificial Sequence: Synthetic oligonucleotide
acuggcggagcagucgcug

SEQ ID NO: 1873935 - RNA, 19 nt, Artificial Sequence
  Description of Artificial Sequence: Synthetic oligonucleotide
guguugucgcuggacggag

SEQ ID NO: 1873936 - RNA, 19 nt, Artificial Sequence
  Description of Artificial Sequence: Synthetic oligonucleotide
gagcagagacuagacaaua

SEQ ID NO: 1873937 - RNA, 19 nt, Artificial Sequence
  Description of Artificial Sequence: Synthetic oligonucleotide
uucgggcuccucgaacaug

SEQ ID NO: 1873938 - RNA, 19 nt, Artificial Sequence
  Description of Artificial Sequence: Synthetic oligonucleotide
gugauagaggagaaagccu

SEQ ID NO: 1873939 - RNA, 19 nt, Artificial Sequence
  Description of Artificial Sequence: Synthetic oligonucleotide
agucacugccaggugggcu

SEQ ID NO: 1873940 - RNA, 19 nt, Artificial Sequence
  Description of Artificial Sequence: Synthetic oligonucleotide
agcuaggcggcaaucucca

SEQ ID NO: 1873941 - RNA, 19 nt, Artificial Sequence
  Description of Artificial Sequence: Synthetic oligonucleotide
ugcaggcuucugucggaga

SEQ ID NO: 1873942 - RNA, 19 nt, Artificial Sequence
  Description of Artificial Sequence: Synthetic oligonucleotide
aaggcccgaauguccucaa

SEQ ID NO: 1873943 - RNA, 19 nt, Artificial Sequence
  Description of Artificial Sequence: Synthetic oligonucleotide
ccugcgcuuguagagacag

SEQ ID NO: 1873944 - RNA, 19 nt, Artificial Sequence
  Description of Artificial Sequence: Synthetic oligonucleotide
augcaggcuucugucggag

SEQ ID NO: 1873945 - RNA, 19 nt, Artificial Sequence
  Description of Artificial Sequence: Synthetic oligonucleotide
cugcgcuuguagagacagg

SEQ ID NO: 1873946 - RNA, 19 nt, Artificial Sequence
  Description of Artificial Sequence: Synthetic oligonucleotide
cacauacggugacccuggg

SEQ ID NO: 1873947 - RNA, 19 nt, Artificial Sequence
  Description of Artificial Sequence: Synthetic oligonucleotide
ccaagucaaagcagugcac

SEQ ID NO: 1873948 - RNA, 19 nt, Artificial Sequence
  Description of Artificial Sequence: Synthetic oligonucleotide
aggcggcaaucuccacagc

SEQ ID NO: 1873949 - RNA, 19 nt, Artificial Sequence
  Description of Artificial Sequence: Synthetic oligonucleotide
uguagccaagaaggcucca

SEQ ID NO: 1873950 - RNA, 19 nt, Artificial Sequence
  Description of Artificial Sequence: Synthetic oligonucleotide
gaggaggcccagucuuuuc

SEQ ID NO: 1873951 - RNA, 19 nt, Artificial Sequence
  Description of Artificial Sequence: Synthetic oligonucleotide
ggagaucuuuggcgauacg

SEQ ID NO: 1873952 - RNA, 19 nt, Artificial Sequence
  Description of Artificial Sequence: Synthetic oligonucleotide
agucugagcccuccccuuu

SEQ ID NO: 1873953 - RNA, 19 nt, Artificial Sequence
  Description of Artificial Sequence: Synthetic oligonucleotide
ucgaggaggcccagucuuu

SEQ ID NO: 1873954 - RNA, 19 nt, Artificial Sequence
  Description of Artificial Sequence: Synthetic oligonucleotide
ucggagaucuuuggcgaua

SEQ ID NO: 1873955 - RNA, 19 nt, Artificial Sequence
  Description of Artificial Sequence: Synthetic oligonucleotide
gaagaggcguugggcagca

SEQ ID NO: 1873956 - RNA, 19 nt, Artificial Sequence
  Description of Artificial Sequence: Synthetic oligonucleotide
uugcggcccuugacuggcg

SEQ ID NO: 1873957 - RNA, 19 nt, Artificial Sequence
  Description of Artificial Sequence: Synthetic oligonucleotide
guacagucuucagaguucu

SEQ ID NO: 1873958 - RNA, 19 nt, Artificial Sequence
  Description of Artificial Sequence: Synthetic oligonucleotide
agcagugcacaggguuccg

SEQ ID NO: 1873959 - RNA, 19 nt, Artificial Sequence
  Description of Artificial Sequence: Synthetic oligonucleotide
cuggacggaggcccacggc

SEQ ID NO: 1873960 - RNA, 19 nt, Artificial Sequence
  Description of Artificial Sequence: Synthetic oligonucleotide
cuuggguagguacagucuu

SEQ ID NO: 1873961 - RNA, 19 nt, Artificial Sequence
  Description of Artificial Sequence: Synthetic oligonucleotide
uugucgcuggacggaggcc

SEQ ID NO: 1873962 - RNA, 19 nt, Artificial Sequence
  Description of Artificial Sequence: Synthetic oligonucleotide
cagguucuggcuuguagcu

SEQ ID NO: 1873963 - RNA, 19 nt, Artificial Sequence
  Description of Artificial Sequence: Synthetic oligonucleotide
agccuuuaauguggccaag

SEQ ID NO: 1873964 - RNA, 19 nt, Artificial Sequence
  Description of Artificial Sequence: Synthetic oligonucleotide
gcuugcggcccuugacugg

SEQ ID NO: 1873965 - RNA, 19 nt, Artificial Sequence
  Description of Artificial Sequence: Synthetic oligonucleotide
cuuuggcgauacgauccac

SEQ ID NO: 1873966 - RNA, 19 nt, Artificial Sequence
  Description of Artificial Sequence: Synthetic oligonucleotide
gcuggacggaggcccacgg

SEQ ID NO: 1873967 - RNA, 19 nt, Artificial Sequence
  Description of Artificial Sequence: Synthetic oligonucleotide
ggaagaggcguugggcagc

SEQ ID NO: 1873968 - RNA, 19 nt, Artificial Sequence
  Description of Artificial Sequence: Synthetic oligonucleotide
ccugggccaugucacauac

SEQ ID NO: 1873969 - RNA, 19 nt, Artificial Sequence
  Description of Artificial Sequence: Synthetic oligonucleotide
ggguagguacagucuucag

SEQ ID NO: 1873970 - RNA, 19 nt, Artificial Sequence
  Description of Artificial Sequence: Synthetic oligonucleotide
cuggggaauuucugggaaa

SEQ ID NO: 1873971 - RNA, 19 nt, Artificial Sequence
  Description of Artificial Sequence: Synthetic oligonucleotide
cagucgcuggccgauucug

SEQ ID NO: 1873972 - RNA, 19 nt, Artificial Sequence
  Description of Artificial Sequence: Synthetic oligonucleotide
acuagacaauacagucaga

SEQ ID NO: 1873973 - RNA, 19 nt, Artificial Sequence
  Description of Artificial Sequence: Synthetic oligonucleotide
gggcagcacugcuauuucc

SEQ ID NO: 1873974 - RNA, 19 nt, Artificial Sequence
  Description of Artificial Sequence: Synthetic oligonucleotide
ccgaacacuugaagcuagg

SEQ ID NO: 1873975 - RNA, 19 nt, Artificial Sequence
  Description of Artificial Sequence: Synthetic oligonucleotide
guacaggaggguggcacca

SEQ ID NO: 1873976 - RNA, 19 nt, Artificial Sequence
  Description of Artificial Sequence: Synthetic oligonucleotide
cuuggugauagaggagaaa

SEQ ID NO: 1873977 - RNA, 19 nt, Artificial Sequence
  Description of Artificial Sequence: Synthetic oligonucleotide
ugagggccuuuggagguau

SEQ ID NO: 1873978 - RNA, 19 nt, Artificial Sequence
  Description of Artificial Sequence: Synthetic oligonucleotide
cagcuaccaccaagggaug

SEQ ID NO: 1873979 - RNA, 19 nt, Artificial Sequence
  Description of Artificial Sequence: Synthetic oligonucleotide
uacgauccacugggugcag

SEQ ID NO: 1873980 - RNA, 19 nt, Artificial Sequence
  Description of Artificial Sequence: Synthetic oligonucleotide
ggcuuguagcuuggguagg

SEQ ID NO: 1873981 - RNA, 19 nt, Artificial Sequence
  Description of Artificial Sequence: Synthetic oligonucleotide
cccagucuuuucaaaguca

SEQ ID NO: 1873982 - RNA, 19 nt, Artificial Sequence
  Description of Artificial Sequence: Synthetic oligonucleotide
cugauagauaacaccuguu

SEQ ID NO: 1873983 - RNA, 19 nt, Artificial Sequence
  Description of Artificial Sequence: Synthetic oligonucleotide
uagcuuggguagguacagu

SEQ ID NO: 1873984 - RNA, 19 nt, Artificial Sequence
  Description of Artificial Sequence: Synthetic oligonucleotide
gcccuccccuuuuaacagg

SEQ ID NO: 1873985 - RNA, 19 nt, Artificial Sequence
  Description of Artificial Sequence: Synthetic oligonucleotide
ggccacuucuucuacuugu

SEQ ID NO: 1873986 - RNA, 19 nt, Artificial Sequence
  Description of Artificial Sequence: Synthetic oligonucleotide
aagaggcguugggcagcac

SEQ ID NO: 1873987 - RNA, 19 nt, Artificial Sequence
  Description of Artificial Sequence: Synthetic oligonucleotide
uggccgauucuguguuguc

SEQ ID NO: 1873988 - RNA, 19 nt, Artificial Sequence
  Description of Artificial Sequence: Synthetic oligonucleotide
agaaagccucagggucuuc

SEQ ID NO: 1873989 - RNA, 19 nt, Artificial Sequence
  Description of Artificial Sequence: Synthetic oligonucleotide
ccauuagaguagagcugag

SEQ ID NO: 1873990 - RNA, 19 nt, Artificial Sequence
  Description of Artificial Sequence: Synthetic oligonucleotide
cgauacgauccacugggug

SEQ ID NO: 1873991 - RNA, 19 nt, Artificial Sequence
  Description of Artificial Sequence: Synthetic oligonucleotide
accugggccaugucacaua

SEQ ID NO: 1873992 - RNA, 19 nt, Artificial Sequence
  Description of Artificial Sequence: Synthetic oligonucleotide
agggccuuuggagguauuu

SEQ ID NO: 1873993 - RNA, 19 nt, Artificial Sequence
  Description of Artificial Sequence: Synthetic oligonucleotide
cgauuugccuccucaagga

SEQ ID NO: 1873994 - RNA, 19 nt, Artificial Sequence
  Description of Artificial Sequence: Synthetic oligonucleotide
cucgacccauucgggcucc

SEQ ID NO: 1873995 - RNA, 19 nt, Artificial Sequence
  Description of Artificial Sequence: Synthetic oligonucleotide
gcggagcagucgcuggccg

SEQ ID NO: 1873996 - RNA, 19 nt, Artificial Sequence
  Description of Artificial Sequence: Synthetic oligonucleotide
aggguuccgaacacuugaa

SEQ ID NO: 1873997 - RNA, 19 nt, Artificial Sequence
  Description of Artificial Sequence: Synthetic oligonucleotide
uuguagagacagggcugaa

SEQ ID NO: 1873998 - RNA, 19 nt, Artificial Sequence
  Description of Artificial Sequence: Synthetic oligonucleotide
agucgcuggccgauucugu

SEQ ID NO: 1873999 - RNA, 19 nt, Artificial Sequence
  Description of Artificial Sequence: Synthetic oligonucleotide
ggagaaagccucagggucu

SEQ ID NO: 1874000 - RNA, 19 nt, Artificial Sequence
  Description of Artificial Sequence: Synthetic oligonucleotide
cgaacacuugaagcuaggc

SEQ ID NO: 1874001 - RNA, 19 nt, Artificial Sequence
  Description of Artificial Sequence: Synthetic oligonucleotide
gccaugucacauacgguga

SEQ ID NO: 1874002 - RNA, 19 nt, Artificial Sequence
  Description of Artificial Sequence: Synthetic oligonucleotide
caaucuccacagccgaagu

SEQ ID NO: 1874003 - RNA, 19 nt, Artificial Sequence
  Description of Artificial Sequence: Synthetic oligonucleotide
gcccauuagugaaaggcaa

SEQ ID NO: 1874004 - RNA, 19 nt, Artificial Sequence
  Description of Artificial Sequence: Synthetic oligonucleotide
cuugaagcuaggcggcaau

SEQ ID NO: 1874005 - RNA, 19 nt, Artificial Sequence
  Description of Artificial Sequence: Synthetic oligonucleotide
cugcuauuuccuuucuauu

SEQ ID NO: 1874006 - RNA, 19 nt, Artificial Sequence
  Description of Artificial Sequence: Synthetic oligonucleotide
gguccuacucgaggaggcc

SEQ ID NO: 1874007 - RNA, 19 nt, Artificial Sequence
  Description of Artificial Sequence: Synthetic oligonucleotide
ccauucgggcuccucgaac

SEQ ID NO: 1874008 - RNA, 19 nt, Artificial Sequence
  Description of Artificial Sequence: Synthetic oligonucleotide
agguucuggcuuguagcuu

SEQ ID NO: 1874009 - RNA, 19 nt, Artificial Sequence
  Description of Artificial Sequence: Synthetic oligonucleotide
ggccgccucgacccauucg

SEQ ID NO: 1874010 - RNA, 19 nt, Artificial Sequence
  Description of Artificial Sequence: Synthetic oligonucleotide
cuucaaggcauuggcuugu

SEQ ID NO: 1874011 - RNA, 19 nt, Artificial Sequence
  Description of Artificial Sequence: Synthetic oligonucleotide
cagccgaagucagcuacca

SEQ ID NO: 1874012 - RNA, 19 nt, Artificial Sequence
  Description of Artificial Sequence: Synthetic oligonucleotide
gggcuccucgaacaugcca

SEQ ID NO: 1874013 - RNA, 19 nt, Artificial Sequence
  Description of Artificial Sequence: Synthetic oligonucleotide
cccauuagugaaaggcaaa

SEQ ID NO: 1874014 - RNA, 19 nt, Artificial Sequence
  Description of Artificial Sequence: Synthetic oligonucleotide
cacugcuauuuccuuucua

SEQ ID NO: 1874015 - RNA, 19 nt, Artificial Sequence
  Description of Artificial Sequence: Synthetic oligonucleotide
ccacggauucauccuccag

SEQ ID NO: 1874016 - RNA, 19 nt, Artificial Sequence
  Description of Artificial Sequence: Synthetic oligonucleotide
acccugggguccagagagg

SEQ ID NO: 1874017 - RNA, 19 nt, Artificial Sequence
  Description of Artificial Sequence: Synthetic oligonucleotide
caccaagggaugcaggcuu

SEQ ID NO: 1874018 - RNA, 19 nt, Artificial Sequence
  Description of Artificial Sequence: Synthetic oligonucleotide
aagcggcugcugacuucag

SEQ ID NO: 1874019 - RNA, 19 nt, Artificial Sequence
  Description of Artificial Sequence: Synthetic oligonucleotide
cacuugaagcuaggcggca

SEQ ID NO: 1874020 - RNA, 19 nt, Artificial Sequence
  Description of Artificial Sequence: Synthetic oligonucleotide
gcuguuggucagguccuug

SEQ ID NO: 1874021 - RNA, 19 nt, Artificial Sequence
  Description of Artificial Sequence: Synthetic oligonucleotide
uuggcuugugagggccuuu

SEQ ID NO: 1874022 - RNA, 19 nt, Artificial Sequence
  Description of Artificial Sequence: Synthetic oligonucleotide
gagucugagcccuccccuu

SEQ ID NO: 1874023 - RNA, 19 nt, Artificial Sequence
  Description of Artificial Sequence: Synthetic oligonucleotide
gcaaaagcugugugucugu

SEQ ID NO: 1874024 - RNA, 19 nt, Artificial Sequence
  Description of Artificial Sequence: Synthetic oligonucleotide
gcgcuuguagagacagggc

SEQ ID NO: 1874025 - RNA, 19 nt, Artificial Sequence
  Description of Artificial Sequence: Synthetic oligonucleotide
ggacggaggcccacggcug

SEQ ID NO: 1874026 - RNA, 19 nt, Artificial Sequence
  Description of Artificial Sequence: Synthetic oligonucleotide
gguguccuuuggucaccug

SEQ ID NO: 1874027 - RNA, 19 nt, Artificial Sequence
  Description of Artificial Sequence: Synthetic oligonucleotide
guagccaagaaggcuccau

SEQ ID NO: 1874028 - RNA, 19 nt, Artificial Sequence
  Description of Artificial Sequence: Synthetic oligonucleotide
ccuccuuccuucaaggcau

SEQ ID NO: 1874029 - RNA, 19 nt, Artificial Sequence
  Description of Artificial Sequence: Synthetic oligonucleotide
acggugacccuggggucca

SEQ ID NO: 1874030 - RNA, 19 nt, Artificial Sequence
  Description of Artificial Sequence: Synthetic oligonucleotide
cugagcccuccccuuuuaa

SEQ ID NO: 1874031 - RNA, 19 nt, Artificial Sequence
  Description of Artificial Sequence: Synthetic oligonucleotide
gcuggccgauucuguguug

SEQ ID NO: 1874032 - RNA, 19 nt, Artificial Sequence
  Description of Artificial Sequence: Synthetic oligonucleotide
gcugaaguuucaggccuga

SEQ ID NO: 1874033 - RNA, 19 nt, Artificial Sequence
  Description of Artificial Sequence: Synthetic oligonucleotide
cggauucauccuccagagg

SEQ ID NO: 1874034 - RNA, 19 nt, Artificial Sequence
  Description of Artificial Sequence: Synthetic oligonucleotide
gucggagaucuuuggcgau

SEQ ID NO: 1874035 - RNA, 19 nt, Artificial Sequence
  Description of Artificial Sequence: Synthetic oligonucleotide
gccucgacccauucgggcu

SEQ ID NO: 1874036 - RNA, 19 nt, Artificial Sequence
  Description of Artificial Sequence: Synthetic oligonucleotide
ccucgacccauucgggcuc

SEQ ID NO: 1874037 - RNA, 19 nt, Artificial Sequence
  Description of Artificial Sequence: Synthetic oligonucleotide
cuggccgauucuguguugu

SEQ ID NO: 1874038 - RNA, 19 nt, Artificial Sequence
  Description of Artificial Sequence: Synthetic oligonucleotide
cgauucuguguugucgcug

SEQ ID NO: 1874039 - RNA, 19 nt, Artificial Sequence
  Description of Artificial Sequence: Synthetic oligonucleotide
gcuuggguagguacagucu

SEQ ID NO: 1874040 - RNA, 19 nt, Artificial Sequence
  Description of Artificial Sequence: Synthetic oligonucleotide
accugcgcuuguagagaca

SEQ ID NO: 1874041 - RNA, 19 nt, Artificial Sequence
  Description of Artificial Sequence: Synthetic oligonucleotide
ccgccucgacccauucggg

SEQ ID NO: 1874042 - RNA, 19 nt, Artificial Sequence
  Description of Artificial Sequence: Synthetic oligonucleotide
gccacauccacggauucau

SEQ ID NO: 1874043 - RNA, 19 nt, Artificial Sequence
  Description of Artificial Sequence: Synthetic oligonucleotide
ccuuuuaacagguguccuu

SEQ ID NO: 1874044 - RNA, 19 nt, Artificial Sequence
  Description of Artificial Sequence: Synthetic oligonucleotide
ccccaaaaggcccgaaugu

SEQ ID NO: 1874045 - RNA, 19 nt, Artificial Sequence
  Description of Artificial Sequence: Synthetic oligonucleotide
gcuaggcggcaaucuccac

SEQ ID NO: 1874046 - RNA, 19 nt, Artificial Sequence
  Description of Artificial Sequence: Synthetic oligonucleotide
ggaagucccugauguuagu

SEQ ID NO: 1874047 - RNA, 19 nt, Artificial Sequence
  Description of Artificial Sequence: Synthetic oligonucleotide
gucgcuggacggaggccca

SEQ ID NO: 1874048 - RNA, 19 nt, Artificial Sequence
  Description of Artificial Sequence: Synthetic oligonucleotide
ggcccacggcugcuggggc

SEQ ID NO: 1874049 - RNA, 19 nt, Artificial Sequence
  Description of Artificial Sequence: Synthetic oligonucleotide
acggaggcccacggcugcu

SEQ ID NO: 1874050 - RNA, 19 nt, Artificial Sequence
  Description of Artificial Sequence: Synthetic oligonucleotide
gcgcuugcggcccuugacu

SEQ ID NO: 1874051 - RNA, 19 nt, Artificial Sequence
  Description of Artificial Sequence: Synthetic oligonucleotide
ggcccuugacuggcggagc

SEQ ID NO: 1874052 - RNA, 19 nt, Artificial Sequence
  Description of Artificial Sequence: Synthetic oligonucleotide
ggcguugggcagcacugcu

SEQ ID NO: 1874053 - RNA, 19 nt, Artificial Sequence
  Description of Artificial Sequence: Synthetic oligonucleotide
ggcaaucuccacagccgaa

SEQ ID NO: 1874054 - RNA, 19 nt, Artificial Sequence
  Description of Artificial Sequence: Synthetic oligonucleotide
ccucagagucacugauaga

SEQ ID NO: 1874055 - RNA, 19 nt, Artificial Sequence
  Description of Artificial Sequence: Synthetic oligonucleotide
ucgacccauucgggcuccu

SEQ ID NO: 1874056 - RNA, 19 nt, Artificial Sequence
  Description of Artificial Sequence: Synthetic oligonucleotide
ccuacucgaggaggcccag

SEQ ID NO: 1874057 - RNA, 19 nt, Artificial Sequence
  Description of Artificial Sequence: Synthetic oligonucleotide
gugagggccuuuggaggua

SEQ ID NO: 1874058 - RNA, 19 nt, Artificial Sequence
  Description of Artificial Sequence: Synthetic oligonucleotide
gcagcacugcuauuuccuu

SEQ ID NO: 1874059 - RNA, 19 nt, Artificial Sequence
  Description of Artificial Sequence: Synthetic oligonucleotide
cggcaaucuccacagccga

SEQ ID NO: 1874060 - RNA, 19 nt, Artificial Sequence
  Description of Artificial Sequence: Synthetic oligonucleotide
gcggcccuugacuggcgga

SEQ ID NO: 1874061 - RNA, 19 nt, Artificial Sequence
  Description of Artificial Sequence: Synthetic oligonucleotide
gacuggcggagcagucgcu

SEQ ID NO: 1874062 - RNA, 19 nt, Artificial Sequence
  Description of Artificial Sequence: Synthetic oligonucleotide
aguugggcuuuggguccua

SEQ ID NO: 1874063 - RNA, 19 nt, Artificial Sequence
  Description of Artificial Sequence: Synthetic oligonucleotide
gccaagagauggcggcgcu

SEQ ID NO: 1874064 - RNA, 19 nt, Artificial Sequence
  Description of Artificial Sequence: Synthetic oligonucleotide
gcagucgcuggccgauucu

SEQ ID NO: 1874065 - RNA, 19 nt, Artificial Sequence
  Description of Artificial Sequence: Synthetic oligonucleotide
ccacugggugcaguggcca

SEQ ID NO: 1874066 - RNA, 19 nt, Artificial Sequence
  Description of Artificial Sequence: Synthetic oligonucleotide
ggugacccugggguccaga

SEQ ID NO: 1874067 - RNA, 19 nt, Artificial Sequence
  Description of Artificial Sequence: Synthetic oligonucleotide
guugggcagcacugcuauu

SEQ ID NO: 1874068 - RNA, 19 nt, Artificial Sequence
  Description of Artificial Sequence: Synthetic oligonucleotide
caccugggccaugucacau

SEQ ID NO: 1874069 - RNA, 19 nt, Artificial Sequence
  Description of Artificial Sequence: Synthetic oligonucleotide
cagaggcaccugggccaug

SEQ ID NO: 1874070 - RNA, 19 nt, Artificial Sequence
  Description of Artificial Sequence: Synthetic oligonucleotide
gggccuuuggagguauuuu

SEQ ID NO: 1874071 - RNA, 19 nt, Artificial Sequence
  Description of Artificial Sequence: Synthetic oligonucleotide
cguugggcagcacugcuau

SEQ ID NO: 1874072 - RNA, 19 nt, Artificial Sequence
  Description of Artificial Sequence: Synthetic oligonucleotide
ccggcuucaguacucgauu

SEQ ID NO: 1874073 - RNA, 19 nt, Artificial Sequence
  Description of Artificial Sequence: Synthetic oligonucleotide
cuggggccgccucgaccca

SEQ ID NO: 1874074 - RNA, 19 nt, Artificial Sequence
  Description of Artificial Sequence: Synthetic oligonucleotide
gcccucagagucacugaua

SEQ ID NO: 1874075 - RNA, 19 nt, Artificial Sequence
  Description of Artificial Sequence: Synthetic oligonucleotide
cuacucgaggaggcccagu

SEQ ID NO: 1874076 - RNA, 19 nt, Artificial Sequence
  Description of Artificial Sequence: Synthetic oligonucleotide
gcguugggcagcacugcua

SEQ ID NO: 1874077 - RNA, 19 nt, Artificial Sequence
  Description of Artificial Sequence: Synthetic oligonucleotide
cgggcuccucgaacaugcc

SEQ ID NO: 1874078 - RNA, 19 nt, Artificial Sequence
  Description of Artificial Sequence: Synthetic oligonucleotide
ccgauucuguguugucgcu

SEQ ID NO: 1874079 - RNA, 19 nt, Artificial Sequence
  Description of Artificial Sequence: Synthetic oligonucleotide
cccauucgggcuccucgaa

SEQ ID NO: 1874080 - RNA, 19 nt, Artificial Sequence
  Description of Artificial Sequence: Synthetic oligonucleotide
gcacaggguuccgaacacu

SEQ ID NO: 1874081 - RNA, 19 nt, Artificial Sequence
  Description of Artificial Sequence: Synthetic oligonucleotide
gggccgccucgacccauuc

SEQ ID NO: 1874082 - RNA, 19 nt, Artificial Sequence
  Description of Artificial Sequence: Synthetic oligonucleotide
gggccaugucacauacggu

SEQ ID NO: 1874083 - RNA, 19 nt, Artificial Sequence
  Description of Artificial Sequence: Synthetic oligonucleotide
ccacagccgaagucagcua

SEQ ID NO: 1874084 - RNA, 19 nt, Artificial Sequence
  Description of Artificial Sequence: Synthetic oligonucleotide
gcgauacgauccacugggu

SEQ ID NO: 1874085 - RNA, 19 nt, Artificial Sequence
  Description of Artificial Sequence: Synthetic oligonucleotide
cggagcagucgcuggccga

SEQ ID NO: 1874086 - RNA, 19 nt, Artificial Sequence
  Description of Artificial Sequence: Synthetic oligonucleotide
cgaagucagcuaccaccaa

SEQ ID NO: 1874087 - RNA, 19 nt, Artificial Sequence
  Description of Artificial Sequence: Synthetic oligonucleotide
gagcagucgcuggccgauu

SEQ ID NO: 1874088 - RNA, 19 nt, Artificial Sequence
  Description of Artificial Sequence: Synthetic oligonucleotide
ccccggcuucaguacucga

SEQ ID NO: 1874089 - RNA, 19 nt, Artificial Sequence
  Description of Artificial Sequence: Synthetic oligonucleotide
gagggccuuuggagguauu

SEQ ID NO: 1874090 - RNA, 19 nt, Artificial Sequence
  Description of Artificial Sequence: Synthetic oligonucleotide
gcaccagguucuggcuugu

SEQ ID NO: 1874091 - RNA, 19 nt, Artificial Sequence
  Description of Artificial Sequence: Synthetic oligonucleotide
cggcuucaguacucgauuu

SEQ ID NO: 1874092 - RNA, 19 nt, Artificial Sequence
  Description of Artificial Sequence: Synthetic oligonucleotide
cgacccauucgggcuccuc

SEQ ID NO: 1874093 - RNA, 19 nt, Artificial Sequence
  Description of Artificial Sequence: Synthetic oligonucleotide
ccaagagauggcggcgcuu

SEQ ID NO: 1874094 - RNA, 19 nt, Artificial Sequence
  Description of Artificial Sequence: Synthetic oligonucleotide
cccugauguuagugcccau

SEQ ID NO: 1874095 - RNA, 19 nt, Artificial Sequence
  Description of Artificial Sequence: Synthetic oligonucleotide
cggugacccugggguccag

SEQ ID NO: 1874096 - RNA, 19 nt, Artificial Sequence
  Description of Artificial Sequence: Synthetic oligonucleotide
uauagcaugaaacagugac

SEQ ID NO: 1874097 - RNA, 19 nt, Artificial Sequence
  Description of Artificial Sequence: Synthetic oligonucleotide
aucacguccauucuuagcc

SEQ ID NO: 1874098 - RNA, 19 nt, Artificial Sequence
  Description of Artificial Sequence: Synthetic oligonucleotide
gauauuaaccugcaaagag

SEQ ID NO: 1874099 - RNA, 19 nt, Artificial Sequence
  Description of Artificial Sequence: Synthetic oligonucleotide
aggaguaguagaaagagcc

SEQ ID NO: 1874100 - RNA, 19 nt, Artificial Sequence
  Description of Artificial Sequence: Synthetic oligonucleotide
agugacuaagaacaugccc

SEQ ID NO: 1874101 - RNA, 19 nt, Artificial Sequence
  Description of Artificial Sequence: Synthetic oligonucleotide
uuaaccugcaaagagaagc

SEQ ID NO: 1874102 - RNA, 19 nt, Artificial Sequence
  Description of Artificial Sequence: Synthetic oligonucleotide
uagaaagagccauagagga

SEQ ID NO: 1874103 - RNA, 19 nt, Artificial Sequence
  Description of Artificial Sequence: Synthetic oligonucleotide
gaauucucccuauaguccg

SEQ ID NO: 1874104 - RNA, 19 nt, Artificial Sequence
  Description of Artificial Sequence: Synthetic oligonucleotide
acgaauucucccuauaguc

SEQ ID NO: 1874105 - RNA, 19 nt, Artificial Sequence
  Description of Artificial Sequence: Synthetic oligonucleotide
agcaauaggaggauggugc

SEQ ID NO: 1874106 - RNA, 19 nt, Artificial Sequence
  Description of Artificial Sequence: Synthetic oligonucleotide
agagaagcgguguuggggc

SEQ ID NO: 1874107 - RNA, 19 nt, Artificial Sequence
  Description of Artificial Sequence: Synthetic oligonucleotide
ucugguauagcaugaaaca

SEQ ID NO: 1874108 - RNA, 19 nt, Artificial Sequence
  Description of Artificial Sequence: Synthetic oligonucleotide
uauuaaccugcaaagagaa

SEQ ID NO: 1874109 - RNA, 19 nt, Artificial Sequence
  Description of Artificial Sequence: Synthetic oligonucleotide
ucggauauuaaccugcaaa

SEQ ID NO: 1874110 - RNA, 19 nt, Artificial Sequence
  Description of Artificial Sequence: Synthetic oligonucleotide
ugaccagucggcauguagg

SEQ ID NO: 1874111 - RNA, 19 nt, Artificial Sequence
  Description of Artificial Sequence: Synthetic oligonucleotide
agcacgaugacgcugagga

SEQ ID NO: 1874112 - RNA, 19 nt, Artificial Sequence
  Description of Artificial Sequence: Synthetic oligonucleotide
auggcgagagguccgaugc

SEQ ID NO: 1874113 - RNA, 19 nt, Artificial Sequence
  Description of Artificial Sequence: Synthetic oligonucleotide
gaaguuguacagcagguac

SEQ ID NO: 1874114 - RNA, 19 nt, Artificial Sequence
  Description of Artificial Sequence: Synthetic oligonucleotide
aaugugaaguugcuggcga

SEQ ID NO: 1874115 - RNA, 19 nt, Artificial Sequence
  Description of Artificial Sequence: Synthetic oligonucleotide
aguggaaaugcacagggcu

SEQ ID NO: 1874116 - RNA, 19 nt, Artificial Sequence
  Description of Artificial Sequence: Synthetic oligonucleotide
acugcauauagcugaagag

SEQ ID NO: 1874117 - RNA, 19 nt, Artificial Sequence
  Description of Artificial Sequence: Synthetic oligonucleotide
uguaggaguaguagaaaga

SEQ ID NO: 1874118 - RNA, 19 nt, Artificial Sequence
  Description of Artificial Sequence: Synthetic oligonucleotide
guagaaagagccauagagg

SEQ ID NO: 1874119 - RNA, 19 nt, Artificial Sequence
  Description of Artificial Sequence: Synthetic oligonucleotide
caagucuugauuucacggg

SEQ ID NO: 1874120 - RNA, 19 nt, Artificial Sequence
  Description of Artificial Sequence: Synthetic oligonucleotide
agcgugaagaaguagagau

SEQ ID NO: 1874121 - RNA, 19 nt, Artificial Sequence
  Description of Artificial Sequence: Synthetic oligonucleotide
aaguuguacagcagguacc

SEQ ID NO: 1874122 - RNA, 19 nt, Artificial Sequence
  Description of Artificial Sequence: Synthetic oligonucleotide
aagagaagcgguguugggg

SEQ ID NO: 1874123 - RNA, 19 nt, Artificial Sequence
  Description of Artificial Sequence: Synthetic oligonucleotide
agggacgauacccuuggcc

SEQ ID NO: 1874124 - RNA, 19 nt, Artificial Sequence
  Description of Artificial Sequence: Synthetic oligonucleotide
auggccuacuuccugggcc

SEQ ID NO: 1874125 - RNA, 19 nt, Artificial Sequence
  Description of Artificial Sequence: Synthetic oligonucleotide
ugguauagcaugaaacagu

SEQ ID NO: 1874126 - RNA, 19 nt, Artificial Sequence
  Description of Artificial Sequence: Synthetic oligonucleotide
uauuggugggucauugacc

SEQ ID NO: 1874127 - RNA, 19 nt, Artificial Sequence
  Description of Artificial Sequence: Synthetic oligonucleotide
cucugguauagcaugaaac

SEQ ID NO: 1874128 - RNA, 19 nt, Artificial Sequence
  Description of Artificial Sequence: Synthetic oligonucleotide
aaagagaagcgguguuggg

SEQ ID NO: 1874129 - RNA, 19 nt, Artificial Sequence
  Description of Artificial Sequence: Synthetic oligonucleotide
auacgaauucucccuauag

SEQ ID NO: 1874130 - RNA, 19 nt, Artificial Sequence
  Description of Artificial Sequence: Synthetic oligonucleotide
ugggucauugaccaugaug

SEQ ID NO: 1874131 - RNA, 19 nt, Artificial Sequence
  Description of Artificial Sequence: Synthetic oligonucleotide
cauauagcugaagagcacg

SEQ ID NO: 1874132 - RNA, 19 nt, Artificial Sequence
  Description of Artificial Sequence: Synthetic oligonucleotide
agaagagcacccaaacugc

SEQ ID NO: 1874133 - RNA, 19 nt, Artificial Sequence
  Description of Artificial Sequence: Synthetic oligonucleotide
guaggaguaguagaaagag

SEQ ID NO: 1874134 - RNA, 19 nt, Artificial Sequence
  Description of Artificial Sequence: Synthetic oligonucleotide
uguggaucucaauaacugc

SEQ ID NO: 1874135 - RNA, 19 nt, Artificial Sequence
  Description of Artificial Sequence: Synthetic oligonucleotide
uugaccaugauggggacag

SEQ ID NO: 1874136 - RNA, 19 nt, Artificial Sequence
  Description of Artificial Sequence: Synthetic oligonucleotide
aauuccugguuggucuucc

SEQ ID NO: 1874137 - RNA, 19 nt, Artificial Sequence
  Description of Artificial Sequence: Synthetic oligonucleotide
ugguuggucuuccacgagg

SEQ ID NO: 1874138 - RNA, 19 nt, Artificial Sequence
  Description of Artificial Sequence: Synthetic oligonucleotide
aguccgaguagacuucuac

SEQ ID NO: 1874139 - RNA, 19 nt, Artificial Sequence
  Description of Artificial Sequence: Synthetic oligonucleotide
guagacuucuaccuccagg

SEQ ID NO: 1874140 - RNA, 19 nt, Artificial Sequence
  Description of Artificial Sequence: Synthetic oligonucleotide
aauaggaggauggugcaga

SEQ ID NO: 1874141 - RNA, 19 nt, Artificial Sequence
  Description of Artificial Sequence: Synthetic oligonucleotide
gacauggccuacuuccugg

SEQ ID NO: 1874142 - RNA, 19 nt, Artificial Sequence
  Description of Artificial Sequence: Synthetic oligonucleotide
cuguccauacaucagcacc

SEQ ID NO: 1874143 - RNA, 19 nt, Artificial Sequence
  Description of Artificial Sequence: Synthetic oligonucleotide
uucuuagccagugagacau

SEQ ID NO: 1874144 - RNA, 19 nt, Artificial Sequence
  Description of Artificial Sequence: Synthetic oligonucleotide
uccgaguagacuucuaccu

SEQ ID NO: 1874145 - RNA, 19 nt, Artificial Sequence
  Description of Artificial Sequence: Synthetic oligonucleotide
ucuagggugacucgauaug

SEQ ID NO: 1874146 - RNA, 19 nt, Artificial Sequence
  Description of Artificial Sequence: Synthetic oligonucleotide
uccugguuggucuuccacg

SEQ ID NO: 1874147 - RNA, 19 nt, Artificial Sequence
  Description of Artificial Sequence: Synthetic oligonucleotide
uuugucggauauuaaccug

SEQ ID NO: 1874148 - RNA, 19 nt, Artificial Sequence
  Description of Artificial Sequence: Synthetic oligonucleotide
gacuucuaccuccaggagc

SEQ ID NO: 1874149 - RNA, 19 nt, Artificial Sequence
  Description of Artificial Sequence: Synthetic oligonucleotide
cuguggaucucaauaacug

SEQ ID NO: 1874150 - RNA, 19 nt, Artificial Sequence
  Description of Artificial Sequence: Synthetic oligonucleotide
cugacugcugcguagacuc

SEQ ID NO: 1874151 - RNA, 19 nt, Artificial Sequence
  Description of Artificial Sequence: Synthetic oligonucleotide
cuccucuccauucaggggc

SEQ ID NO: 1874152 - RNA, 19 nt, Artificial Sequence
  Description of Artificial Sequence: Synthetic oligonucleotide
ugucaagcauucuggagca

SEQ ID NO: 1874153 - RNA, 19 nt, Artificial Sequence
  Description of Artificial Sequence: Synthetic oligonucleotide
gaugcuggguacccugucg

SEQ ID NO: 1874154 - RNA, 19 nt, Artificial Sequence
  Description of Artificial Sequence: Synthetic oligonucleotide
aguagagaugauucggcca

SEQ ID NO: 1874155 - RNA, 19 nt, Artificial Sequence
  Description of Artificial Sequence: Synthetic oligonucleotide
ucggagguaagcuccauac

SEQ ID NO: 1874156 - RNA, 19 nt, Artificial Sequence
  Description of Artificial Sequence: Synthetic oligonucleotide
gugggcauggauucggagg

SEQ ID NO: 1874157 - RNA, 19 nt, Artificial Sequence
  Description of Artificial Sequence: Synthetic oligonucleotide
guaguagaaagagccauag

SEQ ID NO: 1874158 - RNA, 19 nt, Artificial Sequence
  Description of Artificial Sequence: Synthetic oligonucleotide
uccacgagggacgauaccc

SEQ ID NO: 1874159 - RNA, 19 nt, Artificial Sequence
  Description of Artificial Sequence: Synthetic oligonucleotide
uagcaaagcugcaucuucc

SEQ ID NO: 1874160 - RNA, 19 nt, Artificial Sequence
  Description of Artificial Sequence: Synthetic oligonucleotide
uuguuagcaaagcugcauc

SEQ ID NO: 1874161 - RNA, 19 nt, Artificial Sequence
  Description of Artificial Sequence: Synthetic oligonucleotide
gaaugugaaguugcuggcg

SEQ ID NO: 1874162 - RNA, 19 nt, Artificial Sequence
  Description of Artificial Sequence: Synthetic oligonucleotide
ugggcauggauucggaggu

SEQ ID NO: 1874163 - RNA, 19 nt, Artificial Sequence
  Description of Artificial Sequence: Synthetic oligonucleotide
caaagagaagcgguguugg

SEQ ID NO: 1874164 - RNA, 19 nt, Artificial Sequence
  Description of Artificial Sequence: Synthetic oligonucleotide
uggcacauacgaauucucc

SEQ ID NO: 1874165 - RNA, 19 nt, Artificial Sequence
  Description of Artificial Sequence: Synthetic oligonucleotide
agguaagcuccauacagcu

SEQ ID NO: 1874166 - RNA, 19 nt, Artificial Sequence
  Description of Artificial Sequence: Synthetic oligonucleotide
uccuguaguggaaaugcac

SEQ ID NO: 1874167 - RNA, 19 nt, Artificial Sequence
  Description of Artificial Sequence: Synthetic oligonucleotide
aucucaauaacugcuccag

SEQ ID NO: 1874168 - RNA, 19 nt, Artificial Sequence
  Description of Artificial Sequence: Synthetic oligonucleotide
auauuaaccugcaaagaga

SEQ ID NO: 1874169 - RNA, 19 nt, Artificial Sequence
  Description of Artificial Sequence: Synthetic oligonucleotide
augcacagggcugaggugg

SEQ ID NO: 1874170 - RNA, 19 nt, Artificial Sequence
  Description of Artificial Sequence: Synthetic oligonucleotide
cuagggugacucgauaugg

SEQ ID NO: 1874171 - RNA, 19 nt, Artificial Sequence
  Description of Artificial Sequence: Synthetic oligonucleotide
agaggaucuagccccagcu

SEQ ID NO: 1874172 - RNA, 19 nt, Artificial Sequence
  Description of Artificial Sequence: Synthetic oligonucleotide
uagcaugaaacagugacua

SEQ ID NO: 1874173 - RNA, 19 nt, Artificial Sequence
  Description of Artificial Sequence: Synthetic oligonucleotide
guauuggugggucauugac

SEQ ID NO: 1874174 - RNA, 19 nt, Artificial Sequence
  Description of Artificial Sequence: Synthetic oligonucleotide
ucaagcauucuggagcagc

SEQ ID NO: 1874175 - RNA, 19 nt, Artificial Sequence
  Description of Artificial Sequence: Synthetic oligonucleotide
uccauucaggggcugacgu

SEQ ID NO: 1874176 - RNA, 19 nt, Artificial Sequence
  Description of Artificial Sequence: Synthetic oligonucleotide
aaugcacagggcugaggug

SEQ ID NO: 1874177 - RNA, 19 nt, Artificial Sequence
  Description of Artificial Sequence: Synthetic oligonucleotide
ccuuugucggauauuaacc

SEQ ID NO: 1874178 - RNA, 19 nt, Artificial Sequence
  Description of Artificial Sequence: Synthetic oligonucleotide
gaagugggcauggauucgg

SEQ ID NO: 1874179 - RNA, 19 nt, Artificial Sequence
  Description of Artificial Sequence: Synthetic oligonucleotide
ucucccuauaguccgagua

SEQ ID NO: 1874180 - RNA, 19 nt, Artificial Sequence
  Description of Artificial Sequence: Synthetic oligonucleotide
cugguauagcaugaaacag

SEQ ID NO: 1874181 - RNA, 19 nt, Artificial Sequence
  Description of Artificial Sequence: Synthetic oligonucleotide
uuuguuagcaaagcugcau

SEQ ID NO: 1874182 - RNA, 19 nt, Artificial Sequence
  Description of Artificial Sequence: Synthetic oligonucleotide
uauaguccgaguagacuuc

SEQ ID NO: 1874183 - RNA, 19 nt, Artificial Sequence
  Description of Artificial Sequence: Synthetic oligonucleotide
gcuggcgacacccacaaag

SEQ ID NO: 1874184 - RNA, 19 nt, Artificial Sequence
  Description of Artificial Sequence: Synthetic oligonucleotide
gucauagggaaguuguaca

SEQ ID NO: 1874185 - RNA, 19 nt, Artificial Sequence
  Description of Artificial Sequence: Synthetic oligonucleotide
gcuccauacagcuggaugc

SEQ ID NO: 1874186 - RNA, 19 nt, Artificial Sequence
  Description of Artificial Sequence: Synthetic oligonucleotide
agcuccauacagcuggaug

SEQ ID NO: 1874187 - RNA, 19 nt, Artificial Sequence
  Description of Artificial Sequence: Synthetic oligonucleotide
uccucugucacgucugacu

SEQ ID NO: 1874188 - RNA, 19 nt, Artificial Sequence
  Description of Artificial Sequence: Synthetic oligonucleotide
cuggguacccugucgagag

SEQ ID NO: 1874189 - RNA, 19 nt, Artificial Sequence
  Description of Artificial Sequence: Synthetic oligonucleotide
gaucacguccauucuuagc

SEQ ID NO: 1874190 - RNA, 19 nt, Artificial Sequence
  Description of Artificial Sequence: Synthetic oligonucleotide
gacgcugaggaaugugaag

SEQ ID NO: 1874191 - RNA, 19 nt, Artificial Sequence
  Description of Artificial Sequence: Synthetic oligonucleotide
gguauagcaugaaacagug

SEQ ID NO: 1874192 - RNA, 19 nt, Artificial Sequence
  Description of Artificial Sequence: Synthetic oligonucleotide
gaugauucggccaccucug

SEQ ID NO: 1874193 - RNA, 19 nt, Artificial Sequence
  Description of Artificial Sequence: Synthetic oligonucleotide
aaccugcaaagagaagcgg

SEQ ID NO: 1874194 - RNA, 19 nt, Artificial Sequence
  Description of Artificial Sequence: Synthetic oligonucleotide
auacaucagcacccgauca

SEQ ID NO: 1874195 - RNA, 19 nt, Artificial Sequence
  Description of Artificial Sequence: Synthetic oligonucleotide
gaucucaauaacugcucca

SEQ ID NO: 1874196 - RNA, 19 nt, Artificial Sequence
  Description of Artificial Sequence: Synthetic oligonucleotide
guaaugcagcaucacugag

SEQ ID NO: 1874197 - RNA, 19 nt, Artificial Sequence
  Description of Artificial Sequence: Synthetic oligonucleotide
uugcuguggaucucaauaa

SEQ ID NO: 1874198 - RNA, 19 nt, Artificial Sequence
  Description of Artificial Sequence: Synthetic oligonucleotide
ugcuguggaucucaauaac

SEQ ID NO: 1874199 - RNA, 19 nt, Artificial Sequence
  Description of Artificial Sequence: Synthetic oligonucleotide
augugaaguugcuggcgac

SEQ ID NO: 1874200 - RNA, 19 nt, Artificial Sequence
  Description of Artificial Sequence: Synthetic oligonucleotide
ugucggauauuaaccugca

SEQ ID NO: 1874201 - RNA, 19 nt, Artificial Sequence
  Description of Artificial Sequence: Synthetic oligonucleotide
cugggagcgguaaugcagc

SEQ ID NO: 1874202 - RNA, 19 nt, Artificial Sequence
  Description of Artificial Sequence: Synthetic oligonucleotide
cucccuauaguccgaguag

SEQ ID NO: 1874203 - RNA, 19 nt, Artificial Sequence
  Description of Artificial Sequence: Synthetic oligonucleotide
ucugucacgucugacugcu

SEQ ID NO: 1874204 - RNA, 19 nt, Artificial Sequence
  Description of Artificial Sequence: Synthetic oligonucleotide
uagggugacucgauauggc

SEQ ID NO: 1874205 - RNA, 19 nt, Artificial Sequence
  Description of Artificial Sequence: Synthetic oligonucleotide
ugacuaagaacaugcccaa

SEQ ID NO: 1874206 - RNA, 19 nt, Artificial Sequence
  Description of Artificial Sequence: Synthetic oligonucleotide
ggaacacagacacccagag

SEQ ID NO: 1874207 - RNA, 19 nt, Artificial Sequence
  Description of Artificial Sequence: Synthetic oligonucleotide
uuggucuuccacgagggac

SEQ ID NO: 1874208 - RNA, 19 nt, Artificial Sequence
  Description of Artificial Sequence: Synthetic oligonucleotide
cugagcgugaagaaguaga

SEQ ID NO: 1874209 - RNA, 19 nt, Artificial Sequence
  Description of Artificial Sequence: Synthetic oligonucleotide
cauacaucagcacccgauc

SEQ ID NO: 1874210 - RNA, 19 nt, Artificial Sequence
  Description of Artificial Sequence: Synthetic oligonucleotide
aguuguacagcagguaccu

SEQ ID NO: 1874211 - RNA, 19 nt, Artificial Sequence
  Description of Artificial Sequence: Synthetic oligonucleotide
aagagccauagaggaacac

SEQ ID NO: 1874212 - RNA, 19 nt, Artificial Sequence
  Description of Artificial Sequence: Synthetic oligonucleotide
caguuguuggcacauacga

SEQ ID NO: 1874213 - RNA, 19 nt, Artificial Sequence
  Description of Artificial Sequence: Synthetic oligonucleotide
uaguggaaaugcacagggc

SEQ ID NO: 1874214 - RNA, 19 nt, Artificial Sequence
  Description of Artificial Sequence: Synthetic oligonucleotide
uggaaaugcacagggcuga

SEQ ID NO: 1874215 - RNA, 19 nt, Artificial Sequence
  Description of Artificial Sequence: Synthetic oligonucleotide
ggcacauacgaauucuccc

SEQ ID NO: 1874216 - RNA, 19 nt, Artificial Sequence
  Description of Artificial Sequence: Synthetic oligonucleotide
ucucaauaacugcuccagu

SEQ ID NO: 1874217 - RNA, 19 nt, Artificial Sequence
  Description of Artificial Sequence: Synthetic oligonucleotide
gagguaagcuccauacagc

SEQ ID NO: 1874218 - RNA, 19 nt, Artificial Sequence
  Description of Artificial Sequence: Synthetic oligonucleotide
acaaaggcgcaggucauag

SEQ ID NO: 1874219 - RNA, 19 nt, Artificial Sequence
  Description of Artificial Sequence: Synthetic oligonucleotide
cacccgaucacguccauuc

SEQ ID NO: 1874220 - RNA, 19 nt, Artificial Sequence
  Description of Artificial Sequence: Synthetic oligonucleotide
ucgauauggcuguccauac

SEQ ID NO: 1874221 - RNA, 19 nt, Artificial Sequence
  Description of Artificial Sequence: Synthetic oligonucleotide
guccgaguagacuucuacc

SEQ ID NO: 1874222 - RNA, 19 nt, Artificial Sequence
  Description of Artificial Sequence: Synthetic oligonucleotide
gcaugaaacagugacuaag

SEQ ID NO: 1874223 - RNA, 19 nt, Artificial Sequence
  Description of Artificial Sequence: Synthetic oligonucleotide
ucgagagcuaucccuuugu

SEQ ID NO: 1874224 - RNA, 19 nt, Artificial Sequence
  Description of Artificial Sequence: Synthetic oligonucleotide
augaaacagugacuaagaa

SEQ ID NO: 1874225 - RNA, 19 nt, Artificial Sequence
  Description of Artificial Sequence: Synthetic oligonucleotide
guuguuggcacauacgaau

SEQ ID NO: 1874226 - RNA, 19 nt, Artificial Sequence
  Description of Artificial Sequence: Synthetic oligonucleotide
gauggcgagagguccgaug

SEQ ID NO: 1874227 - RNA, 19 nt, Artificial Sequence
  Description of Artificial Sequence: Synthetic oligonucleotide
gcuuugaauuccugguugg

SEQ ID NO: 1874228 - RNA, 19 nt, Artificial Sequence
  Description of Artificial Sequence: Synthetic oligonucleotide
aucagcacccgaucacguc

SEQ ID NO: 1874229 - RNA, 19 nt, Artificial Sequence
  Description of Artificial Sequence: Synthetic oligonucleotide
ucaccauccucugucacgu

SEQ ID NO: 1874230 - RNA, 19 nt, Artificial Sequence
  Description of Artificial Sequence: Synthetic oligonucleotide
gaacacagacacccagagc

SEQ ID NO: 1874231 - RNA, 19 nt, Artificial Sequence
  Description of Artificial Sequence: Synthetic oligonucleotide
auagaggaacacagacacc

SEQ ID NO: 1874232 - RNA, 19 nt, Artificial Sequence
  Description of Artificial Sequence: Synthetic oligonucleotide
guggaggaaucacagucug

SEQ ID NO: 1874233 - RNA, 19 nt, Artificial Sequence
  Description of Artificial Sequence: Synthetic oligonucleotide
gacucgauauggcugucca

SEQ ID NO: 1874234 - RNA, 19 nt, Artificial Sequence
  Description of Artificial Sequence: Synthetic oligonucleotide
uggcugaccagucggcaug

SEQ ID NO: 1874235 - RNA, 19 nt, Artificial Sequence
  Description of Artificial Sequence: Synthetic oligonucleotide
acgcugaggaaugugaagu

SEQ ID NO: 1874236 - RNA, 19 nt, Artificial Sequence
  Description of Artificial Sequence: Synthetic oligonucleotide
uccgaugcuggguacccug

SEQ ID NO: 1874237 - RNA, 19 nt, Artificial Sequence
  Description of Artificial Sequence: Synthetic oligonucleotide
caagcucuagggugacucg

SEQ ID NO: 1874238 - RNA, 19 nt, Artificial Sequence
  Description of Artificial Sequence: Synthetic oligonucleotide
uggauucggagguaagcuc

SEQ ID NO: 1874239 - RNA, 19 nt, Artificial Sequence
  Description of Artificial Sequence: Synthetic oligonucleotide
agacacccagagcaauagg

SEQ ID NO: 1874240 - RNA, 19 nt, Artificial Sequence
  Description of Artificial Sequence: Synthetic oligonucleotide
cacugcauauagcugaaga

SEQ ID NO: 1874241 - RNA, 19 nt, Artificial Sequence
  Description of Artificial Sequence: Synthetic oligonucleotide
uggcgacacccacaaaggc

SEQ ID NO: 1874242 - RNA, 19 nt, Artificial Sequence
  Description of Artificial Sequence: Synthetic oligonucleotide
uuggcacauacgaauucuc

SEQ ID NO: 1874243 - RNA, 19 nt, Artificial Sequence
  Description of Artificial Sequence: Synthetic oligonucleotide
ggaucucaauaacugcucc

SEQ ID NO: 1874244 - RNA, 19 nt, Artificial Sequence
  Description of Artificial Sequence: Synthetic oligonucleotide
uggccuacuuccugggccc

SEQ ID NO: 1874245 - RNA, 19 nt, Artificial Sequence
  Description of Artificial Sequence: Synthetic oligonucleotide
agacuucuaccuccaggag

SEQ ID NO: 1874246 - RNA, 19 nt, Artificial Sequence
  Description of Artificial Sequence: Synthetic oligonucleotide
ucuuccacgagggacgaua

SEQ ID NO: 1874247 - RNA, 19 nt, Artificial Sequence
  Description of Artificial Sequence: Synthetic oligonucleotide
acggccugccaagacaugg

SEQ ID NO: 1874248 - RNA, 19 nt, Artificial Sequence
  Description of Artificial Sequence: Synthetic oligonucleotide
agugggcauggauucggag

SEQ ID NO: 1874249 - RNA, 19 nt, Artificial Sequence
  Description of Artificial Sequence: Synthetic oligonucleotide
cuuagccagugagacauug

SEQ ID NO: 1874250 - RNA, 19 nt, Artificial Sequence
  Description of Artificial Sequence: Synthetic oligonucleotide
gguaaugcagcaucacuga

SEQ ID NO: 1874251 - RNA, 19 nt, Artificial Sequence
  Description of Artificial Sequence: Synthetic oligonucleotide
ugauucggccaccucuggu

SEQ ID NO: 1874252 - RNA, 19 nt, Artificial Sequence
  Description of Artificial Sequence: Synthetic oligonucleotide
cuuugucggauauuaaccu

SEQ ID NO: 1874253 - RNA, 19 nt, Artificial Sequence
  Description of Artificial Sequence: Synthetic oligonucleotide
gauucggccaccucuggua

SEQ ID NO: 1874254 - RNA, 19 nt, Artificial Sequence
  Description of Artificial Sequence: Synthetic oligonucleotide
ucggccaccucugguauag

SEQ ID NO: 1874255 - RNA, 19 nt, Artificial Sequence
  Description of Artificial Sequence: Synthetic oligonucleotide
ucccuauaguccgaguaga

SEQ ID NO: 1874256 - RNA, 19 nt, Artificial Sequence
  Description of Artificial Sequence: Synthetic oligonucleotide
gaugacgcugaggaaugug

SEQ ID NO: 1874257 - RNA, 19 nt, Artificial Sequence
  Description of Artificial Sequence: Synthetic oligonucleotide
aacaugcccaagucuugau

SEQ ID NO: 1874258 - RNA, 19 nt, Artificial Sequence
  Description of Artificial Sequence: Synthetic oligonucleotide
cugaccagucggcauguag

SEQ ID NO: 1874259 - RNA, 19 nt, Artificial Sequence
  Description of Artificial Sequence: Synthetic oligonucleotide
agcaacagccugcgugcac

SEQ ID NO: 1874260 - RNA, 19 nt, Artificial Sequence
  Description of Artificial Sequence: Synthetic oligonucleotide
gggacgauacccuuggcca

SEQ ID NO: 1874261 - RNA, 19 nt, Artificial Sequence
  Description of Artificial Sequence: Synthetic oligonucleotide
ugcugcguagacuccuggc

SEQ ID NO: 1874262 - RNA, 19 nt, Artificial Sequence
  Description of Artificial Sequence: Synthetic oligonucleotide
cuccauacagcuggaugcg

SEQ ID NO: 1874263 - RNA, 19 nt, Artificial Sequence
  Description of Artificial Sequence: Synthetic oligonucleotide
guggaaaugcacagggcug

SEQ ID NO: 1874264 - RNA, 19 nt, Artificial Sequence
  Description of Artificial Sequence: Synthetic oligonucleotide
gaccgcuugcccucugucc

SEQ ID NO: 1874265 - RNA, 19 nt, Artificial Sequence
  Description of Artificial Sequence: Synthetic oligonucleotide
cuauaguccgaguagacuu

SEQ ID NO: 1874266 - RNA, 19 nt, Artificial Sequence
  Description of Artificial Sequence: Synthetic oligonucleotide
ggauucggagguaagcucc

SEQ ID NO: 1874267 - RNA, 19 nt, Artificial Sequence
  Description of Artificial Sequence: Synthetic oligonucleotide
aguagacuucuaccuccag

SEQ ID NO: 1874268 - RNA, 19 nt, Artificial Sequence
  Description of Artificial Sequence: Synthetic oligonucleotide
cacguccauucuuagccag

SEQ ID NO: 1874269 - RNA, 19 nt, Artificial Sequence
  Description of Artificial Sequence: Synthetic oligonucleotide
acgucugacugcugcguag

SEQ ID NO: 1874270 - RNA, 19 nt, Artificial Sequence
  Description of Artificial Sequence: Synthetic oligonucleotide
aaagagccauagaggaaca

SEQ ID NO: 1874271 - RNA, 19 nt, Artificial Sequence
  Description of Artificial Sequence: Synthetic oligonucleotide
ggagcgguaaugcagcauc

SEQ ID NO: 1874272 - RNA, 19 nt, Artificial Sequence
  Description of Artificial Sequence: Synthetic oligonucleotide
uaagcuccauacagcugga

SEQ ID NO: 1874273 - RNA, 19 nt, Artificial Sequence
  Description of Artificial Sequence: Synthetic oligonucleotide
cgaauucucccuauagucc

SEQ ID NO: 1874274 - RNA, 19 nt, Artificial Sequence
  Description of Artificial Sequence: Synthetic oligonucleotide
agguauuggugggucauug

SEQ ID NO: 1874275 - RNA, 19 nt, Artificial Sequence
  Description of Artificial Sequence: Synthetic oligonucleotide
gaccagucggcauguagga

SEQ ID NO: 1874276 - RNA, 19 nt, Artificial Sequence
  Description of Artificial Sequence: Synthetic oligonucleotide
gguuggucuuccacgaggg

SEQ ID NO: 1874277 - RNA, 19 nt, Artificial Sequence
  Description of Artificial Sequence: Synthetic oligonucleotide
agaccgcuugcccucuguc

SEQ ID NO: 1874278 - RNA, 19 nt, Artificial Sequence
  Description of Artificial Sequence: Synthetic oligonucleotide
aagcucuagggugacucga

SEQ ID NO: 1874279 - RNA, 19 nt, Artificial Sequence
  Description of Artificial Sequence: Synthetic oligonucleotide
aagacauggccuacuuccu

SEQ ID NO: 1874280 - RNA, 19 nt, Artificial Sequence
  Description of Artificial Sequence: Synthetic oligonucleotide
cuuccacgagggacgauac

SEQ ID NO: 1874281 - RNA, 19 nt, Artificial Sequence
  Description of Artificial Sequence: Synthetic oligonucleotide
cagacacccagagcaauag

SEQ ID NO: 1874282 - RNA, 19 nt, Artificial Sequence
  Description of Artificial Sequence: Synthetic oligonucleotide
uggaggaaucacagucugu

SEQ ID NO: 1874283 - RNA, 19 nt, Artificial Sequence
  Description of Artificial Sequence: Synthetic oligonucleotide
acccagagcaauaggagga

SEQ ID NO: 1874284 - RNA, 19 nt, Artificial Sequence
  Description of Artificial Sequence: Synthetic oligonucleotide
caaaggcgcaggucauagg

SEQ ID NO: 1874285 - RNA, 19 nt, Artificial Sequence
  Description of Artificial Sequence: Synthetic oligonucleotide
ggucauugaccaugauggg

SEQ ID NO: 1874286 - RNA, 19 nt, Artificial Sequence
  Description of Artificial Sequence: Synthetic oligonucleotide
gaugcgcuugcuguggauc

SEQ ID NO: 1874287 - RNA, 19 nt, Artificial Sequence
  Description of Artificial Sequence: Synthetic oligonucleotide
acauacgaauucucccuau

SEQ ID NO: 1874288 - RNA, 19 nt, Artificial Sequence
  Description of Artificial Sequence: Synthetic oligonucleotide
agagguccgaugcugggua

SEQ ID NO: 1874289 - RNA, 19 nt, Artificial Sequence
  Description of Artificial Sequence: Synthetic oligonucleotide
augcuggguacccugucga

SEQ ID NO: 1874290 - RNA, 19 nt, Artificial Sequence
  Description of Artificial Sequence: Synthetic oligonucleotide
gccuuuguuagcaaagcug

SEQ ID NO: 1874291 - RNA, 19 nt, Artificial Sequence
  Description of Artificial Sequence: Synthetic oligonucleotide
aauaacugcuccaguuguu

SEQ ID NO: 1874292 - RNA, 19 nt, Artificial Sequence
  Description of Artificial Sequence: Synthetic oligonucleotide
gguaccugagcccagugaa

SEQ ID NO: 1874293 - RNA, 19 nt, Artificial Sequence
  Description of Artificial Sequence: Synthetic oligonucleotide
gcugcguagacuccuggcc

SEQ ID NO: 1874294 - RNA, 19 nt, Artificial Sequence
  Description of Artificial Sequence: Synthetic oligonucleotide
augacgcugaggaauguga

SEQ ID NO: 1874295 - RNA, 19 nt, Artificial Sequence
  Description of Artificial Sequence: Synthetic oligonucleotide
uauagcugaagagcacgau

SEQ ID NO: 1874296 - RNA, 19 nt, Artificial Sequence
  Description of Artificial Sequence: Synthetic oligonucleotide
auauagcugaagagcacga

SEQ ID NO: 1874297 - RNA, 19 nt, Artificial Sequence
  Description of Artificial Sequence: Synthetic oligonucleotide
ugcccaagucuugauuuca

SEQ ID NO: 1874298 - RNA, 19 nt, Artificial Sequence
  Description of Artificial Sequence: Synthetic oligonucleotide
aagcauucuggagcagcug

SEQ ID NO: 1874299 - RNA, 19 nt, Artificial Sequence
  Description of Artificial Sequence: Synthetic oligonucleotide
cuuuguuagcaaagcugca

SEQ ID NO: 1874300 - RNA, 19 nt, Artificial Sequence
  Description of Artificial Sequence: Synthetic oligonucleotide
cacacccacugcauauagc

SEQ ID NO: 1874301 - RNA, 19 nt, Artificial Sequence
  Description of Artificial Sequence: Synthetic oligonucleotide
gagaagcgguguuggggcc

SEQ ID NO: 1874302 - RNA, 19 nt, Artificial Sequence
  Description of Artificial Sequence: Synthetic oligonucleotide
aucccuuugucggauauua

SEQ ID NO: 1874303 - RNA, 19 nt, Artificial Sequence
  Description of Artificial Sequence: Synthetic oligonucleotide
cucugucacgucugacugc

SEQ ID NO: 1874304 - RNA, 19 nt, Artificial Sequence
  Description of Artificial Sequence: Synthetic oligonucleotide
gucgagagcuaucccuuug

SEQ ID NO: 1874305 - RNA, 19 nt, Artificial Sequence
  Description of Artificial Sequence: Synthetic oligonucleotide
gaacaugcccaagucuuga

SEQ ID NO: 1874306 - RNA, 19 nt, Artificial Sequence
  Description of Artificial Sequence: Synthetic oligonucleotide
gugagacauuggcaacagg

SEQ ID NO: 1874307 - RNA, 19 nt, Artificial Sequence
  Description of Artificial Sequence: Synthetic oligonucleotide
ccaguuguuggcacauacg

SEQ ID NO: 1874308 - RNA, 19 nt, Artificial Sequence
  Description of Artificial Sequence: Synthetic oligonucleotide
ucggcauguaggaguagua

SEQ ID NO: 1874309 - RNA, 19 nt, Artificial Sequence
  Description of Artificial Sequence: Synthetic oligonucleotide
ggagccaucacuggccucc

SEQ ID NO: 1874310 - RNA, 19 nt, Artificial Sequence
  Description of Artificial Sequence: Synthetic oligonucleotide
guccauacaucagcacccg

SEQ ID NO: 1874311 - RNA, 19 nt, Artificial Sequence
  Description of Artificial Sequence: Synthetic oligonucleotide
agguccgaugcuggguacc

SEQ ID NO: 1874312 - RNA, 19 nt, Artificial Sequence
  Description of Artificial Sequence: Synthetic oligonucleotide
ugacucgauauggcugucc

SEQ ID NO: 1874313 - RNA, 19 nt, Artificial Sequence
  Description of Artificial Sequence: Synthetic oligonucleotide
uuccacgagggacgauacc

SEQ ID NO: 1874314 - RNA, 19 nt, Artificial Sequence
  Description of Artificial Sequence: Synthetic oligonucleotide
cauugaccaugauggggac

SEQ ID NO: 1874315 - RNA, 19 nt, Artificial Sequence
  Description of Artificial Sequence: Synthetic oligonucleotide
aucuagccccagcuucagg

SEQ ID NO: 1874316 - RNA, 19 nt, Artificial Sequence
  Description of Artificial Sequence: Synthetic oligonucleotide
uucggagguaagcuccaua

SEQ ID NO: 1874317 - RNA, 19 nt, Artificial Sequence
  Description of Artificial Sequence: Synthetic oligonucleotide
caggucauagggaaguugu

SEQ ID NO: 1874318 - RNA, 19 nt, Artificial Sequence
  Description of Artificial Sequence: Synthetic oligonucleotide
agguuggccuuuguuagca

SEQ ID NO: 1874319 - RNA, 19 nt, Artificial Sequence
  Description of Artificial Sequence: Synthetic oligonucleotide
caauaggaggauggugcag

SEQ ID NO: 1874320 - RNA, 19 nt, Artificial Sequence
  Description of Artificial Sequence: Synthetic oligonucleotide
gcaacagccugcgugcacg

SEQ ID NO: 1874321 - RNA, 19 nt, Artificial Sequence
  Description of Artificial Sequence: Synthetic oligonucleotide
ccuguaguggaaaugcaca

SEQ ID NO: 1874322 - RNA, 19 nt, Artificial Sequence
  Description of Artificial Sequence: Synthetic oligonucleotide
agcaugaaacagugacuaa

SEQ ID NO: 1874323 - RNA, 19 nt, Artificial Sequence
  Description of Artificial Sequence: Synthetic oligonucleotide
gaguaguagaaagagccau

SEQ ID NO: 1874324 - RNA, 19 nt, Artificial Sequence
  Description of Artificial Sequence: Synthetic oligonucleotide
acaugcccaagucuugauu

SEQ ID NO: 1874325 - RNA, 19 nt, Artificial Sequence
  Description of Artificial Sequence: Synthetic oligonucleotide
ugacugcugcguagacucc

SEQ ID NO: 1874326 - RNA, 19 nt, Artificial Sequence
  Description of Artificial Sequence: Synthetic oligonucleotide
aggcuuugaauuccugguu

SEQ ID NO: 1874327 - RNA, 19 nt, Artificial Sequence
  Description of Artificial Sequence: Synthetic oligonucleotide
auucggccaccucugguau

SEQ ID NO: 1874328 - RNA, 19 nt, Artificial Sequence
  Description of Artificial Sequence: Synthetic oligonucleotide
acgaugacgcugaggaaug

SEQ ID NO: 1874329 - RNA, 19 nt, Artificial Sequence
  Description of Artificial Sequence: Synthetic oligonucleotide
gugugucaagcauucugga

SEQ ID NO: 1874330 - RNA, 19 nt, Artificial Sequence
  Description of Artificial Sequence: Synthetic oligonucleotide
auaguccgaguagacuucu

SEQ ID NO: 1874331 - RNA, 19 nt, Artificial Sequence
  Description of Artificial Sequence: Synthetic oligonucleotide
gcgacacccacaaaggcgc

SEQ ID NO: 1874332 - RNA, 19 nt, Artificial Sequence
  Description of Artificial Sequence: Synthetic oligonucleotide
gaucuagccccagcuucag

SEQ ID NO: 1874333 - RNA, 19 nt, Artificial Sequence
  Description of Artificial Sequence: Synthetic oligonucleotide
cccaagucuugauuucacg

SEQ ID NO: 1874334 - RNA, 19 nt, Artificial Sequence
  Description of Artificial Sequence: Synthetic oligonucleotide
aggcagguauugguggguc

SEQ ID NO: 1874335 - RNA, 19 nt, Artificial Sequence
  Description of Artificial Sequence: Synthetic oligonucleotide
cuggagaacaccagugugu

SEQ ID NO: 1874336 - RNA, 19 nt, Artificial Sequence
  Description of Artificial Sequence: Synthetic oligonucleotide
caacagccugcgugcacgg

SEQ ID NO: 1874337 - RNA, 19 nt, Artificial Sequence
  Description of Artificial Sequence: Synthetic oligonucleotide
cuuggccagugggauagag

SEQ ID NO: 1874338 - RNA, 19 nt, Artificial Sequence
  Description of Artificial Sequence: Synthetic oligonucleotide
cagaaguaggcagguuggc

SEQ ID NO: 1874339 - RNA, 19 nt, Artificial Sequence
  Description of Artificial Sequence: Synthetic oligonucleotide
ggacgauacccuuggccag

SEQ ID NO: 1874340 - RNA, 19 nt, Artificial Sequence
  Description of Artificial Sequence: Synthetic oligonucleotide
aguuguuggcacauacgaa

SEQ ID NO: 1874341 - RNA, 19 nt, Artificial Sequence
  Description of Artificial Sequence: Synthetic oligonucleotide
uggcugauggcgagagguc

SEQ ID NO: 1874342 - RNA, 19 nt, Artificial Sequence
  Description of Artificial Sequence: Synthetic oligonucleotide
ucccuuugucggauauuaa

SEQ ID NO: 1874343 - RNA, 19 nt, Artificial Sequence
  Description of Artificial Sequence: Synthetic oligonucleotide
guaccugagcccagugaag

SEQ ID NO: 1874344 - RNA, 19 nt, Artificial Sequence
  Description of Artificial Sequence: Synthetic oligonucleotide
agcaaggcgguggaggaau

SEQ ID NO: 1874345 - RNA, 19 nt, Artificial Sequence
  Description of Artificial Sequence: Synthetic oligonucleotide
gagaugauucggccaccuc

SEQ ID NO: 1874346 - RNA, 19 nt, Artificial Sequence
  Description of Artificial Sequence: Synthetic oligonucleotide
caugcccaagucuugauuu

SEQ ID NO: 1874347 - RNA, 19 nt, Artificial Sequence
  Description of Artificial Sequence: Synthetic oligonucleotide
gauucggagguaagcucca

SEQ ID NO: 1874348 - RNA, 19 nt, Artificial Sequence
  Description of Artificial Sequence: Synthetic oligonucleotide
gagcgugaagaaguagaga

SEQ ID NO: 1874349 - RNA, 19 nt, Artificial Sequence
  Description of Artificial Sequence: Synthetic oligonucleotide
ccucugucacgucugacug

SEQ ID NO: 1874350 - RNA, 19 nt, Artificial Sequence
  Description of Artificial Sequence: Synthetic oligonucleotide
cuacuuccugggcccacag

SEQ ID NO: 1874351 - RNA, 19 nt, Artificial Sequence
  Description of Artificial Sequence: Synthetic oligonucleotide
gaguagacuucuaccucca

SEQ ID NO: 1874352 - RNA, 19 nt, Artificial Sequence
  Description of Artificial Sequence: Synthetic oligonucleotide
cgugaagaaguagagauga

SEQ ID NO: 1874353 - RNA, 19 nt, Artificial Sequence
  Description of Artificial Sequence: Synthetic oligonucleotide
auugaccaugauggggaca

SEQ ID NO: 1874354 - RNA, 19 nt, Artificial Sequence
  Description of Artificial Sequence: Synthetic oligonucleotide
uggguacccugucgagagc

SEQ ID NO: 1874355 - RNA, 19 nt, Artificial Sequence
  Description of Artificial Sequence: Synthetic oligonucleotide
gggacagcagaggaucuag

SEQ ID NO: 1874356 - RNA, 19 nt, Artificial Sequence
  Description of Artificial Sequence: Synthetic oligonucleotide
cagugagacauuggcaaca

SEQ ID NO: 1874357 - RNA, 19 nt, Artificial Sequence
  Description of Artificial Sequence: Synthetic oligonucleotide
ggugacucgauauggcugu

SEQ ID NO: 1874358 - RNA, 19 nt, Artificial Sequence
  Description of Artificial Sequence: Synthetic oligonucleotide
ugggagcgguaaugcagca

SEQ ID NO: 1874359 - RNA, 19 nt, Artificial Sequence
  Description of Artificial Sequence: Synthetic oligonucleotide
uucucccuauaguccgagu

SEQ ID NO: 1874360 - RNA, 19 nt, Artificial Sequence
  Description of Artificial Sequence: Synthetic oligonucleotide
cugguuggucuuccacgag

SEQ ID NO: 1874361 - RNA, 19 nt, Artificial Sequence
  Description of Artificial Sequence: Synthetic oligonucleotide
caucacugagcgugaagaa

SEQ ID NO: 1874362 - RNA, 19 nt, Artificial Sequence
  Description of Artificial Sequence: Synthetic oligonucleotide
acucgauauggcuguccau

SEQ ID NO: 1874363 - RNA, 19 nt, Artificial Sequence
  Description of Artificial Sequence: Synthetic oligonucleotide
caagcauucuggagcagcu

SEQ ID NO: 1874364 - RNA, 19 nt, Artificial Sequence
  Description of Artificial Sequence: Synthetic oligonucleotide
cauguaggaguaguagaaa

SEQ ID NO: 1874365 - RNA, 19 nt, Artificial Sequence
  Description of Artificial Sequence: Synthetic oligonucleotide
cauacgaauucucccuaua

SEQ ID NO: 1874366 - RNA, 19 nt, Artificial Sequence
  Description of Artificial Sequence: Synthetic oligonucleotide
agccaaacagcaggaggcu

SEQ ID NO: 1874367 - RNA, 19 nt, Artificial Sequence
  Description of Artificial Sequence: Synthetic oligonucleotide
ggaagggagcagagcaagg

SEQ ID NO: 1874368 - RNA, 19 nt, Artificial Sequence
  Description of Artificial Sequence: Synthetic oligonucleotide
gguauuggugggucauuga

SEQ ID NO: 1874369 - RNA, 19 nt, Artificial Sequence
  Description of Artificial Sequence: Synthetic oligonucleotide
accagucggcauguaggag

SEQ ID NO: 1874370 - RNA, 19 nt, Artificial Sequence
  Description of Artificial Sequence: Synthetic oligonucleotide
gcacauacgaauucucccu

SEQ ID NO: 1874371 - RNA, 19 nt, Artificial Sequence
  Description of Artificial Sequence: Synthetic oligonucleotide
gcugauggcgagagguccg

SEQ ID NO: 1874372 - RNA, 19 nt, Artificial Sequence
  Description of Artificial Sequence: Synthetic oligonucleotide
uggcgagagguccgaugcu

SEQ ID NO: 1874373 - RNA, 19 nt, Artificial Sequence
  Description of Artificial Sequence: Synthetic oligonucleotide
aagugggcauggauucgga

SEQ ID NO: 1874374 - RNA, 19 nt, Artificial Sequence
  Description of Artificial Sequence: Synthetic oligonucleotide
gagguccgaugcuggguac

SEQ ID NO: 1874375 - RNA, 19 nt, Artificial Sequence
  Description of Artificial Sequence: Synthetic oligonucleotide
gcacccaaacugcagcaac

SEQ ID NO: 1874376 - RNA, 19 nt, Artificial Sequence
  Description of Artificial Sequence: Synthetic oligonucleotide
agaggaacacagacaccca

SEQ ID NO: 1874377 - RNA, 19 nt, Artificial Sequence
  Description of Artificial Sequence: Synthetic oligonucleotide
cgagggacgauacccuugg

SEQ ID NO: 1874378 - RNA, 19 nt, Artificial Sequence
  Description of Artificial Sequence: Synthetic oligonucleotide
ggaguaguagaaagagcca

SEQ ID NO: 1874379 - RNA, 19 nt, Artificial Sequence
  Description of Artificial Sequence: Synthetic oligonucleotide
acccgaucacguccauucu

SEQ ID NO: 1874380 - RNA, 19 nt, Artificial Sequence
  Description of Artificial Sequence: Synthetic oligonucleotide
guauagcaugaaacaguga

SEQ ID NO: 1874381 - RNA, 19 nt, Artificial Sequence
  Description of Artificial Sequence: Synthetic oligonucleotide
acgagggacgauacccuug

SEQ ID NO: 1874382 - RNA, 19 nt, Artificial Sequence
  Description of Artificial Sequence: Synthetic oligonucleotide
cuggcugauggcgagaggu

SEQ ID NO: 1874383 - RNA, 19 nt, Artificial Sequence
  Description of Artificial Sequence: Synthetic oligonucleotide
gguaagcuccauacagcug

SEQ ID NO: 1874384 - RNA, 19 nt, Artificial Sequence
  Description of Artificial Sequence: Synthetic oligonucleotide
caacagggaagggagcaga

SEQ ID NO: 1874385 - RNA, 19 nt, Artificial Sequence
  Description of Artificial Sequence: Synthetic oligonucleotide
caccucugguauagcauga

SEQ ID NO: 1874386 - RNA, 19 nt, Artificial Sequence
  Description of Artificial Sequence: Synthetic oligonucleotide
gagggacgauacccuuggc

SEQ ID NO: 1874387 - RNA, 19 nt, Artificial Sequence
  Description of Artificial Sequence: Synthetic oligonucleotide
agccaucacuggccucccg

SEQ ID NO: 1874388 - RNA, 19 nt, Artificial Sequence
  Description of Artificial Sequence: Synthetic oligonucleotide
guuggucuuccacgaggga

SEQ ID NO: 1874389 - RNA, 19 nt, Artificial Sequence
  Description of Artificial Sequence: Synthetic oligonucleotide
ucagaccgcuugcccucug

SEQ ID NO: 1874390 - RNA, 19 nt, Artificial Sequence
  Description of Artificial Sequence: Synthetic oligonucleotide
ucuuagccagugagacauu

SEQ ID NO: 1874391 - RNA, 19 nt, Artificial Sequence
  Description of Artificial Sequence: Synthetic oligonucleotide
uucaagcucuagggugacu

SEQ ID NO: 1874392 - RNA, 19 nt, Artificial Sequence
  Description of Artificial Sequence: Synthetic oligonucleotide
cagguaccugagcccagug

SEQ ID NO: 1874393 - RNA, 19 nt, Artificial Sequence
  Description of Artificial Sequence: Synthetic oligonucleotide
gcgugaagaaguagagaug

SEQ ID NO: 1874394 - RNA, 19 nt, Artificial Sequence
  Description of Artificial Sequence: Synthetic oligonucleotide
agcuaucccuuugucggau

SEQ ID NO: 1874395 - RNA, 19 nt, Artificial Sequence
  Description of Artificial Sequence: Synthetic oligonucleotide
gcauauagcugaagagcac

SEQ ID NO: 1874396 - RNA, 19 nt, Artificial Sequence
  Description of Artificial Sequence: Synthetic oligonucleotide
ggcgagagguccgaugcug

SEQ ID NO: 1874397 - RNA, 19 nt, Artificial Sequence
  Description of Artificial Sequence: Synthetic oligonucleotide
acagacacccagagcaaua

SEQ ID NO: 1874398 - RNA, 19 nt, Artificial Sequence
  Description of Artificial Sequence: Synthetic oligonucleotide
uaguccgaguagacuucua

SEQ ID NO: 1874399 - RNA, 19 nt, Artificial Sequence
  Description of Artificial Sequence: Synthetic oligonucleotide
uaucccuuugucggauauu

SEQ ID NO: 1874400 - RNA, 19 nt, Artificial Sequence
  Description of Artificial Sequence: Synthetic oligonucleotide
cccuauaguccgaguagac

SEQ ID NO: 1874401 - RNA, 19 nt, Artificial Sequence
  Description of Artificial Sequence: Synthetic oligonucleotide
ccugguuggucuuccacga

SEQ ID NO: 1874402 - RNA, 19 nt, Artificial Sequence
  Description of Artificial Sequence: Synthetic oligonucleotide
gucggauauuaaccugcaa

SEQ ID NO: 1874403 - RNA, 19 nt, Artificial Sequence
  Description of Artificial Sequence: Synthetic oligonucleotide
ggaucuagccccagcuuca

SEQ ID NO: 1874404 - RNA, 19 nt, Artificial Sequence
  Description of Artificial Sequence: Synthetic oligonucleotide
ccgaguagacuucuaccuc

SEQ ID NO: 1874405 - RNA, 19 nt, Artificial Sequence
  Description of Artificial Sequence: Synthetic oligonucleotide
agcacccaaacugcagcaa

SEQ ID NO: 1874406 - RNA, 19 nt, Artificial Sequence
  Description of Artificial Sequence: Synthetic oligonucleotide
gcgagagguccgaugcugg

SEQ ID NO: 1874407 - RNA, 19 nt, Artificial Sequence
  Description of Artificial Sequence: Synthetic oligonucleotide
cagucggcauguaggagua

SEQ ID NO: 1874408 - RNA, 19 nt, Artificial Sequence
  Description of Artificial Sequence: Synthetic oligonucleotide
gucaagcauucuggagcag

SEQ ID NO: 1874409 - RNA, 19 nt, Artificial Sequence
  Description of Artificial Sequence: Synthetic oligonucleotide
uuggugggucauugaccau

SEQ ID NO: 1874410 - RNA, 19 nt, Artificial Sequence
  Description of Artificial Sequence: Synthetic oligonucleotide
cugcguagacuccuggccu

SEQ ID NO: 1874411 - RNA, 19 nt, Artificial Sequence
  Description of Artificial Sequence: Synthetic oligonucleotide
accucugguauagcaugaa

SEQ ID NO: 1874412 - RNA, 19 nt, Artificial Sequence
  Description of Artificial Sequence: Synthetic oligonucleotide
gucggcauguaggaguagu

SEQ ID NO: 1874413 - RNA, 19 nt, Artificial Sequence
  Description of Artificial Sequence: Synthetic oligonucleotide
gacugcugcguagacuccu

SEQ ID NO: 1874414 - RNA, 19 nt, Artificial Sequence
  Description of Artificial Sequence: Synthetic oligonucleotide
ggaaguuguacagcaggua

SEQ ID NO: 1874415 - RNA, 19 nt, Artificial Sequence
  Description of Artificial Sequence: Synthetic oligonucleotide
ggacagcagaggaucuagc

SEQ ID NO: 1874416 - RNA, 19 nt, Artificial Sequence
  Description of Artificial Sequence: Synthetic oligonucleotide
uucggccaccucugguaua

SEQ ID NO: 1874417 - RNA, 19 nt, Artificial Sequence
  Description of Artificial Sequence: Synthetic oligonucleotide
gacgauacccuuggccagu

SEQ ID NO: 1874418 - RNA, 19 nt, Artificial Sequence
  Description of Artificial Sequence: Synthetic oligonucleotide
cuuugaauuccugguuggu

SEQ ID NO: 1874419 - RNA, 19 nt, Artificial Sequence
  Description of Artificial Sequence: Synthetic oligonucleotide
agcgguguuggggccagau

SEQ ID NO: 1874420 - RNA, 19 nt, Artificial Sequence
  Description of Artificial Sequence: Synthetic oligonucleotide
guuagcaaagcugcaucuu

SEQ ID NO: 1874421 - RNA, 19 nt, Artificial Sequence
  Description of Artificial Sequence: Synthetic oligonucleotide
ggagaacaccaguguguca

SEQ ID NO: 1874422 - RNA, 19 nt, Artificial Sequence
  Description of Artificial Sequence: Synthetic oligonucleotide
gcuguggaucucaauaacu

SEQ ID NO: 1874423 - RNA, 19 nt, Artificial Sequence
  Description of Artificial Sequence: Synthetic oligonucleotide
ccugccaagacauggccua

SEQ ID NO: 1874424 - RNA, 19 nt, Artificial Sequence
  Description of Artificial Sequence: Synthetic oligonucleotide
agucggcauguaggaguag

SEQ ID NO: 1874425 - RNA, 19 nt, Artificial Sequence
  Description of Artificial Sequence: Synthetic oligonucleotide
gagagguccgaugcugggu

SEQ ID NO: 1874426 - RNA, 19 nt, Artificial Sequence
  Description of Artificial Sequence: Synthetic oligonucleotide
gguggaggaaucacagucu

SEQ ID NO: 1874427 - RNA, 19 nt, Artificial Sequence
  Description of Artificial Sequence: Synthetic oligonucleotide
gugcacggccugccaagac

SEQ ID NO: 1874428 - RNA, 19 nt, Artificial Sequence
  Description of Artificial Sequence: Synthetic oligonucleotide
cugucgagagcuaucccuu

SEQ ID NO: 1874429 - RNA, 19 nt, Artificial Sequence
  Description of Artificial Sequence: Synthetic oligonucleotide
cuaucccuuugucggauau

SEQ ID NO: 1874430 - RNA, 19 nt, Artificial Sequence
  Description of Artificial Sequence: Synthetic oligonucleotide
cuagccccagcuucaggcu

SEQ ID NO: 1874431 - RNA, 19 nt, Artificial Sequence
  Description of Artificial Sequence: Synthetic oligonucleotide
caucagcacccgaucacgu

SEQ ID NO: 1874432 - RNA, 19 nt, Artificial Sequence
  Description of Artificial Sequence: Synthetic oligonucleotide
ccagucggcauguaggagu

SEQ ID NO: 1874433 - RNA, 19 nt, Artificial Sequence
  Description of Artificial Sequence: Synthetic oligonucleotide
augcagcaucacugagcgu

SEQ ID NO: 1874434 - RNA, 19 nt, Artificial Sequence
  Description of Artificial Sequence: Synthetic oligonucleotide
caaggcgguggaggaauca

SEQ ID NO: 1874435 - RNA, 19 nt, Artificial Sequence
  Description of Artificial Sequence: Synthetic oligonucleotide
cacggccugccaagacaug

SEQ ID NO: 1874436 - RNA, 19 nt, Artificial Sequence
  Description of Artificial Sequence: Synthetic oligonucleotide
auucggagguaagcuccau

SEQ ID NO: 1874437 - RNA, 19 nt, Artificial Sequence
  Description of Artificial Sequence: Synthetic oligonucleotide
ggcauggauucggagguaa

SEQ ID NO: 1874438 - RNA, 19 nt, Artificial Sequence
  Description of Artificial Sequence: Synthetic oligonucleotide
cauacagcuggaugcgcuu

SEQ ID NO: 1874439 - RNA, 19 nt, Artificial Sequence
  Description of Artificial Sequence: Synthetic oligonucleotide
cgaucacguccauucuuag

SEQ ID NO: 1874440 - RNA, 19 nt, Artificial Sequence
  Description of Artificial Sequence: Synthetic oligonucleotide
acccuuggccagugggaua

SEQ ID NO: 1874441 - RNA, 19 nt, Artificial Sequence
  Description of Artificial Sequence: Synthetic oligonucleotide
cugucacgucugacugcug

SEQ ID NO: 1874442 - RNA, 19 nt, Artificial Sequence
  Description of Artificial Sequence: Synthetic oligonucleotide
ugauggcgagagguccgau

SEQ ID NO: 1874443 - RNA, 19 nt, Artificial Sequence
  Description of Artificial Sequence: Synthetic oligonucleotide
cugauggcgagagguccga

SEQ ID NO: 1874444 - RNA, 19 nt, Artificial Sequence
  Description of Artificial Sequence: Synthetic oligonucleotide
gcguagacuccuggccugg

SEQ ID NO: 1874445 - RNA, 19 nt, Artificial Sequence
  Description of Artificial Sequence: Synthetic oligonucleotide
ccgaucacguccauucuua

SEQ ID NO: 1874446 - RNA, 19 nt, Artificial Sequence
  Description of Artificial Sequence: Synthetic oligonucleotide
gcgguguuggggccagaug

SEQ ID NO: 1874447 - RNA, 19 nt, Artificial Sequence
  Description of Artificial Sequence: Synthetic oligonucleotide
gcuggguacccugucgaga

SEQ ID NO: 1874448 - RNA, 19 nt, Artificial Sequence
  Description of Artificial Sequence: Synthetic oligonucleotide
gguggcugaccagucggca

SEQ ID NO: 1874449 - RNA, 19 nt, Artificial Sequence
  Description of Artificial Sequence: Synthetic oligonucleotide
caccagugugucaagcauu

SEQ ID NO: 1874450 - RNA, 19 nt, Artificial Sequence
  Description of Artificial Sequence: Synthetic oligonucleotide
ugcuggcgacacccacaaa

SEQ ID NO: 1874451 - RNA, 19 nt, Artificial Sequence
  Description of Artificial Sequence: Synthetic oligonucleotide
cacgucugacugcugcgua

SEQ ID NO: 1874452 - RNA, 19 nt, Artificial Sequence
  Description of Artificial Sequence: Synthetic oligonucleotide
gcccaagucuugauuucac

SEQ ID NO: 1874453 - RNA, 19 nt, Artificial Sequence
  Description of Artificial Sequence: Synthetic oligonucleotide
cgagagcuaucccuuuguc

SEQ ID NO: 1874454 - RNA, 19 nt, Artificial Sequence
  Description of Artificial Sequence: Synthetic oligonucleotide
ccauacagcuggaugcgcu

SEQ ID NO: 1874455 - RNA, 19 nt, Artificial Sequence
  Description of Artificial Sequence: Synthetic oligonucleotide
gugacucgauauggcuguc

SEQ ID NO: 1874456 - RNA, 19 nt, Artificial Sequence
  Description of Artificial Sequence: Synthetic oligonucleotide
ggguacccugucgagagcu

SEQ ID NO: 1874457 - RNA, 19 nt, Artificial Sequence
  Description of Artificial Sequence: Synthetic oligonucleotide
gggcugacguggugguuuc

SEQ ID NO: 1874458 - RNA, 19 nt, Artificial Sequence
  Description of Artificial Sequence: Synthetic oligonucleotide
ccucugguauagcaugaaa

SEQ ID NO: 1874459 - RNA, 19 nt, Artificial Sequence
  Description of Artificial Sequence: Synthetic oligonucleotide
cccacaggaaggcagguau

SEQ ID NO: 1874460 - RNA, 19 nt, Artificial Sequence
  Description of Artificial Sequence: Synthetic oligonucleotide
ccuauaguccgaguagacu

SEQ ID NO: 1874461 - RNA, 19 nt, Artificial Sequence
  Description of Artificial Sequence: Synthetic oligonucleotide
gguuggccuuuguuagcaa

SEQ ID NO: 1874462 - RNA, 19 nt, Artificial Sequence
  Description of Artificial Sequence: Synthetic oligonucleotide
cacaaaggcgcaggucaua

SEQ ID NO: 1874463 - RNA, 19 nt, Artificial Sequence
  Description of Artificial Sequence: Synthetic oligonucleotide
gcagcaucacugagcguga

SEQ ID NO: 1874464 - RNA, 19 nt, Artificial Sequence
  Description of Artificial Sequence: Synthetic oligonucleotide
ggucuuccacgagggacga

SEQ ID NO: 1874465 - RNA, 19 nt, Artificial Sequence
  Description of Artificial Sequence: Synthetic oligonucleotide
cagccugcgugcacggccu

SEQ ID NO: 1874466 - RNA, 19 nt, Artificial Sequence
  Description of Artificial Sequence: Synthetic oligonucleotide
cacgagggacgauacccuu

SEQ ID NO: 1874467 - RNA, 19 nt, Artificial Sequence
  Description of Artificial Sequence: Synthetic oligonucleotide
gcuaucccuuugucggaua

SEQ ID NO: 1874468 - RNA, 19 nt, Artificial Sequence
  Description of Artificial Sequence: Synthetic oligonucleotide
cagcaacagccugcgugca

SEQ ID NO: 1874469 - RNA, 19 nt, Artificial Sequence
  Description of Artificial Sequence: Synthetic oligonucleotide
gcgcuugcuguggaucuca

SEQ ID NO: 1874470 - RNA, 19 nt, Artificial Sequence
  Description of Artificial Sequence: Synthetic oligonucleotide
aagcgguguuggggccaga

SEQ ID NO: 1874471 - RNA, 19 nt, Artificial Sequence
  Description of Artificial Sequence: Synthetic oligonucleotide
gggagcagagcaaggcggu

SEQ ID NO: 1874472 - RNA, 19 nt, Artificial Sequence
  Description of Artificial Sequence: Synthetic oligonucleotide
cagaccgcuugcccucugu

SEQ ID NO: 1874473 - RNA, 19 nt, Artificial Sequence
  Description of Artificial Sequence: Synthetic oligonucleotide
cggagguaagcuccauaca

SEQ ID NO: 1874474 - RNA, 19 nt, Artificial Sequence
  Description of Artificial Sequence: Synthetic oligonucleotide
ccacgagggacgauacccu

SEQ ID NO: 1874475 - RNA, 19 nt, Artificial Sequence
  Description of Artificial Sequence: Synthetic oligonucleotide
gguacccugucgagagcua

SEQ ID NO: 1874476 - RNA, 19 nt, Artificial Sequence
  Description of Artificial Sequence: Synthetic oligonucleotide
ggaugcgcuugcuguggau

SEQ ID NO: 1874477 - RNA, 19 nt, Artificial Sequence
  Description of Artificial Sequence: Synthetic oligonucleotide
gcagguaccugagcccagu

SEQ ID NO: 1874478 - RNA, 19 nt, Artificial Sequence
  Description of Artificial Sequence: Synthetic oligonucleotide
gccuacuuccugggcccac

SEQ ID NO: 1874479 - RNA, 19 nt, Artificial Sequence
  Description of Artificial Sequence: Synthetic oligonucleotide
gugggucauugaccaugau

SEQ ID NO: 1874480 - RNA, 19 nt, Artificial Sequence
  Description of Artificial Sequence: Synthetic oligonucleotide
cucagaccgcuugcccucu

SEQ ID NO: 1874481 - RNA, 19 nt, Artificial Sequence
  Description of Artificial Sequence: Synthetic oligonucleotide
ggcugaccagucggcaugu

SEQ ID NO: 1874482 - RNA, 19 nt, Artificial Sequence
  Description of Artificial Sequence: Synthetic oligonucleotide
cagguauuggugggucauu

SEQ ID NO: 1874483 - RNA, 19 nt, Artificial Sequence
  Description of Artificial Sequence: Synthetic oligonucleotide
ccacaaaggcgcaggucau

SEQ ID NO: 1874484 - RNA, 19 nt, Artificial Sequence
  Description of Artificial Sequence: Synthetic oligonucleotide
gggagcgguaaugcagcau

SEQ ID NO: 1874485 - RNA, 19 nt, Artificial Sequence
  Description of Artificial Sequence: Synthetic oligonucleotide
gcccacaggaaggcaggua

SEQ ID NO: 1874486 - RNA, 19 nt, Artificial Sequence
  Description of Artificial Sequence: Synthetic oligonucleotide
cccgaucacguccauucuu

SEQ ID NO: 1874487 - RNA, 19 nt, Artificial Sequence
  Description of Artificial Sequence: Synthetic oligonucleotide
ccgaugcuggguacccugu

SEQ ID NO: 1874488 - RNA, 19 nt, Artificial Sequence
  Description of Artificial Sequence: Synthetic oligonucleotide
gggcauggauucggaggua

SEQ ID NO: 1874489 - RNA, 19 nt, Artificial Sequence
  Description of Artificial Sequence: Synthetic oligonucleotide
cgugcacggccugccaaga

SEQ ID NO: 1874490 - RNA, 19 nt, Artificial Sequence
  Description of Artificial Sequence: Synthetic oligonucleotide
gcugaccagucggcaugua

SEQ ID NO: 1874491 - RNA, 19 nt, Artificial Sequence
  Description of Artificial Sequence: Synthetic oligonucleotide
ccgcuugcccucugucccu

SEQ ID NO: 1874492 - RNA, 19 nt, Artificial Sequence
  Description of Artificial Sequence: Synthetic oligonucleotide
gcacccgaucacguccauu

SEQ ID NO: 1874493 - RNA, 19 nt, Artificial Sequence
  Description of Artificial Sequence: Synthetic oligonucleotide
cgaugacgcugaggaaugu

SEQ ID NO: 1874494 - RNA, 19 nt, Artificial Sequence
  Description of Artificial Sequence: Synthetic oligonucleotide
aaaauuagauaauagauaa

SEQ ID NO: 1874495 - RNA, 19 nt, Artificial Sequence
  Description of Artificial Sequence: Synthetic oligonucleotide
agugauaaaauauggaagg

SEQ ID NO: 1874496 - RNA, 19 nt, Artificial Sequence
  Description of Artificial Sequence: Synthetic oligonucleotide
gaagaaaccauauagugag

SEQ ID NO: 1874497 - RNA, 19 nt, Artificial Sequence
  Description of Artificial Sequence: Synthetic oligonucleotide
ugaacuuuaucacagauga

SEQ ID NO: 1874498 - RNA, 19 nt, Artificial Sequence
  Description of Artificial Sequence: Synthetic oligonucleotide
aaauguuuuaacuuguaug

SEQ ID NO: 1874499 - RNA, 19 nt, Artificial Sequence
  Description of Artificial Sequence: Synthetic oligonucleotide
aagacuggcaagcacaagc

SEQ ID NO: 1874500 - RNA, 19 nt, Artificial Sequence
  Description of Artificial Sequence: Synthetic oligonucleotide
aauuauaacaaucugucau

SEQ ID NO: 1874501 - RNA, 19 nt, Artificial Sequence
  Description of Artificial Sequence: Synthetic oligonucleotide
aauuagauaauagauaaga

SEQ ID NO: 1874502 - RNA, 19 nt, Artificial Sequence
  Description of Artificial Sequence: Synthetic oligonucleotide
uguagauuuccacagaaag

SEQ ID NO: 1874503 - RNA, 19 nt, Artificial Sequence
  Description of Artificial Sequence: Synthetic oligonucleotide
uguagugguauuuugauug

SEQ ID NO: 1874504 - RNA, 19 nt, Artificial Sequence
  Description of Artificial Sequence: Synthetic oligonucleotide
gaaaguaacauucuucugc

SEQ ID NO: 1874505 - RNA, 19 nt, Artificial Sequence
  Description of Artificial Sequence: Synthetic oligonucleotide
uaugcuguaagccaguacc

SEQ ID NO: 1874506 - RNA, 19 nt, Artificial Sequence
  Description of Artificial Sequence: Synthetic oligonucleotide
uuagauaauagauaagaac

SEQ ID NO: 1874507 - RNA, 19 nt, Artificial Sequence
  Description of Artificial Sequence: Synthetic oligonucleotide
uuagaacugaaccaaauac

SEQ ID NO: 1874508 - RNA, 19 nt, Artificial Sequence
  Description of Artificial Sequence: Synthetic oligonucleotide
aaauaugcaaaauuucacu

SEQ ID NO: 1874509 - RNA, 19 nt, Artificial Sequence
  Description of Artificial Sequence: Synthetic oligonucleotide
uguacuguauggaugaaag

SEQ ID NO: 1874510 - RNA, 19 nt, Artificial Sequence
  Description of Artificial Sequence: Synthetic oligonucleotide
uuuguuaacaagaguaggc

SEQ ID NO: 1874511 - RNA, 19 nt, Artificial Sequence
  Description of Artificial Sequence: Synthetic oligonucleotide
uaugaaugcaagccuaugg

SEQ ID NO: 1874512 - RNA, 19 nt, Artificial Sequence
  Description of Artificial Sequence: Synthetic oligonucleotide
accaaccugauuuaguugc

SEQ ID NO: 1874513 - RNA, 19 nt, Artificial Sequence
  Description of Artificial Sequence: Synthetic oligonucleotide
uucuaaauuauaacaaucu

SEQ ID NO: 1874514 - RNA, 19 nt, Artificial Sequence
  Description of Artificial Sequence: Synthetic oligonucleotide
auaauagauaagaacauac

SEQ ID NO: 1874515 - RNA, 19 nt, Artificial Sequence
  Description of Artificial Sequence: Synthetic oligonucleotide
ucuauuucuaugcuguaag

SEQ ID NO: 1874516 - RNA, 19 nt, Artificial Sequence
  Description of Artificial Sequence: Synthetic oligonucleotide
acuuauaccaaccugauuu

SEQ ID NO: 1874517 - RNA, 19 nt, Artificial Sequence
  Description of Artificial Sequence: Synthetic oligonucleotide
aauaucuauuucuaugcug

SEQ ID NO: 1874518 - RNA, 19 nt, Artificial Sequence
  Description of Artificial Sequence: Synthetic oligonucleotide
ucuaaauuauaacaaucug

SEQ ID NO: 1874519 - RNA, 19 nt, Artificial Sequence
  Description of Artificial Sequence: Synthetic oligonucleotide
uuuaguacuuauaccaacc

SEQ ID NO: 1874520 - RNA, 19 nt, Artificial Sequence
  Description of Artificial Sequence: Synthetic oligonucleotide
augauuuaguacuuauacc

SEQ ID NO: 1874521 - RNA, 19 nt, Artificial Sequence
  Description of Artificial Sequence: Synthetic oligonucleotide
uguuuauccagacuguggc

SEQ ID NO: 1874522 - RNA, 19 nt, Artificial Sequence
  Description of Artificial Sequence: Synthetic oligonucleotide
ucagauaugaaugcaagcc

SEQ ID NO: 1874523 - RNA, 19 nt, Artificial Sequence
  Description of Artificial Sequence: Synthetic oligonucleotide
ucuauuuuagaauaucuau

SEQ ID NO: 1874524 - RNA, 19 nt, Artificial Sequence
  Description of Artificial Sequence: Synthetic oligonucleotide
uaaugcauguacuguaugg

SEQ ID NO: 1874525 - RNA, 19 nt, Artificial Sequence
  Description of Artificial Sequence: Synthetic oligonucleotide
aacguguagauuuccacag

SEQ ID NO: 1874526 - RNA, 19 nt, Artificial Sequence
  Description of Artificial Sequence: Synthetic oligonucleotide
uguaagagcuuuauuaccu

SEQ ID NO: 1874527 - RNA, 19 nt, Artificial Sequence
  Description of Artificial Sequence: Synthetic oligonucleotide
auuuccuauugucagcacc

SEQ ID NO: 1874528 - RNA, 19 nt, Artificial Sequence
  Description of Artificial Sequence: Synthetic oligonucleotide
ugaauccucacucacauuc

SEQ ID NO: 1874529 - RNA, 19 nt, Artificial Sequence
  Description of Artificial Sequence: Synthetic oligonucleotide
gauuguaagagcuuuauua

SEQ ID NO: 1874530 - RNA, 19 nt, Artificial Sequence
  Description of Artificial Sequence: Synthetic oligonucleotide
auuuaguacuuauaccaac

SEQ ID NO: 1874531 - RNA, 19 nt, Artificial Sequence
  Description of Artificial Sequence: Synthetic oligonucleotide
uaugcaaaauuucacuaug

SEQ ID NO: 1874532 - RNA, 19 nt, Artificial Sequence
  Description of Artificial Sequence: Synthetic oligonucleotide
uguauaucgguuucuagug

SEQ ID NO: 1874533 - RNA, 19 nt, Artificial Sequence
  Description of Artificial Sequence: Synthetic oligonucleotide
uguuacacagacaugcuga

SEQ ID NO: 1874534 - RNA, 19 nt, Artificial Sequence
  Description of Artificial Sequence: Synthetic oligonucleotide
aauaugcaaaauuucacua

SEQ ID NO: 1874535 - RNA, 19 nt, Artificial Sequence
  Description of Artificial Sequence: Synthetic oligonucleotide
uuucagauaugaaugcaag

SEQ ID NO: 1874536 - RNA, 19 nt, Artificial Sequence
  Description of Artificial Sequence: Synthetic oligonucleotide
cauauagugaggcaugggg

SEQ ID NO: 1874537 - RNA, 19 nt, Artificial Sequence
  Description of Artificial Sequence: Synthetic oligonucleotide
uuuaacuuguaugauuuag

SEQ ID NO: 1874538 - RNA, 19 nt, Artificial Sequence
  Description of Artificial Sequence: Synthetic oligonucleotide
auuauaacaaucugucaug

SEQ ID NO: 1874539 - RNA, 19 nt, Artificial Sequence
  Description of Artificial Sequence: Synthetic oligonucleotide
uguuaacaagaguaggcgg

SEQ ID NO: 1874540 - RNA, 19 nt, Artificial Sequence
  Description of Artificial Sequence: Synthetic oligonucleotide
aaaccuggauuucagauau

SEQ ID NO: 1874541 - RNA, 19 nt, Artificial Sequence
  Description of Artificial Sequence: Synthetic oligonucleotide
agaaaccauauagugaggc

SEQ ID NO: 1874542 - RNA, 19 nt, Artificial Sequence
  Description of Artificial Sequence: Synthetic oligonucleotide
uaggcaaaauauuuuaaca

SEQ ID NO: 1874543 - RNA, 19 nt, Artificial Sequence
  Description of Artificial Sequence: Synthetic oligonucleotide
uuguuaacaagaguaggcg

SEQ ID NO: 1874544 - RNA, 19 nt, Artificial Sequence
  Description of Artificial Sequence: Synthetic oligonucleotide
uacuguauggaugaaagca

SEQ ID NO: 1874545 - RNA, 19 nt, Artificial Sequence
  Description of Artificial Sequence: Synthetic oligonucleotide
ugcuuuguaagagagcagg

SEQ ID NO: 1874546 - RNA, 19 nt, Artificial Sequence
  Description of Artificial Sequence: Synthetic oligonucleotide
auagcaucaaaguaagacu

SEQ ID NO: 1874547 - RNA, 19 nt, Artificial Sequence
  Description of Artificial Sequence: Synthetic oligonucleotide
guaauucuagcacagaaga

SEQ ID NO: 1874548 - RNA, 19 nt, Artificial Sequence
  Description of Artificial Sequence: Synthetic oligonucleotide
cagugauaaaauauggaag

SEQ ID NO: 1874549 - RNA, 19 nt, Artificial Sequence
  Description of Artificial Sequence: Synthetic oligonucleotide
uuucuaugcuguaagccag

SEQ ID NO: 1874550 - RNA, 19 nt, Artificial Sequence
  Description of Artificial Sequence: Synthetic oligonucleotide
auuucuaugcuguaagcca

SEQ ID NO: 1874551 - RNA, 19 nt, Artificial Sequence
  Description of Artificial Sequence: Synthetic oligonucleotide
uuugacaucuucugcuagg

SEQ ID NO: 1874552 - RNA, 19 nt, Artificial Sequence
  Description of Artificial Sequence: Synthetic oligonucleotide
ugauuuaguugcuugaauc

SEQ ID NO: 1874553 - RNA, 19 nt, Artificial Sequence
  Description of Artificial Sequence: Synthetic oligonucleotide
uuuucuaaauuauaacaau

SEQ ID NO: 1874554 - RNA, 19 nt, Artificial Sequence
  Description of Artificial Sequence: Synthetic oligonucleotide
uuguuuauccagacugugg

SEQ ID NO: 1874555 - RNA, 19 nt, Artificial Sequence
  Description of Artificial Sequence: Synthetic oligonucleotide
aaguaagacuggcaagcac

SEQ ID NO: 1874556 - RNA, 19 nt, Artificial Sequence
  Description of Artificial Sequence: Synthetic oligonucleotide
cagaagaaaccauauagug

SEQ ID NO: 1874557 - RNA, 19 nt, Artificial Sequence
  Description of Artificial Sequence: Synthetic oligonucleotide
uuaacuuguaugauuuagu

SEQ ID NO: 1874558 - RNA, 19 nt, Artificial Sequence
  Description of Artificial Sequence: Synthetic oligonucleotide
uaugcuguaaacguguaga

SEQ ID NO: 1874559 - RNA, 19 nt, Artificial Sequence
  Description of Artificial Sequence: Synthetic oligonucleotide
uacacagaaugccuuggcg

SEQ ID NO: 1874560 - RNA, 19 nt, Artificial Sequence
  Description of Artificial Sequence: Synthetic oligonucleotide
ucauaugcuguaaacgugu

SEQ ID NO: 1874561 - RNA, 19 nt, Artificial Sequence
  Description of Artificial Sequence: Synthetic oligonucleotide
ucaccguuuguuaacaaga

SEQ ID NO: 1874562 - RNA, 19 nt, Artificial Sequence
  Description of Artificial Sequence: Synthetic oligonucleotide
aaugccuuggcgugcauca

SEQ ID NO: 1874563 - RNA, 19 nt, Artificial Sequence
  Description of Artificial Sequence: Synthetic oligonucleotide
uauuucuaugcuguaagcc

SEQ ID NO: 1874564 - RNA, 19 nt, Artificial Sequence
  Description of Artificial Sequence: Synthetic oligonucleotide
gaggccuccuuguauaucg

SEQ ID NO: 1874565 - RNA, 19 nt, Artificial Sequence
  Description of Artificial Sequence: Synthetic oligonucleotide
aaucuaugcuuuguaagag

SEQ ID NO: 1874566 - RNA, 19 nt, Artificial Sequence
  Description of Artificial Sequence: Synthetic oligonucleotide
aauacacagaaugccuugg

SEQ ID NO: 1874567 - RNA, 19 nt, Artificial Sequence
  Description of Artificial Sequence: Synthetic oligonucleotide
ucuagugugucaccaacca

SEQ ID NO: 1874568 - RNA, 19 nt, Artificial Sequence
  Description of Artificial Sequence: Synthetic oligonucleotide
ucuucaaguuuucuggacu

SEQ ID NO: 1874569 - RNA, 19 nt, Artificial Sequence
  Description of Artificial Sequence: Synthetic oligonucleotide
ucauguucacaccacagaa

SEQ ID NO: 1874570 - RNA, 19 nt, Artificial Sequence
  Description of Artificial Sequence: Synthetic oligonucleotide
uauaucgguuucuagugug

SEQ ID NO: 1874571 - RNA, 19 nt, Artificial Sequence
  Description of Artificial Sequence: Synthetic oligonucleotide
ucaguucuaacccuguaaa

SEQ ID NO: 1874572 - RNA, 19 nt, Artificial Sequence
  Description of Artificial Sequence: Synthetic oligonucleotide
uacacauugaaaguaggca

SEQ ID NO: 1874573 - RNA, 19 nt, Artificial Sequence
  Description of Artificial Sequence: Synthetic oligonucleotide
aacaagaguaggcggaccu

SEQ ID NO: 1874574 - RNA, 19 nt, Artificial Sequence
  Description of Artificial Sequence: Synthetic oligonucleotide
uaaaauauggaaggugcug

SEQ ID NO: 1874575 - RNA, 19 nt, Artificial Sequence
  Description of Artificial Sequence: Synthetic oligonucleotide
uuguaagagcuuuauuacc

SEQ ID NO: 1874576 - RNA, 19 nt, Artificial Sequence
  Description of Artificial Sequence: Synthetic oligonucleotide
aaguaggcaaaauauuuua

SEQ ID NO: 1874577 - RNA, 19 nt, Artificial Sequence
  Description of Artificial Sequence: Synthetic oligonucleotide
ucugcuagggucauaugcu

SEQ ID NO: 1874578 - RNA, 19 nt, Artificial Sequence
  Description of Artificial Sequence: Synthetic oligonucleotide
uuaguacuuauaccaaccu

SEQ ID NO: 1874579 - RNA, 19 nt, Artificial Sequence
  Description of Artificial Sequence: Synthetic oligonucleotide
uaagccaguaccugcauac

SEQ ID NO: 1874580 - RNA, 19 nt, Artificial Sequence
  Description of Artificial Sequence: Synthetic oligonucleotide
ugcauguacuguauggaug

SEQ ID NO: 1874581 - RNA, 19 nt, Artificial Sequence
  Description of Artificial Sequence: Synthetic oligonucleotide
aaccugauuuaguugcuug

SEQ ID NO: 1874582 - RNA, 19 nt, Artificial Sequence
  Description of Artificial Sequence: Synthetic oligonucleotide
cacauguaagcuaucuugc

SEQ ID NO: 1874583 - RNA, 19 nt, Artificial Sequence
  Description of Artificial Sequence: Synthetic oligonucleotide
guaggcaaaauauuuuaac

SEQ ID NO: 1874584 - RNA, 19 nt, Artificial Sequence
  Description of Artificial Sequence: Synthetic oligonucleotide
uuuguagugguauuuugau

SEQ ID NO: 1874585 - RNA, 19 nt, Artificial Sequence
  Description of Artificial Sequence: Synthetic oligonucleotide
aaauuagauaauagauaag

SEQ ID NO: 1874586 - RNA, 19 nt, Artificial Sequence
  Description of Artificial Sequence: Synthetic oligonucleotide
auaucuauuucuaugcugu

SEQ ID NO: 1874587 - RNA, 19 nt, Artificial Sequence
  Description of Artificial Sequence: Synthetic oligonucleotide
aaaaccuggauuucagaua

SEQ ID NO: 1874588 - RNA, 19 nt, Artificial Sequence
  Description of Artificial Sequence: Synthetic oligonucleotide
cucuuugcgaaguucagug

SEQ ID NO: 1874589 - RNA, 19 nt, Artificial Sequence
  Description of Artificial Sequence: Synthetic oligonucleotide
aauuuccuauugucagcac

SEQ ID NO: 1874590 - RNA, 19 nt, Artificial Sequence
  Description of Artificial Sequence: Synthetic oligonucleotide
auacacagaaugccuuggc

SEQ ID NO: 1874591 - RNA, 19 nt, Artificial Sequence
  Description of Artificial Sequence: Synthetic oligonucleotide
cauacacauugaaaguagg

SEQ ID NO: 1874592 - RNA, 19 nt, Artificial Sequence
  Description of Artificial Sequence: Synthetic oligonucleotide
uaguacuuauaccaaccug

SEQ ID NO: 1874593 - RNA, 19 nt, Artificial Sequence
  Description of Artificial Sequence: Synthetic oligonucleotide
ucuccuccuacaacaauag

SEQ ID NO: 1874594 - RNA, 19 nt, Artificial Sequence
  Description of Artificial Sequence: Synthetic oligonucleotide
aaugcauguacuguaugga

SEQ ID NO: 1874595 - RNA, 19 nt, Artificial Sequence
  Description of Artificial Sequence: Synthetic oligonucleotide
agggucauaugcuguaaac

SEQ ID NO: 1874596 - RNA, 19 nt, Artificial Sequence
  Description of Artificial Sequence: Synthetic oligonucleotide
uaaacguguagauuuccac

SEQ ID NO: 1874597 - RNA, 19 nt, Artificial Sequence
  Description of Artificial Sequence: Synthetic oligonucleotide
cuuugcgaaguucagugag

SEQ ID NO: 1874598 - RNA, 19 nt, Artificial Sequence
  Description of Artificial Sequence: Synthetic oligonucleotide
uauaccaaccugauuuagu

SEQ ID NO: 1874599 - RNA, 19 nt, Artificial Sequence
  Description of Artificial Sequence: Synthetic oligonucleotide
aaaccauauagugaggcau

SEQ ID NO: 1874600 - RNA, 19 nt, Artificial Sequence
  Description of Artificial Sequence: Synthetic oligonucleotide
aguucuaacccuguaaacu

SEQ ID NO: 1874601 - RNA, 19 nt, Artificial Sequence
  Description of Artificial Sequence: Synthetic oligonucleotide
uguuuuaacuuguaugauu

SEQ ID NO: 1874602 - RNA, 19 nt, Artificial Sequence
  Description of Artificial Sequence: Synthetic oligonucleotide
uaacuuguaugauuuagua

SEQ ID NO: 1874603 - RNA, 19 nt, Artificial Sequence
  Description of Artificial Sequence: Synthetic oligonucleotide
aaugcaagccuaugguuau

SEQ ID NO: 1874604 - RNA, 19 nt, Artificial Sequence
  Description of Artificial Sequence: Synthetic oligonucleotide
acacauugaaaguaggcaa

SEQ ID NO: 1874605 - RNA, 19 nt, Artificial Sequence
  Description of Artificial Sequence: Synthetic oligonucleotide
cauucuuagaacugaacca

SEQ ID NO: 1874606 - RNA, 19 nt, Artificial Sequence
  Description of Artificial Sequence: Synthetic oligonucleotide
cagcagugauaaaauaugg

SEQ ID NO: 1874607 - RNA, 19 nt, Artificial Sequence
  Description of Artificial Sequence: Synthetic oligonucleotide
uuucuagugugucaccaac

SEQ ID NO: 1874608 - RNA, 19 nt, Artificial Sequence
  Description of Artificial Sequence: Synthetic oligonucleotide
auguucacaccacagaaaa

SEQ ID NO: 1874609 - RNA, 19 nt, Artificial Sequence
  Description of Artificial Sequence: Synthetic oligonucleotide
uaagcuaucuugccuuucu

SEQ ID NO: 1874610 - RNA, 19 nt, Artificial Sequence
  Description of Artificial Sequence: Synthetic oligonucleotide
auaugcaaaauuucacuau

SEQ ID NO: 1874611 - RNA, 19 nt, Artificial Sequence
  Description of Artificial Sequence: Synthetic oligonucleotide
ucuaacccuguaaacuggc

SEQ ID NO: 1874612 - RNA, 19 nt, Artificial Sequence
  Description of Artificial Sequence: Synthetic oligonucleotide
agcuaucuugccuuucuuc

SEQ ID NO: 1874613 - RNA, 19 nt, Artificial Sequence
  Description of Artificial Sequence: Synthetic oligonucleotide
agugaauccucacucacau

SEQ ID NO: 1874614 - RNA, 19 nt, Artificial Sequence
  Description of Artificial Sequence: Synthetic oligonucleotide
ugcauacccacauguaagc

SEQ ID NO: 1874615 - RNA, 19 nt, Artificial Sequence
  Description of Artificial Sequence: Synthetic oligonucleotide
ggacuacagauuuaaaacc

SEQ ID NO: 1874616 - RNA, 19 nt, Artificial Sequence
  Description of Artificial Sequence: Synthetic oligonucleotide
uuugcgaaguucagugagc

SEQ ID NO: 1874617 - RNA, 19 nt, Artificial Sequence
  Description of Artificial Sequence: Synthetic oligonucleotide
ugaaagcacuccuugcuga

SEQ ID NO: 1874618 - RNA, 19 nt, Artificial Sequence
  Description of Artificial Sequence: Synthetic oligonucleotide
augucagaggcacccuucc

SEQ ID NO: 1874619 - RNA, 19 nt, Artificial Sequence
  Description of Artificial Sequence: Synthetic oligonucleotide
uuauaacaaucugucaugu

SEQ ID NO: 1874620 - RNA, 19 nt, Artificial Sequence
  Description of Artificial Sequence: Synthetic oligonucleotide
uucuagugugucaccaacc

SEQ ID NO: 1874621 - RNA, 19 nt, Artificial Sequence
  Description of Artificial Sequence: Synthetic oligonucleotide
aaguucagugagcauggcu

SEQ ID NO: 1874622 - RNA, 19 nt, Artificial Sequence
  Description of Artificial Sequence: Synthetic oligonucleotide
ucuuagaacugaaccaaau

SEQ ID NO: 1874623 - RNA, 19 nt, Artificial Sequence
  Description of Artificial Sequence: Synthetic oligonucleotide
ucuguaaugcauguacugu

SEQ ID NO: 1874624 - RNA, 19 nt, Artificial Sequence
  Description of Artificial Sequence: Synthetic oligonucleotide
gauuuaguugcuugaaucu

SEQ ID NO: 1874625 - RNA, 19 nt, Artificial Sequence
  Description of Artificial Sequence: Synthetic oligonucleotide
ucuuguuuauccagacugu

SEQ ID NO: 1874626 - RNA, 19 nt, Artificial Sequence
  Description of Artificial Sequence: Synthetic oligonucleotide
gucaccaaccaucacgcag

SEQ ID NO: 1874627 - RNA, 19 nt, Artificial Sequence
  Description of Artificial Sequence: Synthetic oligonucleotide
cugcauacccacauguaag

SEQ ID NO: 1874628 - RNA, 19 nt, Artificial Sequence
  Description of Artificial Sequence: Synthetic oligonucleotide
agugugaaguccucacauc

SEQ ID NO: 1874629 - RNA, 19 nt, Artificial Sequence
  Description of Artificial Sequence: Synthetic oligonucleotide
guugggaggaucgucacag

SEQ ID NO: 1874630 - RNA, 19 nt, Artificial Sequence
  Description of Artificial Sequence: Synthetic oligonucleotide
caaucuaugcuuuguaaga

SEQ ID NO: 1874631 - RNA, 19 nt, Artificial Sequence
  Description of Artificial Sequence: Synthetic oligonucleotide
gagaucacagcagugauaa

SEQ ID NO: 1874632 - RNA, 19 nt, Artificial Sequence
  Description of Artificial Sequence: Synthetic oligonucleotide
agcagguaauucuagcaca

SEQ ID NO: 1874633 - RNA, 19 nt, Artificial Sequence
  Description of Artificial Sequence: Synthetic oligonucleotide
cuuguauaucgguuucuag

SEQ ID NO: 1874634 - RNA, 19 nt, Artificial Sequence
  Description of Artificial Sequence: Synthetic oligonucleotide
agguaauucuagcacagaa

SEQ ID NO: 1874635 - RNA, 19 nt, Artificial Sequence
  Description of Artificial Sequence: Synthetic oligonucleotide
gcaaucuaugcuuuguaag

SEQ ID NO: 1874636 - RNA, 19 nt, Artificial Sequence
  Description of Artificial Sequence: Synthetic oligonucleotide
auaccaaccugauuuaguu

SEQ ID NO: 1874637 - RNA, 19 nt, Artificial Sequence
  Description of Artificial Sequence: Synthetic oligonucleotide
uuuugauuguaagagcuuu

SEQ ID NO: 1874638 - RNA, 19 nt, Artificial Sequence
  Description of Artificial Sequence: Synthetic oligonucleotide
agacuggcaagcacaagcc

SEQ ID NO: 1874639 - RNA, 19 nt, Artificial Sequence
  Description of Artificial Sequence: Synthetic oligonucleotide
gaucgucacagcauggcag

SEQ ID NO: 1874640 - RNA, 19 nt, Artificial Sequence
  Description of Artificial Sequence: Synthetic oligonucleotide
auaugcuguaaacguguag

SEQ ID NO: 1874641 - RNA, 19 nt, Artificial Sequence
  Description of Artificial Sequence: Synthetic oligonucleotide
uauugucagcaccaccucu

SEQ ID NO: 1874642 - RNA, 19 nt, Artificial Sequence
  Description of Artificial Sequence: Synthetic oligonucleotide
ugcaaucuaugcuuuguaa

SEQ ID NO: 1874643 - RNA, 19 nt, Artificial Sequence
  Description of Artificial Sequence: Synthetic oligonucleotide
uaccugcauacccacaugu

SEQ ID NO: 1874644 - RNA, 19 nt, Artificial Sequence
  Description of Artificial Sequence: Synthetic oligonucleotide
gagagcagguaauucuagc

SEQ ID NO: 1874645 - RNA, 19 nt, Artificial Sequence
  Description of Artificial Sequence: Synthetic oligonucleotide
gaaaccauauagugaggca

SEQ ID NO: 1874646 - RNA, 19 nt, Artificial Sequence
  Description of Artificial Sequence: Synthetic oligonucleotide
uuauaccaaccugauuuag

SEQ ID NO: 1874647 - RNA, 19 nt, Artificial Sequence
  Description of Artificial Sequence: Synthetic oligonucleotide
ugaaauguuuuaacuugua

SEQ ID NO: 1874648 - RNA, 19 nt, Artificial Sequence
  Description of Artificial Sequence: Synthetic oligonucleotide
acagaagaaaccauauagu

SEQ ID NO: 1874649 - RNA, 19 nt, Artificial Sequence
  Description of Artificial Sequence: Synthetic oligonucleotide
auuagauaauagauaagaa

SEQ ID NO: 1874650 - RNA, 19 nt, Artificial Sequence
  Description of Artificial Sequence: Synthetic oligonucleotide
ugggaggaucgucacagca

SEQ ID NO: 1874651 - RNA, 19 nt, Artificial Sequence
  Description of Artificial Sequence: Synthetic oligonucleotide
aggaucgucacagcauggc

SEQ ID NO: 1874652 - RNA, 19 nt, Artificial Sequence
  Description of Artificial Sequence: Synthetic oligonucleotide
guuaacaagaguaggcgga

SEQ ID NO: 1874653 - RNA, 19 nt, Artificial Sequence
  Description of Artificial Sequence: Synthetic oligonucleotide
uugucagcaccaccucugg

SEQ ID NO: 1874654 - RNA, 19 nt, Artificial Sequence
  Description of Artificial Sequence: Synthetic oligonucleotide
uuguaagagagcagguaau

SEQ ID NO: 1874655 - RNA, 19 nt, Artificial Sequence
  Description of Artificial Sequence: Synthetic oligonucleotide
gauaauagauaagaacaua

SEQ ID NO: 1874656 - RNA, 19 nt, Artificial Sequence
  Description of Artificial Sequence: Synthetic oligonucleotide
aucaguucuaacccuguaa

SEQ ID NO: 1874657 - RNA, 19 nt, Artificial Sequence
  Description of Artificial Sequence: Synthetic oligonucleotide
aaccauauagugaggcaug

SEQ ID NO: 1874658 - RNA, 19 nt, Artificial Sequence
  Description of Artificial Sequence: Synthetic oligonucleotide
guauggaugaaagcacucc

SEQ ID NO: 1874659 - RNA, 19 nt, Artificial Sequence
  Description of Artificial Sequence: Synthetic oligonucleotide
gcagugauaaaauauggaa

SEQ ID NO: 1874660 - RNA, 19 nt, Artificial Sequence
  Description of Artificial Sequence: Synthetic oligonucleotide
agauaauagauaagaacau

SEQ ID NO: 1874661 - RNA, 19 nt, Artificial Sequence
  Description of Artificial Sequence: Synthetic oligonucleotide
gguaauucuagcacagaag

SEQ ID NO: 1874662 - RNA, 19 nt, Artificial Sequence
  Description of Artificial Sequence: Synthetic oligonucleotide
agcacaagccucgaucuuc

SEQ ID NO: 1874663 - RNA, 19 nt, Artificial Sequence
  Description of Artificial Sequence: Synthetic oligonucleotide
ucacuaugaaauguuuuaa

SEQ ID NO: 1874664 - RNA, 19 nt, Artificial Sequence
  Description of Artificial Sequence: Synthetic oligonucleotide
uccuauugucagcaccacc

SEQ ID NO: 1874665 - RNA, 19 nt, Artificial Sequence
  Description of Artificial Sequence: Synthetic oligonucleotide
uuaacaagaguaggcggac

SEQ ID NO: 1874666 - RNA, 19 nt, Artificial Sequence
  Description of Artificial Sequence: Synthetic oligonucleotide
aagaaaccauauagugagg

SEQ ID NO: 1874667 - RNA, 19 nt, Artificial Sequence
  Description of Artificial Sequence: Synthetic oligonucleotide
uucuggacuacagauuuaa

SEQ ID NO: 1874668 - RNA, 19 nt, Artificial Sequence
  Description of Artificial Sequence: Synthetic oligonucleotide
ugcugaguuuaacuugaac

SEQ ID NO: 1874669 - RNA, 19 nt, Artificial Sequence
  Description of Artificial Sequence: Synthetic oligonucleotide
caccguuuguuaacaagag

SEQ ID NO: 1874670 - RNA, 19 nt, Artificial Sequence
  Description of Artificial Sequence: Synthetic oligonucleotide
guaaugcauguacuguaug

SEQ ID NO: 1874671 - RNA, 19 nt, Artificial Sequence
  Description of Artificial Sequence: Synthetic oligonucleotide
uaccaaccugauuuaguug

SEQ ID NO: 1874672 - RNA, 19 nt, Artificial Sequence
  Description of Artificial Sequence: Synthetic oligonucleotide
ucacaucuguaaugcaugu

SEQ ID NO: 1874673 - RNA, 19 nt, Artificial Sequence
  Description of Artificial Sequence: Synthetic oligonucleotide
auaaaauauggaaggugcu

SEQ ID NO: 1874674 - RNA, 19 nt, Artificial Sequence
  Description of Artificial Sequence: Synthetic oligonucleotide
ucgguuucuagugugucac

SEQ ID NO: 1874675 - RNA, 19 nt, Artificial Sequence
  Description of Artificial Sequence: Synthetic oligonucleotide
ucuuugcgaaguucaguga

SEQ ID NO: 1874676 - RNA, 19 nt, Artificial Sequence
  Description of Artificial Sequence: Synthetic oligonucleotide
auugaggccuccuuguaua

SEQ ID NO: 1874677 - RNA, 19 nt, Artificial Sequence
  Description of Artificial Sequence: Synthetic oligonucleotide
gaguaggcggaccucuuug

SEQ ID NO: 1874678 - RNA, 19 nt, Artificial Sequence
  Description of Artificial Sequence: Synthetic oligonucleotide
accauauagugaggcaugg

SEQ ID NO: 1874679 - RNA, 19 nt, Artificial Sequence
  Description of Artificial Sequence: Synthetic oligonucleotide
uccuugcugaguuuaacuu

SEQ ID NO: 1874680 - RNA, 19 nt, Artificial Sequence
  Description of Artificial Sequence: Synthetic oligonucleotide
aagcacuccuugcugaguu

SEQ ID NO: 1874681 - RNA, 19 nt, Artificial Sequence
  Description of Artificial Sequence: Synthetic oligonucleotide
aguucagugagcauggcuu

SEQ ID NO: 1874682 - RNA, 19 nt, Artificial Sequence
  Description of Artificial Sequence: Synthetic oligonucleotide
uuaguugcuugaaucucua

SEQ ID NO: 1874683 - RNA, 19 nt, Artificial Sequence
  Description of Artificial Sequence: Synthetic oligonucleotide
cuuguuuauccagacugug

SEQ ID NO: 1874684 - RNA, 19 nt, Artificial Sequence
  Description of Artificial Sequence: Synthetic oligonucleotide
guacuguauggaugaaagc

SEQ ID NO: 1874685 - RNA, 19 nt, Artificial Sequence
  Description of Artificial Sequence: Synthetic oligonucleotide
cuugaaucucuauuuuaga

SEQ ID NO: 1874686 - RNA, 19 nt, Artificial Sequence
  Description of Artificial Sequence: Synthetic oligonucleotide
ugaguuuaacuugaacuuu

SEQ ID NO: 1874687 - RNA, 19 nt, Artificial Sequence
  Description of Artificial Sequence: Synthetic oligonucleotide
agacaugcugacuuugcaa

SEQ ID NO: 1874688 - RNA, 19 nt, Artificial Sequence
  Description of Artificial Sequence: Synthetic oligonucleotide
gcgugcaucaguucuaacc

SEQ ID NO: 1874689 - RNA, 19 nt, Artificial Sequence
  Description of Artificial Sequence: Synthetic oligonucleotide
gaaguccucacaucuguaa

SEQ ID NO: 1874690 - RNA, 19 nt, Artificial Sequence
  Description of Artificial Sequence: Synthetic oligonucleotide
ugucuaaaauaugcaaaau

SEQ ID NO: 1874691 - RNA, 19 nt, Artificial Sequence
  Description of Artificial Sequence: Synthetic oligonucleotide
gugucaccaaccaucacgc

SEQ ID NO: 1874692 - RNA, 19 nt, Artificial Sequence
  Description of Artificial Sequence: Synthetic oligonucleotide
gaaugcaagccuaugguua

SEQ ID NO: 1874693 - RNA, 19 nt, Artificial Sequence
  Description of Artificial Sequence: Synthetic oligonucleotide
accuggauuucagauauga

SEQ ID NO: 1874694 - RNA, 19 nt, Artificial Sequence
  Description of Artificial Sequence: Synthetic oligonucleotide
cucuauuuuagaauaucua

SEQ ID NO: 1874695 - RNA, 19 nt, Artificial Sequence
  Description of Artificial Sequence: Synthetic oligonucleotide
guaggcggaccucuuugcg

SEQ ID NO: 1874696 - RNA, 19 nt, Artificial Sequence
  Description of Artificial Sequence: Synthetic oligonucleotide
guuuaacuugaacuuuauc

SEQ ID NO: 1874697 - RNA, 19 nt, Artificial Sequence
  Description of Artificial Sequence: Synthetic oligonucleotide
cuggauuucagauaugaau

SEQ ID NO: 1874698 - RNA, 19 nt, Artificial Sequence
  Description of Artificial Sequence: Synthetic oligonucleotide
aucgucacagcauggcagu

SEQ ID NO: 1874699 - RNA, 19 nt, Artificial Sequence
  Description of Artificial Sequence: Synthetic oligonucleotide
gucauaugcuguaaacgug

SEQ ID NO: 1874700 - RNA, 19 nt, Artificial Sequence
  Description of Artificial Sequence: Synthetic oligonucleotide
ugcuagggucauaugcugu

SEQ ID NO: 1874701 - RNA, 19 nt, Artificial Sequence
  Description of Artificial Sequence: Synthetic oligonucleotide
ccaaccaucacgcagucuc

SEQ ID NO: 1874702 - RNA, 19 nt, Artificial Sequence
  Description of Artificial Sequence: Synthetic oligonucleotide
cacgcagucuccuggcugc

SEQ ID NO: 1874703 - RNA, 19 nt, Artificial Sequence
  Description of Artificial Sequence: Synthetic oligonucleotide
accguuuguuaacaagagu

SEQ ID NO: 1874704 - RNA, 19 nt, Artificial Sequence
  Description of Artificial Sequence: Synthetic oligonucleotide
ugcaagccuaugguuauca

SEQ ID NO: 1874705 - RNA, 19 nt, Artificial Sequence
  Description of Artificial Sequence: Synthetic oligonucleotide
uccgccucuucuuuguagu

SEQ ID NO: 1874706 - RNA, 19 nt, Artificial Sequence
  Description of Artificial Sequence: Synthetic oligonucleotide
gucagaggcacccuuccac

SEQ ID NO: 1874707 - RNA, 19 nt, Artificial Sequence
  Description of Artificial Sequence: Synthetic oligonucleotide
gucuaaaauaugcaaaauu

SEQ ID NO: 1874708 - RNA, 19 nt, Artificial Sequence
  Description of Artificial Sequence: Synthetic oligonucleotide
guugcuugaaucucuauuu

SEQ ID NO: 1874709 - RNA, 19 nt, Artificial Sequence
  Description of Artificial Sequence: Synthetic oligonucleotide
augcauguacuguauggau

SEQ ID NO: 1874710 - RNA, 19 nt, Artificial Sequence
  Description of Artificial Sequence: Synthetic oligonucleotide
agugagcauggcuuugaca

SEQ ID NO: 1874711 - RNA, 19 nt, Artificial Sequence
  Description of Artificial Sequence: Synthetic oligonucleotide
agcagugauaaaauaugga

SEQ ID NO: 1874712 - RNA, 19 nt, Artificial Sequence
  Description of Artificial Sequence: Synthetic oligonucleotide
aucgguuucuaguguguca

SEQ ID NO: 1874713 - RNA, 19 nt, Artificial Sequence
  Description of Artificial Sequence: Synthetic oligonucleotide
cuuugcaaucuaugcuuug

SEQ ID NO: 1874714 - RNA, 19 nt, Artificial Sequence
  Description of Artificial Sequence: Synthetic oligonucleotide
uuugguugcuguguucuuc

SEQ ID NO: 1874715 - RNA, 19 nt, Artificial Sequence
  Description of Artificial Sequence: Synthetic oligonucleotide
uucuaugcuguaagccagu

SEQ ID NO: 1874716 - RNA, 19 nt, Artificial Sequence
  Description of Artificial Sequence: Synthetic oligonucleotide
caguucuaacccuguaaac

SEQ ID NO: 1874717 - RNA, 19 nt, Artificial Sequence
  Description of Artificial Sequence: Synthetic oligonucleotide
acucuuguuuauccagacu

SEQ ID NO: 1874718 - RNA, 19 nt, Artificial Sequence
  Description of Artificial Sequence: Synthetic oligonucleotide
aagagagcagguaauucua

SEQ ID NO: 1874719 - RNA, 19 nt, Artificial Sequence
  Description of Artificial Sequence: Synthetic oligonucleotide
ggaggaucgucacagcaug

SEQ ID NO: 1874720 - RNA, 19 nt, Artificial Sequence
  Description of Artificial Sequence: Synthetic oligonucleotide
agugguauuuugauuguaa

SEQ ID NO: 1874721 - RNA, 19 nt, Artificial Sequence
  Description of Artificial Sequence: Synthetic oligonucleotide
gacaugcugacuuugcaau

SEQ ID NO: 1874722 - RNA, 19 nt, Artificial Sequence
  Description of Artificial Sequence: Synthetic oligonucleotide
uguucacaccacagaaaau

SEQ ID NO: 1874723 - RNA, 19 nt, Artificial Sequence
  Description of Artificial Sequence: Synthetic oligonucleotide
cuguaaacguguagauuuc

SEQ ID NO: 1874724 - RNA, 19 nt, Artificial Sequence
  Description of Artificial Sequence: Synthetic oligonucleotide
caaggagaucacagcagug

SEQ ID NO: 1874725 - RNA, 19 nt, Artificial Sequence
  Description of Artificial Sequence: Synthetic oligonucleotide
cgugcaucaguucuaaccc

SEQ ID NO: 1874726 - RNA, 19 nt, Artificial Sequence
  Description of Artificial Sequence: Synthetic oligonucleotide
acuccuugcugaguuuaac

SEQ ID NO: 1874727 - RNA, 19 nt, Artificial Sequence
  Description of Artificial Sequence: Synthetic oligonucleotide
uaggcggaccucuuugcga

SEQ ID NO: 1874728 - RNA, 19 nt, Artificial Sequence
  Description of Artificial Sequence: Synthetic oligonucleotide
ggucauaugcuguaaacgu

SEQ ID NO: 1874729 - RNA, 19 nt, Artificial Sequence
  Description of Artificial Sequence: Synthetic oligonucleotide
auacccacauguaagcuau

SEQ ID NO: 1874730 - RNA, 19 nt, Artificial Sequence
  Description of Artificial Sequence: Synthetic oligonucleotide
gaccucuuugcgaaguuca

SEQ ID NO: 1874731 - RNA, 19 nt, Artificial Sequence
  Description of Artificial Sequence: Synthetic oligonucleotide
augcuguaaacguguagau

SEQ ID NO: 1874732 - RNA, 19 nt, Artificial Sequence
  Description of Artificial Sequence: Synthetic oligonucleotide
aguaggcaaaauauuuuaa

SEQ ID NO: 1874733 - RNA, 19 nt, Artificial Sequence
  Description of Artificial Sequence: Synthetic oligonucleotide
gcuguaaacguguagauuu

SEQ ID NO: 1874734 - RNA, 19 nt, Artificial Sequence
  Description of Artificial Sequence: Synthetic oligonucleotide
uaacaagaguaggcggacc

SEQ ID NO: 1874735 - RNA, 19 nt, Artificial Sequence
  Description of Artificial Sequence: Synthetic oligonucleotide
cuaugcuguaagccaguac

SEQ ID NO: 1874736 - RNA, 19 nt, Artificial Sequence
  Description of Artificial Sequence: Synthetic oligonucleotide
uucaaguuuucuggacuac

SEQ ID NO: 1874737 - RNA, 19 nt, Artificial Sequence
  Description of Artificial Sequence: Synthetic oligonucleotide
cugaguuuaacuugaacuu

SEQ ID NO: 1874738 - RNA, 19 nt, Artificial Sequence
  Description of Artificial Sequence: Synthetic oligonucleotide
cagauuuaaaaccuggauu

SEQ ID NO: 1874739 - RNA, 19 nt, Artificial Sequence
  Description of Artificial Sequence: Synthetic oligonucleotide
gaguuuaacuugaacuuua

SEQ ID NO: 1874740 - RNA, 19 nt, Artificial Sequence
  Description of Artificial Sequence: Synthetic oligonucleotide
cugcauugaggccuccuug

SEQ ID NO: 1874741 - RNA, 19 nt, Artificial Sequence
  Description of Artificial Sequence: Synthetic oligonucleotide
uguaagccaguaccugcau

SEQ ID NO: 1874742 - RNA, 19 nt, Artificial Sequence
  Description of Artificial Sequence: Synthetic oligonucleotide
agagagcagguaauucuag

SEQ ID NO: 1874743 - RNA, 19 nt, Artificial Sequence
  Description of Artificial Sequence: Synthetic oligonucleotide
uacuuauaccaaccugauu

SEQ ID NO: 1874744 - RNA, 19 nt, Artificial Sequence
  Description of Artificial Sequence: Synthetic oligonucleotide
uaucuauuucuaugcugua

SEQ ID NO: 1874745 - RNA, 19 nt, Artificial Sequence
  Description of Artificial Sequence: Synthetic oligonucleotide
cuguaaugcauguacugua

SEQ ID NO: 1874746 - RNA, 19 nt, Artificial Sequence
  Description of Artificial Sequence: Synthetic oligonucleotide
aaagcacuccuugcugagu

SEQ ID NO: 1874747 - RNA, 19 nt, Artificial Sequence
  Description of Artificial Sequence: Synthetic oligonucleotide
guaaacguguagauuucca

SEQ ID NO: 1874748 - RNA, 19 nt, Artificial Sequence
  Description of Artificial Sequence: Synthetic oligonucleotide
uguaagcuaucuugccuuu

SEQ ID NO: 1874749 - RNA, 19 nt, Artificial Sequence
  Description of Artificial Sequence: Synthetic oligonucleotide
guucuucuguguguuacac

SEQ ID NO: 1874750 - RNA, 19 nt, Artificial Sequence
  Description of Artificial Sequence: Synthetic oligonucleotide
agcacagaagaaaccauau

SEQ ID NO: 1874751 - RNA, 19 nt, Artificial Sequence
  Description of Artificial Sequence: Synthetic oligonucleotide
acauugaaaguaggcaaaa

SEQ ID NO: 1874752 - RNA, 19 nt, Artificial Sequence
  Description of Artificial Sequence: Synthetic oligonucleotide
gaggaucgucacagcaugg

SEQ ID NO: 1874753 - RNA, 19 nt, Artificial Sequence
  Description of Artificial Sequence: Synthetic oligonucleotide
cuucaaguuuucuggacua

SEQ ID NO: 1874754 - RNA, 19 nt, Artificial Sequence
  Description of Artificial Sequence: Synthetic oligonucleotide
cuaugguuaucagcagcag

SEQ ID NO: 1874755 - RNA, 19 nt, Artificial Sequence
  Description of Artificial Sequence: Synthetic oligonucleotide
cuauugucagcaccaccuc

SEQ ID NO: 1874756 - RNA, 19 nt, Artificial Sequence
  Description of Artificial Sequence: Synthetic oligonucleotide
cauguucacaccacagaaa

SEQ ID NO: 1874757 - RNA, 19 nt, Artificial Sequence
  Description of Artificial Sequence: Synthetic oligonucleotide
cuccuacaacaauagcauc

SEQ ID NO: 1874758 - RNA, 19 nt, Artificial Sequence
  Description of Artificial Sequence: Synthetic oligonucleotide
gauugcuucuucccagugu

SEQ ID NO: 1874759 - RNA, 19 nt, Artificial Sequence
  Description of Artificial Sequence: Synthetic oligonucleotide
cauacccacauguaagcua

SEQ ID NO: 1874760 - RNA, 19 nt, Artificial Sequence
  Description of Artificial Sequence: Synthetic oligonucleotide
ugagcauggcuuugacauc

SEQ ID NO: 1874761 - RNA, 19 nt, Artificial Sequence
  Description of Artificial Sequence: Synthetic oligonucleotide
guagauuuccacagaaagu

SEQ ID NO: 1874762 - RNA, 19 nt, Artificial Sequence
  Description of Artificial Sequence: Synthetic oligonucleotide
uaucgguuucuaguguguc

SEQ ID NO: 1874763 - RNA, 19 nt, Artificial Sequence
  Description of Artificial Sequence: Synthetic oligonucleotide
uuucuggacuacagauuua

SEQ ID NO: 1874764 - RNA, 19 nt, Artificial Sequence
  Description of Artificial Sequence: Synthetic oligonucleotide
gcaucaaaguaagacuggc

SEQ ID NO: 1874765 - RNA, 19 nt, Artificial Sequence
  Description of Artificial Sequence: Synthetic oligonucleotide
caagcacaagccucgaucu

SEQ ID NO: 1874766 - RNA, 19 nt, Artificial Sequence
  Description of Artificial Sequence: Synthetic oligonucleotide
gcagguaauucuagcacag

SEQ ID NO: 1874767 - RNA, 19 nt, Artificial Sequence
  Description of Artificial Sequence: Synthetic oligonucleotide
cagauaugaaugcaagccu

SEQ ID NO: 1874768 - RNA, 19 nt, Artificial Sequence
  Description of Artificial Sequence: Synthetic oligonucleotide
acguguagauuuccacaga

SEQ ID NO: 1874769 - RNA, 19 nt, Artificial Sequence
  Description of Artificial Sequence: Synthetic oligonucleotide
ugcuguaaacguguagauu

SEQ ID NO: 1874770 - RNA, 19 nt, Artificial Sequence
  Description of Artificial Sequence: Synthetic oligonucleotide
aggcggaccucuuugcgaa

SEQ ID NO: 1874771 - RNA, 19 nt, Artificial Sequence
  Description of Artificial Sequence: Synthetic oligonucleotide
gccuaugguuaucagcagc

SEQ ID NO: 1874772 - RNA, 19 nt, Artificial Sequence
  Description of Artificial Sequence: Synthetic oligonucleotide
ugucagcaccaccucuggu

SEQ ID NO: 1874773 - RNA, 19 nt, Artificial Sequence
  Description of Artificial Sequence: Synthetic oligonucleotide
ccuaugguuaucagcagca

SEQ ID NO: 1874774 - RNA, 19 nt, Artificial Sequence
  Description of Artificial Sequence: Synthetic oligonucleotide
uuggcgugcaucaguucua

SEQ ID NO: 1874775 - RNA, 19 nt, Artificial Sequence
  Description of Artificial Sequence: Synthetic oligonucleotide
guaugauuuaguacuuaua

SEQ ID NO: 1874776 - RNA, 19 nt, Artificial Sequence
  Description of Artificial Sequence: Synthetic oligonucleotide
auaucgguuucuagugugu

SEQ ID NO: 1874777 - RNA, 19 nt, Artificial Sequence
  Description of Artificial Sequence: Synthetic oligonucleotide
cacagacaugcugacuuug

SEQ ID NO: 1874778 - RNA, 19 nt, Artificial Sequence
  Description of Artificial Sequence: Synthetic oligonucleotide
cagugaauccucacucaca

SEQ ID NO: 1874779 - RNA, 19 nt, Artificial Sequence
  Description of Artificial Sequence: Synthetic oligonucleotide
aggguugggaggaucguca

SEQ ID NO: 1874780 - RNA, 19 nt, Artificial Sequence
  Description of Artificial Sequence: Synthetic oligonucleotide
ugucaccguuuguuaacaa

SEQ ID NO: 1874781 - RNA, 19 nt, Artificial Sequence
  Description of Artificial Sequence: Synthetic oligonucleotide
ucuaugcuguaagccagua

SEQ ID NO: 1874782 - RNA, 19 nt, Artificial Sequence
  Description of Artificial Sequence: Synthetic oligonucleotide
ccuauugucagcaccaccu

SEQ ID NO: 1874783 - RNA, 19 nt, Artificial Sequence
  Description of Artificial Sequence: Synthetic oligonucleotide
guauaucgguuucuagugu

SEQ ID NO: 1874784 - RNA, 19 nt, Artificial Sequence
  Description of Artificial Sequence: Synthetic oligonucleotide
guaacauucuucugccaau

SEQ ID NO: 1874785 - RNA, 19 nt, Artificial Sequence
  Description of Artificial Sequence: Synthetic oligonucleotide
gauaugaaugcaagccuau

SEQ ID NO: 1874786 - RNA, 19 nt, Artificial Sequence
  Description of Artificial Sequence: Synthetic oligonucleotide
gucugucaccguuuguuaa

SEQ ID NO: 1874787 - RNA, 19 nt, Artificial Sequence
  Description of Artificial Sequence: Synthetic oligonucleotide
gguuucuagugugucacca

SEQ ID NO: 1874788 - RNA, 19 nt, Artificial Sequence
  Description of Artificial Sequence: Synthetic oligonucleotide
agauuuccacagaaaguaa

SEQ ID NO: 1874789 - RNA, 19 nt, Artificial Sequence
  Description of Artificial Sequence: Synthetic oligonucleotide
gugauaaaauauggaaggu

SEQ ID NO: 1874790 - RNA, 19 nt, Artificial Sequence
  Description of Artificial Sequence: Synthetic oligonucleotide
uaguugcuugaaucucuau

SEQ ID NO: 1874791 - RNA, 19 nt, Artificial Sequence
  Description of Artificial Sequence: Synthetic oligonucleotide
uuccuauugucagcaccac

SEQ ID NO: 1874792 - RNA, 19 nt, Artificial Sequence
  Description of Artificial Sequence: Synthetic oligonucleotide
caucuguaaugcauguacu

SEQ ID NO: 1874793 - RNA, 19 nt, Artificial Sequence
  Description of Artificial Sequence: Synthetic oligonucleotide
ggcuuucaguccugcauug

SEQ ID NO: 1874794 - RNA, 19 nt, Artificial Sequence
  Description of Artificial Sequence: Synthetic oligonucleotide
augcuguaagccaguaccu

SEQ ID NO: 1874795 - RNA, 19 nt, Artificial Sequence
  Description of Artificial Sequence: Synthetic oligonucleotide
agaguaggcggaccucuuu

SEQ ID NO: 1874796 - RNA, 19 nt, Artificial Sequence
  Description of Artificial Sequence: Synthetic oligonucleotide
gaaugccuuggcgugcauc

SEQ ID NO: 1874797 - RNA, 19 nt, Artificial Sequence
  Description of Artificial Sequence: Synthetic oligonucleotide
guagugguauuuugauugu

SEQ ID NO: 1874798 - RNA, 19 nt, Artificial Sequence
  Description of Artificial Sequence: Synthetic oligonucleotide
uagugguauuuugauugua

SEQ ID NO: 1874799 - RNA, 19 nt, Artificial Sequence
  Description of Artificial Sequence: Synthetic oligonucleotide
acacagacaugcugacuuu

SEQ ID NO: 1874800 - RNA, 19 nt, Artificial Sequence
  Description of Artificial Sequence: Synthetic oligonucleotide
ugcgaaguucagugagcau

SEQ ID NO: 1874801 - RNA, 19 nt, Artificial Sequence
  Description of Artificial Sequence: Synthetic oligonucleotide
caauagcaucaaaguaaga

SEQ ID NO: 1874802 - RNA, 19 nt, Artificial Sequence
  Description of Artificial Sequence: Synthetic oligonucleotide
ggaucgucacagcauggca

SEQ ID NO: 1874803 - RNA, 19 nt, Artificial Sequence
  Description of Artificial Sequence: Synthetic oligonucleotide
ggauugcuucuucccagug

SEQ ID NO: 1874804 - RNA, 19 nt, Artificial Sequence
  Description of Artificial Sequence: Synthetic oligonucleotide
uuuccgccucuucuuugua

SEQ ID NO: 1874805 - RNA, 19 nt, Artificial Sequence
  Description of Artificial Sequence: Synthetic oligonucleotide
auggaugaaagcacuccuu

SEQ ID NO: 1874806 - RNA, 19 nt, Artificial Sequence
  Description of Artificial Sequence: Synthetic oligonucleotide
cuucuguguguuacacaga

SEQ ID NO: 1874807 - RNA, 19 nt, Artificial Sequence
  Description of Artificial Sequence: Synthetic oligonucleotide
cauaugcuguaaacgugua

SEQ ID NO: 1874808 - RNA, 19 nt, Artificial Sequence
  Description of Artificial Sequence: Synthetic oligonucleotide
uggaaggugcugguuucuc

SEQ ID NO: 1874809 - RNA, 19 nt, Artificial Sequence
  Description of Artificial Sequence: Synthetic oligonucleotide
augcaagccuaugguuauc

SEQ ID NO: 1874810 - RNA, 19 nt, Artificial Sequence
  Description of Artificial Sequence: Synthetic oligonucleotide
guaagccaguaccugcaua

SEQ ID NO: 1874811 - RNA, 19 nt, Artificial Sequence
  Description of Artificial Sequence: Synthetic oligonucleotide
gcaagccuaugguuaucag

SEQ ID NO: 1874812 - RNA, 19 nt, Artificial Sequence
  Description of Artificial Sequence: Synthetic oligonucleotide
uauccagacuguggcuuuc

SEQ ID NO: 1874813 - RNA, 19 nt, Artificial Sequence
  Description of Artificial Sequence: Synthetic oligonucleotide
guaagcuaucuugccuuuc

SEQ ID NO: 1874814 - RNA, 19 nt, Artificial Sequence
  Description of Artificial Sequence: Synthetic oligonucleotide
ugaggccuccuuguauauc

SEQ ID NO: 1874815 - RNA, 19 nt, Artificial Sequence
  Description of Artificial Sequence: Synthetic oligonucleotide
augcugacuuugcaaucua

SEQ ID NO: 1874816 - RNA, 19 nt, Artificial Sequence
  Description of Artificial Sequence: Synthetic oligonucleotide
aaccuggauuucagauaug

SEQ ID NO: 1874817 - RNA, 19 nt, Artificial Sequence
  Description of Artificial Sequence: Synthetic oligonucleotide
cagugugaaguccucacau

SEQ ID NO: 1874818 - RNA, 19 nt, Artificial Sequence
  Description of Artificial Sequence: Synthetic oligonucleotide
acccuguaaacuggcucug

SEQ ID NO: 1874819 - RNA, 19 nt, Artificial Sequence
  Description of Artificial Sequence: Synthetic oligonucleotide
ccaguaccugcauacccac

SEQ ID NO: 1874820 - RNA, 19 nt, Artificial Sequence
  Description of Artificial Sequence: Synthetic oligonucleotide
cugucaccguuuguuaaca

SEQ ID NO: 1874821 - RNA, 19 nt, Artificial Sequence
  Description of Artificial Sequence: Synthetic oligonucleotide
uggcgugcaucaguucuaa

SEQ ID NO: 1874822 - RNA, 19 nt, Artificial Sequence
  Description of Artificial Sequence: Synthetic oligonucleotide
ccauauagugaggcauggg

SEQ ID NO: 1874823 - RNA, 19 nt, Artificial Sequence
  Description of Artificial Sequence: Synthetic oligonucleotide
aagaguaggcggaccucuu

SEQ ID NO: 1874824 - RNA, 19 nt, Artificial Sequence
  Description of Artificial Sequence: Synthetic oligonucleotide
caggguugggaggaucguc

SEQ ID NO: 1874825 - RNA, 19 nt, Artificial Sequence
  Description of Artificial Sequence: Synthetic oligonucleotide
gcuagggucauaugcugua

SEQ ID NO: 1874826 - RNA, 19 nt, Artificial Sequence
  Description of Artificial Sequence: Synthetic oligonucleotide
gcuuugacaucuucugcua

SEQ ID NO: 1874827 - RNA, 19 nt, Artificial Sequence
  Description of Artificial Sequence: Synthetic oligonucleotide
uacccacauguaagcuauc

SEQ ID NO: 1874828 - RNA, 19 nt, Artificial Sequence
  Description of Artificial Sequence: Synthetic oligonucleotide
guacuuauaccaaccugau

SEQ ID NO: 1874829 - RNA, 19 nt, Artificial Sequence
  Description of Artificial Sequence: Synthetic oligonucleotide
guuuucuggacuacagauu

SEQ ID NO: 1874830 - RNA, 19 nt, Artificial Sequence
  Description of Artificial Sequence: Synthetic oligonucleotide
agcacuccuugcugaguuu

SEQ ID NO: 1874831 - RNA, 19 nt, Artificial Sequence
  Description of Artificial Sequence: Synthetic oligonucleotide
caccaaccaucacgcaguc

SEQ ID NO: 1874832 - RNA, 19 nt, Artificial Sequence
  Description of Artificial Sequence: Synthetic oligonucleotide
gugcaucaguucuaacccu

SEQ ID NO: 1874833 - RNA, 19 nt, Artificial Sequence
  Description of Artificial Sequence: Synthetic oligonucleotide
caucaguucuaacccugua

SEQ ID NO: 1874834 - RNA, 19 nt, Artificial Sequence
  Description of Artificial Sequence: Synthetic oligonucleotide
cauugaggccuccuuguau

SEQ ID NO: 1874835 - RNA, 19 nt, Artificial Sequence
  Description of Artificial Sequence: Synthetic oligonucleotide
augccuuggcgugcaucag

SEQ ID NO: 1874836 - RNA, 19 nt, Artificial Sequence
  Description of Artificial Sequence: Synthetic oligonucleotide
cagguaauucuagcacaga

SEQ ID NO: 1874837 - RNA, 19 nt, Artificial Sequence
  Description of Artificial Sequence: Synthetic oligonucleotide
ccacucuuguuuauccaga

SEQ ID NO: 1874838 - RNA, 19 nt, Artificial Sequence
  Description of Artificial Sequence: Synthetic oligonucleotide
gguugggaggaucgucaca

SEQ ID NO: 1874839 - RNA, 19 nt, Artificial Sequence
  Description of Artificial Sequence: Synthetic oligonucleotide
ggguugggaggaucgucac

SEQ ID NO: 1874840 - RNA, 19 nt, Artificial Sequence
  Description of Artificial Sequence: Synthetic oligonucleotide
uggcaagcacaagccucga

SEQ ID NO: 1874841 - RNA, 19 nt, Artificial Sequence
  Description of Artificial Sequence: Synthetic oligonucleotide
caguaccugcauacccaca

SEQ ID NO: 1874842 - RNA, 19 nt, Artificial Sequence
  Description of Artificial Sequence: Synthetic oligonucleotide
cacuccuugcugaguuuaa

SEQ ID NO: 1874843 - RNA, 19 nt, Artificial Sequence
  Description of Artificial Sequence: Synthetic oligonucleotide
cuagugugucaccaaccau

SEQ ID NO: 1874844 - RNA, 19 nt, Artificial Sequence
  Description of Artificial Sequence: Synthetic oligonucleotide
agaaugccuuggcgugcau

SEQ ID NO: 1874845 - RNA, 19 nt, Artificial Sequence
  Description of Artificial Sequence: Synthetic oligonucleotide
cgccucuucuuuguagugg

SEQ ID NO: 1874846 - RNA, 19 nt, Artificial Sequence
  Description of Artificial Sequence: Synthetic oligonucleotide
ccaaggagaucacagcagu

SEQ ID NO: 1874847 - RNA, 19 nt, Artificial Sequence
  Description of Artificial Sequence: Synthetic oligonucleotide
ccuggauuucagauaugaa

SEQ ID NO: 1874848 - RNA, 19 nt, Artificial Sequence
  Description of Artificial Sequence: Synthetic oligonucleotide
ggcggaccucuuugcgaag

SEQ ID NO: 1874849 - RNA, 19 nt, Artificial Sequence
  Description of Artificial Sequence: Synthetic oligonucleotide
gaggcacccuuccacucuu

SEQ ID NO: 1874850 - RNA, 19 nt, Artificial Sequence
  Description of Artificial Sequence: Synthetic oligonucleotide
ccacagaaaguaacauucu

SEQ ID NO: 1874851 - RNA, 19 nt, Artificial Sequence
  Description of Artificial Sequence: Synthetic oligonucleotide
gcauugaggccuccuugua

SEQ ID NO: 1874852 - RNA, 19 nt, Artificial Sequence
  Description of Artificial Sequence: Synthetic oligonucleotide
cgguuucuagugugucacc

SEQ ID NO: 1874853 - RNA, 19 nt, Artificial Sequence
  Description of Artificial Sequence: Synthetic oligonucleotide
ggcgugcaucaguucuaac

SEQ ID NO: 1874854 - RNA, 19 nt, Artificial Sequence
  Description of Artificial Sequence: Synthetic oligonucleotide
gcauacccacauguaagcu

SEQ ID NO: 1874855 - RNA, 19 nt, Artificial Sequence
  Description of Artificial Sequence: Synthetic oligonucleotide
gggaggaucgucacagcau

SEQ ID NO: 1874856 - RNA, 19 nt, Artificial Sequence
  Description of Artificial Sequence: Synthetic oligonucleotide
acgcagucuccuggcugca

SEQ ID NO: 1874857 - RNA, 19 nt, Artificial Sequence
  Description of Artificial Sequence: Synthetic oligonucleotide
aucuucugcuagggucaua

SEQ ID NO: 1874858 - RNA, 19 nt, Artificial Sequence
  Description of Artificial Sequence: Synthetic oligonucleotide
gcacaagccucgaucuucu

SEQ ID NO: 1874859 - RNA, 19 nt, Artificial Sequence
  Description of Artificial Sequence: Synthetic oligonucleotide
gcaucaguucuaacccugu

SEQ ID NO: 1874860 - RNA, 19 nt, Artificial Sequence
  Description of Artificial Sequence: Synthetic oligonucleotide
ccaaccugauuuaguugcu

SEQ ID NO: 1874861 - RNA, 19 nt, Artificial Sequence
  Description of Artificial Sequence: Synthetic oligonucleotide
guccugcauugaggccucc

SEQ ID NO: 1874862 - RNA, 19 nt, Artificial Sequence
  Description of Artificial Sequence: Synthetic oligonucleotide
ggcaagcacaagccucgau

SEQ ID NO: 1874863 - RNA, 19 nt, Artificial Sequence
  Description of Artificial Sequence: Synthetic oligonucleotide
caccucugguuuccuggau

SEQ ID NO: 1874864 - RNA, 19 nt, Artificial Sequence
  Description of Artificial Sequence: Synthetic oligonucleotide
caucuucugcuagggucau

SEQ ID NO: 1874865 - RNA, 19 nt, Artificial Sequence
  Description of Artificial Sequence: Synthetic oligonucleotide
gcggaccucuuugcgaagu

SEQ ID NO: 1874866 - RNA, 19 nt, Artificial Sequence
  Description of Artificial Sequence: Synthetic oligonucleotide
cccacauguaagcuaucuu

SEQ ID NO: 1874867 - RNA, 19 nt, Artificial Sequence
  Description of Artificial Sequence: Synthetic oligonucleotide
ccugcauugaggccuccuu

SEQ ID NO: 1874868 - RNA, 19 nt, Artificial Sequence
  Description of Artificial Sequence: Synthetic oligonucleotide
gcaggguugggaggaucgu

SEQ ID NO: 1874869 - RNA, 19 nt, Artificial Sequence
  Description of Artificial Sequence: Synthetic oligonucleotide
aagauuaaacuccuguugc

SEQ ID NO: 1874870 - RNA, 19 nt, Artificial Sequence
  Description of Artificial Sequence: Synthetic oligonucleotide
aaccaauucaaugugaacc

SEQ ID NO: 1874871 - RNA, 19 nt, Artificial Sequence
  Description of Artificial Sequence: Synthetic oligonucleotide
aagggaaaagauuaaacuc

SEQ ID NO: 1874872 - RNA, 19 nt, Artificial Sequence
  Description of Artificial Sequence: Synthetic oligonucleotide
uucaaugugaaccaggggc

SEQ ID NO: 1874873 - RNA, 19 nt, Artificial Sequence
  Description of Artificial Sequence: Synthetic oligonucleotide
auagauuugauagaaagac

SEQ ID NO: 1874874 - RNA, 19 nt, Artificial Sequence
  Description of Artificial Sequence: Synthetic oligonucleotide
uguuuaguaacuuuuaaac

SEQ ID NO: 1874875 - RNA, 19 nt, Artificial Sequence
  Description of Artificial Sequence: Synthetic oligonucleotide
aaagauuaaacuccuguug

SEQ ID NO: 1874876 - RNA, 19 nt, Artificial Sequence
  Description of Artificial Sequence: Synthetic oligonucleotide
uacauguucauaaauaggu

SEQ ID NO: 1874877 - RNA, 19 nt, Artificial Sequence
  Description of Artificial Sequence: Synthetic oligonucleotide
gauagaaagacuuacaugu

SEQ ID NO: 1874878 - RNA, 19 nt, Artificial Sequence
  Description of Artificial Sequence: Synthetic oligonucleotide
aauguuuaauguuugaauu

SEQ ID NO: 1874879 - RNA, 19 nt, Artificial Sequence
  Description of Artificial Sequence: Synthetic oligonucleotide
aagacuuacauguucauaa

SEQ ID NO: 1874880 - RNA, 19 nt, Artificial Sequence
  Description of Artificial Sequence: Synthetic oligonucleotide
ugugacauauccagaaagg

SEQ ID NO: 1874881 - RNA, 19 nt, Artificial Sequence
  Description of Artificial Sequence: Synthetic oligonucleotide
aguacagaaauguuuaaug

SEQ ID NO: 1874882 - RNA, 19 nt, Artificial Sequence
  Description of Artificial Sequence: Synthetic oligonucleotide
uuuuaaacaagggaaaaga

SEQ ID NO: 1874883 - RNA, 19 nt, Artificial Sequence
  Description of Artificial Sequence: Synthetic oligonucleotide
uuacauguucauaaauagg

SEQ ID NO: 1874884 - RNA, 19 nt, Artificial Sequence
  Description of Artificial Sequence: Synthetic oligonucleotide
agggaaaagauuaaacucc

SEQ ID NO: 1874885 - RNA, 19 nt, Artificial Sequence
  Description of Artificial Sequence: Synthetic oligonucleotide
uuaauguuugaauuguaca

SEQ ID NO: 1874886 - RNA, 19 nt, Artificial Sequence
  Description of Artificial Sequence: Synthetic oligonucleotide
uaauguuugaauuguacac

SEQ ID NO: 1874887 - RNA, 19 nt, Artificial Sequence
  Description of Artificial Sequence: Synthetic oligonucleotide
aauucaaugugaaccaggg

SEQ ID NO: 1874888 - RNA, 19 nt, Artificial Sequence
  Description of Artificial Sequence: Synthetic oligonucleotide
augaguuccuucuugguac

SEQ ID NO: 1874889 - RNA, 19 nt, Artificial Sequence
  Description of Artificial Sequence: Synthetic oligonucleotide
auuaaacuccuguugcccc

SEQ ID NO: 1874890 - RNA, 19 nt, Artificial Sequence
  Description of Artificial Sequence: Synthetic oligonucleotide
ucgauaagaaggcagguug

SEQ ID NO: 1874891 - RNA, 19 nt, Artificial Sequence
  Description of Artificial Sequence: Synthetic oligonucleotide
aagaacucauccuugccag

SEQ ID NO: 1874892 - RNA, 19 nt, Artificial Sequence
  Description of Artificial Sequence: Synthetic oligonucleotide
uucuugguaccuuaguggg

SEQ ID NO: 1874893 - RNA, 19 nt, Artificial Sequence
  Description of Artificial Sequence: Synthetic oligonucleotide
uaguaacuuuuaaacaagg

SEQ ID NO: 1874894 - RNA, 19 nt, Artificial Sequence
  Description of Artificial Sequence: Synthetic oligonucleotide
agauuaaacuccuguugcc

SEQ ID NO: 1874895 - RNA, 19 nt, Artificial Sequence
  Description of Artificial Sequence: Synthetic oligonucleotide
aaaagauuaaacuccuguu

SEQ ID NO: 1874896 - RNA, 19 nt, Artificial Sequence
  Description of Artificial Sequence: Synthetic oligonucleotide
aaacucuuagagcagggcu

SEQ ID NO: 1874897 - RNA, 19 nt, Artificial Sequence
  Description of Artificial Sequence: Synthetic oligonucleotide
ugauagaaagacuuacaug

SEQ ID NO: 1874898 - RNA, 19 nt, Artificial Sequence
  Description of Artificial Sequence: Synthetic oligonucleotide
uugaauuguacacuggcuc

SEQ ID NO: 1874899 - RNA, 19 nt, Artificial Sequence
  Description of Artificial Sequence: Synthetic oligonucleotide
uugauagaaagacuuacau

SEQ ID NO: 1874900 - RNA, 19 nt, Artificial Sequence
  Description of Artificial Sequence: Synthetic oligonucleotide
aaauagguaaugugaaaau

SEQ ID NO: 1874901 - RNA, 19 nt, Artificial Sequence
  Description of Artificial Sequence: Synthetic oligonucleotide
ugacauauccagaaaggca

SEQ ID NO: 1874902 - RNA, 19 nt, Artificial Sequence
  Description of Artificial Sequence: Synthetic oligonucleotide
agcacuacugucugaaggg

SEQ ID NO: 1874903 - RNA, 19 nt, Artificial Sequence
  Description of Artificial Sequence: Synthetic oligonucleotide
ugugaaaauuuccccaaug

SEQ ID NO: 1874904 - RNA, 19 nt, Artificial Sequence
  Description of Artificial Sequence: Synthetic oligonucleotide
uuuaaacaagggaaaagau

SEQ ID NO: 1874905 - RNA, 19 nt, Artificial Sequence
  Description of Artificial Sequence: Synthetic oligonucleotide
auguuuaauguuugaauug

SEQ ID NO: 1874906 - RNA, 19 nt, Artificial Sequence
  Description of Artificial Sequence: Synthetic oligonucleotide
gagauuuggaagaggaggg

SEQ ID NO: 1874907 - RNA, 19 nt, Artificial Sequence
  Description of Artificial Sequence: Synthetic oligonucleotide
uuugaauuguacacuggcu

SEQ ID NO: 1874908 - RNA, 19 nt, Artificial Sequence
  Description of Artificial Sequence: Synthetic oligonucleotide
agugggcaagaccuuagcc

SEQ ID NO: 1874909 - RNA, 19 nt, Artificial Sequence
  Description of Artificial Sequence: Synthetic oligonucleotide
caggauaccgaagauaagg

SEQ ID NO: 1874910 - RNA, 19 nt, Artificial Sequence
  Description of Artificial Sequence: Synthetic oligonucleotide
uguuugaauuguacacugg

SEQ ID NO: 1874911 - RNA, 19 nt, Artificial Sequence
  Description of Artificial Sequence: Synthetic oligonucleotide
cagacaugugaguagagag

SEQ ID NO: 1874912 - RNA, 19 nt, Artificial Sequence
  Description of Artificial Sequence: Synthetic oligonucleotide
uguuuaauguuugaauugu

SEQ ID NO: 1874913 - RNA, 19 nt, Artificial Sequence
  Description of Artificial Sequence: Synthetic oligonucleotide
agggcaaccaauucaaugu

SEQ ID NO: 1874914 - RNA, 19 nt, Artificial Sequence
  Description of Artificial Sequence: Synthetic oligonucleotide
agagagugagagcacagag

SEQ ID NO: 1874915 - RNA, 19 nt, Artificial Sequence
  Description of Artificial Sequence: Synthetic oligonucleotide
uuuguuuccugacuugcac

SEQ ID NO: 1874916 - RNA, 19 nt, Artificial Sequence
  Description of Artificial Sequence: Synthetic oligonucleotide
gaaaagauuaaacuccugu

SEQ ID NO: 1874917 - RNA, 19 nt, Artificial Sequence
  Description of Artificial Sequence: Synthetic oligonucleotide
ucaaugugaaccaggggcu

SEQ ID NO: 1874918 - RNA, 19 nt, Artificial Sequence
  Description of Artificial Sequence: Synthetic oligonucleotide
ugaauuguacacuggcucu

SEQ ID NO: 1874919 - RNA, 19 nt, Artificial Sequence
  Description of Artificial Sequence: Synthetic oligonucleotide
aaugugaaccaggggcucc

SEQ ID NO: 1874920 - RNA, 19 nt, Artificial Sequence
  Description of Artificial Sequence: Synthetic oligonucleotide
uagaaagacuuacauguuc

SEQ ID NO: 1874921 - RNA, 19 nt, Artificial Sequence
  Description of Artificial Sequence: Synthetic oligonucleotide
cugggcuaaacucuuagag

SEQ ID NO: 1874922 - RNA, 19 nt, Artificial Sequence
  Description of Artificial Sequence: Synthetic oligonucleotide
uguucauaaauagguaaug

SEQ ID NO: 1874923 - RNA, 19 nt, Artificial Sequence
  Description of Artificial Sequence: Synthetic oligonucleotide
aaggcagguuggcagagag

SEQ ID NO: 1874924 - RNA, 19 nt, Artificial Sequence
  Description of Artificial Sequence: Synthetic oligonucleotide
ucggaggagacuuuggugu

SEQ ID NO: 1874925 - RNA, 19 nt, Artificial Sequence
  Description of Artificial Sequence: Synthetic oligonucleotide
uguuuccugacuugcacgc

SEQ ID NO: 1874926 - RNA, 19 nt, Artificial Sequence
  Description of Artificial Sequence: Synthetic oligonucleotide
aagauaaggccuguggcug

SEQ ID NO: 1874927 - RNA, 19 nt, Artificial Sequence
  Description of Artificial Sequence: Synthetic oligonucleotide
ugggcuaaacucuuagagc

SEQ ID NO: 1874928 - RNA, 19 nt, Artificial Sequence
  Description of Artificial Sequence: Synthetic oligonucleotide
uagauuugauagaaagacu

SEQ ID NO: 1874929 - RNA, 19 nt, Artificial Sequence
  Description of Artificial Sequence: Synthetic oligonucleotide
cugcuaaagggcacgaggg

SEQ ID NO: 1874930 - RNA, 19 nt, Artificial Sequence
  Description of Artificial Sequence: Synthetic oligonucleotide
gguaaugugaaaauuuccc

SEQ ID NO: 1874931 - RNA, 19 nt, Artificial Sequence
  Description of Artificial Sequence: Synthetic oligonucleotide
accaauucaaugugaacca

SEQ ID NO: 1874932 - RNA, 19 nt, Artificial Sequence
  Description of Artificial Sequence: Synthetic oligonucleotide
aaagcagcugguuuuguuu

SEQ ID NO: 1874933 - RNA, 19 nt, Artificial Sequence
  Description of Artificial Sequence: Synthetic oligonucleotide
cugucgauaagaaggcagg

SEQ ID NO: 1874934 - RNA, 19 nt, Artificial Sequence
  Description of Artificial Sequence: Synthetic oligonucleotide
aauagguaaugugaaaauu

SEQ ID NO: 1874935 - RNA, 19 nt, Artificial Sequence
  Description of Artificial Sequence: Synthetic oligonucleotide
ugaguagagaggugggcag

SEQ ID NO: 1874936 - RNA, 19 nt, Artificial Sequence
  Description of Artificial Sequence: Synthetic oligonucleotide
aggauaccgaagauaaggc

SEQ ID NO: 1874937 - RNA, 19 nt, Artificial Sequence
  Description of Artificial Sequence: Synthetic oligonucleotide
cuuagagcagggcugcucc

SEQ ID NO: 1874938 - RNA, 19 nt, Artificial Sequence
  Description of Artificial Sequence: Synthetic oligonucleotide
ucaaagggacaugaguucc

SEQ ID NO: 1874939 - RNA, 19 nt, Artificial Sequence
  Description of Artificial Sequence: Synthetic oligonucleotide
aggggcucccuguagauuc

SEQ ID NO: 1874940 - RNA, 19 nt, Artificial Sequence
  Description of Artificial Sequence: Synthetic oligonucleotide
ugggugagagcccugggcc

SEQ ID NO: 1874941 - RNA, 19 nt, Artificial Sequence
  Description of Artificial Sequence: Synthetic oligonucleotide
uagcauacagccuccaccu

SEQ ID NO: 1874942 - RNA, 19 nt, Artificial Sequence
  Description of Artificial Sequence: Synthetic oligonucleotide
ucacuugugggauucugug

SEQ ID NO: 1874943 - RNA, 19 nt, Artificial Sequence
  Description of Artificial Sequence: Synthetic oligonucleotide
gagacuuuggugucugggc

SEQ ID NO: 1874944 - RNA, 19 nt, Artificial Sequence
  Description of Artificial Sequence: Synthetic oligonucleotide
cuaaacucuuagagcaggg

SEQ ID NO: 1874945 - RNA, 19 nt, Artificial Sequence
  Description of Artificial Sequence: Synthetic oligonucleotide
agauuugauagaaagacuu

SEQ ID NO: 1874946 - RNA, 19 nt, Artificial Sequence
  Description of Artificial Sequence: Synthetic oligonucleotide
uguggguacuuccuugccc

SEQ ID NO: 1874947 - RNA, 19 nt, Artificial Sequence
  Description of Artificial Sequence: Synthetic oligonucleotide
cucuguaggagccagcuuc

SEQ ID NO: 1874948 - RNA, 19 nt, Artificial Sequence
  Description of Artificial Sequence: Synthetic oligonucleotide
uccccaaugcacauggaac

SEQ ID NO: 1874949 - RNA, 19 nt, Artificial Sequence
  Description of Artificial Sequence: Synthetic oligonucleotide
agugagagcacagagugga

SEQ ID NO: 1874950 - RNA, 19 nt, Artificial Sequence
  Description of Artificial Sequence: Synthetic oligonucleotide
uuagugggcaagaccuuag

SEQ ID NO: 1874951 - RNA, 19 nt, Artificial Sequence
  Description of Artificial Sequence: Synthetic oligonucleotide
auucacacugggugagagc

SEQ ID NO: 1874952 - RNA, 19 nt, Artificial Sequence
  Description of Artificial Sequence: Synthetic oligonucleotide
ggugcauuuggcuagcggc

SEQ ID NO: 1874953 - RNA, 19 nt, Artificial Sequence
  Description of Artificial Sequence: Synthetic oligonucleotide
guuccugcuguuuaguaac

SEQ ID NO: 1874954 - RNA, 19 nt, Artificial Sequence
  Description of Artificial Sequence: Synthetic oligonucleotide
cauguucauaaauagguaa

SEQ ID NO: 1874955 - RNA, 19 nt, Artificial Sequence
  Description of Artificial Sequence: Synthetic oligonucleotide
cagcacuacugucugaagg

SEQ ID NO: 1874956 - RNA, 19 nt, Artificial Sequence
  Description of Artificial Sequence: Synthetic oligonucleotide
ugggcaagaccuuagcccu

SEQ ID NO: 1874957 - RNA, 19 nt, Artificial Sequence
  Description of Artificial Sequence: Synthetic oligonucleotide
agagagauuuggaagagga

SEQ ID NO: 1874958 - RNA, 19 nt, Artificial Sequence
  Description of Artificial Sequence: Synthetic oligonucleotide
cuggcucugugacauaucc

SEQ ID NO: 1874959 - RNA, 19 nt, Artificial Sequence
  Description of Artificial Sequence: Synthetic oligonucleotide
agaaagacuuacauguuca

SEQ ID NO: 1874960 - RNA, 19 nt, Artificial Sequence
  Description of Artificial Sequence: Synthetic oligonucleotide
uaccuuagugggcaagacc

SEQ ID NO: 1874961 - RNA, 19 nt, Artificial Sequence
  Description of Artificial Sequence: Synthetic oligonucleotide
ugguccucaagcccggugc

SEQ ID NO: 1874962 - RNA, 19 nt, Artificial Sequence
  Description of Artificial Sequence: Synthetic oligonucleotide
cuaaagggcacgagggcag

SEQ ID NO: 1874963 - RNA, 19 nt, Artificial Sequence
  Description of Artificial Sequence: Synthetic oligonucleotide
acucuuagagcagggcugc

SEQ ID NO: 1874964 - RNA, 19 nt, Artificial Sequence
  Description of Artificial Sequence: Synthetic oligonucleotide
gauaagaaggcagguuggc

SEQ ID NO: 1874965 - RNA, 19 nt, Artificial Sequence
  Description of Artificial Sequence: Synthetic oligonucleotide
agacaugugaguagagagg

SEQ ID NO: 1874966 - RNA, 19 nt, Artificial Sequence
  Description of Artificial Sequence: Synthetic oligonucleotide
uuaaacuccuguugcccca

SEQ ID NO: 1874967 - RNA, 19 nt, Artificial Sequence
  Description of Artificial Sequence: Synthetic oligonucleotide
uucugugcugucgauaaga

SEQ ID NO: 1874968 - RNA, 19 nt, Artificial Sequence
  Description of Artificial Sequence: Synthetic oligonucleotide
ugacuugcacgcuugccug

SEQ ID NO: 1874969 - RNA, 19 nt, Artificial Sequence
  Description of Artificial Sequence: Synthetic oligonucleotide
ugcuaaagggcacgagggc

SEQ ID NO: 1874970 - RNA, 19 nt, Artificial Sequence
  Description of Artificial Sequence: Synthetic oligonucleotide
ugggauucugugcugucga

SEQ ID NO: 1874971 - RNA, 19 nt, Artificial Sequence
  Description of Artificial Sequence: Synthetic oligonucleotide
gauaccgaagauaaggccu

SEQ ID NO: 1874972 - RNA, 19 nt, Artificial Sequence
  Description of Artificial Sequence: Synthetic oligonucleotide
aacuccuguugccccagag

SEQ ID NO: 1874973 - RNA, 19 nt, Artificial Sequence
  Description of Artificial Sequence: Synthetic oligonucleotide
agauaaggccuguggcugg

SEQ ID NO: 1874974 - RNA, 19 nt, Artificial Sequence
  Description of Artificial Sequence: Synthetic oligonucleotide
gggcuaaacucuuagagca

SEQ ID NO: 1874975 - RNA, 19 nt, Artificial Sequence
  Description of Artificial Sequence: Synthetic oligonucleotide
cucccuagcauacagccuc

SEQ ID NO: 1874976 - RNA, 19 nt, Artificial Sequence
  Description of Artificial Sequence: Synthetic oligonucleotide
agacuuuggugucugggcu

SEQ ID NO: 1874977 - RNA, 19 nt, Artificial Sequence
  Description of Artificial Sequence: Synthetic oligonucleotide
gaagauaaggccuguggcu

SEQ ID NO: 1874978 - RNA, 19 nt, Artificial Sequence
  Description of Artificial Sequence: Synthetic oligonucleotide
uuguacacuggcucuguga

SEQ ID NO: 1874979 - RNA, 19 nt, Artificial Sequence
  Description of Artificial Sequence: Synthetic oligonucleotide
gccacggucauucacacug

SEQ ID NO: 1874980 - RNA, 19 nt, Artificial Sequence
  Description of Artificial Sequence: Synthetic oligonucleotide
cagggcaaccaauucaaug

SEQ ID NO: 1874981 - RNA, 19 nt, Artificial Sequence
  Description of Artificial Sequence: Synthetic oligonucleotide
ucuguaggagccagcuuca

SEQ ID NO: 1874982 - RNA, 19 nt, Artificial Sequence
  Description of Artificial Sequence: Synthetic oligonucleotide
auuggccccagacauguga

SEQ ID NO: 1874983 - RNA, 19 nt, Artificial Sequence
  Description of Artificial Sequence: Synthetic oligonucleotide
uuggggacagacuuccacu

SEQ ID NO: 1874984 - RNA, 19 nt, Artificial Sequence
  Description of Artificial Sequence: Synthetic oligonucleotide
cuggcaguggaccuggaac

SEQ ID NO: 1874985 - RNA, 19 nt, Artificial Sequence
  Description of Artificial Sequence: Synthetic oligonucleotide
uuggugucugggcuaaacu

SEQ ID NO: 1874986 - RNA, 19 nt, Artificial Sequence
  Description of Artificial Sequence: Synthetic oligonucleotide
acgcuugccuguuuucugg

SEQ ID NO: 1874987 - RNA, 19 nt, Artificial Sequence
  Description of Artificial Sequence: Synthetic oligonucleotide
uuccccaaugcacauggaa

SEQ ID NO: 1874988 - RNA, 19 nt, Artificial Sequence
  Description of Artificial Sequence: Synthetic oligonucleotide
acuuacauguucauaaaua

SEQ ID NO: 1874989 - RNA, 19 nt, Artificial Sequence
  Description of Artificial Sequence: Synthetic oligonucleotide
acauggaacccuugggcug

SEQ ID NO: 1874990 - RNA, 19 nt, Artificial Sequence
  Description of Artificial Sequence: Synthetic oligonucleotide
agcaaccugggacagggca

SEQ ID NO: 1874991 - RNA, 19 nt, Artificial Sequence
  Description of Artificial Sequence: Synthetic oligonucleotide
aaagacuuacauguucaua

SEQ ID NO: 1874992 - RNA, 19 nt, Artificial Sequence
  Description of Artificial Sequence: Synthetic oligonucleotide
cauccuugccaggauaccg

SEQ ID NO: 1874993 - RNA, 19 nt, Artificial Sequence
  Description of Artificial Sequence: Synthetic oligonucleotide
ugaaccaggggcucccugu

SEQ ID NO: 1874994 - RNA, 19 nt, Artificial Sequence
  Description of Artificial Sequence: Synthetic oligonucleotide
accuggaacccagagagug

SEQ ID NO: 1874995 - RNA, 19 nt, Artificial Sequence
  Description of Artificial Sequence: Synthetic oligonucleotide
uguaggagccagcuucagu

SEQ ID NO: 1874996 - RNA, 19 nt, Artificial Sequence
  Description of Artificial Sequence: Synthetic oligonucleotide
acucaaagggacaugaguu

SEQ ID NO: 1874997 - RNA, 19 nt, Artificial Sequence
  Description of Artificial Sequence: Synthetic oligonucleotide
cuguuuaguaacuuuuaaa

SEQ ID NO: 1874998 - RNA, 19 nt, Artificial Sequence
  Description of Artificial Sequence: Synthetic oligonucleotide
gaauuguacacuggcucug

SEQ ID NO: 1874999 - RNA, 19 nt, Artificial Sequence
  Description of Artificial Sequence: Synthetic oligonucleotide
uggaccuggaacccagaga

SEQ ID NO: 1875000 - RNA, 19 nt, Artificial Sequence
  Description of Artificial Sequence: Synthetic oligonucleotide
cuuggggacagacuuccac

SEQ ID NO: 1875001 - RNA, 19 nt, Artificial Sequence
  Description of Artificial Sequence: Synthetic oligonucleotide
cacuugugggauucugugc

SEQ ID NO: 1875002 - RNA, 19 nt, Artificial Sequence
  Description of Artificial Sequence: Synthetic oligonucleotide
cuggggugcauuuggcuag

SEQ ID NO: 1875003 - RNA, 19 nt, Artificial Sequence
  Description of Artificial Sequence: Synthetic oligonucleotide
ggauaccgaagauaaggcc

SEQ ID NO: 1875004 - RNA, 19 nt, Artificial Sequence
  Description of Artificial Sequence: Synthetic oligonucleotide
auuuggaagaggaggguca

SEQ ID NO: 1875005 - RNA, 19 nt, Artificial Sequence
  Description of Artificial Sequence: Synthetic oligonucleotide
uuuggcuagcggcccacca

SEQ ID NO: 1875006 - RNA, 19 nt, Artificial Sequence
  Description of Artificial Sequence: Synthetic oligonucleotide
ccugcuaaagggcacgagg

SEQ ID NO: 1875007 - RNA, 19 nt, Artificial Sequence
  Description of Artificial Sequence: Synthetic oligonucleotide
ggcagagagauuuggaaga

SEQ ID NO: 1875008 - RNA, 19 nt, Artificial Sequence
  Description of Artificial Sequence: Synthetic oligonucleotide
cauggaacccuugggcugg

SEQ ID NO: 1875009 - RNA, 19 nt, Artificial Sequence
  Description of Artificial Sequence: Synthetic oligonucleotide
gcuaaacucuuagagcagg

SEQ ID NO: 1875010 - RNA, 19 nt, Artificial Sequence
  Description of Artificial Sequence: Synthetic oligonucleotide
cucggaggagacuuuggug

SEQ ID NO: 1875011 - RNA, 19 nt, Artificial Sequence
  Description of Artificial Sequence: Synthetic oligonucleotide
auguucauaaauagguaau

SEQ ID NO: 1875012 - RNA, 19 nt, Artificial Sequence
  Description of Artificial Sequence: Synthetic oligonucleotide
uagugggcaagaccuuagc

SEQ ID NO: 1875013 - RNA, 19 nt, Artificial Sequence
  Description of Artificial Sequence: Synthetic oligonucleotide
cuugcccucccuagcauac

SEQ ID NO: 1875014 - RNA, 19 nt, Artificial Sequence
  Description of Artificial Sequence: Synthetic oligonucleotide
cuugguaccuuagugggca

SEQ ID NO: 1875015 - RNA, 19 nt, Artificial Sequence
  Description of Artificial Sequence: Synthetic oligonucleotide
guggauaccagggcagggg

SEQ ID NO: 1875016 - RNA, 19 nt, Artificial Sequence
  Description of Artificial Sequence: Synthetic oligonucleotide
uuccugacuugcacgcuug

SEQ ID NO: 1875017 - RNA, 19 nt, Artificial Sequence
  Description of Artificial Sequence: Synthetic oligonucleotide
aaaggcccagacgucucuc

SEQ ID NO: 1875018 - RNA, 19 nt, Artificial Sequence
  Description of Artificial Sequence: Synthetic oligonucleotide
gaacccagagagugagagc

SEQ ID NO: 1875019 - RNA, 19 nt, Artificial Sequence
  Description of Artificial Sequence: Synthetic oligonucleotide
aggccacggucauucacac

SEQ ID NO: 1875020 - RNA, 19 nt, Artificial Sequence
  Description of Artificial Sequence: Synthetic oligonucleotide
agacuuacauguucauaaa

SEQ ID NO: 1875021 - RNA, 19 nt, Artificial Sequence
  Description of Artificial Sequence: Synthetic oligonucleotide
cuagcggcccaccacuggc

SEQ ID NO: 1875022 - RNA, 19 nt, Artificial Sequence
  Description of Artificial Sequence: Synthetic oligonucleotide
auaagaaggcagguuggca

SEQ ID NO: 1875023 - RNA, 19 nt, Artificial Sequence
  Description of Artificial Sequence: Synthetic oligonucleotide
acuacugucugaagggaca

SEQ ID NO: 1875024 - RNA, 19 nt, Artificial Sequence
  Description of Artificial Sequence: Synthetic oligonucleotide
cacuacugucugaagggac

SEQ ID NO: 1875025 - RNA, 19 nt, Artificial Sequence
  Description of Artificial Sequence: Synthetic oligonucleotide
gcacauggaacccuugggc

SEQ ID NO: 1875026 - RNA, 19 nt, Artificial Sequence
  Description of Artificial Sequence: Synthetic oligonucleotide
uuggcuagcggcccaccac

SEQ ID NO: 1875027 - RNA, 19 nt, Artificial Sequence
  Description of Artificial Sequence: Synthetic oligonucleotide
accuguuccugcuguuuag

SEQ ID NO: 1875028 - RNA, 19 nt, Artificial Sequence
  Description of Artificial Sequence: Synthetic oligonucleotide
gaguggauaccagggcagg

SEQ ID NO: 1875029 - RNA, 19 nt, Artificial Sequence
  Description of Artificial Sequence: Synthetic oligonucleotide
ugcauuuggcuagcggccc

SEQ ID NO: 1875030 - RNA, 19 nt, Artificial Sequence
  Description of Artificial Sequence: Synthetic oligonucleotide
uggcuagcggcccaccacu

SEQ ID NO: 1875031 - RNA, 19 nt, Artificial Sequence
  Description of Artificial Sequence: Synthetic oligonucleotide
uggccuuccagaccugcac

SEQ ID NO: 1875032 - RNA, 19 nt, Artificial Sequence
  Description of Artificial Sequence: Synthetic oligonucleotide
uccucaagcccggugcucc

SEQ ID NO: 1875033 - RNA, 19 nt, Artificial Sequence
  Description of Artificial Sequence: Synthetic oligonucleotide
uccuguugccccagaggcc

SEQ ID NO: 1875034 - RNA, 19 nt, Artificial Sequence
  Description of Artificial Sequence: Synthetic oligonucleotide
auuguacacuggcucugug

SEQ ID NO: 1875035 - RNA, 19 nt, Artificial Sequence
  Description of Artificial Sequence: Synthetic oligonucleotide
aguggauaccagggcaggg

SEQ ID NO: 1875036 - RNA, 19 nt, Artificial Sequence
  Description of Artificial Sequence: Synthetic oligonucleotide
aacucauccuugccaggau

SEQ ID NO: 1875037 - RNA, 19 nt, Artificial Sequence
  Description of Artificial Sequence: Synthetic oligonucleotide
ugucgauaagaaggcaggu

SEQ ID NO: 1875038 - RNA, 19 nt, Artificial Sequence
  Description of Artificial Sequence: Synthetic oligonucleotide
cugugcugucgauaagaag

SEQ ID NO: 1875039 - RNA, 19 nt, Artificial Sequence
  Description of Artificial Sequence: Synthetic oligonucleotide
gagugagagcacagagugg

SEQ ID NO: 1875040 - RNA, 19 nt, Artificial Sequence
  Description of Artificial Sequence: Synthetic oligonucleotide
uaaacuccuguugccccag

SEQ ID NO: 1875041 - RNA, 19 nt, Artificial Sequence
  Description of Artificial Sequence: Synthetic oligonucleotide
gugggauucugugcugucg

SEQ ID NO: 1875042 - RNA, 19 nt, Artificial Sequence
  Description of Artificial Sequence: Synthetic oligonucleotide
ccgaagauaaggccugugg

SEQ ID NO: 1875043 - RNA, 19 nt, Artificial Sequence
  Description of Artificial Sequence: Synthetic oligonucleotide
uguguccuuggggacagac

SEQ ID NO: 1875044 - RNA, 19 nt, Artificial Sequence
  Description of Artificial Sequence: Synthetic oligonucleotide
ccuucuugguaccuuagug

SEQ ID NO: 1875045 - RNA, 19 nt, Artificial Sequence
  Description of Artificial Sequence: Synthetic oligonucleotide
guggaccuggaacccagag

SEQ ID NO: 1875046 - RNA, 19 nt, Artificial Sequence
  Description of Artificial Sequence: Synthetic oligonucleotide
cuuccuugcccucccuagc

SEQ ID NO: 1875047 - RNA, 19 nt, Artificial Sequence
  Description of Artificial Sequence: Synthetic oligonucleotide
uugccuguuuucugguccu

SEQ ID NO: 1875048 - RNA, 19 nt, Artificial Sequence
  Description of Artificial Sequence: Synthetic oligonucleotide
gugcauuuggcuagcggcc

SEQ ID NO: 1875049 - RNA, 19 nt, Artificial Sequence
  Description of Artificial Sequence: Synthetic oligonucleotide
cuacugucugaagggacag

SEQ ID NO: 1875050 - RNA, 19 nt, Artificial Sequence
  Description of Artificial Sequence: Synthetic oligonucleotide
auucugugcugucgauaag

SEQ ID NO: 1875051 - RNA, 19 nt, Artificial Sequence
  Description of Artificial Sequence: Synthetic oligonucleotide
agucacccuggcccugccc

SEQ ID NO: 1875052 - RNA, 19 nt, Artificial Sequence
  Description of Artificial Sequence: Synthetic oligonucleotide
ucugggucacuugugggau

SEQ ID NO: 1875053 - RNA, 19 nt, Artificial Sequence
  Description of Artificial Sequence: Synthetic oligonucleotide
uuccugcuguuuaguaacu

SEQ ID NO: 1875054 - RNA, 19 nt, Artificial Sequence
  Description of Artificial Sequence: Synthetic oligonucleotide
aaccugggacagggcaacc

SEQ ID NO: 1875055 - RNA, 19 nt, Artificial Sequence
  Description of Artificial Sequence: Synthetic oligonucleotide
cacggucauucacacuggg

SEQ ID NO: 1875056 - RNA, 19 nt, Artificial Sequence
  Description of Artificial Sequence: Synthetic oligonucleotide
gaaggaaagcagcugguuu

SEQ ID NO: 1875057 - RNA, 19 nt, Artificial Sequence
  Description of Artificial Sequence: Synthetic oligonucleotide
ucccuagcauacagccucc

SEQ ID NO: 1875058 - RNA, 19 nt, Artificial Sequence
  Description of Artificial Sequence: Synthetic oligonucleotide
ggucacauuggccccagac

SEQ ID NO: 1875059 - RNA, 19 nt, Artificial Sequence
  Description of Artificial Sequence: Synthetic oligonucleotide
aaagggacaugaguuccuu

SEQ ID NO: 1875060 - RNA, 19 nt, Artificial Sequence
  Description of Artificial Sequence: Synthetic oligonucleotide
uccuucugacaaaggccca

SEQ ID NO: 1875061 - RNA, 19 nt, Artificial Sequence
  Description of Artificial Sequence: Synthetic oligonucleotide
caguggaccuggaacccag

SEQ ID NO: 1875062 - RNA, 19 nt, Artificial Sequence
  Description of Artificial Sequence: Synthetic oligonucleotide
ucauccuugccaggauacc

SEQ ID NO: 1875063 - RNA, 19 nt, Artificial Sequence
  Description of Artificial Sequence: Synthetic oligonucleotide
gugcugucgauaagaaggc

SEQ ID NO: 1875064 - RNA, 19 nt, Artificial Sequence
  Description of Artificial Sequence: Synthetic oligonucleotide
gaggggucaagggaagaac

SEQ ID NO: 1875065 - RNA, 19 nt, Artificial Sequence
  Description of Artificial Sequence: Synthetic oligonucleotide
cuugugggauucugugcug

SEQ ID NO: 1875066 - RNA, 19 nt, Artificial Sequence
  Description of Artificial Sequence: Synthetic oligonucleotide
gacgucucucugugcacug

SEQ ID NO: 1875067 - RNA, 19 nt, Artificial Sequence
  Description of Artificial Sequence: Synthetic oligonucleotide
gaggccacggucauucaca

SEQ ID NO: 1875068 - RNA, 19 nt, Artificial Sequence
  Description of Artificial Sequence: Synthetic oligonucleotide
ugggccuggccuuccagac

SEQ ID NO: 1875069 - RNA, 19 nt, Artificial Sequence
  Description of Artificial Sequence: Synthetic oligonucleotide
auuuggcuagcggcccacc

SEQ ID NO: 1875070 - RNA, 19 nt, Artificial Sequence
  Description of Artificial Sequence: Synthetic oligonucleotide
ucuuagagcagggcugcuc

SEQ ID NO: 1875071 - RNA, 19 nt, Artificial Sequence
  Description of Artificial Sequence: Synthetic oligonucleotide
agggaagaacucauccuug

SEQ ID NO: 1875072 - RNA, 19 nt, Artificial Sequence
  Description of Artificial Sequence: Synthetic oligonucleotide
cacgcuugccuguuuucug

SEQ ID NO: 1875073 - RNA, 19 nt, Artificial Sequence
  Description of Artificial Sequence: Synthetic oligonucleotide
agccaagccugcccagggg

SEQ ID NO: 1875074 - RNA, 19 nt, Artificial Sequence
  Description of Artificial Sequence: Synthetic oligonucleotide
uccugacuugcacgcuugc

SEQ ID NO: 1875075 - RNA, 19 nt, Artificial Sequence
  Description of Artificial Sequence: Synthetic oligonucleotide
aggagccagcuucagucca

SEQ ID NO: 1875076 - RNA, 19 nt, Artificial Sequence
  Description of Artificial Sequence: Synthetic oligonucleotide
gcuccuucugacaaaggcc

SEQ ID NO: 1875077 - RNA, 19 nt, Artificial Sequence
  Description of Artificial Sequence: Synthetic oligonucleotide
uugugggauucugugcugu

SEQ ID NO: 1875078 - RNA, 19 nt, Artificial Sequence
  Description of Artificial Sequence: Synthetic oligonucleotide
ggucauucacacuggguga

SEQ ID NO: 1875079 - RNA, 19 nt, Artificial Sequence
  Description of Artificial Sequence: Synthetic oligonucleotide
cggucauucacacugggug

SEQ ID NO: 1875080 - RNA, 19 nt, Artificial Sequence
  Description of Artificial Sequence: Synthetic oligonucleotide
acaaaggcccagacgucuc

SEQ ID NO: 1875081 - RNA, 19 nt, Artificial Sequence
  Description of Artificial Sequence: Synthetic oligonucleotide
accagagcucagcacuacu

SEQ ID NO: 1875082 - RNA, 19 nt, Artificial Sequence
  Description of Artificial Sequence: Synthetic oligonucleotide
ucaagcccggugcuccuuc

SEQ ID NO: 1875083 - RNA, 19 nt, Artificial Sequence
  Description of Artificial Sequence: Synthetic oligonucleotide
gguacuuccuugcccuccc

SEQ ID NO: 1875084 - RNA, 19 nt, Artificial Sequence
  Description of Artificial Sequence: Synthetic oligonucleotide
cuguggguacuuccuugcc

SEQ ID NO: 1875085 - RNA, 19 nt, Artificial Sequence
  Description of Artificial Sequence: Synthetic oligonucleotide
acucauccuugccaggaua

SEQ ID NO: 1875086 - RNA, 19 nt, Artificial Sequence
  Description of Artificial Sequence: Synthetic oligonucleotide
cacauuggccccagacaug

SEQ ID NO: 1875087 - RNA, 19 nt, Artificial Sequence
  Description of Artificial Sequence: Synthetic oligonucleotide
ugugggauucugugcuguc

SEQ ID NO: 1875088 - RNA, 19 nt, Artificial Sequence
  Description of Artificial Sequence: Synthetic oligonucleotide
uagagcagggcugcuccug

SEQ ID NO: 1875089 - RNA, 19 nt, Artificial Sequence
  Description of Artificial Sequence: Synthetic oligonucleotide
ggaacccuugggcuggcag

SEQ ID NO: 1875090 - RNA, 19 nt, Artificial Sequence
  Description of Artificial Sequence: Synthetic oligonucleotide
uccuugccaggauaccgaa

SEQ ID NO: 1875091 - RNA, 19 nt, Artificial Sequence
  Description of Artificial Sequence: Synthetic oligonucleotide
cagccaagccugcccaggg

SEQ ID NO: 1875092 - RNA, 19 nt, Artificial Sequence
  Description of Artificial Sequence: Synthetic oligonucleotide
gggcaaccaauucaaugug

SEQ ID NO: 1875093 - RNA, 19 nt, Artificial Sequence
  Description of Artificial Sequence: Synthetic oligonucleotide
cacucaaagggacaugagu

SEQ ID NO: 1875094 - RNA, 19 nt, Artificial Sequence
  Description of Artificial Sequence: Synthetic oligonucleotide
auagaaagacuuacauguu

SEQ ID NO: 1875095 - RNA, 19 nt, Artificial Sequence
  Description of Artificial Sequence: Synthetic oligonucleotide
gcuguuuaguaacuuuuaa

SEQ ID NO: 1875096 - RNA, 19 nt, Artificial Sequence
  Description of Artificial Sequence: Synthetic oligonucleotide
uuuccccaaugcacaugga

SEQ ID NO: 1875097 - RNA, 19 nt, Artificial Sequence
  Description of Artificial Sequence: Synthetic oligonucleotide
uacuuccuugcccucccua

SEQ ID NO: 1875098 - RNA, 19 nt, Artificial Sequence
  Description of Artificial Sequence: Synthetic oligonucleotide
agcacagaguggauaccag

SEQ ID NO: 1875099 - RNA, 19 nt, Artificial Sequence
  Description of Artificial Sequence: Synthetic oligonucleotide
gccaggauaccgaagauaa

SEQ ID NO: 1875100 - RNA, 19 nt, Artificial Sequence
  Description of Artificial Sequence: Synthetic oligonucleotide
gggugcauuuggcuagcgg

SEQ ID NO: 1875101 - RNA, 19 nt, Artificial Sequence
  Description of Artificial Sequence: Synthetic oligonucleotide
acuuccacucaaagggaca

SEQ ID NO: 1875102 - RNA, 19 nt, Artificial Sequence
  Description of Artificial Sequence: Synthetic oligonucleotide
cugcaguggggcaggugcc

SEQ ID NO: 1875103 - RNA, 19 nt, Artificial Sequence
  Description of Artificial Sequence: Synthetic oligonucleotide
agacgucucucugugcacu

SEQ ID NO: 1875104 - RNA, 19 nt, Artificial Sequence
  Description of Artificial Sequence: Synthetic oligonucleotide
gacaaaggcccagacgucu

SEQ ID NO: 1875105 - RNA, 19 nt, Artificial Sequence
  Description of Artificial Sequence: Synthetic oligonucleotide
uugcacgcuugccuguuuu

SEQ ID NO: 1875106 - RNA, 19 nt, Artificial Sequence
  Description of Artificial Sequence: Synthetic oligonucleotide
uccugcuaaagggcacgag

SEQ ID NO: 1875107 - RNA, 19 nt, Artificial Sequence
  Description of Artificial Sequence: Synthetic oligonucleotide
ccuaguuggggccuguguc

SEQ ID NO: 1875108 - RNA, 19 nt, Artificial Sequence
  Description of Artificial Sequence: Synthetic oligonucleotide
cacauggaacccuugggcu

SEQ ID NO: 1875109 - RNA, 19 nt, Artificial Sequence
  Description of Artificial Sequence: Synthetic oligonucleotide
uggaacccagagagugaga

SEQ ID NO: 1875110 - RNA, 19 nt, Artificial Sequence
  Description of Artificial Sequence: Synthetic oligonucleotide
ugcugucgauaagaaggca

SEQ ID NO: 1875111 - RNA, 19 nt, Artificial Sequence
  Description of Artificial Sequence: Synthetic oligonucleotide
aaacuccuguugccccaga

SEQ ID NO: 1875112 - RNA, 19 nt, Artificial Sequence
  Description of Artificial Sequence: Synthetic oligonucleotide
uaguuggggccuguguccu

SEQ ID NO: 1875113 - RNA, 19 nt, Artificial Sequence
  Description of Artificial Sequence: Synthetic oligonucleotide
aacccuugggcuggcaguu

SEQ ID NO: 1875114 - RNA, 19 nt, Artificial Sequence
  Description of Artificial Sequence: Synthetic oligonucleotide
agacuuccacucaaaggga

SEQ ID NO: 1875115 - RNA, 19 nt, Artificial Sequence
  Description of Artificial Sequence: Synthetic oligonucleotide
ccuguugccccagaggccc

SEQ ID NO: 1875116 - RNA, 19 nt, Artificial Sequence
  Description of Artificial Sequence: Synthetic oligonucleotide
ugcacgcuugccuguuuuc

SEQ ID NO: 1875117 - RNA, 19 nt, Artificial Sequence
  Description of Artificial Sequence: Synthetic oligonucleotide
uagcggcccaccacuggca

SEQ ID NO: 1875118 - RNA, 19 nt, Artificial Sequence
  Description of Artificial Sequence: Synthetic oligonucleotide
gagagugagagcacagagu

SEQ ID NO: 1875119 - RNA, 19 nt, Artificial Sequence
  Description of Artificial Sequence: Synthetic oligonucleotide
cagacgucucucugugcac

SEQ ID NO: 1875120 - RNA, 19 nt, Artificial Sequence
  Description of Artificial Sequence: Synthetic oligonucleotide
gaacccuugggcuggcagu

SEQ ID NO: 1875121 - RNA, 19 nt, Artificial Sequence
  Description of Artificial Sequence: Synthetic oligonucleotide
ggagggucacauuggcccc

SEQ ID NO: 1875122 - RNA, 19 nt, Artificial Sequence
  Description of Artificial Sequence: Synthetic oligonucleotide
caaccugggacagggcaac

SEQ ID NO: 1875123 - RNA, 19 nt, Artificial Sequence
  Description of Artificial Sequence: Synthetic oligonucleotide
ccucagaaauguccucugg

SEQ ID NO: 1875124 - RNA, 19 nt, Artificial Sequence
  Description of Artificial Sequence: Synthetic oligonucleotide
ucucuguaggagccagcuu

SEQ ID NO: 1875125 - RNA, 19 nt, Artificial Sequence
  Description of Artificial Sequence: Synthetic oligonucleotide
cuucaguccaggauucagu

SEQ ID NO: 1875126 - RNA, 19 nt, Artificial Sequence
  Description of Artificial Sequence: Synthetic oligonucleotide
guaccuuagugggcaagac

SEQ ID NO: 1875127 - RNA, 19 nt, Artificial Sequence
  Description of Artificial Sequence: Synthetic oligonucleotide
aggugccucagcagaggac

SEQ ID NO: 1875128 - RNA, 19 nt, Artificial Sequence
  Description of Artificial Sequence: Synthetic oligonucleotide
gggguaguggcagggcucg

SEQ ID NO: 1875129 - RNA, 19 nt, Artificial Sequence
  Description of Artificial Sequence: Synthetic oligonucleotide
caaugugaaccaggggcuc

SEQ ID NO: 1875130 - RNA, 19 nt, Artificial Sequence
  Description of Artificial Sequence: Synthetic oligonucleotide
gcuucaguccaggauucag

SEQ ID NO: 1875131 - RNA, 19 nt, Artificial Sequence
  Description of Artificial Sequence: Synthetic oligonucleotide
ggcuaaacucuuagagcag

SEQ ID NO: 1875132 - RNA, 19 nt, Artificial Sequence
  Description of Artificial Sequence: Synthetic oligonucleotide
gaggcccugggcugcuggc

SEQ ID NO: 1875133 - RNA, 19 nt, Artificial Sequence
  Description of Artificial Sequence: Synthetic oligonucleotide
acaugugaguagagaggug

SEQ ID NO: 1875134 - RNA, 19 nt, Artificial Sequence
  Description of Artificial Sequence: Synthetic oligonucleotide
accgaagauaaggccugug

SEQ ID NO: 1875135 - RNA, 19 nt, Artificial Sequence
  Description of Artificial Sequence: Synthetic oligonucleotide
gcuccugcuaaagggcacg

SEQ ID NO: 1875136 - RNA, 19 nt, Artificial Sequence
  Description of Artificial Sequence: Synthetic oligonucleotide
cagguuggcagagagauuu

SEQ ID NO: 1875137 - RNA, 19 nt, Artificial Sequence
  Description of Artificial Sequence: Synthetic oligonucleotide
ccucugggucacuuguggg

SEQ ID NO: 1875138 - RNA, 19 nt, Artificial Sequence
  Description of Artificial Sequence: Synthetic oligonucleotide
cuuagugggcaagaccuua

SEQ ID NO: 1875139 - RNA, 19 nt, Artificial Sequence
  Description of Artificial Sequence: Synthetic oligonucleotide
gguaccuuagugggcaaga

SEQ ID NO: 1875140 - RNA, 19 nt, Artificial Sequence
  Description of Artificial Sequence: Synthetic oligonucleotide
gggucaagggaagaacuca

SEQ ID NO: 1875141 - RNA, 19 nt, Artificial Sequence
  Description of Artificial Sequence: Synthetic oligonucleotide
ccaauucaaugugaaccag

SEQ ID NO: 1875142 - RNA, 19 nt, Artificial Sequence
  Description of Artificial Sequence: Synthetic oligonucleotide
gcuagcggcccaccacugg

SEQ ID NO: 1875143 - RNA, 19 nt, Artificial Sequence
  Description of Artificial Sequence: Synthetic oligonucleotide
cauuuggcuagcggcccac

SEQ ID NO: 1875144 - RNA, 19 nt, Artificial Sequence
  Description of Artificial Sequence: Synthetic oligonucleotide
uggggugcauuuggcuagc

SEQ ID NO: 1875145 - RNA, 19 nt, Artificial Sequence
  Description of Artificial Sequence: Synthetic oligonucleotide
gccaucuccccucagaaau

SEQ ID NO: 1875146 - RNA, 19 nt, Artificial Sequence
  Description of Artificial Sequence: Synthetic oligonucleotide
ccagacgucucucugugca

SEQ ID NO: 1875147 - RNA, 19 nt, Artificial Sequence
  Description of Artificial Sequence: Synthetic oligonucleotide
acggucauucacacugggu

SEQ ID NO: 1875148 - RNA, 19 nt, Artificial Sequence
  Description of Artificial Sequence: Synthetic oligonucleotide
gaccagagcucagcacuac

SEQ ID NO: 1875149 - RNA, 19 nt, Artificial Sequence
  Description of Artificial Sequence: Synthetic oligonucleotide
cagaccugcaccuggcagu

SEQ ID NO: 1875150 - RNA, 19 nt, Artificial Sequence
  Description of Artificial Sequence: Synthetic oligonucleotide
accugggacagggcaacca

SEQ ID NO: 1875151 - RNA, 19 nt, Artificial Sequence
  Description of Artificial Sequence: Synthetic oligonucleotide
ggcaaccaauucaauguga

SEQ ID NO: 1875152 - RNA, 19 nt, Artificial Sequence
  Description of Artificial Sequence: Synthetic oligonucleotide
auggaacccuugggcuggc

SEQ ID NO: 1875153 - RNA, 19 nt, Artificial Sequence
  Description of Artificial Sequence: Synthetic oligonucleotide
uaccgaagauaaggccugu

SEQ ID NO: 1875154 - RNA, 19 nt, Artificial Sequence
  Description of Artificial Sequence: Synthetic oligonucleotide
uggguacuuccuugcccuc

SEQ ID NO: 1875155 - RNA, 19 nt, Artificial Sequence
  Description of Artificial Sequence: Synthetic oligonucleotide
gcuggggugcauuuggcua

SEQ ID NO: 1875156 - RNA, 19 nt, Artificial Sequence
  Description of Artificial Sequence: Synthetic oligonucleotide
gcccagacgucucucugug

SEQ ID NO: 1875157 - RNA, 19 nt, Artificial Sequence
  Description of Artificial Sequence: Synthetic oligonucleotide
uguugccccagaggcccug

SEQ ID NO: 1875158 - RNA, 19 nt, Artificial Sequence
  Description of Artificial Sequence: Synthetic oligonucleotide
uccaccuguuccugcuguu

SEQ ID NO: 1875159 - RNA, 19 nt, Artificial Sequence
  Description of Artificial Sequence: Synthetic oligonucleotide
cauauccagaaaggcaacu

SEQ ID NO: 1875160 - RNA, 19 nt, Artificial Sequence
  Description of Artificial Sequence: Synthetic oligonucleotide
guugccccagaggcccugg

SEQ ID NO: 1875161 - RNA, 19 nt, Artificial Sequence
  Description of Artificial Sequence: Synthetic oligonucleotide
cuguaggagccagcuucag

SEQ ID NO: 1875162 - RNA, 19 nt, Artificial Sequence
  Description of Artificial Sequence: Synthetic oligonucleotide
ccacucaaagggacaugag

SEQ ID NO: 1875163 - RNA, 19 nt, Artificial Sequence
  Description of Artificial Sequence: Synthetic oligonucleotide
ggcaguggaccuggaaccc

SEQ ID NO: 1875164 - RNA, 19 nt, Artificial Sequence
  Description of Artificial Sequence: Synthetic oligonucleotide
ccacggucauucacacugg

SEQ ID NO: 1875165 - RNA, 19 nt, Artificial Sequence
  Description of Artificial Sequence: Synthetic oligonucleotide
caggugccucagcagagga

SEQ ID NO: 1875166 - RNA, 19 nt, Artificial Sequence
  Description of Artificial Sequence: Synthetic oligonucleotide
ccaucuccccucagaaaug

SEQ ID NO: 1875167 - RNA, 19 nt, Artificial Sequence
  Description of Artificial Sequence: Synthetic oligonucleotide
gucacuugugggauucugu

SEQ ID NO: 1875168 - RNA, 19 nt, Artificial Sequence
  Description of Artificial Sequence: Synthetic oligonucleotide
caguacagaaauguuuaau

SEQ ID NO: 1875169 - RNA, 19 nt, Artificial Sequence
  Description of Artificial Sequence: Synthetic oligonucleotide
ggguacuuccuugcccucc

SEQ ID NO: 1875170 - RNA, 19 nt, Artificial Sequence
  Description of Artificial Sequence: Synthetic oligonucleotide
ccuuagcccuucacucucc

SEQ ID NO: 1875171 - RNA, 19 nt, Artificial Sequence
  Description of Artificial Sequence: Synthetic oligonucleotide
agcuucucuguaggagcca

SEQ ID NO: 1875172 - RNA, 19 nt, Artificial Sequence
  Description of Artificial Sequence: Synthetic oligonucleotide
cuggccuuccagaccugca

SEQ ID NO: 1875173 - RNA, 19 nt, Artificial Sequence
  Description of Artificial Sequence: Synthetic oligonucleotide
cagcaaccugggacagggc

SEQ ID NO: 1875174 - RNA, 19 nt, Artificial Sequence
  Description of Artificial Sequence: Synthetic oligonucleotide
gacuugcacgcuugccugu

SEQ ID NO: 1875175 - RNA, 19 nt, Artificial Sequence
  Description of Artificial Sequence: Synthetic oligonucleotide
agcuucaguccaggauuca

SEQ ID NO: 1875176 - RNA, 19 nt, Artificial Sequence
  Description of Artificial Sequence: Synthetic oligonucleotide
ggggucaagggaagaacuc

SEQ ID NO: 1875177 - RNA, 19 nt, Artificial Sequence
  Description of Artificial Sequence: Synthetic oligonucleotide
ccugacuugcacgcuugcc

SEQ ID NO: 1875178 - RNA, 19 nt, Artificial Sequence
  Description of Artificial Sequence: Synthetic oligonucleotide
ggggacagacuuccacuca

SEQ ID NO: 1875179 - RNA, 19 nt, Artificial Sequence
  Description of Artificial Sequence: Synthetic oligonucleotide
cuuccacucaaagggacau

SEQ ID NO: 1875180 - RNA, 19 nt, Artificial Sequence
  Description of Artificial Sequence: Synthetic oligonucleotide
acuugcacgcuugccuguu

SEQ ID NO: 1875181 - RNA, 19 nt, Artificial Sequence
  Description of Artificial Sequence: Synthetic oligonucleotide
gucgauaagaaggcagguu

SEQ ID NO: 1875182 - RNA, 19 nt, Artificial Sequence
  Description of Artificial Sequence: Synthetic oligonucleotide
gggccaucuccccucagaa

SEQ ID NO: 1875183 - RNA, 19 nt, Artificial Sequence
  Description of Artificial Sequence: Synthetic oligonucleotide
gaggggccaucuccccuca

SEQ ID NO: 1875184 - RNA, 19 nt, Artificial Sequence
  Description of Artificial Sequence: Synthetic oligonucleotide
gaccugcaccuggcagugg

SEQ ID NO: 1875185 - RNA, 19 nt, Artificial Sequence
  Description of Artificial Sequence: Synthetic oligonucleotide
caucuccccucagaaaugu

SEQ ID NO: 1875186 - RNA, 19 nt, Artificial Sequence
  Description of Artificial Sequence: Synthetic oligonucleotide
acagggcaaccaauucaau

SEQ ID NO: 1875187 - RNA, 19 nt, Artificial Sequence
  Description of Artificial Sequence: Synthetic oligonucleotide
ggcaagaccuuagcccuuc

SEQ ID NO: 1875188 - RNA, 19 nt, Artificial Sequence
  Description of Artificial Sequence: Synthetic oligonucleotide
ugccuguuuucugguccuc

SEQ ID NO: 1875189 - RNA, 19 nt, Artificial Sequence
  Description of Artificial Sequence: Synthetic oligonucleotide
cagucacccuggcccugcc

SEQ ID NO: 1875190 - RNA, 19 nt, Artificial Sequence
  Description of Artificial Sequence: Synthetic oligonucleotide
cacacugggugagagcccu

SEQ ID NO: 1875191 - RNA, 19 nt, Artificial Sequence
  Description of Artificial Sequence: Synthetic oligonucleotide
gcacuacugucugaaggga

SEQ ID NO: 1875192 - RNA, 19 nt, Artificial Sequence
  Description of Artificial Sequence: Synthetic oligonucleotide
aguggaccuggaacccaga

SEQ ID NO: 1875193 - RNA, 19 nt, Artificial Sequence
  Description of Artificial Sequence: Synthetic oligonucleotide
ccagcuucaguccaggauu

SEQ ID NO: 1875194 - RNA, 19 nt, Artificial Sequence
  Description of Artificial Sequence: Synthetic oligonucleotide
gguaguggcagggcucgga

SEQ ID NO: 1875195 - RNA, 19 nt, Artificial Sequence
  Description of Artificial Sequence: Synthetic oligonucleotide
cuuagcccuucacucuccu

SEQ ID NO: 1875196 - RNA, 19 nt, Artificial Sequence
  Description of Artificial Sequence: Synthetic oligonucleotide
ggauucugugcugucgaua

SEQ ID NO: 1875197 - RNA, 19 nt, Artificial Sequence
  Description of Artificial Sequence: Synthetic oligonucleotide
aggcagguuggcagagaga

SEQ ID NO: 1875198 - RNA, 19 nt, Artificial Sequence
  Description of Artificial Sequence: Synthetic oligonucleotide
agccuuucuguggguacuu

SEQ ID NO: 1875199 - RNA, 19 nt, Artificial Sequence
  Description of Artificial Sequence: Synthetic oligonucleotide
gcucggaggagacuuuggu

SEQ ID NO: 1875200 - RNA, 19 nt, Artificial Sequence
  Description of Artificial Sequence: Synthetic oligonucleotide
agugcccucccaggccacu

SEQ ID NO: 1875201 - RNA, 19 nt, Artificial Sequence
  Description of Artificial Sequence: Synthetic oligonucleotide
cuccaccuguuccugcugu

SEQ ID NO: 1875202 - RNA, 19 nt, Artificial Sequence
  Description of Artificial Sequence: Synthetic oligonucleotide
cacugcaguggggcaggug

SEQ ID NO: 1875203 - RNA, 19 nt, Artificial Sequence
  Description of Artificial Sequence: Synthetic oligonucleotide
gggcucggaggagacuuug

SEQ ID NO: 1875204 - RNA, 19 nt, Artificial Sequence
  Description of Artificial Sequence: Synthetic oligonucleotide
guuuccugacuugcacgcu

SEQ ID NO: 1875205 - RNA, 19 nt, Artificial Sequence
  Description of Artificial Sequence: Synthetic oligonucleotide
cccagacgucucucugugc

SEQ ID NO: 1875206 - RNA, 19 nt, Artificial Sequence
  Description of Artificial Sequence: Synthetic oligonucleotide
cuccugcuaaagggcacga

SEQ ID NO: 1875207 - RNA, 19 nt, Artificial Sequence
  Description of Artificial Sequence: Synthetic oligonucleotide
gugccucagcagaggacca

SEQ ID NO: 1875208 - RNA, 19 nt, Artificial Sequence
  Description of Artificial Sequence: Synthetic oligonucleotide
ggcucccuguagauucccc

SEQ ID NO: 1875209 - RNA, 19 nt, Artificial Sequence
  Description of Artificial Sequence: Synthetic oligonucleotide
ccuggccuuccagaccugc

SEQ ID NO: 1875210 - RNA, 19 nt, Artificial Sequence
  Description of Artificial Sequence: Synthetic oligonucleotide
gcccggugcuccuucugac

SEQ ID NO: 1875211 - RNA, 19 nt, Artificial Sequence
  Description of Artificial Sequence: Synthetic oligonucleotide
cugcccguccaggcccugc

SEQ ID NO: 1875212 - RNA, 19 nt, Artificial Sequence
  Description of Artificial Sequence: Synthetic oligonucleotide
gccuguuuucugguccuca

SEQ ID NO: 1875213 - RNA, 19 nt, Artificial Sequence
  Description of Artificial Sequence: Synthetic oligonucleotide
ggggugcauuuggcuagcg

SEQ ID NO: 1875214 - RNA, 19 nt, Artificial Sequence
  Description of Artificial Sequence: Synthetic oligonucleotide
cugcagucacccuggcccu

SEQ ID NO: 1875215 - RNA, 19 nt, Artificial Sequence
  Description of Artificial Sequence: Synthetic oligonucleotide
gccccagaggcccugggcu

SEQ ID NO: 1875216 - RNA, 19 nt, Artificial Sequence
  Description of Artificial Sequence: Synthetic oligonucleotide
guagagaggugggcaggcu

SEQ ID NO: 1875217 - RNA, 19 nt, Artificial Sequence
  Description of Artificial Sequence: Synthetic oligonucleotide
gccuguguccuuggggaca

SEQ ID NO: 1875218 - RNA, 19 nt, Artificial Sequence
  Description of Artificial Sequence: Synthetic oligonucleotide
ggggcucccuguagauucc

SEQ ID NO: 1875219 - RNA, 19 nt, Artificial Sequence
  Description of Artificial Sequence: Synthetic oligonucleotide
ggacagacuuccacucaaa

SEQ ID NO: 1875220 - RNA, 19 nt, Artificial Sequence
  Description of Artificial Sequence: Synthetic oligonucleotide
ccggugcuccuucugacaa

SEQ ID NO: 1875221 - RNA, 19 nt, Artificial Sequence
  Description of Artificial Sequence: Synthetic oligonucleotide
ucugcccguccaggcccug

SEQ ID NO: 1875222 - RNA, 19 nt, Artificial Sequence
  Description of Artificial Sequence: Synthetic oligonucleotide
uggcccugcccagccuuuc

SEQ ID NO: 1875223 - RNA, 19 nt, Artificial Sequence
  Description of Artificial Sequence: Synthetic oligonucleotide
ggaaggaaagcagcugguu

SEQ ID NO: 1875224 - RNA, 19 nt, Artificial Sequence
  Description of Artificial Sequence: Synthetic oligonucleotide
gcaagaccuuagcccuuca

SEQ ID NO: 1875225 - RNA, 19 nt, Artificial Sequence
  Description of Artificial Sequence: Synthetic oligonucleotide
gaccuggaacccagagagu

SEQ ID NO: 1875226 - RNA, 19 nt, Artificial Sequence
  Description of Artificial Sequence: Synthetic oligonucleotide
gggugagagcccugggccu

SEQ ID NO: 1875227 - RNA, 19 nt, Artificial Sequence
  Description of Artificial Sequence: Synthetic oligonucleotide
ggcuagcggcccaccacug

SEQ ID NO: 1875228 - RNA, 19 nt, Artificial Sequence
  Description of Artificial Sequence: Synthetic oligonucleotide
guacuuccuugcccucccu

SEQ ID NO: 1875229 - RNA, 19 nt, Artificial Sequence
  Description of Artificial Sequence: Synthetic oligonucleotide
ggaccagagcucagcacua

SEQ ID NO: 1875230 - RNA, 19 nt, Artificial Sequence
  Description of Artificial Sequence: Synthetic oligonucleotide
gcggcccaccacuggcagc

SEQ ID NO: 1875231 - RNA, 19 nt, Artificial Sequence
  Description of Artificial Sequence: Synthetic oligonucleotide
cccggugcuccuucugaca

SEQ ID NO: 1875232 - RNA, 19 nt, Artificial Sequence
  Description of Artificial Sequence: Synthetic oligonucleotide
ggguaguggcagggcucgg

SEQ ID NO: 1875233 - RNA, 19 nt, Artificial Sequence
  Description of Artificial Sequence: Synthetic oligonucleotide
caagcccggugcuccuucu

SEQ ID NO: 1875234 - RNA, 19 nt, Artificial Sequence
  Description of Artificial Sequence: Synthetic oligonucleotide
agggcucggaggagacuuu

SEQ ID NO: 1875235 - RNA, 19 nt, Artificial Sequence
  Description of Artificial Sequence: Synthetic oligonucleotide
cuguggaggccacggucau

SEQ ID NO: 1875236 - RNA, 19 nt, Artificial Sequence
  Description of Artificial Sequence: Synthetic oligonucleotide
gugagagcacagaguggau

SEQ ID NO: 1875237 - RNA, 19 nt, Artificial Sequence
  Description of Artificial Sequence: Synthetic oligonucleotide
ccaaugcacauggaacccu

SEQ ID NO: 1875238 - RNA, 19 nt, Artificial Sequence
  Description of Artificial Sequence: Synthetic oligonucleotide
cuugcacgcuugccuguuu

SEQ ID NO: 1875239 - RNA, 19 nt, Artificial Sequence
  Description of Artificial Sequence: Synthetic oligonucleotide
cugggucacuugugggauu

SEQ ID NO: 1875240 - RNA, 19 nt, Artificial Sequence
  Description of Artificial Sequence: Synthetic oligonucleotide
ccucccuagcauacagccu

SEQ ID NO: 1875241 - RNA, 19 nt, Artificial Sequence
  Description of Artificial Sequence: Synthetic oligonucleotide
cucuuagagcagggcugcu

SEQ ID NO: 1875242 - RNA, 19 nt, Artificial Sequence
  Description of Artificial Sequence: Synthetic oligonucleotide
cccuaguuggggccugugu

SEQ ID NO: 1875243 - RNA, 19 nt, Artificial Sequence
  Description of Artificial Sequence: Synthetic oligonucleotide
gggucacauuggccccaga

SEQ ID NO: 1875244 - RNA, 19 nt, Artificial Sequence
  Description of Artificial Sequence: Synthetic oligonucleotide
ggccacggucauucacacu

SEQ ID NO: 1875245 - RNA, 19 nt, Artificial Sequence
  Description of Artificial Sequence: Synthetic oligonucleotide
ccccuaguuggggccugug

SEQ ID NO: 1875246 - RNA, 19 nt, Artificial Sequence
  Description of Artificial Sequence: Synthetic oligonucleotide
gggcacgagggcagggccu

SEQ ID NO: 1875247 - RNA, 19 nt, Artificial Sequence
  Description of Artificial Sequence: Synthetic oligonucleotide
cccuagcauacagccucca

SEQ ID NO: 1875248 - RNA, 19 nt, Artificial Sequence
  Description of Artificial Sequence: Synthetic oligonucleotide
cucaagcccggugcuccuu

SEQ ID NO: 1875249 - RNA, 19 nt, Artificial Sequence
  Description of Artificial Sequence: Synthetic oligonucleotide
gccuggccuuccagaccug

SEQ ID NO: 1875250 - RNA, 19 nt, Artificial Sequence
  Description of Artificial Sequence: Synthetic oligonucleotide
gcacgagggcagggccuca

SEQ ID NO: 1875251 - RNA, 19 nt, Artificial Sequence
  Description of Artificial Sequence: Synthetic oligonucleotide
gggcaagaccuuagcccuu

SEQ ID NO: 1875252 - RNA, 19 nt, Artificial Sequence
  Description of Artificial Sequence: Synthetic oligonucleotide
uugaaaauugugaagaugg

SEQ ID NO: 1875253 - RNA, 19 nt, Artificial Sequence
  Description of Artificial Sequence: Synthetic oligonucleotide
aauuccauuauguuugccc

SEQ ID NO: 1875254 - RNA, 19 nt, Artificial Sequence
  Description of Artificial Sequence: Synthetic oligonucleotide
uauagaauugaucacgagg

SEQ ID NO: 1875255 - RNA, 19 nt, Artificial Sequence
  Description of Artificial Sequence: Synthetic oligonucleotide
aauaucgugucauggauac

SEQ ID NO: 1875256 - RNA, 19 nt, Artificial Sequence
  Description of Artificial Sequence: Synthetic oligonucleotide
uucagcguuauucagaagg

SEQ ID NO: 1875257 - RNA, 19 nt, Artificial Sequence
  Description of Artificial Sequence: Synthetic oligonucleotide
auuuccauuuaucacauuc

SEQ ID NO: 1875258 - RNA, 19 nt, Artificial Sequence
  Description of Artificial Sequence: Synthetic oligonucleotide
uguucuauaaaacaucuaa

SEQ ID NO: 1875259 - RNA, 19 nt, Artificial Sequence
  Description of Artificial Sequence: Synthetic oligonucleotide
uauuaugugggguagaaga

SEQ ID NO: 1875260 - RNA, 19 nt, Artificial Sequence
  Description of Artificial Sequence: Synthetic oligonucleotide
ucuuauagaauugaucacg

SEQ ID NO: 1875261 - RNA, 19 nt, Artificial Sequence
  Description of Artificial Sequence: Synthetic oligonucleotide
aaugauaacaccaacaaua

SEQ ID NO: 1875262 - RNA, 19 nt, Artificial Sequence
  Description of Artificial Sequence: Synthetic oligonucleotide
caaaauaucaaccucagca

SEQ ID NO: 1875263 - RNA, 19 nt, Artificial Sequence
  Description of Artificial Sequence: Synthetic oligonucleotide
auaaacaccaggaaugugc

SEQ ID NO: 1875264 - RNA, 19 nt, Artificial Sequence
  Description of Artificial Sequence: Synthetic oligonucleotide
aguuuagaaaugaagagcg

SEQ ID NO: 1875265 - RNA, 19 nt, Artificial Sequence
  Description of Artificial Sequence: Synthetic oligonucleotide
auuccauuauguuugcccc

SEQ ID NO: 1875266 - RNA, 19 nt, Artificial Sequence
  Description of Artificial Sequence: Synthetic oligonucleotide
ucauaugucuucuugcccg

SEQ ID NO: 1875267 - RNA, 19 nt, Artificial Sequence
  Description of Artificial Sequence: Synthetic oligonucleotide
ugaguuuagaaaugaagag

SEQ ID NO: 1875268 - RNA, 19 nt, Artificial Sequence
  Description of Artificial Sequence: Synthetic oligonucleotide
caucuuauagaauugauca

SEQ ID NO: 1875269 - RNA, 19 nt, Artificial Sequence
  Description of Artificial Sequence: Synthetic oligonucleotide
aaacccuugaucuuguaga

SEQ ID NO: 1875270 - RNA, 19 nt, Artificial Sequence
  Description of Artificial Sequence: Synthetic oligonucleotide
aaaauaucaaccucagcau

SEQ ID NO: 1875271 - RNA, 19 nt, Artificial Sequence
  Description of Artificial Sequence: Synthetic oligonucleotide
uuagaaaugaagagcgagc

SEQ ID NO: 1875272 - RNA, 19 nt, Artificial Sequence
  Description of Artificial Sequence: Synthetic oligonucleotide
aaccccauccagcaugucc

SEQ ID NO: 1875273 - RNA, 19 nt, Artificial Sequence
  Description of Artificial Sequence: Synthetic oligonucleotide
gaugccaugggacauaaac

SEQ ID NO: 1875274 - RNA, 19 nt, Artificial Sequence
  Description of Artificial Sequence: Synthetic oligonucleotide
aacaucuaauugaaaagac

SEQ ID NO: 1875275 - RNA, 19 nt, Artificial Sequence
  Description of Artificial Sequence: Synthetic oligonucleotide
gacauaaacaccaggaaug

SEQ ID NO: 1875276 - RNA, 19 nt, Artificial Sequence
  Description of Artificial Sequence: Synthetic oligonucleotide
gauacucucucaauggugg

SEQ ID NO: 1875277 - RNA, 19 nt, Artificial Sequence
  Description of Artificial Sequence: Synthetic oligonucleotide
gaugaguuuagaaaugaag

SEQ ID NO: 1875278 - RNA, 19 nt, Artificial Sequence
  Description of Artificial Sequence: Synthetic oligonucleotide
uuuaucaccacugaguauc

SEQ ID NO: 1875279 - RNA, 19 nt, Artificial Sequence
  Description of Artificial Sequence: Synthetic oligonucleotide
uucaaaauaucaaccucag

SEQ ID NO: 1875280 - RNA, 19 nt, Artificial Sequence
  Description of Artificial Sequence: Synthetic oligonucleotide
uguguuaauucccagggaa

SEQ ID NO: 1875281 - RNA, 19 nt, Artificial Sequence
  Description of Artificial Sequence: Synthetic oligonucleotide
aacugcauuaauucugucu

SEQ ID NO: 1875282 - RNA, 19 nt, Artificial Sequence
  Description of Artificial Sequence: Synthetic oligonucleotide
auuuggaucucuuucauau

SEQ ID NO: 1875283 - RNA, 19 nt, Artificial Sequence
  Description of Artificial Sequence: Synthetic oligonucleotide
uuuacagcucagcacaagc

SEQ ID NO: 1875284 - RNA, 19 nt, Artificial Sequence
  Description of Artificial Sequence: Synthetic oligonucleotide
ucuuucauaugucuucuug

SEQ ID NO: 1875285 - RNA, 19 nt, Artificial Sequence
  Description of Artificial Sequence: Synthetic oligonucleotide
uugaucacgaggacaaaag

SEQ ID NO: 1875286 - RNA, 19 nt, Artificial Sequence
  Description of Artificial Sequence: Synthetic oligonucleotide
ugggacauaaacaccagga

SEQ ID NO: 1875287 - RNA, 19 nt, Artificial Sequence
  Description of Artificial Sequence: Synthetic oligonucleotide
auaagagccaaucguguuc

SEQ ID NO: 1875288 - RNA, 19 nt, Artificial Sequence
  Description of Artificial Sequence: Synthetic oligonucleotide
uagaaauaucgugucaugg

SEQ ID NO: 1875289 - RNA, 19 nt, Artificial Sequence
  Description of Artificial Sequence: Synthetic oligonucleotide
uuggccaaacccuugaucu

SEQ ID NO: 1875290 - RNA, 19 nt, Artificial Sequence
  Description of Artificial Sequence: Synthetic oligonucleotide
aagagcgagccacucuugc

SEQ ID NO: 1875291 - RNA, 19 nt, Artificial Sequence
  Description of Artificial Sequence: Synthetic oligonucleotide
agaugauaagagccaaucg

SEQ ID NO: 1875292 - RNA, 19 nt, Artificial Sequence
  Description of Artificial Sequence: Synthetic oligonucleotide
auagaauugaucacgagga

SEQ ID NO: 1875293 - RNA, 19 nt, Artificial Sequence
  Description of Artificial Sequence: Synthetic oligonucleotide
uccuuuaucaccacugagu

SEQ ID NO: 1875294 - RNA, 19 nt, Artificial Sequence
  Description of Artificial Sequence: Synthetic oligonucleotide
cuggauauaucucuuuugc

SEQ ID NO: 1875295 - RNA, 19 nt, Artificial Sequence
  Description of Artificial Sequence: Synthetic oligonucleotide
ucugggugaguucaccugg

SEQ ID NO: 1875296 - RNA, 19 nt, Artificial Sequence
  Description of Artificial Sequence: Synthetic oligonucleotide
aauguugaaccuuucuaaa

SEQ ID NO: 1875297 - RNA, 19 nt, Artificial Sequence
  Description of Artificial Sequence: Synthetic oligonucleotide
gucugaguaacucauuucc

SEQ ID NO: 1875298 - RNA, 19 nt, Artificial Sequence
  Description of Artificial Sequence: Synthetic oligonucleotide
ggugaguucaccuggaucc

SEQ ID NO: 1875299 - RNA, 19 nt, Artificial Sequence
  Description of Artificial Sequence: Synthetic oligonucleotide
acgucuggcucuuuguucc

SEQ ID NO: 1875300 - RNA, 19 nt, Artificial Sequence
  Description of Artificial Sequence: Synthetic oligonucleotide
ccaagaaauauuauguggg

SEQ ID NO: 1875301 - RNA, 19 nt, Artificial Sequence
  Description of Artificial Sequence: Synthetic oligonucleotide
uggauacccaaacaauucc

SEQ ID NO: 1875302 - RNA, 19 nt, Artificial Sequence
  Description of Artificial Sequence: Synthetic oligonucleotide
aacgucuggcucuuuguuc

SEQ ID NO: 1875303 - RNA, 19 nt, Artificial Sequence
  Description of Artificial Sequence: Synthetic oligonucleotide
uuuuguugcagaugauaag

SEQ ID NO: 1875304 - RNA, 19 nt, Artificial Sequence
  Description of Artificial Sequence: Synthetic oligonucleotide
augaguuuagaaaugaaga

SEQ ID NO: 1875305 - RNA, 19 nt, Artificial Sequence
  Description of Artificial Sequence: Synthetic oligonucleotide
aauaucaaccucagcaucu

SEQ ID NO: 1875306 - RNA, 19 nt, Artificial Sequence
  Description of Artificial Sequence: Synthetic oligonucleotide
agaaauauuauguggggua

SEQ ID NO: 1875307 - RNA, 19 nt, Artificial Sequence
  Description of Artificial Sequence: Synthetic oligonucleotide
gaaauauuaugugggguag

SEQ ID NO: 1875308 - RNA, 19 nt, Artificial Sequence
  Description of Artificial Sequence: Synthetic oligonucleotide
uuuucagcguuauucagaa

SEQ ID NO: 1875309 - RNA, 19 nt, Artificial Sequence
  Description of Artificial Sequence: Synthetic oligonucleotide
agucgaugaguuuagaaau

SEQ ID NO: 1875310 - RNA, 19 nt, Artificial Sequence
  Description of Artificial Sequence: Synthetic oligonucleotide
guaagguuuuccuuuauca

SEQ ID NO: 1875311 - RNA, 19 nt, Artificial Sequence
  Description of Artificial Sequence: Synthetic oligonucleotide
uaagagccaaucguguucg

SEQ ID NO: 1875312 - RNA, 19 nt, Artificial Sequence
  Description of Artificial Sequence: Synthetic oligonucleotide
gaugauaagagccaaucgu

SEQ ID NO: 1875313 - RNA, 19 nt, Artificial Sequence
  Description of Artificial Sequence: Synthetic oligonucleotide
guggcuaucccuuugcuug

SEQ ID NO: 1875314 - RNA, 19 nt, Artificial Sequence
  Description of Artificial Sequence: Synthetic oligonucleotide
augauaacaccaacaauac

SEQ ID NO: 1875315 - RNA, 19 nt, Artificial Sequence
  Description of Artificial Sequence: Synthetic oligonucleotide
auuauguuugccccugcag

SEQ ID NO: 1875316 - RNA, 19 nt, Artificial Sequence
  Description of Artificial Sequence: Synthetic oligonucleotide
gaauguugaaccuuucuaa

SEQ ID NO: 1875317 - RNA, 19 nt, Artificial Sequence
  Description of Artificial Sequence: Synthetic oligonucleotide
aggacuggugcucuggacg

SEQ ID NO: 1875318 - RNA, 19 nt, Artificial Sequence
  Description of Artificial Sequence: Synthetic oligonucleotide
uagaagauuugaaagcaau

SEQ ID NO: 1875319 - RNA, 19 nt, Artificial Sequence
  Description of Artificial Sequence: Synthetic oligonucleotide
uuuccuccaaaugauaaca

SEQ ID NO: 1875320 - RNA, 19 nt, Artificial Sequence
  Description of Artificial Sequence: Synthetic oligonucleotide
ugaucacgaggacaaaagc

SEQ ID NO: 1875321 - RNA, 19 nt, Artificial Sequence
  Description of Artificial Sequence: Synthetic oligonucleotide
uaagguuuuccuuuaucac

SEQ ID NO: 1875322 - RNA, 19 nt, Artificial Sequence
  Description of Artificial Sequence: Synthetic oligonucleotide
uucauaugucuucuugccc

SEQ ID NO: 1875323 - RNA, 19 nt, Artificial Sequence
  Description of Artificial Sequence: Synthetic oligonucleotide
uauguuugccccugcaggc

SEQ ID NO: 1875324 - RNA, 19 nt, Artificial Sequence
  Description of Artificial Sequence: Synthetic oligonucleotide
ucagaaggaagcucgcacc

SEQ ID NO: 1875325 - RNA, 19 nt, Artificial Sequence
  Description of Artificial Sequence: Synthetic oligonucleotide
uggacggccagcaaacugc

SEQ ID NO: 1875326 - RNA, 19 nt, Artificial Sequence
  Description of Artificial Sequence: Synthetic oligonucleotide
gauggugucaucaggaaga

SEQ ID NO: 1875327 - RNA, 19 nt, Artificial Sequence
  Description of Artificial Sequence: Synthetic oligonucleotide
cauggauacucucucaaug

SEQ ID NO: 1875328 - RNA, 19 nt, Artificial Sequence
  Description of Artificial Sequence: Synthetic oligonucleotide
acaauuccauuauguuugc

SEQ ID NO: 1875329 - RNA, 19 nt, Artificial Sequence
  Description of Artificial Sequence: Synthetic oligonucleotide
uccauuuacagcucagcac

SEQ ID NO: 1875330 - RNA, 19 nt, Artificial Sequence
  Description of Artificial Sequence: Synthetic oligonucleotide
gauaacaccaacaauacuu

SEQ ID NO: 1875331 - RNA, 19 nt, Artificial Sequence
  Description of Artificial Sequence: Synthetic oligonucleotide
ucuugcuuaccuuccaaga

SEQ ID NO: 1875332 - RNA, 19 nt, Artificial Sequence
  Description of Artificial Sequence: Synthetic oligonucleotide
uuauagaauugaucacgag

SEQ ID NO: 1875333 - RNA, 19 nt, Artificial Sequence
  Description of Artificial Sequence: Synthetic oligonucleotide
aaaauccaggauucuuugu

SEQ ID NO: 1875334 - RNA, 19 nt, Artificial Sequence
  Description of Artificial Sequence: Synthetic oligonucleotide
aauauuaugugggguagaa

SEQ ID NO: 1875335 - RNA, 19 nt, Artificial Sequence
  Description of Artificial Sequence: Synthetic oligonucleotide
ucugaguaacucauuucca

SEQ ID NO: 1875336 - RNA, 19 nt, Artificial Sequence
  Description of Artificial Sequence: Synthetic oligonucleotide
ugaucuuguagauuuggau

SEQ ID NO: 1875337 - RNA, 19 nt, Artificial Sequence
  Description of Artificial Sequence: Synthetic oligonucleotide
ucaaaauaucaaccucagc

SEQ ID NO: 1875338 - RNA, 19 nt, Artificial Sequence
  Description of Artificial Sequence: Synthetic oligonucleotide
uguuaauucccagggaaga

SEQ ID NO: 1875339 - RNA, 19 nt, Artificial Sequence
  Description of Artificial Sequence: Synthetic oligonucleotide
acuggauauaucucuuuug

SEQ ID NO: 1875340 - RNA, 19 nt, Artificial Sequence
  Description of Artificial Sequence: Synthetic oligonucleotide
aauuuccuccaaaugauaa

SEQ ID NO: 1875341 - RNA, 19 nt, Artificial Sequence
  Description of Artificial Sequence: Synthetic oligonucleotide
uuccuuuaucaccacugag

SEQ ID NO: 1875342 - RNA, 19 nt, Artificial Sequence
  Description of Artificial Sequence: Synthetic oligonucleotide
aauccaggauucuuuguau

SEQ ID NO: 1875343 - RNA, 19 nt, Artificial Sequence
  Description of Artificial Sequence: Synthetic oligonucleotide
uaucaccuguguuaauucc

SEQ ID NO: 1875344 - RNA, 19 nt, Artificial Sequence
  Description of Artificial Sequence: Synthetic oligonucleotide
aacugcauguguaucaccu

SEQ ID NO: 1875345 - RNA, 19 nt, Artificial Sequence
  Description of Artificial Sequence: Synthetic oligonucleotide
uuugaagcagucgaugagu

SEQ ID NO: 1875346 - RNA, 19 nt, Artificial Sequence
  Description of Artificial Sequence: Synthetic oligonucleotide
ucagcguuauucagaagga

SEQ ID NO: 1875347 - RNA, 19 nt, Artificial Sequence
  Description of Artificial Sequence: Synthetic oligonucleotide
ugugcugucagaggacugg

SEQ ID NO: 1875348 - RNA, 19 nt, Artificial Sequence
  Description of Artificial Sequence: Synthetic oligonucleotide
uaucgugucauggauacuc

SEQ ID NO: 1875349 - RNA, 19 nt, Artificial Sequence
  Description of Artificial Sequence: Synthetic oligonucleotide
ugccucaccccacagauuc

SEQ ID NO: 1875350 - RNA, 19 nt, Artificial Sequence
  Description of Artificial Sequence: Synthetic oligonucleotide
uuacagcucagcacaagcu

SEQ ID NO: 1875351 - RNA, 19 nt, Artificial Sequence
  Description of Artificial Sequence: Synthetic oligonucleotide
cagguuuucagcguuauuc

SEQ ID NO: 1875352 - RNA, 19 nt, Artificial Sequence
  Description of Artificial Sequence: Synthetic oligonucleotide
uaccuuccaagaaauauua

SEQ ID NO: 1875353 - RNA, 19 nt, Artificial Sequence
  Description of Artificial Sequence: Synthetic oligonucleotide
cuuauagaauugaucacga

SEQ ID NO: 1875354 - RNA, 19 nt, Artificial Sequence
  Description of Artificial Sequence: Synthetic oligonucleotide
uugaucuuguagauuugga

SEQ ID NO: 1875355 - RNA, 19 nt, Artificial Sequence
  Description of Artificial Sequence: Synthetic oligonucleotide
aagcuccucaucuguauca

SEQ ID NO: 1875356 - RNA, 19 nt, Artificial Sequence
  Description of Artificial Sequence: Synthetic oligonucleotide
uucaucuuauagaauugau

SEQ ID NO: 1875357 - RNA, 19 nt, Artificial Sequence
  Description of Artificial Sequence: Synthetic oligonucleotide
ucggcugagaacugcaugu

SEQ ID NO: 1875358 - RNA, 19 nt, Artificial Sequence
  Description of Artificial Sequence: Synthetic oligonucleotide
uguucggccuuccuucucc

SEQ ID NO: 1875359 - RNA, 19 nt, Artificial Sequence
  Description of Artificial Sequence: Synthetic oligonucleotide
agcaauacucggcugagaa

SEQ ID NO: 1875360 - RNA, 19 nt, Artificial Sequence
  Description of Artificial Sequence: Synthetic oligonucleotide
auguguaucaccuguguua

SEQ ID NO: 1875361 - RNA, 19 nt, Artificial Sequence
  Description of Artificial Sequence: Synthetic oligonucleotide
uauucagaaggaagcucgc

SEQ ID NO: 1875362 - RNA, 19 nt, Artificial Sequence
  Description of Artificial Sequence: Synthetic oligonucleotide
augauaagagccaaucgug

SEQ ID NO: 1875363 - RNA, 19 nt, Artificial Sequence
  Description of Artificial Sequence: Synthetic oligonucleotide
aggaaugugcugucagagg

SEQ ID NO: 1875364 - RNA, 19 nt, Artificial Sequence
  Description of Artificial Sequence: Synthetic oligonucleotide
ugaagagcgagccacucuu

SEQ ID NO: 1875365 - RNA, 19 nt, Artificial Sequence
  Description of Artificial Sequence: Synthetic oligonucleotide
ucaccuguguuaauuccca

SEQ ID NO: 1875366 - RNA, 19 nt, Artificial Sequence
  Description of Artificial Sequence: Synthetic oligonucleotide
ugauaacaccaacaauacu

SEQ ID NO: 1875367 - RNA, 19 nt, Artificial Sequence
  Description of Artificial Sequence: Synthetic oligonucleotide
augaauguugaaccuuucu

SEQ ID NO: 1875368 - RNA, 19 nt, Artificial Sequence
  Description of Artificial Sequence: Synthetic oligonucleotide
agaguuguugaaaauugug

SEQ ID NO: 1875369 - RNA, 19 nt, Artificial Sequence
  Description of Artificial Sequence: Synthetic oligonucleotide
caaacccuugaucuuguag

SEQ ID NO: 1875370 - RNA, 19 nt, Artificial Sequence
  Description of Artificial Sequence: Synthetic oligonucleotide
agaauugaucacgaggaca

SEQ ID NO: 1875371 - RNA, 19 nt, Artificial Sequence
  Description of Artificial Sequence: Synthetic oligonucleotide
gagguagaaauaucguguc

SEQ ID NO: 1875372 - RNA, 19 nt, Artificial Sequence
  Description of Artificial Sequence: Synthetic oligonucleotide
cucacccacagcaauacuc

SEQ ID NO: 1875373 - RNA, 19 nt, Artificial Sequence
  Description of Artificial Sequence: Synthetic oligonucleotide
agcguuauucagaaggaag

SEQ ID NO: 1875374 - RNA, 19 nt, Artificial Sequence
  Description of Artificial Sequence: Synthetic oligonucleotide
uuguggauacccaaacaau

SEQ ID NO: 1875375 - RNA, 19 nt, Artificial Sequence
  Description of Artificial Sequence: Synthetic oligonucleotide
ucgaugaguuuagaaauga

SEQ ID NO: 1875376 - RNA, 19 nt, Artificial Sequence
  Description of Artificial Sequence: Synthetic oligonucleotide
guagaaauaucgugucaug

SEQ ID NO: 1875377 - RNA, 19 nt, Artificial Sequence
  Description of Artificial Sequence: Synthetic oligonucleotide
uuaucaccacugaguaucc

SEQ ID NO: 1875378 - RNA, 19 nt, Artificial Sequence
  Description of Artificial Sequence: Synthetic oligonucleotide
agaagauuugaaagcaaug

SEQ ID NO: 1875379 - RNA, 19 nt, Artificial Sequence
  Description of Artificial Sequence: Synthetic oligonucleotide
uuuggaucucuuucauaug

SEQ ID NO: 1875380 - RNA, 19 nt, Artificial Sequence
  Description of Artificial Sequence: Synthetic oligonucleotide
ugcauuaauucugucucca

SEQ ID NO: 1875381 - RNA, 19 nt, Artificial Sequence
  Description of Artificial Sequence: Synthetic oligonucleotide
uguguaucaccuguguuaa

SEQ ID NO: 1875382 - RNA, 19 nt, Artificial Sequence
  Description of Artificial Sequence: Synthetic oligonucleotide
cuuguggauacccaaacaa

SEQ ID NO: 1875383 - RNA, 19 nt, Artificial Sequence
  Description of Artificial Sequence: Synthetic oligonucleotide
uguaucaccuguguuaauu

SEQ ID NO: 1875384 - RNA, 19 nt, Artificial Sequence
  Description of Artificial Sequence: Synthetic oligonucleotide
ugcuuaccuuccaagaaau

SEQ ID NO: 1875385 - RNA, 19 nt, Artificial Sequence
  Description of Artificial Sequence: Synthetic oligonucleotide
ggacaaaagcuucagugug

SEQ ID NO: 1875386 - RNA, 19 nt, Artificial Sequence
  Description of Artificial Sequence: Synthetic oligonucleotide
ugcaguuagaguuguugaa

SEQ ID NO: 1875387 - RNA, 19 nt, Artificial Sequence
  Description of Artificial Sequence: Synthetic oligonucleotide
aaauauuaugugggguaga

SEQ ID NO: 1875388 - RNA, 19 nt, Artificial Sequence
  Description of Artificial Sequence: Synthetic oligonucleotide
aacccuugaucuuguagau

SEQ ID NO: 1875389 - RNA, 19 nt, Artificial Sequence
  Description of Artificial Sequence: Synthetic oligonucleotide
ugugggguagaagauuuga

SEQ ID NO: 1875390 - RNA, 19 nt, Artificial Sequence
  Description of Artificial Sequence: Synthetic oligonucleotide
ugcauguguaucaccugug

SEQ ID NO: 1875391 - RNA, 19 nt, Artificial Sequence
  Description of Artificial Sequence: Synthetic oligonucleotide
ucaaccagguuuucagcgu

SEQ ID NO: 1875392 - RNA, 19 nt, Artificial Sequence
  Description of Artificial Sequence: Synthetic oligonucleotide
agaaaugaagagcgagcca

SEQ ID NO: 1875393 - RNA, 19 nt, Artificial Sequence
  Description of Artificial Sequence: Synthetic oligonucleotide
uguagauuuggaucucuuu

SEQ ID NO: 1875394 - RNA, 19 nt, Artificial Sequence
  Description of Artificial Sequence: Synthetic oligonucleotide
ccauguucaaaauaucaac

SEQ ID NO: 1875395 - RNA, 19 nt, Artificial Sequence
  Description of Artificial Sequence: Synthetic oligonucleotide
agagccaaucguguucggc

SEQ ID NO: 1875396 - RNA, 19 nt, Artificial Sequence
  Description of Artificial Sequence: Synthetic oligonucleotide
gaagcagucgaugaguuua

SEQ ID NO: 1875397 - RNA, 19 nt, Artificial Sequence
  Description of Artificial Sequence: Synthetic oligonucleotide
ugaguaacucauuuccauu

SEQ ID NO: 1875398 - RNA, 19 nt, Artificial Sequence
  Description of Artificial Sequence: Synthetic oligonucleotide
cuggauccucaaaugaaug

SEQ ID NO: 1875399 - RNA, 19 nt, Artificial Sequence
  Description of Artificial Sequence: Synthetic oligonucleotide
gaaggaagcucgcaccuuc

SEQ ID NO: 1875400 - RNA, 19 nt, Artificial Sequence
  Description of Artificial Sequence: Synthetic oligonucleotide
uauccaagguuuugaagua

SEQ ID NO: 1875401 - RNA, 19 nt, Artificial Sequence
  Description of Artificial Sequence: Synthetic oligonucleotide
auguugaaccuuucuaaaa

SEQ ID NO: 1875402 - RNA, 19 nt, Artificial Sequence
  Description of Artificial Sequence: Synthetic oligonucleotide
auacucucucaaugguggg

SEQ ID NO: 1875403 - RNA, 19 nt, Artificial Sequence
  Description of Artificial Sequence: Synthetic oligonucleotide
ggaaugugcugucagagga

SEQ ID NO: 1875404 - RNA, 19 nt, Artificial Sequence
  Description of Artificial Sequence: Synthetic oligonucleotide
gaaauaucgugucauggau

SEQ ID NO: 1875405 - RNA, 19 nt, Artificial Sequence
  Description of Artificial Sequence: Synthetic oligonucleotide
accacugaguauccaaggu

SEQ ID NO: 1875406 - RNA, 19 nt, Artificial Sequence
  Description of Artificial Sequence: Synthetic oligonucleotide
ucucuuucauaugucuucu

SEQ ID NO: 1875407 - RNA, 19 nt, Artificial Sequence
  Description of Artificial Sequence: Synthetic oligonucleotide
auugugaagauggugucau

SEQ ID NO: 1875408 - RNA, 19 nt, Artificial Sequence
  Description of Artificial Sequence: Synthetic oligonucleotide
cagaugauaagagccaauc

SEQ ID NO: 1875409 - RNA, 19 nt, Artificial Sequence
  Description of Artificial Sequence: Synthetic oligonucleotide
ggauauaucucuuuugccu

SEQ ID NO: 1875410 - RNA, 19 nt, Artificial Sequence
  Description of Artificial Sequence: Synthetic oligonucleotide
uccauuauguuugccccug

SEQ ID NO: 1875411 - RNA, 19 nt, Artificial Sequence
  Description of Artificial Sequence: Synthetic oligonucleotide
ucguguucggccuuccuuc

SEQ ID NO: 1875412 - RNA, 19 nt, Artificial Sequence
  Description of Artificial Sequence: Synthetic oligonucleotide
cagucgaugaguuuagaaa

SEQ ID NO: 1875413 - RNA, 19 nt, Artificial Sequence
  Description of Artificial Sequence: Synthetic oligonucleotide
agguuuuccuuuaucacca

SEQ ID NO: 1875414 - RNA, 19 nt, Artificial Sequence
  Description of Artificial Sequence: Synthetic oligonucleotide
cugcauuaauucugucucc

SEQ ID NO: 1875415 - RNA, 19 nt, Artificial Sequence
  Description of Artificial Sequence: Synthetic oligonucleotide
caggaaugugcugucagag

SEQ ID NO: 1875416 - RNA, 19 nt, Artificial Sequence
  Description of Artificial Sequence: Synthetic oligonucleotide
agauuuggaucucuuucau

SEQ ID NO: 1875417 - RNA, 19 nt, Artificial Sequence
  Description of Artificial Sequence: Synthetic oligonucleotide
gucuuggguuuucucaaag

SEQ ID NO: 1875418 - RNA, 19 nt, Artificial Sequence
  Description of Artificial Sequence: Synthetic oligonucleotide
agaacgucuggcucuuugu

SEQ ID NO: 1875419 - RNA, 19 nt, Artificial Sequence
  Description of Artificial Sequence: Synthetic oligonucleotide
auacucggcugagaacugc

SEQ ID NO: 1875420 - RNA, 19 nt, Artificial Sequence
  Description of Artificial Sequence: Synthetic oligonucleotide
aaauaucgugucauggaua

SEQ ID NO: 1875421 - RNA, 19 nt, Artificial Sequence
  Description of Artificial Sequence: Synthetic oligonucleotide
auaucucuuuugccuuuuc

SEQ ID NO: 1875422 - RNA, 19 nt, Artificial Sequence
  Description of Artificial Sequence: Synthetic oligonucleotide
aucugggugaguucaccug

SEQ ID NO: 1875423 - RNA, 19 nt, Artificial Sequence
  Description of Artificial Sequence: Synthetic oligonucleotide
caucuguaucagcaguggc

SEQ ID NO: 1875424 - RNA, 19 nt, Artificial Sequence
  Description of Artificial Sequence: Synthetic oligonucleotide
auauuaugugggguagaag

SEQ ID NO: 1875425 - RNA, 19 nt, Artificial Sequence
  Description of Artificial Sequence: Synthetic oligonucleotide
acccaaacaauuccauuau

SEQ ID NO: 1875426 - RNA, 19 nt, Artificial Sequence
  Description of Artificial Sequence: Synthetic oligonucleotide
acuggugcucuggacggcc

SEQ ID NO: 1875427 - RNA, 19 nt, Artificial Sequence
  Description of Artificial Sequence: Synthetic oligonucleotide
agguagaaauaucguguca

SEQ ID NO: 1875428 - RNA, 19 nt, Artificial Sequence
  Description of Artificial Sequence: Synthetic oligonucleotide
uggaucucuuucauauguc

SEQ ID NO: 1875429 - RNA, 19 nt, Artificial Sequence
  Description of Artificial Sequence: Synthetic oligonucleotide
auguuugccccugcaggcc

SEQ ID NO: 1875430 - RNA, 19 nt, Artificial Sequence
  Description of Artificial Sequence: Synthetic oligonucleotide
auugaucacgaggacaaaa

SEQ ID NO: 1875431 - RNA, 19 nt, Artificial Sequence
  Description of Artificial Sequence: Synthetic oligonucleotide
gaucacgaggacaaaagcu

SEQ ID NO: 1875432 - RNA, 19 nt, Artificial Sequence
  Description of Artificial Sequence: Synthetic oligonucleotide
aaaaccccauccagcaugu

SEQ ID NO: 1875433 - RNA, 19 nt, Artificial Sequence
  Description of Artificial Sequence: Synthetic oligonucleotide
ucauggauacucucucaau

SEQ ID NO: 1875434 - RNA, 19 nt, Artificial Sequence
  Description of Artificial Sequence: Synthetic oligonucleotide
gaacugcauguguaucacc

SEQ ID NO: 1875435 - RNA, 19 nt, Artificial Sequence
  Description of Artificial Sequence: Synthetic oligonucleotide
aguaacucauuuccauuua

SEQ ID NO: 1875436 - RNA, 19 nt, Artificial Sequence
  Description of Artificial Sequence: Synthetic oligonucleotide
uuccauuauguuugccccu

SEQ ID NO: 1875437 - RNA, 19 nt, Artificial Sequence
  Description of Artificial Sequence: Synthetic oligonucleotide
uucucacccacagcaauac

SEQ ID NO: 1875438 - RNA, 19 nt, Artificial Sequence
  Description of Artificial Sequence: Synthetic oligonucleotide
uaucccuuugcuuguggau

SEQ ID NO: 1875439 - RNA, 19 nt, Artificial Sequence
  Description of Artificial Sequence: Synthetic oligonucleotide
uguuugccccugcaggccu

SEQ ID NO: 1875440 - RNA, 19 nt, Artificial Sequence
  Description of Artificial Sequence: Synthetic oligonucleotide
cuuggccaaacccuugauc

SEQ ID NO: 1875441 - RNA, 19 nt, Artificial Sequence
  Description of Artificial Sequence: Synthetic oligonucleotide
uacucucucaauggugggc

SEQ ID NO: 1875442 - RNA, 19 nt, Artificial Sequence
  Description of Artificial Sequence: Synthetic oligonucleotide
aagagccaaucguguucgg

SEQ ID NO: 1875443 - RNA, 19 nt, Artificial Sequence
  Description of Artificial Sequence: Synthetic oligonucleotide
ccaaaugauaacaccaaca

SEQ ID NO: 1875444 - RNA, 19 nt, Artificial Sequence
  Description of Artificial Sequence: Synthetic oligonucleotide
gcguuauucagaaggaagc

SEQ ID NO: 1875445 - RNA, 19 nt, Artificial Sequence
  Description of Artificial Sequence: Synthetic oligonucleotide
guggauacccaaacaauuc

SEQ ID NO: 1875446 - RNA, 19 nt, Artificial Sequence
  Description of Artificial Sequence: Synthetic oligonucleotide
ccauuuacagcucagcaca

SEQ ID NO: 1875447 - RNA, 19 nt, Artificial Sequence
  Description of Artificial Sequence: Synthetic oligonucleotide
acaagcuccucaucuguau

SEQ ID NO: 1875448 - RNA, 19 nt, Artificial Sequence
  Description of Artificial Sequence: Synthetic oligonucleotide
auuuacagcucagcacaag

SEQ ID NO: 1875449 - RNA, 19 nt, Artificial Sequence
  Description of Artificial Sequence: Synthetic oligonucleotide
auaacaccaacaauacuuu

SEQ ID NO: 1875450 - RNA, 19 nt, Artificial Sequence
  Description of Artificial Sequence: Synthetic oligonucleotide
cuugcuuaccuuccaagaa

SEQ ID NO: 1875451 - RNA, 19 nt, Artificial Sequence
  Description of Artificial Sequence: Synthetic oligonucleotide
cuccauuuacagcucagca

SEQ ID NO: 1875452 - RNA, 19 nt, Artificial Sequence
  Description of Artificial Sequence: Synthetic oligonucleotide
caauacucggcugagaacu

SEQ ID NO: 1875453 - RNA, 19 nt, Artificial Sequence
  Description of Artificial Sequence: Synthetic oligonucleotide
auaugucuucuugcccgcc

SEQ ID NO: 1875454 - RNA, 19 nt, Artificial Sequence
  Description of Artificial Sequence: Synthetic oligonucleotide
aauacucggcugagaacug

SEQ ID NO: 1875455 - RNA, 19 nt, Artificial Sequence
  Description of Artificial Sequence: Synthetic oligonucleotide
uuaucacauucuucuccac

SEQ ID NO: 1875456 - RNA, 19 nt, Artificial Sequence
  Description of Artificial Sequence: Synthetic oligonucleotide
uuaugugggguagaagauu

SEQ ID NO: 1875457 - RNA, 19 nt, Artificial Sequence
  Description of Artificial Sequence: Synthetic oligonucleotide
ggacuggugcucuggacgg

SEQ ID NO: 1875458 - RNA, 19 nt, Artificial Sequence
  Description of Artificial Sequence: Synthetic oligonucleotide
ugucuucaucuuauagaau

SEQ ID NO: 1875459 - RNA, 19 nt, Artificial Sequence
  Description of Artificial Sequence: Synthetic oligonucleotide
acucucucaauggugggca

SEQ ID NO: 1875460 - RNA, 19 nt, Artificial Sequence
  Description of Artificial Sequence: Synthetic oligonucleotide
auacccaaacaauuccauu

SEQ ID NO: 1875461 - RNA, 19 nt, Artificial Sequence
  Description of Artificial Sequence: Synthetic oligonucleotide
ugagaacugcauguguauc

SEQ ID NO: 1875462 - RNA, 19 nt, Artificial Sequence
  Description of Artificial Sequence: Synthetic oligonucleotide
gucgaugaguuuagaaaug

SEQ ID NO: 1875463 - RNA, 19 nt, Artificial Sequence
  Description of Artificial Sequence: Synthetic oligonucleotide
uuguagauuuggaucucuu

SEQ ID NO: 1875464 - RNA, 19 nt, Artificial Sequence
  Description of Artificial Sequence: Synthetic oligonucleotide
aagcagucgaugaguuuag

SEQ ID NO: 1875465 - RNA, 19 nt, Artificial Sequence
  Description of Artificial Sequence: Synthetic oligonucleotide
caguuagaguuguugaaaa

SEQ ID NO: 1875466 - RNA, 19 nt, Artificial Sequence
  Description of Artificial Sequence: Synthetic oligonucleotide
auuaugugggguagaagau

SEQ ID NO: 1875467 - RNA, 19 nt, Artificial Sequence
  Description of Artificial Sequence: Synthetic oligonucleotide
caucacuggauauaucucu

SEQ ID NO: 1875468 - RNA, 19 nt, Artificial Sequence
  Description of Artificial Sequence: Synthetic oligonucleotide
aaucguguucggccuuccu

SEQ ID NO: 1875469 - RNA, 19 nt, Artificial Sequence
  Description of Artificial Sequence: Synthetic oligonucleotide
acagcaauacucggcugag

SEQ ID NO: 1875470 - RNA, 19 nt, Artificial Sequence
  Description of Artificial Sequence: Synthetic oligonucleotide
auccaagguuuugaaguag

SEQ ID NO: 1875471 - RNA, 19 nt, Artificial Sequence
  Description of Artificial Sequence: Synthetic oligonucleotide
cucaggcuccugcaguuag

SEQ ID NO: 1875472 - RNA, 19 nt, Artificial Sequence
  Description of Artificial Sequence: Synthetic oligonucleotide
gucuccauuuccugagcug

SEQ ID NO: 1875473 - RNA, 19 nt, Artificial Sequence
  Description of Artificial Sequence: Synthetic oligonucleotide
cacagcaauacucggcuga

SEQ ID NO: 1875474 - RNA, 19 nt, Artificial Sequence
  Description of Artificial Sequence: Synthetic oligonucleotide
uuucagcguuauucagaag

SEQ ID NO: 1875475 - RNA, 19 nt, Artificial Sequence
  Description of Artificial Sequence: Synthetic oligonucleotide
agcauguccuuggccaaac

SEQ ID NO: 1875476 - RNA, 19 nt, Artificial Sequence
  Description of Artificial Sequence: Synthetic oligonucleotide
gucauggauacucucucaa

SEQ ID NO: 1875477 - RNA, 19 nt, Artificial Sequence
  Description of Artificial Sequence: Synthetic oligonucleotide
cuccaaaugauaacaccaa

SEQ ID NO: 1875478 - RNA, 19 nt, Artificial Sequence
  Description of Artificial Sequence: Synthetic oligonucleotide
augccaugggacauaaaca

SEQ ID NO: 1875479 - RNA, 19 nt, Artificial Sequence
  Description of Artificial Sequence: Synthetic oligonucleotide
cugagcuguaagguuuucc

SEQ ID NO: 1875480 - RNA, 19 nt, Artificial Sequence
  Description of Artificial Sequence: Synthetic oligonucleotide
acaugggccuuugccacac

SEQ ID NO: 1875481 - RNA, 19 nt, Artificial Sequence
  Description of Artificial Sequence: Synthetic oligonucleotide
uggguuuguuucucaggcu

SEQ ID NO: 1875482 - RNA, 19 nt, Artificial Sequence
  Description of Artificial Sequence: Synthetic oligonucleotide
agccaaucguguucggccu

SEQ ID NO: 1875483 - RNA, 19 nt, Artificial Sequence
  Description of Artificial Sequence: Synthetic oligonucleotide
ucaccccacagauuccuuc

SEQ ID NO: 1875484 - RNA, 19 nt, Artificial Sequence
  Description of Artificial Sequence: Synthetic oligonucleotide
acgaggacaaaagcuucag

SEQ ID NO: 1875485 - RNA, 19 nt, Artificial Sequence
  Description of Artificial Sequence: Synthetic oligonucleotide
agagcgagccacucuugcu

SEQ ID NO: 1875486 - RNA, 19 nt, Artificial Sequence
  Description of Artificial Sequence: Synthetic oligonucleotide
ggguuuguuucucaggcuc

SEQ ID NO: 1875487 - RNA, 19 nt, Artificial Sequence
  Description of Artificial Sequence: Synthetic oligonucleotide
gauuuggaucucuuucaua

SEQ ID NO: 1875488 - RNA, 19 nt, Artificial Sequence
  Description of Artificial Sequence: Synthetic oligonucleotide
gaugaggaucuuggguuug

SEQ ID NO: 1875489 - RNA, 19 nt, Artificial Sequence
  Description of Artificial Sequence: Synthetic oligonucleotide
gaaugugcugucagaggac

SEQ ID NO: 1875490 - RNA, 19 nt, Artificial Sequence
  Description of Artificial Sequence: Synthetic oligonucleotide
gaagcucgcaccuuccccu

SEQ ID NO: 1875491 - RNA, 19 nt, Artificial Sequence
  Description of Artificial Sequence: Synthetic oligonucleotide
ugcugucagaggacuggug

SEQ ID NO: 1875492 - RNA, 19 nt, Artificial Sequence
  Description of Artificial Sequence: Synthetic oligonucleotide
cucggcugagaacugcaug

SEQ ID NO: 1875493 - RNA, 19 nt, Artificial Sequence
  Description of Artificial Sequence: Synthetic oligonucleotide
guuagaguuguugaaaauu

SEQ ID NO: 1875494 - RNA, 19 nt, Artificial Sequence
  Description of Artificial Sequence: Synthetic oligonucleotide
cugcaggccugcaugauga

SEQ ID NO: 1875495 - RNA, 19 nt, Artificial Sequence
  Description of Artificial Sequence: Synthetic oligonucleotide
aguggcuaucccuuugcuu

SEQ ID NO: 1875496 - RNA, 19 nt, Artificial Sequence
  Description of Artificial Sequence: Synthetic oligonucleotide
ccaugggacauaaacacca

SEQ ID NO: 1875497 - RNA, 19 nt, Artificial Sequence
  Description of Artificial Sequence: Synthetic oligonucleotide
ucagcacaagcuccucauc

SEQ ID NO: 1875498 - RNA, 19 nt, Artificial Sequence
  Description of Artificial Sequence: Synthetic oligonucleotide
cauaaacaccaggaaugug

SEQ ID NO: 1875499 - RNA, 19 nt, Artificial Sequence
  Description of Artificial Sequence: Synthetic oligonucleotide
gauaagagccaaucguguu

SEQ ID NO: 1875500 - RNA, 19 nt, Artificial Sequence
  Description of Artificial Sequence: Synthetic oligonucleotide
ugucuuggguuuucucaaa

SEQ ID NO: 1875501 - RNA, 19 nt, Artificial Sequence
  Description of Artificial Sequence: Synthetic oligonucleotide
aucguguucggccuuccuu

SEQ ID NO: 1875502 - RNA, 19 nt, Artificial Sequence
  Description of Artificial Sequence: Synthetic oligonucleotide
cacccacagcaauacucgg

SEQ ID NO: 1875503 - RNA, 19 nt, Artificial Sequence
  Description of Artificial Sequence: Synthetic oligonucleotide
agaggacuggugcucugga

SEQ ID NO: 1875504 - RNA, 19 nt, Artificial Sequence
  Description of Artificial Sequence: Synthetic oligonucleotide
cuggacggccagcaaacug

SEQ ID NO: 1875505 - RNA, 19 nt, Artificial Sequence
  Description of Artificial Sequence: Synthetic oligonucleotide
agccuuccugcccacaaaa

SEQ ID NO: 1875506 - RNA, 19 nt, Artificial Sequence
  Description of Artificial Sequence: Synthetic oligonucleotide
caagcuccucaucuguauc

SEQ ID NO: 1875507 - RNA, 19 nt, Artificial Sequence
  Description of Artificial Sequence: Synthetic oligonucleotide
uccccuagucugaguaacu

SEQ ID NO: 1875508 - RNA, 19 nt, Artificial Sequence
  Description of Artificial Sequence: Synthetic oligonucleotide
ugucagaggacuggugcuc

SEQ ID NO: 1875509 - RNA, 19 nt, Artificial Sequence
  Description of Artificial Sequence: Synthetic oligonucleotide
accccauccagcauguccu

SEQ ID NO: 1875510 - RNA, 19 nt, Artificial Sequence
  Description of Artificial Sequence: Synthetic oligonucleotide
ggauacucucucaauggug

SEQ ID NO: 1875511 - RNA, 19 nt, Artificial Sequence
  Description of Artificial Sequence: Synthetic oligonucleotide
ggaagcucgcaccuucccc

SEQ ID NO: 1875512 - RNA, 19 nt, Artificial Sequence
  Description of Artificial Sequence: Synthetic oligonucleotide
guuuagaaaugaagagcga

SEQ ID NO: 1875513 - RNA, 19 nt, Artificial Sequence
  Description of Artificial Sequence: Synthetic oligonucleotide
cuaucccuuugcuugugga

SEQ ID NO: 1875514 - RNA, 19 nt, Artificial Sequence
  Description of Artificial Sequence: Synthetic oligonucleotide
ucuuguagauuuggaucuc

SEQ ID NO: 1875515 - RNA, 19 nt, Artificial Sequence
  Description of Artificial Sequence: Synthetic oligonucleotide
ucgugucauggauacucuc

SEQ ID NO: 1875516 - RNA, 19 nt, Artificial Sequence
  Description of Artificial Sequence: Synthetic oligonucleotide
aauugaucacgaggacaaa

SEQ ID NO: 1875517 - RNA, 19 nt, Artificial Sequence
  Description of Artificial Sequence: Synthetic oligonucleotide
uauaucucuuuugccuuuu

SEQ ID NO: 1875518 - RNA, 19 nt, Artificial Sequence
  Description of Artificial Sequence: Synthetic oligonucleotide
ucagaggacuggugcucug

SEQ ID NO: 1875519 - RNA, 19 nt, Artificial Sequence
  Description of Artificial Sequence: Synthetic oligonucleotide
caggcuccugcaguuagag

SEQ ID NO: 1875520 - RNA, 19 nt, Artificial Sequence
  Description of Artificial Sequence: Synthetic oligonucleotide
uggcuaucccuuugcuugu

SEQ ID NO: 1875521 - RNA, 19 nt, Artificial Sequence
  Description of Artificial Sequence: Synthetic oligonucleotide
ggacauaaacaccaggaau

SEQ ID NO: 1875522 - RNA, 19 nt, Artificial Sequence
  Description of Artificial Sequence: Synthetic oligonucleotide
caccuggauccucaaauga

SEQ ID NO: 1875523 - RNA, 19 nt, Artificial Sequence
  Description of Artificial Sequence: Synthetic oligonucleotide
agauuccuuccaggaugcc

SEQ ID NO: 1875524 - RNA, 19 nt, Artificial Sequence
  Description of Artificial Sequence: Synthetic oligonucleotide
ccaaacaauuccauuaugu

SEQ ID NO: 1875525 - RNA, 19 nt, Artificial Sequence
  Description of Artificial Sequence: Synthetic oligonucleotide
cccacagauuccuuccagg

SEQ ID NO: 1875526 - RNA, 19 nt, Artificial Sequence
  Description of Artificial Sequence: Synthetic oligonucleotide
gaagagcgagccacucuug

SEQ ID NO: 1875527 - RNA, 19 nt, Artificial Sequence
  Description of Artificial Sequence: Synthetic oligonucleotide
cugucuccauuuccugagc

SEQ ID NO: 1875528 - RNA, 19 nt, Artificial Sequence
  Description of Artificial Sequence: Synthetic oligonucleotide
gaguucaccuggauccuca

SEQ ID NO: 1875529 - RNA, 19 nt, Artificial Sequence
  Description of Artificial Sequence: Synthetic oligonucleotide
agguuuugaaguagcuccu

SEQ ID NO: 1875530 - RNA, 19 nt, Artificial Sequence
  Description of Artificial Sequence: Synthetic oligonucleotide
ucgcaccuuccccuagucu

SEQ ID NO: 1875531 - RNA, 19 nt, Artificial Sequence
  Description of Artificial Sequence: Synthetic oligonucleotide
aucccuuugcuuguggaua

SEQ ID NO: 1875532 - RNA, 19 nt, Artificial Sequence
  Description of Artificial Sequence: Synthetic oligonucleotide
gccacucuugcuuaccuuc

SEQ ID NO: 1875533 - RNA, 19 nt, Artificial Sequence
  Description of Artificial Sequence: Synthetic oligonucleotide
gauacccaaacaauuccau

SEQ ID NO: 1875534 - RNA, 19 nt, Artificial Sequence
  Description of Artificial Sequence: Synthetic oligonucleotide
uccugagcuguaagguuuu

SEQ ID NO: 1875535 - RNA, 19 nt, Artificial Sequence
  Description of Artificial Sequence: Synthetic oligonucleotide
cugaguaacucauuuccau

SEQ ID NO: 1875536 - RNA, 19 nt, Artificial Sequence
  Description of Artificial Sequence: Synthetic oligonucleotide
ugccacacugcuucuccau

SEQ ID NO: 1875537 - RNA, 19 nt, Artificial Sequence
  Description of Artificial Sequence: Synthetic oligonucleotide
gcuaucccuuugcuugugg

SEQ ID NO: 1875538 - RNA, 19 nt, Artificial Sequence
  Description of Artificial Sequence: Synthetic oligonucleotide
cacugaguauccaagguuu

SEQ ID NO: 1875539 - RNA, 19 nt, Artificial Sequence
  Description of Artificial Sequence: Synthetic oligonucleotide
guaacucauuuccauuuau

SEQ ID NO: 1875540 - RNA, 19 nt, Artificial Sequence
  Description of Artificial Sequence: Synthetic oligonucleotide
gguagaaauaucgugucau

SEQ ID NO: 1875541 - RNA, 19 nt, Artificial Sequence
  Description of Artificial Sequence: Synthetic oligonucleotide
ggauacccaaacaauucca

SEQ ID NO: 1875542 - RNA, 19 nt, Artificial Sequence
  Description of Artificial Sequence: Synthetic oligonucleotide
ucucucaauggugggcauc

SEQ ID NO: 1875543 - RNA, 19 nt, Artificial Sequence
  Description of Artificial Sequence: Synthetic oligonucleotide
auaucaaccucagcaucuu

SEQ ID NO: 1875544 - RNA, 19 nt, Artificial Sequence
  Description of Artificial Sequence: Synthetic oligonucleotide
ugggugaguucaccuggau

SEQ ID NO: 1875545 - RNA, 19 nt, Artificial Sequence
  Description of Artificial Sequence: Synthetic oligonucleotide
cuguguuaauucccaggga

SEQ ID NO: 1875546 - RNA, 19 nt, Artificial Sequence
  Description of Artificial Sequence: Synthetic oligonucleotide
gcaauacucggcugagaac

SEQ ID NO: 1875547 - RNA, 19 nt, Artificial Sequence
  Description of Artificial Sequence: Synthetic oligonucleotide
cauggcugugcagccuucc

SEQ ID NO: 1875548 - RNA, 19 nt, Artificial Sequence
  Description of Artificial Sequence: Synthetic oligonucleotide
ccuuuaucaccacugagua

SEQ ID NO: 1875549 - RNA, 19 nt, Artificial Sequence
  Description of Artificial Sequence: Synthetic oligonucleotide
cgcaccuuccccuagucug

SEQ ID NO: 1875550 - RNA, 19 nt, Artificial Sequence
  Description of Artificial Sequence: Synthetic oligonucleotide
ugaguucaccuggauccuc

SEQ ID NO: 1875551 - RNA, 19 nt, Artificial Sequence
  Description of Artificial Sequence: Synthetic oligonucleotide
ccaucacuggauauaucuc

SEQ ID NO: 1875552 - RNA, 19 nt, Artificial Sequence
  Description of Artificial Sequence: Synthetic oligonucleotide
aucgugucauggauacucu

SEQ ID NO: 1875553 - RNA, 19 nt, Artificial Sequence
  Description of Artificial Sequence: Synthetic oligonucleotide
agcgagccacucuugcuua

SEQ ID NO: 1875554 - RNA, 19 nt, Artificial Sequence
  Description of Artificial Sequence: Synthetic oligonucleotide
aaaccccauccagcauguc

SEQ ID NO: 1875555 - RNA, 19 nt, Artificial Sequence
  Description of Artificial Sequence: Synthetic oligonucleotide
cugcauguguaucaccugu

SEQ ID NO: 1875556 - RNA, 19 nt, Artificial Sequence
  Description of Artificial Sequence: Synthetic oligonucleotide
aguucaccuggauccucaa

SEQ ID NO: 1875557 - RNA, 19 nt, Artificial Sequence
  Description of Artificial Sequence: Synthetic oligonucleotide
gcagucgaugaguuuagaa

SEQ ID NO: 1875558 - RNA, 19 nt, Artificial Sequence
  Description of Artificial Sequence: Synthetic oligonucleotide
ccacucuugcuuaccuucc

SEQ ID NO: 1875559 - RNA, 19 nt, Artificial Sequence
  Description of Artificial Sequence: Synthetic oligonucleotide
cagcacaagcuccucaucu

SEQ ID NO: 1875560 - RNA, 19 nt, Artificial Sequence
  Description of Artificial Sequence: Synthetic oligonucleotide
gggugaguucaccuggauc

SEQ ID NO: 1875561 - RNA, 19 nt, Artificial Sequence
  Description of Artificial Sequence: Synthetic oligonucleotide
gcaguuagaguuguugaaa

SEQ ID NO: 1875562 - RNA, 19 nt, Artificial Sequence
  Description of Artificial Sequence: Synthetic oligonucleotide
aagcucgcaccuuccccua

SEQ ID NO: 1875563 - RNA, 19 nt, Artificial Sequence
  Description of Artificial Sequence: Synthetic oligonucleotide
agcucgcaccuuccccuag

SEQ ID NO: 1875564 - RNA, 19 nt, Artificial Sequence
  Description of Artificial Sequence: Synthetic oligonucleotide
uuugccccugcaggccugc

SEQ ID NO: 1875565 - RNA, 19 nt, Artificial Sequence
  Description of Artificial Sequence: Synthetic oligonucleotide
cccaaacaauuccauuaug

SEQ ID NO: 1875566 - RNA, 19 nt, Artificial Sequence
  Description of Artificial Sequence: Synthetic oligonucleotide
gaacgucuggcucuuuguu

SEQ ID NO: 1875567 - RNA, 19 nt, Artificial Sequence
  Description of Artificial Sequence: Synthetic oligonucleotide
gagcgagccacucuugcuu

SEQ ID NO: 1875568 - RNA, 19 nt, Artificial Sequence
  Description of Artificial Sequence: Synthetic oligonucleotide
acugaguauccaagguuuu

SEQ ID NO: 1875569 - RNA, 19 nt, Artificial Sequence
  Description of Artificial Sequence: Synthetic oligonucleotide
cucgcaccuuccccuaguc

SEQ ID NO: 1875570 - RNA, 19 nt, Artificial Sequence
  Description of Artificial Sequence: Synthetic oligonucleotide
caaucguguucggccuucc

SEQ ID NO: 1875571 - RNA, 19 nt, Artificial Sequence
  Description of Artificial Sequence: Synthetic oligonucleotide
auaucgugucauggauacu

SEQ ID NO: 1875572 - RNA, 19 nt, Artificial Sequence
  Description of Artificial Sequence: Synthetic oligonucleotide
aggaugccaugggacauaa

SEQ ID NO: 1875573 - RNA, 19 nt, Artificial Sequence
  Description of Artificial Sequence: Synthetic oligonucleotide
uggugucaucaggaagaac

SEQ ID NO: 1875574 - RNA, 19 nt, Artificial Sequence
  Description of Artificial Sequence: Synthetic oligonucleotide
cuuccccuagucugaguaa

SEQ ID NO: 1875575 - RNA, 19 nt, Artificial Sequence
  Description of Artificial Sequence: Synthetic oligonucleotide
ccuugaucuuguagauuug

SEQ ID NO: 1875576 - RNA, 19 nt, Artificial Sequence
  Description of Artificial Sequence: Synthetic oligonucleotide
gguuuugaaguagcuccuc

SEQ ID NO: 1875577 - RNA, 19 nt, Artificial Sequence
  Description of Artificial Sequence: Synthetic oligonucleotide
augugcugucagaggacug

SEQ ID NO: 1875578 - RNA, 19 nt, Artificial Sequence
  Description of Artificial Sequence: Synthetic oligonucleotide
cuuuaucaccacugaguau

SEQ ID NO: 1875579 - RNA, 19 nt, Artificial Sequence
  Description of Artificial Sequence: Synthetic oligonucleotide
gacuggugcucuggacggc

SEQ ID NO: 1875580 - RNA, 19 nt, Artificial Sequence
  Description of Artificial Sequence: Synthetic oligonucleotide
gccccugcaggccugcaug

SEQ ID NO: 1875581 - RNA, 19 nt, Artificial Sequence
  Description of Artificial Sequence: Synthetic oligonucleotide
cuuguagauuuggaucucu

SEQ ID NO: 1875582 - RNA, 19 nt, Artificial Sequence
  Description of Artificial Sequence: Synthetic oligonucleotide
agaaggaagcucgcaccuu

SEQ ID NO: 1875583 - RNA, 19 nt, Artificial Sequence
  Description of Artificial Sequence: Synthetic oligonucleotide
agcagucgaugaguuuaga

SEQ ID NO: 1875584 - RNA, 19 nt, Artificial Sequence
  Description of Artificial Sequence: Synthetic oligonucleotide
guucggccuuccuucucca

SEQ ID NO: 1875585 - RNA, 19 nt, Artificial Sequence
  Description of Artificial Sequence: Synthetic oligonucleotide
cacacugcuucuccauuua

SEQ ID NO: 1875586 - RNA, 19 nt, Artificial Sequence
  Description of Artificial Sequence: Synthetic oligonucleotide
gcucuggacggccagcaaa

SEQ ID NO: 1875587 - RNA, 19 nt, Artificial Sequence
  Description of Artificial Sequence: Synthetic oligonucleotide
cauguguaucaccuguguu

SEQ ID NO: 1875588 - RNA, 19 nt, Artificial Sequence
  Description of Artificial Sequence: Synthetic oligonucleotide
accuuccccuagucugagu

SEQ ID NO: 1875589 - RNA, 19 nt, Artificial Sequence
  Description of Artificial Sequence: Synthetic oligonucleotide
ccauuauguuugccccugc

SEQ ID NO: 1875590 - RNA, 19 nt, Artificial Sequence
  Description of Artificial Sequence: Synthetic oligonucleotide
ccagcaaacugcauuaauu

SEQ ID NO: 1875591 - RNA, 19 nt, Artificial Sequence
  Description of Artificial Sequence: Synthetic oligonucleotide
gcauguccuuggccaaacc

SEQ ID NO: 1875592 - RNA, 19 nt, Artificial Sequence
  Description of Artificial Sequence: Synthetic oligonucleotide
guagcuccuccauguucaa

SEQ ID NO: 1875593 - RNA, 19 nt, Artificial Sequence
  Description of Artificial Sequence: Synthetic oligonucleotide
cagcguuauucagaaggaa

SEQ ID NO: 1875594 - RNA, 19 nt, Artificial Sequence
  Description of Artificial Sequence: Synthetic oligonucleotide
guguucggccuuccuucuc

SEQ ID NO: 1875595 - RNA, 19 nt, Artificial Sequence
  Description of Artificial Sequence: Synthetic oligonucleotide
acccuugaucuuguagauu

SEQ ID NO: 1875596 - RNA, 19 nt, Artificial Sequence
  Description of Artificial Sequence: Synthetic oligonucleotide
guuugccccugcaggccug

SEQ ID NO: 1875597 - RNA, 19 nt, Artificial Sequence
  Description of Artificial Sequence: Synthetic oligonucleotide
ccuuccccuagucugagua

SEQ ID NO: 1875598 - RNA, 19 nt, Artificial Sequence
  Description of Artificial Sequence: Synthetic oligonucleotide
ccccacagauuccuuccag

SEQ ID NO: 1875599 - RNA, 19 nt, Artificial Sequence
  Description of Artificial Sequence: Synthetic oligonucleotide
cuagucugaguaacucauu

SEQ ID NO: 1875600 - RNA, 19 nt, Artificial Sequence
  Description of Artificial Sequence: Synthetic oligonucleotide
acucggcugagaacugcau

SEQ ID NO: 1875601 - RNA, 19 nt, Artificial Sequence
  Description of Artificial Sequence: Synthetic oligonucleotide
cccacagcaauacucggcu

SEQ ID NO: 1875602 - RNA, 19 nt, Artificial Sequence
  Description of Artificial Sequence: Synthetic oligonucleotide
ccacagcaauacucggcug

SEQ ID NO: 1875603 - RNA, 19 nt, Artificial Sequence
  Description of Artificial Sequence: Synthetic oligonucleotide
ccccuagucugaguaacuc

SEQ ID NO: 1875604 - RNA, 19 nt, Artificial Sequence
  Description of Artificial Sequence: Synthetic oligonucleotide
cgugucauggauacucucu

SEQ ID NO: 1875605 - RNA, 19 nt, Artificial Sequence
  Description of Artificial Sequence: Synthetic oligonucleotide
gugaguucaccuggauccu

SEQ ID NO: 1875606 - RNA, 19 nt, Artificial Sequence
  Description of Artificial Sequence: Synthetic oligonucleotide
caccaggaaugugcuguca

SEQ ID NO: 1875607 - RNA, 19 nt, Artificial Sequence
  Description of Artificial Sequence: Synthetic oligonucleotide
ggcuaucccuuugcuugug

SEQ ID NO: 1875608 - RNA, 19 nt, Artificial Sequence
  Description of Artificial Sequence: Synthetic oligonucleotide
cagcaauacucggcugaga

SEQ ID NO: 1875609 - RNA, 19 nt, Artificial Sequence
  Description of Artificial Sequence: Synthetic oligonucleotide
cgaugaguuuagaaaugaa

SEQ ID NO: 1875610 - RNA, 19 nt, Artificial Sequence
  Description of Artificial Sequence: Synthetic oligonucleotide
ccgccauggcugugcagcc

SEQ ID NO: 1875611 - RNA, 19 nt, Artificial Sequence
  Description of Artificial Sequence: Synthetic oligonucleotide
gcaccuuccccuagucuga

SEQ ID NO: 1875612 - RNA, 19 nt, Artificial Sequence
  Description of Artificial Sequence: Synthetic oligonucleotide
cagccuuccugcccacaaa

SEQ ID NO: 1875613 - RNA, 19 nt, Artificial Sequence
  Description of Artificial Sequence: Synthetic oligonucleotide
cuugcccgccauggcugug

SEQ ID NO: 1875614 - RNA, 19 nt, Artificial Sequence
  Description of Artificial Sequence: Synthetic oligonucleotide
ggccugcaugaugaggauc

SEQ ID NO: 1875615 - RNA, 19 nt, Artificial Sequence
  Description of Artificial Sequence: Synthetic oligonucleotide
caguggcuaucccuuugcu

SEQ ID NO: 1875616 - RNA, 19 nt, Artificial Sequence
  Description of Artificial Sequence: Synthetic oligonucleotide
ccaaucguguucggccuuc

SEQ ID NO: 1875617 - RNA, 19 nt, Artificial Sequence
  Description of Artificial Sequence: Synthetic oligonucleotide
gcgagccacucuugcuuac

SEQ ID NO: 1875618 - RNA, 19 nt, Artificial Sequence
  Description of Artificial Sequence: Synthetic oligonucleotide
cucuuucauaugucuucuu

SEQ ID NO: 1875619 - RNA, 19 nt, Artificial Sequence
  Description of Artificial Sequence: Synthetic oligonucleotide
gugcugucagaggacuggu

SEQ ID NO: 1875620 - RNA, 19 nt, Artificial Sequence
  Description of Artificial Sequence: Synthetic oligonucleotide
cuguaucagcaguggcuau

SEQ ID NO: 1875621 - RNA, 19 nt, Artificial Sequence
  Description of Artificial Sequence: Synthetic oligonucleotide
cgagccacucuugcuuacc

SEQ ID NO: 1875622 - RNA, 19 nt, Artificial Sequence
  Description of Artificial Sequence: Synthetic oligonucleotide
cguuauucagaaggaagcu

SEQ ID NO: 1875623 - RNA, 19 nt, Artificial Sequence
  Description of Artificial Sequence: Synthetic oligonucleotide
ccacugaguauccaagguu

SEQ ID NO: 1875624 - RNA, 19 nt, Artificial Sequence
  Description of Artificial Sequence: Synthetic oligonucleotide
guguaucaccuguguuaau

SEQ ID NO: 1875625 - RNA, 19 nt, Artificial Sequence
  Description of Artificial Sequence: Synthetic oligonucleotide
gccucaccccacagauucc

SEQ ID NO: 1875626 - RNA, 19 nt, Artificial Sequence
  Description of Artificial Sequence: Synthetic oligonucleotide
ccauggcugugcagccuuc

SEQ ID NO: 1875627 - RNA, 19 nt, Artificial Sequence
  Description of Artificial Sequence: Synthetic oligonucleotide
cggccagcaaacugcauua

SEQ ID NO: 1875628 - RNA, 19 nt, Artificial Sequence
  Description of Artificial Sequence: Synthetic oligonucleotide
gcagaugauaagagccaau

SEQ ID NO: 1875629 - RNA, 19 nt, Artificial Sequence
  Description of Artificial Sequence: Synthetic oligonucleotide
ggaagaacgucuggcucuu

SEQ ID NO: 1875630 - RNA, 19 nt, Artificial Sequence
  Description of Artificial Sequence: Synthetic oligonucleotide
ggccagcaaacugcauuaa

SEQ ID NO: 1875631 - RNA, 19 nt, Artificial Sequence
  Description of Artificial Sequence: Synthetic oligonucleotide
ccugagcuguaagguuuuc

SEQ ID NO: 1875632 - RNA, 19 nt, Artificial Sequence
  Description of Artificial Sequence: Synthetic oligonucleotide
cggcugagaacugcaugug

SEQ ID NO: 1875633 - RNA, 19 nt, Artificial Sequence
  Description of Artificial Sequence: Synthetic oligonucleotide
gcucgcaccuuccccuagu

SEQ ID NO: 1875634 - RNA, 19 nt, Artificial Sequence
  Description of Artificial Sequence: Synthetic oligonucleotide
cucaccccacagauuccuu

SEQ ID NO: 1875635 - RNA, 19 nt, Artificial Sequence
  Description of Artificial Sequence: Synthetic oligonucleotide
gccacacugcuucuccauu

SEQ ID NO: 1875636 - RNA, 19 nt, Artificial Sequence
  Description of Artificial Sequence: Synthetic oligonucleotide
gcccgccauggcugugcag

SEQ ID NO: 1875637 - RNA, 19 nt, Artificial Sequence
  Description of Artificial Sequence: Synthetic oligonucleotide
gaagaacgucuggcucuuu

SEQ ID NO: 1875638 - RNA, 19 nt, Artificial Sequence
  Description of Artificial Sequence: Synthetic oligonucleotide
ccaaacccuugaucuugua

SEQ ID NO: 1875639 - RNA, 19 nt, Artificial Sequence
  Description of Artificial Sequence: Synthetic oligonucleotide
gacggccagcaaacugcau

SEQ ID NO: 1875640 - RNA, 19 nt, Artificial Sequence
  Description of Artificial Sequence: Synthetic oligonucleotide
ccucaccccacagauuccu

SEQ ID NO: 1875641 - RNA, 19 nt, Artificial Sequence
  Description of Artificial Sequence: Synthetic oligonucleotide
ccaggaugccaugggacau

SEQ ID NO: 1875642 - RNA, 19 nt, Artificial Sequence
  Description of Artificial Sequence: Synthetic oligonucleotide
gccaaucguguucggccuu

SEQ ID NO: 1875643 - RNA, 19 nt, Artificial Sequence
  Description of Artificial Sequence: Synthetic oligonucleotide
cguguucggccuuccuucu

SEQ ID NO: 1875644 - RNA, 19 nt, Artificial Sequence
  Description of Artificial Sequence: Synthetic oligonucleotide
ggugggcaucugggugagu

SEQ ID NO: 1875645 - RNA, 19 nt, Artificial Sequence
  Description of Artificial Sequence: Synthetic oligonucleotide
cccugcaggccugcaugau

SEQ ID NO: 1875646 - RNA, 19 nt, Artificial Sequence
  Description of Artificial Sequence: Synthetic oligonucleotide
cgccauggcugugcagccu

SEQ ID NO: 1875647 - RNA, 19 nt, Artificial Sequence
  Description of Artificial Sequence: Synthetic oligonucleotide
acaagaguauguuacacac

SEQ ID NO: 1875648 - RNA, 19 nt, Artificial Sequence
  Description of Artificial Sequence: Synthetic oligonucleotide
auauacaagaguauguuac

SEQ ID NO: 1875649 - RNA, 19 nt, Artificial Sequence
  Description of Artificial Sequence: Synthetic oligonucleotide
uuacacacuauacaagaag

SEQ ID NO: 1875650 - RNA, 19 nt, Artificial Sequence
  Description of Artificial Sequence: Synthetic oligonucleotide
uguuacacacuauacaaga

SEQ ID NO: 1875651 - RNA, 19 nt, Artificial Sequence
  Description of Artificial Sequence: Synthetic oligonucleotide
aaacagagccggcaagugc

SEQ ID NO: 1875652 - RNA, 19 nt, Artificial Sequence
  Description of Artificial Sequence: Synthetic oligonucleotide
aagaguauguuacacacua

SEQ ID NO: 1875653 - RNA, 19 nt, Artificial Sequence
  Description of Artificial Sequence: Synthetic oligonucleotide
auuccuugagcugacaccc

SEQ ID NO: 1875654 - RNA, 19 nt, Artificial Sequence
  Description of Artificial Sequence: Synthetic oligonucleotide
uacacacuauacaagaagu

SEQ ID NO: 1875655 - RNA, 19 nt, Artificial Sequence
  Description of Artificial Sequence: Synthetic oligonucleotide
  modified_base (18)..(18): a, c, u, g, unknown or other
cauaggugcccuuaaagng

SEQ ID NO: 1875656 - RNA, 19 nt, Artificial Sequence
  Description of Artificial Sequence: Synthetic oligonucleotide
uucaucagaaucccucgcg

SEQ ID NO: 1875657 - RNA, 19 nt, Artificial Sequence
  Description of Artificial Sequence: Synthetic oligonucleotide
gauucgacgaugcagguca

SEQ ID NO: 1875658 - RNA, 19 nt, Artificial Sequence
  Description of Artificial Sequence: Synthetic oligonucleotide
caaaccaggacccuuagug

SEQ ID NO: 1875659 - RNA, 19 nt, Artificial Sequence
  Description of Artificial Sequence: Synthetic oligonucleotide
uccauagcuaccaacaaau

SEQ ID NO: 1875660 - RNA, 19 nt, Artificial Sequence
  Description of Artificial Sequence: Synthetic oligonucleotide
gauagugucgguguggcag

SEQ ID NO: 1875661 - RNA, 19 nt, Artificial Sequence
  Description of Artificial Sequence: Synthetic oligonucleotide
ucaucagaaucccucgcgg

SEQ ID NO: 1875662 - RNA, 19 nt, Artificial Sequence
  Description of Artificial Sequence: Synthetic oligonucleotide
aacagagccggcaagugcg

SEQ ID NO: 1875663 - RNA, 19 nt, Artificial Sequence
  Description of Artificial Sequence: Synthetic oligonucleotide
guuccugagcaucucaucg

SEQ ID NO: 1875664 - RNA, 19 nt, Artificial Sequence
  Description of Artificial Sequence: Synthetic oligonucleotide
uuaaugcucuccuccauag

SEQ ID NO: 1875665 - RNA, 19 nt, Artificial Sequence
  Description of Artificial Sequence: Synthetic oligonucleotide
cuggauucgacgaugcagg

SEQ ID NO: 1875666 - RNA, 19 nt, Artificial Sequence
  Description of Artificial Sequence: Synthetic oligonucleotide
aaagacaccaggagugcgc

SEQ ID NO: 1875667 - RNA, 19 nt, Artificial Sequence
  Description of Artificial Sequence: Synthetic oligonucleotide
aguauguuacacacuauac

SEQ ID NO: 1875668 - RNA, 19 nt, Artificial Sequence
  Description of Artificial Sequence: Synthetic oligonucleotide
aucagaaucccucgcgggc

SEQ ID NO: 1875669 - RNA, 19 nt, Artificial Sequence
  Description of Artificial Sequence: Synthetic oligonucleotide
aaccaggacccuuagugag

SEQ ID NO: 1875670 - RNA, 19 nt, Artificial Sequence
  Description of Artificial Sequence: Synthetic oligonucleotide
agccagagaaacccaaagc

SEQ ID NO: 1875671 - RNA, 19 nt, Artificial Sequence
  Description of Artificial Sequence: Synthetic oligonucleotide
accauauuuaaugcucucc

SEQ ID NO: 1875672 - RNA, 19 nt, Artificial Sequence
  Description of Artificial Sequence: Synthetic oligonucleotide
aggccugugccguagaaac

SEQ ID NO: 1875673 - RNA, 19 nt, Artificial Sequence
  Description of Artificial Sequence: Synthetic oligonucleotide
uauacaagaguauguuaca

SEQ ID NO: 1875674 - RNA, 19 nt, Artificial Sequence
  Description of Artificial Sequence: Synthetic oligonucleotide
  modified_base (8)..(8): a, c, u, g, unknown or other
cuuaaagnggccuggcuug

SEQ ID NO: 1875675 - RNA, 19 nt, Artificial Sequence
  Description of Artificial Sequence: Synthetic oligonucleotide
uauuuaaugcucuccucca

SEQ ID NO: 1875676 - RNA, 19 nt, Artificial Sequence
  Description of Artificial Sequence: Synthetic oligonucleotide
ucaucgaaggccuguggcg

SEQ ID NO: 1875677 - RNA, 19 nt, Artificial Sequence
  Description of Artificial Sequence: Synthetic oligonucleotide
ucuggauucgacgaugcag

SEQ ID NO: 1875678 - RNA, 19 nt, Artificial Sequence
  Description of Artificial Sequence: Synthetic oligonucleotide
gugccguagaaacagagcc

SEQ ID NO: 1875679 - RNA, 19 nt, Artificial Sequence
  Description of Artificial Sequence: Synthetic oligonucleotide
  modified_base (4)..(4): a, c, u, g, unknown or other
aagnggccuggcuugauga

SEQ ID NO: 1875680 - RNA, 19 nt, Artificial Sequence
  Description of Artificial Sequence: Synthetic oligonucleotide
ugaaggcucccgaaguggg

SEQ ID NO: 1875681 - RNA, 19 nt, Artificial Sequence
  Description of Artificial Sequence: Synthetic oligonucleotide
gacuggauguuccugagca

SEQ ID NO: 1875682 - RNA, 19 nt, Artificial Sequence
  Description of Artificial Sequence: Synthetic oligonucleotide
agcaaugaggccugugccg

SEQ ID NO: 1875683 - RNA, 19 nt, Artificial Sequence
  Description of Artificial Sequence: Synthetic oligonucleotide
aaaccaggacccuuaguga

SEQ ID NO: 1875684 - RNA, 19 nt, Artificial Sequence
  Description of Artificial Sequence: Synthetic oligonucleotide
guauguuacacacuauaca

SEQ ID NO: 1875685 - RNA, 19 nt, Artificial Sequence
  Description of Artificial Sequence: Synthetic oligonucleotide
acacuauacaagaaguguc

SEQ ID NO: 1875686 - RNA, 19 nt, Artificial Sequence
  Description of Artificial Sequence: Synthetic oligonucleotide
  modified_base (16)..(16): a, c, u, g, unknown or other
uaggugcccuuaaagnggc

SEQ ID NO: 1875687 - RNA, 19 nt, Artificial Sequence
  Description of Artificial Sequence: Synthetic oligonucleotide
ugccguagaaacagagccg

SEQ ID NO: 1875688 - RNA, 19 nt, Artificial Sequence
  Description of Artificial Sequence: Synthetic oligonucleotide
ucgcccgugaucuuggugc

SEQ ID NO: 1875689 - RNA, 19 nt, Artificial Sequence
  Description of Artificial Sequence: Synthetic oligonucleotide
ugggagguagauccggcgg

SEQ ID NO: 1875690 - RNA, 19 nt, Artificial Sequence
  Description of Artificial Sequence: Synthetic oligonucleotide
ugacugguguagaugaacu

SEQ ID NO: 1875691 - RNA, 19 nt, Artificial Sequence
  Description of Artificial Sequence: Synthetic oligonucleotide
  modified_base (17)..(17): a, c, u, g, unknown or other
auaggugcccuuaaagngg

SEQ ID NO: 1875692 - RNA, 19 nt, Artificial Sequence
  Description of Artificial Sequence: Synthetic oligonucleotide
  modified_base (5)..(5): a, c, u, g, unknown or other
aaagnggccuggcuugaug

SEQ ID NO: 1875693 - RNA, 19 nt, Artificial Sequence
  Description of Artificial Sequence: Synthetic oligonucleotide
cuuagugaggaggugugcg

SEQ ID NO: 1875694 - RNA, 19 nt, Artificial Sequence
  Description of Artificial Sequence: Synthetic oligonucleotide
ugagcaucucaucgaaggc

SEQ ID NO: 1875695 - RNA, 19 nt, Artificial Sequence
  Description of Artificial Sequence: Synthetic oligonucleotide
caagaagugucucagggca

SEQ ID NO: 1875696 - RNA, 19 nt, Artificial Sequence
  Description of Artificial Sequence: Synthetic oligonucleotide
gcaguugucguacugacug

SEQ ID NO: 1875697 - RNA, 19 nt, Artificial Sequence
  Description of Artificial Sequence: Synthetic oligonucleotide
ucauuccuugagcugacac

SEQ ID NO: 1875698 - RNA, 19 nt, Artificial Sequence
  Description of Artificial Sequence: Synthetic oligonucleotide
uuugggucgcccgugaucu

SEQ ID NO: 1875699 - RNA, 19 nt, Artificial Sequence
  Description of Artificial Sequence: Synthetic oligonucleotide
agcagggauguuugggucg

SEQ ID NO: 1875700 - RNA, 19 nt, Artificial Sequence
  Description of Artificial Sequence: Synthetic oligonucleotide
agcugagcaucacaauuuc

SEQ ID NO: 1875701 - RNA, 19 nt, Artificial Sequence
  Description of Artificial Sequence: Synthetic oligonucleotide
uugucguacugacuggugu

SEQ ID NO: 1875702 - RNA, 19 nt, Artificial Sequence
  Description of Artificial Sequence: Synthetic oligonucleotide
acaggcaacacaaauggcu

SEQ ID NO: 1875703 - RNA, 19 nt, Artificial Sequence
  Description of Artificial Sequence: Synthetic oligonucleotide
auaguccucauuccuugag

SEQ ID NO: 1875704 - RNA, 19 nt, Artificial Sequence
  Description of Artificial Sequence: Synthetic oligonucleotide
agagacuggauguuccuga

SEQ ID NO: 1875705 - RNA, 19 nt, Artificial Sequence
  Description of Artificial Sequence: Synthetic oligonucleotide
uccugcucuggauucgacg

SEQ ID NO: 1875706 - RNA, 19 nt, Artificial Sequence
  Description of Artificial Sequence: Synthetic oligonucleotide
acuauacaagaagugucuc

SEQ ID NO: 1875707 - RNA, 19 nt, Artificial Sequence
  Description of Artificial Sequence: Synthetic oligonucleotide
gaguauguuacacacuaua

SEQ ID NO: 1875708 - RNA, 19 nt, Artificial Sequence
  Description of Artificial Sequence: Synthetic oligonucleotide
aggacugguaaagccaugg

SEQ ID NO: 1875709 - RNA, 19 nt, Artificial Sequence
  Description of Artificial Sequence: Synthetic oligonucleotide
cucaucgaaggccuguggc

SEQ ID NO: 1875710 - RNA, 19 nt, Artificial Sequence
  Description of Artificial Sequence: Synthetic oligonucleotide
aggcaguugucguacugac

SEQ ID NO: 1875711 - RNA, 19 nt, Artificial Sequence
  Description of Artificial Sequence: Synthetic oligonucleotide
caucagaaucccucgcggg

SEQ ID NO: 1875712 - RNA, 19 nt, Artificial Sequence
  Description of Artificial Sequence: Synthetic oligonucleotide
guagaugaacuucaucaga

SEQ ID NO: 1875713 - RNA, 19 nt, Artificial Sequence
  Description of Artificial Sequence: Synthetic oligonucleotide
ucaggacugguaaagccau

SEQ ID NO: 1875714 - RNA, 19 nt, Artificial Sequence
  Description of Artificial Sequence: Synthetic oligonucleotide
aggacccuuagugaggagg

SEQ ID NO: 1875715 - RNA, 19 nt, Artificial Sequence
  Description of Artificial Sequence: Synthetic oligonucleotide
gacgaugcaggucaaucuc

SEQ ID NO: 1875716 - RNA, 19 nt, Artificial Sequence
  Description of Artificial Sequence: Synthetic oligonucleotide
ugcggcgggaaccugcugc

SEQ ID NO: 1875717 - RNA, 19 nt, Artificial Sequence
  Description of Artificial Sequence: Synthetic oligonucleotide
cuauacaagaagugucuca

SEQ ID NO: 1875718 - RNA, 19 nt, Artificial Sequence
  Description of Artificial Sequence: Synthetic oligonucleotide
ccagagaaacccaaagcgg

SEQ ID NO: 1875719 - RNA, 19 nt, Artificial Sequence
  Description of Artificial Sequence: Synthetic oligonucleotide
uccagauagugucggugug

SEQ ID NO: 1875720 - RNA, 19 nt, Artificial Sequence
  Description of Artificial Sequence: Synthetic oligonucleotide
agcgcacaccgccaugccc

SEQ ID NO: 1875721 - RNA, 19 nt, Artificial Sequence
  Description of Artificial Sequence: Synthetic oligonucleotide
ugagccauggaagcugagc

SEQ ID NO: 1875722 - RNA, 19 nt, Artificial Sequence
  Description of Artificial Sequence: Synthetic oligonucleotide
uugagcugacacccacagg

SEQ ID NO: 1875723 - RNA, 19 nt, Artificial Sequence
  Description of Artificial Sequence: Synthetic oligonucleotide
guaggucaggcaguugucg

SEQ ID NO: 1875724 - RNA, 19 nt, Artificial Sequence
  Description of Artificial Sequence: Synthetic oligonucleotide
auguuacacacuauacaag

SEQ ID NO: 1875725 - RNA, 19 nt, Artificial Sequence
  Description of Artificial Sequence: Synthetic oligonucleotide
cagcaugcggcccaucagg

SEQ ID NO: 1875726 - RNA, 19 nt, Artificial Sequence
  Description of Artificial Sequence: Synthetic oligonucleotide
ugaucuuggugccccuggc

SEQ ID NO: 1875727 - RNA, 19 nt, Artificial Sequence
  Description of Artificial Sequence: Synthetic oligonucleotide
cuucaucagaaucccucgc

SEQ ID NO: 1875728 - RNA, 19 nt, Artificial Sequence
  Description of Artificial Sequence: Synthetic oligonucleotide
ucaggcaguugucguacug

SEQ ID NO: 1875729 - RNA, 19 nt, Artificial Sequence
  Description of Artificial Sequence: Synthetic oligonucleotide
caucacaauuuccaggcca

SEQ ID NO: 1875730 - RNA, 19 nt, Artificial Sequence
  Description of Artificial Sequence: Synthetic oligonucleotide
cugugccguagaaacagag

SEQ ID NO: 1875731 - RNA, 19 nt, Artificial Sequence
  Description of Artificial Sequence: Synthetic oligonucleotide
  modified_base (7)..(7): a, c, u, g, unknown or other
uuaaagnggccuggcuuga

SEQ ID NO: 1875732 - RNA, 19 nt, Artificial Sequence
  Description of Artificial Sequence: Synthetic oligonucleotide
gacucggcuguacaagcug

SEQ ID NO: 1875733 - RNA, 19 nt, Artificial Sequence
  Description of Artificial Sequence: Synthetic oligonucleotide
uuccugagcaucucaucga

SEQ ID NO: 1875734 - RNA, 19 nt, Artificial Sequence
  Description of Artificial Sequence: Synthetic oligonucleotide
gucgguguccgccucacug

SEQ ID NO: 1875735 - RNA, 19 nt, Artificial Sequence
  Description of Artificial Sequence: Synthetic oligonucleotide
cucaggacugguaaagcca

SEQ ID NO: 1875736 - RNA, 19 nt, Artificial Sequence
  Description of Artificial Sequence: Synthetic oligonucleotide
cagcaaugaggccugugcc

SEQ ID NO: 1875737 - RNA, 19 nt, Artificial Sequence
  Description of Artificial Sequence: Synthetic oligonucleotide
agagaaacccaaagcgguc

SEQ ID NO: 1875738 - RNA, 19 nt, Artificial Sequence
  Description of Artificial Sequence: Synthetic oligonucleotide
ugagagacuggauguuccu

SEQ ID NO: 1875739 - RNA, 19 nt, Artificial Sequence
  Description of Artificial Sequence: Synthetic oligonucleotide
uccugagcaucucaucgaa

SEQ ID NO: 1875740 - RNA, 19 nt, Artificial Sequence
  Description of Artificial Sequence: Synthetic oligonucleotide
  modified_base (12)..(12): a, c, u, g, unknown or other
ugcccuuaaagnggccugg

SEQ ID NO: 1875741 - RNA, 19 nt, Artificial Sequence
  Description of Artificial Sequence: Synthetic oligonucleotide
uuuucccaccauauuuaau

SEQ ID NO: 1875742 - RNA, 19 nt, Artificial Sequence
  Description of Artificial Sequence: Synthetic oligonucleotide
  modified_base (2)..(2): a, c, u, g, unknown or other
gnggccuggcuugaugagg

SEQ ID NO: 1875743 - RNA, 19 nt, Artificial Sequence
  Description of Artificial Sequence: Synthetic oligonucleotide
gaaggacuucaguuccagc

SEQ ID NO: 1875744 - RNA, 19 nt, Artificial Sequence
  Description of Artificial Sequence: Synthetic oligonucleotide
gaagcugagcaucacaauu

SEQ ID NO: 1875745 - RNA, 19 nt, Artificial Sequence
  Description of Artificial Sequence: Synthetic oligonucleotide
acacacuauacaagaagug

SEQ ID NO: 1875746 - RNA, 19 nt, Artificial Sequence
  Description of Artificial Sequence: Synthetic oligonucleotide
agggauguuugggucgccc

SEQ ID NO: 1875747 - RNA, 19 nt, Artificial Sequence
  Description of Artificial Sequence: Synthetic oligonucleotide
aagcugagcaucacaauuu

SEQ ID NO: 1875748 - RNA, 19 nt, Artificial Sequence
  Description of Artificial Sequence: Synthetic oligonucleotide
ugcguucauuucccaagug

SEQ ID NO: 1875749 - RNA, 19 nt, Artificial Sequence
  Description of Artificial Sequence: Synthetic oligonucleotide
ugucguacugacuggugua

SEQ ID NO: 1875750 - RNA, 19 nt, Artificial Sequence
  Description of Artificial Sequence: Synthetic oligonucleotide
aucgaaggccuguggcgac

SEQ ID NO: 1875751 - RNA, 19 nt, Artificial Sequence
  Description of Artificial Sequence: Synthetic oligonucleotide
gugggagguagauccggcg

SEQ ID NO: 1875752 - RNA, 19 nt, Artificial Sequence
  Description of Artificial Sequence: Synthetic oligonucleotide
cagauagugucgguguggc

SEQ ID NO: 1875753 - RNA, 19 nt, Artificial Sequence
  Description of Artificial Sequence: Synthetic oligonucleotide
gccauaggugcccuuaaag

SEQ ID NO: 1875754 - RNA, 19 nt, Artificial Sequence
  Description of Artificial Sequence: Synthetic oligonucleotide
uagauccggcgguagguca

SEQ ID NO: 1875755 - RNA, 19 nt, Artificial Sequence
  Description of Artificial Sequence: Synthetic oligonucleotide
gaagguggccuggacucgg

SEQ ID NO: 1875756 - RNA, 19 nt, Artificial Sequence
  Description of Artificial Sequence: Synthetic oligonucleotide
ucucugcccacguggaggu

SEQ ID NO: 1875757 - RNA, 19 nt, Artificial Sequence
  Description of Artificial Sequence: Synthetic oligonucleotide
ucgacgaugcaggucaauc

SEQ ID NO: 1875758 - RNA, 19 nt, Artificial Sequence
  Description of Artificial Sequence: Synthetic oligonucleotide
gccguagaaacagagccgg

SEQ ID NO: 1875759 - RNA, 19 nt, Artificial Sequence
  Description of Artificial Sequence: Synthetic oligonucleotide
agaaacccaaagcgguccu

SEQ ID NO: 1875760 - RNA, 19 nt, Artificial Sequence
  Description of Artificial Sequence: Synthetic oligonucleotide
gcguucauuucccaagugc

SEQ ID NO: 1875761 - RNA, 19 nt, Artificial Sequence
  Description of Artificial Sequence: Synthetic oligonucleotide
caguugucguacugacugg

SEQ ID NO: 1875762 - RNA, 19 nt, Artificial Sequence
  Description of Artificial Sequence: Synthetic oligonucleotide
gugagagacuggauguucc

SEQ ID NO: 1875763 - RNA, 19 nt, Artificial Sequence
  Description of Artificial Sequence: Synthetic oligonucleotide
  modified_base (3)..(3): a, c, u, g, unknown or other
agnggccuggcuugaugag

SEQ ID NO: 1875764 - RNA, 19 nt, Artificial Sequence
  Description of Artificial Sequence: Synthetic oligonucleotide
gauguuugggucgcccgug

SEQ ID NO: 1875765 - RNA, 19 nt, Artificial Sequence
  Description of Artificial Sequence: Synthetic oligonucleotide
ugcucuggauucgacgaug

SEQ ID NO: 1875766 - RNA, 19 nt, Artificial Sequence
  Description of Artificial Sequence: Synthetic oligonucleotide
gaaucccucgcgggcagcg

SEQ ID NO: 1875767 - RNA, 19 nt, Artificial Sequence
  Description of Artificial Sequence: Synthetic oligonucleotide
uucccaagugcaugcuucu

SEQ ID NO: 1875768 - RNA, 19 nt, Artificial Sequence
  Description of Artificial Sequence: Synthetic oligonucleotide
cagagccgagcgcacaccg

SEQ ID NO: 1875769 - RNA, 19 nt, Artificial Sequence
  Description of Artificial Sequence: Synthetic oligonucleotide
aggaggugugcguucauuu

SEQ ID NO: 1875770 - RNA, 19 nt, Artificial Sequence
  Description of Artificial Sequence: Synthetic oligonucleotide
gaaggcucccgaagugggg

SEQ ID NO: 1875771 - RNA, 19 nt, Artificial Sequence
  Description of Artificial Sequence: Synthetic oligonucleotide
ugucgguguggcagggaug

SEQ ID NO: 1875772 - RNA, 19 nt, Artificial Sequence
  Description of Artificial Sequence: Synthetic oligonucleotide
aguugucguacugacuggu

SEQ ID NO: 1875773 - RNA, 19 nt, Artificial Sequence
  Description of Artificial Sequence: Synthetic oligonucleotide
guacugacugguguagaug

SEQ ID NO: 1875774 - RNA, 19 nt, Artificial Sequence
  Description of Artificial Sequence: Synthetic oligonucleotide
ucgguguccgccucacugu

SEQ ID NO: 1875775 - RNA, 19 nt, Artificial Sequence
  Description of Artificial Sequence: Synthetic oligonucleotide
gucguacugacugguguag

SEQ ID NO: 1875776 - RNA, 19 nt, Artificial Sequence
  Description of Artificial Sequence: Synthetic oligonucleotide
ggcacgugagccauggaag

SEQ ID NO: 1875777 - RNA, 19 nt, Artificial Sequence
  Description of Artificial Sequence: Synthetic oligonucleotide
cuggacucggcuguacaag

SEQ ID NO: 1875778 - RNA, 19 nt, Artificial Sequence
  Description of Artificial Sequence: Synthetic oligonucleotide
gggauguuugggucgcccg

SEQ ID NO: 1875779 - RNA, 19 nt, Artificial Sequence
  Description of Artificial Sequence: Synthetic oligonucleotide
ucggcuguacaagcugaag

SEQ ID NO: 1875780 - RNA, 19 nt, Artificial Sequence
  Description of Artificial Sequence: Synthetic oligonucleotide
ugccccuggcacgugagcc

SEQ ID NO: 1875781 - RNA, 19 nt, Artificial Sequence
  Description of Artificial Sequence: Synthetic oligonucleotide
auacgcuccuccucagggu

SEQ ID NO: 1875782 - RNA, 19 nt, Artificial Sequence
  Description of Artificial Sequence: Synthetic oligonucleotide
cuguccgcagcaugcggcc

SEQ ID NO: 1875783 - RNA, 19 nt, Artificial Sequence
  Description of Artificial Sequence: Synthetic oligonucleotide
ucgauacgcuccuccucag

SEQ ID NO: 1875784 - RNA, 19 nt, Artificial Sequence
  Description of Artificial Sequence: Synthetic oligonucleotide
acccuuagugaggaggugu

SEQ ID NO: 1875785 - RNA, 19 nt, Artificial Sequence
  Description of Artificial Sequence: Synthetic oligonucleotide
agcaugcggcccaucaggg

SEQ ID NO: 1875786 - RNA, 19 nt, Artificial Sequence
  Description of Artificial Sequence: Synthetic oligonucleotide
gcggggauaguccucauuc

SEQ ID NO: 1875787 - RNA, 19 nt, Artificial Sequence
  Description of Artificial Sequence: Synthetic oligonucleotide
uggauucgacgaugcaggu

SEQ ID NO: 1875788 - RNA, 19 nt, Artificial Sequence
  Description of Artificial Sequence: Synthetic oligonucleotide
gaggccgacggcucagcug

SEQ ID NO: 1875789 - RNA, 19 nt, Artificial Sequence
  Description of Artificial Sequence: Synthetic oligonucleotide
gccgucuccagauaguguc

SEQ ID NO: 1875790 - RNA, 19 nt, Artificial Sequence
  Description of Artificial Sequence: Synthetic oligonucleotide
gaugaggccgacggcucag

SEQ ID NO: 1875791 - RNA, 19 nt, Artificial Sequence
  Description of Artificial Sequence: Synthetic oligonucleotide
gguaaagccauggccagca

SEQ ID NO: 1875792 - RNA, 19 nt, Artificial Sequence
  Description of Artificial Sequence: Synthetic oligonucleotide
gguguagaugaacuucauc

SEQ ID NO: 1875793 - RNA, 19 nt, Artificial Sequence
  Description of Artificial Sequence: Synthetic oligonucleotide
ucagggucgguguccgccu

SEQ ID NO: 1875794 - RNA, 19 nt, Artificial Sequence
  Description of Artificial Sequence: Synthetic oligonucleotide
ucgaaggccuguggcgacg

SEQ ID NO: 1875795 - RNA, 19 nt, Artificial Sequence
  Description of Artificial Sequence: Synthetic oligonucleotide
guuugggucgcccgugauc

SEQ ID NO: 1875796 - RNA, 19 nt, Artificial Sequence
  Description of Artificial Sequence: Synthetic oligonucleotide
aggagugcgcucaggacug

SEQ ID NO: 1875797 - RNA, 19 nt, Artificial Sequence
  Description of Artificial Sequence: Synthetic oligonucleotide
caguuccagccagagaaac

SEQ ID NO: 1875798 - RNA, 19 nt, Artificial Sequence
  Description of Artificial Sequence: Synthetic oligonucleotide
agcugacacccacaggcaa

SEQ ID NO: 1875799 - RNA, 19 nt, Artificial Sequence
  Description of Artificial Sequence: Synthetic oligonucleotide
agaugaggccgacggcuca

SEQ ID NO: 1875800 - RNA, 19 nt, Artificial Sequence
  Description of Artificial Sequence: Synthetic oligonucleotide
ugccauaggugcccuuaaa

SEQ ID NO: 1875801 - RNA, 19 nt, Artificial Sequence
  Description of Artificial Sequence: Synthetic oligonucleotide
aucucaucgaaggccugug

SEQ ID NO: 1875802 - RNA, 19 nt, Artificial Sequence
  Description of Artificial Sequence: Synthetic oligonucleotide
cagcagggauguuuggguc

SEQ ID NO: 1875803 - RNA, 19 nt, Artificial Sequence
  Description of Artificial Sequence: Synthetic oligonucleotide
aagugcggggauaguccuc

SEQ ID NO: 1875804 - RNA, 19 nt, Artificial Sequence
  Description of Artificial Sequence: Synthetic oligonucleotide
gccugugccguagaaacag

SEQ ID NO: 1875805 - RNA, 19 nt, Artificial Sequence
  Description of Artificial Sequence: Synthetic oligonucleotide
gcaagugcggggauagucc

SEQ ID NO: 1875806 - RNA, 19 nt, Artificial Sequence
  Description of Artificial Sequence: Synthetic oligonucleotide
gcacgugagccauggaagc

SEQ ID NO: 1875807 - RNA, 19 nt, Artificial Sequence
  Description of Artificial Sequence: Synthetic oligonucleotide
ugcgcucaggacugguaaa

SEQ ID NO: 1875808 - RNA, 19 nt, Artificial Sequence
  Description of Artificial Sequence: Synthetic oligonucleotide
ugggucgcccgugaucuug

SEQ ID NO: 1875809 - RNA, 19 nt, Artificial Sequence
  Description of Artificial Sequence: Synthetic oligonucleotide
guugucguacugacuggug

SEQ ID NO: 1875810 - RNA, 19 nt, Artificial Sequence
  Description of Artificial Sequence: Synthetic oligonucleotide
auguuugggucgcccguga

SEQ ID NO: 1875811 - RNA, 19 nt, Artificial Sequence
  Description of Artificial Sequence: Synthetic oligonucleotide
uagugucgguguggcaggg

SEQ ID NO: 1875812 - RNA, 19 nt, Artificial Sequence
  Description of Artificial Sequence: Synthetic oligonucleotide
uguuugggucgcccgugau

SEQ ID NO: 1875813 - RNA, 19 nt, Artificial Sequence
  Description of Artificial Sequence: Synthetic oligonucleotide
ucguacugacugguguaga

SEQ ID NO: 1875814 - RNA, 19 nt, Artificial Sequence
  Description of Artificial Sequence: Synthetic oligonucleotide
agauagugucgguguggca

SEQ ID NO: 1875815 - RNA, 19 nt, Artificial Sequence
  Description of Artificial Sequence: Synthetic oligonucleotide
gauccggcgguaggucagg

SEQ ID NO: 1875816 - RNA, 19 nt, Artificial Sequence
  Description of Artificial Sequence: Synthetic oligonucleotide
cccaaagcgguccucauca

SEQ ID NO: 1875817 - RNA, 19 nt, Artificial Sequence
  Description of Artificial Sequence: Synthetic oligonucleotide
agcagcucgggcgggagcu

SEQ ID NO: 1875818 - RNA, 19 nt, Artificial Sequence
  Description of Artificial Sequence: Synthetic oligonucleotide
agaaucccucgcgggcagc

SEQ ID NO: 1875819 - RNA, 19 nt, Artificial Sequence
  Description of Artificial Sequence: Synthetic oligonucleotide
agauccggcgguaggucag

SEQ ID NO: 1875820 - RNA, 19 nt, Artificial Sequence
  Description of Artificial Sequence: Synthetic oligonucleotide
gaagugucucagggcaaac

SEQ ID NO: 1875821 - RNA, 19 nt, Artificial Sequence
  Description of Artificial Sequence: Synthetic oligonucleotide
cguucauuucccaagugca

SEQ ID NO: 1875822 - RNA, 19 nt, Artificial Sequence
  Description of Artificial Sequence: Synthetic oligonucleotide
  modified_base (13)..(13): a, c, u, g, unknown or other
gugcccuuaaagnggccug

SEQ ID NO: 1875823 - RNA, 19 nt, Artificial Sequence
  Description of Artificial Sequence: Synthetic oligonucleotide
augaggccgacggcucagc

SEQ ID NO: 1875824 - RNA, 19 nt, Artificial Sequence
  Description of Artificial Sequence: Synthetic oligonucleotide
gcgcacaccgccaugcccg

SEQ ID NO: 1875825 - RNA, 19 nt, Artificial Sequence
  Description of Artificial Sequence: Synthetic oligonucleotide
caucgaaggccuguggcga

SEQ ID NO: 1875826 - RNA, 19 nt, Artificial Sequence
  Description of Artificial Sequence: Synthetic oligonucleotide
acucggcuguacaagcuga

SEQ ID NO: 1875827 - RNA, 19 nt, Artificial Sequence
  Description of Artificial Sequence: Synthetic oligonucleotide
ggcacccacgcgcagggcc

SEQ ID NO: 1875828 - RNA, 19 nt, Artificial Sequence
  Description of Artificial Sequence: Synthetic oligonucleotide
ucucggccgggccgcggcg

SEQ ID NO: 1875829 - RNA, 19 nt, Artificial Sequence
  Description of Artificial Sequence: Synthetic oligonucleotide
cuccagauagugucggugu

SEQ ID NO: 1875830 - RNA, 19 nt, Artificial Sequence
  Description of Artificial Sequence: Synthetic oligonucleotide
ccggcgguaggucaggcag

SEQ ID NO: 1875831 - RNA, 19 nt, Artificial Sequence
  Description of Artificial Sequence: Synthetic oligonucleotide
gaaacccaaagcgguccuc

SEQ ID NO: 1875832 - RNA, 19 nt, Artificial Sequence
  Description of Artificial Sequence: Synthetic oligonucleotide
uccggcgguaggucaggca

SEQ ID NO: 1875833 - RNA, 19 nt, Artificial Sequence
  Description of Artificial Sequence: Synthetic oligonucleotide
gugcgcucaggacugguaa

SEQ ID NO: 1875834 - RNA, 19 nt, Artificial Sequence
  Description of Artificial Sequence: Synthetic oligonucleotide
ugcccagaugaggccgacg

SEQ ID NO: 1875835 - RNA, 19 nt, Artificial Sequence
  Description of Artificial Sequence: Synthetic oligonucleotide
caagaguauguuacacacu

SEQ ID NO: 1875836 - RNA, 19 nt, Artificial Sequence
  Description of Artificial Sequence: Synthetic oligonucleotide
acagagccggcaagugcgg

SEQ ID NO: 1875837 - RNA, 19 nt, Artificial Sequence
  Description of Artificial Sequence: Synthetic oligonucleotide
aggcucuuugcuguccgca

SEQ ID NO: 1875838 - RNA, 19 nt, Artificial Sequence
  Description of Artificial Sequence: Synthetic oligonucleotide
guagauccggcgguagguc

SEQ ID NO: 1875839 - RNA, 19 nt, Artificial Sequence
  Description of Artificial Sequence: Synthetic oligonucleotide
gucgcccgugaucuuggug

SEQ ID NO: 1875840 - RNA, 19 nt, Artificial Sequence
  Description of Artificial Sequence: Synthetic oligonucleotide
agcuaccaacaaaucaaau

SEQ ID NO: 1875841 - RNA, 19 nt, Artificial Sequence
  Description of Artificial Sequence: Synthetic oligonucleotide
agaguauguuacacacuau

SEQ ID NO: 1875842 - RNA, 19 nt, Artificial Sequence
  Description of Artificial Sequence: Synthetic oligonucleotide
acuguccgccgcugcuguc

SEQ ID NO: 1875843 - RNA, 19 nt, Artificial Sequence
  Description of Artificial Sequence: Synthetic oligonucleotide
ucgccagccuccugcucug

SEQ ID NO: 1875844 - RNA, 19 nt, Artificial Sequence
  Description of Artificial Sequence: Synthetic oligonucleotide
caggcucuuugcuguccgc

SEQ ID NO: 1875845 - RNA, 19 nt, Artificial Sequence
  Description of Artificial Sequence: Synthetic oligonucleotide
cuguggcgacggugcaucg

SEQ ID NO: 1875846 - RNA, 19 nt, Artificial Sequence
  Description of Artificial Sequence: Synthetic oligonucleotide
gacccuuagugaggaggug

SEQ ID NO: 1875847 - RNA, 19 nt, Artificial Sequence
  Description of Artificial Sequence: Synthetic oligonucleotide
caucagggcccuuggcuga

SEQ ID NO: 1875848 - RNA, 19 nt, Artificial Sequence
  Description of Artificial Sequence: Synthetic oligonucleotide
cugacacccacaggcaaca

SEQ ID NO: 1875849 - RNA, 19 nt, Artificial Sequence
  Description of Artificial Sequence: Synthetic oligonucleotide
agggaugcggcgggaaccu

SEQ ID NO: 1875850 - RNA, 19 nt, Artificial Sequence
  Description of Artificial Sequence: Synthetic oligonucleotide
uggcgacggugcaucggca

SEQ ID NO: 1875851 - RNA, 19 nt, Artificial Sequence
  Description of Artificial Sequence: Synthetic oligonucleotide
gcugagcaucacaauuucc

SEQ ID NO: 1875852 - RNA, 19 nt, Artificial Sequence
  Description of Artificial Sequence: Synthetic oligonucleotide
  modified_base (6)..(6): a, c, u, g, unknown or other
uaaagnggccuggcuugau

SEQ ID NO: 1875853 - RNA, 19 nt, Artificial Sequence
  Description of Artificial Sequence: Synthetic oligonucleotide
ggcaagugcggggauaguc

SEQ ID NO: 1875854 - RNA, 19 nt, Artificial Sequence
  Description of Artificial Sequence: Synthetic oligonucleotide
ugaggaggugugcguucau

SEQ ID NO: 1875855 - RNA, 19 nt, Artificial Sequence
  Description of Artificial Sequence: Synthetic oligonucleotide
auccggcgguaggucaggc

SEQ ID NO: 1875856 - RNA, 19 nt, Artificial Sequence
  Description of Artificial Sequence: Synthetic oligonucleotide
cccuuagugaggaggugug

SEQ ID NO: 1875857 - RNA, 19 nt, Artificial Sequence
  Description of Artificial Sequence: Synthetic oligonucleotide
gcagggagcagcgcgccgg

SEQ ID NO: 1875858 - RNA, 19 nt, Artificial Sequence
  Description of Artificial Sequence: Synthetic oligonucleotide
ugggcaggucggugccggg

SEQ ID NO: 1875859 - RNA, 19 nt, Artificial Sequence
  Description of Artificial Sequence: Synthetic oligonucleotide
ccauagcuaccaacaaauc

SEQ ID NO: 1875860 - RNA, 19 nt, Artificial Sequence
  Description of Artificial Sequence: Synthetic oligonucleotide
uguccgcagcaugcggccc

SEQ ID NO: 1875861 - RNA, 19 nt, Artificial Sequence
  Description of Artificial Sequence: Synthetic oligonucleotide
uguccgccgcugcugucuc

SEQ ID NO: 1875862 - RNA, 19 nt, Artificial Sequence
  Description of Artificial Sequence: Synthetic oligonucleotide
ccuggcacgugagccaugg

SEQ ID NO: 1875863 - RNA, 19 nt, Artificial Sequence
  Description of Artificial Sequence: Synthetic oligonucleotide
gggagcagcgcgccggccc

SEQ ID NO: 1875864 - RNA, 19 nt, Artificial Sequence
  Description of Artificial Sequence: Synthetic oligonucleotide
gcuguccgcagcaugcggc

SEQ ID NO: 1875865 - RNA, 19 nt, Artificial Sequence
  Description of Artificial Sequence: Synthetic oligonucleotide
gcgggaaccugcugcagac

SEQ ID NO: 1875866 - RNA, 19 nt, Artificial Sequence
  Description of Artificial Sequence: Synthetic oligonucleotide
aggcucccgaaguggggca

SEQ ID NO: 1875867 - RNA, 19 nt, Artificial Sequence
  Description of Artificial Sequence: Synthetic oligonucleotide
caagugcggggauaguccu

SEQ ID NO: 1875868 - RNA, 19 nt, Artificial Sequence
  Description of Artificial Sequence: Synthetic oligonucleotide
gugcguucauuucccaagu

SEQ ID NO: 1875869 - RNA, 19 nt, Artificial Sequence
  Description of Artificial Sequence: Synthetic oligonucleotide
ggggauaguccucauuccu

SEQ ID NO: 1875870 - RNA, 19 nt, Artificial Sequence
  Description of Artificial Sequence: Synthetic oligonucleotide
cacaccgccaugcccgcca

SEQ ID NO: 1875871 - RNA, 19 nt, Artificial Sequence
  Description of Artificial Sequence: Synthetic oligonucleotide
  modified_base (15)..(15): a, c, u, g, unknown or other
aggugcccuuaaagnggcc

SEQ ID NO: 1875872 - RNA, 19 nt, Artificial Sequence
  Description of Artificial Sequence: Synthetic oligonucleotide
gaggccugugccguagaaa

SEQ ID NO: 1875873 - RNA, 19 nt, Artificial Sequence
  Description of Artificial Sequence: Synthetic oligonucleotide
ggcccaucagggcccuugg

SEQ ID NO: 1875874 - RNA, 19 nt, Artificial Sequence
  Description of Artificial Sequence: Synthetic oligonucleotide
gucucggccgggccgcggc

SEQ ID NO: 1875875 - RNA, 19 nt, Artificial Sequence
  Description of Artificial Sequence: Synthetic oligonucleotide
ggaugcggcgggaaccugc

SEQ ID NO: 1875876 - RNA, 19 nt, Artificial Sequence
  Description of Artificial Sequence: Synthetic oligonucleotide
ggcauucuggaagguggcc

SEQ ID NO: 1875877 - RNA, 19 nt, Artificial Sequence
  Description of Artificial Sequence: Synthetic oligonucleotide
ucgguguggcagggaugcg

SEQ ID NO: 1875878 - RNA, 19 nt, Artificial Sequence
  Description of Artificial Sequence: Synthetic oligonucleotide
  modified_base (14)..(14): a, c, u, g, unknown or other
ggugcccuuaaagnggccu

SEQ ID NO: 1875879 - RNA, 19 nt, Artificial Sequence
  Description of Artificial Sequence: Synthetic oligonucleotide
uguccgccucacuguccgc

SEQ ID NO: 1875880 - RNA, 19 nt, Artificial Sequence
  Description of Artificial Sequence: Synthetic oligonucleotide
cccacguggaggucaggag

SEQ ID NO: 1875881 - RNA, 19 nt, Artificial Sequence
  Description of Artificial Sequence: Synthetic oligonucleotide
gcugacacccacaggcaac

SEQ ID NO: 1875882 - RNA, 19 nt, Artificial Sequence
  Description of Artificial Sequence: Synthetic oligonucleotide
cugcugucucggccgggcc

SEQ ID NO: 1875883 - RNA, 19 nt, Artificial Sequence
  Description of Artificial Sequence: Synthetic oligonucleotide
ccaggagugcgcucaggac

SEQ ID NO: 1875884 - RNA, 19 nt, Artificial Sequence
  Description of Artificial Sequence: Synthetic oligonucleotide
uucgacgaugcaggucaau

SEQ ID NO: 1875885 - RNA, 19 nt, Artificial Sequence
  Description of Artificial Sequence: Synthetic oligonucleotide
acggugcaucggcauucug

SEQ ID NO: 1875886 - RNA, 19 nt, Artificial Sequence
  Description of Artificial Sequence: Synthetic oligonucleotide
aggugagagacuggauguu

SEQ ID NO: 1875887 - RNA, 19 nt, Artificial Sequence
  Description of Artificial Sequence: Synthetic oligonucleotide
ggugccgggcagcaggcga

SEQ ID NO: 1875888 - RNA, 19 nt, Artificial Sequence
  Description of Artificial Sequence: Synthetic oligonucleotide
cucggcuguacaagcugaa

SEQ ID NO: 1875889 - RNA, 19 nt, Artificial Sequence
  Description of Artificial Sequence: Synthetic oligonucleotide
ugacacccacaggcaacac

SEQ ID NO: 1875890 - RNA, 19 nt, Artificial Sequence
  Description of Artificial Sequence: Synthetic oligonucleotide
ugucucggccgggccgcgg

SEQ ID NO: 1875891 - RNA, 19 nt, Artificial Sequence
  Description of Artificial Sequence: Synthetic oligonucleotide
ggauucgacgaugcagguc

SEQ ID NO: 1875892 - RNA, 19 nt, Artificial Sequence
  Description of Artificial Sequence: Synthetic oligonucleotide
gcaugcggcccaucagggc

SEQ ID NO: 1875893 - RNA, 19 nt, Artificial Sequence
  Description of Artificial Sequence: Synthetic oligonucleotide
gugucgguguggcagggau

SEQ ID NO: 1875894 - RNA, 19 nt, Artificial Sequence
  Description of Artificial Sequence: Synthetic oligonucleotide
ggucaucggggugcugggg

SEQ ID NO: 1875895 - RNA, 19 nt, Artificial Sequence
  Description of Artificial Sequence: Synthetic oligonucleotide
cggggauaguccucauucc

SEQ ID NO: 1875896 - RNA, 19 nt, Artificial Sequence
  Description of Artificial Sequence: Synthetic oligonucleotide
cugccccugcccagaugag

SEQ ID NO: 1875897 - RNA, 19 nt, Artificial Sequence
  Description of Artificial Sequence: Synthetic oligonucleotide
agugucgguguggcaggga

SEQ ID NO: 1875898 - RNA, 19 nt, Artificial Sequence
  Description of Artificial Sequence: Synthetic oligonucleotide
cagcucgggcgggagcucc

SEQ ID NO: 1875899 - RNA, 19 nt, Artificial Sequence
  Description of Artificial Sequence: Synthetic oligonucleotide
gcagggaugcggcgggaac

SEQ ID NO: 1875900 - RNA, 19 nt, Artificial Sequence
  Description of Artificial Sequence: Synthetic oligonucleotide
gccggccccgccucgauac

SEQ ID NO: 1875901 - RNA, 19 nt, Artificial Sequence
  Description of Artificial Sequence: Synthetic oligonucleotide
cucgggcgggagcuccagc

SEQ ID NO: 1875902 - RNA, 19 nt, Artificial Sequence
  Description of Artificial Sequence: Synthetic oligonucleotide
gaugcggcgggaaccugcu

SEQ ID NO: 1875903 - RNA, 19 nt, Artificial Sequence
  Description of Artificial Sequence: Synthetic oligonucleotide
gguagauccggcgguaggu

SEQ ID NO: 1875904 - RNA, 19 nt, Artificial Sequence
  Description of Artificial Sequence: Synthetic oligonucleotide
agcgccgucuccagauagu

SEQ ID NO: 1875905 - RNA, 19 nt, Artificial Sequence
  Description of Artificial Sequence: Synthetic oligonucleotide
caccaggagugcgcucagg

SEQ ID NO: 1875906 - RNA, 19 nt, Artificial Sequence
  Description of Artificial Sequence: Synthetic oligonucleotide
agugcgcucaggacuggua

SEQ ID NO: 1875907 - RNA, 19 nt, Artificial Sequence
  Description of Artificial Sequence: Synthetic oligonucleotide
  modified_base (9)..(9): a, c, u, g, unknown or other
ccuuaaagnggccuggcuu

SEQ ID NO: 1875908 - RNA, 19 nt, Artificial Sequence
  Description of Artificial Sequence: Synthetic oligonucleotide
cguagaaacagagccggca

SEQ ID NO: 1875909 - RNA, 19 nt, Artificial Sequence
  Description of Artificial Sequence: Synthetic oligonucleotide
gggucgcccgugaucuugg

SEQ ID NO: 1875910 - RNA, 19 nt, Artificial Sequence
  Description of Artificial Sequence: Synthetic oligonucleotide
gugagccauggaagcugag

SEQ ID NO: 1875911 - RNA, 19 nt, Artificial Sequence
  Description of Artificial Sequence: Synthetic oligonucleotide
ccguagaaacagagccggc

SEQ ID NO: 1875912 - RNA, 19 nt, Artificial Sequence
  Description of Artificial Sequence: Synthetic oligonucleotide
gcugcugucucggccgggc

SEQ ID NO: 1875913 - RNA, 19 nt, Artificial Sequence
  Description of Artificial Sequence: Synthetic oligonucleotide
ccggcaagugcggggauag

SEQ ID NO: 1875914 - RNA, 19 nt, Artificial Sequence
  Description of Artificial Sequence: Synthetic oligonucleotide
ccucgauacgcuccuccuc

SEQ ID NO: 1875915 - RNA, 19 nt, Artificial Sequence
  Description of Artificial Sequence: Synthetic oligonucleotide
gcugucucggccgggccgc

SEQ ID NO: 1875916 - RNA, 19 nt, Artificial Sequence
  Description of Artificial Sequence: Synthetic oligonucleotide
gggagguagauccggcggu

SEQ ID NO: 1875917 - RNA, 19 nt, Artificial Sequence
  Description of Artificial Sequence: Synthetic oligonucleotide
  modified_base (11)..(11): a, c, u, g, unknown or other
gcccuuaaagnggccuggc

SEQ ID NO: 1875918 - RNA, 19 nt, Artificial Sequence
  Description of Artificial Sequence: Synthetic oligonucleotide
ggugccccuggcacgugag

SEQ ID NO: 1875919 - RNA, 19 nt, Artificial Sequence
  Description of Artificial Sequence: Synthetic oligonucleotide
cuuggugccccuggcacgu

SEQ ID NO: 1875920 - RNA, 19 nt, Artificial Sequence
  Description of Artificial Sequence: Synthetic oligonucleotide
gguguccgccucacugucc

SEQ ID NO: 1875921 - RNA, 19 nt, Artificial Sequence
  Description of Artificial Sequence: Synthetic oligonucleotide
gcgccgucuccagauagug

SEQ ID NO: 1875922 - RNA, 19 nt, Artificial Sequence
  Description of Artificial Sequence: Synthetic oligonucleotide
gugcaucggcauucuggaa

SEQ ID NO: 1875923 - RNA, 19 nt, Artificial Sequence
  Description of Artificial Sequence: Synthetic oligonucleotide
ggacccuuagugaggaggu

SEQ ID NO: 1875924 - RNA, 19 nt, Artificial Sequence
  Description of Artificial Sequence: Synthetic oligonucleotide
gccuccugcucuggauucg

SEQ ID NO: 1875925 - RNA, 19 nt, Artificial Sequence
  Description of Artificial Sequence: Synthetic oligonucleotide
cgauacgcuccuccucagg

SEQ ID NO: 1875926 - RNA, 19 nt, Artificial Sequence
  Description of Artificial Sequence: Synthetic oligonucleotide
cgagcgcacaccgccaugc

SEQ ID NO: 1875927 - RNA, 19 nt, Artificial Sequence
  Description of Artificial Sequence: Synthetic oligonucleotide
cucauuccuugagcugaca

SEQ ID NO: 1875928 - RNA, 19 nt, Artificial Sequence
  Description of Artificial Sequence: Synthetic oligonucleotide
ccagcagggauguuugggu

SEQ ID NO: 1875929 - RNA, 19 nt, Artificial Sequence
  Description of Artificial Sequence: Synthetic oligonucleotide
ccccgccucgauacgcucc

SEQ ID NO: 1875930 - RNA, 19 nt, Artificial Sequence
  Description of Artificial Sequence: Synthetic oligonucleotide
cagggucgguguccgccuc

SEQ ID NO: 1875931 - RNA, 19 nt, Artificial Sequence
  Description of Artificial Sequence: Synthetic oligonucleotide
gcacccacgcgcagggccc

SEQ ID NO: 1875932 - RNA, 19 nt, Artificial Sequence
  Description of Artificial Sequence: Synthetic oligonucleotide
ccuggacucggcuguacaa

SEQ ID NO: 1875933 - RNA, 19 nt, Artificial Sequence
  Description of Artificial Sequence: Synthetic oligonucleotide
gcugccauaggugcccuua

SEQ ID NO: 1875934 - RNA, 19 nt, Artificial Sequence
  Description of Artificial Sequence: Synthetic oligonucleotide
cgccucgauacgcuccucc

SEQ ID NO: 1875935 - RNA, 19 nt, Artificial Sequence
  Description of Artificial Sequence: Synthetic oligonucleotide
cauuucccaagugcaugcu

SEQ ID NO: 1875936 - RNA, 19 nt, Artificial Sequence
  Description of Artificial Sequence: Synthetic oligonucleotide
gaaguggggcaggguccuc

SEQ ID NO: 1875937 - RNA, 19 nt, Artificial Sequence
  Description of Artificial Sequence: Synthetic oligonucleotide
gcagagccgagcgcacacc

SEQ ID NO: 1875938 - RNA, 19 nt, Artificial Sequence
  Description of Artificial Sequence: Synthetic oligonucleotide
auucgacgaugcaggucaa

SEQ ID NO: 1875939 - RNA, 19 nt, Artificial Sequence
  Description of Artificial Sequence: Synthetic oligonucleotide
agccgagcgcacaccgcca

SEQ ID NO: 1875940 - RNA, 19 nt, Artificial Sequence
  Description of Artificial Sequence: Synthetic oligonucleotide
cccaucagggcccuuggcu

SEQ ID NO: 1875941 - RNA, 19 nt, Artificial Sequence
  Description of Artificial Sequence: Synthetic oligonucleotide
ccacgcgcagggcccacgc

SEQ ID NO: 1875942 - RNA, 19 nt, Artificial Sequence
  Description of Artificial Sequence: Synthetic oligonucleotide
  modified_base (10)..(10): a, c, u, g, unknown or other
cccuuaaagnggccuggcu

SEQ ID NO: 1875943 - RNA, 19 nt, Artificial Sequence
  Description of Artificial Sequence: Synthetic oligonucleotide
agccggcaagugcggggau

SEQ ID NO: 1875944 - RNA, 19 nt, Artificial Sequence
  Description of Artificial Sequence: Synthetic oligonucleotide
cugucucggccgggccgcg

SEQ ID NO: 1875945 - RNA, 19 nt, Artificial Sequence
  Description of Artificial Sequence: Synthetic oligonucleotide
ccugugccguagaaacaga

SEQ ID NO: 1875946 - RNA, 19 nt, Artificial Sequence
  Description of Artificial Sequence: Synthetic oligonucleotide
cgcccgugaucuuggugcc

SEQ ID NO: 1875947 - RNA, 19 nt, Artificial Sequence
  Description of Artificial Sequence: Synthetic oligonucleotide
gugccgggcagcaggcgaa

SEQ ID NO: 1875948 - RNA, 19 nt, Artificial Sequence
  Description of Artificial Sequence: Synthetic oligonucleotide
cuguccgccgcugcugucu

SEQ ID NO: 1875949 - RNA, 19 nt, Artificial Sequence
  Description of Artificial Sequence: Synthetic oligonucleotide
cgacgaugcaggucaaucu

SEQ ID NO: 1875950 - RNA, 19 nt, Artificial Sequence
  Description of Artificial Sequence: Synthetic oligonucleotide
ggacucggcuguacaagcu

SEQ ID NO: 1875951 - RNA, 19 nt, Artificial Sequence
  Description of Artificial Sequence: Synthetic oligonucleotide
cgacggugcaucggcauuc

SEQ ID NO: 1875952 - RNA, 19 nt, Artificial Sequence
  Description of Artificial Sequence: Synthetic oligonucleotide
ccgacggcucagcugccuc

SEQ ID NO: 1875953 - RNA, 19 nt, Artificial Sequence
  Description of Artificial Sequence: Synthetic oligonucleotide
ggcaguugucguacugacu

SEQ ID NO: 1875954 - RNA, 19 nt, Artificial Sequence
  Description of Artificial Sequence: Synthetic oligonucleotide
ggcgacggugcaucggcau

SEQ ID NO: 1875955 - RNA, 19 nt, Artificial Sequence
  Description of Artificial Sequence: Synthetic oligonucleotide
cucgcgggcagcgccgucu

SEQ ID NO: 1875956 - RNA, 19 nt, Artificial Sequence
  Description of Artificial Sequence: Synthetic oligonucleotide
gggcaggguccucgccagc

SEQ ID NO: 1875957 - RNA, 19 nt, Artificial Sequence
  Description of Artificial Sequence: Synthetic oligonucleotide
cguacugacugguguagau

SEQ ID NO: 1875958 - RNA, 19 nt, Artificial Sequence
  Description of Artificial Sequence: Synthetic oligonucleotide
gcagccucucugcccacgu

SEQ ID NO: 1875959 - RNA, 19 nt, Artificial Sequence
  Description of Artificial Sequence: Synthetic oligonucleotide
gcccgugaucuuggugccc

SEQ ID NO: 1875960 - RNA, 19 nt, Artificial Sequence
  Description of Artificial Sequence: Synthetic oligonucleotide
cgguguccgccucacuguc

SEQ ID NO: 1875961 - RNA, 19 nt, Artificial Sequence
  Description of Artificial Sequence: Synthetic oligonucleotide
ccgagcgcacaccgccaug

SEQ ID NO: 1875962 - RNA, 19 nt, Artificial Sequence
  Description of Artificial Sequence: Synthetic oligonucleotide
gggaugcggcgggaaccug

SEQ ID NO: 1875963 - RNA, 19 nt, Artificial Sequence
  Description of Artificial Sequence: Synthetic oligonucleotide
ggcagggaugcggcgggaa

SEQ ID NO: 1875964 - RNA, 19 nt, Artificial Sequence
  Description of Artificial Sequence: Synthetic oligonucleotide
gcgguaggucaggcaguug

SEQ ID NO: 1875965 - RNA, 19 nt, Artificial Sequence
  Description of Artificial Sequence: Synthetic oligonucleotide
ccggccccgccucgauacg

SEQ ID NO: 1875966 - RNA, 19 nt, Artificial Sequence
  Description of Artificial Sequence: Synthetic oligonucleotide
cgggaaccugcugcagacc

SEQ ID NO: 1875967 - RNA, 19 nt, Artificial Sequence
  Description of Artificial Sequence: Synthetic oligonucleotide
gccccgccucgauacgcuc

SEQ ID NO: 1875968 - RNA, 19 nt, Artificial Sequence
  Description of Artificial Sequence: Synthetic oligonucleotide
gcggcggcacccacgcgca

SEQ ID NO: 1875969 - RNA, 19 nt, Artificial Sequence
  Description of Artificial Sequence: Synthetic oligonucleotide
cgacggcucagcugccuca

SEQ ID NO: 1875970 - RNA, 19 nt, Artificial Sequence
  Description of Artificial Sequence: Synthetic oligonucleotide
cacccacgcgcagggccca

SEQ ID NO: 1875971 - RNA, 19 nt, Artificial Sequence
  Description of Artificial Sequence: Synthetic oligonucleotide
ggcgguaggucaggcaguu

SEQ ID NO: 1875972 - RNA, 19 nt, Artificial Sequence
  Description of Artificial Sequence: Synthetic oligonucleotide
gcgacggugcaucggcauu

SEQ ID NO: 1875973 - RNA, 19 nt, Artificial Sequence
  Description of Artificial Sequence: Synthetic oligonucleotide
cgccgcagagccgagcgca

SEQ ID NO: 1875974 - RNA, 19 nt, Artificial Sequence
  Description of Artificial Sequence: Synthetic oligonucleotide
gccggcaagugcggggaua

SEQ ID NO: 1875975 - RNA, 19 nt, Artificial Sequence
  Description of Artificial Sequence: Synthetic oligonucleotide
gcgggagcuccagcaggga

SEQ ID NO: 1875976 - RNA, 19 nt, Artificial Sequence
  Description of Artificial Sequence: Synthetic oligonucleotide
ggucgcccgugaucuuggu

SEQ ID NO: 1875977 - RNA, 19 nt, Artificial Sequence
  Description of Artificial Sequence: Synthetic oligonucleotide
cggccccgccucgauacgc

SEQ ID NO: 1875978 - RNA, 19 nt, Artificial Sequence
  Description of Artificial Sequence: Synthetic oligonucleotide
gccgggcagcaggcgaaga

SEQ ID NO: 1875979 - RNA, 19 nt, Artificial Sequence
  Description of Artificial Sequence: Synthetic oligonucleotide
ggccccgccucgauacgcu

SEQ ID NO: 1875980 - RNA, 19 nt, Artificial Sequence
  Description of Artificial Sequence: Synthetic oligonucleotide
cggugccgggcagcaggcg

SEQ ID NO: 1875981 - RNA, 19 nt, Artificial Sequence
  Description of Artificial Sequence: Synthetic oligonucleotide
cgcgggcagcgccgucucc

SEQ ID NO: 1875982 - RNA, 19 nt, Artificial Sequence
  Description of Artificial Sequence: Synthetic oligonucleotide
gccgacggcucagcugccu

SEQ ID NO: 1875983 - RNA, 19 nt, Artificial Sequence
  Description of Artificial Sequence: Synthetic oligonucleotide
cgccgucuccagauagugu

SEQ ID NO: 1875984 - RNA, 19 nt, Artificial Sequence
  Description of Artificial Sequence: Synthetic oligonucleotide
gccuguggcgacggugcau

SEQ ID NO: 1875985 - RNA, 19 nt, Artificial Sequence
  Description of Artificial Sequence: Synthetic oligonucleotide
ggcugccauaggugcccuu

SEQ ID NO: 1875986 - RNA, 19 nt, Artificial Sequence
  Description of Artificial Sequence: Synthetic oligonucleotide
cggcgguaggucaggcagu

SEQ ID NO: 1875987 - RNA, 19 nt, Artificial Sequence
  Description of Artificial Sequence: Synthetic oligonucleotide
ccgccucgauacgcuccuc

SEQ ID NO: 1875988 - RNA, 19 nt, Artificial Sequence
  Description of Artificial Sequence: Synthetic oligonucleotide
ccgcagcaugcggcccauc

SEQ ID NO: 1875989 - RNA, 19 nt, Artificial Sequence
  Description of Artificial Sequence: Synthetic oligonucleotide
ccgggccccagugcagccu

SEQ ID NO: 1875990 - RNA, 19 nt, Artificial Sequence
  Description of Artificial Sequence: Synthetic oligonucleotide
cgccggccccgccucgaua

SEQ ID NO: 1875991 - RNA, 19 nt, Artificial Sequence
  Description of Artificial Sequence: Synthetic oligonucleotide
cggcaagugcggggauagu

SEQ ID NO: 1875992 - RNA, 19 nt, Artificial Sequence
  Description of Artificial Sequence: Synthetic oligonucleotide
aaagcuaucugugagagcc

SEQ ID NO: 1875993 - RNA, 19 nt, Artificial Sequence
  Description of Artificial Sequence: Synthetic oligonucleotide
aaaauuuugugagauaugg

SEQ ID NO: 1875994 - RNA, 19 nt, Artificial Sequence
  Description of Artificial Sequence: Synthetic oligonucleotide
uuaaguuuauauaaaagac

SEQ ID NO: 1875995 - RNA, 19 nt, Artificial Sequence
  Description of Artificial Sequence: Synthetic oligonucleotide
uuaacaacaguuuggauag

SEQ ID NO: 1875996 - RNA, 19 nt, Artificial Sequence
  Description of Artificial Sequence: Synthetic oligonucleotide
uuugcaauugaauucacag

SEQ ID NO: 1875997 - RNA, 19 nt, Artificial Sequence
  Description of Artificial Sequence: Synthetic oligonucleotide
uuaauaguggcucaaggag

SEQ ID NO: 1875998 - RNA, 19 nt, Artificial Sequence
  Description of Artificial Sequence: Synthetic oligonucleotide
uuuccugugaauuuuaagc

SEQ ID NO: 1875999 - RNA, 19 nt, Artificial Sequence
  Description of Artificial Sequence: Synthetic oligonucleotide
auacaauaugcuuuuaaac

SEQ ID NO: 1876000 - RNA, 19 nt, Artificial Sequence
  Description of Artificial Sequence: Synthetic oligonucleotide
cuuaagucacccaacaugg

SEQ ID NO: 1876001 - RNA, 19 nt, Artificial Sequence
  Description of Artificial Sequence: Synthetic oligonucleotide
uauauaaagucacaauccc

SEQ ID NO: 1876002 - RNA, 19 nt, Artificial Sequence
  Description of Artificial Sequence: Synthetic oligonucleotide
aaagauuucaugucacaag

SEQ ID NO: 1876003 - RNA, 19 nt, Artificial Sequence
  Description of Artificial Sequence: Synthetic oligonucleotide
aaagauaaacaguuaauau

SEQ ID NO: 1876004 - RNA, 19 nt, Artificial Sequence
  Description of Artificial Sequence: Synthetic oligonucleotide
aauaaggccugguuaauag

SEQ ID NO: 1876005 - RNA, 19 nt, Artificial Sequence
  Description of Artificial Sequence: Synthetic oligonucleotide
aaaauaauacaauaugcuu

SEQ ID NO: 1876006 - RNA, 19 nt, Artificial Sequence
  Description of Artificial Sequence: Synthetic oligonucleotide
ucauaugagaaauucacca

SEQ ID NO: 1876007 - RNA, 19 nt, Artificial Sequence
  Description of Artificial Sequence: Synthetic oligonucleotide
acaauaugcuuuuaaacuc

SEQ ID NO: 1876008 - RNA, 19 nt, Artificial Sequence
  Description of Artificial Sequence: Synthetic oligonucleotide
ucugguuuuaagauggaag

SEQ ID NO: 1876009 - RNA, 19 nt, Artificial Sequence
  Description of Artificial Sequence: Synthetic oligonucleotide
aagauuucaugucacaaga

SEQ ID NO: 1876010 - RNA, 19 nt, Artificial Sequence
  Description of Artificial Sequence: Synthetic oligonucleotide
cuuaaguuuauauaaaaga

SEQ ID NO: 1876011 - RNA, 19 nt, Artificial Sequence
  Description of Artificial Sequence: Synthetic oligonucleotide
uaacacaugacauuuaaaa

SEQ ID NO: 1876012 - RNA, 19 nt, Artificial Sequence
  Description of Artificial Sequence: Synthetic oligonucleotide
cacauuauaaaauuuugug

SEQ ID NO: 1876013 - RNA, 19 nt, Artificial Sequence
  Description of Artificial Sequence: Synthetic oligonucleotide
uuaaagucaucuagaaucc

SEQ ID NO: 1876014 - RNA, 19 nt, Artificial Sequence
  Description of Artificial Sequence: Synthetic oligonucleotide
uaauaguggcucaaggagg

SEQ ID NO: 1876015 - RNA, 19 nt, Artificial Sequence
  Description of Artificial Sequence: Synthetic oligonucleotide
ugauugugcauacacaucu

SEQ ID NO: 1876016 - RNA, 19 nt, Artificial Sequence
  Description of Artificial Sequence: Synthetic oligonucleotide
uaugcuuuuaaacucucug

SEQ ID NO: 1876017 - RNA, 19 nt, Artificial Sequence
  Description of Artificial Sequence: Synthetic oligonucleotide
auuaacaacaguuuggaua

SEQ ID NO: 1876018 - RNA, 19 nt, Artificial Sequence
  Description of Artificial Sequence: Synthetic oligonucleotide
uucuuauauuaauugaacc

SEQ ID NO: 1876019 - RNA, 19 nt, Artificial Sequence
  Description of Artificial Sequence: Synthetic oligonucleotide
acauuauaaaauuuuguga

SEQ ID NO: 1876020 - RNA, 19 nt, Artificial Sequence
  Description of Artificial Sequence: Synthetic oligonucleotide
uuuagguauaauuaacaac

SEQ ID NO: 1876021 - RNA, 19 nt, Artificial Sequence
  Description of Artificial Sequence: Synthetic oligonucleotide
ugaauuuuaagcuuauaau

SEQ ID NO: 1876022 - RNA, 19 nt, Artificial Sequence
  Description of Artificial Sequence: Synthetic oligonucleotide
uacacauuauaaaauuuug

SEQ ID NO: 1876023 - RNA, 19 nt, Artificial Sequence
  Description of Artificial Sequence: Synthetic oligonucleotide
auugaauucacaguuuggg

SEQ ID NO: 1876024 - RNA, 19 nt, Artificial Sequence
  Description of Artificial Sequence: Synthetic oligonucleotide
uguuuuaagaaugauucug

SEQ ID NO: 1876025 - RNA, 19 nt, Artificial Sequence
  Description of Artificial Sequence: Synthetic oligonucleotide
aaauuaaagucaucuagaa

SEQ ID NO: 1876026 - RNA, 19 nt, Artificial Sequence
  Description of Artificial Sequence: Synthetic oligonucleotide
caucauaugagaaauucac

SEQ ID NO: 1876027 - RNA, 19 nt, Artificial Sequence
  Description of Artificial Sequence: Synthetic oligonucleotide
uuauucuuauuacuuuuag

SEQ ID NO: 1876028 - RNA, 19 nt, Artificial Sequence
  Description of Artificial Sequence: Synthetic oligonucleotide
auaauuaacaacaguuugg

SEQ ID NO: 1876029 - RNA, 19 nt, Artificial Sequence
  Description of Artificial Sequence: Synthetic oligonucleotide
uguucuuauauuaauugaa

SEQ ID NO: 1876030 - RNA, 19 nt, Artificial Sequence
  Description of Artificial Sequence: Synthetic oligonucleotide
uuaauugaaccucagggau

SEQ ID NO: 1876031 - RNA, 19 nt, Artificial Sequence
  Description of Artificial Sequence: Synthetic oligonucleotide
aucagucaaagauaaacag

SEQ ID NO: 1876032 - RNA, 19 nt, Artificial Sequence
  Description of Artificial Sequence: Synthetic oligonucleotide
ucuuauuacuuuuaguuau

SEQ ID NO: 1876033 - RNA, 19 nt, Artificial Sequence
  Description of Artificial Sequence: Synthetic oligonucleotide
ugcaauugaauucacaguu

SEQ ID NO: 1876034 - RNA, 19 nt, Artificial Sequence
  Description of Artificial Sequence: Synthetic oligonucleotide
uuuuaguuaugauugugca

SEQ ID NO: 1876035 - RNA, 19 nt, Artificial Sequence
  Description of Artificial Sequence: Synthetic oligonucleotide
auuaauugaaccucaggga

SEQ ID NO: 1876036 - RNA, 19 nt, Artificial Sequence
  Description of Artificial Sequence: Synthetic oligonucleotide
uucaacaauguuuuaagaa

SEQ ID NO: 1876037 - RNA, 19 nt, Artificial Sequence
  Description of Artificial Sequence: Synthetic oligonucleotide
acuuagacggucaugacac

SEQ ID NO: 1876038 - RNA, 19 nt, Artificial Sequence
  Description of Artificial Sequence: Synthetic oligonucleotide
uugaauucacaguuugggg

SEQ ID NO: 1876039 - RNA, 19 nt, Artificial Sequence
  Description of Artificial Sequence: Synthetic oligonucleotide
uucaacaguugucagggag

SEQ ID NO: 1876040 - RNA, 19 nt, Artificial Sequence
  Description of Artificial Sequence: Synthetic oligonucleotide
aaacaguuaauauauucuu

SEQ ID NO: 1876041 - RNA, 19 nt, Artificial Sequence
  Description of Artificial Sequence: Synthetic oligonucleotide
aaucccaucgucgucagag

SEQ ID NO: 1876042 - RNA, 19 nt, Artificial Sequence
  Description of Artificial Sequence: Synthetic oligonucleotide
guauauaaagucacaaucc

SEQ ID NO: 1876043 - RNA, 19 nt, Artificial Sequence
  Description of Artificial Sequence: Synthetic oligonucleotide
uucgaaagcuaucugugag

SEQ ID NO: 1876044 - RNA, 19 nt, Artificial Sequence
  Description of Artificial Sequence: Synthetic oligonucleotide
aaaucaucauaugagaaau

SEQ ID NO: 1876045 - RNA, 19 nt, Artificial Sequence
  Description of Artificial Sequence: Synthetic oligonucleotide
ugaaguguugucuccagcc

SEQ ID NO: 1876046 - RNA, 19 nt, Artificial Sequence
  Description of Artificial Sequence: Synthetic oligonucleotide
ugugagagcccucaguuug

SEQ ID NO: 1876047 - RNA, 19 nt, Artificial Sequence
  Description of Artificial Sequence: Synthetic oligonucleotide
aucaucauaugagaaauuc

SEQ ID NO: 1876048 - RNA, 19 nt, Artificial Sequence
  Description of Artificial Sequence: Synthetic oligonucleotide
gaugaaaagauuucauguc

SEQ ID NO: 1876049 - RNA, 19 nt, Artificial Sequence
  Description of Artificial Sequence: Synthetic oligonucleotide
guuaugauugugcauacac

SEQ ID NO: 1876050 - RNA, 19 nt, Artificial Sequence
  Description of Artificial Sequence: Synthetic oligonucleotide
agaaauucaccauuccuug

SEQ ID NO: 1876051 - RNA, 19 nt, Artificial Sequence
  Description of Artificial Sequence: Synthetic oligonucleotide
ucuucgaaagcuaucugug

SEQ ID NO: 1876052 - RNA, 19 nt, Artificial Sequence
  Description of Artificial Sequence: Synthetic oligonucleotide
uggaauguugaguauauuc

SEQ ID NO: 1876053 - RNA, 19 nt, Artificial Sequence
  Description of Artificial Sequence: Synthetic oligonucleotide
uuaguuaugauugugcaua

SEQ ID NO: 1876054 - RNA, 19 nt, Artificial Sequence
  Description of Artificial Sequence: Synthetic oligonucleotide
auagaagacuuuuagguau

SEQ ID NO: 1876055 - RNA, 19 nt, Artificial Sequence
  Description of Artificial Sequence: Synthetic oligonucleotide
aaaaugaagcuucgguugu

SEQ ID NO: 1876056 - RNA, 19 nt, Artificial Sequence
  Description of Artificial Sequence: Synthetic oligonucleotide
uuucaugucacaagaaaau

SEQ ID NO: 1876057 - RNA, 19 nt, Artificial Sequence
  Description of Artificial Sequence: Synthetic oligonucleotide
uuuugugagauauggaaau

SEQ ID NO: 1876058 - RNA, 19 nt, Artificial Sequence
  Description of Artificial Sequence: Synthetic oligonucleotide
ucagucaaagauaaacagu

SEQ ID NO: 1876059 - RNA, 19 nt, Artificial Sequence
  Description of Artificial Sequence: Synthetic oligonucleotide
acugaugaaguguugucuc

SEQ ID NO: 1876060 - RNA, 19 nt, Artificial Sequence
  Description of Artificial Sequence: Synthetic oligonucleotide
augaaaagauuucauguca

SEQ ID NO: 1876061 - RNA, 19 nt, Artificial Sequence
  Description of Artificial Sequence: Synthetic oligonucleotide
aauuaaagucaucuagaau

SEQ ID NO: 1876062 - RNA, 19 nt, Artificial Sequence
  Description of Artificial Sequence: Synthetic oligonucleotide
uuuuaaacucucugcauac

SEQ ID NO: 1876063 - RNA, 19 nt, Artificial Sequence
  Description of Artificial Sequence: Synthetic oligonucleotide
aguguuguuggaaaucugc

SEQ ID NO: 1876064 - RNA, 19 nt, Artificial Sequence
  Description of Artificial Sequence: Synthetic oligonucleotide
uugugcauguuuaaguaca

SEQ ID NO: 1876065 - RNA, 19 nt, Artificial Sequence
  Description of Artificial Sequence: Synthetic oligonucleotide
uuucuuauucuuauuacuu

SEQ ID NO: 1876066 - RNA, 19 nt, Artificial Sequence
  Description of Artificial Sequence: Synthetic oligonucleotide
gauauggaaauacauguaa

SEQ ID NO: 1876067 - RNA, 19 nt, Artificial Sequence
  Description of Artificial Sequence: Synthetic oligonucleotide
uggaugaaaagauuucaug

SEQ ID NO: 1876068 - RNA, 19 nt, Artificial Sequence
  Description of Artificial Sequence: Synthetic oligonucleotide
aaguacauuaacacaugac

SEQ ID NO: 1876069 - RNA, 19 nt, Artificial Sequence
  Description of Artificial Sequence: Synthetic oligonucleotide
uaauuaacaacaguuugga

SEQ ID NO: 1876070 - RNA, 19 nt, Artificial Sequence
  Description of Artificial Sequence: Synthetic oligonucleotide
uuauaaaauuuugugagau

SEQ ID NO: 1876071 - RNA, 19 nt, Artificial Sequence
  Description of Artificial Sequence: Synthetic oligonucleotide
ucgguuguauauaaaguca

SEQ ID NO: 1876072 - RNA, 19 nt, Artificial Sequence
  Description of Artificial Sequence: Synthetic oligonucleotide
gaaaauaaggccugguuaa

SEQ ID NO: 1876073 - RNA, 19 nt, Artificial Sequence
  Description of Artificial Sequence: Synthetic oligonucleotide
uucgguuguauauaaaguc

SEQ ID NO: 1876074 - RNA, 19 nt, Artificial Sequence
  Description of Artificial Sequence: Synthetic oligonucleotide
ugcauguuuaaguacauua

SEQ ID NO: 1876075 - RNA, 19 nt, Artificial Sequence
  Description of Artificial Sequence: Synthetic oligonucleotide
ucaugucacaagaaaauaa

SEQ ID NO: 1876076 - RNA, 19 nt, Artificial Sequence
  Description of Artificial Sequence: Synthetic oligonucleotide
aaaacugaugaaguguugu

SEQ ID NO: 1876077 - RNA, 19 nt, Artificial Sequence
  Description of Artificial Sequence: Synthetic oligonucleotide
uuaaguacauuaacacaug

SEQ ID NO: 1876078 - RNA, 19 nt, Artificial Sequence
  Description of Artificial Sequence: Synthetic oligonucleotide
aacacacuuguucuuauau

SEQ ID NO: 1876079 - RNA, 19 nt, Artificial Sequence
  Description of Artificial Sequence: Synthetic oligonucleotide
auuauaaaauuuugugaga

SEQ ID NO: 1876080 - RNA, 19 nt, Artificial Sequence
  Description of Artificial Sequence: Synthetic oligonucleotide
ucaaagauaaacaguuaau

SEQ ID NO: 1876081 - RNA, 19 nt, Artificial Sequence
  Description of Artificial Sequence: Synthetic oligonucleotide
ugugagauauggaaauaca

SEQ ID NO: 1876082 - RNA, 19 nt, Artificial Sequence
  Description of Artificial Sequence: Synthetic oligonucleotide
uuuuaagauggaagcauac

SEQ ID NO: 1876083 - RNA, 19 nt, Artificial Sequence
  Description of Artificial Sequence: Synthetic oligonucleotide
uaaaauuuugugagauaug

SEQ ID NO: 1876084 - RNA, 19 nt, Artificial Sequence
  Description of Artificial Sequence: Synthetic oligonucleotide
uuaugauugugcauacaca

SEQ ID NO: 1876085 - RNA, 19 nt, Artificial Sequence
  Description of Artificial Sequence: Synthetic oligonucleotide
ucaucauaugagaaauuca

SEQ ID NO: 1876086 - RNA, 19 nt, Artificial Sequence
  Description of Artificial Sequence: Synthetic oligonucleotide
uuguucuuauauuaauuga

SEQ ID NO: 1876087 - RNA, 19 nt, Artificial Sequence
  Description of Artificial Sequence: Synthetic oligonucleotide
aauugaauucacaguuugg

SEQ ID NO: 1876088 - RNA, 19 nt, Artificial Sequence
  Description of Artificial Sequence: Synthetic oligonucleotide
acuuuuagguauaauuaac

SEQ ID NO: 1876089 - RNA, 19 nt, Artificial Sequence
  Description of Artificial Sequence: Synthetic oligonucleotide
uagauggaugaaaagauuu

SEQ ID NO: 1876090 - RNA, 19 nt, Artificial Sequence
  Description of Artificial Sequence: Synthetic oligonucleotide
ugguacaacacacuuguuc

SEQ ID NO: 1876091 - RNA, 19 nt, Artificial Sequence
  Description of Artificial Sequence: Synthetic oligonucleotide
ugaguccucugcaagagca

SEQ ID NO: 1876092 - RNA, 19 nt, Artificial Sequence
  Description of Artificial Sequence: Synthetic oligonucleotide
aauucaccauuccuuguug

SEQ ID NO: 1876093 - RNA, 19 nt, Artificial Sequence
  Description of Artificial Sequence: Synthetic oligonucleotide
uagguauaauuaacaacag

SEQ ID NO: 1876094 - RNA, 19 nt, Artificial Sequence
  Description of Artificial Sequence: Synthetic oligonucleotide
aagucacccaacaugggcg

SEQ ID NO: 1876095 - RNA, 19 nt, Artificial Sequence
  Description of Artificial Sequence: Synthetic oligonucleotide
uuggauagauggaugaaaa

SEQ ID NO: 1876096 - RNA, 19 nt, Artificial Sequence
  Description of Artificial Sequence: Synthetic oligonucleotide
cauguuuaaguacauuaac

SEQ ID NO: 1876097 - RNA, 19 nt, Artificial Sequence
  Description of Artificial Sequence: Synthetic oligonucleotide
aucauaugagaaauucacc

SEQ ID NO: 1876098 - RNA, 19 nt, Artificial Sequence
  Description of Artificial Sequence: Synthetic oligonucleotide
uauucuuauuacuuuuagu

SEQ ID NO: 1876099 - RNA, 19 nt, Artificial Sequence
  Description of Artificial Sequence: Synthetic oligonucleotide
accucagggauuuauuauc

SEQ ID NO: 1876100 - RNA, 19 nt, Artificial Sequence
  Description of Artificial Sequence: Synthetic oligonucleotide
ugcuguaucgcuuugcaau

SEQ ID NO: 1876101 - RNA, 19 nt, Artificial Sequence
  Description of Artificial Sequence: Synthetic oligonucleotide
aaucccguucaacaguugu

SEQ ID NO: 1876102 - RNA, 19 nt, Artificial Sequence
  Description of Artificial Sequence: Synthetic oligonucleotide
uauagaagacuuuuaggua

SEQ ID NO: 1876103 - RNA, 19 nt, Artificial Sequence
  Description of Artificial Sequence: Synthetic oligonucleotide
aguuuggauagauggauga

SEQ ID NO: 1876104 - RNA, 19 nt, Artificial Sequence
  Description of Artificial Sequence: Synthetic oligonucleotide
guuaauaguggcucaagga

SEQ ID NO: 1876105 - RNA, 19 nt, Artificial Sequence
  Description of Artificial Sequence: Synthetic oligonucleotide
aaauacauguaaaggaaau

SEQ ID NO: 1876106 - RNA, 19 nt, Artificial Sequence
  Description of Artificial Sequence: Synthetic oligonucleotide
uucuugugcauguuuaagu

SEQ ID NO: 1876107 - RNA, 19 nt, Artificial Sequence
  Description of Artificial Sequence: Synthetic oligonucleotide
uuucaacaauguuuuaaga

SEQ ID NO: 1876108 - RNA, 19 nt, Artificial Sequence
  Description of Artificial Sequence: Synthetic oligonucleotide
auauaaagucacaaucccg

SEQ ID NO: 1876109 - RNA, 19 nt, Artificial Sequence
  Description of Artificial Sequence: Synthetic oligonucleotide
cuuguugagcagaaucccg

SEQ ID NO: 1876110 - RNA, 19 nt, Artificial Sequence
  Description of Artificial Sequence: Synthetic oligonucleotide
aguuuauauaaaagacagc

SEQ ID NO: 1876111 - RNA, 19 nt, Artificial Sequence
  Description of Artificial Sequence: Synthetic oligonucleotide
caauugaauucacaguuug

SEQ ID NO: 1876112 - RNA, 19 nt, Artificial Sequence
  Description of Artificial Sequence: Synthetic oligonucleotide
ugucagggaguguuguugg

SEQ ID NO: 1876113 - RNA, 19 nt, Artificial Sequence
  Description of Artificial Sequence: Synthetic oligonucleotide
uucuuauuacuuuuaguua

SEQ ID NO: 1876114 - RNA, 19 nt, Artificial Sequence
  Description of Artificial Sequence: Synthetic oligonucleotide
aauaugcuuuuaaacucuc

SEQ ID NO: 1876115 - RNA, 19 nt, Artificial Sequence
  Description of Artificial Sequence: Synthetic oligonucleotide
ucaguuugacacagcaggc

SEQ ID NO: 1876116 - RNA, 19 nt, Artificial Sequence
  Description of Artificial Sequence: Synthetic oligonucleotide
ugcauacuuaaguuuauau

SEQ ID NO: 1876117 - RNA, 19 nt, Artificial Sequence
  Description of Artificial Sequence: Synthetic oligonucleotide
aucgcuuugcaauugaauu

SEQ ID NO: 1876118 - RNA, 19 nt, Artificial Sequence
  Description of Artificial Sequence: Synthetic oligonucleotide
ucaacaguugucagggagu

SEQ ID NO: 1876119 - RNA, 19 nt, Artificial Sequence
  Description of Artificial Sequence: Synthetic oligonucleotide
uuaagucacccaacauggg

SEQ ID NO: 1876120 - RNA, 19 nt, Artificial Sequence
  Description of Artificial Sequence: Synthetic oligonucleotide
gaaaucugcacacagcacu

SEQ ID NO: 1876121 - RNA, 19 nt, Artificial Sequence
  Description of Artificial Sequence: Synthetic oligonucleotide
gacuuuuagguauaauuaa

SEQ ID NO: 1876122 - RNA, 19 nt, Artificial Sequence
  Description of Artificial Sequence: Synthetic oligonucleotide
agcaguacaugcucuuaac

SEQ ID NO: 1876123 - RNA, 19 nt, Artificial Sequence
  Description of Artificial Sequence: Synthetic oligonucleotide
acugaaugaaaucaucaua

SEQ ID NO: 1876124 - RNA, 19 nt, Artificial Sequence
  Description of Artificial Sequence: Synthetic oligonucleotide
uaaagucacaaucccguuc

SEQ ID NO: 1876125 - RNA, 19 nt, Artificial Sequence
  Description of Artificial Sequence: Synthetic oligonucleotide
aacugaugaaguguugucu

SEQ ID NO: 1876126 - RNA, 19 nt, Artificial Sequence
  Description of Artificial Sequence: Synthetic oligonucleotide
cuuauuacuuuuaguuaug

SEQ ID NO: 1876127 - RNA, 19 nt, Artificial Sequence
  Description of Artificial Sequence: Synthetic oligonucleotide
augaaguguugucuccagc

SEQ ID NO: 1876128 - RNA, 19 nt, Artificial Sequence
  Description of Artificial Sequence: Synthetic oligonucleotide
aaucccgucuucgaaagcu

SEQ ID NO: 1876129 - RNA, 19 nt, Artificial Sequence
  Description of Artificial Sequence: Synthetic oligonucleotide
gucaaagauaaacaguuaa

SEQ ID NO: 1876130 - RNA, 19 nt, Artificial Sequence
  Description of Artificial Sequence: Synthetic oligonucleotide
uguugaguauauucagaca

SEQ ID NO: 1876131 - RNA, 19 nt, Artificial Sequence
  Description of Artificial Sequence: Synthetic oligonucleotide
acucucugcauacuuaagu

SEQ ID NO: 1876132 - RNA, 19 nt, Artificial Sequence
  Description of Artificial Sequence: Synthetic oligonucleotide
aauaguggcucaaggaggu

SEQ ID NO: 1876133 - RNA, 19 nt, Artificial Sequence
  Description of Artificial Sequence: Synthetic oligonucleotide
agaaucccgucuucgaaag

SEQ ID NO: 1876134 - RNA, 19 nt, Artificial Sequence
  Description of Artificial Sequence: Synthetic oligonucleotide
uugaguauauucagacaac

SEQ ID NO: 1876135 - RNA, 19 nt, Artificial Sequence
  Description of Artificial Sequence: Synthetic oligonucleotide
uuuaguuaugauugugcau

SEQ ID NO: 1876136 - RNA, 19 nt, Artificial Sequence
  Description of Artificial Sequence: Synthetic oligonucleotide
auaugagaaauucaccauu

SEQ ID NO: 1876137 - RNA, 19 nt, Artificial Sequence
  Description of Artificial Sequence: Synthetic oligonucleotide
gguuaauaguggcucaagg

SEQ ID NO: 1876138 - RNA, 19 nt, Artificial Sequence
  Description of Artificial Sequence: Synthetic oligonucleotide
ucagggauuuauuaucaaa

SEQ ID NO: 1876139 - RNA, 19 nt, Artificial Sequence
  Description of Artificial Sequence: Synthetic oligonucleotide
aauuaacaacaguuuggau

SEQ ID NO: 1876140 - RNA, 19 nt, Artificial Sequence
  Description of Artificial Sequence: Synthetic oligonucleotide
auguuuaaguacauuaaca

SEQ ID NO: 1876141 - RNA, 19 nt, Artificial Sequence
  Description of Artificial Sequence: Synthetic oligonucleotide
uucaccauuccuuguugag

SEQ ID NO: 1876142 - RNA, 19 nt, Artificial Sequence
  Description of Artificial Sequence: Synthetic oligonucleotide
ugcaagagcaguacaugcu

SEQ ID NO: 1876143 - RNA, 19 nt, Artificial Sequence
  Description of Artificial Sequence: Synthetic oligonucleotide
uuauaauauagaagacuuu

SEQ ID NO: 1876144 - RNA, 19 nt, Artificial Sequence
  Description of Artificial Sequence: Synthetic oligonucleotide
gcuuaagucacccaacaug

SEQ ID NO: 1876145 - RNA, 19 nt, Artificial Sequence
  Description of Artificial Sequence: Synthetic oligonucleotide
uuauuacuuuuaguuauga

SEQ ID NO: 1876146 - RNA, 19 nt, Artificial Sequence
  Description of Artificial Sequence: Synthetic oligonucleotide
uuuggauagauggaugaaa

SEQ ID NO: 1876147 - RNA, 19 nt, Artificial Sequence
  Description of Artificial Sequence: Synthetic oligonucleotide
ucaaucugaaucccaucgu

SEQ ID NO: 1876148 - RNA, 19 nt, Artificial Sequence
  Description of Artificial Sequence: Synthetic oligonucleotide
aauacauguaaaggaaauu

SEQ ID NO: 1876149 - RNA, 19 nt, Artificial Sequence
  Description of Artificial Sequence: Synthetic oligonucleotide
uuguuggaaaucugcacac

SEQ ID NO: 1876150 - RNA, 19 nt, Artificial Sequence
  Description of Artificial Sequence: Synthetic oligonucleotide
aauugaaccucagggauuu

SEQ ID NO: 1876151 - RNA, 19 nt, Artificial Sequence
  Description of Artificial Sequence: Synthetic oligonucleotide
uugugagauauggaaauac

SEQ ID NO: 1876152 - RNA, 19 nt, Artificial Sequence
  Description of Artificial Sequence: Synthetic oligonucleotide
gaugaaguguugucuccag

SEQ ID NO: 1876153 - RNA, 19 nt, Artificial Sequence
  Description of Artificial Sequence: Synthetic oligonucleotide
agguauaauuaacaacagu

SEQ ID NO: 1876154 - RNA, 19 nt, Artificial Sequence
  Description of Artificial Sequence: Synthetic oligonucleotide
aaccucagggauuuauuau

SEQ ID NO: 1876155 - RNA, 19 nt, Artificial Sequence
  Description of Artificial Sequence: Synthetic oligonucleotide
auucagcacagcccagagc

SEQ ID NO: 1876156 - RNA, 19 nt, Artificial Sequence
  Description of Artificial Sequence: Synthetic oligonucleotide
cuugugcauguuuaaguac

SEQ ID NO: 1876157 - RNA, 19 nt, Artificial Sequence
  Description of Artificial Sequence: Synthetic oligonucleotide
agcuuauaauauagaagac

SEQ ID NO: 1876158 - RNA, 19 nt, Artificial Sequence
  Description of Artificial Sequence: Synthetic oligonucleotide
acggucaugacacacugaa

SEQ ID NO: 1876159 - RNA, 19 nt, Artificial Sequence
  Description of Artificial Sequence: Synthetic oligonucleotide
ucgaaagcuaucugugaga

SEQ ID NO: 1876160 - RNA, 19 nt, Artificial Sequence
  Description of Artificial Sequence: Synthetic oligonucleotide
agccauucagcacagccca

SEQ ID NO: 1876161 - RNA, 19 nt, Artificial Sequence
  Description of Artificial Sequence: Synthetic oligonucleotide
uucagacaacuucuucuug

SEQ ID NO: 1876162 - RNA, 19 nt, Artificial Sequence
  Description of Artificial Sequence: Synthetic oligonucleotide
uaucgcuuugcaauugaau

SEQ ID NO: 1876163 - RNA, 19 nt, Artificial Sequence
  Description of Artificial Sequence: Synthetic oligonucleotide
acuccugucacugucaaaa

SEQ ID NO: 1876164 - RNA, 19 nt, Artificial Sequence
  Description of Artificial Sequence: Synthetic oligonucleotide
cagggauuuauuaucaaaa

SEQ ID NO: 1876165 - RNA, 19 nt, Artificial Sequence
  Description of Artificial Sequence: Synthetic oligonucleotide
aacaguuuggauagaugga

SEQ ID NO: 1876166 - RNA, 19 nt, Artificial Sequence
  Description of Artificial Sequence: Synthetic oligonucleotide
agucaucuagaaucccauc

SEQ ID NO: 1876167 - RNA, 19 nt, Artificial Sequence
  Description of Artificial Sequence: Synthetic oligonucleotide
uacacaucuguuccagggu

SEQ ID NO: 1876168 - RNA, 19 nt, Artificial Sequence
  Description of Artificial Sequence: Synthetic oligonucleotide
aacaacaguuuggauagau

SEQ ID NO: 1876169 - RNA, 19 nt, Artificial Sequence
  Description of Artificial Sequence: Synthetic oligonucleotide
uccaguuggaauguugagu

SEQ ID NO: 1876170 - RNA, 19 nt, Artificial Sequence
  Description of Artificial Sequence: Synthetic oligonucleotide
agugcuuaagucacccaac

SEQ ID NO: 1876171 - RNA, 19 nt, Artificial Sequence
  Description of Artificial Sequence: Synthetic oligonucleotide
ugaucuucccacuggugcu

SEQ ID NO: 1876172 - RNA, 19 nt, Artificial Sequence
  Description of Artificial Sequence: Synthetic oligonucleotide
aucugaaucccaucgucgu

SEQ ID NO: 1876173 - RNA, 19 nt, Artificial Sequence
  Description of Artificial Sequence: Synthetic oligonucleotide
gauagauggaugaaaagau

SEQ ID NO: 1876174 - RNA, 19 nt, Artificial Sequence
  Description of Artificial Sequence: Synthetic oligonucleotide
uucuugacuuagacgguca

SEQ ID NO: 1876175 - RNA, 19 nt, Artificial Sequence
  Description of Artificial Sequence: Synthetic oligonucleotide
aacaguuaauauauucuua

SEQ ID NO: 1876176 - RNA, 19 nt, Artificial Sequence
  Description of Artificial Sequence: Synthetic oligonucleotide
cugaugaaguguugucucc

SEQ ID NO: 1876177 - RNA, 19 nt, Artificial Sequence
  Description of Artificial Sequence: Synthetic oligonucleotide
ucaccauuccuuguugagc

SEQ ID NO: 1876178 - RNA, 19 nt, Artificial Sequence
  Description of Artificial Sequence: Synthetic oligonucleotide
ggcgauguagucaucaaag

SEQ ID NO: 1876179 - RNA, 19 nt, Artificial Sequence
  Description of Artificial Sequence: Synthetic oligonucleotide
agacggucaugacacacug

SEQ ID NO: 1876180 - RNA, 19 nt, Artificial Sequence
  Description of Artificial Sequence: Synthetic oligonucleotide
ugacacacugaaugaaauc

SEQ ID NO: 1876181 - RNA, 19 nt, Artificial Sequence
  Description of Artificial Sequence: Synthetic oligonucleotide
caaagauaaacaguuaaua

SEQ ID NO: 1876182 - RNA, 19 nt, Artificial Sequence
  Description of Artificial Sequence: Synthetic oligonucleotide
uaauugaaccucagggauu

SEQ ID NO: 1876183 - RNA, 19 nt, Artificial Sequence
  Description of Artificial Sequence: Synthetic oligonucleotide
aacaugggcgcugggaacu

SEQ ID NO: 1876184 - RNA, 19 nt, Artificial Sequence
  Description of Artificial Sequence: Synthetic oligonucleotide
uagacggucaugacacacu

SEQ ID NO: 1876185 - RNA, 19 nt, Artificial Sequence
  Description of Artificial Sequence: Synthetic oligonucleotide
cagccauucagcacagccc

SEQ ID NO: 1876186 - RNA, 19 nt, Artificial Sequence
  Description of Artificial Sequence: Synthetic oligonucleotide
uuagacggucaugacacac

SEQ ID NO: 1876187 - RNA, 19 nt, Artificial Sequence
  Description of Artificial Sequence: Synthetic oligonucleotide
aggaaauuaaagucaucua

SEQ ID NO: 1876188 - RNA, 19 nt, Artificial Sequence
  Description of Artificial Sequence: Synthetic oligonucleotide
ggaauguugaguauauuca

SEQ ID NO: 1876189 - RNA, 19 nt, Artificial Sequence
  Description of Artificial Sequence: Synthetic oligonucleotide
gguauaauuaacaacaguu

SEQ ID NO: 1876190 - RNA, 19 nt, Artificial Sequence
  Description of Artificial Sequence: Synthetic oligonucleotide
uucaugucacaagaaaaua

SEQ ID NO: 1876191 - RNA, 19 nt, Artificial Sequence
  Description of Artificial Sequence: Synthetic oligonucleotide
auuuugugagauauggaaa

SEQ ID NO: 1876192 - RNA, 19 nt, Artificial Sequence
  Description of Artificial Sequence: Synthetic oligonucleotide
auguagucaucaaagguga

SEQ ID NO: 1876193 - RNA, 19 nt, Artificial Sequence
  Description of Artificial Sequence: Synthetic oligonucleotide
ucccguucaacaguuguca

SEQ ID NO: 1876194 - RNA, 19 nt, Artificial Sequence
  Description of Artificial Sequence: Synthetic oligonucleotide
gaggcagugcuuaagucac

SEQ ID NO: 1876195 - RNA, 19 nt, Artificial Sequence
  Description of Artificial Sequence: Synthetic oligonucleotide
ugaugaaguguugucucca

SEQ ID NO: 1876196 - RNA, 19 nt, Artificial Sequence
  Description of Artificial Sequence: Synthetic oligonucleotide
aagcuucgguuguauauaa

SEQ ID NO: 1876197 - RNA, 19 nt, Artificial Sequence
  Description of Artificial Sequence: Synthetic oligonucleotide
uaguuaugauugugcauac

SEQ ID NO: 1876198 - RNA, 19 nt, Artificial Sequence
  Description of Artificial Sequence: Synthetic oligonucleotide
gaaguguugucuccagcca

SEQ ID NO: 1876199 - RNA, 19 nt, Artificial Sequence
  Description of Artificial Sequence: Synthetic oligonucleotide
caagcuugggcuccaguug

SEQ ID NO: 1876200 - RNA, 19 nt, Artificial Sequence
  Description of Artificial Sequence: Synthetic oligonucleotide
ccaucagucaaagauaaac

SEQ ID NO: 1876201 - RNA, 19 nt, Artificial Sequence
  Description of Artificial Sequence: Synthetic oligonucleotide
caguuugacacagcaggcg

SEQ ID NO: 1876202 - RNA, 19 nt, Artificial Sequence
  Description of Artificial Sequence: Synthetic oligonucleotide
uuuaaacucucugcauacu

SEQ ID NO: 1876203 - RNA, 19 nt, Artificial Sequence
  Description of Artificial Sequence: Synthetic oligonucleotide
aaaauaaggccugguuaau

SEQ ID NO: 1876204 - RNA, 19 nt, Artificial Sequence
  Description of Artificial Sequence: Synthetic oligonucleotide
accguuccacuccugucac

SEQ ID NO: 1876205 - RNA, 19 nt, Artificial Sequence
  Description of Artificial Sequence: Synthetic oligonucleotide
guaugugcauccaagugca

SEQ ID NO: 1876206 - RNA, 19 nt, Artificial Sequence
  Description of Artificial Sequence: Synthetic oligonucleotide
ggcgcugggaacuugaguc

SEQ ID NO: 1876207 - RNA, 19 nt, Artificial Sequence
  Description of Artificial Sequence: Synthetic oligonucleotide
ucucucucucucuucauuu

SEQ ID NO: 1876208 - RNA, 19 nt, Artificial Sequence
  Description of Artificial Sequence: Synthetic oligonucleotide
gaaugauucugucugguuu

SEQ ID NO: 1876209 - RNA, 19 nt, Artificial Sequence
  Description of Artificial Sequence: Synthetic oligonucleotide
gaaagcuaucugugagagc

SEQ ID NO: 1876210 - RNA, 19 nt, Artificial Sequence
  Description of Artificial Sequence: Synthetic oligonucleotide
ugugcauguuuaaguacau

SEQ ID NO: 1876211 - RNA, 19 nt, Artificial Sequence
  Description of Artificial Sequence: Synthetic oligonucleotide
cugucugguuuucuuauuc

SEQ ID NO: 1876212 - RNA, 19 nt, Artificial Sequence
  Description of Artificial Sequence: Synthetic oligonucleotide
aaauaaggccugguuaaua

SEQ ID NO: 1876213 - RNA, 19 nt, Artificial Sequence
  Description of Artificial Sequence: Synthetic oligonucleotide
ucaugacacacugaaugaa

SEQ ID NO: 1876214 - RNA, 19 nt, Artificial Sequence
  Description of Artificial Sequence: Synthetic oligonucleotide
uccugugaauuuuaagcuu

SEQ ID NO: 1876215 - RNA, 19 nt, Artificial Sequence
  Description of Artificial Sequence: Synthetic oligonucleotide
aagcuaucugugagagccc

SEQ ID NO: 1876216 - RNA, 19 nt, Artificial Sequence
  Description of Artificial Sequence: Synthetic oligonucleotide
gaaccucagggauuuauua

SEQ ID NO: 1876217 - RNA, 19 nt, Artificial Sequence
  Description of Artificial Sequence: Synthetic oligonucleotide
ugaaccucagggauuuauu

SEQ ID NO: 1876218 - RNA, 19 nt, Artificial Sequence
  Description of Artificial Sequence: Synthetic oligonucleotide
gguacaacacacuuguucu

SEQ ID NO: 1876219 - RNA, 19 nt, Artificial Sequence
  Description of Artificial Sequence: Synthetic oligonucleotide
uagaagacuuuuagguaua

SEQ ID NO: 1876220 - RNA, 19 nt, Artificial Sequence
  Description of Artificial Sequence: Synthetic oligonucleotide
augauugugcauacacauc

SEQ ID NO: 1876221 - RNA, 19 nt, Artificial Sequence
  Description of Artificial Sequence: Synthetic oligonucleotide
aagucaucuagaaucccau

SEQ ID NO: 1876222 - RNA, 19 nt, Artificial Sequence
  Description of Artificial Sequence: Synthetic oligonucleotide
uugaguccucugcaagagc

SEQ ID NO: 1876223 - RNA, 19 nt, Artificial Sequence
  Description of Artificial Sequence: Synthetic oligonucleotide
cagucaaagauaaacaguu

SEQ ID NO: 1876224 - RNA, 19 nt, Artificial Sequence
  Description of Artificial Sequence: Synthetic oligonucleotide
ugguuaauaguggcucaag

SEQ ID NO: 1876225 - RNA, 19 nt, Artificial Sequence
  Description of Artificial Sequence: Synthetic oligonucleotide
ucugaaucccaucgucguc

SEQ ID NO: 1876226 - RNA, 19 nt, Artificial Sequence
  Description of Artificial Sequence: Synthetic oligonucleotide
gagcagaaucccgucuucg

SEQ ID NO: 1876227 - RNA, 19 nt, Artificial Sequence
  Description of Artificial Sequence: Synthetic oligonucleotide
uccaccguuccacuccugu

SEQ ID NO: 1876228 - RNA, 19 nt, Artificial Sequence
  Description of Artificial Sequence: Synthetic oligonucleotide
ugaaucccaucgucgucag

SEQ ID NO: 1876229 - RNA, 19 nt, Artificial Sequence
  Description of Artificial Sequence: Synthetic oligonucleotide
ugcuuaagucacccaacau

SEQ ID NO: 1876230 - RNA, 19 nt, Artificial Sequence
  Description of Artificial Sequence: Synthetic oligonucleotide
ggaagcauacacauuauaa

SEQ ID NO: 1876231 - RNA, 19 nt, Artificial Sequence
  Description of Artificial Sequence: Synthetic oligonucleotide
uacaacacacuuguucuua

SEQ ID NO: 1876232 - RNA, 19 nt, Artificial Sequence
  Description of Artificial Sequence: Synthetic oligonucleotide
agacaacuucuucuugacu

SEQ ID NO: 1876233 - RNA, 19 nt, Artificial Sequence
  Description of Artificial Sequence: Synthetic oligonucleotide
agcagaaucccgucuucga

SEQ ID NO: 1876234 - RNA, 19 nt, Artificial Sequence
  Description of Artificial Sequence: Synthetic oligonucleotide
caugacacacugaaugaaa

SEQ ID NO: 1876235 - RNA, 19 nt, Artificial Sequence
  Description of Artificial Sequence: Synthetic oligonucleotide
aguuggaauguugaguaua

SEQ ID NO: 1876236 - RNA, 19 nt, Artificial Sequence
  Description of Artificial Sequence: Synthetic oligonucleotide
auaaagucacaaucccguu

SEQ ID NO: 1876237 - RNA, 19 nt, Artificial Sequence
  Description of Artificial Sequence: Synthetic oligonucleotide
ucuugacuuagacggucau

SEQ ID NO: 1876238 - RNA, 19 nt, Artificial Sequence
  Description of Artificial Sequence: Synthetic oligonucleotide
ugcugagcugucucucugc

SEQ ID NO: 1876239 - RNA, 19 nt, Artificial Sequence
  Description of Artificial Sequence: Synthetic oligonucleotide
caauaugcuuuuaaacucu

SEQ ID NO: 1876240 - RNA, 19 nt, Artificial Sequence
  Description of Artificial Sequence: Synthetic oligonucleotide
acaacaguuuggauagaug

SEQ ID NO: 1876241 - RNA, 19 nt, Artificial Sequence
  Description of Artificial Sequence: Synthetic oligonucleotide
uaugugcauccaagugcag

SEQ ID NO: 1876242 - RNA, 19 nt, Artificial Sequence
  Description of Artificial Sequence: Synthetic oligonucleotide
uguuggaaaucugcacaca

SEQ ID NO: 1876243 - RNA, 19 nt, Artificial Sequence
  Description of Artificial Sequence: Synthetic oligonucleotide
agaaugauucugucugguu

SEQ ID NO: 1876244 - RNA, 19 nt, Artificial Sequence
  Description of Artificial Sequence: Synthetic oligonucleotide
cuccaguuggaauguugag

SEQ ID NO: 1876245 - RNA, 19 nt, Artificial Sequence
  Description of Artificial Sequence: Synthetic oligonucleotide
acagcaggcgauguaguca

SEQ ID NO: 1876246 - RNA, 19 nt, Artificial Sequence
  Description of Artificial Sequence: Synthetic oligonucleotide
ccaacaucugguuuuaaga

SEQ ID NO: 1876247 - RNA, 19 nt, Artificial Sequence
  Description of Artificial Sequence: Synthetic oligonucleotide
uugaaccucagggauuuau

SEQ ID NO: 1876248 - RNA, 19 nt, Artificial Sequence
  Description of Artificial Sequence: Synthetic oligonucleotide
gugcuuaagucacccaaca

SEQ ID NO: 1876249 - RNA, 19 nt, Artificial Sequence
  Description of Artificial Sequence: Synthetic oligonucleotide
uggggauccaccguuccac

SEQ ID NO: 1876250 - RNA, 19 nt, Artificial Sequence
  Description of Artificial Sequence: Synthetic oligonucleotide
acaacacacuuguucuuau

SEQ ID NO: 1876251 - RNA, 19 nt, Artificial Sequence
  Description of Artificial Sequence: Synthetic oligonucleotide
cuucgaaagcuaucuguga

SEQ ID NO: 1876252 - RNA, 19 nt, Artificial Sequence
  Description of Artificial Sequence: Synthetic oligonucleotide
cuucuugacuuagacgguc

SEQ ID NO: 1876253 - RNA, 19 nt, Artificial Sequence
  Description of Artificial Sequence: Synthetic oligonucleotide
gguucuggcugguacaaca

SEQ ID NO: 1876254 - RNA, 19 nt, Artificial Sequence
  Description of Artificial Sequence: Synthetic oligonucleotide
ggguaugugcauccaagug

SEQ ID NO: 1876255 - RNA, 19 nt, Artificial Sequence
  Description of Artificial Sequence: Synthetic oligonucleotide
caacaguugucagggagug

SEQ ID NO: 1876256 - RNA, 19 nt, Artificial Sequence
  Description of Artificial Sequence: Synthetic oligonucleotide
gcauacuuaaguuuauaua

SEQ ID NO: 1876257 - RNA, 19 nt, Artificial Sequence
  Description of Artificial Sequence: Synthetic oligonucleotide
ggauccaccguuccacucc

SEQ ID NO: 1876258 - RNA, 19 nt, Artificial Sequence
  Description of Artificial Sequence: Synthetic oligonucleotide
uccucugcaagagcaguac

SEQ ID NO: 1876259 - RNA, 19 nt, Artificial Sequence
  Description of Artificial Sequence: Synthetic oligonucleotide
cuucgguuguauauaaagu

SEQ ID NO: 1876260 - RNA, 19 nt, Artificial Sequence
  Description of Artificial Sequence: Synthetic oligonucleotide
ugacuuagacggucaugac

SEQ ID NO: 1876261 - RNA, 19 nt, Artificial Sequence
  Description of Artificial Sequence: Synthetic oligonucleotide
guucaaucugaaucccauc

SEQ ID NO: 1876262 - RNA, 19 nt, Artificial Sequence
  Description of Artificial Sequence: Synthetic oligonucleotide
cuugacuuagacggucaug

SEQ ID NO: 1876263 - RNA, 19 nt, Artificial Sequence
  Description of Artificial Sequence: Synthetic oligonucleotide
guauaauuaacaacaguuu

SEQ ID NO: 1876264 - RNA, 19 nt, Artificial Sequence
  Description of Artificial Sequence: Synthetic oligonucleotide
auggaugaaaagauuucau

SEQ ID NO: 1876265 - RNA, 19 nt, Artificial Sequence
  Description of Artificial Sequence: Synthetic oligonucleotide
gaagcuucgguuguauaua

SEQ ID NO: 1876266 - RNA, 19 nt, Artificial Sequence
  Description of Artificial Sequence: Synthetic oligonucleotide
aaucaucauaugagaaauu

SEQ ID NO: 1876267 - RNA, 19 nt, Artificial Sequence
  Description of Artificial Sequence: Synthetic oligonucleotide
acuggugcuguaucgcuuu

SEQ ID NO: 1876268 - RNA, 19 nt, Artificial Sequence
  Description of Artificial Sequence: Synthetic oligonucleotide
auagauggaugaaaagauu

SEQ ID NO: 1876269 - RNA, 19 nt, Artificial Sequence
  Description of Artificial Sequence: Synthetic oligonucleotide
aguugucagggaguguugu

SEQ ID NO: 1876270 - RNA, 19 nt, Artificial Sequence
  Description of Artificial Sequence: Synthetic oligonucleotide
augacacacugaaugaaau

SEQ ID NO: 1876271 - RNA, 19 nt, Artificial Sequence
  Description of Artificial Sequence: Synthetic oligonucleotide
guuuuaagauggaagcaua

SEQ ID NO: 1876272 - RNA, 19 nt, Artificial Sequence
  Description of Artificial Sequence: Synthetic oligonucleotide
ucucucucucucucucucu

SEQ ID NO: 1876273 - RNA, 19 nt, Artificial Sequence
  Description of Artificial Sequence: Synthetic oligonucleotide
gcuuauaauauagaagacu

SEQ ID NO: 1876274 - RNA, 19 nt, Artificial Sequence
  Description of Artificial Sequence: Synthetic oligonucleotide
cugaaucccaucgucguca

SEQ ID NO: 1876275 - RNA, 19 nt, Artificial Sequence
  Description of Artificial Sequence: Synthetic oligonucleotide
gaaucccgucuucgaaagc

SEQ ID NO: 1876276 - RNA, 19 nt, Artificial Sequence
  Description of Artificial Sequence: Synthetic oligonucleotide
agauauggaaauacaugua

SEQ ID NO: 1876277 - RNA, 19 nt, Artificial Sequence
  Description of Artificial Sequence: Synthetic oligonucleotide
ugugaauuuuaagcuuaua

SEQ ID NO: 1876278 - RNA, 19 nt, Artificial Sequence
  Description of Artificial Sequence: Synthetic oligonucleotide
caacaugggcgcugggaac

SEQ ID NO: 1876279 - RNA, 19 nt, Artificial Sequence
  Description of Artificial Sequence: Synthetic oligonucleotide
cuguggaggccagaggcag

SEQ ID NO: 1876280 - RNA, 19 nt, Artificial Sequence
  Description of Artificial Sequence: Synthetic oligonucleotide
aggcgauguagucaucaaa

SEQ ID NO: 1876281 - RNA, 19 nt, Artificial Sequence
  Description of Artificial Sequence: Synthetic oligonucleotide
cagugcuuaagucacccaa

SEQ ID NO: 1876282 - RNA, 19 nt, Artificial Sequence
  Description of Artificial Sequence: Synthetic oligonucleotide
cccaacaucugguuuuaag

SEQ ID NO: 1876283 - RNA, 19 nt, Artificial Sequence
  Description of Artificial Sequence: Synthetic oligonucleotide
agcccucaguuugacacag

SEQ ID NO: 1876284 - RNA, 19 nt, Artificial Sequence
  Description of Artificial Sequence: Synthetic oligonucleotide
auaugcuuuuaaacucucu

SEQ ID NO: 1876285 - RNA, 19 nt, Artificial Sequence
  Description of Artificial Sequence: Synthetic oligonucleotide
agggaguguuguuggaaau

SEQ ID NO: 1876286 - RNA, 19 nt, Artificial Sequence
  Description of Artificial Sequence: Synthetic oligonucleotide
cucucucucucucucucuc

SEQ ID NO: 1876287 - RNA, 19 nt, Artificial Sequence
  Description of Artificial Sequence: Synthetic oligonucleotide
cagaaucccgucuucgaaa

SEQ ID NO: 1876288 - RNA, 19 nt, Artificial Sequence
  Description of Artificial Sequence: Synthetic oligonucleotide
ucccgucuucgaaagcuau

SEQ ID NO: 1876289 - RNA, 19 nt, Artificial Sequence
  Description of Artificial Sequence: Synthetic oligonucleotide
agcuaucugugagagcccu

SEQ ID NO: 1876290 - RNA, 19 nt, Artificial Sequence
  Description of Artificial Sequence: Synthetic oligonucleotide
cucucucucucucucuuca

SEQ ID NO: 1876291 - RNA, 19 nt, Artificial Sequence
  Description of Artificial Sequence: Synthetic oligonucleotide
ucacccaacaugggcgcug

SEQ ID NO: 1876292 - RNA, 19 nt, Artificial Sequence
  Description of Artificial Sequence: Synthetic oligonucleotide
ucgucgucagagccuucug

SEQ ID NO: 1876293 - RNA, 19 nt, Artificial Sequence
  Description of Artificial Sequence: Synthetic oligonucleotide
acacuuguucuuauauuaa

SEQ ID NO: 1876294 - RNA, 19 nt, Artificial Sequence
  Description of Artificial Sequence: Synthetic oligonucleotide
ucuuaacugcugagcuguc

SEQ ID NO: 1876295 - RNA, 19 nt, Artificial Sequence
  Description of Artificial Sequence: Synthetic oligonucleotide
caccguuccacuccuguca

SEQ ID NO: 1876296 - RNA, 19 nt, Artificial Sequence
  Description of Artificial Sequence: Synthetic oligonucleotide
aguggcucaaggagguucu

SEQ ID NO: 1876297 - RNA, 19 nt, Artificial Sequence
  Description of Artificial Sequence: Synthetic oligonucleotide
cuccugucacugucaaaac

SEQ ID NO: 1876298 - RNA, 19 nt, Artificial Sequence
  Description of Artificial Sequence: Synthetic oligonucleotide
ugggcgcugggaacuugag

SEQ ID NO: 1876299 - RNA, 19 nt, Artificial Sequence
  Description of Artificial Sequence: Synthetic oligonucleotide
ucucucucucucucucuuc

SEQ ID NO: 1876300 - RNA, 19 nt, Artificial Sequence
  Description of Artificial Sequence: Synthetic oligonucleotide
agauuucaugucacaagaa

SEQ ID NO: 1876301 - RNA, 19 nt, Artificial Sequence
  Description of Artificial Sequence: Synthetic oligonucleotide
ugauucugucugguuuucu

SEQ ID NO: 1876302 - RNA, 19 nt, Artificial Sequence
  Description of Artificial Sequence: Synthetic oligonucleotide
ugggaacuugaguccucug

SEQ ID NO: 1876303 - RNA, 19 nt, Artificial Sequence
  Description of Artificial Sequence: Synthetic oligonucleotide
gugagauauggaaauacau

SEQ ID NO: 1876304 - RNA, 19 nt, Artificial Sequence
  Description of Artificial Sequence: Synthetic oligonucleotide
uggugcuguaucgcuuugc

SEQ ID NO: 1876305 - RNA, 19 nt, Artificial Sequence
  Description of Artificial Sequence: Synthetic oligonucleotide
cgguuguauauaaagucac

SEQ ID NO: 1876306 - RNA, 19 nt, Artificial Sequence
  Description of Artificial Sequence: Synthetic oligonucleotide
caguugucagggaguguug

SEQ ID NO: 1876307 - RNA, 19 nt, Artificial Sequence
  Description of Artificial Sequence: Synthetic oligonucleotide
guucuggcugguacaacac

SEQ ID NO: 1876308 - RNA, 19 nt, Artificial Sequence
  Description of Artificial Sequence: Synthetic oligonucleotide
cgaaagcuaucugugagag

SEQ ID NO: 1876309 - RNA, 19 nt, Artificial Sequence
  Description of Artificial Sequence: Synthetic oligonucleotide
ggaagcaagcuugggcucc

SEQ ID NO: 1876310 - RNA, 19 nt, Artificial Sequence
  Description of Artificial Sequence: Synthetic oligonucleotide
cacugaaugaaaucaucau

SEQ ID NO: 1876311 - RNA, 19 nt, Artificial Sequence
  Description of Artificial Sequence: Synthetic oligonucleotide
cagggaguguuguuggaaa

SEQ ID NO: 1876312 - RNA, 19 nt, Artificial Sequence
  Description of Artificial Sequence: Synthetic oligonucleotide
agucaaagauaaacaguua

SEQ ID NO: 1876313 - RNA, 19 nt, Artificial Sequence
  Description of Artificial Sequence: Synthetic oligonucleotide
gggauuuauuaucaaaauu

SEQ ID NO: 1876314 - RNA, 19 nt, Artificial Sequence
  Description of Artificial Sequence: Synthetic oligonucleotide
guuuggauagauggaugaa

SEQ ID NO: 1876315 - RNA, 19 nt, Artificial Sequence
  Description of Artificial Sequence: Synthetic oligonucleotide
augaagcuucgguuguaua

SEQ ID NO: 1876316 - RNA, 19 nt, Artificial Sequence
  Description of Artificial Sequence: Synthetic oligonucleotide
ugagagcccucaguuugac

SEQ ID NO: 1876317 - RNA, 19 nt, Artificial Sequence
  Description of Artificial Sequence: Synthetic oligonucleotide
ucucucucucucucuucau

SEQ ID NO: 1876318 - RNA, 19 nt, Artificial Sequence
  Description of Artificial Sequence: Synthetic oligonucleotide
gcaggaaaauaaggccugg

SEQ ID NO: 1876319 - RNA, 19 nt, Artificial Sequence
  Description of Artificial Sequence: Synthetic oligonucleotide
caaucccguucaacaguug

SEQ ID NO: 1876320 - RNA, 19 nt, Artificial Sequence
  Description of Artificial Sequence: Synthetic oligonucleotide
ccugugaauuuuaagcuua

SEQ ID NO: 1876321 - RNA, 19 nt, Artificial Sequence
  Description of Artificial Sequence: Synthetic oligonucleotide
caucuagaaucccaucagu

SEQ ID NO: 1876322 - RNA, 19 nt, Artificial Sequence
  Description of Artificial Sequence: Synthetic oligonucleotide
aggcagugcuuaagucacc

SEQ ID NO: 1876323 - RNA, 19 nt, Artificial Sequence
  Description of Artificial Sequence: Synthetic oligonucleotide
cuucugcaguuccugggga

SEQ ID NO: 1876324 - RNA, 19 nt, Artificial Sequence
  Description of Artificial Sequence: Synthetic oligonucleotide
ccucagggauuuauuauca

SEQ ID NO: 1876325 - RNA, 19 nt, Artificial Sequence
  Description of Artificial Sequence: Synthetic oligonucleotide
ggaaaucugcacacagcac

SEQ ID NO: 1876326 - RNA, 19 nt, Artificial Sequence
  Description of Artificial Sequence: Synthetic oligonucleotide
cacaaucccguucaacagu

SEQ ID NO: 1876327 - RNA, 19 nt, Artificial Sequence
  Description of Artificial Sequence: Synthetic oligonucleotide
uaacaacaguuuggauaga

SEQ ID NO: 1876328 - RNA, 19 nt, Artificial Sequence
  Description of Artificial Sequence: Synthetic oligonucleotide
gccugguuaauaguggcuc

SEQ ID NO: 1876329 - RNA, 19 nt, Artificial Sequence
  Description of Artificial Sequence: Synthetic oligonucleotide
ggcugguacaacacacuug

SEQ ID NO: 1876330 - RNA, 19 nt, Artificial Sequence
  Description of Artificial Sequence: Synthetic oligonucleotide
guacaugcucuuaacugcu

SEQ ID NO: 1876331 - RNA, 19 nt, Artificial Sequence
  Description of Artificial Sequence: Synthetic oligonucleotide
agagcaguacaugcucuua

SEQ ID NO: 1876332 - RNA, 19 nt, Artificial Sequence
  Description of Artificial Sequence: Synthetic oligonucleotide
cuuagacggucaugacaca

SEQ ID NO: 1876333 - RNA, 19 nt, Artificial Sequence
  Description of Artificial Sequence: Synthetic oligonucleotide
gauccaccguuccacuccu

SEQ ID NO: 1876334 - RNA, 19 nt, Artificial Sequence
  Description of Artificial Sequence: Synthetic oligonucleotide
cugaaggcaggaggaagca

SEQ ID NO: 1876335 - RNA, 19 nt, Artificial Sequence
  Description of Artificial Sequence: Synthetic oligonucleotide
gcaguacaugcucuuaacu

SEQ ID NO: 1876336 - RNA, 19 nt, Artificial Sequence
  Description of Artificial Sequence: Synthetic oligonucleotide
gcagaaucccgucuucgaa

SEQ ID NO: 1876337 - RNA, 19 nt, Artificial Sequence
  Description of Artificial Sequence: Synthetic oligonucleotide
cucucucucucuucauuua

SEQ ID NO: 1876338 - RNA, 19 nt, Artificial Sequence
  Description of Artificial Sequence: Synthetic oligonucleotide
gggguucaaucugaauccc

SEQ ID NO: 1876339 - RNA, 19 nt, Artificial Sequence
  Description of Artificial Sequence: Synthetic oligonucleotide
caacacacuuguucuuaua

SEQ ID NO: 1876340 - RNA, 19 nt, Artificial Sequence
  Description of Artificial Sequence: Synthetic oligonucleotide
gacggucaugacacacuga

SEQ ID NO: 1876341 - RNA, 19 nt, Artificial Sequence
  Description of Artificial Sequence: Synthetic oligonucleotide
gcaggcgauguagucauca

SEQ ID NO: 1876342 - RNA, 19 nt, Artificial Sequence
  Description of Artificial Sequence: Synthetic oligonucleotide
augggcgcugggaacuuga

SEQ ID NO: 1876343 - RNA, 19 nt, Artificial Sequence
  Description of Artificial Sequence: Synthetic oligonucleotide
gaaucccaucgucgucaga

SEQ ID NO: 1876344 - RNA, 19 nt, Artificial Sequence
  Description of Artificial Sequence: Synthetic oligonucleotide
cuggggauccaccguucca

SEQ ID NO: 1876345 - RNA, 19 nt, Artificial Sequence
  Description of Artificial Sequence: Synthetic oligonucleotide
gguucaaucugaaucccau

SEQ ID NO: 1876346 - RNA, 19 nt, Artificial Sequence
  Description of Artificial Sequence: Synthetic oligonucleotide
gugagagcccucaguuuga

SEQ ID NO: 1876347 - RNA, 19 nt, Artificial Sequence
  Description of Artificial Sequence: Synthetic oligonucleotide
cgucgucagagccuucugc

SEQ ID NO: 1876348 - RNA, 19 nt, Artificial Sequence
  Description of Artificial Sequence: Synthetic oligonucleotide
cugugaauuuuaagcuuau

SEQ ID NO: 1876349 - RNA, 19 nt, Artificial Sequence
  Description of Artificial Sequence: Synthetic oligonucleotide
cagcaggcgauguagucau

SEQ ID NO: 1876350 - RNA, 19 nt, Artificial Sequence
  Description of Artificial Sequence: Synthetic oligonucleotide
gggauccaccguuccacuc

SEQ ID NO: 1876351 - RNA, 19 nt, Artificial Sequence
  Description of Artificial Sequence: Synthetic oligonucleotide
ggguucaaucugaauccca

SEQ ID NO: 1876352 - RNA, 19 nt, Artificial Sequence
  Description of Artificial Sequence: Synthetic oligonucleotide
agcuucgguuguauauaaa

SEQ ID NO: 1876353 - RNA, 19 nt, Artificial Sequence
  Description of Artificial Sequence: Synthetic oligonucleotide
cacaucuguuccaggguau

SEQ ID NO: 1876354 - RNA, 19 nt, Artificial Sequence
  Description of Artificial Sequence: Synthetic oligonucleotide
gcuuugcaauugaauucac

SEQ ID NO: 1876355 - RNA, 19 nt, Artificial Sequence
  Description of Artificial Sequence: Synthetic oligonucleotide
guugucagggaguguuguu

SEQ ID NO: 1876356 - RNA, 19 nt, Artificial Sequence
  Description of Artificial Sequence: Synthetic oligonucleotide
guuugacacagcaggcgau

SEQ ID NO: 1876357 - RNA, 19 nt, Artificial Sequence
  Description of Artificial Sequence: Synthetic oligonucleotide
caugggcgcugggaacuug

SEQ ID NO: 1876358 - RNA, 19 nt, Artificial Sequence
  Description of Artificial Sequence: Synthetic oligonucleotide
gcagugcuuaagucaccca

SEQ ID NO: 1876359 - RNA, 19 nt, Artificial Sequence
  Description of Artificial Sequence: Synthetic oligonucleotide
cccgucuucgaaagcuauc

SEQ ID NO: 1876360 - RNA, 19 nt, Artificial Sequence
  Description of Artificial Sequence: Synthetic oligonucleotide
ccaagugcaggugccugug

SEQ ID NO: 1876361 - RNA, 19 nt, Artificial Sequence
  Description of Artificial Sequence: Synthetic oligonucleotide
gcuguaucgcuuugcaauu

SEQ ID NO: 1876362 - RNA, 19 nt, Artificial Sequence
  Description of Artificial Sequence: Synthetic oligonucleotide
agcaggcgauguagucauc

SEQ ID NO: 1876363 - RNA, 19 nt, Artificial Sequence
  Description of Artificial Sequence: Synthetic oligonucleotide
aucccgucuucgaaagcua

SEQ ID NO: 1876364 - RNA, 19 nt, Artificial Sequence
  Description of Artificial Sequence: Synthetic oligonucleotide
ccaccguuccacuccuguc

SEQ ID NO: 1876365 - RNA, 19 nt, Artificial Sequence
  Description of Artificial Sequence: Synthetic oligonucleotide
cucucucucucucuucauu

SEQ ID NO: 1876366 - RNA, 19 nt, Artificial Sequence
  Description of Artificial Sequence: Synthetic oligonucleotide
caucuguuccaggguaugu

SEQ ID NO: 1876367 - RNA, 19 nt, Artificial Sequence
  Description of Artificial Sequence: Synthetic oligonucleotide
cugggaacuugaguccucu

SEQ ID NO: 1876368 - RNA, 19 nt, Artificial Sequence
  Description of Artificial Sequence: Synthetic oligonucleotide
caguuggaauguugaguau

SEQ ID NO: 1876369 - RNA, 19 nt, Artificial Sequence
  Description of Artificial Sequence: Synthetic oligonucleotide
caucgucgucagagccuuc

SEQ ID NO: 1876370 - RNA, 19 nt, Artificial Sequence
  Description of Artificial Sequence: Synthetic oligonucleotide
cucucucucucucucucuu

SEQ ID NO: 1876371 - RNA, 19 nt, Artificial Sequence
  Description of Artificial Sequence: Synthetic oligonucleotide
ccagaggcagugcuuaagu

SEQ ID NO: 1876372 - RNA, 19 nt, Artificial Sequence
  Description of Artificial Sequence: Synthetic oligonucleotide
auugaaccucagggauuua

SEQ ID NO: 1876373 - RNA, 19 nt, Artificial Sequence
  Description of Artificial Sequence: Synthetic oligonucleotide
ccgucuucgaaagcuaucu

SEQ ID NO: 1876374 - RNA, 19 nt, Artificial Sequence
  Description of Artificial Sequence: Synthetic oligonucleotide
acaugggcgcugggaacuu

SEQ ID NO: 1876375 - RNA, 19 nt, Artificial Sequence
  Description of Artificial Sequence: Synthetic oligonucleotide
cacuggugcuguaucgcuu

SEQ ID NO: 1876376 - RNA, 19 nt, Artificial Sequence
  Description of Artificial Sequence: Synthetic oligonucleotide
gcuaucugugagagcccuc

SEQ ID NO: 1876377 - RNA, 19 nt, Artificial Sequence
  Description of Artificial Sequence: Synthetic oligonucleotide
gcugggaacuugaguccuc

SEQ ID NO: 1876378 - RNA, 19 nt, Artificial Sequence
  Description of Artificial Sequence: Synthetic oligonucleotide
auccaccguuccacuccug

SEQ ID NO: 1876379 - RNA, 19 nt, Artificial Sequence
  Description of Artificial Sequence: Synthetic oligonucleotide
ggggauccaccguuccacu

SEQ ID NO: 1876380 - RNA, 19 nt, Artificial Sequence
  Description of Artificial Sequence: Synthetic oligonucleotide
ccacuggugcuguaucgcu

SEQ ID NO: 1876381 - RNA, 19 nt, Artificial Sequence
  Description of Artificial Sequence: Synthetic oligonucleotide
ggccagaggcagugcuuaa

SEQ ID NO: 1876382 - RNA, 19 nt, Artificial Sequence
  Description of Artificial Sequence: Synthetic oligonucleotide
cugguacaacacacuuguu

SEQ ID NO: 1876383 - RNA, 19 nt, Artificial Sequence
  Description of Artificial Sequence: Synthetic oligonucleotide
gcccucaguuugacacagc

SEQ ID NO: 1876384 - RNA, 19 nt, Artificial Sequence
  Description of Artificial Sequence: Synthetic oligonucleotide
ccguuccacuccugucacu

SEQ ID NO: 1876385 - RNA, 19 nt, Artificial Sequence
  Description of Artificial Sequence: Synthetic oligonucleotide
ucaacuguaaauaugaagc

SEQ ID NO: 1876386 - RNA, 19 nt, Artificial Sequence
  Description of Artificial Sequence: Synthetic oligonucleotide
aaaaccaagaaacaaguuc

SEQ ID NO: 1876387 - RNA, 19 nt, Artificial Sequence
  Description of Artificial Sequence: Synthetic oligonucleotide
aauuccaaacauuuggccc

SEQ ID NO: 1876388 - RNA, 19 nt, Artificial Sequence
  Description of Artificial Sequence: Synthetic oligonucleotide
uaaauaugaagccauaaug

SEQ ID NO: 1876389 - RNA, 19 nt, Artificial Sequence
  Description of Artificial Sequence: Synthetic oligonucleotide
aaauuuagggacaacacac

SEQ ID NO: 1876390 - RNA, 19 nt, Artificial Sequence
  Description of Artificial Sequence: Synthetic oligonucleotide
ucuuuguagacucaaagca

SEQ ID NO: 1876391 - RNA, 19 nt, Artificial Sequence
  Description of Artificial Sequence: Synthetic oligonucleotide
guaagguacucucauaugg

SEQ ID NO: 1876392 - RNA, 19 nt, Artificial Sequence
  Description of Artificial Sequence: Synthetic oligonucleotide
ucuauugauagacuuguug

SEQ ID NO: 1876393 - RNA, 19 nt, Artificial Sequence
  Description of Artificial Sequence: Synthetic oligonucleotide
aaaaccaaccauuggggag

SEQ ID NO: 1876394 - RNA, 19 nt, Artificial Sequence
  Description of Artificial Sequence: Synthetic oligonucleotide
aaauaugaagccauaaugu

SEQ ID NO: 1876395 - RNA, 19 nt, Artificial Sequence
  Description of Artificial Sequence: Synthetic oligonucleotide
ugcgauauugccaucacug

SEQ ID NO: 1876396 - RNA, 19 nt, Artificial Sequence
  Description of Artificial Sequence: Synthetic oligonucleotide
auuagaaaugucaauacag

SEQ ID NO: 1876397 - RNA, 19 nt, Artificial Sequence
  Description of Artificial Sequence: Synthetic oligonucleotide
aaaccaaccauuggggagc

SEQ ID NO: 1876398 - RNA, 19 nt, Artificial Sequence
  Description of Artificial Sequence: Synthetic oligonucleotide
uucaacuguaaauaugaag

SEQ ID NO: 1876399 - RNA, 19 nt, Artificial Sequence
  Description of Artificial Sequence: Synthetic oligonucleotide
uuuaauuauaacuuuucua

SEQ ID NO: 1876400 - RNA, 19 nt, Artificial Sequence
  Description of Artificial Sequence: Synthetic oligonucleotide
uucuaugucaacauuugga

SEQ ID NO: 1876401 - RNA, 19 nt, Artificial Sequence
  Description of Artificial Sequence: Synthetic oligonucleotide
aagguacucucauaugggg

SEQ ID NO: 1876402 - RNA, 19 nt, Artificial Sequence
  Description of Artificial Sequence: Synthetic oligonucleotide
aauaugaagccauaauguu

SEQ ID NO: 1876403 - RNA, 19 nt, Artificial Sequence
  Description of Artificial Sequence: Synthetic oligonucleotide
uguugcauuuucuuuguag

SEQ ID NO: 1876404 - RNA, 19 nt, Artificial Sequence
  Description of Artificial Sequence: Synthetic oligonucleotide
uauuugucaggcuuguuca

SEQ ID NO: 1876405 - RNA, 19 nt, Artificial Sequence
  Description of Artificial Sequence: Synthetic oligonucleotide
ucuaugucaacauuuggaa

SEQ ID NO: 1876406 - RNA, 19 nt, Artificial Sequence
  Description of Artificial Sequence: Synthetic oligonucleotide
uuuguagacucaaagcagu

SEQ ID NO: 1876407 - RNA, 19 nt, Artificial Sequence
  Description of Artificial Sequence: Synthetic oligonucleotide
acuuguugcauuuucuuug

SEQ ID NO: 1876408 - RNA, 19 nt, Artificial Sequence
  Description of Artificial Sequence: Synthetic oligonucleotide
aagaauagcaaaaccaaga

SEQ ID NO: 1876409 - RNA, 19 nt, Artificial Sequence
  Description of Artificial Sequence: Synthetic oligonucleotide
uccaaagguagacagguga

SEQ ID NO: 1876410 - RNA, 19 nt, Artificial Sequence
  Description of Artificial Sequence: Synthetic oligonucleotide
ugcauaggcagcaccaggg

SEQ ID NO: 1876411 - RNA, 19 nt, Artificial Sequence
  Description of Artificial Sequence: Synthetic oligonucleotide
uuuggaaacguuucuucag

SEQ ID NO: 1876412 - RNA, 19 nt, Artificial Sequence
  Description of Artificial Sequence: Synthetic oligonucleotide
aggaggaucaaaaccaacc

SEQ ID NO: 1876413 - RNA, 19 nt, Artificial Sequence
  Description of Artificial Sequence: Synthetic oligonucleotide
uccacuugccgcaauaagc

SEQ ID NO: 1876414 - RNA, 19 nt, Artificial Sequence
  Description of Artificial Sequence: Synthetic oligonucleotide
ucauuagaaaugucaauac

SEQ ID NO: 1876415 - RNA, 19 nt, Artificial Sequence
  Description of Artificial Sequence: Synthetic oligonucleotide
aaugguaagguacucucau

SEQ ID NO: 1876416 - RNA, 19 nt, Artificial Sequence
  Description of Artificial Sequence: Synthetic oligonucleotide
aaagaauagcaaaaccaag

SEQ ID NO: 1876417 - RNA, 19 nt, Artificial Sequence
  Description of Artificial Sequence: Synthetic oligonucleotide
cauucaacuguaaauauga

SEQ ID NO: 1876418 - RNA, 19 nt, Artificial Sequence
  Description of Artificial Sequence: Synthetic oligonucleotide
ucugugaugugaaaucaug

SEQ ID NO: 1876419 - RNA, 19 nt, Artificial Sequence
  Description of Artificial Sequence: Synthetic oligonucleotide
aaggagaagaucugugaug

SEQ ID NO: 1876420 - RNA, 19 nt, Artificial Sequence
  Description of Artificial Sequence: Synthetic oligonucleotide
gaaaucaugcugcugcagc

SEQ ID NO: 1876421 - RNA, 19 nt, Artificial Sequence
  Description of Artificial Sequence: Synthetic oligonucleotide
ugggguaccaugccaaagg

SEQ ID NO: 1876422 - RNA, 19 nt, Artificial Sequence
  Description of Artificial Sequence: Synthetic oligonucleotide
auguuuucaguagaugacc

SEQ ID NO: 1876423 - RNA, 19 nt, Artificial Sequence
  Description of Artificial Sequence: Synthetic oligonucleotide
aguaagcucacaguugggc

SEQ ID NO: 1876424 - RNA, 19 nt, Artificial Sequence
  Description of Artificial Sequence: Synthetic oligonucleotide
auagacuuguugcauuuuc

SEQ ID NO: 1876425 - RNA, 19 nt, Artificial Sequence
  Description of Artificial Sequence: Synthetic oligonucleotide
aacauuuggaaacguuucu

SEQ ID NO: 1876426 - RNA, 19 nt, Artificial Sequence
  Description of Artificial Sequence: Synthetic oligonucleotide
uauuucuacaaauuccaaa

SEQ ID NO: 1876427 - RNA, 19 nt, Artificial Sequence
  Description of Artificial Sequence: Synthetic oligonucleotide
agggacaacacacagcucu

SEQ ID NO: 1876428 - RNA, 19 nt, Artificial Sequence
  Description of Artificial Sequence: Synthetic oligonucleotide
ucaacauuuggaaacguuu

SEQ ID NO: 1876429 - RNA, 19 nt, Artificial Sequence
  Description of Artificial Sequence: Synthetic oligonucleotide
aaagguagacaggugacug

SEQ ID NO: 1876430 - RNA, 19 nt, Artificial Sequence
  Description of Artificial Sequence: Synthetic oligonucleotide
agaaaaguaagcucacagu

SEQ ID NO: 1876431 - RNA, 19 nt, Artificial Sequence
  Description of Artificial Sequence: Synthetic oligonucleotide
aacauuuggcccauucaac

SEQ ID NO: 1876432 - RNA, 19 nt, Artificial Sequence
  Description of Artificial Sequence: Synthetic oligonucleotide
uuauaacuuuucuauuucu

SEQ ID NO: 1876433 - RNA, 19 nt, Artificial Sequence
  Description of Artificial Sequence: Synthetic oligonucleotide
ugcugcuugguugacaagg

SEQ ID NO: 1876434 - RNA, 19 nt, Artificial Sequence
  Description of Artificial Sequence: Synthetic oligonucleotide
aaguucauuggagacacca

SEQ ID NO: 1876435 - RNA, 19 nt, Artificial Sequence
  Description of Artificial Sequence: Synthetic oligonucleotide
ucuacaaauuccaaacauu

SEQ ID NO: 1876436 - RNA, 19 nt, Artificial Sequence
  Description of Artificial Sequence: Synthetic oligonucleotide
uguuuucaguagaugaccu

SEQ ID NO: 1876437 - RNA, 19 nt, Artificial Sequence
  Description of Artificial Sequence: Synthetic oligonucleotide
ucaacgugaagugaacugc

SEQ ID NO: 1876438 - RNA, 19 nt, Artificial Sequence
  Description of Artificial Sequence: Synthetic oligonucleotide
caauaagcaaauuuaggga

SEQ ID NO: 1876439 - RNA, 19 nt, Artificial Sequence
  Description of Artificial Sequence: Synthetic oligonucleotide
agcaaaaccaagaaacaag

SEQ ID NO: 1876440 - RNA, 19 nt, Artificial Sequence
  Description of Artificial Sequence: Synthetic oligonucleotide
uggaauugccugaccaggg

SEQ ID NO: 1876441 - RNA, 19 nt, Artificial Sequence
  Description of Artificial Sequence: Synthetic oligonucleotide
ugguaagguacucucauau

SEQ ID NO: 1876442 - RNA, 19 nt, Artificial Sequence
  Description of Artificial Sequence: Synthetic oligonucleotide
agguauuccugccagguug

SEQ ID NO: 1876443 - RNA, 19 nt, Artificial Sequence
  Description of Artificial Sequence: Synthetic oligonucleotide
auauugccaucacugcagc

SEQ ID NO: 1876444 - RNA, 19 nt, Artificial Sequence
  Description of Artificial Sequence: Synthetic oligonucleotide
ugucuauugauagacuugu

SEQ ID NO: 1876445 - RNA, 19 nt, Artificial Sequence
  Description of Artificial Sequence: Synthetic oligonucleotide
guagcuugcuucucuaucc

SEQ ID NO: 1876446 - RNA, 19 nt, Artificial Sequence
  Description of Artificial Sequence: Synthetic oligonucleotide
gugguuaugguguccaaag

SEQ ID NO: 1876447 - RNA, 19 nt, Artificial Sequence
  Description of Artificial Sequence: Synthetic oligonucleotide
cucuaucccacacuugugg

SEQ ID NO: 1876448 - RNA, 19 nt, Artificial Sequence
  Description of Artificial Sequence: Synthetic oligonucleotide
acauuuggcccauucaacu

SEQ ID NO: 1876449 - RNA, 19 nt, Artificial Sequence
  Description of Artificial Sequence: Synthetic oligonucleotide
uguccaaagguagacaggu

SEQ ID NO: 1876450 - RNA, 19 nt, Artificial Sequence
  Description of Artificial Sequence: Synthetic oligonucleotide
aaaccgccuguccagagcu

SEQ ID NO: 1876451 - RNA, 19 nt, Artificial Sequence
  Description of Artificial Sequence: Synthetic oligonucleotide
gugacugacaggcaguagc

SEQ ID NO: 1876452 - RNA, 19 nt, Artificial Sequence
  Description of Artificial Sequence: Synthetic oligonucleotide
ugguuaugguguccaaagg

SEQ ID NO: 1876453 - RNA, 19 nt, Artificial Sequence
  Description of Artificial Sequence: Synthetic oligonucleotide
aacaaguucauuggagaca

SEQ ID NO: 1876454 - RNA, 19 nt, Artificial Sequence
  Description of Artificial Sequence: Synthetic oligonucleotide
ggcaagaugugacugacag

SEQ ID NO: 1876455 - RNA, 19 nt, Artificial Sequence
  Description of Artificial Sequence: Synthetic oligonucleotide
ucauuggagacaccacugc

SEQ ID NO: 1876456 - RNA, 19 nt, Artificial Sequence
  Description of Artificial Sequence: Synthetic oligonucleotide
uguccaaaccgccugucca

SEQ ID NO: 1876457 - RNA, 19 nt, Artificial Sequence
  Description of Artificial Sequence: Synthetic oligonucleotide
uuggaaacguuucuucagu

SEQ ID NO: 1876458 - RNA, 19 nt, Artificial Sequence
  Description of Artificial Sequence: Synthetic oligonucleotide
acugacaggcaguagcuug

SEQ ID NO: 1876459 - RNA, 19 nt, Artificial Sequence
  Description of Artificial Sequence: Synthetic oligonucleotide
uguaaauaugaagccauaa

SEQ ID NO: 1876460 - RNA, 19 nt, Artificial Sequence
  Description of Artificial Sequence: Synthetic oligonucleotide
ugacugucuauugauagac

SEQ ID NO: 1876461 - RNA, 19 nt, Artificial Sequence
  Description of Artificial Sequence: Synthetic oligonucleotide
cuuggugccaucauuagaa

SEQ ID NO: 1876462 - RNA, 19 nt, Artificial Sequence
  Description of Artificial Sequence: Synthetic oligonucleotide
aggaugcagguauuccugc

SEQ ID NO: 1876463 - RNA, 19 nt, Artificial Sequence
  Description of Artificial Sequence: Synthetic oligonucleotide
aggaacucaacgugaagug

SEQ ID NO: 1876464 - RNA, 19 nt, Artificial Sequence
  Description of Artificial Sequence: Synthetic oligonucleotide
accacugcucuacagagga

SEQ ID NO: 1876465 - RNA, 19 nt, Artificial Sequence
  Description of Artificial Sequence: Synthetic oligonucleotide
acugcaaggaacagaaaag

SEQ ID NO: 1876466 - RNA, 19 nt, Artificial Sequence
  Description of Artificial Sequence: Synthetic oligonucleotide
aagaucugugaugugaaau

SEQ ID NO: 1876467 - RNA, 19 nt, Artificial Sequence
  Description of Artificial Sequence: Synthetic oligonucleotide
cauuuggaaacguuucuuc

SEQ ID NO: 1876468 - RNA, 19 nt, Artificial Sequence
  Description of Artificial Sequence: Synthetic oligonucleotide
ucuaucccacacuuguggc

SEQ ID NO: 1876469 - RNA, 19 nt, Artificial Sequence
  Description of Artificial Sequence: Synthetic oligonucleotide
caggguaugggccaggcac

SEQ ID NO: 1876470 - RNA, 19 nt, Artificial Sequence
  Description of Artificial Sequence: Synthetic oligonucleotide
ugcauuuucuuuguagacu

SEQ ID NO: 1876471 - RNA, 19 nt, Artificial Sequence
  Description of Artificial Sequence: Synthetic oligonucleotide
acaugcagaacuuccacau

SEQ ID NO: 1876472 - RNA, 19 nt, Artificial Sequence
  Description of Artificial Sequence: Synthetic oligonucleotide
cucaacgugaagugaacug

SEQ ID NO: 1876473 - RNA, 19 nt, Artificial Sequence
  Description of Artificial Sequence: Synthetic oligonucleotide
acugucuauugauagacuu

SEQ ID NO: 1876474 - RNA, 19 nt, Artificial Sequence
  Description of Artificial Sequence: Synthetic oligonucleotide
aagccauaauguuuucagu

SEQ ID NO: 1876475 - RNA, 19 nt, Artificial Sequence
  Description of Artificial Sequence: Synthetic oligonucleotide
uagacuuguugcauuuucu

SEQ ID NO: 1876476 - RNA, 19 nt, Artificial Sequence
  Description of Artificial Sequence: Synthetic oligonucleotide
agccauaauguuuucagua

SEQ ID NO: 1876477 - RNA, 19 nt, Artificial Sequence
  Description of Artificial Sequence: Synthetic oligonucleotide
gguacucucauauggggag

SEQ ID NO: 1876478 - RNA, 19 nt, Artificial Sequence
  Description of Artificial Sequence: Synthetic oligonucleotide
gguguccaaagguagacag

SEQ ID NO: 1876479 - RNA, 19 nt, Artificial Sequence
  Description of Artificial Sequence: Synthetic oligonucleotide
uguggagacaugcugugua

SEQ ID NO: 1876480 - RNA, 19 nt, Artificial Sequence
  Description of Artificial Sequence: Synthetic oligonucleotide
ugucaauacagcuggccuc

SEQ ID NO: 1876481 - RNA, 19 nt, Artificial Sequence
  Description of Artificial Sequence: Synthetic oligonucleotide
aacucaacgugaagugaac

SEQ ID NO: 1876482 - RNA, 19 nt, Artificial Sequence
  Description of Artificial Sequence: Synthetic oligonucleotide
aaaugucaauacagcuggc

SEQ ID NO: 1876483 - RNA, 19 nt, Artificial Sequence
  Description of Artificial Sequence: Synthetic oligonucleotide
ugacugacaggcaguagcu

SEQ ID NO: 1876484 - RNA, 19 nt, Artificial Sequence
  Description of Artificial Sequence: Synthetic oligonucleotide
uuccacuugccgcaauaag

SEQ ID NO: 1876485 - RNA, 19 nt, Artificial Sequence
  Description of Artificial Sequence: Synthetic oligonucleotide
uagggcaguaucccaagga

SEQ ID NO: 1876486 - RNA, 19 nt, Artificial Sequence
  Description of Artificial Sequence: Synthetic oligonucleotide
cugucuauugauagacuug

SEQ ID NO: 1876487 - RNA, 19 nt, Artificial Sequence
  Description of Artificial Sequence: Synthetic oligonucleotide
uaggcaaccacugcugcag

SEQ ID NO: 1876488 - RNA, 19 nt, Artificial Sequence
  Description of Artificial Sequence: Synthetic oligonucleotide
auuggagacaccacugcuc

SEQ ID NO: 1876489 - RNA, 19 nt, Artificial Sequence
  Description of Artificial Sequence: Synthetic oligonucleotide
acgugaagugaacugcaag

SEQ ID NO: 1876490 - RNA, 19 nt, Artificial Sequence
  Description of Artificial Sequence: Synthetic oligonucleotide
aagguagacaggugacugu

SEQ ID NO: 1876491 - RNA, 19 nt, Artificial Sequence
  Description of Artificial Sequence: Synthetic oligonucleotide
acugcgauauugccaucac

SEQ ID NO: 1876492 - RNA, 19 nt, Artificial Sequence
  Description of Artificial Sequence: Synthetic oligonucleotide
ucuccauucaugccggcau

SEQ ID NO: 1876493 - RNA, 19 nt, Artificial Sequence
  Description of Artificial Sequence: Synthetic oligonucleotide
aagaccucacaguguuguc

SEQ ID NO: 1876494 - RNA, 19 nt, Artificial Sequence
  Description of Artificial Sequence: Synthetic oligonucleotide
aauugccugaccagggucu

SEQ ID NO: 1876495 - RNA, 19 nt, Artificial Sequence
  Description of Artificial Sequence: Synthetic oligonucleotide
aguucuaugucaacauuug

SEQ ID NO: 1876496 - RNA, 19 nt, Artificial Sequence
  Description of Artificial Sequence: Synthetic oligonucleotide
cauucaugccggcaugggg

SEQ ID NO: 1876497 - RNA, 19 nt, Artificial Sequence
  Description of Artificial Sequence: Synthetic oligonucleotide
ugugugguuauggugucca

SEQ ID NO: 1876498 - RNA, 19 nt, Artificial Sequence
  Description of Artificial Sequence: Synthetic oligonucleotide
cuaucccacacuuguggcc

SEQ ID NO: 1876499 - RNA, 19 nt, Artificial Sequence
  Description of Artificial Sequence: Synthetic oligonucleotide
ugcucuacagaggaacuca

SEQ ID NO: 1876500 - RNA, 19 nt, Artificial Sequence
  Description of Artificial Sequence: Synthetic oligonucleotide
gccauaauguuuucaguag

SEQ ID NO: 1876501 - RNA, 19 nt, Artificial Sequence
  Description of Artificial Sequence: Synthetic oligonucleotide
aguagggcaguaucccaag

SEQ ID NO: 1876502 - RNA, 19 nt, Artificial Sequence
  Description of Artificial Sequence: Synthetic oligonucleotide
acaacacacagcucucgug

SEQ ID NO: 1876503 - RNA, 19 nt, Artificial Sequence
  Description of Artificial Sequence: Synthetic oligonucleotide
agcaguucuaugucaacau

SEQ ID NO: 1876504 - RNA, 19 nt, Artificial Sequence
  Description of Artificial Sequence: Synthetic oligonucleotide
cugacaggcaguagcuugc

SEQ ID NO: 1876505 - RNA, 19 nt, Artificial Sequence
  Description of Artificial Sequence: Synthetic oligonucleotide
uaagcaaauuuagggacaa

SEQ ID NO: 1876506 - RNA, 19 nt, Artificial Sequence
  Description of Artificial Sequence: Synthetic oligonucleotide
augagaagcagaccuugga

SEQ ID NO: 1876507 - RNA, 19 nt, Artificial Sequence
  Description of Artificial Sequence: Synthetic oligonucleotide
cugguauuugucaggcuug

SEQ ID NO: 1876508 - RNA, 19 nt, Artificial Sequence
  Description of Artificial Sequence: Synthetic oligonucleotide
ugauagacuuguugcauuu

SEQ ID NO: 1876509 - RNA, 19 nt, Artificial Sequence
  Description of Artificial Sequence: Synthetic oligonucleotide
caucuguggagacaugcug

SEQ ID NO: 1876510 - RNA, 19 nt, Artificial Sequence
  Description of Artificial Sequence: Synthetic oligonucleotide
cauauggggaggaggauca

SEQ ID NO: 1876511 - RNA, 19 nt, Artificial Sequence
  Description of Artificial Sequence: Synthetic oligonucleotide
aagcagaccuuggagucag

SEQ ID NO: 1876512 - RNA, 19 nt, Artificial Sequence
  Description of Artificial Sequence: Synthetic oligonucleotide
uucucucaggucccaagac

SEQ ID NO: 1876513 - RNA, 19 nt, Artificial Sequence
  Description of Artificial Sequence: Synthetic oligonucleotide
uagcuugcuucucuauccc

SEQ ID NO: 1876514 - RNA, 19 nt, Artificial Sequence
  Description of Artificial Sequence: Synthetic oligonucleotide
aaucaugcugcugcagcug

SEQ ID NO: 1876515 - RNA, 19 nt, Artificial Sequence
  Description of Artificial Sequence: Synthetic oligonucleotide
aguucauuggagacaccac

SEQ ID NO: 1876516 - RNA, 19 nt, Artificial Sequence
  Description of Artificial Sequence: Synthetic oligonucleotide
cuuguucacaugcagaacu

SEQ ID NO: 1876517 - RNA, 19 nt, Artificial Sequence
  Description of Artificial Sequence: Synthetic oligonucleotide
gaugcagguauuccugcca

SEQ ID NO: 1876518 - RNA, 19 nt, Artificial Sequence
  Description of Artificial Sequence: Synthetic oligonucleotide
uuugucaggcuuguucaca

SEQ ID NO: 1876519 - RNA, 19 nt, Artificial Sequence
  Description of Artificial Sequence: Synthetic oligonucleotide
cauaggcaaccacugcugc

SEQ ID NO: 1876520 - RNA, 19 nt, Artificial Sequence
  Description of Artificial Sequence: Synthetic oligonucleotide
gaauugccugaccaggguc

SEQ ID NO: 1876521 - RNA, 19 nt, Artificial Sequence
  Description of Artificial Sequence: Synthetic oligonucleotide
auugauagacuuguugcau

SEQ ID NO: 1876522 - RNA, 19 nt, Artificial Sequence
  Description of Artificial Sequence: Synthetic oligonucleotide
gucaauacagcuggccucc

SEQ ID NO: 1876523 - RNA, 19 nt, Artificial Sequence
  Description of Artificial Sequence: Synthetic oligonucleotide
ucauauggggaggaggauc

SEQ ID NO: 1876524 - RNA, 19 nt, Artificial Sequence
  Description of Artificial Sequence: Synthetic oligonucleotide
uaucccacacuuguggccu

SEQ ID NO: 1876525 - RNA, 19 nt, Artificial Sequence
  Description of Artificial Sequence: Synthetic oligonucleotide
ugacaaggggcuccauagc

SEQ ID NO: 1876526 - RNA, 19 nt, Artificial Sequence
  Description of Artificial Sequence: Synthetic oligonucleotide
auucaugccggcauggggu

SEQ ID NO: 1876527 - RNA, 19 nt, Artificial Sequence
  Description of Artificial Sequence: Synthetic oligonucleotide
ugcggcacucaucugugga

SEQ ID NO: 1876528 - RNA, 19 nt, Artificial Sequence
  Description of Artificial Sequence: Synthetic oligonucleotide
agaggaacucaacgugaag

SEQ ID NO: 1876529 - RNA, 19 nt, Artificial Sequence
  Description of Artificial Sequence: Synthetic oligonucleotide
guaaauaugaagccauaau

SEQ ID NO: 1876530 - RNA, 19 nt, Artificial Sequence
  Description of Artificial Sequence: Synthetic oligonucleotide
ggaaugguaagguacucuc

SEQ ID NO: 1876531 - RNA, 19 nt, Artificial Sequence
  Description of Artificial Sequence: Synthetic oligonucleotide
agcugcggcacucaucugu

SEQ ID NO: 1876532 - RNA, 19 nt, Artificial Sequence
  Description of Artificial Sequence: Synthetic oligonucleotide
uugguugacaaggggcucc

SEQ ID NO: 1876533 - RNA, 19 nt, Artificial Sequence
  Description of Artificial Sequence: Synthetic oligonucleotide
uguagacucaaagcaguuc

SEQ ID NO: 1876534 - RNA, 19 nt, Artificial Sequence
  Description of Artificial Sequence: Synthetic oligonucleotide
aguugggcaagaugugacu

SEQ ID NO: 1876535 - RNA, 19 nt, Artificial Sequence
  Description of Artificial Sequence: Synthetic oligonucleotide
ggaaacguuucuucaguug

SEQ ID NO: 1876536 - RNA, 19 nt, Artificial Sequence
  Description of Artificial Sequence: Synthetic oligonucleotide
uagaccugcauaggcagca

SEQ ID NO: 1876537 - RNA, 19 nt, Artificial Sequence
  Description of Artificial Sequence: Synthetic oligonucleotide
cuacaaauuccaaacauuu

SEQ ID NO: 1876538 - RNA, 19 nt, Artificial Sequence
  Description of Artificial Sequence: Synthetic oligonucleotide
ggaucaaaaccaaccauug

SEQ ID NO: 1876539 - RNA, 19 nt, Artificial Sequence
  Description of Artificial Sequence: Synthetic oligonucleotide
caaaaccaaccauugggga

SEQ ID NO: 1876540 - RNA, 19 nt, Artificial Sequence
  Description of Artificial Sequence: Synthetic oligonucleotide
gaacucaacgugaagugaa

SEQ ID NO: 1876541 - RNA, 19 nt, Artificial Sequence
  Description of Artificial Sequence: Synthetic oligonucleotide
caggcuuguucacaugcag

SEQ ID NO: 1876542 - RNA, 19 nt, Artificial Sequence
  Description of Artificial Sequence: Synthetic oligonucleotide
augaccucauaaacgguag

SEQ ID NO: 1876543 - RNA, 19 nt, Artificial Sequence
  Description of Artificial Sequence: Synthetic oligonucleotide
gggcauagcaggcaggggc

SEQ ID NO: 1876544 - RNA, 19 nt, Artificial Sequence
  Description of Artificial Sequence: Synthetic oligonucleotide
cacugcucuacagaggaac

SEQ ID NO: 1876545 - RNA, 19 nt, Artificial Sequence
  Description of Artificial Sequence: Synthetic oligonucleotide
gaggaacucaacgugaagu

SEQ ID NO: 1876546 - RNA, 19 nt, Artificial Sequence
  Description of Artificial Sequence: Synthetic oligonucleotide
uugucaggcuuguucacau

SEQ ID NO: 1876547 - RNA, 19 nt, Artificial Sequence
  Description of Artificial Sequence: Synthetic oligonucleotide
uggaggcuugccgagaccu

SEQ ID NO: 1876548 - RNA, 19 nt, Artificial Sequence
  Description of Artificial Sequence: Synthetic oligonucleotide
auaggcaaccacugcugca

SEQ ID NO: 1876549 - RNA, 19 nt, Artificial Sequence
  Description of Artificial Sequence: Synthetic oligonucleotide
uccccaguagggcaguauc

SEQ ID NO: 1876550 - RNA, 19 nt, Artificial Sequence
  Description of Artificial Sequence: Synthetic oligonucleotide
ggucugguugugcaggucc

SEQ ID NO: 1876551 - RNA, 19 nt, Artificial Sequence
  Description of Artificial Sequence: Synthetic oligonucleotide
uggggagcgcccauaggca

SEQ ID NO: 1876552 - RNA, 19 nt, Artificial Sequence
  Description of Artificial Sequence: Synthetic oligonucleotide
guccaaaccgccuguccag

SEQ ID NO: 1876553 - RNA, 19 nt, Artificial Sequence
  Description of Artificial Sequence: Synthetic oligonucleotide
guagggcaguaucccaagg

SEQ ID NO: 1876554 - RNA, 19 nt, Artificial Sequence
  Description of Artificial Sequence: Synthetic oligonucleotide
uuguucacaugcagaacuu

SEQ ID NO: 1876555 - RNA, 19 nt, Artificial Sequence
  Description of Artificial Sequence: Synthetic oligonucleotide
caaagcaguucuaugucaa

SEQ ID NO: 1876556 - RNA, 19 nt, Artificial Sequence
  Description of Artificial Sequence: Synthetic oligonucleotide
ugugguuaugguguccaaa

SEQ ID NO: 1876557 - RNA, 19 nt, Artificial Sequence
  Description of Artificial Sequence: Synthetic oligonucleotide
uggugccaucauuagaaau

SEQ ID NO: 1876558 - RNA, 19 nt, Artificial Sequence
  Description of Artificial Sequence: Synthetic oligonucleotide
auuggggagcgcccauagg

SEQ ID NO: 1876559 - RNA, 19 nt, Artificial Sequence
  Description of Artificial Sequence: Synthetic oligonucleotide
gccaucauuagaaauguca

SEQ ID NO: 1876560 - RNA, 19 nt, Artificial Sequence
  Description of Artificial Sequence: Synthetic oligonucleotide
aaccaaccauuggggagcg

SEQ ID NO: 1876561 - RNA, 19 nt, Artificial Sequence
  Description of Artificial Sequence: Synthetic oligonucleotide
gguaagguacucucauaug

SEQ ID NO: 1876562 - RNA, 19 nt, Artificial Sequence
  Description of Artificial Sequence: Synthetic oligonucleotide
cagggcauagcaggcaggg

SEQ ID NO: 1876563 - RNA, 19 nt, Artificial Sequence
  Description of Artificial Sequence: Synthetic oligonucleotide
gacaaggggcuccauagcu

SEQ ID NO: 1876564 - RNA, 19 nt, Artificial Sequence
  Description of Artificial Sequence: Synthetic oligonucleotide
gcaaauuuagggacaacac

SEQ ID NO: 1876565 - RNA, 19 nt, Artificial Sequence
  Description of Artificial Sequence: Synthetic oligonucleotide
cauuggggagcgcccauag

SEQ ID NO: 1876566 - RNA, 19 nt, Artificial Sequence
  Description of Artificial Sequence: Synthetic oligonucleotide
caaaccgccuguccagagc

SEQ ID NO: 1876567 - RNA, 19 nt, Artificial Sequence
  Description of Artificial Sequence: Synthetic oligonucleotide
cucuacagaggaacucaac

SEQ ID NO: 1876568 - RNA, 19 nt, Artificial Sequence
  Description of Artificial Sequence: Synthetic oligonucleotide
caaccauuggggagcgccc

SEQ ID NO: 1876569 - RNA, 19 nt, Artificial Sequence
  Description of Artificial Sequence: Synthetic oligonucleotide
guuaugguguccaaaggua

SEQ ID NO: 1876570 - RNA, 19 nt, Artificial Sequence
  Description of Artificial Sequence: Synthetic oligonucleotide
accucauaaacgguagccu

SEQ ID NO: 1876571 - RNA, 19 nt, Artificial Sequence
  Description of Artificial Sequence: Synthetic oligonucleotide
ccauucaacuguaaauaug

SEQ ID NO: 1876572 - RNA, 19 nt, Artificial Sequence
  Description of Artificial Sequence: Synthetic oligonucleotide
cuggccuccguccugugug

SEQ ID NO: 1876573 - RNA, 19 nt, Artificial Sequence
  Description of Artificial Sequence: Synthetic oligonucleotide
uguguggcccuggaauugc

SEQ ID NO: 1876574 - RNA, 19 nt, Artificial Sequence
  Description of Artificial Sequence: Synthetic oligonucleotide
gaaugguaagguacucuca

SEQ ID NO: 1876575 - RNA, 19 nt, Artificial Sequence
  Description of Artificial Sequence: Synthetic oligonucleotide
uggaaacguuucuucaguu

SEQ ID NO: 1876576 - RNA, 19 nt, Artificial Sequence
  Description of Artificial Sequence: Synthetic oligonucleotide
acaguugggcaagauguga

SEQ ID NO: 1876577 - RNA, 19 nt, Artificial Sequence
  Description of Artificial Sequence: Synthetic oligonucleotide
cacaguugggcaagaugug

SEQ ID NO: 1876578 - RNA, 19 nt, Artificial Sequence
  Description of Artificial Sequence: Synthetic oligonucleotide
uuuggcccauucaacugua

SEQ ID NO: 1876579 - RNA, 19 nt, Artificial Sequence
  Description of Artificial Sequence: Synthetic oligonucleotide
gugacugucuauugauaga

SEQ ID NO: 1876580 - RNA, 19 nt, Artificial Sequence
  Description of Artificial Sequence: Synthetic oligonucleotide
agcgcccauaggcaaccac

SEQ ID NO: 1876581 - RNA, 19 nt, Artificial Sequence
  Description of Artificial Sequence: Synthetic oligonucleotide
ucauaaacgguagccuuuu

SEQ ID NO: 1876582 - RNA, 19 nt, Artificial Sequence
  Description of Artificial Sequence: Synthetic oligonucleotide
gggguaccaugccaaaggg

SEQ ID NO: 1876583 - RNA, 19 nt, Artificial Sequence
  Description of Artificial Sequence: Synthetic oligonucleotide
ucugugugguuaugguguc

SEQ ID NO: 1876584 - RNA, 19 nt, Artificial Sequence
  Description of Artificial Sequence: Synthetic oligonucleotide
ggagacaugcuguguagac

SEQ ID NO: 1876585 - RNA, 19 nt, Artificial Sequence
  Description of Artificial Sequence: Synthetic oligonucleotide
ccgcaauaagcaaauuuag

SEQ ID NO: 1876586 - RNA, 19 nt, Artificial Sequence
  Description of Artificial Sequence: Synthetic oligonucleotide
ggagucagggcugauggcc

SEQ ID NO: 1876587 - RNA, 19 nt, Artificial Sequence
  Description of Artificial Sequence: Synthetic oligonucleotide
ugggcaagaugugacugac

SEQ ID NO: 1876588 - RNA, 19 nt, Artificial Sequence
  Description of Artificial Sequence: Synthetic oligonucleotide
cuacagaggaacucaacgu

SEQ ID NO: 1876589 - RNA, 19 nt, Artificial Sequence
  Description of Artificial Sequence: Synthetic oligonucleotide
uacucucauauggggagga

SEQ ID NO: 1876590 - RNA, 19 nt, Artificial Sequence
  Description of Artificial Sequence: Synthetic oligonucleotide
cauaauguuuucaguagau

SEQ ID NO: 1876591 - RNA, 19 nt, Artificial Sequence
  Description of Artificial Sequence: Synthetic oligonucleotide
caacgugaagugaacugca

SEQ ID NO: 1876592 - RNA, 19 nt, Artificial Sequence
  Description of Artificial Sequence: Synthetic oligonucleotide
uuuccacuugccgcaauaa

SEQ ID NO: 1876593 - RNA, 19 nt, Artificial Sequence
  Description of Artificial Sequence: Synthetic oligonucleotide
cuucucuaucccacacuug

SEQ ID NO: 1876594 - RNA, 19 nt, Artificial Sequence
  Description of Artificial Sequence: Synthetic oligonucleotide
cagcaugagaagcagaccu

SEQ ID NO: 1876595 - RNA, 19 nt, Artificial Sequence
  Description of Artificial Sequence: Synthetic oligonucleotide
gguauuccugccagguugg

SEQ ID NO: 1876596 - RNA, 19 nt, Artificial Sequence
  Description of Artificial Sequence: Synthetic oligonucleotide
caccacugcucuacagagg

SEQ ID NO: 1876597 - RNA, 19 nt, Artificial Sequence
  Description of Artificial Sequence: Synthetic oligonucleotide
gguuaugguguccaaaggu

SEQ ID NO: 1876598 - RNA, 19 nt, Artificial Sequence
  Description of Artificial Sequence: Synthetic oligonucleotide
cuauuucuacaaauuccaa

SEQ ID NO: 1876599 - RNA, 19 nt, Artificial Sequence
  Description of Artificial Sequence: Synthetic oligonucleotide
acucaacgugaagugaacu

SEQ ID NO: 1876600 - RNA, 19 nt, Artificial Sequence
  Description of Artificial Sequence: Synthetic oligonucleotide
agcucuccauucaugccgg

SEQ ID NO: 1876601 - RNA, 19 nt, Artificial Sequence
  Description of Artificial Sequence: Synthetic oligonucleotide
ugucaacauuuggaaacgu

SEQ ID NO: 1876602 - RNA, 19 nt, Artificial Sequence
  Description of Artificial Sequence: Synthetic oligonucleotide
uggagacaugcuguguaga

SEQ ID NO: 1876603 - RNA, 19 nt, Artificial Sequence
  Description of Artificial Sequence: Synthetic oligonucleotide
cuuggagucagggcugaug

SEQ ID NO: 1876604 - RNA, 19 nt, Artificial Sequence
  Description of Artificial Sequence: Synthetic oligonucleotide
ugguauuugucaggcuugu

SEQ ID NO: 1876605 - RNA, 19 nt, Artificial Sequence
  Description of Artificial Sequence: Synthetic oligonucleotide
gguugugcaggucccacac

SEQ ID NO: 1876606 - RNA, 19 nt, Artificial Sequence
  Description of Artificial Sequence: Synthetic oligonucleotide
ugucaggcuuguucacaug

SEQ ID NO: 1876607 - RNA, 19 nt, Artificial Sequence
  Description of Artificial Sequence: Synthetic oligonucleotide
gcgauauugccaucacugc

SEQ ID NO: 1876608 - RNA, 19 nt, Artificial Sequence
  Description of Artificial Sequence: Synthetic oligonucleotide
cuucucucaggucccaaga

SEQ ID NO: 1876609 - RNA, 19 nt, Artificial Sequence
  Description of Artificial Sequence: Synthetic oligonucleotide
ccaaagguagacaggugac

SEQ ID NO: 1876610 - RNA, 19 nt, Artificial Sequence
  Description of Artificial Sequence: Synthetic oligonucleotide
ucccaaggagaagaucugu

SEQ ID NO: 1876611 - RNA, 19 nt, Artificial Sequence
  Description of Artificial Sequence: Synthetic oligonucleotide
uggagucagggcugauggc

SEQ ID NO: 1876612 - RNA, 19 nt, Artificial Sequence
  Description of Artificial Sequence: Synthetic oligonucleotide
uuggugccaucauuagaaa

SEQ ID NO: 1876613 - RNA, 19 nt, Artificial Sequence
  Description of Artificial Sequence: Synthetic oligonucleotide
ggcuuguucacaugcagaa

SEQ ID NO: 1876614 - RNA, 19 nt, Artificial Sequence
  Description of Artificial Sequence: Synthetic oligonucleotide
aaccauuggggagcgccca

SEQ ID NO: 1876615 - RNA, 19 nt, Artificial Sequence
  Description of Artificial Sequence: Synthetic oligonucleotide
cucccuucucucagguccc

SEQ ID NO: 1876616 - RNA, 19 nt, Artificial Sequence
  Description of Artificial Sequence: Synthetic oligonucleotide
cuugcuucucuaucccaca

SEQ ID NO: 1876617 - RNA, 19 nt, Artificial Sequence
  Description of Artificial Sequence: Synthetic oligonucleotide
guagacaggugacugucua

SEQ ID NO: 1876618 - RNA, 19 nt, Artificial Sequence
  Description of Artificial Sequence: Synthetic oligonucleotide
agguacucucauaugggga

SEQ ID NO: 1876619 - RNA, 19 nt, Artificial Sequence
  Description of Artificial Sequence: Synthetic oligonucleotide
uauggggaggaggaucaaa

SEQ ID NO: 1876620 - RNA, 19 nt, Artificial Sequence
  Description of Artificial Sequence: Synthetic oligonucleotide
aaacguuucuucaguuguu

SEQ ID NO: 1876621 - RNA, 19 nt, Artificial Sequence
  Description of Artificial Sequence: Synthetic oligonucleotide
uguccucaggccagcugcu

SEQ ID NO: 1876622 - RNA, 19 nt, Artificial Sequence
  Description of Artificial Sequence: Synthetic oligonucleotide
gugaacugcaaggaacaga

SEQ ID NO: 1876623 - RNA, 19 nt, Artificial Sequence
  Description of Artificial Sequence: Synthetic oligonucleotide
augggguaccaugccaaag

SEQ ID NO: 1876624 - RNA, 19 nt, Artificial Sequence
  Description of Artificial Sequence: Synthetic oligonucleotide
ggagacaccacugcucuac

SEQ ID NO: 1876625 - RNA, 19 nt, Artificial Sequence
  Description of Artificial Sequence: Synthetic oligonucleotide
aacgugaagugaacugcaa

SEQ ID NO: 1876626 - RNA, 19 nt, Artificial Sequence
  Description of Artificial Sequence: Synthetic oligonucleotide
guugacaaggggcuccaua

SEQ ID NO: 1876627 - RNA, 19 nt, Artificial Sequence
  Description of Artificial Sequence: Synthetic oligonucleotide
gacuuguugcauuuucuuu

SEQ ID NO: 1876628 - RNA, 19 nt, Artificial Sequence
  Description of Artificial Sequence: Synthetic oligonucleotide
aagaugugacugacaggca

SEQ ID NO: 1876629 - RNA, 19 nt, Artificial Sequence
  Description of Artificial Sequence: Synthetic oligonucleotide
ggaugcagguauuccugcc

SEQ ID NO: 1876630 - RNA, 19 nt, Artificial Sequence
  Description of Artificial Sequence: Synthetic oligonucleotide
augguaagguacucucaua

SEQ ID NO: 1876631 - RNA, 19 nt, Artificial Sequence
  Description of Artificial Sequence: Synthetic oligonucleotide
caugcuguguagaccugca

SEQ ID NO: 1876632 - RNA, 19 nt, Artificial Sequence
  Description of Artificial Sequence: Synthetic oligonucleotide
gacaacacacagcucucgu

SEQ ID NO: 1876633 - RNA, 19 nt, Artificial Sequence
  Description of Artificial Sequence: Synthetic oligonucleotide
cuccauucaugccggcaug

SEQ ID NO: 1876634 - RNA, 19 nt, Artificial Sequence
  Description of Artificial Sequence: Synthetic oligonucleotide
ccacuugccgcaauaagca

SEQ ID NO: 1876635 - RNA, 19 nt, Artificial Sequence
  Description of Artificial Sequence: Synthetic oligonucleotide
ccauaggcaaccacugcug

SEQ ID NO: 1876636 - RNA, 19 nt, Artificial Sequence
  Description of Artificial Sequence: Synthetic oligonucleotide
caguucuaugucaacauuu

SEQ ID NO: 1876637 - RNA, 19 nt, Artificial Sequence
  Description of Artificial Sequence: Synthetic oligonucleotide
uccaaaccgccuguccaga

SEQ ID NO: 1876638 - RNA, 19 nt, Artificial Sequence
  Description of Artificial Sequence: Synthetic oligonucleotide
caaguucauuggagacacc

SEQ ID NO: 1876639 - RNA, 19 nt, Artificial Sequence
  Description of Artificial Sequence: Synthetic oligonucleotide
gccgcaauaagcaaauuua

SEQ ID NO: 1876640 - RNA, 19 nt, Artificial Sequence
  Description of Artificial Sequence: Synthetic oligonucleotide
ggacaacacacagcucucg

SEQ ID NO: 1876641 - RNA, 19 nt, Artificial Sequence
  Description of Artificial Sequence: Synthetic oligonucleotide
guagaccugcauaggcagc

SEQ ID NO: 1876642 - RNA, 19 nt, Artificial Sequence
  Description of Artificial Sequence: Synthetic oligonucleotide
cagaggaacucaacgugaa

SEQ ID NO: 1876643 - RNA, 19 nt, Artificial Sequence
  Description of Artificial Sequence: Synthetic oligonucleotide
caugccggcaugggguacc

SEQ ID NO: 1876644 - RNA, 19 nt, Artificial Sequence
  Description of Artificial Sequence: Synthetic oligonucleotide
cccaaggagaagaucugug

SEQ ID NO: 1876645 - RNA, 19 nt, Artificial Sequence
  Description of Artificial Sequence: Synthetic oligonucleotide
cuugccgcaauaagcaaau

SEQ ID NO: 1876646 - RNA, 19 nt, Artificial Sequence
  Description of Artificial Sequence: Synthetic oligonucleotide
caguagggcaguaucccaa

SEQ ID NO: 1876647 - RNA, 19 nt, Artificial Sequence
  Description of Artificial Sequence: Synthetic oligonucleotide
cuguaaauaugaagccaua

SEQ ID NO: 1876648 - RNA, 19 nt, Artificial Sequence
  Description of Artificial Sequence: Synthetic oligonucleotide
cuugguugacaaggggcuc

SEQ ID NO: 1876649 - RNA, 19 nt, Artificial Sequence
  Description of Artificial Sequence: Synthetic oligonucleotide
ccaaggagaagaucuguga

SEQ ID NO: 1876650 - RNA, 19 nt, Artificial Sequence
  Description of Artificial Sequence: Synthetic oligonucleotide
ccggcaugggguaccaugc

SEQ ID NO: 1876651 - RNA, 19 nt, Artificial Sequence
  Description of Artificial Sequence: Synthetic oligonucleotide
agcugguauuugucaggcu

SEQ ID NO: 1876652 - RNA, 19 nt, Artificial Sequence
  Description of Artificial Sequence: Synthetic oligonucleotide
guaucccaaggagaagauc

SEQ ID NO: 1876653 - RNA, 19 nt, Artificial Sequence
  Description of Artificial Sequence: Synthetic oligonucleotide
accgccuguccagagcuug

SEQ ID NO: 1876654 - RNA, 19 nt, Artificial Sequence
  Description of Artificial Sequence: Synthetic oligonucleotide
caagaccucacaguguugu

SEQ ID NO: 1876655 - RNA, 19 nt, Artificial Sequence
  Description of Artificial Sequence: Synthetic oligonucleotide
ugacaggcaguagcuugcu

SEQ ID NO: 1876656 - RNA, 19 nt, Artificial Sequence
  Description of Artificial Sequence: Synthetic oligonucleotide
uuggcccauucaacuguaa

SEQ ID NO: 1876657 - RNA, 19 nt, Artificial Sequence
  Description of Artificial Sequence: Synthetic oligonucleotide
ggaacucaacgugaaguga

SEQ ID NO: 1876658 - RNA, 19 nt, Artificial Sequence
  Description of Artificial Sequence: Synthetic oligonucleotide
acacugcgauauugccauc

SEQ ID NO: 1876659 - RNA, 19 nt, Artificial Sequence
  Description of Artificial Sequence: Synthetic oligonucleotide
uugccugaccagggucugg

SEQ ID NO: 1876660 - RNA, 19 nt, Artificial Sequence
  Description of Artificial Sequence: Synthetic oligonucleotide
gccggcaugggguaccaug

SEQ ID NO: 1876661 - RNA, 19 nt, Artificial Sequence
  Description of Artificial Sequence: Synthetic oligonucleotide
guauuccugccagguuggg

SEQ ID NO: 1876662 - RNA, 19 nt, Artificial Sequence
  Description of Artificial Sequence: Synthetic oligonucleotide
cugcggcacucaucugugg

SEQ ID NO: 1876663 - RNA, 19 nt, Artificial Sequence
  Description of Artificial Sequence: Synthetic oligonucleotide
gcggcacucaucuguggag

SEQ ID NO: 1876664 - RNA, 19 nt, Artificial Sequence
  Description of Artificial Sequence: Synthetic oligonucleotide
ccuucucucaggucccaag

SEQ ID NO: 1876665 - RNA, 19 nt, Artificial Sequence
  Description of Artificial Sequence: Synthetic oligonucleotide
cugugugguuauggugucc

SEQ ID NO: 1876666 - RNA, 19 nt, Artificial Sequence
  Description of Artificial Sequence: Synthetic oligonucleotide
cucaggucccaagaccuca

SEQ ID NO: 1876667 - RNA, 19 nt, Artificial Sequence
  Description of Artificial Sequence: Synthetic oligonucleotide
ccccaguagggcaguaucc

SEQ ID NO: 1876668 - RNA, 19 nt, Artificial Sequence
  Description of Artificial Sequence: Synthetic oligonucleotide
cagcugucucccuucucuc

SEQ ID NO: 1876669 - RNA, 19 nt, Artificial Sequence
  Description of Artificial Sequence: Synthetic oligonucleotide
ggccucugugugguuaugg

SEQ ID NO: 1876670 - RNA, 19 nt, Artificial Sequence
  Description of Artificial Sequence: Synthetic oligonucleotide
cagggguguccucaggcca

SEQ ID NO: 1876671 - RNA, 19 nt, Artificial Sequence
  Description of Artificial Sequence: Synthetic oligonucleotide
cuggaggcuugccgagacc

SEQ ID NO: 1876672 - RNA, 19 nt, Artificial Sequence
  Description of Artificial Sequence: Synthetic oligonucleotide
aggguaugggccaggcacu

SEQ ID NO: 1876673 - RNA, 19 nt, Artificial Sequence
  Description of Artificial Sequence: Synthetic oligonucleotide
augugacugacaggcagua

SEQ ID NO: 1876674 - RNA, 19 nt, Artificial Sequence
  Description of Artificial Sequence: Synthetic oligonucleotide
ggcacucaucuguggagac

SEQ ID NO: 1876675 - RNA, 19 nt, Artificial Sequence
  Description of Artificial Sequence: Synthetic oligonucleotide
cugcugcuugguugacaag

SEQ ID NO: 1876676 - RNA, 19 nt, Artificial Sequence
  Description of Artificial Sequence: Synthetic oligonucleotide
cugccagggguguccucag

SEQ ID NO: 1876677 - RNA, 19 nt, Artificial Sequence
  Description of Artificial Sequence: Synthetic oligonucleotide
gacugucuauugauagacu

SEQ ID NO: 1876678 - RNA, 19 nt, Artificial Sequence
  Description of Artificial Sequence: Synthetic oligonucleotide
ggagcgcccauaggcaacc

SEQ ID NO: 1876679 - RNA, 19 nt, Artificial Sequence
  Description of Artificial Sequence: Synthetic oligonucleotide
ccacacugcgauauugcca

SEQ ID NO: 1876680 - RNA, 19 nt, Artificial Sequence
  Description of Artificial Sequence: Synthetic oligonucleotide
cgauauugccaucacugca

SEQ ID NO: 1876681 - RNA, 19 nt, Artificial Sequence
  Description of Artificial Sequence: Synthetic oligonucleotide
cacuugccgcaauaagcaa

SEQ ID NO: 1876682 - RNA, 19 nt, Artificial Sequence
  Description of Artificial Sequence: Synthetic oligonucleotide
uggagacaccacugcucua

SEQ ID NO: 1876683 - RNA, 19 nt, Artificial Sequence
  Description of Artificial Sequence: Synthetic oligonucleotide
gcuucucuaucccacacuu

SEQ ID NO: 1876684 - RNA, 19 nt, Artificial Sequence
  Description of Artificial Sequence: Synthetic oligonucleotide
aggugacugucuauugaua

SEQ ID NO: 1876685 - RNA, 19 nt, Artificial Sequence
  Description of Artificial Sequence: Synthetic oligonucleotide
cucucguggaggugcagcu

SEQ ID NO: 1876686 - RNA, 19 nt, Artificial Sequence
  Description of Artificial Sequence: Synthetic oligonucleotide
accaaccauuggggagcgc

SEQ ID NO: 1876687 - RNA, 19 nt, Artificial Sequence
  Description of Artificial Sequence: Synthetic oligonucleotide
gucaacauuuggaaacguu

SEQ ID NO: 1876688 - RNA, 19 nt, Artificial Sequence
  Description of Artificial Sequence: Synthetic oligonucleotide
ggcaguagcuugcuucucu

SEQ ID NO: 1876689 - RNA, 19 nt, Artificial Sequence
  Description of Artificial Sequence: Synthetic oligonucleotide
ccaaaccgccuguccagag

SEQ ID NO: 1876690 - RNA, 19 nt, Artificial Sequence
  Description of Artificial Sequence: Synthetic oligonucleotide
ggaauugccugaccagggu

SEQ ID NO: 1876691 - RNA, 19 nt, Artificial Sequence
  Description of Artificial Sequence: Synthetic oligonucleotide
gauagacuuguugcauuuu

SEQ ID NO: 1876692 - RNA, 19 nt, Artificial Sequence
  Description of Artificial Sequence: Synthetic oligonucleotide
ccuccguccuguguggccc

SEQ ID NO: 1876693 - RNA, 19 nt, Artificial Sequence
  Description of Artificial Sequence: Synthetic oligonucleotide
gggcugaggaugcagguau

SEQ ID NO: 1876694 - RNA, 19 nt, Artificial Sequence
  Description of Artificial Sequence: Synthetic oligonucleotide
gggacaacacacagcucuc

SEQ ID NO: 1876695 - RNA, 19 nt, Artificial Sequence
  Description of Artificial Sequence: Synthetic oligonucleotide
ccaagaccucacaguguug

SEQ ID NO: 1876696 - RNA, 19 nt, Artificial Sequence
  Description of Artificial Sequence: Synthetic oligonucleotide
gugugguuaugguguccaa

SEQ ID NO: 1876697 - RNA, 19 nt, Artificial Sequence
  Description of Artificial Sequence: Synthetic oligonucleotide
auauggggaggaggaucaa

SEQ ID NO: 1876698 - RNA, 19 nt, Artificial Sequence
  Description of Artificial Sequence: Synthetic oligonucleotide
cugcgauauugccaucacu

SEQ ID NO: 1876699 - RNA, 19 nt, Artificial Sequence
  Description of Artificial Sequence: Synthetic oligonucleotide
ccaguagggcaguauccca

SEQ ID NO: 1876700 - RNA, 19 nt, Artificial Sequence
  Description of Artificial Sequence: Synthetic oligonucleotide
gggaaugguaagguacucu

SEQ ID NO: 1876701 - RNA, 19 nt, Artificial Sequence
  Description of Artificial Sequence: Synthetic oligonucleotide
agcucacaguugggcaaga

SEQ ID NO: 1876702 - RNA, 19 nt, Artificial Sequence
  Description of Artificial Sequence: Synthetic oligonucleotide
gguaugggccaggcacugc

SEQ ID NO: 1876703 - RNA, 19 nt, Artificial Sequence
  Description of Artificial Sequence: Synthetic oligonucleotide
gccuccguccuguguggcc

SEQ ID NO: 1876704 - RNA, 19 nt, Artificial Sequence
  Description of Artificial Sequence: Synthetic oligonucleotide
ggggaaugguaagguacuc

SEQ ID NO: 1876705 - RNA, 19 nt, Artificial Sequence
  Description of Artificial Sequence: Synthetic oligonucleotide
ggggagcgcccauaggcaa

SEQ ID NO: 1876706 - RNA, 19 nt, Artificial Sequence
  Description of Artificial Sequence: Synthetic oligonucleotide
uccguccuguguggcccug

SEQ ID NO: 1876707 - RNA, 19 nt, Artificial Sequence
  Description of Artificial Sequence: Synthetic oligonucleotide
uugccgcaauaagcaaauu

SEQ ID NO: 1876708 - RNA, 19 nt, Artificial Sequence
  Description of Artificial Sequence: Synthetic oligonucleotide
ggcccuggaauugccugac

SEQ ID NO: 1876709 - RNA, 19 nt, Artificial Sequence
  Description of Artificial Sequence: Synthetic oligonucleotide
agcuggccuccguccugug

SEQ ID NO: 1876710 - RNA, 19 nt, Artificial Sequence
  Description of Artificial Sequence: Synthetic oligonucleotide
ccucauaaacgguagccuu

SEQ ID NO: 1876711 - RNA, 19 nt, Artificial Sequence
  Description of Artificial Sequence: Synthetic oligonucleotide
guggccucugugugguuau

SEQ ID NO: 1876712 - RNA, 19 nt, Artificial Sequence
  Description of Artificial Sequence: Synthetic oligonucleotide
caguagcuugcuucucuau

SEQ ID NO: 1876713 - RNA, 19 nt, Artificial Sequence
  Description of Artificial Sequence: Synthetic oligonucleotide
gcucuacagaggaacucaa

SEQ ID NO: 1876714 - RNA, 19 nt, Artificial Sequence
  Description of Artificial Sequence: Synthetic oligonucleotide
gggagcgcccauaggcaac

SEQ ID NO: 1876715 - RNA, 19 nt, Artificial Sequence
  Description of Artificial Sequence: Synthetic oligonucleotide
cagcugcggcacucaucug

SEQ ID NO: 1876716 - RNA, 19 nt, Artificial Sequence
  Description of Artificial Sequence: Synthetic oligonucleotide
cacugccagggguguccuc

SEQ ID NO: 1876717 - RNA, 19 nt, Artificial Sequence
  Description of Artificial Sequence: Synthetic oligonucleotide
gcccuggaauugccugacc

SEQ ID NO: 1876718 - RNA, 19 nt, Artificial Sequence
  Description of Artificial Sequence: Synthetic oligonucleotide
gcgcccauaggcaaccacu

SEQ ID NO: 1876719 - RNA, 19 nt, Artificial Sequence
  Description of Artificial Sequence: Synthetic oligonucleotide
gggcaagaugugacugaca

SEQ ID NO: 1876720 - RNA, 19 nt, Artificial Sequence
  Description of Artificial Sequence: Synthetic oligonucleotide
cagguauuccugccagguu

SEQ ID NO: 1876721 - RNA, 19 nt, Artificial Sequence
  Description of Artificial Sequence: Synthetic oligonucleotide
gggguguccucaggccagc

SEQ ID NO: 1876722 - RNA, 19 nt, Artificial Sequence
  Description of Artificial Sequence: Synthetic oligonucleotide
cggcaugggguaccaugcc

SEQ ID NO: 1876723 - RNA, 19 nt, Artificial Sequence
  Description of Artificial Sequence: Synthetic oligonucleotide
gagcgcccauaggcaacca

SEQ ID NO: 1876724 - RNA, 19 nt, Artificial Sequence
  Description of Artificial Sequence: Synthetic oligonucleotide
ggccuccguccuguguggc

SEQ ID NO: 1876725 - RNA, 19 nt, Artificial Sequence
  Description of Artificial Sequence: Synthetic oligonucleotide
ccguccuguguggcccugg

SEQ ID NO: 1876726 - RNA, 19 nt, Artificial Sequence
  Description of Artificial Sequence: Synthetic oligonucleotide
ggcugauggccagggcaua

SEQ ID NO: 1876727 - RNA, 19 nt, Artificial Sequence
  Description of Artificial Sequence: Synthetic oligonucleotide
ccauuggggagcgcccaua

SEQ ID NO: 1876728 - RNA, 19 nt, Artificial Sequence
  Description of Artificial Sequence: Synthetic oligonucleotide
gcacugccagggguguccu

SEQ ID NO: 1876729 - RNA, 19 nt, Artificial Sequence
  Description of Artificial Sequence: Synthetic oligonucleotide
gguugacaaggggcuccau

SEQ ID NO: 1876730 - RNA, 19 nt, Artificial Sequence
  Description of Artificial Sequence: Synthetic oligonucleotide
ggguguccucaggccagcu

SEQ ID NO: 1876731 - RNA, 19 nt, Artificial Sequence
  Description of Artificial Sequence: Synthetic oligonucleotide
cccuucucucaggucccaa

SEQ ID NO: 1876732 - RNA, 19 nt, Artificial Sequence
  Description of Artificial Sequence: Synthetic oligonucleotide
uuugagauuauaaugaaca

SEQ ID NO: 1876733 - RNA, 19 nt, Artificial Sequence
  Description of Artificial Sequence: Synthetic oligonucleotide
gagauuauaaugaacaugg

SEQ ID NO: 1876734 - RNA, 19 nt, Artificial Sequence
  Description of Artificial Sequence: Synthetic oligonucleotide
acagaaaacgcucugaagg

SEQ ID NO: 1876735 - RNA, 19 nt, Artificial Sequence
  Description of Artificial Sequence: Synthetic oligonucleotide
ugucuagucauccucaucg

SEQ ID NO: 1876736 - RNA, 19 nt, Artificial Sequence
  Description of Artificial Sequence: Synthetic oligonucleotide
uuaaccaucucauacaaac

SEQ ID NO: 1876737 - RNA, 19 nt, Artificial Sequence
  Description of Artificial Sequence: Synthetic oligonucleotide
uuauaguacagcuagguac

SEQ ID NO: 1876738 - RNA, 19 nt, Artificial Sequence
  Description of Artificial Sequence: Synthetic oligonucleotide
aaaccaacuacuuauagua

SEQ ID NO: 1876739 - RNA, 19 nt, Artificial Sequence
  Description of Artificial Sequence: Synthetic oligonucleotide
auaaaauuccgguuuauug

SEQ ID NO: 1876740 - RNA, 19 nt, Artificial Sequence
  Description of Artificial Sequence: Synthetic oligonucleotide
acauacaucaaacaggcca

SEQ ID NO: 1876741 - RNA, 19 nt, Artificial Sequence
  Description of Artificial Sequence: Synthetic oligonucleotide
ucucauacaaaccaacuac

SEQ ID NO: 1876742 - RNA, 19 nt, Artificial Sequence
  Description of Artificial Sequence: Synthetic oligonucleotide
cauggugugguuuuggugg

SEQ ID NO: 1876743 - RNA, 19 nt, Artificial Sequence
  Description of Artificial Sequence: Synthetic oligonucleotide
ucagaaguaggacagaaaa

SEQ ID NO: 1876744 - RNA, 19 nt, Artificial Sequence
  Description of Artificial Sequence: Synthetic oligonucleotide
uaaaauuccgguuuauugu

SEQ ID NO: 1876745 - RNA, 19 nt, Artificial Sequence
  Description of Artificial Sequence: Synthetic oligonucleotide
cuacuuauaguacagcuag

SEQ ID NO: 1876746 - RNA, 19 nt, Artificial Sequence
  Description of Artificial Sequence: Synthetic oligonucleotide
uuguuucacacauacauca

SEQ ID NO: 1876747 - RNA, 19 nt, Artificial Sequence
  Description of Artificial Sequence: Synthetic oligonucleotide
aacuacuuauaguacagcu

SEQ ID NO: 1876748 - RNA, 19 nt, Artificial Sequence
  Description of Artificial Sequence: Synthetic oligonucleotide
agcaaaauaaaauuccggu

SEQ ID NO: 1876749 - RNA, 19 nt, Artificial Sequence
  Description of Artificial Sequence: Synthetic oligonucleotide
aauuccgguuuauuguugg

SEQ ID NO: 1876750 - RNA, 19 nt, Artificial Sequence
  Description of Artificial Sequence: Synthetic oligonucleotide
cacacauacaucaaacagg

SEQ ID NO: 1876751 - RNA, 19 nt, Artificial Sequence
  Description of Artificial Sequence: Synthetic oligonucleotide
uauaguacagcuagguaca

SEQ ID NO: 1876752 - RNA, 19 nt, Artificial Sequence
  Description of Artificial Sequence: Synthetic oligonucleotide
cacguuuaaauucugagac

SEQ ID NO: 1876753 - RNA, 19 nt, Artificial Sequence
  Description of Artificial Sequence: Synthetic oligonucleotide
gauuauaaugaacaugguc

SEQ ID NO: 1876754 - RNA, 19 nt, Artificial Sequence
  Description of Artificial Sequence: Synthetic oligonucleotide
uauuguuggacauuguuuc

SEQ ID NO: 1876755 - RNA, 19 nt, Artificial Sequence
  Description of Artificial Sequence: Synthetic oligonucleotide
aaugaacauggucacacca

SEQ ID NO: 1876756 - RNA, 19 nt, Artificial Sequence
  Description of Artificial Sequence: Synthetic oligonucleotide
cuuggugucaacaucauca

SEQ ID NO: 1876757 - RNA, 19 nt, Artificial Sequence
  Description of Artificial Sequence: Synthetic oligonucleotide
ucagcuacccgcuugcccg

SEQ ID NO: 1876758 - RNA, 19 nt, Artificial Sequence
  Description of Artificial Sequence: Synthetic oligonucleotide
uuucacacauacaucaaac

SEQ ID NO: 1876759 - RNA, 19 nt, Artificial Sequence
  Description of Artificial Sequence: Synthetic oligonucleotide
aaguuuagcuuuuccuuuc

SEQ ID NO: 1876760 - RNA, 19 nt, Artificial Sequence
  Description of Artificial Sequence: Synthetic oligonucleotide
uguugcaaauucauggugu

SEQ ID NO: 1876761 - RNA, 19 nt, Artificial Sequence
  Description of Artificial Sequence: Synthetic oligonucleotide
aaacaaauuuuccuuuuaa

SEQ ID NO: 1876762 - RNA, 19 nt, Artificial Sequence
  Description of Artificial Sequence: Synthetic oligonucleotide
ugagauuauaaugaacaug

SEQ ID NO: 1876763 - RNA, 19 nt, Artificial Sequence
  Description of Artificial Sequence: Synthetic oligonucleotide
uuauaaugaacauggucac

SEQ ID NO: 1876764 - RNA, 19 nt, Artificial Sequence
  Description of Artificial Sequence: Synthetic oligonucleotide
aaugcaaagauggcuuuuc

SEQ ID NO: 1876765 - RNA, 19 nt, Artificial Sequence
  Description of Artificial Sequence: Synthetic oligonucleotide
uuuuaaccaucucauacaa

SEQ ID NO: 1876766 - RNA, 19 nt, Artificial Sequence
  Description of Artificial Sequence: Synthetic oligonucleotide
gggaacaaugcaaagaugg

SEQ ID NO: 1876767 - RNA, 19 nt, Artificial Sequence
  Description of Artificial Sequence: Synthetic oligonucleotide
aaaauuccgguuuauuguu

SEQ ID NO: 1876768 - RNA, 19 nt, Artificial Sequence
  Description of Artificial Sequence: Synthetic oligonucleotide
ugagacgggaaguggaggg

SEQ ID NO: 1876769 - RNA, 19 nt, Artificial Sequence
  Description of Artificial Sequence: Synthetic oligonucleotide
accacguuuaaauucugag

SEQ ID NO: 1876770 - RNA, 19 nt, Artificial Sequence
  Description of Artificial Sequence: Synthetic oligonucleotide
cuccuuugagauuauaaug

SEQ ID NO: 1876771 - RNA, 19 nt, Artificial Sequence
  Description of Artificial Sequence: Synthetic oligonucleotide
aaagcagggccuuggaagu

SEQ ID NO: 1876772 - RNA, 19 nt, Artificial Sequence
  Description of Artificial Sequence: Synthetic oligonucleotide
ggugucaacaucaucaucc

SEQ ID NO: 1876773 - RNA, 19 nt, Artificial Sequence
  Description of Artificial Sequence: Synthetic oligonucleotide
ugaacauggucacaccaca

SEQ ID NO: 1876774 - RNA, 19 nt, Artificial Sequence
  Description of Artificial Sequence: Synthetic oligonucleotide
acaaaccaacuacuuauag

SEQ ID NO: 1876775 - RNA, 19 nt, Artificial Sequence
  Description of Artificial Sequence: Synthetic oligonucleotide
ucacccguuaucauuaaaa

SEQ ID NO: 1876776 - RNA, 19 nt, Artificial Sequence
  Description of Artificial Sequence: Synthetic oligonucleotide
acucagcaaaauaaaauuc

SEQ ID NO: 1876777 - RNA, 19 nt, Artificial Sequence
  Description of Artificial Sequence: Synthetic oligonucleotide
aguaggacagaaaacgcuc

SEQ ID NO: 1876778 - RNA, 19 nt, Artificial Sequence
  Description of Artificial Sequence: Synthetic oligonucleotide
ucuccuuugagauuauaau

SEQ ID NO: 1876779 - RNA, 19 nt, Artificial Sequence
  Description of Artificial Sequence: Synthetic oligonucleotide
uaaccaucucauacaaacc

SEQ ID NO: 1876780 - RNA, 19 nt, Artificial Sequence
  Description of Artificial Sequence: Synthetic oligonucleotide
uucuccuuugagauuauaa

SEQ ID NO: 1876781 - RNA, 19 nt, Artificial Sequence
  Description of Artificial Sequence: Synthetic oligonucleotide
acguuuaaauucugagacg

SEQ ID NO: 1876782 - RNA, 19 nt, Artificial Sequence
  Description of Artificial Sequence: Synthetic oligonucleotide
uugguggugaucucggagc

SEQ ID NO: 1876783 - RNA, 19 nt, Artificial Sequence
  Description of Artificial Sequence: Synthetic oligonucleotide
cuuugagauuauaaugaac

SEQ ID NO: 1876784 - RNA, 19 nt, Artificial Sequence
  Description of Artificial Sequence: Synthetic oligonucleotide
accaacuacuuauaguaca

SEQ ID NO: 1876785 - RNA, 19 nt, Artificial Sequence
  Description of Artificial Sequence: Synthetic oligonucleotide
ugcaaauucaugguguggu

SEQ ID NO: 1876786 - RNA, 19 nt, Artificial Sequence
  Description of Artificial Sequence: Synthetic oligonucleotide
cagaaaacgcucugaaggc

SEQ ID NO: 1876787 - RNA, 19 nt, Artificial Sequence
  Description of Artificial Sequence: Synthetic oligonucleotide
ugugguuuugguggggugg

SEQ ID NO: 1876788 - RNA, 19 nt, Artificial Sequence
  Description of Artificial Sequence: Synthetic oligonucleotide
cucaccgucgccuucuucc

SEQ ID NO: 1876789 - RNA, 19 nt, Artificial Sequence
  Description of Artificial Sequence: Synthetic oligonucleotide
uggaaugcucggaauaaga

SEQ ID NO: 1876790 - RNA, 19 nt, Artificial Sequence
  Description of Artificial Sequence: Synthetic oligonucleotide
gacaugguggggcacgccg

SEQ ID NO: 1876791 - RNA, 19 nt, Artificial Sequence
  Description of Artificial Sequence: Synthetic oligonucleotide
gacagaaaacgcucugaag

SEQ ID NO: 1876792 - RNA, 19 nt, Artificial Sequence
  Description of Artificial Sequence: Synthetic oligonucleotide
uacuuauaguacagcuagg

SEQ ID NO: 1876793 - RNA, 19 nt, Artificial Sequence
  Description of Artificial Sequence: Synthetic oligonucleotide
ucugagacgggaaguggag

SEQ ID NO: 1876794 - RNA, 19 nt, Artificial Sequence
  Description of Artificial Sequence: Synthetic oligonucleotide
aaguuacuggaaugcucgg

SEQ ID NO: 1876795 - RNA, 19 nt, Artificial Sequence
  Description of Artificial Sequence: Synthetic oligonucleotide
uccgguuuauuguuggaca

SEQ ID NO: 1876796 - RNA, 19 nt, Artificial Sequence
  Description of Artificial Sequence: Synthetic oligonucleotide
aacaaugcaaagauggcuu

SEQ ID NO: 1876797 - RNA, 19 nt, Artificial Sequence
  Description of Artificial Sequence: Synthetic oligonucleotide
aaccaacuacuuauaguac

SEQ ID NO: 1876798 - RNA, 19 nt, Artificial Sequence
  Description of Artificial Sequence: Synthetic oligonucleotide
gaaguaggacagaaaacgc

SEQ ID NO: 1876799 - RNA, 19 nt, Artificial Sequence
  Description of Artificial Sequence: Synthetic oligonucleotide
cuagucauccucaucgguc

SEQ ID NO: 1876800 - RNA, 19 nt, Artificial Sequence
  Description of Artificial Sequence: Synthetic oligonucleotide
aaggcugguuuggucaccc

SEQ ID NO: 1876801 - RNA, 19 nt, Artificial Sequence
  Description of Artificial Sequence: Synthetic oligonucleotide
aauaaaauuccgguuuauu

SEQ ID NO: 1876802 - RNA, 19 nt, Artificial Sequence
  Description of Artificial Sequence: Synthetic oligonucleotide
acuuauaguacagcuaggu

SEQ ID NO: 1876803 - RNA, 19 nt, Artificial Sequence
  Description of Artificial Sequence: Synthetic oligonucleotide
gaaguggagggugaauagg

SEQ ID NO: 1876804 - RNA, 19 nt, Artificial Sequence
  Description of Artificial Sequence: Synthetic oligonucleotide
aaauucugagacgggaagu

SEQ ID NO: 1876805 - RNA, 19 nt, Artificial Sequence
  Description of Artificial Sequence: Synthetic oligonucleotide
uucugagacgggaagugga

SEQ ID NO: 1876806 - RNA, 19 nt, Artificial Sequence
  Description of Artificial Sequence: Synthetic oligonucleotide
gaggacucuggcgagagag

SEQ ID NO: 1876807 - RNA, 19 nt, Artificial Sequence
  Description of Artificial Sequence: Synthetic oligonucleotide
aaguaggacagaaaacgcu

SEQ ID NO: 1876808 - RNA, 19 nt, Artificial Sequence
  Description of Artificial Sequence: Synthetic oligonucleotide
uugagauuauaaugaacau

SEQ ID NO: 1876809 - RNA, 19 nt, Artificial Sequence
  Description of Artificial Sequence: Synthetic oligonucleotide
aaguaaggucagaaguagg

SEQ ID NO: 1876810 - RNA, 19 nt, Artificial Sequence
  Description of Artificial Sequence: Synthetic oligonucleotide
caaguaaggucagaaguag

SEQ ID NO: 1876811 - RNA, 19 nt, Artificial Sequence
  Description of Artificial Sequence: Synthetic oligonucleotide
agcucgaggacucuggcga

SEQ ID NO: 1876812 - RNA, 19 nt, Artificial Sequence
  Description of Artificial Sequence: Synthetic oligonucleotide
aacaacucagcaaaauaaa

SEQ ID NO: 1876813 - RNA, 19 nt, Artificial Sequence
  Description of Artificial Sequence: Synthetic oligonucleotide
ucgaaggugaccacguuua

SEQ ID NO: 1876814 - RNA, 19 nt, Artificial Sequence
  Description of Artificial Sequence: Synthetic oligonucleotide
accgucgccuucuuccucc

SEQ ID NO: 1876815 - RNA, 19 nt, Artificial Sequence
  Description of Artificial Sequence: Synthetic oligonucleotide
ucauacaaaccaacuacuu

SEQ ID NO: 1876816 - RNA, 19 nt, Artificial Sequence
  Description of Artificial Sequence: Synthetic oligonucleotide
aggugcgucucuuccauuc

SEQ ID NO: 1876817 - RNA, 19 nt, Artificial Sequence
  Description of Artificial Sequence: Synthetic oligonucleotide
guugcaaauucauggugug

SEQ ID NO: 1876818 - RNA, 19 nt, Artificial Sequence
  Description of Artificial Sequence: Synthetic oligonucleotide
aguaaggucagaaguagga

SEQ ID NO: 1876819 - RNA, 19 nt, Artificial Sequence
  Description of Artificial Sequence: Synthetic oligonucleotide
ucugacaugguggggcacg

SEQ ID NO: 1876820 - RNA, 19 nt, Artificial Sequence
  Description of Artificial Sequence: Synthetic oligonucleotide
uguuggacauuguuucaca

SEQ ID NO: 1876821 - RNA, 19 nt, Artificial Sequence
  Description of Artificial Sequence: Synthetic oligonucleotide
gagcgcaugucaucugugg

SEQ ID NO: 1876822 - RNA, 19 nt, Artificial Sequence
  Description of Artificial Sequence: Synthetic oligonucleotide
uccucauuagcauuuccau

SEQ ID NO: 1876823 - RNA, 19 nt, Artificial Sequence
  Description of Artificial Sequence: Synthetic oligonucleotide
cagaaguaggacagaaaac

SEQ ID NO: 1876824 - RNA, 19 nt, Artificial Sequence
  Description of Artificial Sequence: Synthetic oligonucleotide
uggagcucgaggacucugg

SEQ ID NO: 1876825 - RNA, 19 nt, Artificial Sequence
  Description of Artificial Sequence: Synthetic oligonucleotide
agcgcaugucaucuguggg

SEQ ID NO: 1876826 - RNA, 19 nt, Artificial Sequence
  Description of Artificial Sequence: Synthetic oligonucleotide
aaaacgcucugaaggcugg

SEQ ID NO: 1876827 - RNA, 19 nt, Artificial Sequence
  Description of Artificial Sequence: Synthetic oligonucleotide
uggccuuaaguuuagcuuu

SEQ ID NO: 1876828 - RNA, 19 nt, Artificial Sequence
  Description of Artificial Sequence: Synthetic oligonucleotide
ucuagucauccucaucggu

SEQ ID NO: 1876829 - RNA, 19 nt, Artificial Sequence
  Description of Artificial Sequence: Synthetic oligonucleotide
uggagggugaauaggucac

SEQ ID NO: 1876830 - RNA, 19 nt, Artificial Sequence
  Description of Artificial Sequence: Synthetic oligonucleotide
gaaaacgcucugaaggcug

SEQ ID NO: 1876831 - RNA, 19 nt, Artificial Sequence
  Description of Artificial Sequence: Synthetic oligonucleotide
cuuaaguuuagcuuuuccu

SEQ ID NO: 1876832 - RNA, 19 nt, Artificial Sequence
  Description of Artificial Sequence: Synthetic oligonucleotide
ggugaauaggucacggugg

SEQ ID NO: 1876833 - RNA, 19 nt, Artificial Sequence
  Description of Artificial Sequence: Synthetic oligonucleotide
aucucauacaaaccaacua

SEQ ID NO: 1876834 - RNA, 19 nt, Artificial Sequence
  Description of Artificial Sequence: Synthetic oligonucleotide
aaguggagggugaauaggu

SEQ ID NO: 1876835 - RNA, 19 nt, Artificial Sequence
  Description of Artificial Sequence: Synthetic oligonucleotide
ugcuccucuacucgaaggu

SEQ ID NO: 1876836 - RNA, 19 nt, Artificial Sequence
  Description of Artificial Sequence: Synthetic oligonucleotide
uccucaucggucuucugcu

SEQ ID NO: 1876837 - RNA, 19 nt, Artificial Sequence
  Description of Artificial Sequence: Synthetic oligonucleotide
uacuggaaugcucggaaua

SEQ ID NO: 1876838 - RNA, 19 nt, Artificial Sequence
  Description of Artificial Sequence: Synthetic oligonucleotide
uacucgaaggugaccacgu

SEQ ID NO: 1876839 - RNA, 19 nt, Artificial Sequence
  Description of Artificial Sequence: Synthetic oligonucleotide
aaauaaaauuccgguuuau

SEQ ID NO: 1876840 - RNA, 19 nt, Artificial Sequence
  Description of Artificial Sequence: Synthetic oligonucleotide
uuagaacaacucagcaaaa

SEQ ID NO: 1876841 - RNA, 19 nt, Artificial Sequence
  Description of Artificial Sequence: Synthetic oligonucleotide
guuuaaauucugagacggg

SEQ ID NO: 1876842 - RNA, 19 nt, Artificial Sequence
  Description of Artificial Sequence: Synthetic oligonucleotide
gugaauaggucacgguggc

SEQ ID NO: 1876843 - RNA, 19 nt, Artificial Sequence
  Description of Artificial Sequence: Synthetic oligonucleotide
cguuuaaauucugagacgg

SEQ ID NO: 1876844 - RNA, 19 nt, Artificial Sequence
  Description of Artificial Sequence: Synthetic oligonucleotide
gagggugaauaggucacgg

SEQ ID NO: 1876845 - RNA, 19 nt, Artificial Sequence
  Description of Artificial Sequence: Synthetic oligonucleotide
uacaaaccaacuacuuaua

SEQ ID NO: 1876846 - RNA, 19 nt, Artificial Sequence
  Description of Artificial Sequence: Synthetic oligonucleotide
ggugaccacguuuaaauuc

SEQ ID NO: 1876847 - RNA, 19 nt, Artificial Sequence
  Description of Artificial Sequence: Synthetic oligonucleotide
gcuagguacauacacaaaa

SEQ ID NO: 1876848 - RNA, 19 nt, Artificial Sequence
  Description of Artificial Sequence: Synthetic oligonucleotide
gggugaauaggucacggug

SEQ ID NO: 1876849 - RNA, 19 nt, Artificial Sequence
  Description of Artificial Sequence: Synthetic oligonucleotide
uggucacccguuaucauua

SEQ ID NO: 1876850 - RNA, 19 nt, Artificial Sequence
  Description of Artificial Sequence: Synthetic oligonucleotide
aaauuccgguuuauuguug

SEQ ID NO: 1876851 - RNA, 19 nt, Artificial Sequence
  Description of Artificial Sequence: Synthetic oligonucleotide
uccccauuuuccucauuag

SEQ ID NO: 1876852 - RNA, 19 nt, Artificial Sequence
  Description of Artificial Sequence: Synthetic oligonucleotide
guuggacauuguuucacac

SEQ ID NO: 1876853 - RNA, 19 nt, Artificial Sequence
  Description of Artificial Sequence: Synthetic oligonucleotide
auucugagacgggaagugg

SEQ ID NO: 1876854 - RNA, 19 nt, Artificial Sequence
  Description of Artificial Sequence: Synthetic oligonucleotide
uggagagcgcaugucaucu

SEQ ID NO: 1876855 - RNA, 19 nt, Artificial Sequence
  Description of Artificial Sequence: Synthetic oligonucleotide
uccauuggcaggugcgucu

SEQ ID NO: 1876856 - RNA, 19 nt, Artificial Sequence
  Description of Artificial Sequence: Synthetic oligonucleotide
gagcucgaggacucuggcg

SEQ ID NO: 1876857 - RNA, 19 nt, Artificial Sequence
  Description of Artificial Sequence: Synthetic oligonucleotide
aguuuagcuuuuccuuucu

SEQ ID NO: 1876858 - RNA, 19 nt, Artificial Sequence
  Description of Artificial Sequence: Synthetic oligonucleotide
cauuagcauuuccauuggc

SEQ ID NO: 1876859 - RNA, 19 nt, Artificial Sequence
  Description of Artificial Sequence: Synthetic oligonucleotide
uccccuguugcaaauucau

SEQ ID NO: 1876860 - RNA, 19 nt, Artificial Sequence
  Description of Artificial Sequence: Synthetic oligonucleotide
uagaacaacucagcaaaau

SEQ ID NO: 1876861 - RNA, 19 nt, Artificial Sequence
  Description of Artificial Sequence: Synthetic oligonucleotide
cauacaaaccaacuacuua

SEQ ID NO: 1876862 - RNA, 19 nt, Artificial Sequence
  Description of Artificial Sequence: Synthetic oligonucleotide
cuacucgaaggugaccacg

SEQ ID NO: 1876863 - RNA, 19 nt, Artificial Sequence
  Description of Artificial Sequence: Synthetic oligonucleotide
uuccgguuuauuguuggac

SEQ ID NO: 1876864 - RNA, 19 nt, Artificial Sequence
  Description of Artificial Sequence: Synthetic oligonucleotide
acggccgcgucugacaugg

SEQ ID NO: 1876865 - RNA, 19 nt, Artificial Sequence
  Description of Artificial Sequence: Synthetic oligonucleotide
acaaguaaggucagaagua

SEQ ID NO: 1876866 - RNA, 19 nt, Artificial Sequence
  Description of Artificial Sequence: Synthetic oligonucleotide
uggcaggugcgucucuucc

SEQ ID NO: 1876867 - RNA, 19 nt, Artificial Sequence
  Description of Artificial Sequence: Synthetic oligonucleotide
gaguccgccgcggaggagg

SEQ ID NO: 1876868 - RNA, 19 nt, Artificial Sequence
  Description of Artificial Sequence: Synthetic oligonucleotide
cuggcgagagagcugccgg

SEQ ID NO: 1876869 - RNA, 19 nt, Artificial Sequence
  Description of Artificial Sequence: Synthetic oligonucleotide
guaaggucagaaguaggac

SEQ ID NO: 1876870 - RNA, 19 nt, Artificial Sequence
  Description of Artificial Sequence: Synthetic oligonucleotide
uuggucacccguuaucauu

SEQ ID NO: 1876871 - RNA, 19 nt, Artificial Sequence
  Description of Artificial Sequence: Synthetic oligonucleotide
acaacucagcaaaauaaaa

SEQ ID NO: 1876872 - RNA, 19 nt, Artificial Sequence
  Description of Artificial Sequence: Synthetic oligonucleotide
accacaaguaaggucagaa

SEQ ID NO: 1876873 - RNA, 19 nt, Artificial Sequence
  Description of Artificial Sequence: Synthetic oligonucleotide
uccucuacucgaaggugac

SEQ ID NO: 1876874 - RNA, 19 nt, Artificial Sequence
  Description of Artificial Sequence: Synthetic oligonucleotide
ggugaugcgcugcagcgag

SEQ ID NO: 1876875 - RNA, 19 nt, Artificial Sequence
  Description of Artificial Sequence: Synthetic oligonucleotide
gaauaggucacgguggccu

SEQ ID NO: 1876876 - RNA, 19 nt, Artificial Sequence
  Description of Artificial Sequence: Synthetic oligonucleotide
guuuggucacccguuauca

SEQ ID NO: 1876877 - RNA, 19 nt, Artificial Sequence
  Description of Artificial Sequence: Synthetic oligonucleotide
cucggaauaagauuguuuu

SEQ ID NO: 1876878 - RNA, 19 nt, Artificial Sequence
  Description of Artificial Sequence: Synthetic oligonucleotide
uggggcacgccggugaugc

SEQ ID NO: 1876879 - RNA, 19 nt, Artificial Sequence
  Description of Artificial Sequence: Synthetic oligonucleotide
agaaaacgcucugaaggcu

SEQ ID NO: 1876880 - RNA, 19 nt, Artificial Sequence
  Description of Artificial Sequence: Synthetic oligonucleotide
cucuacucgaaggugacca

SEQ ID NO: 1876881 - RNA, 19 nt, Artificial Sequence
  Description of Artificial Sequence: Synthetic oligonucleotide
aauaggucacgguggccuu

SEQ ID NO: 1876882 - RNA, 19 nt, Artificial Sequence
  Description of Artificial Sequence: Synthetic oligonucleotide
caacuacuuauaguacagc

SEQ ID NO: 1876883 - RNA, 19 nt, Artificial Sequence
  Description of Artificial Sequence: Synthetic oligonucleotide
acuacuuauaguacagcua

SEQ ID NO: 1876884 - RNA, 19 nt, Artificial Sequence
  Description of Artificial Sequence: Synthetic oligonucleotide
ugaccacguuuaaauucug

SEQ ID NO: 1876885 - RNA, 19 nt, Artificial Sequence
  Description of Artificial Sequence: Synthetic oligonucleotide
uuuucccuccccuguugca

SEQ ID NO: 1876886 - RNA, 19 nt, Artificial Sequence
  Description of Artificial Sequence: Synthetic oligonucleotide
caacucagcaaaauaaaau

SEQ ID NO: 1876887 - RNA, 19 nt, Artificial Sequence
  Description of Artificial Sequence: Synthetic oligonucleotide
agcgagggaggcgagaacu

SEQ ID NO: 1876888 - RNA, 19 nt, Artificial Sequence
  Description of Artificial Sequence: Synthetic oligonucleotide
ucuacucgaaggugaccac

SEQ ID NO: 1876889 - RNA, 19 nt, Artificial Sequence
  Description of Artificial Sequence: Synthetic oligonucleotide
caaaccaacuacuuauagu

SEQ ID NO: 1876890 - RNA, 19 nt, Artificial Sequence
  Description of Artificial Sequence: Synthetic oligonucleotide
acaaugcaaagauggcuuu

SEQ ID NO: 1876891 - RNA, 19 nt, Artificial Sequence
  Description of Artificial Sequence: Synthetic oligonucleotide
uuacuggaaugcucggaau

SEQ ID NO: 1876892 - RNA, 19 nt, Artificial Sequence
  Description of Artificial Sequence: Synthetic oligonucleotide
aguggagggugaauagguc

SEQ ID NO: 1876893 - RNA, 19 nt, Artificial Sequence
  Description of Artificial Sequence: Synthetic oligonucleotide
cagcuagguacauacacaa

SEQ ID NO: 1876894 - RNA, 19 nt, Artificial Sequence
  Description of Artificial Sequence: Synthetic oligonucleotide
ggagcugguguccacggcc

SEQ ID NO: 1876895 - RNA, 19 nt, Artificial Sequence
  Description of Artificial Sequence: Synthetic oligonucleotide
ggcacugcccgcuaagggc

SEQ ID NO: 1876896 - RNA, 19 nt, Artificial Sequence
  Description of Artificial Sequence: Synthetic oligonucleotide
cucauacaaaccaacuacu

SEQ ID NO: 1876897 - RNA, 19 nt, Artificial Sequence
  Description of Artificial Sequence: Synthetic oligonucleotide
cuuauaguacagcuaggua

SEQ ID NO: 1876898 - RNA, 19 nt, Artificial Sequence
  Description of Artificial Sequence: Synthetic oligonucleotide
uuuugguggggugguggag

SEQ ID NO: 1876899 - RNA, 19 nt, Artificial Sequence
  Description of Artificial Sequence: Synthetic oligonucleotide
gaaugcucggaauaagauu

SEQ ID NO: 1876900 - RNA, 19 nt, Artificial Sequence
  Description of Artificial Sequence: Synthetic oligonucleotide
uacaucaaacaggccaaaa

SEQ ID NO: 1876901 - RNA, 19 nt, Artificial Sequence
  Description of Artificial Sequence: Synthetic oligonucleotide
uggugucaacaucaucauc

SEQ ID NO: 1876902 - RNA, 19 nt, Artificial Sequence
  Description of Artificial Sequence: Synthetic oligonucleotide
gagcugguguccacggccg

SEQ ID NO: 1876903 - RNA, 19 nt, Artificial Sequence
  Description of Artificial Sequence: Synthetic oligonucleotide
aguuacuggaaugcucgga

SEQ ID NO: 1876904 - RNA, 19 nt, Artificial Sequence
  Description of Artificial Sequence: Synthetic oligonucleotide
uuuggucacccguuaucau

SEQ ID NO: 1876905 - RNA, 19 nt, Artificial Sequence
  Description of Artificial Sequence: Synthetic oligonucleotide
ucgaggacucuggcgagag

SEQ ID NO: 1876906 - RNA, 19 nt, Artificial Sequence
  Description of Artificial Sequence: Synthetic oligonucleotide
aggacagaaaacgcucuga

SEQ ID NO: 1876907 - RNA, 19 nt, Artificial Sequence
  Description of Artificial Sequence: Synthetic oligonucleotide
cugagacgggaaguggagg

SEQ ID NO: 1876908 - RNA, 19 nt, Artificial Sequence
  Description of Artificial Sequence: Synthetic oligonucleotide
cauggucacaccacaagua

SEQ ID NO: 1876909 - RNA, 19 nt, Artificial Sequence
  Description of Artificial Sequence: Synthetic oligonucleotide
cuccucuacucgaagguga

SEQ ID NO: 1876910 - RNA, 19 nt, Artificial Sequence
  Description of Artificial Sequence: Synthetic oligonucleotide
cucaucggucuucugcuuc

SEQ ID NO: 1876911 - RNA, 19 nt, Artificial Sequence
  Description of Artificial Sequence: Synthetic oligonucleotide
ugaauaggucacgguggcc

SEQ ID NO: 1876912 - RNA, 19 nt, Artificial Sequence
  Description of Artificial Sequence: Synthetic oligonucleotide
caggacccgggaacaaugc

SEQ ID NO: 1876913 - RNA, 19 nt, Artificial Sequence
  Description of Artificial Sequence: Synthetic oligonucleotide
auuccgguuuauuguugga

SEQ ID NO: 1876914 - RNA, 19 nt, Artificial Sequence
  Description of Artificial Sequence: Synthetic oligonucleotide
agggugaauaggucacggu

SEQ ID NO: 1876915 - RNA, 19 nt, Artificial Sequence
  Description of Artificial Sequence: Synthetic oligonucleotide
cugcugucuagucauccuc

SEQ ID NO: 1876916 - RNA, 19 nt, Artificial Sequence
  Description of Artificial Sequence: Synthetic oligonucleotide
ccaucucauacaaaccaac

SEQ ID NO: 1876917 - RNA, 19 nt, Artificial Sequence
  Description of Artificial Sequence: Synthetic oligonucleotide
agauuauaaugaacauggu

SEQ ID NO: 1876918 - RNA, 19 nt, Artificial Sequence
  Description of Artificial Sequence: Synthetic oligonucleotide
uccacggccgcgucugaca

SEQ ID NO: 1876919 - RNA, 19 nt, Artificial Sequence
  Description of Artificial Sequence: Synthetic oligonucleotide
gccuuggaaguuuugguuc

SEQ ID NO: 1876920 - RNA, 19 nt, Artificial Sequence
  Description of Artificial Sequence: Synthetic oligonucleotide
cuaccucauugucagccuc

SEQ ID NO: 1876921 - RNA, 19 nt, Artificial Sequence
  Description of Artificial Sequence: Synthetic oligonucleotide
gaucucggagcuggugucc

SEQ ID NO: 1876922 - RNA, 19 nt, Artificial Sequence
  Description of Artificial Sequence: Synthetic oligonucleotide
gucacgguggccuuaaguu

SEQ ID NO: 1876923 - RNA, 19 nt, Artificial Sequence
  Description of Artificial Sequence: Synthetic oligonucleotide
aggcgagaacuggagcucg

SEQ ID NO: 1876924 - RNA, 19 nt, Artificial Sequence
  Description of Artificial Sequence: Synthetic oligonucleotide
ugguuuggucacccguuau

SEQ ID NO: 1876925 - RNA, 19 nt, Artificial Sequence
  Description of Artificial Sequence: Synthetic oligonucleotide
ucaccgucgccuucuuccu

SEQ ID NO: 1876926 - RNA, 19 nt, Artificial Sequence
  Description of Artificial Sequence: Synthetic oligonucleotide
ccacaaguaaggucagaag

SEQ ID NO: 1876927 - RNA, 19 nt, Artificial Sequence
  Description of Artificial Sequence: Synthetic oligonucleotide
cucggagcugguguccacg

SEQ ID NO: 1876928 - RNA, 19 nt, Artificial Sequence
  Description of Artificial Sequence: Synthetic oligonucleotide
acccgggaacaaugcaaag

SEQ ID NO: 1876929 - RNA, 19 nt, Artificial Sequence
  Description of Artificial Sequence: Synthetic oligonucleotide
gguuuggucacccguuauc

SEQ ID NO: 1876930 - RNA, 19 nt, Artificial Sequence
  Description of Artificial Sequence: Synthetic oligonucleotide
gugaccacguuuaaauucu

SEQ ID NO: 1876931 - RNA, 19 nt, Artificial Sequence
  Description of Artificial Sequence: Synthetic oligonucleotide
gccgcgucugacauggugg

SEQ ID NO: 1876932 - RNA, 19 nt, Artificial Sequence
  Description of Artificial Sequence: Synthetic oligonucleotide
guggccuuaaguuuagcuu

SEQ ID NO: 1876933 - RNA, 19 nt, Artificial Sequence
  Description of Artificial Sequence: Synthetic oligonucleotide
gaccacguuuaaauucuga

SEQ ID NO: 1876934 - RNA, 19 nt, Artificial Sequence
  Description of Artificial Sequence: Synthetic oligonucleotide
cuacccgcuugcccguagg

SEQ ID NO: 1876935 - RNA, 19 nt, Artificial Sequence
  Description of Artificial Sequence: Synthetic oligonucleotide
accaucucauacaaaccaa

SEQ ID NO: 1876936 - RNA, 19 nt, Artificial Sequence
  Description of Artificial Sequence: Synthetic oligonucleotide
acgcucugaaggcugguuu

SEQ ID NO: 1876937 - RNA, 19 nt, Artificial Sequence
  Description of Artificial Sequence: Synthetic oligonucleotide
cugucuagucauccucauc

SEQ ID NO: 1876938 - RNA, 19 nt, Artificial Sequence
  Description of Artificial Sequence: Synthetic oligonucleotide
guggcacugcccgcuaagg

SEQ ID NO: 1876939 - RNA, 19 nt, Artificial Sequence
  Description of Artificial Sequence: Synthetic oligonucleotide
caucuaccucauugucagc

SEQ ID NO: 1876940 - RNA, 19 nt, Artificial Sequence
  Description of Artificial Sequence: Synthetic oligonucleotide
gcacugcccgcuaagggcg

SEQ ID NO: 1876941 - RNA, 19 nt, Artificial Sequence
  Description of Artificial Sequence: Synthetic oligonucleotide
gaggcgagaacuggagcuc

SEQ ID NO: 1876942 - RNA, 19 nt, Artificial Sequence
  Description of Artificial Sequence: Synthetic oligonucleotide
gugugguuuugguggggug

SEQ ID NO: 1876943 - RNA, 19 nt, Artificial Sequence
  Description of Artificial Sequence: Synthetic oligonucleotide
guggagagcgcaugucauc

SEQ ID NO: 1876944 - RNA, 19 nt, Artificial Sequence
  Description of Artificial Sequence: Synthetic oligonucleotide
gggccugcuccucuacucg

SEQ ID NO: 1876945 - RNA, 19 nt, Artificial Sequence
  Description of Artificial Sequence: Synthetic oligonucleotide
cccgcuugcccguaggagc

SEQ ID NO: 1876946 - RNA, 19 nt, Artificial Sequence
  Description of Artificial Sequence: Synthetic oligonucleotide
gaacauggucacaccacaa

SEQ ID NO: 1876947 - RNA, 19 nt, Artificial Sequence
  Description of Artificial Sequence: Synthetic oligonucleotide
uuggcaggugcgucucuuc

SEQ ID NO: 1876948 - RNA, 19 nt, Artificial Sequence
  Description of Artificial Sequence: Synthetic oligonucleotide
ugcccguaggagccucagc

SEQ ID NO: 1876949 - RNA, 19 nt, Artificial Sequence
  Description of Artificial Sequence: Synthetic oligonucleotide
uucccuccccuguugcaaa

SEQ ID NO: 1876950 - RNA, 19 nt, Artificial Sequence
  Description of Artificial Sequence: Synthetic oligonucleotide
uuccauucucugucuccuc

SEQ ID NO: 1876951 - RNA, 19 nt, Artificial Sequence
  Description of Artificial Sequence: Synthetic oligonucleotide
uuccauuggcaggugcguc

SEQ ID NO: 1876952 - RNA, 19 nt, Artificial Sequence
  Description of Artificial Sequence: Synthetic oligonucleotide
aaacgcucugaaggcuggu

SEQ ID NO: 1876953 - RNA, 19 nt, Artificial Sequence
  Description of Artificial Sequence: Synthetic oligonucleotide
gguggcacugcccgcuaag

SEQ ID NO: 1876954 - RNA, 19 nt, Artificial Sequence
  Description of Artificial Sequence: Synthetic oligonucleotide
aggcugguuuggucacccg

SEQ ID NO: 1876955 - RNA, 19 nt, Artificial Sequence
  Description of Artificial Sequence: Synthetic oligonucleotide
ggagggugaauaggucacg

SEQ ID NO: 1876956 - RNA, 19 nt, Artificial Sequence
  Description of Artificial Sequence: Synthetic oligonucleotide
ggagcucgaggacucuggc

SEQ ID NO: 1876957 - RNA, 19 nt, Artificial Sequence
  Description of Artificial Sequence: Synthetic oligonucleotide
gaacuggagcucgaggacu

SEQ ID NO: 1876958 - RNA, 19 nt, Artificial Sequence
  Description of Artificial Sequence: Synthetic oligonucleotide
agagcgcaugucaucugug

SEQ ID NO: 1876959 - RNA, 19 nt, Artificial Sequence
  Description of Artificial Sequence: Synthetic oligonucleotide
cugacaugguggggcacgc

SEQ ID NO: 1876960 - RNA, 19 nt, Artificial Sequence
  Description of Artificial Sequence: Synthetic oligonucleotide
acaccacaaguaaggucag

SEQ ID NO: 1876961 - RNA, 19 nt, Artificial Sequence
  Description of Artificial Sequence: Synthetic oligonucleotide
uaguacagcuagguacaua

SEQ ID NO: 1876962 - RNA, 19 nt, Artificial Sequence
  Description of Artificial Sequence: Synthetic oligonucleotide
acccgcuugcccguaggag

SEQ ID NO: 1876963 - RNA, 19 nt, Artificial Sequence
  Description of Artificial Sequence: Synthetic oligonucleotide
auacaucaaacaggccaaa

SEQ ID NO: 1876964 - RNA, 19 nt, Artificial Sequence
  Description of Artificial Sequence: Synthetic oligonucleotide
uugcccguaggagccucag

SEQ ID NO: 1876965 - RNA, 19 nt, Artificial Sequence
  Description of Artificial Sequence: Synthetic oligonucleotide
gucagaaguaggacagaaa

SEQ ID NO: 1876966 - RNA, 19 nt, Artificial Sequence
  Description of Artificial Sequence: Synthetic oligonucleotide
cuaagggcggggccugcuc

SEQ ID NO: 1876967 - RNA, 19 nt, Artificial Sequence
  Description of Artificial Sequence: Synthetic oligonucleotide
gggaggcgagaacuggagc

SEQ ID NO: 1876968 - RNA, 19 nt, Artificial Sequence
  Description of Artificial Sequence: Synthetic oligonucleotide
ccuuugagauuauaaugaa

SEQ ID NO: 1876969 - RNA, 19 nt, Artificial Sequence
  Description of Artificial Sequence: Synthetic oligonucleotide
guaggacagaaaacgcucu

SEQ ID NO: 1876970 - RNA, 19 nt, Artificial Sequence
  Description of Artificial Sequence: Synthetic oligonucleotide
auaguacagcuagguacau

SEQ ID NO: 1876971 - RNA, 19 nt, Artificial Sequence
  Description of Artificial Sequence: Synthetic oligonucleotide
uaggucacgguggccuuaa

SEQ ID NO: 1876972 - RNA, 19 nt, Artificial Sequence
  Description of Artificial Sequence: Synthetic oligonucleotide
aguccgccgcggaggaggc

SEQ ID NO: 1876973 - RNA, 19 nt, Artificial Sequence
  Description of Artificial Sequence: Synthetic oligonucleotide
cacugcccgcuaagggcgg

SEQ ID NO: 1876974 - RNA, 19 nt, Artificial Sequence
  Description of Artificial Sequence: Synthetic oligonucleotide
cuucagcuacccgcuugcc

SEQ ID NO: 1876975 - RNA, 19 nt, Artificial Sequence
  Description of Artificial Sequence: Synthetic oligonucleotide
ucucggagcugguguccac

SEQ ID NO: 1876976 - RNA, 19 nt, Artificial Sequence
  Description of Artificial Sequence: Synthetic oligonucleotide
ggugaucucggagcuggug

SEQ ID NO: 1876977 - RNA, 19 nt, Artificial Sequence
  Description of Artificial Sequence: Synthetic oligonucleotide
uggugaucucggagcuggu

SEQ ID NO: 1876978 - RNA, 19 nt, Artificial Sequence
  Description of Artificial Sequence: Synthetic oligonucleotide
auuggcaggugcgucucuu

SEQ ID NO: 1876979 - RNA, 19 nt, Artificial Sequence
  Description of Artificial Sequence: Synthetic oligonucleotide
gcugcagcgagggaggcga

SEQ ID NO: 1876980 - RNA, 19 nt, Artificial Sequence
  Description of Artificial Sequence: Synthetic oligonucleotide
cuggagcucgaggacucug

SEQ ID NO: 1876981 - RNA, 19 nt, Artificial Sequence
  Description of Artificial Sequence: Synthetic oligonucleotide
acucgaaggugaccacguu

SEQ ID NO: 1876982 - RNA, 19 nt, Artificial Sequence
  Description of Artificial Sequence: Synthetic oligonucleotide
ugcagcgagggaggcgaga

SEQ ID NO: 1876983 - RNA, 19 nt, Artificial Sequence
  Description of Artificial Sequence: Synthetic oligonucleotide
ccgcgucugacaugguggg

SEQ ID NO: 1876984 - RNA, 19 nt, Artificial Sequence
  Description of Artificial Sequence: Synthetic oligonucleotide
ggagagcgcaugucaucug

SEQ ID NO: 1876985 - RNA, 19 nt, Artificial Sequence
  Description of Artificial Sequence: Synthetic oligonucleotide
ccccuaacaauauguacaa

SEQ ID NO: 1876986 - RNA, 19 nt, Artificial Sequence
  Description of Artificial Sequence: Synthetic oligonucleotide
cacgccggugaugcgcugc

SEQ ID NO: 1876987 - RNA, 19 nt, Artificial Sequence
  Description of Artificial Sequence: Synthetic oligonucleotide
ccguaggagccucagcuuc

SEQ ID NO: 1876988 - RNA, 19 nt, Artificial Sequence
  Description of Artificial Sequence: Synthetic oligonucleotide
guacagcuagguacauaca

SEQ ID NO: 1876989 - RNA, 19 nt, Artificial Sequence
  Description of Artificial Sequence: Synthetic oligonucleotide
aggucagaaguaggacaga

SEQ ID NO: 1876990 - RNA, 19 nt, Artificial Sequence
  Description of Artificial Sequence: Synthetic oligonucleotide
ggcgagagagcugccggag

SEQ ID NO: 1876991 - RNA, 19 nt, Artificial Sequence
  Description of Artificial Sequence: Synthetic oligonucleotide
agcuagguacauacacaaa

SEQ ID NO: 1876992 - RNA, 19 nt, Artificial Sequence
  Description of Artificial Sequence: Synthetic oligonucleotide
gucacccguuaucauuaaa

SEQ ID NO: 1876993 - RNA, 19 nt, Artificial Sequence
  Description of Artificial Sequence: Synthetic oligonucleotide
gcccguaggagccucagcu

SEQ ID NO: 1876994 - RNA, 19 nt, Artificial Sequence
  Description of Artificial Sequence: Synthetic oligonucleotide
ugcccgcuaagggcggggc

SEQ ID NO: 1876995 - RNA, 19 nt, Artificial Sequence
  Description of Artificial Sequence: Synthetic oligonucleotide
gcuccucuacucgaaggug

SEQ ID NO: 1876996 - RNA, 19 nt, Artificial Sequence
  Description of Artificial Sequence: Synthetic oligonucleotide
gcugccggaguccgccgcg

SEQ ID NO: 1876997 - RNA, 19 nt, Artificial Sequence
  Description of Artificial Sequence: Synthetic oligonucleotide
gcugguguccacggccgcg

SEQ ID NO: 1876998 - RNA, 19 nt, Artificial Sequence
  Description of Artificial Sequence: Synthetic oligonucleotide
uguccacggccgcgucuga

SEQ ID NO: 1876999 - RNA, 19 nt, Artificial Sequence
  Description of Artificial Sequence: Synthetic oligonucleotide
ugccggaguccgccgcgga

SEQ ID NO: 1877000 - RNA, 19 nt, Artificial Sequence
  Description of Artificial Sequence: Synthetic oligonucleotide
agcagggccuuggaaguuu

SEQ ID NO: 1877001 - RNA, 19 nt, Artificial Sequence
  Description of Artificial Sequence: Synthetic oligonucleotide
gugaugcgcugcagcgagg

SEQ ID NO: 1877002 - RNA, 19 nt, Artificial Sequence
  Description of Artificial Sequence: Synthetic oligonucleotide
ggacccgggaacaaugcaa

SEQ ID NO: 1877003 - RNA, 19 nt, Artificial Sequence
  Description of Artificial Sequence: Synthetic oligonucleotide
ucccuccccuguugcaaau

SEQ ID NO: 1877004 - RNA, 19 nt, Artificial Sequence
  Description of Artificial Sequence: Synthetic oligonucleotide
ccccuguugcaaauucaug

SEQ ID NO: 1877005 - RNA, 19 nt, Artificial Sequence
  Description of Artificial Sequence: Synthetic oligonucleotide
cucgaaggugaccacguuu

SEQ ID NO: 1877006 - RNA, 19 nt, Artificial Sequence
  Description of Artificial Sequence: Synthetic oligonucleotide
aggucacgguggccuuaag

SEQ ID NO: 1877007 - RNA, 19 nt, Artificial Sequence
  Description of Artificial Sequence: Synthetic oligonucleotide
cgagcgcggagcaggaccc

SEQ ID NO: 1877008 - RNA, 19 nt, Artificial Sequence
  Description of Artificial Sequence: Synthetic oligonucleotide
cagcgagggaggcgagaac

SEQ ID NO: 1877009 - RNA, 19 nt, Artificial Sequence
  Description of Artificial Sequence: Synthetic oligonucleotide
cuugcccguaggagccuca

SEQ ID NO: 1877010 - RNA, 19 nt, Artificial Sequence
  Description of Artificial Sequence: Synthetic oligonucleotide
gcgagaacuggagcucgag

SEQ ID NO: 1877011 - RNA, 19 nt, Artificial Sequence
  Description of Artificial Sequence: Synthetic oligonucleotide
gagacgggaaguggagggu

SEQ ID NO: 1877012 - RNA, 19 nt, Artificial Sequence
  Description of Artificial Sequence: Synthetic oligonucleotide
cgcaugucaucugugggug

SEQ ID NO: 1877013 - RNA, 19 nt, Artificial Sequence
  Description of Artificial Sequence: Synthetic oligonucleotide
gggcacgccggugaugcgc

SEQ ID NO: 1877014 - RNA, 19 nt, Artificial Sequence
  Description of Artificial Sequence: Synthetic oligonucleotide
ccgggaacaaugcaaagau

SEQ ID NO: 1877015 - RNA, 19 nt, Artificial Sequence
  Description of Artificial Sequence: Synthetic oligonucleotide
ggugguggagagcgcaugu

SEQ ID NO: 1877016 - RNA, 19 nt, Artificial Sequence
  Description of Artificial Sequence: Synthetic oligonucleotide
uggguggcacugcccgcua

SEQ ID NO: 1877017 - RNA, 19 nt, Artificial Sequence
  Description of Artificial Sequence: Synthetic oligonucleotide
cugcccgcuaagggcgggg

SEQ ID NO: 1877018 - RNA, 19 nt, Artificial Sequence
  Description of Artificial Sequence: Synthetic oligonucleotide
cggagcaggacccgggaac

SEQ ID NO: 1877019 - RNA, 19 nt, Artificial Sequence
  Description of Artificial Sequence: Synthetic oligonucleotide
gcgcaugucaucugugggu

SEQ ID NO: 1877020 - RNA, 19 nt, Artificial Sequence
  Description of Artificial Sequence: Synthetic oligonucleotide
cugccggaguccgccgcgg

SEQ ID NO: 1877021 - RNA, 19 nt, Artificial Sequence
  Description of Artificial Sequence: Synthetic oligonucleotide
cugcagcgagggaggcgag

SEQ ID NO: 1877022 - RNA, 19 nt, Artificial Sequence
  Description of Artificial Sequence: Synthetic oligonucleotide
ggcugguuuggucacccgu

SEQ ID NO: 1877023 - RNA, 19 nt, Artificial Sequence
  Description of Artificial Sequence: Synthetic oligonucleotide
ggacucuggcgagagagcu

SEQ ID NO: 1877024 - RNA, 19 nt, Artificial Sequence
  Description of Artificial Sequence: Synthetic oligonucleotide
ccggaguccgccgcggagg

SEQ ID NO: 1877025 - RNA, 19 nt, Artificial Sequence
  Description of Artificial Sequence: Synthetic oligonucleotide
gcuacccgcuugcccguag

SEQ ID NO: 1877026 - RNA, 19 nt, Artificial Sequence
  Description of Artificial Sequence: Synthetic oligonucleotide
caccgucgccuucuuccuc

SEQ ID NO: 1877027 - RNA, 19 nt, Artificial Sequence
  Description of Artificial Sequence: Synthetic oligonucleotide
cacggccgcgucugacaug

SEQ ID NO: 1877028 - RNA, 19 nt, Artificial Sequence
  Description of Artificial Sequence: Synthetic oligonucleotide
gccggaguccgccgcggag

SEQ ID NO: 1877029 - RNA, 19 nt, Artificial Sequence
  Description of Artificial Sequence: Synthetic oligonucleotide
ggccugcuccucuacucga

SEQ ID NO: 1877030 - RNA, 19 nt, Artificial Sequence
  Description of Artificial Sequence: Synthetic oligonucleotide
uccucaccgucgccuucuu

SEQ ID NO: 1877031 - RNA, 19 nt, Artificial Sequence
  Description of Artificial Sequence: Synthetic oligonucleotide
cucgaggacucuggcgaga

SEQ ID NO: 1877032 - RNA, 19 nt, Artificial Sequence
  Description of Artificial Sequence: Synthetic oligonucleotide
ccucuacucgaaggugacc

SEQ ID NO: 1877033 - RNA, 19 nt, Artificial Sequence
  Description of Artificial Sequence: Synthetic oligonucleotide
gcgagggaggcgagaacug

SEQ ID NO: 1877034 - RNA, 19 nt, Artificial Sequence
  Description of Artificial Sequence: Synthetic oligonucleotide
ggugcgucucuuccauucu

SEQ ID NO: 1877035 - RNA, 19 nt, Artificial Sequence
  Description of Artificial Sequence: Synthetic oligonucleotide
gcagcgagggaggcgagaa

SEQ ID NO: 1877036 - RNA, 19 nt, Artificial Sequence
  Description of Artificial Sequence: Synthetic oligonucleotide
gcgaagguggcugcagcga

SEQ ID NO: 1877037 - RNA, 19 nt, Artificial Sequence
  Description of Artificial Sequence: Synthetic oligonucleotide
guaggagccucagcuuccu

SEQ ID NO: 1877038 - RNA, 19 nt, Artificial Sequence
  Description of Artificial Sequence: Synthetic oligonucleotide
gccgcggaggaggcgggcg

SEQ ID NO: 1877039 - RNA, 19 nt, Artificial Sequence
  Description of Artificial Sequence: Synthetic oligonucleotide
gguggagagcgcaugucau

SEQ ID NO: 1877040 - RNA, 19 nt, Artificial Sequence
  Description of Artificial Sequence: Synthetic oligonucleotide
ggucacccguuaucauuaa

SEQ ID NO: 1877041 - RNA, 19 nt, Artificial Sequence
  Description of Artificial Sequence: Synthetic oligonucleotide
gcaggugcgucucuuccau

SEQ ID NO: 1877042 - RNA, 19 nt, Artificial Sequence
  Description of Artificial Sequence: Synthetic oligonucleotide
guggggcacgccggugaug

SEQ ID NO: 1877043 - RNA, 19 nt, Artificial Sequence
  Description of Artificial Sequence: Synthetic oligonucleotide
ccucauuagcauuuccauu

SEQ ID NO: 1877044 - RNA, 19 nt, Artificial Sequence
  Description of Artificial Sequence: Synthetic oligonucleotide
gcccgcuaagggcggggcc

SEQ ID NO: 1877045 - RNA, 19 nt, Artificial Sequence
  Description of Artificial Sequence: Synthetic oligonucleotide
aggcgggcgggaggcgaag

SEQ ID NO: 1877046 - RNA, 19 nt, Artificial Sequence
  Description of Artificial Sequence: Synthetic oligonucleotide
ccgcggaggaggcgggcgg

SEQ ID NO: 1877047 - RNA, 19 nt, Artificial Sequence
  Description of Artificial Sequence: Synthetic oligonucleotide
ccgguuuauuguuggacau

SEQ ID NO: 1877048 - RNA, 19 nt, Artificial Sequence
  Description of Artificial Sequence: Synthetic oligonucleotide
cugguguccacggccgcgu

SEQ ID NO: 1877049 - RNA, 19 nt, Artificial Sequence
  Description of Artificial Sequence: Synthetic oligonucleotide
ggcgagaacuggagcucga

SEQ ID NO: 1877050 - RNA, 19 nt, Artificial Sequence
  Description of Artificial Sequence: Synthetic oligonucleotide
gcugguuuggucacccguu

SEQ ID NO: 1877051 - RNA, 19 nt, Artificial Sequence
  Description of Artificial Sequence: Synthetic oligonucleotide
ggaguccgccgcggaggag

SEQ ID NO: 1877052 - RNA, 19 nt, Artificial Sequence
  Description of Artificial Sequence: Synthetic oligonucleotide
gcgagagagcugccggagu

SEQ ID NO: 1877053 - RNA, 19 nt, Artificial Sequence
  Description of Artificial Sequence: Synthetic oligonucleotide
cagcuacccgcuugcccgu

SEQ ID NO: 1877054 - RNA, 19 nt, Artificial Sequence
  Description of Artificial Sequence: Synthetic oligonucleotide
ggccuuaaguuuagcuuuu

SEQ ID NO: 1877055 - RNA, 19 nt, Artificial Sequence
  Description of Artificial Sequence: Synthetic oligonucleotide
agcuacccgcuugcccgua

SEQ ID NO: 1877056 - RNA, 19 nt, Artificial Sequence
  Description of Artificial Sequence: Synthetic oligonucleotide
cgcgucugacauggugggg

SEQ ID NO: 1877057 - RNA, 19 nt, Artificial Sequence
  Description of Artificial Sequence: Synthetic oligonucleotide
ggguggcacugcccgcuaa

SEQ ID NO: 1877058 - RNA, 19 nt, Artificial Sequence
  Description of Artificial Sequence: Synthetic oligonucleotide
ggcacgccggugaugcgcu

SEQ ID NO: 1877059 - RNA, 19 nt, Artificial Sequence
  Description of Artificial Sequence: Synthetic oligonucleotide
cccuaacaauauguacaaa

SEQ ID NO: 1877060 - RNA, 19 nt, Artificial Sequence
  Description of Artificial Sequence: Synthetic oligonucleotide
gguggggcacgccggugau

SEQ ID NO: 1877061 - RNA, 19 nt, Artificial Sequence
  Description of Artificial Sequence: Synthetic oligonucleotide
gcacgccggugaugcgcug

SEQ ID NO: 1877062 - RNA, 19 nt, Artificial Sequence
  Description of Artificial Sequence: Synthetic oligonucleotide
ccgccgcggaggaggcggg

SEQ ID NO: 1877063 - RNA, 19 nt, Artificial Sequence
  Description of Artificial Sequence: Synthetic oligonucleotide
cgaaggugaccacguuuaa

SEQ ID NO: 1877064 - RNA, 19 nt, Artificial Sequence
  Description of Artificial Sequence: Synthetic oligonucleotide
ccgcuaagggcggggccug

SEQ ID NO: 1877065 - RNA, 19 nt, Artificial Sequence
  Description of Artificial Sequence: Synthetic oligonucleotide
caggugcgucucuuccauu

SEQ ID NO: 1877066 - RNA, 19 nt, Artificial Sequence
  Description of Artificial Sequence: Synthetic oligonucleotide
gcgggcgggaggcgaaggu

SEQ ID NO: 1877067 - RNA, 19 nt, Artificial Sequence
  Description of Artificial Sequence: Synthetic oligonucleotide
cccgcuaagggcggggccu

SEQ ID NO: 1877068 - RNA, 19 nt, Artificial Sequence
  Description of Artificial Sequence: Synthetic oligonucleotide
cggaguccgccgcggagga

SEQ ID NO: 1877069 - RNA, 19 nt, Artificial Sequence
  Description of Artificial Sequence: Synthetic oligonucleotide
gcggaggaggcgggcggga

SEQ ID NO: 1877070 - RNA, 19 nt, Artificial Sequence
  Description of Artificial Sequence: Synthetic oligonucleotide
cccguaggagccucagcuu

SEQ ID NO: 1877071 - RNA, 19 nt, Artificial Sequence
  Description of Artificial Sequence: Synthetic oligonucleotide
cggugaugcgcugcagcga

SEQ ID NO: 1877072 - RNA, 19 nt, Artificial Sequence
  Description of Artificial Sequence: Synthetic oligonucleotide
ccacggccgcgucugacau

SEQ ID NO: 1877073 - RNA, 19 nt, Artificial Sequence
  Description of Artificial Sequence: Synthetic oligonucleotide
ccucaucggucuucugcuu

SEQ ID NO: 1877074 - RNA, 19 nt, Artificial Sequence
  Description of Artificial Sequence: Synthetic oligonucleotide
cgcuaagggcggggccugc

SEQ ID NO: 1877075 - RNA, 19 nt, Artificial Sequence
  Description of Artificial Sequence: Synthetic oligonucleotide
ccgucgccuucuuccuccu

SEQ ID NO: 1877076 - RNA, 19 nt, Artificial Sequence
  Description of Artificial Sequence: Synthetic oligonucleotide
cgggaaguggagggugaau

SEQ ID NO: 1877077 - RNA, 19 nt, Artificial Sequence
  Description of Artificial Sequence: Synthetic oligonucleotide
acuaucuagggucuguucc

SEQ ID NO: 1877078 - RNA, 19 nt, Artificial Sequence
  Description of Artificial Sequence: Synthetic oligonucleotide
gaagguaugcuccaauugg

SEQ ID NO: 1877079 - RNA, 19 nt, Artificial Sequence
  Description of Artificial Sequence: Synthetic oligonucleotide
ucguacaccaacucgaagg

SEQ ID NO: 1877080 - RNA, 19 nt, Artificial Sequence
  Description of Artificial Sequence: Synthetic oligonucleotide
aaagacacccaacucagug

SEQ ID NO: 1877081 - RNA, 19 nt, Artificial Sequence
  Description of Artificial Sequence: Synthetic oligonucleotide
gacaaggagacgcagcugg

SEQ ID NO: 1877082 - RNA, 19 nt, Artificial Sequence
  Description of Artificial Sequence: Synthetic oligonucleotide
ugaucgaggaucugcagcg

SEQ ID NO: 1877083 - RNA, 19 nt, Artificial Sequence
  Description of Artificial Sequence: Synthetic oligonucleotide
ugugcagcaauccugacuc

SEQ ID NO: 1877084 - RNA, 19 nt, Artificial Sequence
  Description of Artificial Sequence: Synthetic oligonucleotide
ucuaugacaaucucccugc

SEQ ID NO: 1877085 - RNA, 19 nt, Artificial Sequence
  Description of Artificial Sequence: Synthetic oligonucleotide
uacguuccuauuuuguugg

SEQ ID NO: 1877086 - RNA, 19 nt, Artificial Sequence
  Description of Artificial Sequence: Synthetic oligonucleotide
aguagauggagguacuuag

SEQ ID NO: 1877087 - RNA, 19 nt, Artificial Sequence
  Description of Artificial Sequence: Synthetic oligonucleotide
aggccgaucacucuuuccc

SEQ ID NO: 1877088 - RNA, 19 nt, Artificial Sequence
  Description of Artificial Sequence: Synthetic oligonucleotide
agauggagguacuuagggc

SEQ ID NO: 1877089 - RNA, 19 nt, Artificial Sequence
  Description of Artificial Sequence: Synthetic oligonucleotide
aagguaugcuccaauuggc

SEQ ID NO: 1877090 - RNA, 19 nt, Artificial Sequence
  Description of Artificial Sequence: Synthetic oligonucleotide
uccguuggcaacgacacgg

SEQ ID NO: 1877091 - RNA, 19 nt, Artificial Sequence
  Description of Artificial Sequence: Synthetic oligonucleotide
gagcggaucacaccuaggg

SEQ ID NO: 1877092 - RNA, 19 nt, Artificial Sequence
  Description of Artificial Sequence: Synthetic oligonucleotide
  modified_base (9)..(9): a, c, u, g, unknown or other
agcugcuanaccccggucg

SEQ ID NO: 1877093 - RNA, 19 nt, Artificial Sequence
  Description of Artificial Sequence: Synthetic oligonucleotide
ucauguagggagcggauca

SEQ ID NO: 1877094 - RNA, 19 nt, Artificial Sequence
  Description of Artificial Sequence: Synthetic oligonucleotide
ugucccauagccagcagug

SEQ ID NO: 1877095 - RNA, 19 nt, Artificial Sequence
  Description of Artificial Sequence: Synthetic oligonucleotide
ugcacugagcccaaucgcc

SEQ ID NO: 1877096 - RNA, 19 nt, Artificial Sequence
  Description of Artificial Sequence: Synthetic oligonucleotide
ugcucguacaccaacucga

SEQ ID NO: 1877097 - RNA, 19 nt, Artificial Sequence
  Description of Artificial Sequence: Synthetic oligonucleotide
acaucaaaagcaggauucc

SEQ ID NO: 1877098 - RNA, 19 nt, Artificial Sequence
  Description of Artificial Sequence: Synthetic oligonucleotide
ucuccguuggcaacgacac

SEQ ID NO: 1877099 - RNA, 19 nt, Artificial Sequence
  Description of Artificial Sequence: Synthetic oligonucleotide
uagggagcggaucacaccu

SEQ ID NO: 1877100 - RNA, 19 nt, Artificial Sequence
  Description of Artificial Sequence: Synthetic oligonucleotide
guuggcaacgacacggucg

SEQ ID NO: 1877101 - RNA, 19 nt, Artificial Sequence
  Description of Artificial Sequence: Synthetic oligonucleotide
agcggaucacaccuagggc

SEQ ID NO: 1877102 - RNA, 19 nt, Artificial Sequence
  Description of Artificial Sequence: Synthetic oligonucleotide
gauggagguacuuagggcu

SEQ ID NO: 1877103 - RNA, 19 nt, Artificial Sequence
  Description of Artificial Sequence: Synthetic oligonucleotide
uugcgguugucucugaggu

SEQ ID NO: 1877104 - RNA, 19 nt, Artificial Sequence
  Description of Artificial Sequence: Synthetic oligonucleotide
guacguuccuauuuuguug

SEQ ID NO: 1877105 - RNA, 19 nt, Artificial Sequence
  Description of Artificial Sequence: Synthetic oligonucleotide
cuggggacuaucuaggguc

SEQ ID NO: 1877106 - RNA, 19 nt, Artificial Sequence
  Description of Artificial Sequence: Synthetic oligonucleotide
ugugucuccguuggcaacg

SEQ ID NO: 1877107 - RNA, 19 nt, Artificial Sequence
  Description of Artificial Sequence: Synthetic oligonucleotide
cuccauucaggucagucag

SEQ ID NO: 1877108 - RNA, 19 nt, Artificial Sequence
  Description of Artificial Sequence: Synthetic oligonucleotide
uuacagugggucagcacug

SEQ ID NO: 1877109 - RNA, 19 nt, Artificial Sequence
  Description of Artificial Sequence: Synthetic oligonucleotide
auuggcccaucucauguag

SEQ ID NO: 1877110 - RNA, 19 nt, Artificial Sequence
  Description of Artificial Sequence: Synthetic oligonucleotide
aacgacacggucggcuccc

SEQ ID NO: 1877111 - RNA, 19 nt, Artificial Sequence
  Description of Artificial Sequence: Synthetic oligonucleotide
acuccauucaggucaguca

SEQ ID NO: 1877112 - RNA, 19 nt, Artificial Sequence
  Description of Artificial Sequence: Synthetic oligonucleotide
uuuugcacgaaggccacca

SEQ ID NO: 1877113 - RNA, 19 nt, Artificial Sequence
  Description of Artificial Sequence: Synthetic oligonucleotide
uagaaggggauuccguggu

SEQ ID NO: 1877114 - RNA, 19 nt, Artificial Sequence
  Description of Artificial Sequence: Synthetic oligonucleotide
accggugaugaguucgugg

SEQ ID NO: 1877115 - RNA, 19 nt, Artificial Sequence
  Description of Artificial Sequence: Synthetic oligonucleotide
uguagggagcggaucacac

SEQ ID NO: 1877116 - RNA, 19 nt, Artificial Sequence
  Description of Artificial Sequence: Synthetic oligonucleotide
ggcgacaauggccaguugg

SEQ ID NO: 1877117 - RNA, 19 nt, Artificial Sequence
  Description of Artificial Sequence: Synthetic oligonucleotide
cucaaguuggaggucacag

SEQ ID NO: 1877118 - RNA, 19 nt, Artificial Sequence
  Description of Artificial Sequence: Synthetic oligonucleotide
cucgaaggcugucagccgg

SEQ ID NO: 1877119 - RNA, 19 nt, Artificial Sequence
  Description of Artificial Sequence: Synthetic oligonucleotide
cucccugguuguaaggccg

SEQ ID NO: 1877120 - RNA, 19 nt, Artificial Sequence
  Description of Artificial Sequence: Synthetic oligonucleotide
aaggagacgcagcugguuu

SEQ ID NO: 1877121 - RNA, 19 nt, Artificial Sequence
  Description of Artificial Sequence: Synthetic oligonucleotide
ugguacguuccuauuuugu

SEQ ID NO: 1877122 - RNA, 19 nt, Artificial Sequence
  Description of Artificial Sequence: Synthetic oligonucleotide
ucuggggacuaucuagggu

SEQ ID NO: 1877123 - RNA, 19 nt, Artificial Sequence
  Description of Artificial Sequence: Synthetic oligonucleotide
auggccaguugguacguuc

SEQ ID NO: 1877124 - RNA, 19 nt, Artificial Sequence
  Description of Artificial Sequence: Synthetic oligonucleotide
gccagucucaaguuggagg

SEQ ID NO: 1877125 - RNA, 19 nt, Artificial Sequence
  Description of Artificial Sequence: Synthetic oligonucleotide
cccaacucagugaugaugc

SEQ ID NO: 1877126 - RNA, 19 nt, Artificial Sequence
  Description of Artificial Sequence: Synthetic oligonucleotide
uagcggaucgcuuuccagu

SEQ ID NO: 1877127 - RNA, 19 nt, Artificial Sequence
  Description of Artificial Sequence: Synthetic oligonucleotide
agcuagucacaucugggga

SEQ ID NO: 1877128 - RNA, 19 nt, Artificial Sequence
  Description of Artificial Sequence: Synthetic oligonucleotide
gguacuuagggcugcucgg

SEQ ID NO: 1877129 - RNA, 19 nt, Artificial Sequence
  Description of Artificial Sequence: Synthetic oligonucleotide
uccucggcgaggccgauca

SEQ ID NO: 1877130 - RNA, 19 nt, Artificial Sequence
  Description of Artificial Sequence: Synthetic oligonucleotide
acacccaacucagugauga

SEQ ID NO: 1877131 - RNA, 19 nt, Artificial Sequence
  Description of Artificial Sequence: Synthetic oligonucleotide
acggucggcucccacuacc

SEQ ID NO: 1877132 - RNA, 19 nt, Artificial Sequence
  Description of Artificial Sequence: Synthetic oligonucleotide
gcugcacugagcccaaucg

SEQ ID NO: 1877133 - RNA, 19 nt, Artificial Sequence
  Description of Artificial Sequence: Synthetic oligonucleotide
aguugguacguuccuauuu

SEQ ID NO: 1877134 - RNA, 19 nt, Artificial Sequence
  Description of Artificial Sequence: Synthetic oligonucleotide
guagauggagguacuuagg

SEQ ID NO: 1877135 - RNA, 19 nt, Artificial Sequence
  Description of Artificial Sequence: Synthetic oligonucleotide
uggccaguugguacguucc

SEQ ID NO: 1877136 - RNA, 19 nt, Artificial Sequence
  Description of Artificial Sequence: Synthetic oligonucleotide
gacgcagcugguuuugcac

SEQ ID NO: 1877137 - RNA, 19 nt, Artificial Sequence
  Description of Artificial Sequence: Synthetic oligonucleotide
  modified_base (6)..(6): a, c, u, g, unknown or other
ugcuanaccccggucgugc

SEQ ID NO: 1877138 - RNA, 19 nt, Artificial Sequence
  Description of Artificial Sequence: Synthetic oligonucleotide
ucugcucguacaccaacuc

SEQ ID NO: 1877139 - RNA, 19 nt, Artificial Sequence
  Description of Artificial Sequence: Synthetic oligonucleotide
uacuuagggcugcucggag

SEQ ID NO: 1877140 - RNA, 19 nt, Artificial Sequence
  Description of Artificial Sequence: Synthetic oligonucleotide
aucucgagcggcacgggcc

SEQ ID NO: 1877141 - RNA, 19 nt, Artificial Sequence
  Description of Artificial Sequence: Synthetic oligonucleotide
cuggcggcgacaaggagac

SEQ ID NO: 1877142 - RNA, 19 nt, Artificial Sequence
  Description of Artificial Sequence: Synthetic oligonucleotide
guaugcuccaauuggccca

SEQ ID NO: 1877143 - RNA, 19 nt, Artificial Sequence
  Description of Artificial Sequence: Synthetic oligonucleotide
cucgguggcacccucgcgc

SEQ ID NO: 1877144 - RNA, 19 nt, Artificial Sequence
  Description of Artificial Sequence: Synthetic oligonucleotide
uugguacguuccuauuuug

SEQ ID NO: 1877145 - RNA, 19 nt, Artificial Sequence
  Description of Artificial Sequence: Synthetic oligonucleotide
ugguuguaaggccgggucu

SEQ ID NO: 1877146 - RNA, 19 nt, Artificial Sequence
  Description of Artificial Sequence: Synthetic oligonucleotide
gaaggggauuccguggugc

SEQ ID NO: 1877147 - RNA, 19 nt, Artificial Sequence
  Description of Artificial Sequence: Synthetic oligonucleotide
cuugccaccccugggauug

SEQ ID NO: 1877148 - RNA, 19 nt, Artificial Sequence
  Description of Artificial Sequence: Synthetic oligonucleotide
auuccguggugcuuggcga

SEQ ID NO: 1877149 - RNA, 19 nt, Artificial Sequence
  Description of Artificial Sequence: Synthetic oligonucleotide
aucgaggaucugcagcgag

SEQ ID NO: 1877150 - RNA, 19 nt, Artificial Sequence
  Description of Artificial Sequence: Synthetic oligonucleotide
uuugcacgaaggccaccag

SEQ ID NO: 1877151 - RNA, 19 nt, Artificial Sequence
  Description of Artificial Sequence: Synthetic oligonucleotide
gaggcagcccaccacgcgc

SEQ ID NO: 1877152 - RNA, 19 nt, Artificial Sequence
  Description of Artificial Sequence: Synthetic oligonucleotide
uguaaggccgggucucugu

SEQ ID NO: 1877153 - RNA, 19 nt, Artificial Sequence
  Description of Artificial Sequence: Synthetic oligonucleotide
aauuggcccaucucaugua

SEQ ID NO: 1877154 - RNA, 19 nt, Artificial Sequence
  Description of Artificial Sequence: Synthetic oligonucleotide
agucucaaguuggagguca

SEQ ID NO: 1877155 - RNA, 19 nt, Artificial Sequence
  Description of Artificial Sequence: Synthetic oligonucleotide
  modified_base (11)..(11): a, c, u, g, unknown or other
acagcugcuanaccccggu

SEQ ID NO: 1877156 - RNA, 19 nt, Artificial Sequence
  Description of Artificial Sequence: Synthetic oligonucleotide
uccauucaggucagucagc

SEQ ID NO: 1877157 - RNA, 19 nt, Artificial Sequence
  Description of Artificial Sequence: Synthetic oligonucleotide
ggaaucugcucguacacca

SEQ ID NO: 1877158 - RNA, 19 nt, Artificial Sequence
  Description of Artificial Sequence: Synthetic oligonucleotide
  modified_base (16)..(16): a, c, u, g, unknown or other
cuaccacagcugcuanacc

SEQ ID NO: 1877159 - RNA, 19 nt, Artificial Sequence
  Description of Artificial Sequence: Synthetic oligonucleotide
agagccagcuagucacauc

SEQ ID NO: 1877160 - RNA, 19 nt, Artificial Sequence
  Description of Artificial Sequence: Synthetic oligonucleotide
acucgaaggcugucagccg

SEQ ID NO: 1877161 - RNA, 19 nt, Artificial Sequence
  Description of Artificial Sequence: Synthetic oligonucleotide
cucccacuaccacagcugc

SEQ ID NO: 1877162 - RNA, 19 nt, Artificial Sequence
  Description of Artificial Sequence: Synthetic oligonucleotide
ugcuccaauuggcccaucu

SEQ ID NO: 1877163 - RNA, 19 nt, Artificial Sequence
  Description of Artificial Sequence: Synthetic oligonucleotide
ugagaguagcaggaaucug

SEQ ID NO: 1877164 - RNA, 19 nt, Artificial Sequence
  Description of Artificial Sequence: Synthetic oligonucleotide
gcugguuuugcacgaaggc

SEQ ID NO: 1877165 - RNA, 19 nt, Artificial Sequence
  Description of Artificial Sequence: Synthetic oligonucleotide
cacucuuucccgcacgguc

SEQ ID NO: 1877166 - RNA, 19 nt, Artificial Sequence
  Description of Artificial Sequence: Synthetic oligonucleotide
guagggagcggaucacacc

SEQ ID NO: 1877167 - RNA, 19 nt, Artificial Sequence
  Description of Artificial Sequence: Synthetic oligonucleotide
gcccaucucauguagggag

SEQ ID NO: 1877168 - RNA, 19 nt, Artificial Sequence
  Description of Artificial Sequence: Synthetic oligonucleotide
ccggugaugaguucguggg

SEQ ID NO: 1877169 - RNA, 19 nt, Artificial Sequence
  Description of Artificial Sequence: Synthetic oligonucleotide
guagcggaucgcuuuccag

SEQ ID NO: 1877170 - RNA, 19 nt, Artificial Sequence
  Description of Artificial Sequence: Synthetic oligonucleotide
gaucucgagcggcacgggc

SEQ ID NO: 1877171 - RNA, 19 nt, Artificial Sequence
  Description of Artificial Sequence: Synthetic oligonucleotide
gcacgggccauguugacag

SEQ ID NO: 1877172 - RNA, 19 nt, Artificial Sequence
  Description of Artificial Sequence: Synthetic oligonucleotide
uagggcguuccucuaugac

SEQ ID NO: 1877173 - RNA, 19 nt, Artificial Sequence
  Description of Artificial Sequence: Synthetic oligonucleotide
gagcaccgguguuacagug

SEQ ID NO: 1877174 - RNA, 19 nt, Artificial Sequence
  Description of Artificial Sequence: Synthetic oligonucleotide
uggggacuaucuagggucu

SEQ ID NO: 1877175 - RNA, 19 nt, Artificial Sequence
  Description of Artificial Sequence: Synthetic oligonucleotide
gacuaucuagggucuguuc

SEQ ID NO: 1877176 - RNA, 19 nt, Artificial Sequence
  Description of Artificial Sequence: Synthetic oligonucleotide
  modified_base (4)..(4): a, c, u, g, unknown or other
cuanaccccggucgugccc

SEQ ID NO: 1877177 - RNA, 19 nt, Artificial Sequence
  Description of Artificial Sequence: Synthetic oligonucleotide
  modified_base (3)..(3): a, c, u, g, unknown or other
uanaccccggucgugcccu

SEQ ID NO: 1877178 - RNA, 19 nt, Artificial Sequence
  Description of Artificial Sequence: Synthetic oligonucleotide
acaggagagccagcuaguc

SEQ ID NO: 1877179 - RNA, 19 nt, Artificial Sequence
  Description of Artificial Sequence: Synthetic oligonucleotide
aaucgccucguagcggcag

SEQ ID NO: 1877180 - RNA, 19 nt, Artificial Sequence
  Description of Artificial Sequence: Synthetic oligonucleotide
acagugggucagcacuguc

SEQ ID NO: 1877181 - RNA, 19 nt, Artificial Sequence
  Description of Artificial Sequence: Synthetic oligonucleotide
ucuacaggagagccagcua

SEQ ID NO: 1877182 - RNA, 19 nt, Artificial Sequence
  Description of Artificial Sequence: Synthetic oligonucleotide
caaucucccugccagucuc

SEQ ID NO: 1877183 - RNA, 19 nt, Artificial Sequence
  Description of Artificial Sequence: Synthetic oligonucleotide
cacguagaaggggauuccg

SEQ ID NO: 1877184 - RNA, 19 nt, Artificial Sequence
  Description of Artificial Sequence: Synthetic oligonucleotide
acccaacucagugaugaug

SEQ ID NO: 1877185 - RNA, 19 nt, Artificial Sequence
  Description of Artificial Sequence: Synthetic oligonucleotide
cuaugacaaucucccugcc

SEQ ID NO: 1877186 - RNA, 19 nt, Artificial Sequence
  Description of Artificial Sequence: Synthetic oligonucleotide
ggugcuuggcgacaauggc

SEQ ID NO: 1877187 - RNA, 19 nt, Artificial Sequence
  Description of Artificial Sequence: Synthetic oligonucleotide
gcaccgguguuacaguggg

SEQ ID NO: 1877188 - RNA, 19 nt, Artificial Sequence
  Description of Artificial Sequence: Synthetic oligonucleotide
aguagcggaucgcuuucca

SEQ ID NO: 1877189 - RNA, 19 nt, Artificial Sequence
  Description of Artificial Sequence: Synthetic oligonucleotide
gacaaucucccugccaguc

SEQ ID NO: 1877190 - RNA, 19 nt, Artificial Sequence
  Description of Artificial Sequence: Synthetic oligonucleotide
ccagcuagucacaucuggg

SEQ ID NO: 1877191 - RNA, 19 nt, Artificial Sequence
  Description of Artificial Sequence: Synthetic oligonucleotide
gcuagucacaucuggggac

SEQ ID NO: 1877192 - RNA, 19 nt, Artificial Sequence
  Description of Artificial Sequence: Synthetic oligonucleotide
gaggccgaucacucuuucc

SEQ ID NO: 1877193 - RNA, 19 nt, Artificial Sequence
  Description of Artificial Sequence: Synthetic oligonucleotide
ugagguccuucuccaacau

SEQ ID NO: 1877194 - RNA, 19 nt, Artificial Sequence
  Description of Artificial Sequence: Synthetic oligonucleotide
uggcgggcucccaaguccc

SEQ ID NO: 1877195 - RNA, 19 nt, Artificial Sequence
  Description of Artificial Sequence: Synthetic oligonucleotide
ugcugcacugagcccaauc

SEQ ID NO: 1877196 - RNA, 19 nt, Artificial Sequence
  Description of Artificial Sequence: Synthetic oligonucleotide
cucguacaccaacucgaag

SEQ ID NO: 1877197 - RNA, 19 nt, Artificial Sequence
  Description of Artificial Sequence: Synthetic oligonucleotide
agagcaccgguguuacagu

SEQ ID NO: 1877198 - RNA, 19 nt, Artificial Sequence
  Description of Artificial Sequence: Synthetic oligonucleotide
guaaggccgggucucugug

SEQ ID NO: 1877199 - RNA, 19 nt, Artificial Sequence
  Description of Artificial Sequence: Synthetic oligonucleotide
caacucgaaggcugucagc

SEQ ID NO: 1877200 - RNA, 19 nt, Artificial Sequence
  Description of Artificial Sequence: Synthetic oligonucleotide
ccaaucgccucguagcggc

SEQ ID NO: 1877201 - RNA, 19 nt, Artificial Sequence
  Description of Artificial Sequence: Synthetic oligonucleotide
ggucuguuccucugaguag

SEQ ID NO: 1877202 - RNA, 19 nt, Artificial Sequence
  Description of Artificial Sequence: Synthetic oligonucleotide
ugucaccuugccaccccug

SEQ ID NO: 1877203 - RNA, 19 nt, Artificial Sequence
  Description of Artificial Sequence: Synthetic oligonucleotide
gagguggcgggcucccaag

SEQ ID NO: 1877204 - RNA, 19 nt, Artificial Sequence
  Description of Artificial Sequence: Synthetic oligonucleotide
acgcgagccagaucucgag

SEQ ID NO: 1877205 - RNA, 19 nt, Artificial Sequence
  Description of Artificial Sequence: Synthetic oligonucleotide
agcaccgguguuacagugg

SEQ ID NO: 1877206 - RNA, 19 nt, Artificial Sequence
  Description of Artificial Sequence: Synthetic oligonucleotide
ugggauuggucugcuccag

SEQ ID NO: 1877207 - RNA, 19 nt, Artificial Sequence
  Description of Artificial Sequence: Synthetic oligonucleotide
accaacucgaaggcuguca

SEQ ID NO: 1877208 - RNA, 19 nt, Artificial Sequence
  Description of Artificial Sequence: Synthetic oligonucleotide
cagugggucagcacuguca

SEQ ID NO: 1877209 - RNA, 19 nt, Artificial Sequence
  Description of Artificial Sequence: Synthetic oligonucleotide
agcgagcccggggaguagc

SEQ ID NO: 1877210 - RNA, 19 nt, Artificial Sequence
  Description of Artificial Sequence: Synthetic oligonucleotide
guugacagcggugggccug

SEQ ID NO: 1877211 - RNA, 19 nt, Artificial Sequence
  Description of Artificial Sequence: Synthetic oligonucleotide
ggccgaucacucuuucccg

SEQ ID NO: 1877212 - RNA, 19 nt, Artificial Sequence
  Description of Artificial Sequence: Synthetic oligonucleotide
uaucuagggucuguuccuc

SEQ ID NO: 1877213 - RNA, 19 nt, Artificial Sequence
  Description of Artificial Sequence: Synthetic oligonucleotide
uccccgauguugcgguugu

SEQ ID NO: 1877214 - RNA, 19 nt, Artificial Sequence
  Description of Artificial Sequence: Synthetic oligonucleotide
uuggcgacaauggccaguu

SEQ ID NO: 1877215 - RNA, 19 nt, Artificial Sequence
  Description of Artificial Sequence: Synthetic oligonucleotide
caauuggcccaucucaugu

SEQ ID NO: 1877216 - RNA, 19 nt, Artificial Sequence
  Description of Artificial Sequence: Synthetic oligonucleotide
agcugaucgaggaucugca

SEQ ID NO: 1877217 - RNA, 19 nt, Artificial Sequence
  Description of Artificial Sequence: Synthetic oligonucleotide
ucucaaguuggaggucaca

SEQ ID NO: 1877218 - RNA, 19 nt, Artificial Sequence
  Description of Artificial Sequence: Synthetic oligonucleotide
ggcggcgacaaggagacgc

SEQ ID NO: 1877219 - RNA, 19 nt, Artificial Sequence
  Description of Artificial Sequence: Synthetic oligonucleotide
caucucauguagggagcgg

SEQ ID NO: 1877220 - RNA, 19 nt, Artificial Sequence
  Description of Artificial Sequence: Synthetic oligonucleotide
cccaaguccccgauguugc

SEQ ID NO: 1877221 - RNA, 19 nt, Artificial Sequence
  Description of Artificial Sequence: Synthetic oligonucleotide
caacgacacggucggcucc

SEQ ID NO: 1877222 - RNA, 19 nt, Artificial Sequence
  Description of Artificial Sequence: Synthetic oligonucleotide
gaguagauggagguacuua

SEQ ID NO: 1877223 - RNA, 19 nt, Artificial Sequence
  Description of Artificial Sequence: Synthetic oligonucleotide
guugguacguuccuauuuu

SEQ ID NO: 1877224 - RNA, 19 nt, Artificial Sequence
  Description of Artificial Sequence: Synthetic oligonucleotide
gccaccggugaugaguucg

SEQ ID NO: 1877225 - RNA, 19 nt, Artificial Sequence
  Description of Artificial Sequence: Synthetic oligonucleotide
gaggaucugcagcgagccc

SEQ ID NO: 1877226 - RNA, 19 nt, Artificial Sequence
  Description of Artificial Sequence: Synthetic oligonucleotide
gggucuguuccucugagua

SEQ ID NO: 1877227 - RNA, 19 nt, Artificial Sequence
  Description of Artificial Sequence: Synthetic oligonucleotide
cuaucuagggucuguuccu

SEQ ID NO: 1877228 - RNA, 19 nt, Artificial Sequence
  Description of Artificial Sequence: Synthetic oligonucleotide
cugugucuccguuggcaac

SEQ ID NO: 1877229 - RNA, 19 nt, Artificial Sequence
  Description of Artificial Sequence: Synthetic oligonucleotide
guggcuagagcaccggugu

SEQ ID NO: 1877230 - RNA, 19 nt, Artificial Sequence
  Description of Artificial Sequence: Synthetic oligonucleotide
ugaguagauggagguacuu

SEQ ID NO: 1877231 - RNA, 19 nt, Artificial Sequence
  Description of Artificial Sequence: Synthetic oligonucleotide
gcccaaucgccucguagcg

SEQ ID NO: 1877232 - RNA, 19 nt, Artificial Sequence
  Description of Artificial Sequence: Synthetic oligonucleotide
cuuagggcugcucggagcu

SEQ ID NO: 1877233 - RNA, 19 nt, Artificial Sequence
  Description of Artificial Sequence: Synthetic oligonucleotide
ccaacucgaaggcugucag

SEQ ID NO: 1877234 - RNA, 19 nt, Artificial Sequence
  Description of Artificial Sequence: Synthetic oligonucleotide
uguugacagcggugggccu

SEQ ID NO: 1877235 - RNA, 19 nt, Artificial Sequence
  Description of Artificial Sequence: Synthetic oligonucleotide
cauguagggagcggaucac

SEQ ID NO: 1877236 - RNA, 19 nt, Artificial Sequence
  Description of Artificial Sequence: Synthetic oligonucleotide
cucguagcggcagugcuca

SEQ ID NO: 1877237 - RNA, 19 nt, Artificial Sequence
  Description of Artificial Sequence: Synthetic oligonucleotide
gaguagcggaucgcuuucc

SEQ ID NO: 1877238 - RNA, 19 nt, Artificial Sequence
  Description of Artificial Sequence: Synthetic oligonucleotide
acacggucggcucccacua

SEQ ID NO: 1877239 - RNA, 19 nt, Artificial Sequence
  Description of Artificial Sequence: Synthetic oligonucleotide
cacugagcccaaucgccuc

SEQ ID NO: 1877240 - RNA, 19 nt, Artificial Sequence
  Description of Artificial Sequence: Synthetic oligonucleotide
aggagacgcagcugguuuu

SEQ ID NO: 1877241 - RNA, 19 nt, Artificial Sequence
  Description of Artificial Sequence: Synthetic oligonucleotide
ggggauuccguggugcuug

SEQ ID NO: 1877242 - RNA, 19 nt, Artificial Sequence
  Description of Artificial Sequence: Synthetic oligonucleotide
ggucacaggaugagcuggg

SEQ ID NO: 1877243 - RNA, 19 nt, Artificial Sequence
  Description of Artificial Sequence: Synthetic oligonucleotide
uuguaaggccgggucucug

SEQ ID NO: 1877244 - RNA, 19 nt, Artificial Sequence
  Description of Artificial Sequence: Synthetic oligonucleotide
ugcagaagguaugcuccaa

SEQ ID NO: 1877245 - RNA, 19 nt, Artificial Sequence
  Description of Artificial Sequence: Synthetic oligonucleotide
auguagggagcggaucaca

SEQ ID NO: 1877246 - RNA, 19 nt, Artificial Sequence
  Description of Artificial Sequence: Synthetic oligonucleotide
gcggaucacaccuagggcu

SEQ ID NO: 1877247 - RNA, 19 nt, Artificial Sequence
  Description of Artificial Sequence: Synthetic oligonucleotide
gcugaucgaggaucugcag

SEQ ID NO: 1877248 - RNA, 19 nt, Artificial Sequence
  Description of Artificial Sequence: Synthetic oligonucleotide
guacuuagggcugcucgga

SEQ ID NO: 1877249 - RNA, 19 nt, Artificial Sequence
  Description of Artificial Sequence: Synthetic oligonucleotide
acguagaaggggauuccgu

SEQ ID NO: 1877250 - RNA, 19 nt, Artificial Sequence
  Description of Artificial Sequence: Synthetic oligonucleotide
ugcgguugucucugagguc

SEQ ID NO: 1877251 - RNA, 19 nt, Artificial Sequence
  Description of Artificial Sequence: Synthetic oligonucleotide
cuccguuggcaacgacacg

SEQ ID NO: 1877252 - RNA, 19 nt, Artificial Sequence
  Description of Artificial Sequence: Synthetic oligonucleotide
agcuccacggccaggcuga

SEQ ID NO: 1877253 - RNA, 19 nt, Artificial Sequence
  Description of Artificial Sequence: Synthetic oligonucleotide
gcuagggcguuccucuaug

SEQ ID NO: 1877254 - RNA, 19 nt, Artificial Sequence
  Description of Artificial Sequence: Synthetic oligonucleotide
  modified_base (5)..(5): a, c, u, g, unknown or other
gcuanaccccggucgugcc

SEQ ID NO: 1877255 - RNA, 19 nt, Artificial Sequence
  Description of Artificial Sequence: Synthetic oligonucleotide
cuggcuagggcguuccucu

SEQ ID NO: 1877256 - RNA, 19 nt, Artificial Sequence
  Description of Artificial Sequence: Synthetic oligonucleotide
  modified_base (13)..(13): a, c, u, g, unknown or other
ccacagcugcuanaccccg

SEQ ID NO: 1877257 - RNA, 19 nt, Artificial Sequence
  Description of Artificial Sequence: Synthetic oligonucleotide
agaucucgagcggcacggg

SEQ ID NO: 1877258 - RNA, 19 nt, Artificial Sequence
  Description of Artificial Sequence: Synthetic oligonucleotide
gauggcggggcgccgcgca

SEQ ID NO: 1877259 - RNA, 19 nt, Artificial Sequence
  Description of Artificial Sequence: Synthetic oligonucleotide
gccgaucacucuuucccgc

SEQ ID NO: 1877260 - RNA, 19 nt, Artificial Sequence
  Description of Artificial Sequence: Synthetic oligonucleotide
gguuguaaggccgggucuc

SEQ ID NO: 1877261 - RNA, 19 nt, Artificial Sequence
  Description of Artificial Sequence: Synthetic oligonucleotide
gcgcggauggccucccugg

SEQ ID NO: 1877262 - RNA, 19 nt, Artificial Sequence
  Description of Artificial Sequence: Synthetic oligonucleotide
ggaguagcggaucgcuuuc

SEQ ID NO: 1877263 - RNA, 19 nt, Artificial Sequence
  Description of Artificial Sequence: Synthetic oligonucleotide
  modified_base (2)..(2): a, c, u, g, unknown or other
anaccccggucgugcccug

SEQ ID NO: 1877264 - RNA, 19 nt, Artificial Sequence
  Description of Artificial Sequence: Synthetic oligonucleotide
gucagucagcuccuggcua

SEQ ID NO: 1877265 - RNA, 19 nt, Artificial Sequence
  Description of Artificial Sequence: Synthetic oligonucleotide
ccaucucauguagggagcg

SEQ ID NO: 1877266 - RNA, 19 nt, Artificial Sequence
  Description of Artificial Sequence: Synthetic oligonucleotide
cuagggcguuccucuauga

SEQ ID NO: 1877267 - RNA, 19 nt, Artificial Sequence
  Description of Artificial Sequence: Synthetic oligonucleotide
acaccaacucgaaggcugu

SEQ ID NO: 1877268 - RNA, 19 nt, Artificial Sequence
  Description of Artificial Sequence: Synthetic oligonucleotide
gucgugcccuggcagcggc

SEQ ID NO: 1877269 - RNA, 19 nt, Artificial Sequence
  Description of Artificial Sequence: Synthetic oligonucleotide
gucuacaggagagccagcu

SEQ ID NO: 1877270 - RNA, 19 nt, Artificial Sequence
  Description of Artificial Sequence: Synthetic oligonucleotide
ggaucugcagcgagcccgg

SEQ ID NO: 1877271 - RNA, 19 nt, Artificial Sequence
  Description of Artificial Sequence: Synthetic oligonucleotide
aucgccucguagcggcagu

SEQ ID NO: 1877272 - RNA, 19 nt, Artificial Sequence
  Description of Artificial Sequence: Synthetic oligonucleotide
  modified_base (10)..(10): a, c, u, g, unknown or other
cagcugcuanaccccgguc

SEQ ID NO: 1877273 - RNA, 19 nt, Artificial Sequence
  Description of Artificial Sequence: Synthetic oligonucleotide
ccaacauguccucggcgag

SEQ ID NO: 1877274 - RNA, 19 nt, Artificial Sequence
  Description of Artificial Sequence: Synthetic oligonucleotide
gcuagagcaccgguguuac

SEQ ID NO: 1877275 - RNA, 19 nt, Artificial Sequence
  Description of Artificial Sequence: Synthetic oligonucleotide
auggcggggcgccgcgcac

SEQ ID NO: 1877276 - RNA, 19 nt, Artificial Sequence
  Description of Artificial Sequence: Synthetic oligonucleotide
gguacguuccuauuuuguu

SEQ ID NO: 1877277 - RNA, 19 nt, Artificial Sequence
  Description of Artificial Sequence: Synthetic oligonucleotide
guuuugcacgaaggccacc

SEQ ID NO: 1877278 - RNA, 19 nt, Artificial Sequence
  Description of Artificial Sequence: Synthetic oligonucleotide
gcagccacguagaagggga

SEQ ID NO: 1877279 - RNA, 19 nt, Artificial Sequence
  Description of Artificial Sequence: Synthetic oligonucleotide
caggauuccaaaccuggau

SEQ ID NO: 1877280 - RNA, 19 nt, Artificial Sequence
  Description of Artificial Sequence: Synthetic oligonucleotide
uccguggugcuuggcgaca

SEQ ID NO: 1877281 - RNA, 19 nt, Artificial Sequence
  Description of Artificial Sequence: Synthetic oligonucleotide
ccaacucagugaugaugcc

SEQ ID NO: 1877282 - RNA, 19 nt, Artificial Sequence
  Description of Artificial Sequence: Synthetic oligonucleotide
gcaacgacacggucggcuc

SEQ ID NO: 1877283 - RNA, 19 nt, Artificial Sequence
  Description of Artificial Sequence: Synthetic oligonucleotide
ggcgacaaggagacgcagc

SEQ ID NO: 1877284 - RNA, 19 nt, Artificial Sequence
  Description of Artificial Sequence: Synthetic oligonucleotide
gaucgaggaucugcagcga

SEQ ID NO: 1877285 - RNA, 19 nt, Artificial Sequence
  Description of Artificial Sequence: Synthetic oligonucleotide
cugugcagcaauccugacu

SEQ ID NO: 1877286 - RNA, 19 nt, Artificial Sequence
  Description of Artificial Sequence: Synthetic oligonucleotide
  modified_base (7)..(7): a, c, u, g, unknown or other
cugcuanaccccggucgug

SEQ ID NO: 1877287 - RNA, 19 nt, Artificial Sequence
  Description of Artificial Sequence: Synthetic oligonucleotide
uggcuagagcaccgguguu

SEQ ID NO: 1877288 - RNA, 19 nt, Artificial Sequence
  Description of Artificial Sequence: Synthetic oligonucleotide
ugcagcgagcccggggagu

SEQ ID NO: 1877289 - RNA, 19 nt, Artificial Sequence
  Description of Artificial Sequence: Synthetic oligonucleotide
gggauuccguggugcuugg

SEQ ID NO: 1877290 - RNA, 19 nt, Artificial Sequence
  Description of Artificial Sequence: Synthetic oligonucleotide
gcuccaauuggcccaucuc

SEQ ID NO: 1877291 - RNA, 19 nt, Artificial Sequence
  Description of Artificial Sequence: Synthetic oligonucleotide
ggagacgcagcugguuuug

SEQ ID NO: 1877292 - RNA, 19 nt, Artificial Sequence
  Description of Artificial Sequence: Synthetic oligonucleotide
uggcgacaauggccaguug

SEQ ID NO: 1877293 - RNA, 19 nt, Artificial Sequence
  Description of Artificial Sequence: Synthetic oligonucleotide
cacgcgagccagaucucga

SEQ ID NO: 1877294 - RNA, 19 nt, Artificial Sequence
  Description of Artificial Sequence: Synthetic oligonucleotide
aauggccaguugguacguu

SEQ ID NO: 1877295 - RNA, 19 nt, Artificial Sequence
  Description of Artificial Sequence: Synthetic oligonucleotide
uggauucccugugcagcaa

SEQ ID NO: 1877296 - RNA, 19 nt, Artificial Sequence
  Description of Artificial Sequence: Synthetic oligonucleotide
ccaccacgcgcgauggcgg

SEQ ID NO: 1877297 - RNA, 19 nt, Artificial Sequence
  Description of Artificial Sequence: Synthetic oligonucleotide
cuagucacaucuggggacu

SEQ ID NO: 1877298 - RNA, 19 nt, Artificial Sequence
  Description of Artificial Sequence: Synthetic oligonucleotide
ggagcggaucacaccuagg

SEQ ID NO: 1877299 - RNA, 19 nt, Artificial Sequence
  Description of Artificial Sequence: Synthetic oligonucleotide
ucgccucguagcggcagug

SEQ ID NO: 1877300 - RNA, 19 nt, Artificial Sequence
  Description of Artificial Sequence: Synthetic oligonucleotide
ggcugugucuccguuggca

SEQ ID NO: 1877301 - RNA, 19 nt, Artificial Sequence
  Description of Artificial Sequence: Synthetic oligonucleotide
ucgagcggcacgggccaug

SEQ ID NO: 1877302 - RNA, 19 nt, Artificial Sequence
  Description of Artificial Sequence: Synthetic oligonucleotide
  modified_base (8)..(8): a, c, u, g, unknown or other
gcugcuanaccccggucgu

SEQ ID NO: 1877303 - RNA, 19 nt, Artificial Sequence
  Description of Artificial Sequence: Synthetic oligonucleotide
cugcagcgagcccggggag

SEQ ID NO: 1877304 - RNA, 19 nt, Artificial Sequence
  Description of Artificial Sequence: Synthetic oligonucleotide
ugagcccaaucgccucgua

SEQ ID NO: 1877305 - RNA, 19 nt, Artificial Sequence
  Description of Artificial Sequence: Synthetic oligonucleotide
agccgggcucccugguugu

SEQ ID NO: 1877306 - RNA, 19 nt, Artificial Sequence
  Description of Artificial Sequence: Synthetic oligonucleotide
gaaggcugucagccgggcu

SEQ ID NO: 1877307 - RNA, 19 nt, Artificial Sequence
  Description of Artificial Sequence: Synthetic oligonucleotide
cugucccauagccagcagu

SEQ ID NO: 1877308 - RNA, 19 nt, Artificial Sequence
  Description of Artificial Sequence: Synthetic oligonucleotide
accacgcgcgauggcgggg

SEQ ID NO: 1877309 - RNA, 19 nt, Artificial Sequence
  Description of Artificial Sequence: Synthetic oligonucleotide
cagucucaaguuggagguc

SEQ ID NO: 1877310 - RNA, 19 nt, Artificial Sequence
  Description of Artificial Sequence: Synthetic oligonucleotide
cccggggaguagcggaucg

SEQ ID NO: 1877311 - RNA, 19 nt, Artificial Sequence
  Description of Artificial Sequence: Synthetic oligonucleotide
caggggcaaagacacccaa

SEQ ID NO: 1877312 - RNA, 19 nt, Artificial Sequence
  Description of Artificial Sequence: Synthetic oligonucleotide
ucgugcccuggcagcggcu

SEQ ID NO: 1877313 - RNA, 19 nt, Artificial Sequence
  Description of Artificial Sequence: Synthetic oligonucleotide
uugccaccccugggauugg

SEQ ID NO: 1877314 - RNA, 19 nt, Artificial Sequence
  Description of Artificial Sequence: Synthetic oligonucleotide
ggcgcggauggccucccug

SEQ ID NO: 1877315 - RNA, 19 nt, Artificial Sequence
  Description of Artificial Sequence: Synthetic oligonucleotide
gcguuccucuaugacaauc

SEQ ID NO: 1877316 - RNA, 19 nt, Artificial Sequence
  Description of Artificial Sequence: Synthetic oligonucleotide
cagugaugaugccaccggu

SEQ ID NO: 1877317 - RNA, 19 nt, Artificial Sequence
  Description of Artificial Sequence: Synthetic oligonucleotide
ccacgcgagccagaucucg

SEQ ID NO: 1877318 - RNA, 19 nt, Artificial Sequence
  Description of Artificial Sequence: Synthetic oligonucleotide
cuagagcaccgguguuaca

SEQ ID NO: 1877319 - RNA, 19 nt, Artificial Sequence
  Description of Artificial Sequence: Synthetic oligonucleotide
ccgcgcaccucauggcgcg

SEQ ID NO: 1877320 - RNA, 19 nt, Artificial Sequence
  Description of Artificial Sequence: Synthetic oligonucleotide
cacggucggcucccacuac

SEQ ID NO: 1877321 - RNA, 19 nt, Artificial Sequence
  Description of Artificial Sequence: Synthetic oligonucleotide
cccaaucgccucguagcgg

SEQ ID NO: 1877322 - RNA, 19 nt, Artificial Sequence
  Description of Artificial Sequence: Synthetic oligonucleotide
gggaguagcggaucgcuuu

SEQ ID NO: 1877323 - RNA, 19 nt, Artificial Sequence
  Description of Artificial Sequence: Synthetic oligonucleotide
cucugagguccuucuccaa

SEQ ID NO: 1877324 - RNA, 19 nt, Artificial Sequence
  Description of Artificial Sequence: Synthetic oligonucleotide
ccggucgugcccuggcagc

SEQ ID NO: 1877325 - RNA, 19 nt, Artificial Sequence
  Description of Artificial Sequence: Synthetic oligonucleotide
cacccucgcgcuccgccuc

SEQ ID NO: 1877326 - RNA, 19 nt, Artificial Sequence
  Description of Artificial Sequence: Synthetic oligonucleotide
cacgcgcgauggcggggcg

SEQ ID NO: 1877327 - RNA, 19 nt, Artificial Sequence
  Description of Artificial Sequence: Synthetic oligonucleotide
gcuuggcgacaauggccag

SEQ ID NO: 1877328 - RNA, 19 nt, Artificial Sequence
  Description of Artificial Sequence: Synthetic oligonucleotide
caccggugaugaguucgug

SEQ ID NO: 1877329 - RNA, 19 nt, Artificial Sequence
  Description of Artificial Sequence: Synthetic oligonucleotide
ggcaacgacacggucggcu

SEQ ID NO: 1877330 - RNA, 19 nt, Artificial Sequence
  Description of Artificial Sequence: Synthetic oligonucleotide
cgguguuacagugggucag

SEQ ID NO: 1877331 - RNA, 19 nt, Artificial Sequence
  Description of Artificial Sequence: Synthetic oligonucleotide
ggucgugcccuggcagcgg

SEQ ID NO: 1877332 - RNA, 19 nt, Artificial Sequence
  Description of Artificial Sequence: Synthetic oligonucleotide
cuuggcgacaauggccagu

SEQ ID NO: 1877333 - RNA, 19 nt, Artificial Sequence
  Description of Artificial Sequence: Synthetic oligonucleotide
gagagccagcuagucacau

SEQ ID NO: 1877334 - RNA, 19 nt, Artificial Sequence
  Description of Artificial Sequence: Synthetic oligonucleotide
caccaacucgaaggcuguc

SEQ ID NO: 1877335 - RNA, 19 nt, Artificial Sequence
  Description of Artificial Sequence: Synthetic oligonucleotide
gcgggcucccaaguccccg

SEQ ID NO: 1877336 - RNA, 19 nt, Artificial Sequence
  Description of Artificial Sequence: Synthetic oligonucleotide
gcgauggcggggcgccgcg

SEQ ID NO: 1877337 - RNA, 19 nt, Artificial Sequence
  Description of Artificial Sequence: Synthetic oligonucleotide
ccaguugguacguuccuau

SEQ ID NO: 1877338 - RNA, 19 nt, Artificial Sequence
  Description of Artificial Sequence: Synthetic oligonucleotide
uggcaacgacacggucggc

SEQ ID NO: 1877339 - RNA, 19 nt, Artificial Sequence
  Description of Artificial Sequence: Synthetic oligonucleotide
cgccgcgcaccucauggcg

SEQ ID NO: 1877340 - RNA, 19 nt, Artificial Sequence
  Description of Artificial Sequence: Synthetic oligonucleotide
ggggacuaucuagggucug

SEQ ID NO: 1877341 - RNA, 19 nt, Artificial Sequence
  Description of Artificial Sequence: Synthetic oligonucleotide
uggcggcgacaaggagacg

SEQ ID NO: 1877342 - RNA, 19 nt, Artificial Sequence
  Description of Artificial Sequence: Synthetic oligonucleotide
ggagagccagcuagucaca

SEQ ID NO: 1877343 - RNA, 19 nt, Artificial Sequence
  Description of Artificial Sequence: Synthetic oligonucleotide
ccuggcuagggcguuccuc

SEQ ID NO: 1877344 - RNA, 19 nt, Artificial Sequence
  Description of Artificial Sequence: Synthetic oligonucleotide
cucggcgaggccgaucacu

SEQ ID NO: 1877345 - RNA, 19 nt, Artificial Sequence
  Description of Artificial Sequence: Synthetic oligonucleotide
gccgcgcaccucauggcgc

SEQ ID NO: 1877346 - RNA, 19 nt, Artificial Sequence
  Description of Artificial Sequence: Synthetic oligonucleotide
gcucguacaccaacucgaa

SEQ ID NO: 1877347 - RNA, 19 nt, Artificial Sequence
  Description of Artificial Sequence: Synthetic oligonucleotide
gccagaucucgagcggcac

SEQ ID NO: 1877348 - RNA, 19 nt, Artificial Sequence
  Description of Artificial Sequence: Synthetic oligonucleotide
gcgagcccggggaguagcg

SEQ ID NO: 1877349 - RNA, 19 nt, Artificial Sequence
  Description of Artificial Sequence: Synthetic oligonucleotide
gggacuaucuagggucugu

SEQ ID NO: 1877350 - RNA, 19 nt, Artificial Sequence
  Description of Artificial Sequence: Synthetic oligonucleotide
gcggcacgggccauguuga

SEQ ID NO: 1877351 - RNA, 19 nt, Artificial Sequence
  Description of Artificial Sequence: Synthetic oligonucleotide
agcccggggaguagcggau

SEQ ID NO: 1877352 - RNA, 19 nt, Artificial Sequence
  Description of Artificial Sequence: Synthetic oligonucleotide
cagcggcugccaugcuguc

SEQ ID NO: 1877353 - RNA, 19 nt, Artificial Sequence
  Description of Artificial Sequence: Synthetic oligonucleotide
ggcgaggccgaucacucuu

SEQ ID NO: 1877354 - RNA, 19 nt, Artificial Sequence
  Description of Artificial Sequence: Synthetic oligonucleotide
caguugguacguuccuauu

SEQ ID NO: 1877355 - RNA, 19 nt, Artificial Sequence
  Description of Artificial Sequence: Synthetic oligonucleotide
cagcgagcccggggaguag

SEQ ID NO: 1877356 - RNA, 19 nt, Artificial Sequence
  Description of Artificial Sequence: Synthetic oligonucleotide
ccacgcgcgauggcggggc

SEQ ID NO: 1877357 - RNA, 19 nt, Artificial Sequence
  Description of Artificial Sequence: Synthetic oligonucleotide
agggagcggaucacaccua

SEQ ID NO: 1877358 - RNA, 19 nt, Artificial Sequence
  Description of Artificial Sequence: Synthetic oligonucleotide
ggccaguugguacguuccu

SEQ ID NO: 1877359 - RNA, 19 nt, Artificial Sequence
  Description of Artificial Sequence: Synthetic oligonucleotide
cguuggcaacgacacgguc

SEQ ID NO: 1877360 - RNA, 19 nt, Artificial Sequence
  Description of Artificial Sequence: Synthetic oligonucleotide
gcacugagcccaaucgccu

SEQ ID NO: 1877361 - RNA, 19 nt, Artificial Sequence
  Description of Artificial Sequence: Synthetic oligonucleotide
caaggagacgcagcugguu

SEQ ID NO: 1877362 - RNA, 19 nt, Artificial Sequence
  Description of Artificial Sequence: Synthetic oligonucleotide
gcggcgacaaggagacgca

SEQ ID NO: 1877363 - RNA, 19 nt, Artificial Sequence
  Description of Artificial Sequence: Synthetic oligonucleotide
gccaguugguacguuccua

SEQ ID NO: 1877364 - RNA, 19 nt, Artificial Sequence
  Description of Artificial Sequence: Synthetic oligonucleotide
acgacacggucggcuccca

SEQ ID NO: 1877365 - RNA, 19 nt, Artificial Sequence
  Description of Artificial Sequence: Synthetic oligonucleotide
ggccuggcggcgacaagga

SEQ ID NO: 1877366 - RNA, 19 nt, Artificial Sequence
  Description of Artificial Sequence: Synthetic oligonucleotide
gucagccgggcucccuggu

SEQ ID NO: 1877367 - RNA, 19 nt, Artificial Sequence
  Description of Artificial Sequence: Synthetic oligonucleotide
ccgcccgcagcuccacggc

SEQ ID NO: 1877368 - RNA, 19 nt, Artificial Sequence
  Description of Artificial Sequence: Synthetic oligonucleotide
cggucgugcccuggcagcg

SEQ ID NO: 1877369 - RNA, 19 nt, Artificial Sequence
  Description of Artificial Sequence: Synthetic oligonucleotide
ggcuagggcguuccucuau

SEQ ID NO: 1877370 - RNA, 19 nt, Artificial Sequence
  Description of Artificial Sequence: Synthetic oligonucleotide
ggacuaucuagggucuguu

SEQ ID NO: 1877371 - RNA, 19 nt, Artificial Sequence
  Description of Artificial Sequence: Synthetic oligonucleotide
ccggggaguagcggaucgc

SEQ ID NO: 1877372 - RNA, 19 nt, Artificial Sequence
  Description of Artificial Sequence: Synthetic oligonucleotide
ccgggucucugugcagaag

SEQ ID NO: 1877373 - RNA, 19 nt, Artificial Sequence
  Description of Artificial Sequence: Synthetic oligonucleotide
gcagcgagcccggggagua

SEQ ID NO: 1877374 - RNA, 19 nt, Artificial Sequence
  Description of Artificial Sequence: Synthetic oligonucleotide
cagccacguagaaggggau

SEQ ID NO: 1877375 - RNA, 19 nt, Artificial Sequence
  Description of Artificial Sequence: Synthetic oligonucleotide
cgagcccggggaguagcgg

SEQ ID NO: 1877376 - RNA, 19 nt, Artificial Sequence
  Description of Artificial Sequence: Synthetic oligonucleotide
ggcgggcucccaagucccc

SEQ ID NO: 1877377 - RNA, 19 nt, Artificial Sequence
  Description of Artificial Sequence: Synthetic oligonucleotide
cugagcccaaucgccucgu

SEQ ID NO: 1877378 - RNA, 19 nt, Artificial Sequence
  Description of Artificial Sequence: Synthetic oligonucleotide
ggaucacaccuagggcugu

SEQ ID NO: 1877379 - RNA, 19 nt, Artificial Sequence
  Description of Artificial Sequence: Synthetic oligonucleotide
caccgguguuacagugggu

SEQ ID NO: 1877380 - RNA, 19 nt, Artificial Sequence
  Description of Artificial Sequence: Synthetic oligonucleotide
ccgccuccugggcugccac

SEQ ID NO: 1877381 - RNA, 19 nt, Artificial Sequence
  Description of Artificial Sequence: Synthetic oligonucleotide
gcuccuggcuagggcguuc

SEQ ID NO: 1877382 - RNA, 19 nt, Artificial Sequence
  Description of Artificial Sequence: Synthetic oligonucleotide
cgccucguagcggcagugc

SEQ ID NO: 1877383 - RNA, 19 nt, Artificial Sequence
  Description of Artificial Sequence: Synthetic oligonucleotide
cguuccuauuuuguuggcu

SEQ ID NO: 1877384 - RNA, 19 nt, Artificial Sequence
  Description of Artificial Sequence: Synthetic oligonucleotide
cucccaaguccccgauguu

SEQ ID NO: 1877385 - RNA, 19 nt, Artificial Sequence
  Description of Artificial Sequence: Synthetic oligonucleotide
ccguuggcaacgacacggu

SEQ ID NO: 1877386 - RNA, 19 nt, Artificial Sequence
  Description of Artificial Sequence: Synthetic oligonucleotide
gcgcaccucauggcgcgga

SEQ ID NO: 1877387 - RNA, 19 nt, Artificial Sequence
  Description of Artificial Sequence: Synthetic oligonucleotide
cgacacggucggcucccac

SEQ ID NO: 1877388 - RNA, 19 nt, Artificial Sequence
  Description of Artificial Sequence: Synthetic oligonucleotide
gcccggggaguagcggauc

SEQ ID NO: 1877389 - RNA, 19 nt, Artificial Sequence
  Description of Artificial Sequence: Synthetic oligonucleotide
ccucggcgaggccgaucac

SEQ ID NO: 1877390 - RNA, 19 nt, Artificial Sequence
  Description of Artificial Sequence: Synthetic oligonucleotide
ggggaguagcggaucgcuu

SEQ ID NO: 1877391 - RNA, 19 nt, Artificial Sequence
  Description of Artificial Sequence: Synthetic oligonucleotide
ggcggggcgccgcgcaccu

SEQ ID NO: 1877392 - RNA, 19 nt, Artificial Sequence
  Description of Artificial Sequence: Synthetic oligonucleotide
ccccggucgugcccuggca

SEQ ID NO: 1877393 - RNA, 19 nt, Artificial Sequence
  Description of Artificial Sequence: Synthetic oligonucleotide
cggggaguagcggaucgcu

SEQ ID NO: 1877394 - RNA, 19 nt, Artificial Sequence
  Description of Artificial Sequence: Synthetic oligonucleotide
gcgaggccgaucacucuuu

SEQ ID NO: 1877395 - RNA, 19 nt, Artificial Sequence
  Description of Artificial Sequence: Synthetic oligonucleotide
ccccgauguugcgguuguc

SEQ ID NO: 1877396 - RNA, 19 nt, Artificial Sequence
  Description of Artificial Sequence: Synthetic oligonucleotide
gccgggcucccugguugua

SEQ ID NO: 1877397 - RNA, 19 nt, Artificial Sequence
  Description of Artificial Sequence: Synthetic oligonucleotide
cgcaccucauggcgcggau

SEQ ID NO: 1877398 - RNA, 19 nt, Artificial Sequence
  Description of Artificial Sequence: Synthetic oligonucleotide
  modified_base (1)..(1): a, c, u, g, unknown or other
naccccggucgugcccugg

SEQ ID NO: 1877399 - RNA, 19 nt, Artificial Sequence
  Description of Artificial Sequence: Synthetic oligonucleotide
aacagcauaauccuucagg

SEQ ID NO: 1877400 - RNA, 19 nt, Artificial Sequence
  Description of Artificial Sequence: Synthetic oligonucleotide
aauccuguuggccacaggg

SEQ ID NO: 1877401 - RNA, 19 nt, Artificial Sequence
  Description of Artificial Sequence: Synthetic oligonucleotide
acaacuaugcaggagaugc

SEQ ID NO: 1877402 - RNA, 19 nt, Artificial Sequence
  Description of Artificial Sequence: Synthetic oligonucleotide
ucauccguaacaaagagcu

SEQ ID NO: 1877403 - RNA, 19 nt, Artificial Sequence
  Description of Artificial Sequence: Synthetic oligonucleotide
uuucauagcgaugagaaag

SEQ ID NO: 1877404 - RNA, 19 nt, Artificial Sequence
  Description of Artificial Sequence: Synthetic oligonucleotide
aaagaugacagaaguaucg

SEQ ID NO: 1877405 - RNA, 19 nt, Artificial Sequence
  Description of Artificial Sequence: Synthetic oligonucleotide
aaagcauucauccguaaca

SEQ ID NO: 1877406 - RNA, 19 nt, Artificial Sequence
  Description of Artificial Sequence: Synthetic oligonucleotide
agcauaauccuucagguag

SEQ ID NO: 1877407 - RNA, 19 nt, Artificial Sequence
  Description of Artificial Sequence: Synthetic oligonucleotide
augacagaaguaucgaggc

SEQ ID NO: 1877408 - RNA, 19 nt, Artificial Sequence
  Description of Artificial Sequence: Synthetic oligonucleotide
ucaacaacuaugcaggaga

SEQ ID NO: 1877409 - RNA, 19 nt, Artificial Sequence
  Description of Artificial Sequence: Synthetic oligonucleotide
aauugaagcaugagcagcc

SEQ ID NO: 1877410 - RNA, 19 nt, Artificial Sequence
  Description of Artificial Sequence: Synthetic oligonucleotide
aaagccugguugcagauag

SEQ ID NO: 1877411 - RNA, 19 nt, Artificial Sequence
  Description of Artificial Sequence: Synthetic oligonucleotide
agaugucugacucaccacc

SEQ ID NO: 1877412 - RNA, 19 nt, Artificial Sequence
  Description of Artificial Sequence: Synthetic oligonucleotide
gaggcaaccagccuggugg

SEQ ID NO: 1877413 - RNA, 19 nt, Artificial Sequence
  Description of Artificial Sequence: Synthetic oligonucleotide
ucuguucguacguagaucc

SEQ ID NO: 1877414 - RNA, 19 nt, Artificial Sequence
  Description of Artificial Sequence: Synthetic oligonucleotide
guaacaaagagcuuggcca

SEQ ID NO: 1877415 - RNA, 19 nt, Artificial Sequence
  Description of Artificial Sequence: Synthetic oligonucleotide
guuguggaugcuuauauag

SEQ ID NO: 1877416 - RNA, 19 nt, Artificial Sequence
  Description of Artificial Sequence: Synthetic oligonucleotide
gaugagaaagcccuguccc

SEQ ID NO: 1877417 - RNA, 19 nt, Artificial Sequence
  Description of Artificial Sequence: Synthetic oligonucleotide
gaugacagaaguaucgagg

SEQ ID NO: 1877418 - RNA, 19 nt, Artificial Sequence
  Description of Artificial Sequence: Synthetic oligonucleotide
cauauugggagccauuucc

SEQ ID NO: 1877419 - RNA, 19 nt, Artificial Sequence
  Description of Artificial Sequence: Synthetic oligonucleotide
uggguaaggacaauugaag

SEQ ID NO: 1877420 - RNA, 19 nt, Artificial Sequence
  Description of Artificial Sequence: Synthetic oligonucleotide
gacaauugaagcaugagca

SEQ ID NO: 1877421 - RNA, 19 nt, Artificial Sequence
  Description of Artificial Sequence: Synthetic oligonucleotide
agaaguaucgaggcgagac

SEQ ID NO: 1877422 - RNA, 19 nt, Artificial Sequence
  Description of Artificial Sequence: Synthetic oligonucleotide
accuucuaggauuuggugg

SEQ ID NO: 1877423 - RNA, 19 nt, Artificial Sequence
  Description of Artificial Sequence: Synthetic oligonucleotide
uaguaaagcauucauccgu

SEQ ID NO: 1877424 - RNA, 19 nt, Artificial Sequence
  Description of Artificial Sequence: Synthetic oligonucleotide
cuuauauaggcaguggugc

SEQ ID NO: 1877425 - RNA, 19 nt, Artificial Sequence
  Description of Artificial Sequence: Synthetic oligonucleotide
guucaguccuuucauagcg

SEQ ID NO: 1877426 - RNA, 19 nt, Artificial Sequence
  Description of Artificial Sequence: Synthetic oligonucleotide
ugcaguacggaucaucagc

SEQ ID NO: 1877427 - RNA, 19 nt, Artificial Sequence
  Description of Artificial Sequence: Synthetic oligonucleotide
cugcugaacagcauaaucc

SEQ ID NO: 1877428 - RNA, 19 nt, Artificial Sequence
  Description of Artificial Sequence: Synthetic oligonucleotide
auaguaaagcauucauccg

SEQ ID NO: 1877429 - RNA, 19 nt, Artificial Sequence
  Description of Artificial Sequence: Synthetic oligonucleotide
cuucaaagaucacugcucg

SEQ ID NO: 1877430 - RNA, 19 nt, Artificial Sequence
  Description of Artificial Sequence: Synthetic oligonucleotide
uuguggaugcuuauauagg

SEQ ID NO: 1877431 - RNA, 19 nt, Artificial Sequence
  Description of Artificial Sequence: Synthetic oligonucleotide
guagccauagccuccaugc

SEQ ID NO: 1877432 - RNA, 19 nt, Artificial Sequence
  Description of Artificial Sequence: Synthetic oligonucleotide
auagaugucugacucacca

SEQ ID NO: 1877433 - RNA, 19 nt, Artificial Sequence
  Description of Artificial Sequence: Synthetic oligonucleotide
uggaugcuuauauaggcag

SEQ ID NO: 1877434 - RNA, 19 nt, Artificial Sequence
  Description of Artificial Sequence: Synthetic oligonucleotide
aauugcaggugcugguuuc

SEQ ID NO: 1877435 - RNA, 19 nt, Artificial Sequence
  Description of Artificial Sequence: Synthetic oligonucleotide
uccaguucggcacaugacc

SEQ ID NO: 1877436 - RNA, 19 nt, Artificial Sequence
  Description of Artificial Sequence: Synthetic oligonucleotide
aaagccacagcugcaguac

SEQ ID NO: 1877437 - RNA, 19 nt, Artificial Sequence
  Description of Artificial Sequence: Synthetic oligonucleotide
aagaucacugcucggguug

SEQ ID NO: 1877438 - RNA, 19 nt, Artificial Sequence
  Description of Artificial Sequence: Synthetic oligonucleotide
auugcuaccuucuaggauu

SEQ ID NO: 1877439 - RNA, 19 nt, Artificial Sequence
  Description of Artificial Sequence: Synthetic oligonucleotide
ugcuaacuggaauugcagg

SEQ ID NO: 1877440 - RNA, 19 nt, Artificial Sequence
  Description of Artificial Sequence: Synthetic oligonucleotide
cacucugccauauugggag

SEQ ID NO: 1877441 - RNA, 19 nt, Artificial Sequence
  Description of Artificial Sequence: Synthetic oligonucleotide
ucugcuaacuggaauugca

SEQ ID NO: 1877442 - RNA, 19 nt, Artificial Sequence
  Description of Artificial Sequence: Synthetic oligonucleotide
ucuucaaagaucacugcuc

SEQ ID NO: 1877443 - RNA, 19 nt, Artificial Sequence
  Description of Artificial Sequence: Synthetic oligonucleotide
aguacggaucaucagccgg

SEQ ID NO: 1877444 - RNA, 19 nt, Artificial Sequence
  Description of Artificial Sequence: Synthetic oligonucleotide
ugccuuuggggccugaucc

SEQ ID NO: 1877445 - RNA, 19 nt, Artificial Sequence
  Description of Artificial Sequence: Synthetic oligonucleotide
uaauccuucagguagccau

SEQ ID NO: 1877446 - RNA, 19 nt, Artificial Sequence
  Description of Artificial Sequence: Synthetic oligonucleotide
auaauccaggcacacaugu

SEQ ID NO: 1877447 - RNA, 19 nt, Artificial Sequence
  Description of Artificial Sequence: Synthetic oligonucleotide
ugucguuuggcugagguca

SEQ ID NO: 1877448 - RNA, 19 nt, Artificial Sequence
  Description of Artificial Sequence: Synthetic oligonucleotide
auugcggcugcacaugaac

SEQ ID NO: 1877449 - RNA, 19 nt, Artificial Sequence
  Description of Artificial Sequence: Synthetic oligonucleotide
uccguaacaaagagcuugg

SEQ ID NO: 1877450 - RNA, 19 nt, Artificial Sequence
  Description of Artificial Sequence: Synthetic oligonucleotide
aagcuaucaauaauccagg

SEQ ID NO: 1877451 - RNA, 19 nt, Artificial Sequence
  Description of Artificial Sequence: Synthetic oligonucleotide
auucauccguaacaaagag

SEQ ID NO: 1877452 - RNA, 19 nt, Artificial Sequence
  Description of Artificial Sequence: Synthetic oligonucleotide
cacaugaccacauagaugu

SEQ ID NO: 1877453 - RNA, 19 nt, Artificial Sequence
  Description of Artificial Sequence: Synthetic oligonucleotide
acaauugaagcaugagcag

SEQ ID NO: 1877454 - RNA, 19 nt, Artificial Sequence
  Description of Artificial Sequence: Synthetic oligonucleotide
agcuaucaauaauccaggc

SEQ ID NO: 1877455 - RNA, 19 nt, Artificial Sequence
  Description of Artificial Sequence: Synthetic oligonucleotide
uuggguaaggacaauugaa

SEQ ID NO: 1877456 - RNA, 19 nt, Artificial Sequence
  Description of Artificial Sequence: Synthetic oligonucleotide
aaguaucgaggcgagacag

SEQ ID NO: 1877457 - RNA, 19 nt, Artificial Sequence
  Description of Artificial Sequence: Synthetic oligonucleotide
ucuugccaaagcuaaggcc

SEQ ID NO: 1877458 - RNA, 19 nt, Artificial Sequence
  Description of Artificial Sequence: Synthetic oligonucleotide
auuugguggacccuggagu

SEQ ID NO: 1877459 - RNA, 19 nt, Artificial Sequence
  Description of Artificial Sequence: Synthetic oligonucleotide
auagcgaugagaaagcccu

SEQ ID NO: 1877460 - RNA, 19 nt, Artificial Sequence
  Description of Artificial Sequence: Synthetic oligonucleotide
ugcuuauauaggcaguggu

SEQ ID NO: 1877461 - RNA, 19 nt, Artificial Sequence
  Description of Artificial Sequence: Synthetic oligonucleotide
caugcaucugcaaagccug

SEQ ID NO: 1877462 - RNA, 19 nt, Artificial Sequence
  Description of Artificial Sequence: Synthetic oligonucleotide
ugaggauguaaugaucucc

SEQ ID NO: 1877463 - RNA, 19 nt, Artificial Sequence
  Description of Artificial Sequence: Synthetic oligonucleotide
ugcugaacagcauaauccu

SEQ ID NO: 1877464 - RNA, 19 nt, Artificial Sequence
  Description of Artificial Sequence: Synthetic oligonucleotide
aagagagcaggaugcaaca

SEQ ID NO: 1877465 - RNA, 19 nt, Artificial Sequence
  Description of Artificial Sequence: Synthetic oligonucleotide
auugaggauguaaugaucu

SEQ ID NO: 1877466 - RNA, 19 nt, Artificial Sequence
  Description of Artificial Sequence: Synthetic oligonucleotide
uccucauuacuucauugcu

SEQ ID NO: 1877467 - RNA, 19 nt, Artificial Sequence
  Description of Artificial Sequence: Synthetic oligonucleotide
agaucagcauccucauuac

SEQ ID NO: 1877468 - RNA, 19 nt, Artificial Sequence
  Description of Artificial Sequence: Synthetic oligonucleotide
agauaguaaagcauucauc

SEQ ID NO: 1877469 - RNA, 19 nt, Artificial Sequence
  Description of Artificial Sequence: Synthetic oligonucleotide
aguccuuucauagcgauga

SEQ ID NO: 1877470 - RNA, 19 nt, Artificial Sequence
  Description of Artificial Sequence: Synthetic oligonucleotide
ugacagaaguaucgaggcg

SEQ ID NO: 1877471 - RNA, 19 nt, Artificial Sequence
  Description of Artificial Sequence: Synthetic oligonucleotide
agcacaaggccacugcauc

SEQ ID NO: 1877472 - RNA, 19 nt, Artificial Sequence
  Description of Artificial Sequence: Synthetic oligonucleotide
ucggcacaugaccacauag

SEQ ID NO: 1877473 - RNA, 19 nt, Artificial Sequence
  Description of Artificial Sequence: Synthetic oligonucleotide
uaucaauaauccaggcaca

SEQ ID NO: 1877474 - RNA, 19 nt, Artificial Sequence
  Description of Artificial Sequence: Synthetic oligonucleotide
caagagagcaggaugcaac

SEQ ID NO: 1877475 - RNA, 19 nt, Artificial Sequence
  Description of Artificial Sequence: Synthetic oligonucleotide
aaaggccacuuucugaaau

SEQ ID NO: 1877476 - RNA, 19 nt, Artificial Sequence
  Description of Artificial Sequence: Synthetic oligonucleotide
auccguaacaaagagcuug

SEQ ID NO: 1877477 - RNA, 19 nt, Artificial Sequence
  Description of Artificial Sequence: Synthetic oligonucleotide
gauuugguggacccuggag

SEQ ID NO: 1877478 - RNA, 19 nt, Artificial Sequence
  Description of Artificial Sequence: Synthetic oligonucleotide
aucaauaauccaggcacac

SEQ ID NO: 1877479 - RNA, 19 nt, Artificial Sequence
  Description of Artificial Sequence: Synthetic oligonucleotide
ugugaguuccaccccaccu

SEQ ID NO: 1877480 - RNA, 19 nt, Artificial Sequence
  Description of Artificial Sequence: Synthetic oligonucleotide
ucccuucucaacaacuaug

SEQ ID NO: 1877481 - RNA, 19 nt, Artificial Sequence
  Description of Artificial Sequence: Synthetic oligonucleotide
cauagcgaugagaaagccc

SEQ ID NO: 1877482 - RNA, 19 nt, Artificial Sequence
  Description of Artificial Sequence: Synthetic oligonucleotide
uccucauuuccaaagcuau

SEQ ID NO: 1877483 - RNA, 19 nt, Artificial Sequence
  Description of Artificial Sequence: Synthetic oligonucleotide
aaggccagggguucccuuc

SEQ ID NO: 1877484 - RNA, 19 nt, Artificial Sequence
  Description of Artificial Sequence: Synthetic oligonucleotide
caacauugauccuuccgcc

SEQ ID NO: 1877485 - RNA, 19 nt, Artificial Sequence
  Description of Artificial Sequence: Synthetic oligonucleotide
uuauauaggcaguggugcu

SEQ ID NO: 1877486 - RNA, 19 nt, Artificial Sequence
  Description of Artificial Sequence: Synthetic oligonucleotide
ggacaauugaagcaugagc

SEQ ID NO: 1877487 - RNA, 19 nt, Artificial Sequence
  Description of Artificial Sequence: Synthetic oligonucleotide
aacuaugcaggagaugccu

SEQ ID NO: 1877488 - RNA, 19 nt, Artificial Sequence
  Description of Artificial Sequence: Synthetic oligonucleotide
gcaacauugauccuuccgc

SEQ ID NO: 1877489 - RNA, 19 nt, Artificial Sequence
  Description of Artificial Sequence: Synthetic oligonucleotide
caauugaagcaugagcagc

SEQ ID NO: 1877490 - RNA, 19 nt, Artificial Sequence
  Description of Artificial Sequence: Synthetic oligonucleotide
uucaaagaucacugcucgg

SEQ ID NO: 1877491 - RNA, 19 nt, Artificial Sequence
  Description of Artificial Sequence: Synthetic oligonucleotide
uaaggacaauugaagcaug

SEQ ID NO: 1877492 - RNA, 19 nt, Artificial Sequence
  Description of Artificial Sequence: Synthetic oligonucleotide
ugccuuccgcaucauaucc

SEQ ID NO: 1877493 - RNA, 19 nt, Artificial Sequence
  Description of Artificial Sequence: Synthetic oligonucleotide
gacagaaguaucgaggcga

SEQ ID NO: 1877494 - RNA, 19 nt, Artificial Sequence
  Description of Artificial Sequence: Synthetic oligonucleotide
uucaaagaugacagaagua

SEQ ID NO: 1877495 - RNA, 19 nt, Artificial Sequence
  Description of Artificial Sequence: Synthetic oligonucleotide
cugguugcagauaguaaag

SEQ ID NO: 1877496 - RNA, 19 nt, Artificial Sequence
  Description of Artificial Sequence: Synthetic oligonucleotide
aggccuuggaaccauugag

SEQ ID NO: 1877497 - RNA, 19 nt, Artificial Sequence
  Description of Artificial Sequence: Synthetic oligonucleotide
aagaugacagaaguaucga

SEQ ID NO: 1877498 - RNA, 19 nt, Artificial Sequence
  Description of Artificial Sequence: Synthetic oligonucleotide
cugaagcaggcuucgagag

SEQ ID NO: 1877499 - RNA, 19 nt, Artificial Sequence
  Description of Artificial Sequence: Synthetic oligonucleotide
ucgcucccaauccuguugg

SEQ ID NO: 1877500 - RNA, 19 nt, Artificial Sequence
  Description of Artificial Sequence: Synthetic oligonucleotide
guaaugaucuccuugucgu

SEQ ID NO: 1877501 - RNA, 19 nt, Artificial Sequence
  Description of Artificial Sequence: Synthetic oligonucleotide
caaagaugacagaaguauc

SEQ ID NO: 1877502 - RNA, 19 nt, Artificial Sequence
  Description of Artificial Sequence: Synthetic oligonucleotide
uguucguacguagaucccc

SEQ ID NO: 1877503 - RNA, 19 nt, Artificial Sequence
  Description of Artificial Sequence: Synthetic oligonucleotide
aucgaggcgagacagucca

SEQ ID NO: 1877504 - RNA, 19 nt, Artificial Sequence
  Description of Artificial Sequence: Synthetic oligonucleotide
aggugcuccgaacugcuuc

SEQ ID NO: 1877505 - RNA, 19 nt, Artificial Sequence
  Description of Artificial Sequence: Synthetic oligonucleotide
caugguacagagcgguggg

SEQ ID NO: 1877506 - RNA, 19 nt, Artificial Sequence
  Description of Artificial Sequence: Synthetic oligonucleotide
aucaaaggccacuuucuga

SEQ ID NO: 1877507 - RNA, 19 nt, Artificial Sequence
  Description of Artificial Sequence: Synthetic oligonucleotide
ugcagauaguaaagcauuc

SEQ ID NO: 1877508 - RNA, 19 nt, Artificial Sequence
  Description of Artificial Sequence: Synthetic oligonucleotide
gguaaggacaauugaagca

SEQ ID NO: 1877509 - RNA, 19 nt, Artificial Sequence
  Description of Artificial Sequence: Synthetic oligonucleotide
gagaaagcccugucccucg

SEQ ID NO: 1877510 - RNA, 19 nt, Artificial Sequence
  Description of Artificial Sequence: Synthetic oligonucleotide
uauugggagccauuuccug

SEQ ID NO: 1877511 - RNA, 19 nt, Artificial Sequence
  Description of Artificial Sequence: Synthetic oligonucleotide
aggcgagacaguccagacc

SEQ ID NO: 1877512 - RNA, 19 nt, Artificial Sequence
  Description of Artificial Sequence: Synthetic oligonucleotide
uggcuaaggcuucaaagau

SEQ ID NO: 1877513 - RNA, 19 nt, Artificial Sequence
  Description of Artificial Sequence: Synthetic oligonucleotide
uaacaaagagcuuggccau

SEQ ID NO: 1877514 - RNA, 19 nt, Artificial Sequence
  Description of Artificial Sequence: Synthetic oligonucleotide
aaagcuaaggccagggguu

SEQ ID NO: 1877515 - RNA, 19 nt, Artificial Sequence
  Description of Artificial Sequence: Synthetic oligonucleotide
ggauguaaugaucuccuug

SEQ ID NO: 1877516 - RNA, 19 nt, Artificial Sequence
  Description of Artificial Sequence: Synthetic oligonucleotide
ucauugcuaccuucuagga

SEQ ID NO: 1877517 - RNA, 19 nt, Artificial Sequence
  Description of Artificial Sequence: Synthetic oligonucleotide
ugucccucgcucccaaucc

SEQ ID NO: 1877518 - RNA, 19 nt, Artificial Sequence
  Description of Artificial Sequence: Synthetic oligonucleotide
ugcucuuggguaaggacaa

SEQ ID NO: 1877519 - RNA, 19 nt, Artificial Sequence
  Description of Artificial Sequence: Synthetic oligonucleotide
cauucauccguaacaaaga

SEQ ID NO: 1877520 - RNA, 19 nt, Artificial Sequence
  Description of Artificial Sequence: Synthetic oligonucleotide
ucuccaugguacagagcgg

SEQ ID NO: 1877521 - RNA, 19 nt, Artificial Sequence
  Description of Artificial Sequence: Synthetic oligonucleotide
aaagaucacugcucggguu

SEQ ID NO: 1877522 - RNA, 19 nt, Artificial Sequence
  Description of Artificial Sequence: Synthetic oligonucleotide
agggguucccuucucaaca

SEQ ID NO: 1877523 - RNA, 19 nt, Artificial Sequence
  Description of Artificial Sequence: Synthetic oligonucleotide
cauugaggauguaaugauc

SEQ ID NO: 1877524 - RNA, 19 nt, Artificial Sequence
  Description of Artificial Sequence: Synthetic oligonucleotide
uugcggcugcacaugaacc

SEQ ID NO: 1877525 - RNA, 19 nt, Artificial Sequence
  Description of Artificial Sequence: Synthetic oligonucleotide
cugcuaacuggaauugcag

SEQ ID NO: 1877526 - RNA, 19 nt, Artificial Sequence
  Description of Artificial Sequence: Synthetic oligonucleotide
auuugugccucuguuccuc

SEQ ID NO: 1877527 - RNA, 19 nt, Artificial Sequence
  Description of Artificial Sequence: Synthetic oligonucleotide
uaggauuugguggacccug

SEQ ID NO: 1877528 - RNA, 19 nt, Artificial Sequence
  Description of Artificial Sequence: Synthetic oligonucleotide
aagcauucauccguaacaa

SEQ ID NO: 1877529 - RNA, 19 nt, Artificial Sequence
  Description of Artificial Sequence: Synthetic oligonucleotide
ggguaaggacaauugaagc

SEQ ID NO: 1877530 - RNA, 19 nt, Artificial Sequence
  Description of Artificial Sequence: Synthetic oligonucleotide
uccugagcagcaaaaucaa

SEQ ID NO: 1877531 - RNA, 19 nt, Artificial Sequence
  Description of Artificial Sequence: Synthetic oligonucleotide
acugauugcggcugcacau

SEQ ID NO: 1877532 - RNA, 19 nt, Artificial Sequence
  Description of Artificial Sequence: Synthetic oligonucleotide
cuaacuggaauugcaggug

SEQ ID NO: 1877533 - RNA, 19 nt, Artificial Sequence
  Description of Artificial Sequence: Synthetic oligonucleotide
aaugaucuccuugucguuu

SEQ ID NO: 1877534 - RNA, 19 nt, Artificial Sequence
  Description of Artificial Sequence: Synthetic oligonucleotide
gaugcaacauugauccuuc

SEQ ID NO: 1877535 - RNA, 19 nt, Artificial Sequence
  Description of Artificial Sequence: Synthetic oligonucleotide
auuacuucauugcuaccuu

SEQ ID NO: 1877536 - RNA, 19 nt, Artificial Sequence
  Description of Artificial Sequence: Synthetic oligonucleotide
aucuccuugucguuuggcu

SEQ ID NO: 1877537 - RNA, 19 nt, Artificial Sequence
  Description of Artificial Sequence: Synthetic oligonucleotide
ggugggcaaaauuugugcc

SEQ ID NO: 1877538 - RNA, 19 nt, Artificial Sequence
  Description of Artificial Sequence: Synthetic oligonucleotide
ugucugcuaacuggaauug

SEQ ID NO: 1877539 - RNA, 19 nt, Artificial Sequence
  Description of Artificial Sequence: Synthetic oligonucleotide
aucuucccgcuccucuugc

SEQ ID NO: 1877540 - RNA, 19 nt, Artificial Sequence
  Description of Artificial Sequence: Synthetic oligonucleotide
agaaagcccugucccucgc

SEQ ID NO: 1877541 - RNA, 19 nt, Artificial Sequence
  Description of Artificial Sequence: Synthetic oligonucleotide
uaucgaggcgagacagucc

SEQ ID NO: 1877542 - RNA, 19 nt, Artificial Sequence
  Description of Artificial Sequence: Synthetic oligonucleotide
agcaggaugcaacauugau

SEQ ID NO: 1877543 - RNA, 19 nt, Artificial Sequence
  Description of Artificial Sequence: Synthetic oligonucleotide
aacuucuccaugguacaga

SEQ ID NO: 1877544 - RNA, 19 nt, Artificial Sequence
  Description of Artificial Sequence: Synthetic oligonucleotide
ugauugcggcugcacauga

SEQ ID NO: 1877545 - RNA, 19 nt, Artificial Sequence
  Description of Artificial Sequence: Synthetic oligonucleotide
ugaagcaggcuucgagaga

SEQ ID NO: 1877546 - RNA, 19 nt, Artificial Sequence
  Description of Artificial Sequence: Synthetic oligonucleotide
guacggaucaucagccggg

SEQ ID NO: 1877547 - RNA, 19 nt, Artificial Sequence
  Description of Artificial Sequence: Synthetic oligonucleotide
gaaguaucgaggcgagaca

SEQ ID NO: 1877548 - RNA, 19 nt, Artificial Sequence
  Description of Artificial Sequence: Synthetic oligonucleotide
ucauagcgaugagaaagcc

SEQ ID NO: 1877549 - RNA, 19 nt, Artificial Sequence
  Description of Artificial Sequence: Synthetic oligonucleotide
aaggacaauugaagcauga

SEQ ID NO: 1877550 - RNA, 19 nt, Artificial Sequence
  Description of Artificial Sequence: Synthetic oligonucleotide
aagcuaaggccagggguuc

SEQ ID NO: 1877551 - RNA, 19 nt, Artificial Sequence
  Description of Artificial Sequence: Synthetic oligonucleotide
acccacgucuguucguacg

SEQ ID NO: 1877552 - RNA, 19 nt, Artificial Sequence
  Description of Artificial Sequence: Synthetic oligonucleotide
uucagugaggcaguaggaa

SEQ ID NO: 1877553 - RNA, 19 nt, Artificial Sequence
  Description of Artificial Sequence: Synthetic oligonucleotide
gaccacauagaugucugac

SEQ ID NO: 1877554 - RNA, 19 nt, Artificial Sequence
  Description of Artificial Sequence: Synthetic oligonucleotide
agaagagaugcagcaucac

SEQ ID NO: 1877555 - RNA, 19 nt, Artificial Sequence
  Description of Artificial Sequence: Synthetic oligonucleotide
uaguccugaagcaggcuuc

SEQ ID NO: 1877556 - RNA, 19 nt, Artificial Sequence
  Description of Artificial Sequence: Synthetic oligonucleotide
cuuggguaaggacaauuga

SEQ ID NO: 1877557 - RNA, 19 nt, Artificial Sequence
  Description of Artificial Sequence: Synthetic oligonucleotide
augagaaagcccugucccu

SEQ ID NO: 1877558 - RNA, 19 nt, Artificial Sequence
  Description of Artificial Sequence: Synthetic oligonucleotide
caacuaugcaggagaugcc

SEQ ID NO: 1877559 - RNA, 19 nt, Artificial Sequence
  Description of Artificial Sequence: Synthetic oligonucleotide
uguuguggaugcuuauaua

SEQ ID NO: 1877560 - RNA, 19 nt, Artificial Sequence
  Description of Artificial Sequence: Synthetic oligonucleotide
ucucaacaacuaugcagga

SEQ ID NO: 1877561 - RNA, 19 nt, Artificial Sequence
  Description of Artificial Sequence: Synthetic oligonucleotide
cuagaggugcuccgaacug

SEQ ID NO: 1877562 - RNA, 19 nt, Artificial Sequence
  Description of Artificial Sequence: Synthetic oligonucleotide
cacagcugcaguacggauc

SEQ ID NO: 1877563 - RNA, 19 nt, Artificial Sequence
  Description of Artificial Sequence: Synthetic oligonucleotide
uugaggugcucuuggguaa

SEQ ID NO: 1877564 - RNA, 19 nt, Artificial Sequence
  Description of Artificial Sequence: Synthetic oligonucleotide
caucauauccacaggggaa

SEQ ID NO: 1877565 - RNA, 19 nt, Artificial Sequence
  Description of Artificial Sequence: Synthetic oligonucleotide
uccuuucauagcgaugaga

SEQ ID NO: 1877566 - RNA, 19 nt, Artificial Sequence
  Description of Artificial Sequence: Synthetic oligonucleotide
cucaacaacuaugcaggag

SEQ ID NO: 1877567 - RNA, 19 nt, Artificial Sequence
  Description of Artificial Sequence: Synthetic oligonucleotide
agagcggugggcaaaauuu

SEQ ID NO: 1877568 - RNA, 19 nt, Artificial Sequence
  Description of Artificial Sequence: Synthetic oligonucleotide
cauagaugucugacucacc

SEQ ID NO: 1877569 - RNA, 19 nt, Artificial Sequence
  Description of Artificial Sequence: Synthetic oligonucleotide
cacgucuguucguacguag

SEQ ID NO: 1877570 - RNA, 19 nt, Artificial Sequence
  Description of Artificial Sequence: Synthetic oligonucleotide
caauaauccaggcacacau

SEQ ID NO: 1877571 - RNA, 19 nt, Artificial Sequence
  Description of Artificial Sequence: Synthetic oligonucleotide
augccuuuggggccugauc

SEQ ID NO: 1877572 - RNA, 19 nt, Artificial Sequence
  Description of Artificial Sequence: Synthetic oligonucleotide
ugagaaagcccugucccuc

SEQ ID NO: 1877573 - RNA, 19 nt, Artificial Sequence
  Description of Artificial Sequence: Synthetic oligonucleotide
agcugugcugccuuccgca

SEQ ID NO: 1877574 - RNA, 19 nt, Artificial Sequence
  Description of Artificial Sequence: Synthetic oligonucleotide
ucuguuccucauuuccaaa

SEQ ID NO: 1877575 - RNA, 19 nt, Artificial Sequence
  Description of Artificial Sequence: Synthetic oligonucleotide
gacugauugcggcugcaca

SEQ ID NO: 1877576 - RNA, 19 nt, Artificial Sequence
  Description of Artificial Sequence: Synthetic oligonucleotide
ucaucagccgggaggcaac

SEQ ID NO: 1877577 - RNA, 19 nt, Artificial Sequence
  Description of Artificial Sequence: Synthetic oligonucleotide
ucugcaaagccugguugca

SEQ ID NO: 1877578 - RNA, 19 nt, Artificial Sequence
  Description of Artificial Sequence: Synthetic oligonucleotide
gcuuauauaggcaguggug

SEQ ID NO: 1877579 - RNA, 19 nt, Artificial Sequence
  Description of Artificial Sequence: Synthetic oligonucleotide
caguacggaucaucagccg

SEQ ID NO: 1877580 - RNA, 19 nt, Artificial Sequence
  Description of Artificial Sequence: Synthetic oligonucleotide
gcuucaaagaugacagaag

SEQ ID NO: 1877581 - RNA, 19 nt, Artificial Sequence
  Description of Artificial Sequence: Synthetic oligonucleotide
agcugcaguacggaucauc

SEQ ID NO: 1877582 - RNA, 19 nt, Artificial Sequence
  Description of Artificial Sequence: Synthetic oligonucleotide
uccaugguacagagcggug

SEQ ID NO: 1877583 - RNA, 19 nt, Artificial Sequence
  Description of Artificial Sequence: Synthetic oligonucleotide
aguccagacccacccacgu

SEQ ID NO: 1877584 - RNA, 19 nt, Artificial Sequence
  Description of Artificial Sequence: Synthetic oligonucleotide
gcuucgagagaucagcauc

SEQ ID NO: 1877585 - RNA, 19 nt, Artificial Sequence
  Description of Artificial Sequence: Synthetic oligonucleotide
guaaggacaauugaagcau

SEQ ID NO: 1877586 - RNA, 19 nt, Artificial Sequence
  Description of Artificial Sequence: Synthetic oligonucleotide
caaagcuaaggccaggggu

SEQ ID NO: 1877587 - RNA, 19 nt, Artificial Sequence
  Description of Artificial Sequence: Synthetic oligonucleotide
cauuacuucauugcuaccu

SEQ ID NO: 1877588 - RNA, 19 nt, Artificial Sequence
  Description of Artificial Sequence: Synthetic oligonucleotide
cucgcucccaauccuguug

SEQ ID NO: 1877589 - RNA, 19 nt, Artificial Sequence
  Description of Artificial Sequence: Synthetic oligonucleotide
cugcuuccggaccuugagg

SEQ ID NO: 1877590 - RNA, 19 nt, Artificial Sequence
  Description of Artificial Sequence: Synthetic oligonucleotide
acagaaguaucgaggcgag

SEQ ID NO: 1877591 - RNA, 19 nt, Artificial Sequence
  Description of Artificial Sequence: Synthetic oligonucleotide
gaggcgagacaguccagac

SEQ ID NO: 1877592 - RNA, 19 nt, Artificial Sequence
  Description of Artificial Sequence: Synthetic oligonucleotide
ggaucaucagccgggaggc

SEQ ID NO: 1877593 - RNA, 19 nt, Artificial Sequence
  Description of Artificial Sequence: Synthetic oligonucleotide
guaucgaggcgagacaguc

SEQ ID NO: 1877594 - RNA, 19 nt, Artificial Sequence
  Description of Artificial Sequence: Synthetic oligonucleotide
cuccgaacugcuuccggac

SEQ ID NO: 1877595 - RNA, 19 nt, Artificial Sequence
  Description of Artificial Sequence: Synthetic oligonucleotide
ggagccauuuccugagcag

SEQ ID NO: 1877596 - RNA, 19 nt, Artificial Sequence
  Description of Artificial Sequence: Synthetic oligonucleotide
acccacccacgucuguucg

SEQ ID NO: 1877597 - RNA, 19 nt, Artificial Sequence
  Description of Artificial Sequence: Synthetic oligonucleotide
aggccacugcaucuucccg

SEQ ID NO: 1877598 - RNA, 19 nt, Artificial Sequence
  Description of Artificial Sequence: Synthetic oligonucleotide
uaauccaggcacacauguu

SEQ ID NO: 1877599 - RNA, 19 nt, Artificial Sequence
  Description of Artificial Sequence: Synthetic oligonucleotide
aguaaagcauucauccgua

SEQ ID NO: 1877600 - RNA, 19 nt, Artificial Sequence
  Description of Artificial Sequence: Synthetic oligonucleotide
cuguucguacguagauccc

SEQ ID NO: 1877601 - RNA, 19 nt, Artificial Sequence
  Description of Artificial Sequence: Synthetic oligonucleotide
uucuggcuagaggugcucc

SEQ ID NO: 1877602 - RNA, 19 nt, Artificial Sequence
  Description of Artificial Sequence: Synthetic oligonucleotide
ccuggagucccgcauauac

SEQ ID NO: 1877603 - RNA, 19 nt, Artificial Sequence
  Description of Artificial Sequence: Synthetic oligonucleotide
ccguucaguccuuucauag

SEQ ID NO: 1877604 - RNA, 19 nt, Artificial Sequence
  Description of Artificial Sequence: Synthetic oligonucleotide
gcaguacggaucaucagcc

SEQ ID NO: 1877605 - RNA, 19 nt, Artificial Sequence
  Description of Artificial Sequence: Synthetic oligonucleotide
gcaucauauccacagggga

SEQ ID NO: 1877606 - RNA, 19 nt, Artificial Sequence
  Description of Artificial Sequence: Synthetic oligonucleotide
ucgagagaucagcauccuc

SEQ ID NO: 1877607 - RNA, 19 nt, Artificial Sequence
  Description of Artificial Sequence: Synthetic oligonucleotide
gagcggugggcaaaauuug

SEQ ID NO: 1877608 - RNA, 19 nt, Artificial Sequence
  Description of Artificial Sequence: Synthetic oligonucleotide
ccgcaucauauccacaggg

SEQ ID NO: 1877609 - RNA, 19 nt, Artificial Sequence
  Description of Artificial Sequence: Synthetic oligonucleotide
ggugcuccgaacugcuucc

SEQ ID NO: 1877610 - RNA, 19 nt, Artificial Sequence
  Description of Artificial Sequence: Synthetic oligonucleotide
ugcucggguuggcugugag

SEQ ID NO: 1877611 - RNA, 19 nt, Artificial Sequence
  Description of Artificial Sequence: Synthetic oligonucleotide
gaagcaggcuucgagagau

SEQ ID NO: 1877612 - RNA, 19 nt, Artificial Sequence
  Description of Artificial Sequence: Synthetic oligonucleotide
aacuggaauugcaggugcu

SEQ ID NO: 1877613 - RNA, 19 nt, Artificial Sequence
  Description of Artificial Sequence: Synthetic oligonucleotide
ggccauggagcacaaggcc

SEQ ID NO: 1877614 - RNA, 19 nt, Artificial Sequence
  Description of Artificial Sequence: Synthetic oligonucleotide
cuggacucuccuguuuggg

SEQ ID NO: 1877615 - RNA, 19 nt, Artificial Sequence
  Description of Artificial Sequence: Synthetic oligonucleotide
cugcaguacggaucaucag

SEQ ID NO: 1877616 - RNA, 19 nt, Artificial Sequence
  Description of Artificial Sequence: Synthetic oligonucleotide
gagacaguccagacccacc

SEQ ID NO: 1877617 - RNA, 19 nt, Artificial Sequence
  Description of Artificial Sequence: Synthetic oligonucleotide
acauguuguggaugcuuau

SEQ ID NO: 1877618 - RNA, 19 nt, Artificial Sequence
  Description of Artificial Sequence: Synthetic oligonucleotide
cucugccauauugggagcc

SEQ ID NO: 1877619 - RNA, 19 nt, Artificial Sequence
  Description of Artificial Sequence: Synthetic oligonucleotide
ggugcucuuggguaaggac

SEQ ID NO: 1877620 - RNA, 19 nt, Artificial Sequence
  Description of Artificial Sequence: Synthetic oligonucleotide
ugcaucugcaaagccuggu

SEQ ID NO: 1877621 - RNA, 19 nt, Artificial Sequence
  Description of Artificial Sequence: Synthetic oligonucleotide
agcgaugagaaagcccugu

SEQ ID NO: 1877622 - RNA, 19 nt, Artificial Sequence
  Description of Artificial Sequence: Synthetic oligonucleotide
aguucggcacaugaccaca

SEQ ID NO: 1877623 - RNA, 19 nt, Artificial Sequence
  Description of Artificial Sequence: Synthetic oligonucleotide
gauccuccaguucggcaca

SEQ ID NO: 1877624 - RNA, 19 nt, Artificial Sequence
  Description of Artificial Sequence: Synthetic oligonucleotide
cugccuuccgcaucauauc

SEQ ID NO: 1877625 - RNA, 19 nt, Artificial Sequence
  Description of Artificial Sequence: Synthetic oligonucleotide
uugcuaccuucuaggauuu

SEQ ID NO: 1877626 - RNA, 19 nt, Artificial Sequence
  Description of Artificial Sequence: Synthetic oligonucleotide
caguccuuucauagcgaug

SEQ ID NO: 1877627 - RNA, 19 nt, Artificial Sequence
  Description of Artificial Sequence: Synthetic oligonucleotide
auacugcugaacagcauaa

SEQ ID NO: 1877628 - RNA, 19 nt, Artificial Sequence
  Description of Artificial Sequence: Synthetic oligonucleotide
caguucggcacaugaccac

SEQ ID NO: 1877629 - RNA, 19 nt, Artificial Sequence
  Description of Artificial Sequence: Synthetic oligonucleotide
caucuucccgcuccucuug

SEQ ID NO: 1877630 - RNA, 19 nt, Artificial Sequence
  Description of Artificial Sequence: Synthetic oligonucleotide
cagggguucccuucucaac

SEQ ID NO: 1877631 - RNA, 19 nt, Artificial Sequence
  Description of Artificial Sequence: Synthetic oligonucleotide
aggauuugguggacccugg

SEQ ID NO: 1877632 - RNA, 19 nt, Artificial Sequence
  Description of Artificial Sequence: Synthetic oligonucleotide
cacauguuguggaugcuua

SEQ ID NO: 1877633 - RNA, 19 nt, Artificial Sequence
  Description of Artificial Sequence: Synthetic oligonucleotide
ugguucagugaggcaguag

SEQ ID NO: 1877634 - RNA, 19 nt, Artificial Sequence
  Description of Artificial Sequence: Synthetic oligonucleotide
ugggagccauuuccugagc

SEQ ID NO: 1877635 - RNA, 19 nt, Artificial Sequence
  Description of Artificial Sequence: Synthetic oligonucleotide
gcaguaggaagcaaacuuc

SEQ ID NO: 1877636 - RNA, 19 nt, Artificial Sequence
  Description of Artificial Sequence: Synthetic oligonucleotide
cugauugcggcugcacaug

SEQ ID NO: 1877637 - RNA, 19 nt, Artificial Sequence
  Description of Artificial Sequence: Synthetic oligonucleotide
uucccgcuccucuugcaaa

SEQ ID NO: 1877638 - RNA, 19 nt, Artificial Sequence
  Description of Artificial Sequence: Synthetic oligonucleotide
cuugucguuuggcugaggu

SEQ ID NO: 1877639 - RNA, 19 nt, Artificial Sequence
  Description of Artificial Sequence: Synthetic oligonucleotide
auaggcaguggugcuggug

SEQ ID NO: 1877640 - RNA, 19 nt, Artificial Sequence
  Description of Artificial Sequence: Synthetic oligonucleotide
aucaucagccgggaggcaa

SEQ ID NO: 1877641 - RNA, 19 nt, Artificial Sequence
  Description of Artificial Sequence: Synthetic oligonucleotide
gucugcuaacuggaauugc

SEQ ID NO: 1877642 - RNA, 19 nt, Artificial Sequence
  Description of Artificial Sequence: Synthetic oligonucleotide
cugucccucgcucccaauc

SEQ ID NO: 1877643 - RNA, 19 nt, Artificial Sequence
  Description of Artificial Sequence: Synthetic oligonucleotide
ccaugguacagagcggugg

SEQ ID NO: 1877644 - RNA, 19 nt, Artificial Sequence
  Description of Artificial Sequence: Synthetic oligonucleotide
ggcuaaggcuucaaagaug

SEQ ID NO: 1877645 - RNA, 19 nt, Artificial Sequence
  Description of Artificial Sequence: Synthetic oligonucleotide
cuaccuucuaggauuuggu

SEQ ID NO: 1877646 - RNA, 19 nt, Artificial Sequence
  Description of Artificial Sequence: Synthetic oligonucleotide
gagucccgcauauacugcu

SEQ ID NO: 1877647 - RNA, 19 nt, Artificial Sequence
  Description of Artificial Sequence: Synthetic oligonucleotide
gggcuaguccugaagcagg

SEQ ID NO: 1877648 - RNA, 19 nt, Artificial Sequence
  Description of Artificial Sequence: Synthetic oligonucleotide
ucccgcauauacugcugaa

SEQ ID NO: 1877649 - RNA, 19 nt, Artificial Sequence
  Description of Artificial Sequence: Synthetic oligonucleotide
gcauaauccuucagguagc

SEQ ID NO: 1877650 - RNA, 19 nt, Artificial Sequence
  Description of Artificial Sequence: Synthetic oligonucleotide
guucagugaggcaguagga

SEQ ID NO: 1877651 - RNA, 19 nt, Artificial Sequence
  Description of Artificial Sequence: Synthetic oligonucleotide
uucggcacaugaccacaua

SEQ ID NO: 1877652 - RNA, 19 nt, Artificial Sequence
  Description of Artificial Sequence: Synthetic oligonucleotide
gauccuuccgccguucagu

SEQ ID NO: 1877653 - RNA, 19 nt, Artificial Sequence
  Description of Artificial Sequence: Synthetic oligonucleotide
gucuguucguacguagauc

SEQ ID NO: 1877654 - RNA, 19 nt, Artificial Sequence
  Description of Artificial Sequence: Synthetic oligonucleotide
gacccacccacgucuguuc

SEQ ID NO: 1877655 - RNA, 19 nt, Artificial Sequence
  Description of Artificial Sequence: Synthetic oligonucleotide
uccuuccgccguucagucc

SEQ ID NO: 1877656 - RNA, 19 nt, Artificial Sequence
  Description of Artificial Sequence: Synthetic oligonucleotide
ccaaagcuaaggccagggg

SEQ ID NO: 1877657 - RNA, 19 nt, Artificial Sequence
  Description of Artificial Sequence: Synthetic oligonucleotide
agaggugcuccgaacugcu

SEQ ID NO: 1877658 - RNA, 19 nt, Artificial Sequence
  Description of Artificial Sequence: Synthetic oligonucleotide
ugaucccacucugccauau

SEQ ID NO: 1877659 - RNA, 19 nt, Artificial Sequence
  Description of Artificial Sequence: Synthetic oligonucleotide
ucgaggcgagacaguccag

SEQ ID NO: 1877660 - RNA, 19 nt, Artificial Sequence
  Description of Artificial Sequence: Synthetic oligonucleotide
aggauguaaugaucuccuu

SEQ ID NO: 1877661 - RNA, 19 nt, Artificial Sequence
  Description of Artificial Sequence: Synthetic oligonucleotide
ccauggagcacaaggccac

SEQ ID NO: 1877662 - RNA, 19 nt, Artificial Sequence
  Description of Artificial Sequence: Synthetic oligonucleotide
cgaugagaaagcccugucc

SEQ ID NO: 1877663 - RNA, 19 nt, Artificial Sequence
  Description of Artificial Sequence: Synthetic oligonucleotide
aggcaguaggaagcaaacu

SEQ ID NO: 1877664 - RNA, 19 nt, Artificial Sequence
  Description of Artificial Sequence: Synthetic oligonucleotide
agcggugggcaaaauuugu

SEQ ID NO: 1877665 - RNA, 19 nt, Artificial Sequence
  Description of Artificial Sequence: Synthetic oligonucleotide
gcugcaguacggaucauca

SEQ ID NO: 1877666 - RNA, 19 nt, Artificial Sequence
  Description of Artificial Sequence: Synthetic oligonucleotide
ggggcuaguccugaagcag

SEQ ID NO: 1877667 - RNA, 19 nt, Artificial Sequence
  Description of Artificial Sequence: Synthetic oligonucleotide
uuccugguucagugaggca

SEQ ID NO: 1877668 - RNA, 19 nt, Artificial Sequence
  Description of Artificial Sequence: Synthetic oligonucleotide
agccugguugcagauagua

SEQ ID NO: 1877669 - RNA, 19 nt, Artificial Sequence
  Description of Artificial Sequence: Synthetic oligonucleotide
aggcacacauguuguggau

SEQ ID NO: 1877670 - RNA, 19 nt, Artificial Sequence
  Description of Artificial Sequence: Synthetic oligonucleotide
aggaugcaacauugauccu

SEQ ID NO: 1877671 - RNA, 19 nt, Artificial Sequence
  Description of Artificial Sequence: Synthetic oligonucleotide
ggcaaaauuugugccucug

SEQ ID NO: 1877672 - RNA, 19 nt, Artificial Sequence
  Description of Artificial Sequence: Synthetic oligonucleotide
auggagcacaaggccacug

SEQ ID NO: 1877673 - RNA, 19 nt, Artificial Sequence
  Description of Artificial Sequence: Synthetic oligonucleotide
ccugaagcaggcuucgaga

SEQ ID NO: 1877674 - RNA, 19 nt, Artificial Sequence
  Description of Artificial Sequence: Synthetic oligonucleotide
cguucaguccuuucauagc

SEQ ID NO: 1877675 - RNA, 19 nt, Artificial Sequence
  Description of Artificial Sequence: Synthetic oligonucleotide
aguaucgaggcgagacagu

SEQ ID NO: 1877676 - RNA, 19 nt, Artificial Sequence
  Description of Artificial Sequence: Synthetic oligonucleotide
uggugcagccuguggcuaa

SEQ ID NO: 1877677 - RNA, 19 nt, Artificial Sequence
  Description of Artificial Sequence: Synthetic oligonucleotide
guucccuucucaacaacua

SEQ ID NO: 1877678 - RNA, 19 nt, Artificial Sequence
  Description of Artificial Sequence: Synthetic oligonucleotide
agagagcaggaugcaacau

SEQ ID NO: 1877679 - RNA, 19 nt, Artificial Sequence
  Description of Artificial Sequence: Synthetic oligonucleotide
caaagaucacugcucgggu

SEQ ID NO: 1877680 - RNA, 19 nt, Artificial Sequence
  Description of Artificial Sequence: Synthetic oligonucleotide
gucguuuggcugaggucag

SEQ ID NO: 1877681 - RNA, 19 nt, Artificial Sequence
  Description of Artificial Sequence: Synthetic oligonucleotide
ucggguuggcugugaguuc

SEQ ID NO: 1877682 - RNA, 19 nt, Artificial Sequence
  Description of Artificial Sequence: Synthetic oligonucleotide
acgucuguucguacguaga

SEQ ID NO: 1877683 - RNA, 19 nt, Artificial Sequence
  Description of Artificial Sequence: Synthetic oligonucleotide
cagcauaauccuucaggua

SEQ ID NO: 1877684 - RNA, 19 nt, Artificial Sequence
  Description of Artificial Sequence: Synthetic oligonucleotide
gcuagaggugcuccgaacu

SEQ ID NO: 1877685 - RNA, 19 nt, Artificial Sequence
  Description of Artificial Sequence: Synthetic oligonucleotide
agucccgcauauacugcug

SEQ ID NO: 1877686 - RNA, 19 nt, Artificial Sequence
  Description of Artificial Sequence: Synthetic oligonucleotide
cauguuguggaugcuuaua

SEQ ID NO: 1877687 - RNA, 19 nt, Artificial Sequence
  Description of Artificial Sequence: Synthetic oligonucleotide
gggagccauuuccugagca

SEQ ID NO: 1877688 - RNA, 19 nt, Artificial Sequence
  Description of Artificial Sequence: Synthetic oligonucleotide
ccgggaggcaaccagccug

SEQ ID NO: 1877689 - RNA, 19 nt, Artificial Sequence
  Description of Artificial Sequence: Synthetic oligonucleotide
acccuggagucccgcauau

SEQ ID NO: 1877690 - RNA, 19 nt, Artificial Sequence
  Description of Artificial Sequence: Synthetic oligonucleotide
acuaugcaggagaugccuu

SEQ ID NO: 1877691 - RNA, 19 nt, Artificial Sequence
  Description of Artificial Sequence: Synthetic oligonucleotide
aggcuucgagagaucagca

SEQ ID NO: 1877692 - RNA, 19 nt, Artificial Sequence
  Description of Artificial Sequence: Synthetic oligonucleotide
caucagccgggaggcaacc

SEQ ID NO: 1877693 - RNA, 19 nt, Artificial Sequence
  Description of Artificial Sequence: Synthetic oligonucleotide
gcucccaauccuguuggcc

SEQ ID NO: 1877694 - RNA, 19 nt, Artificial Sequence
  Description of Artificial Sequence: Synthetic oligonucleotide
uccgccguucaguccuuuc

SEQ ID NO: 1877695 - RNA, 19 nt, Artificial Sequence
  Description of Artificial Sequence: Synthetic oligonucleotide
ccucauuuccaaagcuauc

SEQ ID NO: 1877696 - RNA, 19 nt, Artificial Sequence
  Description of Artificial Sequence: Synthetic oligonucleotide
cauugcuaccuucuaggau

SEQ ID NO: 1877697 - RNA, 19 nt, Artificial Sequence
  Description of Artificial Sequence: Synthetic oligonucleotide
gcaaaauuugugccucugu

SEQ ID NO: 1877698 - RNA, 19 nt, Artificial Sequence
  Description of Artificial Sequence: Synthetic oligonucleotide
ggagucccgcauauacugc

SEQ ID NO: 1877699 - RNA, 19 nt, Artificial Sequence
  Description of Artificial Sequence: Synthetic oligonucleotide
caacaacuaugcaggagau

SEQ ID NO: 1877700 - RNA, 19 nt, Artificial Sequence
  Description of Artificial Sequence: Synthetic oligonucleotide
caaaggccacuuucugaaa

SEQ ID NO: 1877701 - RNA, 19 nt, Artificial Sequence
  Description of Artificial Sequence: Synthetic oligonucleotide
ccauauugggagccauuuc

SEQ ID NO: 1877702 - RNA, 19 nt, Artificial Sequence
  Description of Artificial Sequence: Synthetic oligonucleotide
gcggugggcaaaauuugug

SEQ ID NO: 1877703 - RNA, 19 nt, Artificial Sequence
  Description of Artificial Sequence: Synthetic oligonucleotide
gugcuccgaacugcuuccg

SEQ ID NO: 1877704 - RNA, 19 nt, Artificial Sequence
  Description of Artificial Sequence: Synthetic oligonucleotide
gguacagagcggugggcaa

SEQ ID NO: 1877705 - RNA, 19 nt, Artificial Sequence
  Description of Artificial Sequence: Synthetic oligonucleotide
ugcuaccuucuaggauuug

SEQ ID NO: 1877706 - RNA, 19 nt, Artificial Sequence
  Description of Artificial Sequence: Synthetic oligonucleotide
cuccaugguacagagcggu

SEQ ID NO: 1877707 - RNA, 19 nt, Artificial Sequence
  Description of Artificial Sequence: Synthetic oligonucleotide
cuggagucccgcauauacu

SEQ ID NO: 1877708 - RNA, 19 nt, Artificial Sequence
  Description of Artificial Sequence: Synthetic oligonucleotide
cucggguuggcugugaguu

SEQ ID NO: 1877709 - RNA, 19 nt, Artificial Sequence
  Description of Artificial Sequence: Synthetic oligonucleotide
ccucauuacuucauugcua

SEQ ID NO: 1877710 - RNA, 19 nt, Artificial Sequence
  Description of Artificial Sequence: Synthetic oligonucleotide
ucguuuggcugaggucaga

SEQ ID NO: 1877711 - RNA, 19 nt, Artificial Sequence
  Description of Artificial Sequence: Synthetic oligonucleotide
cuccucuugcaaagccaca

SEQ ID NO: 1877712 - RNA, 19 nt, Artificial Sequence
  Description of Artificial Sequence: Synthetic oligonucleotide
agacccacccacgucuguu

SEQ ID NO: 1877713 - RNA, 19 nt, Artificial Sequence
  Description of Artificial Sequence: Synthetic oligonucleotide
ggaccuugaggugcucuug

SEQ ID NO: 1877714 - RNA, 19 nt, Artificial Sequence
  Description of Artificial Sequence: Synthetic oligonucleotide
ggauuugguggacccugga

SEQ ID NO: 1877715 - RNA, 19 nt, Artificial Sequence
  Description of Artificial Sequence: Synthetic oligonucleotide
cuaugcaggagaugccuuu

SEQ ID NO: 1877716 - RNA, 19 nt, Artificial Sequence
  Description of Artificial Sequence: Synthetic oligonucleotide
gcgaugagaaagcccuguc

SEQ ID NO: 1877717 - RNA, 19 nt, Artificial Sequence
  Description of Artificial Sequence: Synthetic oligonucleotide
ucacucccacuuccugguu

SEQ ID NO: 1877718 - RNA, 19 nt, Artificial Sequence
  Description of Artificial Sequence: Synthetic oligonucleotide
ggaugcaacauugauccuu

SEQ ID NO: 1877719 - RNA, 19 nt, Artificial Sequence
  Description of Artificial Sequence: Synthetic oligonucleotide
gauugcggcugcacaugaa

SEQ ID NO: 1877720 - RNA, 19 nt, Artificial Sequence
  Description of Artificial Sequence: Synthetic oligonucleotide
caugaaccccaggcuggac

SEQ ID NO: 1877721 - RNA, 19 nt, Artificial Sequence
  Description of Artificial Sequence: Synthetic oligonucleotide
guacagagcggugggcaaa

SEQ ID NO: 1877722 - RNA, 19 nt, Artificial Sequence
  Description of Artificial Sequence: Synthetic oligonucleotide
gcggcugcacaugaacccc

SEQ ID NO: 1877723 - RNA, 19 nt, Artificial Sequence
  Description of Artificial Sequence: Synthetic oligonucleotide
cuguggcuaaggcuucaaa

SEQ ID NO: 1877724 - RNA, 19 nt, Artificial Sequence
  Description of Artificial Sequence: Synthetic oligonucleotide
gguucccuucucaacaacu

SEQ ID NO: 1877725 - RNA, 19 nt, Artificial Sequence
  Description of Artificial Sequence: Synthetic oligonucleotide
cccgcauauacugcugaac

SEQ ID NO: 1877726 - RNA, 19 nt, Artificial Sequence
  Description of Artificial Sequence: Synthetic oligonucleotide
ggguucccuucucaacaac

SEQ ID NO: 1877727 - RNA, 19 nt, Artificial Sequence
  Description of Artificial Sequence: Synthetic oligonucleotide
ccgcuccucuugcaaagcc

SEQ ID NO: 1877728 - RNA, 19 nt, Artificial Sequence
  Description of Artificial Sequence: Synthetic oligonucleotide
guuucuggcuagaggugcu

SEQ ID NO: 1877729 - RNA, 19 nt, Artificial Sequence
  Description of Artificial Sequence: Synthetic oligonucleotide
agccuccaugcaucugcaa

SEQ ID NO: 1877730 - RNA, 19 nt, Artificial Sequence
  Description of Artificial Sequence: Synthetic oligonucleotide
cacugcucggguuggcugu

SEQ ID NO: 1877731 - RNA, 19 nt, Artificial Sequence
  Description of Artificial Sequence: Synthetic oligonucleotide
gggguucccuucucaacaa

SEQ ID NO: 1877732 - RNA, 19 nt, Artificial Sequence
  Description of Artificial Sequence: Synthetic oligonucleotide
ccuucucaacaacuaugca

SEQ ID NO: 1877733 - RNA, 19 nt, Artificial Sequence
  Description of Artificial Sequence: Synthetic oligonucleotide
guggacccuggagucccgc

SEQ ID NO: 1877734 - RNA, 19 nt, Artificial Sequence
  Description of Artificial Sequence: Synthetic oligonucleotide
ccugauccuccaguucggc

SEQ ID NO: 1877735 - RNA, 19 nt, Artificial Sequence
  Description of Artificial Sequence: Synthetic oligonucleotide
ccuuccgccguucaguccu

SEQ ID NO: 1877736 - RNA, 19 nt, Artificial Sequence
  Description of Artificial Sequence: Synthetic oligonucleotide
ccagacccacccacgucug

SEQ ID NO: 1877737 - RNA, 19 nt, Artificial Sequence
  Description of Artificial Sequence: Synthetic oligonucleotide
cucuuggguaaggacaauu

SEQ ID NO: 1877738 - RNA, 19 nt, Artificial Sequence
  Description of Artificial Sequence: Synthetic oligonucleotide
cagaaguaucgaggcgaga

SEQ ID NO: 1877739 - RNA, 19 nt, Artificial Sequence
  Description of Artificial Sequence: Synthetic oligonucleotide
ccguaacaaagagcuuggc

SEQ ID NO: 1877740 - RNA, 19 nt, Artificial Sequence
  Description of Artificial Sequence: Synthetic oligonucleotide
gucccucgcucccaauccu

SEQ ID NO: 1877741 - RNA, 19 nt, Artificial Sequence
  Description of Artificial Sequence: Synthetic oligonucleotide
ggcuucgagagaucagcau

SEQ ID NO: 1877742 - RNA, 19 nt, Artificial Sequence
  Description of Artificial Sequence: Synthetic oligonucleotide
gaucccacucugccauauu

SEQ ID NO: 1877743 - RNA, 19 nt, Artificial Sequence
  Description of Artificial Sequence: Synthetic oligonucleotide
cagagcggugggcaaaauu

SEQ ID NO: 1877744 - RNA, 19 nt, Artificial Sequence
  Description of Artificial Sequence: Synthetic oligonucleotide
gccauauugggagccauuu

SEQ ID NO: 1877745 - RNA, 19 nt, Artificial Sequence
  Description of Artificial Sequence: Synthetic oligonucleotide
cgagacaguccagacccac

SEQ ID NO: 1877746 - RNA, 19 nt, Artificial Sequence
  Description of Artificial Sequence: Synthetic oligonucleotide
cccacugaugaaggccuug

SEQ ID NO: 1877747 - RNA, 19 nt, Artificial Sequence
  Description of Artificial Sequence: Synthetic oligonucleotide
cauugauccuuccgccguu

SEQ ID NO: 1877748 - RNA, 19 nt, Artificial Sequence
  Description of Artificial Sequence: Synthetic oligonucleotide
gccugguugcagauaguaa

SEQ ID NO: 1877749 - RNA, 19 nt, Artificial Sequence
  Description of Artificial Sequence: Synthetic oligonucleotide
ggaauugcaggugcugguu

SEQ ID NO: 1877750 - RNA, 19 nt, Artificial Sequence
  Description of Artificial Sequence: Synthetic oligonucleotide
cauccguaacaaagagcuu

SEQ ID NO: 1877751 - RNA, 19 nt, Artificial Sequence
  Description of Artificial Sequence: Synthetic oligonucleotide
ccuugaggugcucuugggu

SEQ ID NO: 1877752 - RNA, 19 nt, Artificial Sequence
  Description of Artificial Sequence: Synthetic oligonucleotide
guucggcacaugaccacau

SEQ ID NO: 1877753 - RNA, 19 nt, Artificial Sequence
  Description of Artificial Sequence: Synthetic oligonucleotide
gcauccucauuacuucauu

SEQ ID NO: 1877754 - RNA, 19 nt, Artificial Sequence
  Description of Artificial Sequence: Synthetic oligonucleotide
cugaucccacucugccaua

SEQ ID NO: 1877755 - RNA, 19 nt, Artificial Sequence
  Description of Artificial Sequence: Synthetic oligonucleotide
agaugccuuuggggccuga

SEQ ID NO: 1877756 - RNA, 19 nt, Artificial Sequence
  Description of Artificial Sequence: Synthetic oligonucleotide
cuggugcagccuguggcua

SEQ ID NO: 1877757 - RNA, 19 nt, Artificial Sequence
  Description of Artificial Sequence: Synthetic oligonucleotide
ccaagagagcaggaugcaa

SEQ ID NO: 1877758 - RNA, 19 nt, Artificial Sequence
  Description of Artificial Sequence: Synthetic oligonucleotide
cccaaagcccagcugugcu

SEQ ID NO: 1877759 - RNA, 19 nt, Artificial Sequence
  Description of Artificial Sequence: Synthetic oligonucleotide
ggacccuggagucccgcau

SEQ ID NO: 1877760 - RNA, 19 nt, Artificial Sequence
  Description of Artificial Sequence: Synthetic oligonucleotide
cuaaggccagggguucccu

SEQ ID NO: 1877761 - RNA, 19 nt, Artificial Sequence
  Description of Artificial Sequence: Synthetic oligonucleotide
cacacauguuguggaugcu

SEQ ID NO: 1877762 - RNA, 19 nt, Artificial Sequence
  Description of Artificial Sequence: Synthetic oligonucleotide
cauggagcacaaggccacu

SEQ ID NO: 1877763 - RNA, 19 nt, Artificial Sequence
  Description of Artificial Sequence: Synthetic oligonucleotide
uuccgccguucaguccuuu

SEQ ID NO: 1877764 - RNA, 19 nt, Artificial Sequence
  Description of Artificial Sequence: Synthetic oligonucleotide
ccuugucguuuggcugagg

SEQ ID NO: 1877765 - RNA, 19 nt, Artificial Sequence
  Description of Artificial Sequence: Synthetic oligonucleotide
cgaggcgagacaguccaga

SEQ ID NO: 1877766 - RNA, 19 nt, Artificial Sequence
  Description of Artificial Sequence: Synthetic oligonucleotide
cugccauauugggagccau

SEQ ID NO: 1877767 - RNA, 19 nt, Artificial Sequence
  Description of Artificial Sequence: Synthetic oligonucleotide
cccacgucuguucguacgu

SEQ ID NO: 1877768 - RNA, 19 nt, Artificial Sequence
  Description of Artificial Sequence: Synthetic oligonucleotide
ggccagggguucccuucuc

SEQ ID NO: 1877769 - RNA, 19 nt, Artificial Sequence
  Description of Artificial Sequence: Synthetic oligonucleotide
cgcucccaauccuguuggc

SEQ ID NO: 1877770 - RNA, 19 nt, Artificial Sequence
  Description of Artificial Sequence: Synthetic oligonucleotide
gcuaguccugaagcaggcu

SEQ ID NO: 1877771 - RNA, 19 nt, Artificial Sequence
  Description of Artificial Sequence: Synthetic oligonucleotide
cagacccacccacgucugu

SEQ ID NO: 1877772 - RNA, 19 nt, Artificial Sequence
  Description of Artificial Sequence: Synthetic oligonucleotide
ggguuggcugugaguucca

SEQ ID NO: 1877773 - RNA, 19 nt, Artificial Sequence
  Description of Artificial Sequence: Synthetic oligonucleotide
cgucuguucguacguagau

SEQ ID NO: 1877774 - RNA, 19 nt, Artificial Sequence
  Description of Artificial Sequence: Synthetic oligonucleotide
gcgagacaguccagaccca

SEQ ID NO: 1877775 - RNA, 19 nt, Artificial Sequence
  Description of Artificial Sequence: Synthetic oligonucleotide
cccucgcucccaauccugu

SEQ ID NO: 1877776 - RNA, 19 nt, Artificial Sequence
  Description of Artificial Sequence: Synthetic oligonucleotide
ccuguggcuaaggcuucaa

SEQ ID NO: 1877777 - RNA, 19 nt, Artificial Sequence
  Description of Artificial Sequence: Synthetic oligonucleotide
cuuccgccguucaguccuu

SEQ ID NO: 1877778 - RNA, 19 nt, Artificial Sequence
  Description of Artificial Sequence: Synthetic oligonucleotide
ccacgucuguucguacgua

SEQ ID NO: 1877779 - RNA, 19 nt, Artificial Sequence
  Description of Artificial Sequence: Synthetic oligonucleotide
gcucuuggguaaggacaau

SEQ ID NO: 1877780 - RNA, 19 nt, Artificial Sequence
  Description of Artificial Sequence: Synthetic oligonucleotide
ccggaccuugaggugcucu

SEQ ID NO: 1877781 - RNA, 19 nt, Artificial Sequence
  Description of Artificial Sequence: Synthetic oligonucleotide
cggaccuugaggugcucuu

SEQ ID NO: 1877782 - RNA, 19 nt, Artificial Sequence
  Description of Artificial Sequence: Synthetic oligonucleotide
cccuggagucccgcauaua

SEQ ID NO: 1877783 - RNA, 19 nt, Artificial Sequence
  Description of Artificial Sequence: Synthetic oligonucleotide
ccugucccucgcucccaau

SEQ ID NO: 1877784 - RNA, 19 nt, Artificial Sequence
  Description of Artificial Sequence: Synthetic oligonucleotide
cagcugcaguacggaucau

SEQ ID NO: 1877785 - RNA, 19 nt, Artificial Sequence
  Description of Artificial Sequence: Synthetic oligonucleotide
aaguucaaggcucuuaugc

SEQ ID NO: 1877786 - RNA, 19 nt, Artificial Sequence
  Description of Artificial Sequence: Synthetic oligonucleotide
ugaauggucacuuacagag

SEQ ID NO: 1877787 - RNA, 19 nt, Artificial Sequence
  Description of Artificial Sequence: Synthetic oligonucleotide
aagcuuaugaaccugaucu

SEQ ID NO: 1877788 - RNA, 19 nt, Artificial Sequence
  Description of Artificial Sequence: Synthetic oligonucleotide
ugaauggucacuuacagcc

SEQ ID NO: 1877789 - RNA, 19 nt, Artificial Sequence
  Description of Artificial Sequence: Synthetic oligonucleotide
aguaccucaacucagacuc

SEQ ID NO: 1877790 - RNA, 19 nt, Artificial Sequence
  Description of Artificial Sequence: Synthetic oligonucleotide
ugucccuucaacaagauug

SEQ ID NO: 1877791 - RNA, 19 nt, Artificial Sequence
  Description of Artificial Sequence: Synthetic oligonucleotide
aaagccaucaaaauuauug

SEQ ID NO: 1877792 - RNA, 19 nt, Artificial Sequence
  Description of Artificial Sequence: Synthetic oligonucleotide
aagaaguuugagccgaagc

SEQ ID NO: 1877793 - RNA, 19 nt, Artificial Sequence
  Description of Artificial Sequence: Synthetic oligonucleotide
ucuauucugagccaaaaca

SEQ ID NO: 1877794 - RNA, 19 nt, Artificial Sequence
  Description of Artificial Sequence: Synthetic oligonucleotide
ugcaaauuguugcugaggg

SEQ ID NO: 1877795 - RNA, 19 nt, Artificial Sequence
  Description of Artificial Sequence: Synthetic oligonucleotide
aaaggaaccaccucugcuc

SEQ ID NO: 1877796 - RNA, 19 nt, Artificial Sequence
  Description of Artificial Sequence: Synthetic oligonucleotide
ugagccaaaacacagggug

SEQ ID NO: 1877797 - RNA, 19 nt, Artificial Sequence
  Description of Artificial Sequence: Synthetic oligonucleotide
uuuaacagagggcuguagg

SEQ ID NO: 1877798 - RNA, 19 nt, Artificial Sequence
  Description of Artificial Sequence: Synthetic oligonucleotide
ucugagccaaaacacaggg

SEQ ID NO: 1877799 - RNA, 19 nt, Artificial Sequence
  Description of Artificial Sequence: Synthetic oligonucleotide
uucaacagaucuucuaugg

SEQ ID NO: 1877800 - RNA, 19 nt, Artificial Sequence
  Description of Artificial Sequence: Synthetic oligonucleotide
aagacaugagagcagcuag

SEQ ID NO: 1877801 - RNA, 19 nt, Artificial Sequence
  Description of Artificial Sequence: Synthetic oligonucleotide
cuuacagccacaaugggac

SEQ ID NO: 1877802 - RNA, 19 nt, Artificial Sequence
  Description of Artificial Sequence: Synthetic oligonucleotide
aguaguuaugguccugucc

SEQ ID NO: 1877803 - RNA, 19 nt, Artificial Sequence
  Description of Artificial Sequence: Synthetic oligonucleotide
aauggucacuuacagccac

SEQ ID NO: 1877804 - RNA, 19 nt, Artificial Sequence
  Description of Artificial Sequence: Synthetic oligonucleotide
uuuuagaagacgcugcagu

SEQ ID NO: 1877805 - RNA, 19 nt, Artificial Sequence
  Description of Artificial Sequence: Synthetic oligonucleotide
agucggcucauccacaugc

SEQ ID NO: 1877806 - RNA, 19 nt, Artificial Sequence
  Description of Artificial Sequence: Synthetic oligonucleotide
aauggucacuuacagaggu

SEQ ID NO: 1877807 - RNA, 19 nt, Artificial Sequence
  Description of Artificial Sequence: Synthetic oligonucleotide
cauugaauucaguaggugc

SEQ ID NO: 1877808 - RNA, 19 nt, Artificial Sequence
  Description of Artificial Sequence: Synthetic oligonucleotide
guaguuaugguccuguccc

SEQ ID NO: 1877809 - RNA, 19 nt, Artificial Sequence
  Description of Artificial Sequence: Synthetic oligonucleotide
cucaacaacccuuucaccc

SEQ ID NO: 1877810 - RNA, 19 nt, Artificial Sequence
  Description of Artificial Sequence: Synthetic oligonucleotide
ucaguuaccgcucuauucu

SEQ ID NO: 1877811 - RNA, 19 nt, Artificial Sequence
  Description of Artificial Sequence: Synthetic oligonucleotide
agggcuguaggucaguuac

SEQ ID NO: 1877812 - RNA, 19 nt, Artificial Sequence
  Description of Artificial Sequence: Synthetic oligonucleotide
agccaucaaaauuauuggc

SEQ ID NO: 1877813 - RNA, 19 nt, Artificial Sequence
  Description of Artificial Sequence: Synthetic oligonucleotide
uuaccguuuuagaagacgc

SEQ ID NO: 1877814 - RNA, 19 nt, Artificial Sequence
  Description of Artificial Sequence: Synthetic oligonucleotide
gaugccugagauuuggcag

SEQ ID NO: 1877815 - RNA, 19 nt, Artificial Sequence
  Description of Artificial Sequence: Synthetic oligonucleotide
ucaacaagauugauguggc

SEQ ID NO: 1877816 - RNA, 19 nt, Artificial Sequence
  Description of Artificial Sequence: Synthetic oligonucleotide
cuuuuggagacccacaaug

SEQ ID NO: 1877817 - RNA, 19 nt, Artificial Sequence
  Description of Artificial Sequence: Synthetic oligonucleotide
caugagagcagcuaguuuc

SEQ ID NO: 1877818 - RNA, 19 nt, Artificial Sequence
  Description of Artificial Sequence: Synthetic oligonucleotide
ugcuaaaaucucuucauga

SEQ ID NO: 1877819 - RNA, 19 nt, Artificial Sequence
  Description of Artificial Sequence: Synthetic oligonucleotide
uccugucccagacagaugc

SEQ ID NO: 1877820 - RNA, 19 nt, Artificial Sequence
  Description of Artificial Sequence: Synthetic oligonucleotide
uggacucacagucuuuugg

SEQ ID NO: 1877821 - RNA, 19 nt, Artificial Sequence
  Description of Artificial Sequence: Synthetic oligonucleotide
agaaguuugagccgaagcu

SEQ ID NO: 1877822 - RNA, 19 nt, Artificial Sequence
  Description of Artificial Sequence: Synthetic oligonucleotide
cuauucugagccaaaacac

SEQ ID NO: 1877823 - RNA, 19 nt, Artificial Sequence
  Description of Artificial Sequence: Synthetic oligonucleotide
aacaagauugauguggcgu

SEQ ID NO: 1877824 - RNA, 19 nt, Artificial Sequence
  Description of Artificial Sequence: Synthetic oligonucleotide
ugcuuagaagccuuccugg

SEQ ID NO: 1877825 - RNA, 19 nt, Artificial Sequence
  Description of Artificial Sequence: Synthetic oligonucleotide
uuagccucucagcugaaag

SEQ ID NO: 1877826 - RNA, 19 nt, Artificial Sequence
  Description of Artificial Sequence: Synthetic oligonucleotide
uucucagcuaccauggacu

SEQ ID NO: 1877827 - RNA, 19 nt, Artificial Sequence
  Description of Artificial Sequence: Synthetic oligonucleotide
uucugcuaaaaucucuuca

SEQ ID NO: 1877828 - RNA, 19 nt, Artificial Sequence
  Description of Artificial Sequence: Synthetic oligonucleotide
caacaauucugcuaaaauc

SEQ ID NO: 1877829 - RNA, 19 nt, Artificial Sequence
  Description of Artificial Sequence: Synthetic oligonucleotide
uacaugaggugccaucagg

SEQ ID NO: 1877830 - RNA, 19 nt, Artificial Sequence
  Description of Artificial Sequence: Synthetic oligonucleotide
cugaucgucuuucugaggc

SEQ ID NO: 1877831 - RNA, 19 nt, Artificial Sequence
  Description of Artificial Sequence: Synthetic oligonucleotide
ucggcuuugugcauggaag

SEQ ID NO: 1877832 - RNA, 19 nt, Artificial Sequence
  Description of Artificial Sequence: Synthetic oligonucleotide
uuagaugccugagauuugg

SEQ ID NO: 1877833 - RNA, 19 nt, Artificial Sequence
  Description of Artificial Sequence: Synthetic oligonucleotide
uuugagccgaagcuuauga

SEQ ID NO: 1877834 - RNA, 19 nt, Artificial Sequence
  Description of Artificial Sequence: Synthetic oligonucleotide
ugcucaacaacccuuucac

SEQ ID NO: 1877835 - RNA, 19 nt, Artificial Sequence
  Description of Artificial Sequence: Synthetic oligonucleotide
uuuucucacauuagaugcc

SEQ ID NO: 1877836 - RNA, 19 nt, Artificial Sequence
  Description of Artificial Sequence: Synthetic oligonucleotide
cugcuaugcaaauuguugc

SEQ ID NO: 1877837 - RNA, 19 nt, Artificial Sequence
  Description of Artificial Sequence: Synthetic oligonucleotide
ucuucuauggacucacagu

SEQ ID NO: 1877838 - RNA, 19 nt, Artificial Sequence
  Description of Artificial Sequence: Synthetic oligonucleotide
uuaacagagggcuguaggu

SEQ ID NO: 1877839 - RNA, 19 nt, Artificial Sequence
  Description of Artificial Sequence: Synthetic oligonucleotide
uccaaguaccucaacucag

SEQ ID NO: 1877840 - RNA, 19 nt, Artificial Sequence
  Description of Artificial Sequence: Synthetic oligonucleotide
uaaugagcuggccauuacc

SEQ ID NO: 1877841 - RNA, 19 nt, Artificial Sequence
  Description of Artificial Sequence: Synthetic oligonucleotide
aaggcaaguggcuucuuca

SEQ ID NO: 1877842 - RNA, 19 nt, Artificial Sequence
  Description of Artificial Sequence: Synthetic oligonucleotide
uaaaggaaccaccucugcu

SEQ ID NO: 1877843 - RNA, 19 nt, Artificial Sequence
  Description of Artificial Sequence: Synthetic oligonucleotide
auuaccguuuuagaagacg

SEQ ID NO: 1877844 - RNA, 19 nt, Artificial Sequence
  Description of Artificial Sequence: Synthetic oligonucleotide
caucaaaauuauuggcucc

SEQ ID NO: 1877845 - RNA, 19 nt, Artificial Sequence
  Description of Artificial Sequence: Synthetic oligonucleotide
ugagccgaagcuuaugaac

SEQ ID NO: 1877846 - RNA, 19 nt, Artificial Sequence
  Description of Artificial Sequence: Synthetic oligonucleotide
ugagugacuguacuucagc

SEQ ID NO: 1877847 - RNA, 19 nt, Artificial Sequence
  Description of Artificial Sequence: Synthetic oligonucleotide
ugugcacucggcuuugugc

SEQ ID NO: 1877848 - RNA, 19 nt, Artificial Sequence
  Description of Artificial Sequence: Synthetic oligonucleotide
agguugugcagguuuuagc

SEQ ID NO: 1877849 - RNA, 19 nt, Artificial Sequence
  Description of Artificial Sequence: Synthetic oligonucleotide
uucugaucgucuuucugag

SEQ ID NO: 1877850 - RNA, 19 nt, Artificial Sequence
  Description of Artificial Sequence: Synthetic oligonucleotide
uuaugaaccugaucuucag

SEQ ID NO: 1877851 - RNA, 19 nt, Artificial Sequence
  Description of Artificial Sequence: Synthetic oligonucleotide
cacaaugggacacaggcuc

SEQ ID NO: 1877852 - RNA, 19 nt, Artificial Sequence
  Description of Artificial Sequence: Synthetic oligonucleotide
uaugcaaauuguugcugag

SEQ ID NO: 1877853 - RNA, 19 nt, Artificial Sequence
  Description of Artificial Sequence: Synthetic oligonucleotide
accaccucugcucaacaac

SEQ ID NO: 1877854 - RNA, 19 nt, Artificial Sequence
  Description of Artificial Sequence: Synthetic oligonucleotide
auucaacagaucuucuaug

SEQ ID NO: 1877855 - RNA, 19 nt, Artificial Sequence
  Description of Artificial Sequence: Synthetic oligonucleotide
agguuuuagccucucagcu

SEQ ID NO: 1877856 - RNA, 19 nt, Artificial Sequence
  Description of Artificial Sequence: Synthetic oligonucleotide
uuuugucuuaaagccauca

SEQ ID NO: 1877857 - RNA, 19 nt, Artificial Sequence
  Description of Artificial Sequence: Synthetic oligonucleotide
acugcuaugcaaauuguug

SEQ ID NO: 1877858 - RNA, 19 nt, Artificial Sequence
  Description of Artificial Sequence: Synthetic oligonucleotide
augccugagauuuggcagg

SEQ ID NO: 1877859 - RNA, 19 nt, Artificial Sequence
  Description of Artificial Sequence: Synthetic oligonucleotide
uagaagacgcugcaguuuc

SEQ ID NO: 1877860 - RNA, 19 nt, Artificial Sequence
  Description of Artificial Sequence: Synthetic oligonucleotide
uggagacccacaaugggac

SEQ ID NO: 1877861 - RNA, 19 nt, Artificial Sequence
  Description of Artificial Sequence: Synthetic oligonucleotide
gaggcgacaacaauucugc

SEQ ID NO: 1877862 - RNA, 19 nt, Artificial Sequence
  Description of Artificial Sequence: Synthetic oligonucleotide
uuagccuuccuguuuacau

SEQ ID NO: 1877863 - RNA, 19 nt, Artificial Sequence
  Description of Artificial Sequence: Synthetic oligonucleotide
uggcauaaaggaaccaccu

SEQ ID NO: 1877864 - RNA, 19 nt, Artificial Sequence
  Description of Artificial Sequence: Synthetic oligonucleotide
ucacauuagaugccugaga

SEQ ID NO: 1877865 - RNA, 19 nt, Artificial Sequence
  Description of Artificial Sequence: Synthetic oligonucleotide
ucucacauuagaugccuga

SEQ ID NO: 1877866 - RNA, 19 nt, Artificial Sequence
  Description of Artificial Sequence: Synthetic oligonucleotide
ugauguggcguucccacca

SEQ ID NO: 1877867 - RNA, 19 nt, Artificial Sequence
  Description of Artificial Sequence: Synthetic oligonucleotide
gccauuaccguuuuagaag

SEQ ID NO: 1877868 - RNA, 19 nt, Artificial Sequence
  Description of Artificial Sequence: Synthetic oligonucleotide
ugauacuguagcucauuca

SEQ ID NO: 1877869 - RNA, 19 nt, Artificial Sequence
  Description of Artificial Sequence: Synthetic oligonucleotide
agauugauguggcguuccc

SEQ ID NO: 1877870 - RNA, 19 nt, Artificial Sequence
  Description of Artificial Sequence: Synthetic oligonucleotide
cucaacucagacuccacac

SEQ ID NO: 1877871 - RNA, 19 nt, Artificial Sequence
  Description of Artificial Sequence: Synthetic oligonucleotide
gccacaaugggacacaggc

SEQ ID NO: 1877872 - RNA, 19 nt, Artificial Sequence
  Description of Artificial Sequence: Synthetic oligonucleotide
uucaacuccugacgcaggc

SEQ ID NO: 1877873 - RNA, 19 nt, Artificial Sequence
  Description of Artificial Sequence: Synthetic oligonucleotide
ucuauggacucacagucuu

SEQ ID NO: 1877874 - RNA, 19 nt, Artificial Sequence
  Description of Artificial Sequence: Synthetic oligonucleotide
uggucacuuacagaggugc

SEQ ID NO: 1877875 - RNA, 19 nt, Artificial Sequence
  Description of Artificial Sequence: Synthetic oligonucleotide
gagccgaagcuuaugaacc

SEQ ID NO: 1877876 - RNA, 19 nt, Artificial Sequence
  Description of Artificial Sequence: Synthetic oligonucleotide
gugcauggaaggcaagugg

SEQ ID NO: 1877877 - RNA, 19 nt, Artificial Sequence
  Description of Artificial Sequence: Synthetic oligonucleotide
ugugagugacuguacuuca

SEQ ID NO: 1877878 - RNA, 19 nt, Artificial Sequence
  Description of Artificial Sequence: Synthetic oligonucleotide
ugcuaugcaaauuguugcu

SEQ ID NO: 1877879 - RNA, 19 nt, Artificial Sequence
  Description of Artificial Sequence: Synthetic oligonucleotide
gauuuggcagguugugcag

SEQ ID NO: 1877880 - RNA, 19 nt, Artificial Sequence
  Description of Artificial Sequence: Synthetic oligonucleotide
auccacaugcuuagaagcc

SEQ ID NO: 1877881 - RNA, 19 nt, Artificial Sequence
  Description of Artificial Sequence: Synthetic oligonucleotide
augcuuagaagccuuccug

SEQ ID NO: 1877882 - RNA, 19 nt, Artificial Sequence
  Description of Artificial Sequence: Synthetic oligonucleotide
caaauuguugcugagggga

SEQ ID NO: 1877883 - RNA, 19 nt, Artificial Sequence
  Description of Artificial Sequence: Synthetic oligonucleotide
ucugcaaggucaauuugau

SEQ ID NO: 1877884 - RNA, 19 nt, Artificial Sequence
  Description of Artificial Sequence: Synthetic oligonucleotide
auaucagucuucaugggcu

SEQ ID NO: 1877885 - RNA, 19 nt, Artificial Sequence
  Description of Artificial Sequence: Synthetic oligonucleotide
acgugagcuuuccuguccc

SEQ ID NO: 1877886 - RNA, 19 nt, Artificial Sequence
  Description of Artificial Sequence: Synthetic oligonucleotide
ugcugaggggaguugcacg

SEQ ID NO: 1877887 - RNA, 19 nt, Artificial Sequence
  Description of Artificial Sequence: Synthetic oligonucleotide
cagguuuuagccucucagc

SEQ ID NO: 1877888 - RNA, 19 nt, Artificial Sequence
  Description of Artificial Sequence: Synthetic oligonucleotide
uugcacgugagcuuuccug

SEQ ID NO: 1877889 - RNA, 19 nt, Artificial Sequence
  Description of Artificial Sequence: Synthetic oligonucleotide
ggagagaugacacuuucac

SEQ ID NO: 1877890 - RNA, 19 nt, Artificial Sequence
  Description of Artificial Sequence: Synthetic oligonucleotide
acuuacagaggugccacgg

SEQ ID NO: 1877891 - RNA, 19 nt, Artificial Sequence
  Description of Artificial Sequence: Synthetic oligonucleotide
uuuagaagacgcugcaguu

SEQ ID NO: 1877892 - RNA, 19 nt, Artificial Sequence
  Description of Artificial Sequence: Synthetic oligonucleotide
aaaucucuucaugacucug

SEQ ID NO: 1877893 - RNA, 19 nt, Artificial Sequence
  Description of Artificial Sequence: Synthetic oligonucleotide
aauucugcuaaaaucucuu

SEQ ID NO: 1877894 - RNA, 19 nt, Artificial Sequence
  Description of Artificial Sequence: Synthetic oligonucleotide
acaugcuuagaagccuucc

SEQ ID NO: 1877895 - RNA, 19 nt, Artificial Sequence
  Description of Artificial Sequence: Synthetic oligonucleotide
aaauuguugcugaggggag

SEQ ID NO: 1877896 - RNA, 19 nt, Artificial Sequence
  Description of Artificial Sequence: Synthetic oligonucleotide
cugauuuguugucugcaag

SEQ ID NO: 1877897 - RNA, 19 nt, Artificial Sequence
  Description of Artificial Sequence: Synthetic oligonucleotide
uuacaugaggugccaucag

SEQ ID NO: 1877898 - RNA, 19 nt, Artificial Sequence
  Description of Artificial Sequence: Synthetic oligonucleotide
acuucaacuccugacgcag

SEQ ID NO: 1877899 - RNA, 19 nt, Artificial Sequence
  Description of Artificial Sequence: Synthetic oligonucleotide
cacccaacuucccacaaag

SEQ ID NO: 1877900 - RNA, 19 nt, Artificial Sequence
  Description of Artificial Sequence: Synthetic oligonucleotide
accuccaaguaccucaacu

SEQ ID NO: 1877901 - RNA, 19 nt, Artificial Sequence
  Description of Artificial Sequence: Synthetic oligonucleotide
acccuuucacccaacuucc

SEQ ID NO: 1877902 - RNA, 19 nt, Artificial Sequence
  Description of Artificial Sequence: Synthetic oligonucleotide
ugcacgugagcuuuccugu

SEQ ID NO: 1877903 - RNA, 19 nt, Artificial Sequence
  Description of Artificial Sequence: Synthetic oligonucleotide
cugaauggucacuuacagc

SEQ ID NO: 1877904 - RNA, 19 nt, Artificial Sequence
  Description of Artificial Sequence: Synthetic oligonucleotide
cccacaaugggacacaggc

SEQ ID NO: 1877905 - RNA, 19 nt, Artificial Sequence
  Description of Artificial Sequence: Synthetic oligonucleotide
guuaccgcucuauucugag

SEQ ID NO: 1877906 - RNA, 19 nt, Artificial Sequence
  Description of Artificial Sequence: Synthetic oligonucleotide
aacucagacuccacacugg

SEQ ID NO: 1877907 - RNA, 19 nt, Artificial Sequence
  Description of Artificial Sequence: Synthetic oligonucleotide
caauuugauacuguagcuc

SEQ ID NO: 1877908 - RNA, 19 nt, Artificial Sequence
  Description of Artificial Sequence: Synthetic oligonucleotide
acuccacacuggcugaggg

SEQ ID NO: 1877909 - RNA, 19 nt, Artificial Sequence
  Description of Artificial Sequence: Synthetic oligonucleotide
gcuaaaaucucuucaugac

SEQ ID NO: 1877910 - RNA, 19 nt, Artificial Sequence
  Description of Artificial Sequence: Synthetic oligonucleotide
ucugaucgucuuucugagg

SEQ ID NO: 1877911 - RNA, 19 nt, Artificial Sequence
  Description of Artificial Sequence: Synthetic oligonucleotide
ugugcauggaaggcaagug

SEQ ID NO: 1877912 - RNA, 19 nt, Artificial Sequence
  Description of Artificial Sequence: Synthetic oligonucleotide
uuucucacauuagaugccu

SEQ ID NO: 1877913 - RNA, 19 nt, Artificial Sequence
  Description of Artificial Sequence: Synthetic oligonucleotide
gaagcuuaugaaccugauc

SEQ ID NO: 1877914 - RNA, 19 nt, Artificial Sequence
  Description of Artificial Sequence: Synthetic oligonucleotide
uucuauggacucacagucu

SEQ ID NO: 1877915 - RNA, 19 nt, Artificial Sequence
  Description of Artificial Sequence: Synthetic oligonucleotide
ugagauuuggcagguugug

SEQ ID NO: 1877916 - RNA, 19 nt, Artificial Sequence
  Description of Artificial Sequence: Synthetic oligonucleotide
acaagauugauguggcguu

SEQ ID NO: 1877917 - RNA, 19 nt, Artificial Sequence
  Description of Artificial Sequence: Synthetic oligonucleotide
uguggcguucccaccagca

SEQ ID NO: 1877918 - RNA, 19 nt, Artificial Sequence
  Description of Artificial Sequence: Synthetic oligonucleotide
gaauggucacuuacagagg

SEQ ID NO: 1877919 - RNA, 19 nt, Artificial Sequence
  Description of Artificial Sequence: Synthetic oligonucleotide
accguuuuagaagacgcug

SEQ ID NO: 1877920 - RNA, 19 nt, Artificial Sequence
  Description of Artificial Sequence: Synthetic oligonucleotide
ucugggaaacagcauugaa

SEQ ID NO: 1877921 - RNA, 19 nt, Artificial Sequence
  Description of Artificial Sequence: Synthetic oligonucleotide
cuggaggcgacaacaauuc

SEQ ID NO: 1877922 - RNA, 19 nt, Artificial Sequence
  Description of Artificial Sequence: Synthetic oligonucleotide
uggcuguuacaugaggugc

SEQ ID NO: 1877923 - RNA, 19 nt, Artificial Sequence
  Description of Artificial Sequence: Synthetic oligonucleotide
ugucccagacagaugcucu

SEQ ID NO: 1877924 - RNA, 19 nt, Artificial Sequence
  Description of Artificial Sequence: Synthetic oligonucleotide
uccuuuaacagagggcugu

SEQ ID NO: 1877925 - RNA, 19 nt, Artificial Sequence
  Description of Artificial Sequence: Synthetic oligonucleotide
uacuucagcuucacacuug

SEQ ID NO: 1877926 - RNA, 19 nt, Artificial Sequence
  Description of Artificial Sequence: Synthetic oligonucleotide
caugaggugccaucaggag

SEQ ID NO: 1877927 - RNA, 19 nt, Artificial Sequence
  Description of Artificial Sequence: Synthetic oligonucleotide
aggggaguugcacgugagc

SEQ ID NO: 1877928 - RNA, 19 nt, Artificial Sequence
  Description of Artificial Sequence: Synthetic oligonucleotide
cuaugcaaauuguugcuga

SEQ ID NO: 1877929 - RNA, 19 nt, Artificial Sequence
  Description of Artificial Sequence: Synthetic oligonucleotide
augcaaauuguugcugagg

SEQ ID NO: 1877930 - RNA, 19 nt, Artificial Sequence
  Description of Artificial Sequence: Synthetic oligonucleotide
gucaguuaccgcucuauuc

SEQ ID NO: 1877931 - RNA, 19 nt, Artificial Sequence
  Description of Artificial Sequence: Synthetic oligonucleotide
uggcguucccaccagcaug

SEQ ID NO: 1877932 - RNA, 19 nt, Artificial Sequence
  Description of Artificial Sequence: Synthetic oligonucleotide
agaggugccacgguucggg

SEQ ID NO: 1877933 - RNA, 19 nt, Artificial Sequence
  Description of Artificial Sequence: Synthetic oligonucleotide
ucaugacucuggcuguuac

SEQ ID NO: 1877934 - RNA, 19 nt, Artificial Sequence
  Description of Artificial Sequence: Synthetic oligonucleotide
uguugcugaggggaguugc

SEQ ID NO: 1877935 - RNA, 19 nt, Artificial Sequence
  Description of Artificial Sequence: Synthetic oligonucleotide
uuucacccaacuucccaca

SEQ ID NO: 1877936 - RNA, 19 nt, Artificial Sequence
  Description of Artificial Sequence: Synthetic oligonucleotide
ucacuuacagaggugccac

SEQ ID NO: 1877937 - RNA, 19 nt, Artificial Sequence
  Description of Artificial Sequence: Synthetic oligonucleotide
uaagaaguuugagccgaag

SEQ ID NO: 1877938 - RNA, 19 nt, Artificial Sequence
  Description of Artificial Sequence: Synthetic oligonucleotide
gcagguuuuagccucucag

SEQ ID NO: 1877939 - RNA, 19 nt, Artificial Sequence
  Description of Artificial Sequence: Synthetic oligonucleotide
guggcauaaaggaaccacc

SEQ ID NO: 1877940 - RNA, 19 nt, Artificial Sequence
  Description of Artificial Sequence: Synthetic oligonucleotide
aaaacacaggguggcauaa

SEQ ID NO: 1877941 - RNA, 19 nt, Artificial Sequence
  Description of Artificial Sequence: Synthetic oligonucleotide
uaccguuuuagaagacgcu

SEQ ID NO: 1877942 - RNA, 19 nt, Artificial Sequence
  Description of Artificial Sequence: Synthetic oligonucleotide
auacuguagcucauucaac

SEQ ID NO: 1877943 - RNA, 19 nt, Artificial Sequence
  Description of Artificial Sequence: Synthetic oligonucleotide
cagcaacuguaucugagug

SEQ ID NO: 1877944 - RNA, 19 nt, Artificial Sequence
  Description of Artificial Sequence: Synthetic oligonucleotide
uuacagaggugccacgguu

SEQ ID NO: 1877945 - RNA, 19 nt, Artificial Sequence
  Description of Artificial Sequence: Synthetic oligonucleotide
gcuaccauggacuucaacu

SEQ ID NO: 1877946 - RNA, 19 nt, Artificial Sequence
  Description of Artificial Sequence: Synthetic oligonucleotide
aucaggagcaguggugcac

SEQ ID NO: 1877947 - RNA, 19 nt, Artificial Sequence
  Description of Artificial Sequence: Synthetic oligonucleotide
cacagucuuuuggagaccc

SEQ ID NO: 1877948 - RNA, 19 nt, Artificial Sequence
  Description of Artificial Sequence: Synthetic oligonucleotide
gaucgucuuucugaggcug

SEQ ID NO: 1877949 - RNA, 19 nt, Artificial Sequence
  Description of Artificial Sequence: Synthetic oligonucleotide
acuuacagccacaauggga

SEQ ID NO: 1877950 - RNA, 19 nt, Artificial Sequence
  Description of Artificial Sequence: Synthetic oligonucleotide
guuuuagaagacgcugcag

SEQ ID NO: 1877951 - RNA, 19 nt, Artificial Sequence
  Description of Artificial Sequence: Synthetic oligonucleotide
caaggucaauuugauacug

SEQ ID NO: 1877952 - RNA, 19 nt, Artificial Sequence
  Description of Artificial Sequence: Synthetic oligonucleotide
guagcuguacugccugaag

SEQ ID NO: 1877953 - RNA, 19 nt, Artificial Sequence
  Description of Artificial Sequence: Synthetic oligonucleotide
gaguguccuucucagcuac

SEQ ID NO: 1877954 - RNA, 19 nt, Artificial Sequence
  Description of Artificial Sequence: Synthetic oligonucleotide
cucuuaugcaggcacuguc

SEQ ID NO: 1877955 - RNA, 19 nt, Artificial Sequence
  Description of Artificial Sequence: Synthetic oligonucleotide
ucaggagcaguggugcacc

SEQ ID NO: 1877956 - RNA, 19 nt, Artificial Sequence
  Description of Artificial Sequence: Synthetic oligonucleotide
agccucucagcugaaagug

SEQ ID NO: 1877957 - RNA, 19 nt, Artificial Sequence
  Description of Artificial Sequence: Synthetic oligonucleotide
uucucacauuagaugccug

SEQ ID NO: 1877958 - RNA, 19 nt, Artificial Sequence
  Description of Artificial Sequence: Synthetic oligonucleotide
gacagaugcucugggaaac

SEQ ID NO: 1877959 - RNA, 19 nt, Artificial Sequence
  Description of Artificial Sequence: Synthetic oligonucleotide
ugagcuggccauuaccguu

SEQ ID NO: 1877960 - RNA, 19 nt, Artificial Sequence
  Description of Artificial Sequence: Synthetic oligonucleotide
ugacuguacuucagcuuca

SEQ ID NO: 1877961 - RNA, 19 nt, Artificial Sequence
  Description of Artificial Sequence: Synthetic oligonucleotide
uaugguccugucccagaca

SEQ ID NO: 1877962 - RNA, 19 nt, Artificial Sequence
  Description of Artificial Sequence: Synthetic oligonucleotide
cucugacagggcuggaggc

SEQ ID NO: 1877963 - RNA, 19 nt, Artificial Sequence
  Description of Artificial Sequence: Synthetic oligonucleotide
cacuuacagccacaauggg

SEQ ID NO: 1877964 - RNA, 19 nt, Artificial Sequence
  Description of Artificial Sequence: Synthetic oligonucleotide
gcgacaacaauucugcuaa

SEQ ID NO: 1877965 - RNA, 19 nt, Artificial Sequence
  Description of Artificial Sequence: Synthetic oligonucleotide
augacacuuucacugcuau

SEQ ID NO: 1877966 - RNA, 19 nt, Artificial Sequence
  Description of Artificial Sequence: Synthetic oligonucleotide
cuucaacuccugacgcagg

SEQ ID NO: 1877967 - RNA, 19 nt, Artificial Sequence
  Description of Artificial Sequence: Synthetic oligonucleotide
aucuccacagcuugcugga

SEQ ID NO: 1877968 - RNA, 19 nt, Artificial Sequence
  Description of Artificial Sequence: Synthetic oligonucleotide
aaguuugagccgaagcuua

SEQ ID NO: 1877969 - RNA, 19 nt, Artificial Sequence
  Description of Artificial Sequence: Synthetic oligonucleotide
uggccauuaccguuuuaga

SEQ ID NO: 1877970 - RNA, 19 nt, Artificial Sequence
  Description of Artificial Sequence: Synthetic oligonucleotide
uuaccgcucuauucugagc

SEQ ID NO: 1877971 - RNA, 19 nt, Artificial Sequence
  Description of Artificial Sequence: Synthetic oligonucleotide
aaaguggcagcaacuguau

SEQ ID NO: 1877972 - RNA, 19 nt, Artificial Sequence
  Description of Artificial Sequence: Synthetic oligonucleotide
uguaaugagcuggccauua

SEQ ID NO: 1877973 - RNA, 19 nt, Artificial Sequence
  Description of Artificial Sequence: Synthetic oligonucleotide
uagaugccugagauuuggc

SEQ ID NO: 1877974 - RNA, 19 nt, Artificial Sequence
  Description of Artificial Sequence: Synthetic oligonucleotide
gauguggcguucccaccag

SEQ ID NO: 1877975 - RNA, 19 nt, Artificial Sequence
  Description of Artificial Sequence: Synthetic oligonucleotide
uuagaagacgcugcaguuu

SEQ ID NO: 1877976 - RNA, 19 nt, Artificial Sequence
  Description of Artificial Sequence: Synthetic oligonucleotide
gcaaauuguugcugagggg

SEQ ID NO: 1877977 - RNA, 19 nt, Artificial Sequence
  Description of Artificial Sequence: Synthetic oligonucleotide
cucugaauggucacuuaca

SEQ ID NO: 1877978 - RNA, 19 nt, Artificial Sequence
  Description of Artificial Sequence: Synthetic oligonucleotide
cauuagaugccugagauuu

SEQ ID NO: 1877979 - RNA, 19 nt, Artificial Sequence
  Description of Artificial Sequence: Synthetic oligonucleotide
ggacuucaacuccugacgc

SEQ ID NO: 1877980 - RNA, 19 nt, Artificial Sequence
  Description of Artificial Sequence: Synthetic oligonucleotide
ugugcagguuuuagccucu

SEQ ID NO: 1877981 - RNA, 19 nt, Artificial Sequence
  Description of Artificial Sequence: Synthetic oligonucleotide
caaguucaaggcucuuaug

SEQ ID NO: 1877982 - RNA, 19 nt, Artificial Sequence
  Description of Artificial Sequence: Synthetic oligonucleotide
ugaucgucuuucugaggcu

SEQ ID NO: 1877983 - RNA, 19 nt, Artificial Sequence
  Description of Artificial Sequence: Synthetic oligonucleotide
cacgugagcuuuccugucc

SEQ ID NO: 1877984 - RNA, 19 nt, Artificial Sequence
  Description of Artificial Sequence: Synthetic oligonucleotide
acaugaggugccaucagga

SEQ ID NO: 1877985 - RNA, 19 nt, Artificial Sequence
  Description of Artificial Sequence: Synthetic oligonucleotide
gugcacucggcuuugugca

SEQ ID NO: 1877986 - RNA, 19 nt, Artificial Sequence
  Description of Artificial Sequence: Synthetic oligonucleotide
uuguugucugcaaggucaa

SEQ ID NO: 1877987 - RNA, 19 nt, Artificial Sequence
  Description of Artificial Sequence: Synthetic oligonucleotide
uugagccgaagcuuaugaa

SEQ ID NO: 1877988 - RNA, 19 nt, Artificial Sequence
  Description of Artificial Sequence: Synthetic oligonucleotide
gacuucaacuccugacgca

SEQ ID NO: 1877989 - RNA, 19 nt, Artificial Sequence
  Description of Artificial Sequence: Synthetic oligonucleotide
uaguuaugguccuguccca

SEQ ID NO: 1877990 - RNA, 19 nt, Artificial Sequence
  Description of Artificial Sequence: Synthetic oligonucleotide
gucuuuuggagacccacaa

SEQ ID NO: 1877991 - RNA, 19 nt, Artificial Sequence
  Description of Artificial Sequence: Synthetic oligonucleotide
cuccaaguaccucaacuca

SEQ ID NO: 1877992 - RNA, 19 nt, Artificial Sequence
  Description of Artificial Sequence: Synthetic oligonucleotide
uaccucaacucagacucca

SEQ ID NO: 1877993 - RNA, 19 nt, Artificial Sequence
  Description of Artificial Sequence: Synthetic oligonucleotide
uaaagccaucaaaauuauu

SEQ ID NO: 1877994 - RNA, 19 nt, Artificial Sequence
  Description of Artificial Sequence: Synthetic oligonucleotide
gucugcaaggucaauuuga

SEQ ID NO: 1877995 - RNA, 19 nt, Artificial Sequence
  Description of Artificial Sequence: Synthetic oligonucleotide
uccugacgcaggcugugca

SEQ ID NO: 1877996 - RNA, 19 nt, Artificial Sequence
  Description of Artificial Sequence: Synthetic oligonucleotide
agcauugaauucaguaggu

SEQ ID NO: 1877997 - RNA, 19 nt, Artificial Sequence
  Description of Artificial Sequence: Synthetic oligonucleotide
cuuuaacagagggcuguag

SEQ ID NO: 1877998 - RNA, 19 nt, Artificial Sequence
  Description of Artificial Sequence: Synthetic oligonucleotide
augagcuggccauuaccgu

SEQ ID NO: 1877999 - RNA, 19 nt, Artificial Sequence
  Description of Artificial Sequence: Synthetic oligonucleotide
auguggcguucccaccagc

SEQ ID NO: 1878000 - RNA, 19 nt, Artificial Sequence
  Description of Artificial Sequence: Synthetic oligonucleotide
ugacucuggcuguuacaug

SEQ ID NO: 1878001 - RNA, 19 nt, Artificial Sequence
  Description of Artificial Sequence: Synthetic oligonucleotide
uucaugggcuccccaaguu

SEQ ID NO: 1878002 - RNA, 19 nt, Artificial Sequence
  Description of Artificial Sequence: Synthetic oligonucleotide
cacauuagaugccugagau

SEQ ID NO: 1878003 - RNA, 19 nt, Artificial Sequence
  Description of Artificial Sequence: Synthetic oligonucleotide
uucacccaacuucccacaa

SEQ ID NO: 1878004 - RNA, 19 nt, Artificial Sequence
  Description of Artificial Sequence: Synthetic oligonucleotide
cugcagucggcucauccac

SEQ ID NO: 1878005 - RNA, 19 nt, Artificial Sequence
  Description of Artificial Sequence: Synthetic oligonucleotide
ugcacccugauuuguuguc

SEQ ID NO: 1878006 - RNA, 19 nt, Artificial Sequence
  Description of Artificial Sequence: Synthetic oligonucleotide
guaaugagcuggccauuac

SEQ ID NO: 1878007 - RNA, 19 nt, Artificial Sequence
  Description of Artificial Sequence: Synthetic oligonucleotide
gcaacuguaucugaguguc

SEQ ID NO: 1878008 - RNA, 19 nt, Artificial Sequence
  Description of Artificial Sequence: Synthetic oligonucleotide
aacaacccuuucacccaac

SEQ ID NO: 1878009 - RNA, 19 nt, Artificial Sequence
  Description of Artificial Sequence: Synthetic oligonucleotide
gagugacuguacuucagcu

SEQ ID NO: 1878010 - RNA, 19 nt, Artificial Sequence
  Description of Artificial Sequence: Synthetic oligonucleotide
agccgaagcuuaugaaccu

SEQ ID NO: 1878011 - RNA, 19 nt, Artificial Sequence
  Description of Artificial Sequence: Synthetic oligonucleotide
aggcugagucuguaaugag

SEQ ID NO: 1878012 - RNA, 19 nt, Artificial Sequence
  Description of Artificial Sequence: Synthetic oligonucleotide
agcuuaugaaccugaucuu

SEQ ID NO: 1878013 - RNA, 19 nt, Artificial Sequence
  Description of Artificial Sequence: Synthetic oligonucleotide
acauuagaugccugagauu

SEQ ID NO: 1878014 - RNA, 19 nt, Artificial Sequence
  Description of Artificial Sequence: Synthetic oligonucleotide
ugcagucggcucauccaca

SEQ ID NO: 1878015 - RNA, 19 nt, Artificial Sequence
  Description of Artificial Sequence: Synthetic oligonucleotide
ggaggcgacaacaauucug

SEQ ID NO: 1878016 - RNA, 19 nt, Artificial Sequence
  Description of Artificial Sequence: Synthetic oligonucleotide
cacucggcuuugugcaugg

SEQ ID NO: 1878017 - RNA, 19 nt, Artificial Sequence
  Description of Artificial Sequence: Synthetic oligonucleotide
ugaguguccuucucagcua

SEQ ID NO: 1878018 - RNA, 19 nt, Artificial Sequence
  Description of Artificial Sequence: Synthetic oligonucleotide
cugaauggucacuuacaga

SEQ ID NO: 1878019 - RNA, 19 nt, Artificial Sequence
  Description of Artificial Sequence: Synthetic oligonucleotide
agcagcuaguuucuucuuu

SEQ ID NO: 1878020 - RNA, 19 nt, Artificial Sequence
  Description of Artificial Sequence: Synthetic oligonucleotide
ccaccucugcucaacaacc

SEQ ID NO: 1878021 - RNA, 19 nt, Artificial Sequence
  Description of Artificial Sequence: Synthetic oligonucleotide
cacuuacagaggugccacg

SEQ ID NO: 1878022 - RNA, 19 nt, Artificial Sequence
  Description of Artificial Sequence: Synthetic oligonucleotide
ucugcucaacaacccuuuc

SEQ ID NO: 1878023 - RNA, 19 nt, Artificial Sequence
  Description of Artificial Sequence: Synthetic oligonucleotide
gauugauguggcguuccca

SEQ ID NO: 1878024 - RNA, 19 nt, Artificial Sequence
  Description of Artificial Sequence: Synthetic oligonucleotide
cccuucaacaagauugaug

SEQ ID NO: 1878025 - RNA, 19 nt, Artificial Sequence
  Description of Artificial Sequence: Synthetic oligonucleotide
caguuaccgcucuauucug

SEQ ID NO: 1878026 - RNA, 19 nt, Artificial Sequence
  Description of Artificial Sequence: Synthetic oligonucleotide
uggaggcgacaacaauucu

SEQ ID NO: 1878027 - RNA, 19 nt, Artificial Sequence
  Description of Artificial Sequence: Synthetic oligonucleotide
gcucugaauggucacuuac

SEQ ID NO: 1878028 - RNA, 19 nt, Artificial Sequence
  Description of Artificial Sequence: Synthetic oligonucleotide
aaccugaucuucagcugca

SEQ ID NO: 1878029 - RNA, 19 nt, Artificial Sequence
  Description of Artificial Sequence: Synthetic oligonucleotide
gaggugccacgguucgggg

SEQ ID NO: 1878030 - RNA, 19 nt, Artificial Sequence
  Description of Artificial Sequence: Synthetic oligonucleotide
ggugcuggugugcuguccc

SEQ ID NO: 1878031 - RNA, 19 nt, Artificial Sequence
  Description of Artificial Sequence: Synthetic oligonucleotide
ggcguucccaccagcaugg

SEQ ID NO: 1878032 - RNA, 19 nt, Artificial Sequence
  Description of Artificial Sequence: Synthetic oligonucleotide
cacccugauuuguugucug

SEQ ID NO: 1878033 - RNA, 19 nt, Artificial Sequence
  Description of Artificial Sequence: Synthetic oligonucleotide
acaugagagcagcuaguuu

SEQ ID NO: 1878034 - RNA, 19 nt, Artificial Sequence
  Description of Artificial Sequence: Synthetic oligonucleotide
cugggaaacagcauugaau

SEQ ID NO: 1878035 - RNA, 19 nt, Artificial Sequence
  Description of Artificial Sequence: Synthetic oligonucleotide
ggcacugucugugagugac

SEQ ID NO: 1878036 - RNA, 19 nt, Artificial Sequence
  Description of Artificial Sequence: Synthetic oligonucleotide
ggugcacccugauuuguug

SEQ ID NO: 1878037 - RNA, 19 nt, Artificial Sequence
  Description of Artificial Sequence: Synthetic oligonucleotide
gucacuuacagaggugcca

SEQ ID NO: 1878038 - RNA, 19 nt, Artificial Sequence
  Description of Artificial Sequence: Synthetic oligonucleotide
ccauuaccguuuuagaaga

SEQ ID NO: 1878039 - RNA, 19 nt, Artificial Sequence
  Description of Artificial Sequence: Synthetic oligonucleotide
acgcaggcugugcacucgg

SEQ ID NO: 1878040 - RNA, 19 nt, Artificial Sequence
  Description of Artificial Sequence: Synthetic oligonucleotide
auuagaugccugagauuug

SEQ ID NO: 1878041 - RNA, 19 nt, Artificial Sequence
  Description of Artificial Sequence: Synthetic oligonucleotide
cugcucaacaacccuuuca

SEQ ID NO: 1878042 - RNA, 19 nt, Artificial Sequence
  Description of Artificial Sequence: Synthetic oligonucleotide
gaauggucacuuacagcca

SEQ ID NO: 1878043 - RNA, 19 nt, Artificial Sequence
  Description of Artificial Sequence: Synthetic oligonucleotide
ggcugagucuguaaugagc

SEQ ID NO: 1878044 - RNA, 19 nt, Artificial Sequence
  Description of Artificial Sequence: Synthetic oligonucleotide
ggccauuaccguuuuagaa

SEQ ID NO: 1878045 - RNA, 19 nt, Artificial Sequence
  Description of Artificial Sequence: Synthetic oligonucleotide
uggucacuuacagccacaa

SEQ ID NO: 1878046 - RNA, 19 nt, Artificial Sequence
  Description of Artificial Sequence: Synthetic oligonucleotide
caaaacacaggguggcaua

SEQ ID NO: 1878047 - RNA, 19 nt, Artificial Sequence
  Description of Artificial Sequence: Synthetic oligonucleotide
gacgcaggcugugcacucg

SEQ ID NO: 1878048 - RNA, 19 nt, Artificial Sequence
  Description of Artificial Sequence: Synthetic oligonucleotide
guuugagccgaagcuuaug

SEQ ID NO: 1878049 - RNA, 19 nt, Artificial Sequence
  Description of Artificial Sequence: Synthetic oligonucleotide
agacaugagagcagcuagu

SEQ ID NO: 1878050 - RNA, 19 nt, Artificial Sequence
  Description of Artificial Sequence: Synthetic oligonucleotide
gaaguuugagccgaagcuu

SEQ ID NO: 1878051 - RNA, 19 nt, Artificial Sequence
  Description of Artificial Sequence: Synthetic oligonucleotide
caugacucuggcuguuaca

SEQ ID NO: 1878052 - RNA, 19 nt, Artificial Sequence
  Description of Artificial Sequence: Synthetic oligonucleotide
gaauucaguaggugcuggu

SEQ ID NO: 1878053 - RNA, 19 nt, Artificial Sequence
  Description of Artificial Sequence: Synthetic oligonucleotide
gacccacaaugggacacag

SEQ ID NO: 1878054 - RNA, 19 nt, Artificial Sequence
  Description of Artificial Sequence: Synthetic oligonucleotide
gcuuaugaaccugaucuuc

SEQ ID NO: 1878055 - RNA, 19 nt, Artificial Sequence
  Description of Artificial Sequence: Synthetic oligonucleotide
caagauugauguggcguuc

SEQ ID NO: 1878056 - RNA, 19 nt, Artificial Sequence
  Description of Artificial Sequence: Synthetic oligonucleotide
acacaggcucugaaugguc

SEQ ID NO: 1878057 - RNA, 19 nt, Artificial Sequence
  Description of Artificial Sequence: Synthetic oligonucleotide
ggcauaaaggaaccaccuc

SEQ ID NO: 1878058 - RNA, 19 nt, Artificial Sequence
  Description of Artificial Sequence: Synthetic oligonucleotide
uuuagccucucagcugaaa

SEQ ID NO: 1878059 - RNA, 19 nt, Artificial Sequence
  Description of Artificial Sequence: Synthetic oligonucleotide
uuuuagccucucagcugaa

SEQ ID NO: 1878060 - RNA, 19 nt, Artificial Sequence
  Description of Artificial Sequence: Synthetic oligonucleotide
aguagcuguacugccugaa

SEQ ID NO: 1878061 - RNA, 19 nt, Artificial Sequence
  Description of Artificial Sequence: Synthetic oligonucleotide
cucuuagccuuccuguuua

SEQ ID NO: 1878062 - RNA, 19 nt, Artificial Sequence
  Description of Artificial Sequence: Synthetic oligonucleotide
aaacacaggguggcauaaa

SEQ ID NO: 1878063 - RNA, 19 nt, Artificial Sequence
  Description of Artificial Sequence: Synthetic oligonucleotide
accgcucuauucugagcca

SEQ ID NO: 1878064 - RNA, 19 nt, Artificial Sequence
  Description of Artificial Sequence: Synthetic oligonucleotide
gaggggaguugcacgugag

SEQ ID NO: 1878065 - RNA, 19 nt, Artificial Sequence
  Description of Artificial Sequence: Synthetic oligonucleotide
ggcuguuacaugaggugcc

SEQ ID NO: 1878066 - RNA, 19 nt, Artificial Sequence
  Description of Artificial Sequence: Synthetic oligonucleotide
uggugcacccugauuuguu

SEQ ID NO: 1878067 - RNA, 19 nt, Artificial Sequence
  Description of Artificial Sequence: Synthetic oligonucleotide
aguuaccgcucuauucuga

SEQ ID NO: 1878068 - RNA, 19 nt, Artificial Sequence
  Description of Artificial Sequence: Synthetic oligonucleotide
ccuggacauccucuuagcc

SEQ ID NO: 1878069 - RNA, 19 nt, Artificial Sequence
  Description of Artificial Sequence: Synthetic oligonucleotide
caguaguuaugguccuguc

SEQ ID NO: 1878070 - RNA, 19 nt, Artificial Sequence
  Description of Artificial Sequence: Synthetic oligonucleotide
cacgguucggggaagacau

SEQ ID NO: 1878071 - RNA, 19 nt, Artificial Sequence
  Description of Artificial Sequence: Synthetic oligonucleotide
gcucaacaacccuuucacc

SEQ ID NO: 1878072 - RNA, 19 nt, Artificial Sequence
  Description of Artificial Sequence: Synthetic oligonucleotide
cacuuucacugcuaugcaa

SEQ ID NO: 1878073 - RNA, 19 nt, Artificial Sequence
  Description of Artificial Sequence: Synthetic oligonucleotide
acaaugggacacaggcucu

SEQ ID NO: 1878074 - RNA, 19 nt, Artificial Sequence
  Description of Artificial Sequence: Synthetic oligonucleotide
caacuucccacaaaggcuu

SEQ ID NO: 1878075 - RNA, 19 nt, Artificial Sequence
  Description of Artificial Sequence: Synthetic oligonucleotide
gcauugaauucaguaggug

SEQ ID NO: 1878076 - RNA, 19 nt, Artificial Sequence
  Description of Artificial Sequence: Synthetic oligonucleotide
ggcgacaacaauucugcua

SEQ ID NO: 1878077 - RNA, 19 nt, Artificial Sequence
  Description of Artificial Sequence: Synthetic oligonucleotide
cugagauuuggcagguugu

SEQ ID NO: 1878078 - RNA, 19 nt, Artificial Sequence
  Description of Artificial Sequence: Synthetic oligonucleotide
aggucaguuaccgcucuau

SEQ ID NO: 1878079 - RNA, 19 nt, Artificial Sequence
  Description of Artificial Sequence: Synthetic oligonucleotide
ugacgcaggcugugcacuc

SEQ ID NO: 1878080 - RNA, 19 nt, Artificial Sequence
  Description of Artificial Sequence: Synthetic oligonucleotide
caugcuuagaagccuuccu

SEQ ID NO: 1878081 - RNA, 19 nt, Artificial Sequence
  Description of Artificial Sequence: Synthetic oligonucleotide
caaugggacacaggcucug

SEQ ID NO: 1878082 - RNA, 19 nt, Artificial Sequence
  Description of Artificial Sequence: Synthetic oligonucleotide
gacacaggcucugaauggu

SEQ ID NO: 1878083 - RNA, 19 nt, Artificial Sequence
  Description of Artificial Sequence: Synthetic oligonucleotide
auggucacuuacagaggug

SEQ ID NO: 1878084 - RNA, 19 nt, Artificial Sequence
  Description of Artificial Sequence: Synthetic oligonucleotide
aggugccacgguucgggga

SEQ ID NO: 1878085 - RNA, 19 nt, Artificial Sequence
  Description of Artificial Sequence: Synthetic oligonucleotide
agcaguggugcacccugau

SEQ ID NO: 1878086 - RNA, 19 nt, Artificial Sequence
  Description of Artificial Sequence: Synthetic oligonucleotide
aggcgacaacaauucugcu

SEQ ID NO: 1878087 - RNA, 19 nt, Artificial Sequence
  Description of Artificial Sequence: Synthetic oligonucleotide
cucggcuuugugcauggaa

SEQ ID NO: 1878088 - RNA, 19 nt, Artificial Sequence
  Description of Artificial Sequence: Synthetic oligonucleotide
uucaugacucuggcuguua

SEQ ID NO: 1878089 - RNA, 19 nt, Artificial Sequence
  Description of Artificial Sequence: Synthetic oligonucleotide
agccacaaugggacacagg

SEQ ID NO: 1878090 - RNA, 19 nt, Artificial Sequence
  Description of Artificial Sequence: Synthetic oligonucleotide
uaggucaguuaccgcucua

SEQ ID NO: 1878091 - RNA, 19 nt, Artificial Sequence
  Description of Artificial Sequence: Synthetic oligonucleotide
ggugccacgguucggggaa

SEQ ID NO: 1878092 - RNA, 19 nt, Artificial Sequence
  Description of Artificial Sequence: Synthetic oligonucleotide
ccaacuucccacaaaggcu

SEQ ID NO: 1878093 - RNA, 19 nt, Artificial Sequence
  Description of Artificial Sequence: Synthetic oligonucleotide
guaccucaacucagacucc

SEQ ID NO: 1878094 - RNA, 19 nt, Artificial Sequence
  Description of Artificial Sequence: Synthetic oligonucleotide
ggcucuuaugcaggcacug

SEQ ID NO: 1878095 - RNA, 19 nt, Artificial Sequence
  Description of Artificial Sequence: Synthetic oligonucleotide
ccaaguaccucaacucaga

SEQ ID NO: 1878096 - RNA, 19 nt, Artificial Sequence
  Description of Artificial Sequence: Synthetic oligonucleotide
acccacaaugggacacagg

SEQ ID NO: 1878097 - RNA, 19 nt, Artificial Sequence
  Description of Artificial Sequence: Synthetic oligonucleotide
gaucuucuauggacucaca

SEQ ID NO: 1878098 - RNA, 19 nt, Artificial Sequence
  Description of Artificial Sequence: Synthetic oligonucleotide
guugcugaggggaguugca

SEQ ID NO: 1878099 - RNA, 19 nt, Artificial Sequence
  Description of Artificial Sequence: Synthetic oligonucleotide
ggaaccaccucugcucaac

SEQ ID NO: 1878100 - RNA, 19 nt, Artificial Sequence
  Description of Artificial Sequence: Synthetic oligonucleotide
gagggcuguaggucaguua

SEQ ID NO: 1878101 - RNA, 19 nt, Artificial Sequence
  Description of Artificial Sequence: Synthetic oligonucleotide
gccucucagcugaaagugg

SEQ ID NO: 1878102 - RNA, 19 nt, Artificial Sequence
  Description of Artificial Sequence: Synthetic oligonucleotide
aguuugagccgaagcuuau

SEQ ID NO: 1878103 - RNA, 19 nt, Artificial Sequence
  Description of Artificial Sequence: Synthetic oligonucleotide
caacaacccuuucacccaa

SEQ ID NO: 1878104 - RNA, 19 nt, Artificial Sequence
  Description of Artificial Sequence: Synthetic oligonucleotide
cagccacaaugggacacag

SEQ ID NO: 1878105 - RNA, 19 nt, Artificial Sequence
  Description of Artificial Sequence: Synthetic oligonucleotide
agcuugcuggagagaugac

SEQ ID NO: 1878106 - RNA, 19 nt, Artificial Sequence
  Description of Artificial Sequence: Synthetic oligonucleotide
caucaggagcaguggugca

SEQ ID NO: 1878107 - RNA, 19 nt, Artificial Sequence
  Description of Artificial Sequence: Synthetic oligonucleotide
gccaucaggagcaguggug

SEQ ID NO: 1878108 - RNA, 19 nt, Artificial Sequence
  Description of Artificial Sequence: Synthetic oligonucleotide
ucccuucaacaagauugau

SEQ ID NO: 1878109 - RNA, 19 nt, Artificial Sequence
  Description of Artificial Sequence: Synthetic oligonucleotide
guaggucaguuaccgcucu

SEQ ID NO: 1878110 - RNA, 19 nt, Artificial Sequence
  Description of Artificial Sequence: Synthetic oligonucleotide
cugaggcugagucuguaau

SEQ ID NO: 1878111 - RNA, 19 nt, Artificial Sequence
  Description of Artificial Sequence: Synthetic oligonucleotide
uguugucugcaaggucaau

SEQ ID NO: 1878112 - RNA, 19 nt, Artificial Sequence
  Description of Artificial Sequence: Synthetic oligonucleotide
agaagacgcugcaguuucu

SEQ ID NO: 1878113 - RNA, 19 nt, Artificial Sequence
  Description of Artificial Sequence: Synthetic oligonucleotide
cuccugacgcaggcugugc

SEQ ID NO: 1878114 - RNA, 19 nt, Artificial Sequence
  Description of Artificial Sequence: Synthetic oligonucleotide
cagaggugccacgguucgg

SEQ ID NO: 1878115 - RNA, 19 nt, Artificial Sequence
  Description of Artificial Sequence: Synthetic oligonucleotide
aggaaccaccucugcucaa

SEQ ID NO: 1878116 - RNA, 19 nt, Artificial Sequence
  Description of Artificial Sequence: Synthetic oligonucleotide
agcauggggcagaguagcu

SEQ ID NO: 1878117 - RNA, 19 nt, Artificial Sequence
  Description of Artificial Sequence: Synthetic oligonucleotide
aggcucuuaugcaggcacu

SEQ ID NO: 1878118 - RNA, 19 nt, Artificial Sequence
  Description of Artificial Sequence: Synthetic oligonucleotide
gugcacccugauuuguugu

SEQ ID NO: 1878119 - RNA, 19 nt, Artificial Sequence
  Description of Artificial Sequence: Synthetic oligonucleotide
cugcaaggucaauuugaua

SEQ ID NO: 1878120 - RNA, 19 nt, Artificial Sequence
  Description of Artificial Sequence: Synthetic oligonucleotide
ccgaagcuuaugaaccuga

SEQ ID NO: 1878121 - RNA, 19 nt, Artificial Sequence
  Description of Artificial Sequence: Synthetic oligonucleotide
ggggaguugcacgugagcu

SEQ ID NO: 1878122 - RNA, 19 nt, Artificial Sequence
  Description of Artificial Sequence: Synthetic oligonucleotide
cagucggcucauccacaug

SEQ ID NO: 1878123 - RNA, 19 nt, Artificial Sequence
  Description of Artificial Sequence: Synthetic oligonucleotide
ccugaucuucagcugcauc

SEQ ID NO: 1878124 - RNA, 19 nt, Artificial Sequence
  Description of Artificial Sequence: Synthetic oligonucleotide
ccugauuuguugucugcaa

SEQ ID NO: 1878125 - RNA, 19 nt, Artificial Sequence
  Description of Artificial Sequence: Synthetic oligonucleotide
gcugaggggaguugcacgu

SEQ ID NO: 1878126 - RNA, 19 nt, Artificial Sequence
  Description of Artificial Sequence: Synthetic oligonucleotide
agagggcuguaggucaguu

SEQ ID NO: 1878127 - RNA, 19 nt, Artificial Sequence
  Description of Artificial Sequence: Synthetic oligonucleotide
ggagacccacaaugggaca

SEQ ID NO: 1878128 - RNA, 19 nt, Artificial Sequence
  Description of Artificial Sequence: Synthetic oligonucleotide
cguuuuagaagacgcugca

SEQ ID NO: 1878129 - RNA, 19 nt, Artificial Sequence
  Description of Artificial Sequence: Synthetic oligonucleotide
ugccacgguucggggaaga

SEQ ID NO: 1878130 - RNA, 19 nt, Artificial Sequence
  Description of Artificial Sequence: Synthetic oligonucleotide
gguccugucccagacagau

SEQ ID NO: 1878131 - RNA, 19 nt, Artificial Sequence
  Description of Artificial Sequence: Synthetic oligonucleotide
gcuguuacaugaggugcca

SEQ ID NO: 1878132 - RNA, 19 nt, Artificial Sequence
  Description of Artificial Sequence: Synthetic oligonucleotide
caaggcucuuaugcaggca

SEQ ID NO: 1878133 - RNA, 19 nt, Artificial Sequence
  Description of Artificial Sequence: Synthetic oligonucleotide
caccuccaaguaccucaac

SEQ ID NO: 1878134 - RNA, 19 nt, Artificial Sequence
  Description of Artificial Sequence: Synthetic oligonucleotide
gcugaaaguggcagcaacu

SEQ ID NO: 1878135 - RNA, 19 nt, Artificial Sequence
  Description of Artificial Sequence: Synthetic oligonucleotide
guugcacgugagcuuuccu

SEQ ID NO: 1878136 - RNA, 19 nt, Artificial Sequence
  Description of Artificial Sequence: Synthetic oligonucleotide
guacugccugaagguggag

SEQ ID NO: 1878137 - RNA, 19 nt, Artificial Sequence
  Description of Artificial Sequence: Synthetic oligonucleotide
guccugucccagacagaug

SEQ ID NO: 1878138 - RNA, 19 nt, Artificial Sequence
  Description of Artificial Sequence: Synthetic oligonucleotide
cauggaaggcaaguggcuu

SEQ ID NO: 1878139 - RNA, 19 nt, Artificial Sequence
  Description of Artificial Sequence: Synthetic oligonucleotide
gcacgugagcuuuccuguc

SEQ ID NO: 1878140 - RNA, 19 nt, Artificial Sequence
  Description of Artificial Sequence: Synthetic oligonucleotide
gaguugcacgugagcuuuc

SEQ ID NO: 1878141 - RNA, 19 nt, Artificial Sequence
  Description of Artificial Sequence: Synthetic oligonucleotide
cguucccaccagcaugggg

SEQ ID NO: 1878142 - RNA, 19 nt, Artificial Sequence
  Description of Artificial Sequence: Synthetic oligonucleotide
augcucugggaaacagcau

SEQ ID NO: 1878143 - RNA, 19 nt, Artificial Sequence
  Description of Artificial Sequence: Synthetic oligonucleotide
gcuggaggcgacaacaauu

SEQ ID NO: 1878144 - RNA, 19 nt, Artificial Sequence
  Description of Artificial Sequence: Synthetic oligonucleotide
ggaguugcacgugagcuuu

SEQ ID NO: 1878145 - RNA, 19 nt, Artificial Sequence
  Description of Artificial Sequence: Synthetic oligonucleotide
cccugauuuguugucugca

SEQ ID NO: 1878146 - RNA, 19 nt, Artificial Sequence
  Description of Artificial Sequence: Synthetic oligonucleotide
cugacgcaggcugugcacu

SEQ ID NO: 1878147 - RNA, 19 nt, Artificial Sequence
  Description of Artificial Sequence: Synthetic oligonucleotide
gagcagcuaguuucuucuu

SEQ ID NO: 1878148 - RNA, 19 nt, Artificial Sequence
  Description of Artificial Sequence: Synthetic oligonucleotide
acgguucggggaagacaug

SEQ ID NO: 1878149 - RNA, 19 nt, Artificial Sequence
  Description of Artificial Sequence: Synthetic oligonucleotide
guggcguucccaccagcau

SEQ ID NO: 1878150 - RNA, 19 nt, Artificial Sequence
  Description of Artificial Sequence: Synthetic oligonucleotide
augggcuccccaaguucaa

SEQ ID NO: 1878151 - RNA, 19 nt, Artificial Sequence
  Description of Artificial Sequence: Synthetic oligonucleotide
ggcucugaauggucacuua

SEQ ID NO: 1878152 - RNA, 19 nt, Artificial Sequence
  Description of Artificial Sequence: Synthetic oligonucleotide
gggaguugcacgugagcuu

SEQ ID NO: 1878153 - RNA, 19 nt, Artificial Sequence
  Description of Artificial Sequence: Synthetic oligonucleotide
ggucaguuaccgcucuauu

SEQ ID NO: 1878154 - RNA, 19 nt, Artificial Sequence
  Description of Artificial Sequence: Synthetic oligonucleotide
ggaagacaugagagcagcu

SEQ ID NO: 1878155 - RNA, 19 nt, Artificial Sequence
  Description of Artificial Sequence: Synthetic oligonucleotide
gcagucggcucauccacau

SEQ ID NO: 1878156 - RNA, 19 nt, Artificial Sequence
  Description of Artificial Sequence: Synthetic oligonucleotide
ccacgguucggggaagaca

SEQ ID NO: 1878157 - RNA, 19 nt, Artificial Sequence
  Description of Artificial Sequence: Synthetic oligonucleotide
gcucuuaugcaggcacugu

SEQ ID NO: 1878158 - RNA, 19 nt, Artificial Sequence
  Description of Artificial Sequence: Synthetic oligonucleotide
cccaaguucaaggcucuua

SEQ ID NO: 1878159 - RNA, 19 nt, Artificial Sequence
  Description of Artificial Sequence: Synthetic oligonucleotide
gccacgguucggggaagac

SEQ ID NO: 1878160 - RNA, 19 nt, Artificial Sequence
  Description of Artificial Sequence: Synthetic oligonucleotide
cuguaaugagcuggccauu

SEQ ID NO: 1878161 - RNA, 19 nt, Artificial Sequence
  Description of Artificial Sequence: Synthetic oligonucleotide
cuguuacaugaggugccau

SEQ ID NO: 1878162 - RNA, 19 nt, Artificial Sequence
  Description of Artificial Sequence: Synthetic oligonucleotide
gcuggagagaugacacuuu

SEQ ID NO: 1878163 - RNA, 19 nt, Artificial Sequence
  Description of Artificial Sequence: Synthetic oligonucleotide
ccucuuagccuuccuguuu

SEQ ID NO: 1878164 - RNA, 19 nt, Artificial Sequence
  Description of Artificial Sequence: Synthetic oligonucleotide
ccgcucuauucugagccaa

SEQ ID NO: 1878165 - RNA, 19 nt, Artificial Sequence
  Description of Artificial Sequence: Synthetic oligonucleotide
cgcucuauucugagccaaa

SEQ ID NO: 1878166 - RNA, 19 nt, Artificial Sequence
  Description of Artificial Sequence: Synthetic oligonucleotide
gcuggccauuaccguuuua

SEQ ID NO: 1878167 - RNA, 19 nt, Artificial Sequence
  Description of Artificial Sequence: Synthetic oligonucleotide
gcacugucugugagugacu

SEQ ID NO: 1878168 - RNA, 19 nt, Artificial Sequence
  Description of Artificial Sequence: Synthetic oligonucleotide
ccccaccuccaaguaccuc

SEQ ID NO: 1878169 - RNA, 19 nt, Artificial Sequence
  Description of Artificial Sequence: Synthetic oligonucleotide
ccccaaguucaaggcucuu

SEQ ID NO: 1878170 - RNA, 19 nt, Artificial Sequence
  Description of Artificial Sequence: Synthetic oligonucleotide
aagauuaccagcuuguacc

SEQ ID NO: 1878171 - RNA, 19 nt, Artificial Sequence
  Description of Artificial Sequence: Synthetic oligonucleotide
aaaagcuggaagcucaaag

SEQ ID NO: 1878172 - RNA, 19 nt, Artificial Sequence
  Description of Artificial Sequence: Synthetic oligonucleotide
guuaagggcaaacaggcgg

SEQ ID NO: 1878173 - RNA, 19 nt, Artificial Sequence
  Description of Artificial Sequence: Synthetic oligonucleotide
aaucacaacucgcuucccc

SEQ ID NO: 1878174 - RNA, 19 nt, Artificial Sequence
  Description of Artificial Sequence: Synthetic oligonucleotide
gauguuaagggcaaacagg

SEQ ID NO: 1878175 - RNA, 19 nt, Artificial Sequence
  Description of Artificial Sequence: Synthetic oligonucleotide
aagauacugucaccaaugg

SEQ ID NO: 1878176 - RNA, 19 nt, Artificial Sequence
  Description of Artificial Sequence: Synthetic oligonucleotide
auguuaagggcaaacaggc

SEQ ID NO: 1878177 - RNA, 19 nt, Artificial Sequence
  Description of Artificial Sequence: Synthetic oligonucleotide
ugcugcaucuccuacaaag

SEQ ID NO: 1878178 - RNA, 19 nt, Artificial Sequence
  Description of Artificial Sequence: Synthetic oligonucleotide
ucaaucacaacucgcuucc

SEQ ID NO: 1878179 - RNA, 19 nt, Artificial Sequence
  Description of Artificial Sequence: Synthetic oligonucleotide
uuuauugugggcucagccc

SEQ ID NO: 1878180 - RNA, 19 nt, Artificial Sequence
  Description of Artificial Sequence: Synthetic oligonucleotide
ucagucaucucacggaacc

SEQ ID NO: 1878181 - RNA, 19 nt, Artificial Sequence
  Description of Artificial Sequence: Synthetic oligonucleotide
ugcuccuguacgaaggugg

SEQ ID NO: 1878182 - RNA, 19 nt, Artificial Sequence
  Description of Artificial Sequence: Synthetic oligonucleotide
aaagauacugucaccaaug

SEQ ID NO: 1878183 - RNA, 19 nt, Artificial Sequence
  Description of Artificial Sequence: Synthetic oligonucleotide
agucacuagggcuaguggg

SEQ ID NO: 1878184 - RNA, 19 nt, Artificial Sequence
  Description of Artificial Sequence: Synthetic oligonucleotide
uguugucaaucacaacucg

SEQ ID NO: 1878185 - RNA, 19 nt, Artificial Sequence
  Description of Artificial Sequence: Synthetic oligonucleotide
agauuaccagcuuguaccc

SEQ ID NO: 1878186 - RNA, 19 nt, Artificial Sequence
  Description of Artificial Sequence: Synthetic oligonucleotide
uucgguuuagaccugcaug

SEQ ID NO: 1878187 - RNA, 19 nt, Artificial Sequence
  Description of Artificial Sequence: Synthetic oligonucleotide
uccagcguagcacagaagu

SEQ ID NO: 1878188 - RNA, 19 nt, Artificial Sequence
  Description of Artificial Sequence: Synthetic oligonucleotide
gauacugucaccaauggaa

SEQ ID NO: 1878189 - RNA, 19 nt, Artificial Sequence
  Description of Artificial Sequence: Synthetic oligonucleotide
uggcuuucgguuuagaccu

SEQ ID NO: 1878190 - RNA, 19 nt, Artificial Sequence
  Description of Artificial Sequence: Synthetic oligonucleotide
guagcaucaguguuuauug

SEQ ID NO: 1878191 - RNA, 19 nt, Artificial Sequence
  Description of Artificial Sequence: Synthetic oligonucleotide
uuauugugggcucagcccu

SEQ ID NO: 1878192 - RNA, 19 nt, Artificial Sequence
  Description of Artificial Sequence: Synthetic oligonucleotide
agguggugagcauaguagc

SEQ ID NO: 1878193 - RNA, 19 nt, Artificial Sequence
  Description of Artificial Sequence: Synthetic oligonucleotide
ugaugagagucccaucuag

SEQ ID NO: 1878194 - RNA, 19 nt, Artificial Sequence
  Description of Artificial Sequence: Synthetic oligonucleotide
cuggcuuucgguuuagacc

SEQ ID NO: 1878195 - RNA, 19 nt, Artificial Sequence
  Description of Artificial Sequence: Synthetic oligonucleotide
ucgguuuagaccugcauga

SEQ ID NO: 1878196 - RNA, 19 nt, Artificial Sequence
  Description of Artificial Sequence: Synthetic oligonucleotide
aaugugucccuguuaacau

SEQ ID NO: 1878197 - RNA, 19 nt, Artificial Sequence
  Description of Artificial Sequence: Synthetic oligonucleotide
uguagaggggcccagcgcu

SEQ ID NO: 1878198 - RNA, 19 nt, Artificial Sequence
  Description of Artificial Sequence: Synthetic oligonucleotide
acuggcuuucgguuuagac

SEQ ID NO: 1878199 - RNA, 19 nt, Artificial Sequence
  Description of Artificial Sequence: Synthetic oligonucleotide
accugcaugaguugccacc

SEQ ID NO: 1878200 - RNA, 19 nt, Artificial Sequence
  Description of Artificial Sequence: Synthetic oligonucleotide
ugguccucgggucaaaagc

SEQ ID NO: 1878201 - RNA, 19 nt, Artificial Sequence
  Description of Artificial Sequence: Synthetic oligonucleotide
auauccagcugacaccagg

SEQ ID NO: 1878202 - RNA, 19 nt, Artificial Sequence
  Description of Artificial Sequence: Synthetic oligonucleotide
uguuaagggcaaacaggcg

SEQ ID NO: 1878203 - RNA, 19 nt, Artificial Sequence
  Description of Artificial Sequence: Synthetic oligonucleotide
gaagauuaccagcuuguac

SEQ ID NO: 1878204 - RNA, 19 nt, Artificial Sequence
  Description of Artificial Sequence: Synthetic oligonucleotide
gaacgaguggugaugagag

SEQ ID NO: 1878205 - RNA, 19 nt, Artificial Sequence
  Description of Artificial Sequence: Synthetic oligonucleotide
uccuacaaagauacuguca

SEQ ID NO: 1878206 - RNA, 19 nt, Artificial Sequence
  Description of Artificial Sequence: Synthetic oligonucleotide
acaccaguaacuucuuaag

SEQ ID NO: 1878207 - RNA, 19 nt, Artificial Sequence
  Description of Artificial Sequence: Synthetic oligonucleotide
uggaaugguaucugaagga

SEQ ID NO: 1878208 - RNA, 19 nt, Artificial Sequence
  Description of Artificial Sequence: Synthetic oligonucleotide
uggauguguccguaguugg

SEQ ID NO: 1878209 - RNA, 19 nt, Artificial Sequence
  Description of Artificial Sequence: Synthetic oligonucleotide
gagcauaguagcaucagug

SEQ ID NO: 1878210 - RNA, 19 nt, Artificial Sequence
  Description of Artificial Sequence: Synthetic oligonucleotide
aguacagccgcugcagugc

SEQ ID NO: 1878211 - RNA, 19 nt, Artificial Sequence
  Description of Artificial Sequence: Synthetic oligonucleotide
augaccaugucugacacug

SEQ ID NO: 1878212 - RNA, 19 nt, Artificial Sequence
  Description of Artificial Sequence: Synthetic oligonucleotide
guuguggcgagccugcucc

SEQ ID NO: 1878213 - RNA, 19 nt, Artificial Sequence
  Description of Artificial Sequence: Synthetic oligonucleotide
uguacgaagguggacuugc

SEQ ID NO: 1878214 - RNA, 19 nt, Artificial Sequence
  Description of Artificial Sequence: Synthetic oligonucleotide
agggaauccuacugugacc

SEQ ID NO: 1878215 - RNA, 19 nt, Artificial Sequence
  Description of Artificial Sequence: Synthetic oligonucleotide
ucuggauugguguugucaa

SEQ ID NO: 1878216 - RNA, 19 nt, Artificial Sequence
  Description of Artificial Sequence: Synthetic oligonucleotide
gucccaucuagguacaaag

SEQ ID NO: 1878217 - RNA, 19 nt, Artificial Sequence
  Description of Artificial Sequence: Synthetic oligonucleotide
cacagcgcugccaugaccc

SEQ ID NO: 1878218 - RNA, 19 nt, Artificial Sequence
  Description of Artificial Sequence: Synthetic oligonucleotide
ucccacaugccacucacug

SEQ ID NO: 1878219 - RNA, 19 nt, Artificial Sequence
  Description of Artificial Sequence: Synthetic oligonucleotide
acgaguggugaugagaguc

SEQ ID NO: 1878220 - RNA, 19 nt, Artificial Sequence
  Description of Artificial Sequence: Synthetic oligonucleotide
uguaccuggcccgacuugg

SEQ ID NO: 1878221 - RNA, 19 nt, Artificial Sequence
  Description of Artificial Sequence: Synthetic oligonucleotide
cauggguagcucaaacugc

SEQ ID NO: 1878222 - RNA, 19 nt, Artificial Sequence
  Description of Artificial Sequence: Synthetic oligonucleotide
aggaagaacuccucuggag

SEQ ID NO: 1878223 - RNA, 19 nt, Artificial Sequence
  Description of Artificial Sequence: Synthetic oligonucleotide
gaacuggcaguacagccgc

SEQ ID NO: 1878224 - RNA, 19 nt, Artificial Sequence
  Description of Artificial Sequence: Synthetic oligonucleotide
agaacuggcaguacagccg

SEQ ID NO: 1878225 - RNA, 19 nt, Artificial Sequence
  Description of Artificial Sequence: Synthetic oligonucleotide
caucaguguuuauuguggg

SEQ ID NO: 1878226 - RNA, 19 nt, Artificial Sequence
  Description of Artificial Sequence: Synthetic oligonucleotide
ucgggucaaaagcuggaag

SEQ ID NO: 1878227 - RNA, 19 nt, Artificial Sequence
  Description of Artificial Sequence: Synthetic oligonucleotide
uccucgggucaaaagcugg

SEQ ID NO: 1878228 - RNA, 19 nt, Artificial Sequence
  Description of Artificial Sequence: Synthetic oligonucleotide
uccguaguuggaaugguau

SEQ ID NO: 1878229 - RNA, 19 nt, Artificial Sequence
  Description of Artificial Sequence: Synthetic oligonucleotide
uuagaccugcaugaguugc

SEQ ID NO: 1878230 - RNA, 19 nt, Artificial Sequence
  Description of Artificial Sequence: Synthetic oligonucleotide
ugacacuggugcaugcgag

SEQ ID NO: 1878231 - RNA, 19 nt, Artificial Sequence
  Description of Artificial Sequence: Synthetic oligonucleotide
gaagcccucggucagcaug

SEQ ID NO: 1878232 - RNA, 19 nt, Artificial Sequence
  Description of Artificial Sequence: Synthetic oligonucleotide
ugagcauaguagcaucagu

SEQ ID NO: 1878233 - RNA, 19 nt, Artificial Sequence
  Description of Artificial Sequence: Synthetic oligonucleotide
aaacaggcggucugcgcag

SEQ ID NO: 1878234 - RNA, 19 nt, Artificial Sequence
  Description of Artificial Sequence: Synthetic oligonucleotide
acugucaccaauggaaaug

SEQ ID NO: 1878235 - RNA, 19 nt, Artificial Sequence
  Description of Artificial Sequence: Synthetic oligonucleotide
augagagucccaucuaggu

SEQ ID NO: 1878236 - RNA, 19 nt, Artificial Sequence
  Description of Artificial Sequence: Synthetic oligonucleotide
gacacuggugcaugcgagg

SEQ ID NO: 1878237 - RNA, 19 nt, Artificial Sequence
  Description of Artificial Sequence: Synthetic oligonucleotide
ucuuuggaaucccugggua

SEQ ID NO: 1878238 - RNA, 19 nt, Artificial Sequence
  Description of Artificial Sequence: Synthetic oligonucleotide
uuuggaaucccuggguaca

SEQ ID NO: 1878239 - RNA, 19 nt, Artificial Sequence
  Description of Artificial Sequence: Synthetic oligonucleotide
ugucucucacauuuccagc

SEQ ID NO: 1878240 - RNA, 19 nt, Artificial Sequence
  Description of Artificial Sequence: Synthetic oligonucleotide
uguguccguaguuggaaug

SEQ ID NO: 1878241 - RNA, 19 nt, Artificial Sequence
  Description of Artificial Sequence: Synthetic oligonucleotide
aacacagccuccaccuugg

SEQ ID NO: 1878242 - RNA, 19 nt, Artificial Sequence
  Description of Artificial Sequence: Synthetic oligonucleotide
ucccuguuaacauggacau

SEQ ID NO: 1878243 - RNA, 19 nt, Artificial Sequence
  Description of Artificial Sequence: Synthetic oligonucleotide
gggacucuaccccagaugc

SEQ ID NO: 1878244 - RNA, 19 nt, Artificial Sequence
  Description of Artificial Sequence: Synthetic oligonucleotide
ugcaugaguugccaccagc

SEQ ID NO: 1878245 - RNA, 19 nt, Artificial Sequence
  Description of Artificial Sequence: Synthetic oligonucleotide
uuuagaccugcaugaguug

SEQ ID NO: 1878246 - RNA, 19 nt, Artificial Sequence
  Description of Artificial Sequence: Synthetic oligonucleotide
aacucgcuuccccugccuc

SEQ ID NO: 1878247 - RNA, 19 nt, Artificial Sequence
  Description of Artificial Sequence: Synthetic oligonucleotide
uccuguacgaagguggacu

SEQ ID NO: 1878248 - RNA, 19 nt, Artificial Sequence
  Description of Artificial Sequence: Synthetic oligonucleotide
gaugcugugaacaccagua

SEQ ID NO: 1878249 - RNA, 19 nt, Artificial Sequence
  Description of Artificial Sequence: Synthetic oligonucleotide
cuacaaagauacugucacc

SEQ ID NO: 1878250 - RNA, 19 nt, Artificial Sequence
  Description of Artificial Sequence: Synthetic oligonucleotide
uaagaacuggcaguacagc

SEQ ID NO: 1878251 - RNA, 19 nt, Artificial Sequence
  Description of Artificial Sequence: Synthetic oligonucleotide
uguuguuguggcgagccug

SEQ ID NO: 1878252 - RNA, 19 nt, Artificial Sequence
  Description of Artificial Sequence: Synthetic oligonucleotide
ucugacacuggugcaugcg

SEQ ID NO: 1878253 - RNA, 19 nt, Artificial Sequence
  Description of Artificial Sequence: Synthetic oligonucleotide
aucacaacucgcuuccccu

SEQ ID NO: 1878254 - RNA, 19 nt, Artificial Sequence
  Description of Artificial Sequence: Synthetic oligonucleotide
ugaggaguacgcuggacuc

SEQ ID NO: 1878255 - RNA, 19 nt, Artificial Sequence
  Description of Artificial Sequence: Synthetic oligonucleotide
ggugaagauuaccagcuug

SEQ ID NO: 1878256 - RNA, 19 nt, Artificial Sequence
  Description of Artificial Sequence: Synthetic oligonucleotide
gucacuagggcuagugggg

SEQ ID NO: 1878257 - RNA, 19 nt, Artificial Sequence
  Description of Artificial Sequence: Synthetic oligonucleotide
agcggcagggcacucccgc

SEQ ID NO: 1878258 - RNA, 19 nt, Artificial Sequence
  Description of Artificial Sequence: Synthetic oligonucleotide
aaccuguuguuguggcgag

SEQ ID NO: 1878259 - RNA, 19 nt, Artificial Sequence
  Description of Artificial Sequence: Synthetic oligonucleotide
aguagcaucaguguuuauu

SEQ ID NO: 1878260 - RNA, 19 nt, Artificial Sequence
  Description of Artificial Sequence: Synthetic oligonucleotide
gaguacgcuggacucuggg

SEQ ID NO: 1878261 - RNA, 19 nt, Artificial Sequence
  Description of Artificial Sequence: Synthetic oligonucleotide
cuuccuguagcugaacaug

SEQ ID NO: 1878262 - RNA, 19 nt, Artificial Sequence
  Description of Artificial Sequence: Synthetic oligonucleotide
acaacucgcuuccccugcc

SEQ ID NO: 1878263 - RNA, 19 nt, Artificial Sequence
  Description of Artificial Sequence: Synthetic oligonucleotide
gcauggguagcucaaacug

SEQ ID NO: 1878264 - RNA, 19 nt, Artificial Sequence
  Description of Artificial Sequence: Synthetic oligonucleotide
gguagcucaaacugcuucc

SEQ ID NO: 1878265 - RNA, 19 nt, Artificial Sequence
  Description of Artificial Sequence: Synthetic oligonucleotide
ucacggaaccuguuguugu

SEQ ID NO: 1878266 - RNA, 19 nt, Artificial Sequence
  Description of Artificial Sequence: Synthetic oligonucleotide
ucucuggcacacuggaugu

SEQ ID NO: 1878267 - RNA, 19 nt, Artificial Sequence
  Description of Artificial Sequence: Synthetic oligonucleotide
agauacugucaccaaugga

SEQ ID NO: 1878268 - RNA, 19 nt, Artificial Sequence
  Description of Artificial Sequence: Synthetic oligonucleotide
acagaaguugaagcagcgg

SEQ ID NO: 1878269 - RNA, 19 nt, Artificial Sequence
  Description of Artificial Sequence: Synthetic oligonucleotide
uaguuggaaugguaucuga

SEQ ID NO: 1878270 - RNA, 19 nt, Artificial Sequence
  Description of Artificial Sequence: Synthetic oligonucleotide
gucucucacauuuccagca

SEQ ID NO: 1878271 - RNA, 19 nt, Artificial Sequence
  Description of Artificial Sequence: Synthetic oligonucleotide
uggguacagaauccuccag

SEQ ID NO: 1878272 - RNA, 19 nt, Artificial Sequence
  Description of Artificial Sequence: Synthetic oligonucleotide
aucuagguacaaaggcagc

SEQ ID NO: 1878273 - RNA, 19 nt, Artificial Sequence
  Description of Artificial Sequence: Synthetic oligonucleotide
gaaccuguuguuguggcga

SEQ ID NO: 1878274 - RNA, 19 nt, Artificial Sequence
  Description of Artificial Sequence: Synthetic oligonucleotide
agaacgaguggugaugaga

SEQ ID NO: 1878275 - RNA, 19 nt, Artificial Sequence
  Description of Artificial Sequence: Synthetic oligonucleotide
guguccguaguuggaaugg

SEQ ID NO: 1878276 - RNA, 19 nt, Artificial Sequence
  Description of Artificial Sequence: Synthetic oligonucleotide
cagcguagcacagaaguug

SEQ ID NO: 1878277 - RNA, 19 nt, Artificial Sequence
  Description of Artificial Sequence: Synthetic oligonucleotide
acacuggugcaugcgaggg

SEQ ID NO: 1878278 - RNA, 19 nt, Artificial Sequence
  Description of Artificial Sequence: Synthetic oligonucleotide
ucacaacucgcuuccccug

SEQ ID NO: 1878279 - RNA, 19 nt, Artificial Sequence
  Description of Artificial Sequence: Synthetic oligonucleotide
caaacaggcggucugcgca

SEQ ID NO: 1878280 - RNA, 19 nt, Artificial Sequence
  Description of Artificial Sequence: Synthetic oligonucleotide
ccuugaacaccucugccgg

SEQ ID NO: 1878281 - RNA, 19 nt, Artificial Sequence
  Description of Artificial Sequence: Synthetic oligonucleotide
aguacgcuggacucuggga

SEQ ID NO: 1878282 - RNA, 19 nt, Artificial Sequence
  Description of Artificial Sequence: Synthetic oligonucleotide
gucccuguuaacauggaca

SEQ ID NO: 1878283 - RNA, 19 nt, Artificial Sequence
  Description of Artificial Sequence: Synthetic oligonucleotide
aacaccucugccggcagcu

SEQ ID NO: 1878284 - RNA, 19 nt, Artificial Sequence
  Description of Artificial Sequence: Synthetic oligonucleotide
cuggauguguccguaguug

SEQ ID NO: 1878285 - RNA, 19 nt, Artificial Sequence
  Description of Artificial Sequence: Synthetic oligonucleotide
uacgcuggacucugggaug

SEQ ID NO: 1878286 - RNA, 19 nt, Artificial Sequence
  Description of Artificial Sequence: Synthetic oligonucleotide
aacgaguggugaugagagu

SEQ ID NO: 1878287 - RNA, 19 nt, Artificial Sequence
  Description of Artificial Sequence: Synthetic oligonucleotide
cagucacuagggcuagugg

SEQ ID NO: 1878288 - RNA, 19 nt, Artificial Sequence
  Description of Artificial Sequence: Synthetic oligonucleotide
accaauggaaaugggcaug

SEQ ID NO: 1878289 - RNA, 19 nt, Artificial Sequence
  Description of Artificial Sequence: Synthetic oligonucleotide
caugaguugccaccagcac

SEQ ID NO: 1878290 - RNA, 19 nt, Artificial Sequence
  Description of Artificial Sequence: Synthetic oligonucleotide
cuccuacaaagauacuguc

SEQ ID NO: 1878291 - RNA, 19 nt, Artificial Sequence
  Description of Artificial Sequence: Synthetic oligonucleotide
ugccccgggacucuacccc

SEQ ID NO: 1878292 - RNA, 19 nt, Artificial Sequence
  Description of Artificial Sequence: Synthetic oligonucleotide
ucuggauguguccguaguu

SEQ ID NO: 1878293 - RNA, 19 nt, Artificial Sequence
  Description of Artificial Sequence: Synthetic oligonucleotide
cucucacauuuccagcaag

SEQ ID NO: 1878294 - RNA, 19 nt, Artificial Sequence
  Description of Artificial Sequence: Synthetic oligonucleotide
gcuuguaccccucagcauc

SEQ ID NO: 1878295 - RNA, 19 nt, Artificial Sequence
  Description of Artificial Sequence: Synthetic oligonucleotide
cucagugcugccuggcaug

SEQ ID NO: 1878296 - RNA, 19 nt, Artificial Sequence
  Description of Artificial Sequence: Synthetic oligonucleotide
agcuucccucgcccaaugc

SEQ ID NO: 1878297 - RNA, 19 nt, Artificial Sequence
  Description of Artificial Sequence: Synthetic oligonucleotide
augguccucgggucaaaag

SEQ ID NO: 1878298 - RNA, 19 nt, Artificial Sequence
  Description of Artificial Sequence: Synthetic oligonucleotide
ggggucagucaucucacgg

SEQ ID NO: 1878299 - RNA, 19 nt, Artificial Sequence
  Description of Artificial Sequence: Synthetic oligonucleotide
uguuuauugugggcucagc

SEQ ID NO: 1878300 - RNA, 19 nt, Artificial Sequence
  Description of Artificial Sequence: Synthetic oligonucleotide
uggagaugguccucggguc

SEQ ID NO: 1878301 - RNA, 19 nt, Artificial Sequence
  Description of Artificial Sequence: Synthetic oligonucleotide
acuggugcaugcgaggggu

SEQ ID NO: 1878302 - RNA, 19 nt, Artificial Sequence
  Description of Artificial Sequence: Synthetic oligonucleotide
ggaacaucuggauuggugu

SEQ ID NO: 1878303 - RNA, 19 nt, Artificial Sequence
  Description of Artificial Sequence: Synthetic oligonucleotide
auaguagcaucaguguuua

SEQ ID NO: 1878304 - RNA, 19 nt, Artificial Sequence
  Description of Artificial Sequence: Synthetic oligonucleotide
caggccgauguuaagggca

SEQ ID NO: 1878305 - RNA, 19 nt, Artificial Sequence
  Description of Artificial Sequence: Synthetic oligonucleotide
ggugaugagagucccaucu

SEQ ID NO: 1878306 - RNA, 19 nt, Artificial Sequence
  Description of Artificial Sequence: Synthetic oligonucleotide
uacugucaccaauggaaau

SEQ ID NO: 1878307 - RNA, 19 nt, Artificial Sequence
  Description of Artificial Sequence: Synthetic oligonucleotide
auggguagcucaaacugcu

SEQ ID NO: 1878308 - RNA, 19 nt, Artificial Sequence
  Description of Artificial Sequence: Synthetic oligonucleotide
cccgacuuggaacaucugg

SEQ ID NO: 1878309 - RNA, 19 nt, Artificial Sequence
  Description of Artificial Sequence: Synthetic oligonucleotide
cuggcgcccaguuggcugg

SEQ ID NO: 1878310 - RNA, 19 nt, Artificial Sequence
  Description of Artificial Sequence: Synthetic oligonucleotide
aguguuuauugugggcuca

SEQ ID NO: 1878311 - RNA, 19 nt, Artificial Sequence
  Description of Artificial Sequence: Synthetic oligonucleotide
ggaaccuguuguuguggcg

SEQ ID NO: 1878312 - RNA, 19 nt, Artificial Sequence
  Description of Artificial Sequence: Synthetic oligonucleotide
gaguggugaugagaguccc

SEQ ID NO: 1878313 - RNA, 19 nt, Artificial Sequence
  Description of Artificial Sequence: Synthetic oligonucleotide
caguguuuauugugggcuc

SEQ ID NO: 1878314 - RNA, 19 nt, Artificial Sequence
  Description of Artificial Sequence: Synthetic oligonucleotide
acggaaccuguuguugugg

SEQ ID NO: 1878315 - RNA, 19 nt, Artificial Sequence
  Description of Artificial Sequence: Synthetic oligonucleotide
cuaguggggaagaccuuuc

SEQ ID NO: 1878316 - RNA, 19 nt, Artificial Sequence
  Description of Artificial Sequence: Synthetic oligonucleotide
ugaagauuaccagcuugua

SEQ ID NO: 1878317 - RNA, 19 nt, Artificial Sequence
  Description of Artificial Sequence: Synthetic oligonucleotide
cuggcacacuggauguacc

SEQ ID NO: 1878318 - RNA, 19 nt, Artificial Sequence
  Description of Artificial Sequence: Synthetic oligonucleotide
ugcgaggggucagucaucu

SEQ ID NO: 1878319 - RNA, 19 nt, Artificial Sequence
  Description of Artificial Sequence: Synthetic oligonucleotide
aaagggcaggccgauguua

SEQ ID NO: 1878320 - RNA, 19 nt, Artificial Sequence
  Description of Artificial Sequence: Synthetic oligonucleotide
ucugcgcaggagaagucuu

SEQ ID NO: 1878321 - RNA, 19 nt, Artificial Sequence
  Description of Artificial Sequence: Synthetic oligonucleotide
guuuagaccugcaugaguu

SEQ ID NO: 1878322 - RNA, 19 nt, Artificial Sequence
  Description of Artificial Sequence: Synthetic oligonucleotide
gggaauccuacugugacca

SEQ ID NO: 1878323 - RNA, 19 nt, Artificial Sequence
  Description of Artificial Sequence: Synthetic oligonucleotide
aggggucagucaucucacg

SEQ ID NO: 1878324 - RNA, 19 nt, Artificial Sequence
  Description of Artificial Sequence: Synthetic oligonucleotide
cuugccccgggacucuacc

SEQ ID NO: 1878325 - RNA, 19 nt, Artificial Sequence
  Description of Artificial Sequence: Synthetic oligonucleotide
ucuaccccagaugcuguga

SEQ ID NO: 1878326 - RNA, 19 nt, Artificial Sequence
  Description of Artificial Sequence: Synthetic oligonucleotide
cgggucaaaagcuggaagc

SEQ ID NO: 1878327 - RNA, 19 nt, Artificial Sequence
  Description of Artificial Sequence: Synthetic oligonucleotide
cacggaaccuguuguugug

SEQ ID NO: 1878328 - RNA, 19 nt, Artificial Sequence
  Description of Artificial Sequence: Synthetic oligonucleotide
ugggcaugcccucguuggc

SEQ ID NO: 1878329 - RNA, 19 nt, Artificial Sequence
  Description of Artificial Sequence: Synthetic oligonucleotide
uauugugggcucagcccuc

SEQ ID NO: 1878330 - RNA, 19 nt, Artificial Sequence
  Description of Artificial Sequence: Synthetic oligonucleotide
aggaguacgcuggacucug

SEQ ID NO: 1878331 - RNA, 19 nt, Artificial Sequence
  Description of Artificial Sequence: Synthetic oligonucleotide
ugaccaccaccucuggguu

SEQ ID NO: 1878332 - RNA, 19 nt, Artificial Sequence
  Description of Artificial Sequence: Synthetic oligonucleotide
cagcauggguagcucaaac

SEQ ID NO: 1878333 - RNA, 19 nt, Artificial Sequence
  Description of Artificial Sequence: Synthetic oligonucleotide
ggaaaugggcaugcccucg

SEQ ID NO: 1878334 - RNA, 19 nt, Artificial Sequence
  Description of Artificial Sequence: Synthetic oligonucleotide
gaggggucagucaucucac

SEQ ID NO: 1878335 - RNA, 19 nt, Artificial Sequence
  Description of Artificial Sequence: Synthetic oligonucleotide
agcguagcacagaaguuga

SEQ ID NO: 1878336 - RNA, 19 nt, Artificial Sequence
  Description of Artificial Sequence: Synthetic oligonucleotide
guaccccucagcauccagc

SEQ ID NO: 1878337 - RNA, 19 nt, Artificial Sequence
  Description of Artificial Sequence: Synthetic oligonucleotide
ccaccagcaccugaaaugg

SEQ ID NO: 1878338 - RNA, 19 nt, Artificial Sequence
  Description of Artificial Sequence: Synthetic oligonucleotide
ggcacucccgcaucucugg

SEQ ID NO: 1878339 - RNA, 19 nt, Artificial Sequence
  Description of Artificial Sequence: Synthetic oligonucleotide
ucucacggaaccuguuguu

SEQ ID NO: 1878340 - RNA, 19 nt, Artificial Sequence
  Description of Artificial Sequence: Synthetic oligonucleotide
aacaggcggucugcgcagg

SEQ ID NO: 1878341 - RNA, 19 nt, Artificial Sequence
  Description of Artificial Sequence: Synthetic oligonucleotide
aguuggcugggcgcccugc

SEQ ID NO: 1878342 - RNA, 19 nt, Artificial Sequence
  Description of Artificial Sequence: Synthetic oligonucleotide
auguaccuggcccgacuug

SEQ ID NO: 1878343 - RNA, 19 nt, Artificial Sequence
  Description of Artificial Sequence: Synthetic oligonucleotide
acucgcuuccccugccuca

SEQ ID NO: 1878344 - RNA, 19 nt, Artificial Sequence
  Description of Artificial Sequence: Synthetic oligonucleotide
cacuggugcaugcgagggg

SEQ ID NO: 1878345 - RNA, 19 nt, Artificial Sequence
  Description of Artificial Sequence: Synthetic oligonucleotide
guguuuauugugggcucag

SEQ ID NO: 1878346 - RNA, 19 nt, Artificial Sequence
  Description of Artificial Sequence: Synthetic oligonucleotide
auguguccguaguuggaau

SEQ ID NO: 1878347 - RNA, 19 nt, Artificial Sequence
  Description of Artificial Sequence: Synthetic oligonucleotide
acuggcaguacagccgcug

SEQ ID NO: 1878348 - RNA, 19 nt, Artificial Sequence
  Description of Artificial Sequence: Synthetic oligonucleotide
ugggauguagaggggccca

SEQ ID NO: 1878349 - RNA, 19 nt, Artificial Sequence
  Description of Artificial Sequence: Synthetic oligonucleotide
ugguguugucaaucacaac

SEQ ID NO: 1878350 - RNA, 19 nt, Artificial Sequence
  Description of Artificial Sequence: Synthetic oligonucleotide
augguaucugaaggaucuc

SEQ ID NO: 1878351 - RNA, 19 nt, Artificial Sequence
  Description of Artificial Sequence: Synthetic oligonucleotide
gcccucuaagaacuggcag

SEQ ID NO: 1878352 - RNA, 19 nt, Artificial Sequence
  Description of Artificial Sequence: Synthetic oligonucleotide
ucaucucacggaaccuguu

SEQ ID NO: 1878353 - RNA, 19 nt, Artificial Sequence
  Description of Artificial Sequence: Synthetic oligonucleotide
agggcacucccgcaucucu

SEQ ID NO: 1878354 - RNA, 19 nt, Artificial Sequence
  Description of Artificial Sequence: Synthetic oligonucleotide
ggacucugggauguagagg

SEQ ID NO: 1878355 - RNA, 19 nt, Artificial Sequence
  Description of Artificial Sequence: Synthetic oligonucleotide
uugccccgggacucuaccc

SEQ ID NO: 1878356 - RNA, 19 nt, Artificial Sequence
  Description of Artificial Sequence: Synthetic oligonucleotide
gugaagauuaccagcuugu

SEQ ID NO: 1878357 - RNA, 19 nt, Artificial Sequence
  Description of Artificial Sequence: Synthetic oligonucleotide
uggugaagauuaccagcuu

SEQ ID NO: 1878358 - RNA, 19 nt, Artificial Sequence
  Description of Artificial Sequence: Synthetic oligonucleotide
cauauccagcugacaccag

SEQ ID NO: 1878359 - RNA, 19 nt, Artificial Sequence
  Description of Artificial Sequence: Synthetic oligonucleotide
cugacacuggugcaugcga

SEQ ID NO: 1878360 - RNA, 19 nt, Artificial Sequence
  Description of Artificial Sequence: Synthetic oligonucleotide
augucugacacuggugcau

SEQ ID NO: 1878361 - RNA, 19 nt, Artificial Sequence
  Description of Artificial Sequence: Synthetic oligonucleotide
cugggauguagaggggccc

SEQ ID NO: 1878362 - RNA, 19 nt, Artificial Sequence
  Description of Artificial Sequence: Synthetic oligonucleotide
cagaacgaguggugaugag

SEQ ID NO: 1878363 - RNA, 19 nt, Artificial Sequence
  Description of Artificial Sequence: Synthetic oligonucleotide
gggaagaccuuuccagaac

SEQ ID NO: 1878364 - RNA, 19 nt, Artificial Sequence
  Description of Artificial Sequence: Synthetic oligonucleotide
uaccuggcccgacuuggaa

SEQ ID NO: 1878365 - RNA, 19 nt, Artificial Sequence
  Description of Artificial Sequence: Synthetic oligonucleotide
ugcgcaggagaagucuuuc

SEQ ID NO: 1878366 - RNA, 19 nt, Artificial Sequence
  Description of Artificial Sequence: Synthetic oligonucleotide
uaccccagaugcugugaac

SEQ ID NO: 1878367 - RNA, 19 nt, Artificial Sequence
  Description of Artificial Sequence: Synthetic oligonucleotide
gucugacacuggugcaugc

SEQ ID NO: 1878368 - RNA, 19 nt, Artificial Sequence
  Description of Artificial Sequence: Synthetic oligonucleotide
gcacagaaguugaagcagc

SEQ ID NO: 1878369 - RNA, 19 nt, Artificial Sequence
  Description of Artificial Sequence: Synthetic oligonucleotide
cucuaccccagaugcugug

SEQ ID NO: 1878370 - RNA, 19 nt, Artificial Sequence
  Description of Artificial Sequence: Synthetic oligonucleotide
guacgcuggacucugggau

SEQ ID NO: 1878371 - RNA, 19 nt, Artificial Sequence
  Description of Artificial Sequence: Synthetic oligonucleotide
ggcccagcgcuggagaugg

SEQ ID NO: 1878372 - RNA, 19 nt, Artificial Sequence
  Description of Artificial Sequence: Synthetic oligonucleotide
ucccuggguacagaauccu

SEQ ID NO: 1878373 - RNA, 19 nt, Artificial Sequence
  Description of Artificial Sequence: Synthetic oligonucleotide
augaccccaaugugucccu

SEQ ID NO: 1878374 - RNA, 19 nt, Artificial Sequence
  Description of Artificial Sequence: Synthetic oligonucleotide
ggucccacaugccacucac

SEQ ID NO: 1878375 - RNA, 19 nt, Artificial Sequence
  Description of Artificial Sequence: Synthetic oligonucleotide
ucguuggccugcuccugca

SEQ ID NO: 1878376 - RNA, 19 nt, Artificial Sequence
  Description of Artificial Sequence: Synthetic oligonucleotide
gaccugcaugaguugccac

SEQ ID NO: 1878377 - RNA, 19 nt, Artificial Sequence
  Description of Artificial Sequence: Synthetic oligonucleotide
ucccgcaucucuggcacac

SEQ ID NO: 1878378 - RNA, 19 nt, Artificial Sequence
  Description of Artificial Sequence: Synthetic oligonucleotide
uggugaugagagucccauc

SEQ ID NO: 1878379 - RNA, 19 nt, Artificial Sequence
  Description of Artificial Sequence: Synthetic oligonucleotide
agggcaggccgauguuaag

SEQ ID NO: 1878380 - RNA, 19 nt, Artificial Sequence
  Description of Artificial Sequence: Synthetic oligonucleotide
cuuucgguuuagaccugca

SEQ ID NO: 1878381 - RNA, 19 nt, Artificial Sequence
  Description of Artificial Sequence: Synthetic oligonucleotide
gaacaucuggauugguguu

SEQ ID NO: 1878382 - RNA, 19 nt, Artificial Sequence
  Description of Artificial Sequence: Synthetic oligonucleotide
uccugcagauggucccaca

SEQ ID NO: 1878383 - RNA, 19 nt, Artificial Sequence
  Description of Artificial Sequence: Synthetic oligonucleotide
ccgacuuggaacaucugga

SEQ ID NO: 1878384 - RNA, 19 nt, Artificial Sequence
  Description of Artificial Sequence: Synthetic oligonucleotide
guggcgagccugcuccagc

SEQ ID NO: 1878385 - RNA, 19 nt, Artificial Sequence
  Description of Artificial Sequence: Synthetic oligonucleotide
caugcgaggggucagucau

SEQ ID NO: 1878386 - RNA, 19 nt, Artificial Sequence
  Description of Artificial Sequence: Synthetic oligonucleotide
agucccaucuagguacaaa

SEQ ID NO: 1878387 - RNA, 19 nt, Artificial Sequence
  Description of Artificial Sequence: Synthetic oligonucleotide
ggucuggauguguccguag

SEQ ID NO: 1878388 - RNA, 19 nt, Artificial Sequence
  Description of Artificial Sequence: Synthetic oligonucleotide
cucuaagaacuggcaguac

SEQ ID NO: 1878389 - RNA, 19 nt, Artificial Sequence
  Description of Artificial Sequence: Synthetic oligonucleotide
ugcuccagcguagcacaga

SEQ ID NO: 1878390 - RNA, 19 nt, Artificial Sequence
  Description of Artificial Sequence: Synthetic oligonucleotide
gcaaacaggcggucugcgc

SEQ ID NO: 1878391 - RNA, 19 nt, Artificial Sequence
  Description of Artificial Sequence: Synthetic oligonucleotide
cguagcacagaaguugaag

SEQ ID NO: 1878392 - RNA, 19 nt, Artificial Sequence
  Description of Artificial Sequence: Synthetic oligonucleotide
cucagcccucuaagaacug

SEQ ID NO: 1878393 - RNA, 19 nt, Artificial Sequence
  Description of Artificial Sequence: Synthetic oligonucleotide
agcgcuggagaugguccuc

SEQ ID NO: 1878394 - RNA, 19 nt, Artificial Sequence
  Description of Artificial Sequence: Synthetic oligonucleotide
acucugggauguagagggg

SEQ ID NO: 1878395 - RNA, 19 nt, Artificial Sequence
  Description of Artificial Sequence: Synthetic oligonucleotide
ggcaaacaggcggucugcg

SEQ ID NO: 1878396 - RNA, 19 nt, Artificial Sequence
  Description of Artificial Sequence: Synthetic oligonucleotide
gcugccggccacuucagga

SEQ ID NO: 1878397 - RNA, 19 nt, Artificial Sequence
  Description of Artificial Sequence: Synthetic oligonucleotide
gguggugagcauaguagca

SEQ ID NO: 1878398 - RNA, 19 nt, Artificial Sequence
  Description of Artificial Sequence: Synthetic oligonucleotide
ccuguuaacauggacauau

SEQ ID NO: 1878399 - RNA, 19 nt, Artificial Sequence
  Description of Artificial Sequence: Synthetic oligonucleotide
cugcaugaguugccaccag

SEQ ID NO: 1878400 - RNA, 19 nt, Artificial Sequence
  Description of Artificial Sequence: Synthetic oligonucleotide
gauguaccuggcccgacuu

SEQ ID NO: 1878401 - RNA, 19 nt, Artificial Sequence
  Description of Artificial Sequence: Synthetic oligonucleotide
ccuggcaugagcucacaca

SEQ ID NO: 1878402 - RNA, 19 nt, Artificial Sequence
  Description of Artificial Sequence: Synthetic oligonucleotide
gcaugaguugccaccagca

SEQ ID NO: 1878403 - RNA, 19 nt, Artificial Sequence
  Description of Artificial Sequence: Synthetic oligonucleotide
ggggaagaccuuuccagaa

SEQ ID NO: 1878404 - RNA, 19 nt, Artificial Sequence
  Description of Artificial Sequence: Synthetic oligonucleotide
accccaaugugucccuguu

SEQ ID NO: 1878405 - RNA, 19 nt, Artificial Sequence
  Description of Artificial Sequence: Synthetic oligonucleotide
agcccucuaagaacuggca

SEQ ID NO: 1878406 - RNA, 19 nt, Artificial Sequence
  Description of Artificial Sequence: Synthetic oligonucleotide
gucagucaucucacggaac

SEQ ID NO: 1878407 - RNA, 19 nt, Artificial Sequence
  Description of Artificial Sequence: Synthetic oligonucleotide
guacagccgcugcagugca

SEQ ID NO: 1878408 - RNA, 19 nt, Artificial Sequence
  Description of Artificial Sequence: Synthetic oligonucleotide
gcccucguuggccugcucc

SEQ ID NO: 1878409 - RNA, 19 nt, Artificial Sequence
  Description of Artificial Sequence: Synthetic oligonucleotide
gguuuagaccugcaugagu

SEQ ID NO: 1878410 - RNA, 19 nt, Artificial Sequence
  Description of Artificial Sequence: Synthetic oligonucleotide
ggucagcauggguagcuca

SEQ ID NO: 1878411 - RNA, 19 nt, Artificial Sequence
  Description of Artificial Sequence: Synthetic oligonucleotide
caggagaagucuuucuuuu

SEQ ID NO: 1878412 - RNA, 19 nt, Artificial Sequence
  Description of Artificial Sequence: Synthetic oligonucleotide
gucuggauguguccguagu

SEQ ID NO: 1878413 - RNA, 19 nt, Artificial Sequence
  Description of Artificial Sequence: Synthetic oligonucleotide
ggcacacuggauguaccug

SEQ ID NO: 1878414 - RNA, 19 nt, Artificial Sequence
  Description of Artificial Sequence: Synthetic oligonucleotide
cuacugugaccaccaccuc

SEQ ID NO: 1878415 - RNA, 19 nt, Artificial Sequence
  Description of Artificial Sequence: Synthetic oligonucleotide
cuaccccagaugcugugaa

SEQ ID NO: 1878416 - RNA, 19 nt, Artificial Sequence
  Description of Artificial Sequence: Synthetic oligonucleotide
cagccgcugcagugcaggg

SEQ ID NO: 1878417 - RNA, 19 nt, Artificial Sequence
  Description of Artificial Sequence: Synthetic oligonucleotide
ugaccccaaugugucccug

SEQ ID NO: 1878418 - RNA, 19 nt, Artificial Sequence
  Description of Artificial Sequence: Synthetic oligonucleotide
ccguaguuggaaugguauc

SEQ ID NO: 1878419 - RNA, 19 nt, Artificial Sequence
  Description of Artificial Sequence: Synthetic oligonucleotide
gccacuucaggaagaacuc

SEQ ID NO: 1878420 - RNA, 19 nt, Artificial Sequence
  Description of Artificial Sequence: Synthetic oligonucleotide
gacuugccggccccaggga

SEQ ID NO: 1878421 - RNA, 19 nt, Artificial Sequence
  Description of Artificial Sequence: Synthetic oligonucleotide
gaugguccucgggucaaaa

SEQ ID NO: 1878422 - RNA, 19 nt, Artificial Sequence
  Description of Artificial Sequence: Synthetic oligonucleotide
cugccggccacuucaggaa

SEQ ID NO: 1878423 - RNA, 19 nt, Artificial Sequence
  Description of Artificial Sequence: Synthetic oligonucleotide
gccgauguuaagggcaaac

SEQ ID NO: 1878424 - RNA, 19 nt, Artificial Sequence
  Description of Artificial Sequence: Synthetic oligonucleotide
ccagcugccggccacuuca

SEQ ID NO: 1878425 - RNA, 19 nt, Artificial Sequence
  Description of Artificial Sequence: Synthetic oligonucleotide
guagaggggcccagcgcug

SEQ ID NO: 1878426 - RNA, 19 nt, Artificial Sequence
  Description of Artificial Sequence: Synthetic oligonucleotide
gcuuucgguuuagaccugc

SEQ ID NO: 1878427 - RNA, 19 nt, Artificial Sequence
  Description of Artificial Sequence: Synthetic oligonucleotide
gaagcagcggcagggcacu

SEQ ID NO: 1878428 - RNA, 19 nt, Artificial Sequence
  Description of Artificial Sequence: Synthetic oligonucleotide
ggaaugguaucugaaggau

SEQ ID NO: 1878429 - RNA, 19 nt, Artificial Sequence
  Description of Artificial Sequence: Synthetic oligonucleotide
gaggggcccagcgcuggag

SEQ ID NO: 1878430 - RNA, 19 nt, Artificial Sequence
  Description of Artificial Sequence: Synthetic oligonucleotide
cuccuguacgaagguggac

SEQ ID NO: 1878431 - RNA, 19 nt, Artificial Sequence
  Description of Artificial Sequence: Synthetic oligonucleotide
ggugcaugcgaggggucag

SEQ ID NO: 1878432 - RNA, 19 nt, Artificial Sequence
  Description of Artificial Sequence: Synthetic oligonucleotide
guagcucaaacugcuuccu

SEQ ID NO: 1878433 - RNA, 19 nt, Artificial Sequence
  Description of Artificial Sequence: Synthetic oligonucleotide
ccagucacuagggcuagug

SEQ ID NO: 1878434 - RNA, 19 nt, Artificial Sequence
  Description of Artificial Sequence: Synthetic oligonucleotide
caccaauggaaaugggcau

SEQ ID NO: 1878435 - RNA, 19 nt, Artificial Sequence
  Description of Artificial Sequence: Synthetic oligonucleotide
cuuccccugccucagugcu

SEQ ID NO: 1878436 - RNA, 19 nt, Artificial Sequence
  Description of Artificial Sequence: Synthetic oligonucleotide
ccuggcccgacuuggaaca

SEQ ID NO: 1878437 - RNA, 19 nt, Artificial Sequence
  Description of Artificial Sequence: Synthetic oligonucleotide
uuguaccccucagcaucca

SEQ ID NO: 1878438 - RNA, 19 nt, Artificial Sequence
  Description of Artificial Sequence: Synthetic oligonucleotide
cugggcgcccugcugcauc

SEQ ID NO: 1878439 - RNA, 19 nt, Artificial Sequence
  Description of Artificial Sequence: Synthetic oligonucleotide
uuguuguggcgagccugcu

SEQ ID NO: 1878440 - RNA, 19 nt, Artificial Sequence
  Description of Artificial Sequence: Synthetic oligonucleotide
augcgaggggucagucauc

SEQ ID NO: 1878441 - RNA, 19 nt, Artificial Sequence
  Description of Artificial Sequence: Synthetic oligonucleotide
ccaugaccccaaugugucc

SEQ ID NO: 1878442 - RNA, 19 nt, Artificial Sequence
  Description of Artificial Sequence: Synthetic oligonucleotide
gucaucucacggaaccugu

SEQ ID NO: 1878443 - RNA, 19 nt, Artificial Sequence
  Description of Artificial Sequence: Synthetic oligonucleotide
gaccccaaugugucccugu

SEQ ID NO: 1878444 - RNA, 19 nt, Artificial Sequence
  Description of Artificial Sequence: Synthetic oligonucleotide
caggcggucugcgcaggag

SEQ ID NO: 1878445 - RNA, 19 nt, Artificial Sequence
  Description of Artificial Sequence: Synthetic oligonucleotide
gcgcccaguuggcugggcg

SEQ ID NO: 1878446 - RNA, 19 nt, Artificial Sequence
  Description of Artificial Sequence: Synthetic oligonucleotide
uaguagcaucaguguuuau

SEQ ID NO: 1878447 - RNA, 19 nt, Artificial Sequence
  Description of Artificial Sequence: Synthetic oligonucleotide
aggccgauguuaagggcaa

SEQ ID NO: 1878448 - RNA, 19 nt, Artificial Sequence
  Description of Artificial Sequence: Synthetic oligonucleotide
cagcugccggccacuucag

SEQ ID NO: 1878449 - RNA, 19 nt, Artificial Sequence
  Description of Artificial Sequence: Synthetic oligonucleotide
cggaaccuguuguuguggc

SEQ ID NO: 1878450 - RNA, 19 nt, Artificial Sequence
  Description of Artificial Sequence: Synthetic oligonucleotide
aacuggcaguacagccgcu

SEQ ID NO: 1878451 - RNA, 19 nt, Artificial Sequence
  Description of Artificial Sequence: Synthetic oligonucleotide
gggcuaguggggaagaccu

SEQ ID NO: 1878452 - RNA, 19 nt, Artificial Sequence
  Description of Artificial Sequence: Synthetic oligonucleotide
gcgcuggagaugguccucg

SEQ ID NO: 1878453 - RNA, 19 nt, Artificial Sequence
  Description of Artificial Sequence: Synthetic oligonucleotide
cacucacuggcuuucgguu

SEQ ID NO: 1878454 - RNA, 19 nt, Artificial Sequence
  Description of Artificial Sequence: Synthetic oligonucleotide
cccauuugguuggugaaga

SEQ ID NO: 1878455 - RNA, 19 nt, Artificial Sequence
  Description of Artificial Sequence: Synthetic oligonucleotide
gucugcgcaggagaagucu

SEQ ID NO: 1878456 - RNA, 19 nt, Artificial Sequence
  Description of Artificial Sequence: Synthetic oligonucleotide
cagcggcagggcacucccg

SEQ ID NO: 1878457 - RNA, 19 nt, Artificial Sequence
  Description of Artificial Sequence: Synthetic oligonucleotide
cccucuaagaacuggcagu

SEQ ID NO: 1878458 - RNA, 19 nt, Artificial Sequence
  Description of Artificial Sequence: Synthetic oligonucleotide
cucgggucaaaagcuggaa

SEQ ID NO: 1878459 - RNA, 19 nt, Artificial Sequence
  Description of Artificial Sequence: Synthetic oligonucleotide
cuggauguaccuggcccga

SEQ ID NO: 1878460 - RNA, 19 nt, Artificial Sequence
  Description of Artificial Sequence: Synthetic oligonucleotide
gguccucgggucaaaagcu

SEQ ID NO: 1878461 - RNA, 19 nt, Artificial Sequence
  Description of Artificial Sequence: Synthetic oligonucleotide
ccagggaauccuacuguga

SEQ ID NO: 1878462 - RNA, 19 nt, Artificial Sequence
  Description of Artificial Sequence: Synthetic oligonucleotide
gcaugcgaggggucaguca

SEQ ID NO: 1878463 - RNA, 19 nt, Artificial Sequence
  Description of Artificial Sequence: Synthetic oligonucleotide
ccgauguuaagggcaaaca

SEQ ID NO: 1878464 - RNA, 19 nt, Artificial Sequence
  Description of Artificial Sequence: Synthetic oligonucleotide
cacuagggcuaguggggaa

SEQ ID NO: 1878465 - RNA, 19 nt, Artificial Sequence
  Description of Artificial Sequence: Synthetic oligonucleotide
ggaguacgcuggacucugg

SEQ ID NO: 1878466 - RNA, 19 nt, Artificial Sequence
  Description of Artificial Sequence: Synthetic oligonucleotide
ccagaacgaguggugauga

SEQ ID NO: 1878467 - RNA, 19 nt, Artificial Sequence
  Description of Artificial Sequence: Synthetic oligonucleotide
guccguaguuggaauggua

SEQ ID NO: 1878468 - RNA, 19 nt, Artificial Sequence
  Description of Artificial Sequence: Synthetic oligonucleotide
ucgcuuccccugccucagu

SEQ ID NO: 1878469 - RNA, 19 nt, Artificial Sequence
  Description of Artificial Sequence: Synthetic oligonucleotide
ugccuggcaugagcucaca

SEQ ID NO: 1878470 - RNA, 19 nt, Artificial Sequence
  Description of Artificial Sequence: Synthetic oligonucleotide
ggauguaccuggcccgacu

SEQ ID NO: 1878471 - RNA, 19 nt, Artificial Sequence
  Description of Artificial Sequence: Synthetic oligonucleotide
uggcgcccaguuggcuggg

SEQ ID NO: 1878472 - RNA, 19 nt, Artificial Sequence
  Description of Artificial Sequence: Synthetic oligonucleotide
agcccucggucagcauggg

SEQ ID NO: 1878473 - RNA, 19 nt, Artificial Sequence
  Description of Artificial Sequence: Synthetic oligonucleotide
ccucuaagaacuggcagua

SEQ ID NO: 1878474 - RNA, 19 nt, Artificial Sequence
  Description of Artificial Sequence: Synthetic oligonucleotide
guaccuggcccgacuugga

SEQ ID NO: 1878475 - RNA, 19 nt, Artificial Sequence
  Description of Artificial Sequence: Synthetic oligonucleotide
cagcaagguggugagcaua

SEQ ID NO: 1878476 - RNA, 19 nt, Artificial Sequence
  Description of Artificial Sequence: Synthetic oligonucleotide
gcuccuguacgaaggugga

SEQ ID NO: 1878477 - RNA, 19 nt, Artificial Sequence
  Description of Artificial Sequence: Synthetic oligonucleotide
gccuggcaugagcucacac

SEQ ID NO: 1878478 - RNA, 19 nt, Artificial Sequence
  Description of Artificial Sequence: Synthetic oligonucleotide
ccucgggucaaaagcugga

SEQ ID NO: 1878479 - RNA, 19 nt, Artificial Sequence
  Description of Artificial Sequence: Synthetic oligonucleotide
agaugguccucgggucaaa

SEQ ID NO: 1878480 - RNA, 19 nt, Artificial Sequence
  Description of Artificial Sequence: Synthetic oligonucleotide
gccggcagcuucccucgcc

SEQ ID NO: 1878481 - RNA, 19 nt, Artificial Sequence
  Description of Artificial Sequence: Synthetic oligonucleotide
cgggacucuaccccagaug

SEQ ID NO: 1878482 - RNA, 19 nt, Artificial Sequence
  Description of Artificial Sequence: Synthetic oligonucleotide
cuugccggccccagggaau

SEQ ID NO: 1878483 - RNA, 19 nt, Artificial Sequence
  Description of Artificial Sequence: Synthetic oligonucleotide
cgcccaguuggcugggcgc

SEQ ID NO: 1878484 - RNA, 19 nt, Artificial Sequence
  Description of Artificial Sequence: Synthetic oligonucleotide
caucuccuacaaagauacu

SEQ ID NO: 1878485 - RNA, 19 nt, Artificial Sequence
  Description of Artificial Sequence: Synthetic oligonucleotide
caucucuggcacacuggau

SEQ ID NO: 1878486 - RNA, 19 nt, Artificial Sequence
  Description of Artificial Sequence: Synthetic oligonucleotide
cagcgcuggagaugguccu

SEQ ID NO: 1878487 - RNA, 19 nt, Artificial Sequence
  Description of Artificial Sequence: Synthetic oligonucleotide
gagucccaucuagguacaa

SEQ ID NO: 1878488 - RNA, 19 nt, Artificial Sequence
  Description of Artificial Sequence: Synthetic oligonucleotide
ccaccuugccccgggacuc

SEQ ID NO: 1878489 - RNA, 19 nt, Artificial Sequence
  Description of Artificial Sequence: Synthetic oligonucleotide
ggcccgacuuggaacaucu

SEQ ID NO: 1878490 - RNA, 19 nt, Artificial Sequence
  Description of Artificial Sequence: Synthetic oligonucleotide
cgguuuagaccugcaugag

SEQ ID NO: 1878491 - RNA, 19 nt, Artificial Sequence
  Description of Artificial Sequence: Synthetic oligonucleotide
gcuaguggggaagaccuuu

SEQ ID NO: 1878492 - RNA, 19 nt, Artificial Sequence
  Description of Artificial Sequence: Synthetic oligonucleotide
cagucaucucacggaaccu

SEQ ID NO: 1878493 - RNA, 19 nt, Artificial Sequence
  Description of Artificial Sequence: Synthetic oligonucleotide
ggcuuucgguuuagaccug

SEQ ID NO: 1878494 - RNA, 19 nt, Artificial Sequence
  Description of Artificial Sequence: Synthetic oligonucleotide
cucccgcaucucuggcaca

SEQ ID NO: 1878495 - RNA, 19 nt, Artificial Sequence
  Description of Artificial Sequence: Synthetic oligonucleotide
ccacucacuggcuuucggu

SEQ ID NO: 1878496 - RNA, 19 nt, Artificial Sequence
  Description of Artificial Sequence: Synthetic oligonucleotide
gcaguacagccgcugcagu

SEQ ID NO: 1878497 - RNA, 19 nt, Artificial Sequence
  Description of Artificial Sequence: Synthetic oligonucleotide
cugcgcaggagaagucuuu

SEQ ID NO: 1878498 - RNA, 19 nt, Artificial Sequence
  Description of Artificial Sequence: Synthetic oligonucleotide
gcccaaugcccauuugguu

SEQ ID NO: 1878499 - RNA, 19 nt, Artificial Sequence
  Description of Artificial Sequence: Synthetic oligonucleotide
gcggcagggcacucccgca

SEQ ID NO: 1878500 - RNA, 19 nt, Artificial Sequence
  Description of Artificial Sequence: Synthetic oligonucleotide
gugcaugcgaggggucagu

SEQ ID NO: 1878501 - RNA, 19 nt, Artificial Sequence
  Description of Artificial Sequence: Synthetic oligonucleotide
ccuguacgaagguggacuu

SEQ ID NO: 1878502 - RNA, 19 nt, Artificial Sequence
  Description of Artificial Sequence: Synthetic oligonucleotide
cccaguuggcugggcgccc

SEQ ID NO: 1878503 - RNA, 19 nt, Artificial Sequence
  Description of Artificial Sequence: Synthetic oligonucleotide
accuugccccgggacucua

SEQ ID NO: 1878504 - RNA, 19 nt, Artificial Sequence
  Description of Artificial Sequence: Synthetic oligonucleotide
ccccagggaauccuacugu

SEQ ID NO: 1878505 - RNA, 19 nt, Artificial Sequence
  Description of Artificial Sequence: Synthetic oligonucleotide
ccagcguagcacagaaguu

SEQ ID NO: 1878506 - RNA, 19 nt, Artificial Sequence
  Description of Artificial Sequence: Synthetic oligonucleotide
ccauuugguuggugaagau

SEQ ID NO: 1878507 - RNA, 19 nt, Artificial Sequence
  Description of Artificial Sequence: Synthetic oligonucleotide
gcccgacuuggaacaucug

SEQ ID NO: 1878508 - RNA, 19 nt, Artificial Sequence
  Description of Artificial Sequence: Synthetic oligonucleotide
gcgaggggucagucaucuc

SEQ ID NO: 1878509 - RNA, 19 nt, Artificial Sequence
  Description of Artificial Sequence: Synthetic oligonucleotide
cucugccggcagcuucccu

SEQ ID NO: 1878510 - RNA, 19 nt, Artificial Sequence
  Description of Artificial Sequence: Synthetic oligonucleotide
cccgggacucuaccccaga

SEQ ID NO: 1878511 - RNA, 19 nt, Artificial Sequence
  Description of Artificial Sequence: Synthetic oligonucleotide
ggccgauguuaagggcaaa

SEQ ID NO: 1878512 - RNA, 19 nt, Artificial Sequence
  Description of Artificial Sequence: Synthetic oligonucleotide
caccuugccccgggacucu

SEQ ID NO: 1878513 - RNA, 19 nt, Artificial Sequence
  Description of Artificial Sequence: Synthetic oligonucleotide
ggaagcccucggucagcau

SEQ ID NO: 1878514 - RNA, 19 nt, Artificial Sequence
  Description of Artificial Sequence: Synthetic oligonucleotide
cccuguuaacauggacaua

SEQ ID NO: 1878515 - RNA, 19 nt, Artificial Sequence
  Description of Artificial Sequence: Synthetic oligonucleotide
cuggcccgacuuggaacau

SEQ ID NO: 1878516 - RNA, 19 nt, Artificial Sequence
  Description of Artificial Sequence: Synthetic oligonucleotide
ggcuaguggggaagaccuu

SEQ ID NO: 1878517 - RNA, 19 nt, Artificial Sequence
  Description of Artificial Sequence: Synthetic oligonucleotide
ccgggacucuaccccagau

SEQ ID NO: 1878518 - RNA, 19 nt, Artificial Sequence
  Description of Artificial Sequence: Synthetic oligonucleotide
ccaguuggcugggcgcccu

SEQ ID NO: 1878519 - RNA, 19 nt, Artificial Sequence
  Description of Artificial Sequence: Synthetic oligonucleotide
gcugggcgcccugcugcau

SEQ ID NO: 1878520 - RNA, 19 nt, Artificial Sequence
  Description of Artificial Sequence: Synthetic oligonucleotide
gcgcugccaugaccccaau

SEQ ID NO: 1878521 - RNA, 19 nt, Artificial Sequence
  Description of Artificial Sequence: Synthetic oligonucleotide
cccucgcccaaugcccauu

SEQ ID NO: 1878522 - RNA, 19 nt, Artificial Sequence
  Description of Artificial Sequence: Synthetic oligonucleotide
cgcuggacucugggaugua

SEQ ID NO: 1878523 - RNA, 19 nt, Artificial Sequence
  Description of Artificial Sequence: Synthetic oligonucleotide
aaacaaauaauauugacuc

SEQ ID NO: 1878524 - RNA, 19 nt, Artificial Sequence
  Description of Artificial Sequence: Synthetic oligonucleotide
aacaauagacucuaugcgc

SEQ ID NO: 1878525 - RNA, 19 nt, Artificial Sequence
  Description of Artificial Sequence: Synthetic oligonucleotide
aaaucauuaaucugcuggc

SEQ ID NO: 1878526 - RNA, 19 nt, Artificial Sequence
  Description of Artificial Sequence: Synthetic oligonucleotide
aauagcacaagugaagcag

SEQ ID NO: 1878527 - RNA, 19 nt, Artificial Sequence
  Description of Artificial Sequence: Synthetic oligonucleotide
aaucggagacaccaccacc

SEQ ID NO: 1878528 - RNA, 19 nt, Artificial Sequence
  Description of Artificial Sequence: Synthetic oligonucleotide
aguaaguugacucauugaa

SEQ ID NO: 1878529 - RNA, 19 nt, Artificial Sequence
  Description of Artificial Sequence: Synthetic oligonucleotide
aaaucggagacaccaccac

SEQ ID NO: 1878530 - RNA, 19 nt, Artificial Sequence
  Description of Artificial Sequence: Synthetic oligonucleotide
auugacuccacacauggca

SEQ ID NO: 1878531 - RNA, 19 nt, Artificial Sequence
  Description of Artificial Sequence: Synthetic oligonucleotide
uaauauugacuccacacau

SEQ ID NO: 1878532 - RNA, 19 nt, Artificial Sequence
  Description of Artificial Sequence: Synthetic oligonucleotide
auagagaauucgcuucacc

SEQ ID NO: 1878533 - RNA, 19 nt, Artificial Sequence
  Description of Artificial Sequence: Synthetic oligonucleotide
aaguugacucauugaaguc

SEQ ID NO: 1878534 - RNA, 19 nt, Artificial Sequence
  Description of Artificial Sequence: Synthetic oligonucleotide
acaaauaauauugacucca

SEQ ID NO: 1878535 - RNA, 19 nt, Artificial Sequence
  Description of Artificial Sequence: Synthetic oligonucleotide
agagaauucgcuucaccuc

SEQ ID NO: 1878536 - RNA, 19 nt, Artificial Sequence
  Description of Artificial Sequence: Synthetic oligonucleotide
ugagguugagcucagugac

SEQ ID NO: 1878537 - RNA, 19 nt, Artificial Sequence
  Description of Artificial Sequence: Synthetic oligonucleotide
cugaguucgccaauggugg

SEQ ID NO: 1878538 - RNA, 19 nt, Artificial Sequence
  Description of Artificial Sequence: Synthetic oligonucleotide
uagagaauucgcuucaccu

SEQ ID NO: 1878539 - RNA, 19 nt, Artificial Sequence
  Description of Artificial Sequence: Synthetic oligonucleotide
uuuucugggcagaucaagc

SEQ ID NO: 1878540 - RNA, 19 nt, Artificial Sequence
  Description of Artificial Sequence: Synthetic oligonucleotide
aucauuaaucugcuggcag

SEQ ID NO: 1878541 - RNA, 19 nt, Artificial Sequence
  Description of Artificial Sequence: Synthetic oligonucleotide
ucuugauugcgugagagac

SEQ ID NO: 1878542 - RNA, 19 nt, Artificial Sequence
  Description of Artificial Sequence: Synthetic oligonucleotide
uauucuguucugcacgagc

SEQ ID NO: 1878543 - RNA, 19 nt, Artificial Sequence
  Description of Artificial Sequence: Synthetic oligonucleotide
ucagugaccagcaacccgu

SEQ ID NO: 1878544 - RNA, 19 nt, Artificial Sequence
  Description of Artificial Sequence: Synthetic oligonucleotide
ucuagagcuuuucugggca

SEQ ID NO: 1878545 - RNA, 19 nt, Artificial Sequence
  Description of Artificial Sequence: Synthetic oligonucleotide
gacucagcaaauuccgucc

SEQ ID NO: 1878546 - RNA, 19 nt, Artificial Sequence
  Description of Artificial Sequence: Synthetic oligonucleotide
caaauuccguccaaggcag

SEQ ID NO: 1878547 - RNA, 19 nt, Artificial Sequence
  Description of Artificial Sequence: Synthetic oligonucleotide
gaucaagcuuccuagucug

SEQ ID NO: 1878548 - RNA, 19 nt, Artificial Sequence
  Description of Artificial Sequence: Synthetic oligonucleotide
uucgauuggccacagggac

SEQ ID NO: 1878549 - RNA, 19 nt, Artificial Sequence
  Description of Artificial Sequence: Synthetic oligonucleotide
ggagccgccacauagcucg

SEQ ID NO: 1878550 - RNA, 19 nt, Artificial Sequence
  Description of Artificial Sequence: Synthetic oligonucleotide
gauugcgugagagaccagg

SEQ ID NO: 1878551 - RNA, 19 nt, Artificial Sequence
  Description of Artificial Sequence: Synthetic oligonucleotide
gaaacaaauaauauugacu

SEQ ID NO: 1878552 - RNA, 19 nt, Artificial Sequence
  Description of Artificial Sequence: Synthetic oligonucleotide
uugauugcgugagagacca

SEQ ID NO: 1878553 - RNA, 19 nt, Artificial Sequence
  Description of Artificial Sequence: Synthetic oligonucleotide
ugacccacacgguuaauag

SEQ ID NO: 1878554 - RNA, 19 nt, Artificial Sequence
  Description of Artificial Sequence: Synthetic oligonucleotide
aacgcauagcccuucaauu

SEQ ID NO: 1878555 - RNA, 19 nt, Artificial Sequence
  Description of Artificial Sequence: Synthetic oligonucleotide
aguuggguuuaacugcuuc

SEQ ID NO: 1878556 - RNA, 19 nt, Artificial Sequence
  Description of Artificial Sequence: Synthetic oligonucleotide
gguaguuggguuuaacugc

SEQ ID NO: 1878557 - RNA, 19 nt, Artificial Sequence
  Description of Artificial Sequence: Synthetic oligonucleotide
gcuucgauuggccacaggg

SEQ ID NO: 1878558 - RNA, 19 nt, Artificial Sequence
  Description of Artificial Sequence: Synthetic oligonucleotide
ucugacagaaccuggucgu

SEQ ID NO: 1878559 - RNA, 19 nt, Artificial Sequence
  Description of Artificial Sequence: Synthetic oligonucleotide
ugacucauugaagucaccc

SEQ ID NO: 1878560 - RNA, 19 nt, Artificial Sequence
  Description of Artificial Sequence: Synthetic oligonucleotide
gugaucucgaucucguucc

SEQ ID NO: 1878561 - RNA, 19 nt, Artificial Sequence
  Description of Artificial Sequence: Synthetic oligonucleotide
caaagggcauauuccaugc

SEQ ID NO: 1878562 - RNA, 19 nt, Artificial Sequence
  Description of Artificial Sequence: Synthetic oligonucleotide
agaucaagcuuccuagucu

SEQ ID NO: 1878563 - RNA, 19 nt, Artificial Sequence
  Description of Artificial Sequence: Synthetic oligonucleotide
gauugaagaugaucucugc

SEQ ID NO: 1878564 - RNA, 19 nt, Artificial Sequence
  Description of Artificial Sequence: Synthetic oligonucleotide
aauauugacuccacacaug

SEQ ID NO: 1878565 - RNA, 19 nt, Artificial Sequence
  Description of Artificial Sequence: Synthetic oligonucleotide
uacaucucaagucggccug

SEQ ID NO: 1878566 - RNA, 19 nt, Artificial Sequence
  Description of Artificial Sequence: Synthetic oligonucleotide
acgcauagcccuucaauuc

SEQ ID NO: 1878567 - RNA, 19 nt, Artificial Sequence
  Description of Artificial Sequence: Synthetic oligonucleotide
ucgaucucguuccaaaauc

SEQ ID NO: 1878568 - RNA, 19 nt, Artificial Sequence
  Description of Artificial Sequence: Synthetic oligonucleotide
auagcucgaaccguaaaag

SEQ ID NO: 1878569 - RNA, 19 nt, Artificial Sequence
  Description of Artificial Sequence: Synthetic oligonucleotide
auuggcaauggcugcguuc

SEQ ID NO: 1878570 - RNA, 19 nt, Artificial Sequence
  Description of Artificial Sequence: Synthetic oligonucleotide
ucaauucgaaguuucucuc

SEQ ID NO: 1878571 - RNA, 19 nt, Artificial Sequence
  Description of Artificial Sequence: Synthetic oligonucleotide
gacagaaccuggucguuag

SEQ ID NO: 1878572 - RNA, 19 nt, Artificial Sequence
  Description of Artificial Sequence: Synthetic oligonucleotide
uucgaaguuucucucugcu

SEQ ID NO: 1878573 - RNA, 19 nt, Artificial Sequence
  Description of Artificial Sequence: Synthetic oligonucleotide
uugccauagagaauucgcu

SEQ ID NO: 1878574 - RNA, 19 nt, Artificial Sequence
  Description of Artificial Sequence: Synthetic oligonucleotide
uaauagcacaagugaagca

SEQ ID NO: 1878575 - RNA, 19 nt, Artificial Sequence
  Description of Artificial Sequence: Synthetic oligonucleotide
guugagguugagcucagug

SEQ ID NO: 1878576 - RNA, 19 nt, Artificial Sequence
  Description of Artificial Sequence: Synthetic oligonucleotide
agacucuaugcgcuugugg

SEQ ID NO: 1878577 - RNA, 19 nt, Artificial Sequence
  Description of Artificial Sequence: Synthetic oligonucleotide
ucacugaguucgccaaugg

SEQ ID NO: 1878578 - RNA, 19 nt, Artificial Sequence
  Description of Artificial Sequence: Synthetic oligonucleotide
uucugcacgagccccacac

SEQ ID NO: 1878579 - RNA, 19 nt, Artificial Sequence
  Description of Artificial Sequence: Synthetic oligonucleotide
aguucccgggcauacaucu

SEQ ID NO: 1878580 - RNA, 19 nt, Artificial Sequence
  Description of Artificial Sequence: Synthetic oligonucleotide
aguugacucauugaaguca

SEQ ID NO: 1878581 - RNA, 19 nt, Artificial Sequence
  Description of Artificial Sequence: Synthetic oligonucleotide
aaucauuaaucugcuggca

SEQ ID NO: 1878582 - RNA, 19 nt, Artificial Sequence
  Description of Artificial Sequence: Synthetic oligonucleotide
uugcgugagagaccagggg

SEQ ID NO: 1878583 - RNA, 19 nt, Artificial Sequence
  Description of Artificial Sequence: Synthetic oligonucleotide
cuugauugcgugagagacc

SEQ ID NO: 1878584 - RNA, 19 nt, Artificial Sequence
  Description of Artificial Sequence: Synthetic oligonucleotide
cagggacucacugaguucg

SEQ ID NO: 1878585 - RNA, 19 nt, Artificial Sequence
  Description of Artificial Sequence: Synthetic oligonucleotide
gaaccguaaaaguagccaa

SEQ ID NO: 1878586 - RNA, 19 nt, Artificial Sequence
  Description of Artificial Sequence: Synthetic oligonucleotide
gaucucguuccaaaaucgg

SEQ ID NO: 1878587 - RNA, 19 nt, Artificial Sequence
  Description of Artificial Sequence: Synthetic oligonucleotide
auacaucucaagucggccu

SEQ ID NO: 1878588 - RNA, 19 nt, Artificial Sequence
  Description of Artificial Sequence: Synthetic oligonucleotide
ucuaugcgcuuguggaggg

SEQ ID NO: 1878589 - RNA, 19 nt, Artificial Sequence
  Description of Artificial Sequence: Synthetic oligonucleotide
ggcagaucaagcuuccuag

SEQ ID NO: 1878590 - RNA, 19 nt, Artificial Sequence
  Description of Artificial Sequence: Synthetic oligonucleotide
guuccaaaaucggagacac

SEQ ID NO: 1878591 - RNA, 19 nt, Artificial Sequence
  Description of Artificial Sequence: Synthetic oligonucleotide
auguugggacgguaguugg

SEQ ID NO: 1878592 - RNA, 19 nt, Artificial Sequence
  Description of Artificial Sequence: Synthetic oligonucleotide
gagggauugaagaugaucu

SEQ ID NO: 1878593 - RNA, 19 nt, Artificial Sequence
  Description of Artificial Sequence: Synthetic oligonucleotide
aaccguaaaaguagccaag

SEQ ID NO: 1878594 - RNA, 19 nt, Artificial Sequence
  Description of Artificial Sequence: Synthetic oligonucleotide
cauguaguaaguugacuca

SEQ ID NO: 1878595 - RNA, 19 nt, Artificial Sequence
  Description of Artificial Sequence: Synthetic oligonucleotide
cagcaaauuccguccaagg

SEQ ID NO: 1878596 - RNA, 19 nt, Artificial Sequence
  Description of Artificial Sequence: Synthetic oligonucleotide
acaauagacucuaugcgcu

SEQ ID NO: 1878597 - RNA, 19 nt, Artificial Sequence
  Description of Artificial Sequence: Synthetic oligonucleotide
uuccaugccuccuggaaac

SEQ ID NO: 1878598 - RNA, 19 nt, Artificial Sequence
  Description of Artificial Sequence: Synthetic oligonucleotide
cauugauacuguacaugag

SEQ ID NO: 1878599 - RNA, 19 nt, Artificial Sequence
  Description of Artificial Sequence: Synthetic oligonucleotide
ucguuccaaaaucggagac

SEQ ID NO: 1878600 - RNA, 19 nt, Artificial Sequence
  Description of Artificial Sequence: Synthetic oligonucleotide
cauuaaucugcuggcagag

SEQ ID NO: 1878601 - RNA, 19 nt, Artificial Sequence
  Description of Artificial Sequence: Synthetic oligonucleotide
cucaucgggcggcagaugc

SEQ ID NO: 1878602 - RNA, 19 nt, Artificial Sequence
  Description of Artificial Sequence: Synthetic oligonucleotide
cucgaaccguaaaaguagc

SEQ ID NO: 1878603 - RNA, 19 nt, Artificial Sequence
  Description of Artificial Sequence: Synthetic oligonucleotide
ucgcccaacucaucgggcg

SEQ ID NO: 1878604 - RNA, 19 nt, Artificial Sequence
  Description of Artificial Sequence: Synthetic oligonucleotide
acgguaguuggguuuaacu

SEQ ID NO: 1878605 - RNA, 19 nt, Artificial Sequence
  Description of Artificial Sequence: Synthetic oligonucleotide
ucgaaccguaaaaguagcc

SEQ ID NO: 1878606 - RNA, 19 nt, Artificial Sequence
  Description of Artificial Sequence: Synthetic oligonucleotide
augaccaguccugaauugg

SEQ ID NO: 1878607 - RNA, 19 nt, Artificial Sequence
  Description of Artificial Sequence: Synthetic oligonucleotide
cagcaacccgucuugauug

SEQ ID NO: 1878608 - RNA, 19 nt, Artificial Sequence
  Description of Artificial Sequence: Synthetic oligonucleotide
acucuaugcgcuuguggag

SEQ ID NO: 1878609 - RNA, 19 nt, Artificial Sequence
  Description of Artificial Sequence: Synthetic oligonucleotide
accauguugugccucuuug

SEQ ID NO: 1878610 - RNA, 19 nt, Artificial Sequence
  Description of Artificial Sequence: Synthetic oligonucleotide
ucuguucugcacgagcccc

SEQ ID NO: 1878611 - RNA, 19 nt, Artificial Sequence
  Description of Artificial Sequence: Synthetic oligonucleotide
uauugacuccacacauggc

SEQ ID NO: 1878612 - RNA, 19 nt, Artificial Sequence
  Description of Artificial Sequence: Synthetic oligonucleotide
uggucguuagcccauccuc

SEQ ID NO: 1878613 - RNA, 19 nt, Artificial Sequence
  Description of Artificial Sequence: Synthetic oligonucleotide
acgguuaauagcacaagug

SEQ ID NO: 1878614 - RNA, 19 nt, Artificial Sequence
  Description of Artificial Sequence: Synthetic oligonucleotide
cucuaugcgcuuguggagg

SEQ ID NO: 1878615 - RNA, 19 nt, Artificial Sequence
  Description of Artificial Sequence: Synthetic oligonucleotide
uucuguucugcacgagccc

SEQ ID NO: 1878616 - RNA, 19 nt, Artificial Sequence
  Description of Artificial Sequence: Synthetic oligonucleotide
cugcuucgaacgcauagcc

SEQ ID NO: 1878617 - RNA, 19 nt, Artificial Sequence
  Description of Artificial Sequence: Synthetic oligonucleotide
agcuuccuagucugcuugc

SEQ ID NO: 1878618 - RNA, 19 nt, Artificial Sequence
  Description of Artificial Sequence: Synthetic oligonucleotide
ugcuucgaacgcauagccc

SEQ ID NO: 1878619 - RNA, 19 nt, Artificial Sequence
  Description of Artificial Sequence: Synthetic oligonucleotide
cugcaauccugccaaacug

SEQ ID NO: 1878620 - RNA, 19 nt, Artificial Sequence
  Description of Artificial Sequence: Synthetic oligonucleotide
ugggguaguguuccugacc

SEQ ID NO: 1878621 - RNA, 19 nt, Artificial Sequence
  Description of Artificial Sequence: Synthetic oligonucleotide
uagcacaagugaagcagug

SEQ ID NO: 1878622 - RNA, 19 nt, Artificial Sequence
  Description of Artificial Sequence: Synthetic oligonucleotide
gagguugagguugagcuca

SEQ ID NO: 1878623 - RNA, 19 nt, Artificial Sequence
  Description of Artificial Sequence: Synthetic oligonucleotide
ucgaaguuucucucugcug

SEQ ID NO: 1878624 - RNA, 19 nt, Artificial Sequence
  Description of Artificial Sequence: Synthetic oligonucleotide
agcaacccgucuugauugc

SEQ ID NO: 1878625 - RNA, 19 nt, Artificial Sequence
  Description of Artificial Sequence: Synthetic oligonucleotide
guacaugagccaguugagg

SEQ ID NO: 1878626 - RNA, 19 nt, Artificial Sequence
  Description of Artificial Sequence: Synthetic oligonucleotide
ggguuuaacugcuucagca

SEQ ID NO: 1878627 - RNA, 19 nt, Artificial Sequence
  Description of Artificial Sequence: Synthetic oligonucleotide
acagaaccuggucguuagc

SEQ ID NO: 1878628 - RNA, 19 nt, Artificial Sequence
  Description of Artificial Sequence: Synthetic oligonucleotide
ugaagcagugauuggcaau

SEQ ID NO: 1878629 - RNA, 19 nt, Artificial Sequence
  Description of Artificial Sequence: Synthetic oligonucleotide
auugcgugagagaccaggg

SEQ ID NO: 1878630 - RNA, 19 nt, Artificial Sequence
  Description of Artificial Sequence: Synthetic oligonucleotide
gacccacacgguuaauagc

SEQ ID NO: 1878631 - RNA, 19 nt, Artificial Sequence
  Description of Artificial Sequence: Synthetic oligonucleotide
uagcucgaaccguaaaagu

SEQ ID NO: 1878632 - RNA, 19 nt, Artificial Sequence
  Description of Artificial Sequence: Synthetic oligonucleotide
uccguagcaaauguucacu

SEQ ID NO: 1878633 - RNA, 19 nt, Artificial Sequence
  Description of Artificial Sequence: Synthetic oligonucleotide
gaaccuggucguuagccca

SEQ ID NO: 1878634 - RNA, 19 nt, Artificial Sequence
  Description of Artificial Sequence: Synthetic oligonucleotide
agcgguauucuguucugca

SEQ ID NO: 1878635 - RNA, 19 nt, Artificial Sequence
  Description of Artificial Sequence: Synthetic oligonucleotide
ugagagaccagggguccgg

SEQ ID NO: 1878636 - RNA, 19 nt, Artificial Sequence
  Description of Artificial Sequence: Synthetic oligonucleotide
caccucgcccaacucaucg

SEQ ID NO: 1878637 - RNA, 19 nt, Artificial Sequence
  Description of Artificial Sequence: Synthetic oligonucleotide
ucaagcuuccuagucugcu

SEQ ID NO: 1878638 - RNA, 19 nt, Artificial Sequence
  Description of Artificial Sequence: Synthetic oligonucleotide
cagaucaagcuuccuaguc

SEQ ID NO: 1878639 - RNA, 19 nt, Artificial Sequence
  Description of Artificial Sequence: Synthetic oligonucleotide
aaguuucucucugcugcag

SEQ ID NO: 1878640 - RNA, 19 nt, Artificial Sequence
  Description of Artificial Sequence: Synthetic oligonucleotide
ugaugugcuuucuuuccau

SEQ ID NO: 1878641 - RNA, 19 nt, Artificial Sequence
  Description of Artificial Sequence: Synthetic oligonucleotide
gcuccauugauacuguaca

SEQ ID NO: 1878642 - RNA, 19 nt, Artificial Sequence
  Description of Artificial Sequence: Synthetic oligonucleotide
ucguuagcccauccucugc

SEQ ID NO: 1878643 - RNA, 19 nt, Artificial Sequence
  Description of Artificial Sequence: Synthetic oligonucleotide
uucugggcagaucaagcuu

SEQ ID NO: 1878644 - RNA, 19 nt, Artificial Sequence
  Description of Artificial Sequence: Synthetic oligonucleotide
aucucgaucucguuccaaa

SEQ ID NO: 1878645 - RNA, 19 nt, Artificial Sequence
  Description of Artificial Sequence: Synthetic oligonucleotide
gaauucgcuucaccucgcc

SEQ ID NO: 1878646 - RNA, 19 nt, Artificial Sequence
  Description of Artificial Sequence: Synthetic oligonucleotide
gcucgaaccguaaaaguag

SEQ ID NO: 1878647 - RNA, 19 nt, Artificial Sequence
  Description of Artificial Sequence: Synthetic oligonucleotide
cauagcucgaaccguaaaa

SEQ ID NO: 1878648 - RNA, 19 nt, Artificial Sequence
  Description of Artificial Sequence: Synthetic oligonucleotide
cugcgucuggaacacgggg

SEQ ID NO: 1878649 - RNA, 19 nt, Artificial Sequence
  Description of Artificial Sequence: Synthetic oligonucleotide
agggcauauuccaugccuc

SEQ ID NO: 1878650 - RNA, 19 nt, Artificial Sequence
  Description of Artificial Sequence: Synthetic oligonucleotide
cuccauguaguaaguugac

SEQ ID NO: 1878651 - RNA, 19 nt, Artificial Sequence
  Description of Artificial Sequence: Synthetic oligonucleotide
agaauucgcuucaccucgc

SEQ ID NO: 1878652 - RNA, 19 nt, Artificial Sequence
  Description of Artificial Sequence: Synthetic oligonucleotide
agcccuucaauucgaaguu

SEQ ID NO: 1878653 - RNA, 19 nt, Artificial Sequence
  Description of Artificial Sequence: Synthetic oligonucleotide
ugaguucgccaaugguggc

SEQ ID NO: 1878654 - RNA, 19 nt, Artificial Sequence
  Description of Artificial Sequence: Synthetic oligonucleotide
uggccacagggacucacug

SEQ ID NO: 1878655 - RNA, 19 nt, Artificial Sequence
  Description of Artificial Sequence: Synthetic oligonucleotide
uuccaaaaucggagacacc

SEQ ID NO: 1878656 - RNA, 19 nt, Artificial Sequence
  Description of Artificial Sequence: Synthetic oligonucleotide
cuucgauuggccacaggga

SEQ ID NO: 1878657 - RNA, 19 nt, Artificial Sequence
  Description of Artificial Sequence: Synthetic oligonucleotide
uuccuggcuucgauuggcc

SEQ ID NO: 1878658 - RNA, 19 nt, Artificial Sequence
  Description of Artificial Sequence: Synthetic oligonucleotide
uuccugacccacacgguua

SEQ ID NO: 1878659 - RNA, 19 nt, Artificial Sequence
  Description of Artificial Sequence: Synthetic oligonucleotide
aaguucccgggcauacauc

SEQ ID NO: 1878660 - RNA, 19 nt, Artificial Sequence
  Description of Artificial Sequence: Synthetic oligonucleotide
gucguuagcccauccucug

SEQ ID NO: 1878661 - RNA, 19 nt, Artificial Sequence
  Description of Artificial Sequence: Synthetic oligonucleotide
aauuccguccaaggcaguu

SEQ ID NO: 1878662 - RNA, 19 nt, Artificial Sequence
  Description of Artificial Sequence: Synthetic oligonucleotide
ucgccaaugguggcugagg

SEQ ID NO: 1878663 - RNA, 19 nt, Artificial Sequence
  Description of Artificial Sequence: Synthetic oligonucleotide
accucgcccaacucaucgg

SEQ ID NO: 1878664 - RNA, 19 nt, Artificial Sequence
  Description of Artificial Sequence: Synthetic oligonucleotide
cucguuccaaaaucggaga

SEQ ID NO: 1878665 - RNA, 19 nt, Artificial Sequence
  Description of Artificial Sequence: Synthetic oligonucleotide
ugccguccguagcaaaugu

SEQ ID NO: 1878666 - RNA, 19 nt, Artificial Sequence
  Description of Artificial Sequence: Synthetic oligonucleotide
guccguagcaaauguucac

SEQ ID NO: 1878667 - RNA, 19 nt, Artificial Sequence
  Description of Artificial Sequence: Synthetic oligonucleotide
aacucaucgggcggcagau

SEQ ID NO: 1878668 - RNA, 19 nt, Artificial Sequence
  Description of Artificial Sequence: Synthetic oligonucleotide
uuccguccaaggcaguuuu

SEQ ID NO: 1878669 - RNA, 19 nt, Artificial Sequence
  Description of Artificial Sequence: Synthetic oligonucleotide
ggcugcuucgaacgcauag

SEQ ID NO: 1878670 - RNA, 19 nt, Artificial Sequence
  Description of Artificial Sequence: Synthetic oligonucleotide
gguuaauagcacaagugaa

SEQ ID NO: 1878671 - RNA, 19 nt, Artificial Sequence
  Description of Artificial Sequence: Synthetic oligonucleotide
cgaucucguuccaaaaucg

SEQ ID NO: 1878672 - RNA, 19 nt, Artificial Sequence
  Description of Artificial Sequence: Synthetic oligonucleotide
ucgaacgcauagcccuuca

SEQ ID NO: 1878673 - RNA, 19 nt, Artificial Sequence
  Description of Artificial Sequence: Synthetic oligonucleotide
agcucgaaccguaaaagua

SEQ ID NO: 1878674 - RNA, 19 nt, Artificial Sequence
  Description of Artificial Sequence: Synthetic oligonucleotide
ucuccgcugcuccuuggcu

SEQ ID NO: 1878675 - RNA, 19 nt, Artificial Sequence
  Description of Artificial Sequence: Synthetic oligonucleotide
cugccgacucagcaaauuc

SEQ ID NO: 1878676 - RNA, 19 nt, Artificial Sequence
  Description of Artificial Sequence: Synthetic oligonucleotide
uucgcuucaccucgcccaa

SEQ ID NO: 1878677 - RNA, 19 nt, Artificial Sequence
  Description of Artificial Sequence: Synthetic oligonucleotide
gaacgcauagcccuucaau

SEQ ID NO: 1878678 - RNA, 19 nt, Artificial Sequence
  Description of Artificial Sequence: Synthetic oligonucleotide
ugccaaacugcgucuggaa

SEQ ID NO: 1878679 - RNA, 19 nt, Artificial Sequence
  Description of Artificial Sequence: Synthetic oligonucleotide
gccgacucagcaaauuccg

SEQ ID NO: 1878680 - RNA, 19 nt, Artificial Sequence
  Description of Artificial Sequence: Synthetic oligonucleotide
ucaucgggcggcagaugcu

SEQ ID NO: 1878681 - RNA, 19 nt, Artificial Sequence
  Description of Artificial Sequence: Synthetic oligonucleotide
agcacaagugaagcaguga

SEQ ID NO: 1878682 - RNA, 19 nt, Artificial Sequence
  Description of Artificial Sequence: Synthetic oligonucleotide
uugggguaguguuccugac

SEQ ID NO: 1878683 - RNA, 19 nt, Artificial Sequence
  Description of Artificial Sequence: Synthetic oligonucleotide
gcuucgaacgcauagcccu

SEQ ID NO: 1878684 - RNA, 19 nt, Artificial Sequence
  Description of Artificial Sequence: Synthetic oligonucleotide
caucuccagaagugaacuc

SEQ ID NO: 1878685 - RNA, 19 nt, Artificial Sequence
  Description of Artificial Sequence: Synthetic oligonucleotide
aaacugcgucuggaacacg

SEQ ID NO: 1878686 - RNA, 19 nt, Artificial Sequence
  Description of Artificial Sequence: Synthetic oligonucleotide
gucuugauugcgugagaga

SEQ ID NO: 1878687 - RNA, 19 nt, Artificial Sequence
  Description of Artificial Sequence: Synthetic oligonucleotide
ccuccauguaguaaguuga

SEQ ID NO: 1878688 - RNA, 19 nt, Artificial Sequence
  Description of Artificial Sequence: Synthetic oligonucleotide
acugcgucuggaacacggg

SEQ ID NO: 1878689 - RNA, 19 nt, Artificial Sequence
  Description of Artificial Sequence: Synthetic oligonucleotide
gggcauauuccaugccucc

SEQ ID NO: 1878690 - RNA, 19 nt, Artificial Sequence
  Description of Artificial Sequence: Synthetic oligonucleotide
ccaccucaacaauagacuc

SEQ ID NO: 1878691 - RNA, 19 nt, Artificial Sequence
  Description of Artificial Sequence: Synthetic oligonucleotide
cgcauagcccuucaauucg

SEQ ID NO: 1878692 - RNA, 19 nt, Artificial Sequence
  Description of Artificial Sequence: Synthetic oligonucleotide
uagacucuaugcgcuugug

SEQ ID NO: 1878693 - RNA, 19 nt, Artificial Sequence
  Description of Artificial Sequence: Synthetic oligonucleotide
agagaccuguucugccaca

SEQ ID NO: 1878694 - RNA, 19 nt, Artificial Sequence
  Description of Artificial Sequence: Synthetic oligonucleotide
ccauguugugccucuuugc

SEQ ID NO: 1878695 - RNA, 19 nt, Artificial Sequence
  Description of Artificial Sequence: Synthetic oligonucleotide
ugacagaaccuggucguua

SEQ ID NO: 1878696 - RNA, 19 nt, Artificial Sequence
  Description of Artificial Sequence: Synthetic oligonucleotide
gcuugccauagagaauucg

SEQ ID NO: 1878697 - RNA, 19 nt, Artificial Sequence
  Description of Artificial Sequence: Synthetic oligonucleotide
cacucaggucccgccaugg

SEQ ID NO: 1878698 - RNA, 19 nt, Artificial Sequence
  Description of Artificial Sequence: Synthetic oligonucleotide
cguagcaaauguucacugc

SEQ ID NO: 1878699 - RNA, 19 nt, Artificial Sequence
  Description of Artificial Sequence: Synthetic oligonucleotide
ucggagacaccaccaccau

SEQ ID NO: 1878700 - RNA, 19 nt, Artificial Sequence
  Description of Artificial Sequence: Synthetic oligonucleotide
acgagccccacacgcacga

SEQ ID NO: 1878701 - RNA, 19 nt, Artificial Sequence
  Description of Artificial Sequence: Synthetic oligonucleotide
gacgugggcagcgguauuc

SEQ ID NO: 1878702 - RNA, 19 nt, Artificial Sequence
  Description of Artificial Sequence: Synthetic oligonucleotide
cacgagccccacacgcacg

SEQ ID NO: 1878703 - RNA, 19 nt, Artificial Sequence
  Description of Artificial Sequence: Synthetic oligonucleotide
ugauugcgugagagaccag

SEQ ID NO: 1878704 - RNA, 19 nt, Artificial Sequence
  Description of Artificial Sequence: Synthetic oligonucleotide
gguggugccguccguagca

SEQ ID NO: 1878705 - RNA, 19 nt, Artificial Sequence
  Description of Artificial Sequence: Synthetic oligonucleotide
guaguuggguuuaacugcu

SEQ ID NO: 1878706 - RNA, 19 nt, Artificial Sequence
  Description of Artificial Sequence: Synthetic oligonucleotide
ccguccguagcaaauguuc

SEQ ID NO: 1878707 - RNA, 19 nt, Artificial Sequence
  Description of Artificial Sequence: Synthetic oligonucleotide
caauucgaaguuucucucu

SEQ ID NO: 1878708 - RNA, 19 nt, Artificial Sequence
  Description of Artificial Sequence: Synthetic oligonucleotide
cacugcaauccugccaaac

SEQ ID NO: 1878709 - RNA, 19 nt, Artificial Sequence
  Description of Artificial Sequence: Synthetic oligonucleotide
cacgguuaauagcacaagu

SEQ ID NO: 1878710 - RNA, 19 nt, Artificial Sequence
  Description of Artificial Sequence: Synthetic oligonucleotide
gcugcuucgaacgcauagc

SEQ ID NO: 1878711 - RNA, 19 nt, Artificial Sequence
  Description of Artificial Sequence: Synthetic oligonucleotide
ugcguuccuggcuucgauu

SEQ ID NO: 1878712 - RNA, 19 nt, Artificial Sequence
  Description of Artificial Sequence: Synthetic oligonucleotide
ccaaaaucggagacaccac

SEQ ID NO: 1878713 - RNA, 19 nt, Artificial Sequence
  Description of Artificial Sequence: Synthetic oligonucleotide
gaacucauugggguagugu

SEQ ID NO: 1878714 - RNA, 19 nt, Artificial Sequence
  Description of Artificial Sequence: Synthetic oligonucleotide
cgguuaauagcacaaguga

SEQ ID NO: 1878715 - RNA, 19 nt, Artificial Sequence
  Description of Artificial Sequence: Synthetic oligonucleotide
caucuccgcugcuccuugg

SEQ ID NO: 1878716 - RNA, 19 nt, Artificial Sequence
  Description of Artificial Sequence: Synthetic oligonucleotide
caucgggcggcagaugcug

SEQ ID NO: 1878717 - RNA, 19 nt, Artificial Sequence
  Description of Artificial Sequence: Synthetic oligonucleotide
gacgguaguuggguuuaac

SEQ ID NO: 1878718 - RNA, 19 nt, Artificial Sequence
  Description of Artificial Sequence: Synthetic oligonucleotide
agucugcuugccauagaga

SEQ ID NO: 1878719 - RNA, 19 nt, Artificial Sequence
  Description of Artificial Sequence: Synthetic oligonucleotide
ccuggcuucgauuggccac

SEQ ID NO: 1878720 - RNA, 19 nt, Artificial Sequence
  Description of Artificial Sequence: Synthetic oligonucleotide
uguucugcacgagccccac

SEQ ID NO: 1878721 - RNA, 19 nt, Artificial Sequence
  Description of Artificial Sequence: Synthetic oligonucleotide
ccguagcaaauguucacug

SEQ ID NO: 1878722 - RNA, 19 nt, Artificial Sequence
  Description of Artificial Sequence: Synthetic oligonucleotide
ggacucacugaguucgcca

SEQ ID NO: 1878723 - RNA, 19 nt, Artificial Sequence
  Description of Artificial Sequence: Synthetic oligonucleotide
gugagagaccagggguccg

SEQ ID NO: 1878724 - RNA, 19 nt, Artificial Sequence
  Description of Artificial Sequence: Synthetic oligonucleotide
uucgaacgcauagcccuuc

SEQ ID NO: 1878725 - RNA, 19 nt, Artificial Sequence
  Description of Artificial Sequence: Synthetic oligonucleotide
acccgucuugauugcguga

SEQ ID NO: 1878726 - RNA, 19 nt, Artificial Sequence
  Description of Artificial Sequence: Synthetic oligonucleotide
cccacacgcacgaucuggg

SEQ ID NO: 1878727 - RNA, 19 nt, Artificial Sequence
  Description of Artificial Sequence: Synthetic oligonucleotide
cgugaucucgaucucguuc

SEQ ID NO: 1878728 - RNA, 19 nt, Artificial Sequence
  Description of Artificial Sequence: Synthetic oligonucleotide
gcgguauucuguucugcac

SEQ ID NO: 1878729 - RNA, 19 nt, Artificial Sequence
  Description of Artificial Sequence: Synthetic oligonucleotide
aaauuccguccaaggcagu

SEQ ID NO: 1878730 - RNA, 19 nt, Artificial Sequence
  Description of Artificial Sequence: Synthetic oligonucleotide
gaacacgggguggcccagg

SEQ ID NO: 1878731 - RNA, 19 nt, Artificial Sequence
  Description of Artificial Sequence: Synthetic oligonucleotide
caccucaacaauagacucu

SEQ ID NO: 1878732 - RNA, 19 nt, Artificial Sequence
  Description of Artificial Sequence: Synthetic oligonucleotide
agcuaggggcuggaagcag

SEQ ID NO: 1878733 - RNA, 19 nt, Artificial Sequence
  Description of Artificial Sequence: Synthetic oligonucleotide
caacucaucgggcggcaga

SEQ ID NO: 1878734 - RNA, 19 nt, Artificial Sequence
  Description of Artificial Sequence: Synthetic oligonucleotide
ccuagucugcuugccauag

SEQ ID NO: 1878735 - RNA, 19 nt, Artificial Sequence
  Description of Artificial Sequence: Synthetic oligonucleotide
guugggacgguaguugggu

SEQ ID NO: 1878736 - RNA, 19 nt, Artificial Sequence
  Description of Artificial Sequence: Synthetic oligonucleotide
gagcuaggggcuggaagca

SEQ ID NO: 1878737 - RNA, 19 nt, Artificial Sequence
  Description of Artificial Sequence: Synthetic oligonucleotide
gcacaagugaagcagugau

SEQ ID NO: 1878738 - RNA, 19 nt, Artificial Sequence
  Description of Artificial Sequence: Synthetic oligonucleotide
aaccuggucguuagcccau

SEQ ID NO: 1878739 - RNA, 19 nt, Artificial Sequence
  Description of Artificial Sequence: Synthetic oligonucleotide
ccgccacauagcucgaacc

SEQ ID NO: 1878740 - RNA, 19 nt, Artificial Sequence
  Description of Artificial Sequence: Synthetic oligonucleotide
auuccguccaaggcaguuu

SEQ ID NO: 1878741 - RNA, 19 nt, Artificial Sequence
  Description of Artificial Sequence: Synthetic oligonucleotide
cgacucagcaaauuccguc

SEQ ID NO: 1878742 - RNA, 19 nt, Artificial Sequence
  Description of Artificial Sequence: Synthetic oligonucleotide
acaucucaagucggccugu

SEQ ID NO: 1878743 - RNA, 19 nt, Artificial Sequence
  Description of Artificial Sequence: Synthetic oligonucleotide
cacauagcucgaaccguaa

SEQ ID NO: 1878744 - RNA, 19 nt, Artificial Sequence
  Description of Artificial Sequence: Synthetic oligonucleotide
ggcagcgguauucuguucu

SEQ ID NO: 1878745 - RNA, 19 nt, Artificial Sequence
  Description of Artificial Sequence: Synthetic oligonucleotide
cuggcuucgauuggccaca

SEQ ID NO: 1878746 - RNA, 19 nt, Artificial Sequence
  Description of Artificial Sequence: Synthetic oligonucleotide
guuccugacccacacgguu

SEQ ID NO: 1878747 - RNA, 19 nt, Artificial Sequence
  Description of Artificial Sequence: Synthetic oligonucleotide
cuaugcgcuuguggagggc

SEQ ID NO: 1878748 - RNA, 19 nt, Artificial Sequence
  Description of Artificial Sequence: Synthetic oligonucleotide
gcagcgguauucuguucug

SEQ ID NO: 1878749 - RNA, 19 nt, Artificial Sequence
  Description of Artificial Sequence: Synthetic oligonucleotide
cccgucuugauugcgugag

SEQ ID NO: 1878750 - RNA, 19 nt, Artificial Sequence
  Description of Artificial Sequence: Synthetic oligonucleotide
cgucuugauugcgugagag

SEQ ID NO: 1878751 - RNA, 19 nt, Artificial Sequence
  Description of Artificial Sequence: Synthetic oligonucleotide
aggagccgccacauagcuc

SEQ ID NO: 1878752 - RNA, 19 nt, Artificial Sequence
  Description of Artificial Sequence: Synthetic oligonucleotide
cucgaucucguuccaaaau

SEQ ID NO: 1878753 - RNA, 19 nt, Artificial Sequence
  Description of Artificial Sequence: Synthetic oligonucleotide
ccugccaaacugcgucugg

SEQ ID NO: 1878754 - RNA, 19 nt, Artificial Sequence
  Description of Artificial Sequence: Synthetic oligonucleotide
gggguggugccguccguag

SEQ ID NO: 1878755 - RNA, 19 nt, Artificial Sequence
  Description of Artificial Sequence: Synthetic oligonucleotide
cauugaagucacccacucu

SEQ ID NO: 1878756 - RNA, 19 nt, Artificial Sequence
  Description of Artificial Sequence: Synthetic oligonucleotide
cgccaaugguggcugaggg

SEQ ID NO: 1878757 - RNA, 19 nt, Artificial Sequence
  Description of Artificial Sequence: Synthetic oligonucleotide
uggugccguccguagcaaa

SEQ ID NO: 1878758 - RNA, 19 nt, Artificial Sequence
  Description of Artificial Sequence: Synthetic oligonucleotide
cuagucugcuugccauaga

SEQ ID NO: 1878759 - RNA, 19 nt, Artificial Sequence
  Description of Artificial Sequence: Synthetic oligonucleotide
gcacgagccccacacgcac

SEQ ID NO: 1878760 - RNA, 19 nt, Artificial Sequence
  Description of Artificial Sequence: Synthetic oligonucleotide
cugacccacacgguuaaua

SEQ ID NO: 1878761 - RNA, 19 nt, Artificial Sequence
  Description of Artificial Sequence: Synthetic oligonucleotide
acgugggcagcgguauucu

SEQ ID NO: 1878762 - RNA, 19 nt, Artificial Sequence
  Description of Artificial Sequence: Synthetic oligonucleotide
accuggucguuagcccauc

SEQ ID NO: 1878763 - RNA, 19 nt, Artificial Sequence
  Description of Artificial Sequence: Synthetic oligonucleotide
gggcggcagaugcuguucc

SEQ ID NO: 1878764 - RNA, 19 nt, Artificial Sequence
  Description of Artificial Sequence: Synthetic oligonucleotide
gcuuccuagucugcuugcc

SEQ ID NO: 1878765 - RNA, 19 nt, Artificial Sequence
  Description of Artificial Sequence: Synthetic oligonucleotide
uggcuucgauuggccacag

SEQ ID NO: 1878766 - RNA, 19 nt, Artificial Sequence
  Description of Artificial Sequence: Synthetic oligonucleotide
ccacacgcacgaucugggg

SEQ ID NO: 1878767 - RNA, 19 nt, Artificial Sequence
  Description of Artificial Sequence: Synthetic oligonucleotide
cgaaccguaaaaguagcca

SEQ ID NO: 1878768 - RNA, 19 nt, Artificial Sequence
  Description of Artificial Sequence: Synthetic oligonucleotide
gccgccacauagcucgaac

SEQ ID NO: 1878769 - RNA, 19 nt, Artificial Sequence
  Description of Artificial Sequence: Synthetic oligonucleotide
agucggccugucaucuuga

SEQ ID NO: 1878770 - RNA, 19 nt, Artificial Sequence
  Description of Artificial Sequence: Synthetic oligonucleotide
ucccuccauguaguaaguu

SEQ ID NO: 1878771 - RNA, 19 nt, Artificial Sequence
  Description of Artificial Sequence: Synthetic oligonucleotide
ccccacacgcacgaucugg

SEQ ID NO: 1878772 - RNA, 19 nt, Artificial Sequence
  Description of Artificial Sequence: Synthetic oligonucleotide
cacugaguucgccaauggu

SEQ ID NO: 1878773 - RNA, 19 nt, Artificial Sequence
  Description of Artificial Sequence: Synthetic oligonucleotide
gggacucacugaguucgcc

SEQ ID NO: 1878774 - RNA, 19 nt, Artificial Sequence
  Description of Artificial Sequence: Synthetic oligonucleotide
acucaucgggcggcagaug

SEQ ID NO: 1878775 - RNA, 19 nt, Artificial Sequence
  Description of Artificial Sequence: Synthetic oligonucleotide
ggcuucgauuggccacagg

SEQ ID NO: 1878776 - RNA, 19 nt, Artificial Sequence
  Description of Artificial Sequence: Synthetic oligonucleotide
gcgugagagaccagggguc

SEQ ID NO: 1878777 - RNA, 19 nt, Artificial Sequence
  Description of Artificial Sequence: Synthetic oligonucleotide
ggguggugccguccguagc

SEQ ID NO: 1878778 - RNA, 19 nt, Artificial Sequence
  Description of Artificial Sequence: Synthetic oligonucleotide
cuggucguuagcccauccu

SEQ ID NO: 1878779 - RNA, 19 nt, Artificial Sequence
  Description of Artificial Sequence: Synthetic oligonucleotide
cguccguagcaaauguuca

SEQ ID NO: 1878780 - RNA, 19 nt, Artificial Sequence
  Description of Artificial Sequence: Synthetic oligonucleotide
ccuggucguuagcccaucc

SEQ ID NO: 1878781 - RNA, 19 nt, Artificial Sequence
  Description of Artificial Sequence: Synthetic oligonucleotide
gauuggcaauggcugcguu

SEQ ID NO: 1878782 - RNA, 19 nt, Artificial Sequence
  Description of Artificial Sequence: Synthetic oligonucleotide
cgauuggccacagggacuc

SEQ ID NO: 1878783 - RNA, 19 nt, Artificial Sequence
  Description of Artificial Sequence: Synthetic oligonucleotide
gcagaucaagcuuccuagu

SEQ ID NO: 1878784 - RNA, 19 nt, Artificial Sequence
  Description of Artificial Sequence: Synthetic oligonucleotide
ggucguuagcccauccucu

SEQ ID NO: 1878785 - RNA, 19 nt, Artificial Sequence
  Description of Artificial Sequence: Synthetic oligonucleotide
gccugucaucuugaaaguc

SEQ ID NO: 1878786 - RNA, 19 nt, Artificial Sequence
  Description of Artificial Sequence: Synthetic oligonucleotide
ccccgugaucucgaucucg

SEQ ID NO: 1878787 - RNA, 19 nt, Artificial Sequence
  Description of Artificial Sequence: Synthetic oligonucleotide
ccacauagcucgaaccgua

SEQ ID NO: 1878788 - RNA, 19 nt, Artificial Sequence
  Description of Artificial Sequence: Synthetic oligonucleotide
gcauagcccuucaauucga

SEQ ID NO: 1878789 - RNA, 19 nt, Artificial Sequence
  Description of Artificial Sequence: Synthetic oligonucleotide
gucggccugucaucuugaa

SEQ ID NO: 1878790 - RNA, 19 nt, Artificial Sequence
  Description of Artificial Sequence: Synthetic oligonucleotide
guucccgggcauacaucuc

SEQ ID NO: 1878791 - RNA, 19 nt, Artificial Sequence
  Description of Artificial Sequence: Synthetic oligonucleotide
ccucugccgacucagcaaa

SEQ ID NO: 1878792 - RNA, 19 nt, Artificial Sequence
  Description of Artificial Sequence: Synthetic oligonucleotide
ggccugucaucuugaaagu

SEQ ID NO: 1878793 - RNA, 19 nt, Artificial Sequence
  Description of Artificial Sequence: Synthetic oligonucleotide
gcccaacucaucgggcggc

SEQ ID NO: 1878794 - RNA, 19 nt, Artificial Sequence
  Description of Artificial Sequence: Synthetic oligonucleotide
ggaacacgggguggcccag

SEQ ID NO: 1878795 - RNA, 19 nt, Artificial Sequence
  Description of Artificial Sequence: Synthetic oligonucleotide
ccgggcauacaucucaagu

SEQ ID NO: 1878796 - RNA, 19 nt, Artificial Sequence
  Description of Artificial Sequence: Synthetic oligonucleotide
cguuccaaaaucggagaca

SEQ ID NO: 1878797 - RNA, 19 nt, Artificial Sequence
  Description of Artificial Sequence: Synthetic oligonucleotide
cuucgaacgcauagcccuu

SEQ ID NO: 1878798 - RNA, 19 nt, Artificial Sequence
  Description of Artificial Sequence: Synthetic oligonucleotide
ggcggcagaugcuguucca

SEQ ID NO: 1878799 - RNA, 19 nt, Artificial Sequence
  Description of Artificial Sequence: Synthetic oligonucleotide
ggcauauuccaugccuccu

SEQ ID NO: 1878800 - RNA, 19 nt, Artificial Sequence
  Description of Artificial Sequence: Synthetic oligonucleotide
gggacgguaguuggguuua

SEQ ID NO: 1878801 - RNA, 19 nt, Artificial Sequence
  Description of Artificial Sequence: Synthetic oligonucleotide
ggguggacgugggcagcgg

SEQ ID NO: 1878802 - RNA, 19 nt, Artificial Sequence
  Description of Artificial Sequence: Synthetic oligonucleotide
cgucuggaacacggggugg

SEQ ID NO: 1878803 - RNA, 19 nt, Artificial Sequence
  Description of Artificial Sequence: Synthetic oligonucleotide
ggacugccacucagguccc

SEQ ID NO: 1878804 - RNA, 19 nt, Artificial Sequence
  Description of Artificial Sequence: Synthetic oligonucleotide
ccguaaaaguagccaaggu

SEQ ID NO: 1878805 - RNA, 19 nt, Artificial Sequence
  Description of Artificial Sequence: Synthetic oligonucleotide
ggugccguccguagcaaau

SEQ ID NO: 1878806 - RNA, 19 nt, Artificial Sequence
  Description of Artificial Sequence: Synthetic oligonucleotide
gguggacgugggcagcggu

SEQ ID NO: 1878807 - RNA, 19 nt, Artificial Sequence
  Description of Artificial Sequence: Synthetic oligonucleotide
guggugccguccguagcaa

SEQ ID NO: 1878808 - RNA, 19 nt, Artificial Sequence
  Description of Artificial Sequence: Synthetic oligonucleotide
ccaacucaucgggcggcag

SEQ ID NO: 1878809 - RNA, 19 nt, Artificial Sequence
  Description of Artificial Sequence: Synthetic oligonucleotide
agccgccacauagcucgaa

SEQ ID NO: 1878810 - RNA, 19 nt, Artificial Sequence
  Description of Artificial Sequence: Synthetic oligonucleotide
ccagcaacccgucuugauu

SEQ ID NO: 1878811 - RNA, 19 nt, Artificial Sequence
  Description of Artificial Sequence: Synthetic oligonucleotide
cugagggauugaagaugau

SEQ ID NO: 1878812 - RNA, 19 nt, Artificial Sequence
  Description of Artificial Sequence: Synthetic oligonucleotide
cgugggcagcgguauucug

SEQ ID NO: 1878813 - RNA, 19 nt, Artificial Sequence
  Description of Artificial Sequence: Synthetic oligonucleotide
gccccacacgcacgaucug

SEQ ID NO: 1878814 - RNA, 19 nt, Artificial Sequence
  Description of Artificial Sequence: Synthetic oligonucleotide
cugcguuccuggcuucgau

SEQ ID NO: 1878815 - RNA, 19 nt, Artificial Sequence
  Description of Artificial Sequence: Synthetic oligonucleotide
gcugcguuccuggcuucga

SEQ ID NO: 1878816 - RNA, 19 nt, Artificial Sequence
  Description of Artificial Sequence: Synthetic oligonucleotide
gagccgccacauagcucga

SEQ ID NO: 1878817 - RNA, 19 nt, Artificial Sequence
  Description of Artificial Sequence: Synthetic oligonucleotide
cucugccgacucagcaaau

SEQ ID NO: 1878818 - RNA, 19 nt, Artificial Sequence
  Description of Artificial Sequence: Synthetic oligonucleotide
caagucggccugucaucuu

SEQ ID NO: 1878819 - RNA, 19 nt, Artificial Sequence
  Description of Artificial Sequence: Synthetic oligonucleotide
ccgacucagcaaauuccgu

SEQ ID NO: 1878820 - RNA, 19 nt, Artificial Sequence
  Description of Artificial Sequence: Synthetic oligonucleotide
ccgucuugauugcgugaga

SEQ ID NO: 1878821 - RNA, 19 nt, Artificial Sequence
  Description of Artificial Sequence: Synthetic oligonucleotide
ggacgguaguuggguuuaa

SEQ ID NO: 1878822 - RNA, 19 nt, Artificial Sequence
  Description of Artificial Sequence: Synthetic oligonucleotide
cccaacucaucgggcggca

SEQ ID NO: 1878823 - RNA, 19 nt, Artificial Sequence
  Description of Artificial Sequence: Synthetic oligonucleotide
cgggcggcagaugcuguuc

SEQ ID NO: 1878824 - RNA, 19 nt, Artificial Sequence
  Description of Artificial Sequence: Synthetic oligonucleotide
gccguccguagcaaauguu

SEQ ID NO: 1878825 - RNA, 19 nt, Artificial Sequence
  Description of Artificial Sequence: Synthetic oligonucleotide
ggacgugggcagcgguauu

SEQ ID NO: 1878826 - RNA, 19 nt, Artificial Sequence
  Description of Artificial Sequence: Synthetic oligonucleotide
ccgugaucucgaucucguu

SEQ ID NO: 1878827 - RNA, 19 nt, Artificial Sequence
  Description of Artificial Sequence: Synthetic oligonucleotide
aaacgcuggaauuagaggc

SEQ ID NO: 1878828 - RNA, 19 nt, Artificial Sequence
  Description of Artificial Sequence: Synthetic oligonucleotide
auugccuuauauuugaugg

SEQ ID NO: 1878829 - RNA, 19 nt, Artificial Sequence
  Description of Artificial Sequence: Synthetic oligonucleotide
uugguguagucacagaucg

SEQ ID NO: 1878830 - RNA, 19 nt, Artificial Sequence
  Description of Artificial Sequence: Synthetic oligonucleotide
uguucuaguugucugauca

SEQ ID NO: 1878831 - RNA, 19 nt, Artificial Sequence
  Description of Artificial Sequence: Synthetic oligonucleotide
aaucagucgcuucuguugg

SEQ ID NO: 1878832 - RNA, 19 nt, Artificial Sequence
  Description of Artificial Sequence: Synthetic oligonucleotide
agcaauauauccucacggc

SEQ ID NO: 1878833 - RNA, 19 nt, Artificial Sequence
  Description of Artificial Sequence: Synthetic oligonucleotide
uucaagaacagagagagac

SEQ ID NO: 1878834 - RNA, 19 nt, Artificial Sequence
  Description of Artificial Sequence: Synthetic oligonucleotide
uggaauuagaggcaagugc

SEQ ID NO: 1878835 - RNA, 19 nt, Artificial Sequence
  Description of Artificial Sequence: Synthetic oligonucleotide
uauuugaugggaaucaguc

SEQ ID NO: 1878836 - RNA, 19 nt, Artificial Sequence
  Description of Artificial Sequence: Synthetic oligonucleotide
guaaucgucagaaacaacc

SEQ ID NO: 1878837 - RNA, 19 nt, Artificial Sequence
  Description of Artificial Sequence: Synthetic oligonucleotide
ucucaugucguccaggcug

SEQ ID NO: 1878838 - RNA, 19 nt, Artificial Sequence
  Description of Artificial Sequence: Synthetic oligonucleotide
aaggcaucgaaauuuucug

SEQ ID NO: 1878839 - RNA, 19 nt, Artificial Sequence
  Description of Artificial Sequence: Synthetic oligonucleotide
aacgcuuccacucagccau

SEQ ID NO: 1878840 - RNA, 19 nt, Artificial Sequence
  Description of Artificial Sequence: Synthetic oligonucleotide
caauauauccucacggccc

SEQ ID NO: 1878841 - RNA, 19 nt, Artificial Sequence
  Description of Artificial Sequence: Synthetic oligonucleotide
uuuuagaacgcuuccacuc

SEQ ID NO: 1878842 - RNA, 19 nt, Artificial Sequence
  Description of Artificial Sequence: Synthetic oligonucleotide
uagucuggaagucacauuc

SEQ ID NO: 1878843 - RNA, 19 nt, Artificial Sequence
  Description of Artificial Sequence: Synthetic oligonucleotide
guagguaaucgucagaaac

SEQ ID NO: 1878844 - RNA, 19 nt, Artificial Sequence
  Description of Artificial Sequence: Synthetic oligonucleotide
auuugaugggaaucagucg

SEQ ID NO: 1878845 - RNA, 19 nt, Artificial Sequence
  Description of Artificial Sequence: Synthetic oligonucleotide
aauauauccucacggccca

SEQ ID NO: 1878846 - RNA, 19 nt, Artificial Sequence
  Description of Artificial Sequence: Synthetic oligonucleotide
agaacagagagagacggcg

SEQ ID NO: 1878847 - RNA, 19 nt, Artificial Sequence
  Description of Artificial Sequence: Synthetic oligonucleotide
ugugccuagggcuaccagg

SEQ ID NO: 1878848 - RNA, 19 nt, Artificial Sequence
  Description of Artificial Sequence: Synthetic oligonucleotide
uucauugccuuauauuuga

SEQ ID NO: 1878849 - RNA, 19 nt, Artificial Sequence
  Description of Artificial Sequence: Synthetic oligonucleotide
aacuucagccgauagucug

SEQ ID NO: 1878850 - RNA, 19 nt, Artificial Sequence
  Description of Artificial Sequence: Synthetic oligonucleotide
caagaacagagagagacgg

SEQ ID NO: 1878851 - RNA, 19 nt, Artificial Sequence
  Description of Artificial Sequence: Synthetic oligonucleotide
ugucccaaagcaaacacau

SEQ ID NO: 1878852 - RNA, 19 nt, Artificial Sequence
  Description of Artificial Sequence: Synthetic oligonucleotide
aacuuagucuggaagucac

SEQ ID NO: 1878853 - RNA, 19 nt, Artificial Sequence
  Description of Artificial Sequence: Synthetic oligonucleotide
uaaucgucagaaacaacca

SEQ ID NO: 1878854 - RNA, 19 nt, Artificial Sequence
  Description of Artificial Sequence: Synthetic oligonucleotide
cagagggucgucaagagug

SEQ ID NO: 1878855 - RNA, 19 nt, Artificial Sequence
  Description of Artificial Sequence: Synthetic oligonucleotide
ugucggaucuccaaguacu

SEQ ID NO: 1878856 - RNA, 19 nt, Artificial Sequence
  Description of Artificial Sequence: Synthetic oligonucleotide
aaguacucgaagcccaucu

SEQ ID NO: 1878857 - RNA, 19 nt, Artificial Sequence
  Description of Artificial Sequence: Synthetic oligonucleotide
cagcaauauauccucacgg

SEQ ID NO: 1878858 - RNA, 19 nt, Artificial Sequence
  Description of Artificial Sequence: Synthetic oligonucleotide
ugugagagagagcaugugu

SEQ ID NO: 1878859 - RNA, 19 nt, Artificial Sequence
  Description of Artificial Sequence: Synthetic oligonucleotide
uccaacaaacugccggugg

SEQ ID NO: 1878860 - RNA, 19 nt, Artificial Sequence
  Description of Artificial Sequence: Synthetic oligonucleotide
uagaugucggaucuccaag

SEQ ID NO: 1878861 - RNA, 19 nt, Artificial Sequence
  Description of Artificial Sequence: Synthetic oligonucleotide
ucagccgauagucugucug

SEQ ID NO: 1878862 - RNA, 19 nt, Artificial Sequence
  Description of Artificial Sequence: Synthetic oligonucleotide
caaacgcuggaauuagagg

SEQ ID NO: 1878863 - RNA, 19 nt, Artificial Sequence
  Description of Artificial Sequence: Synthetic oligonucleotide
ucgucagaaacaaccacca

SEQ ID NO: 1878864 - RNA, 19 nt, Artificial Sequence
  Description of Artificial Sequence: Synthetic oligonucleotide
uugccuuauauuugauggg

SEQ ID NO: 1878865 - RNA, 19 nt, Artificial Sequence
  Description of Artificial Sequence: Synthetic oligonucleotide
ucuguuggacaccuggaga

SEQ ID NO: 1878866 - RNA, 19 nt, Artificial Sequence
  Description of Artificial Sequence: Synthetic oligonucleotide
agcuuucaacuccugaguc

SEQ ID NO: 1878867 - RNA, 19 nt, Artificial Sequence
  Description of Artificial Sequence: Synthetic oligonucleotide
uauauuugaugggaaucag

SEQ ID NO: 1878868 - RNA, 19 nt, Artificial Sequence
  Description of Artificial Sequence: Synthetic oligonucleotide
aucgugaugaaccgcagga

SEQ ID NO: 1878869 - RNA, 19 nt, Artificial Sequence
  Description of Artificial Sequence: Synthetic oligonucleotide
gcauccaacaaacugccgg

SEQ ID NO: 1878870 - RNA, 19 nt, Artificial Sequence
  Description of Artificial Sequence: Synthetic oligonucleotide
ucgucaagaguggugaugc

SEQ ID NO: 1878871 - RNA, 19 nt, Artificial Sequence
  Description of Artificial Sequence: Synthetic oligonucleotide
uuagaacgcuuccacucag

SEQ ID NO: 1878872 - RNA, 19 nt, Artificial Sequence
  Description of Artificial Sequence: Synthetic oligonucleotide
ugggacacugcuaucccag

SEQ ID NO: 1878873 - RNA, 19 nt, Artificial Sequence
  Description of Artificial Sequence: Synthetic oligonucleotide
aggcaucgaaauuuucugg

SEQ ID NO: 1878874 - RNA, 19 nt, Artificial Sequence
  Description of Artificial Sequence: Synthetic oligonucleotide
auuuuagaacgcuuccacu

SEQ ID NO: 1878875 - RNA, 19 nt, Artificial Sequence
  Description of Artificial Sequence: Synthetic oligonucleotide
uugggaguugucccaaagc

SEQ ID NO: 1878876 - RNA, 19 nt, Artificial Sequence
  Description of Artificial Sequence: Synthetic oligonucleotide
uguauguaugcagaugccu

SEQ ID NO: 1878877 - RNA, 19 nt, Artificial Sequence
  Description of Artificial Sequence: Synthetic oligonucleotide
aagaacagagagagacggc

SEQ ID NO: 1878878 - RNA, 19 nt, Artificial Sequence
  Description of Artificial Sequence: Synthetic oligonucleotide
cuuaaacuugguguguagc

SEQ ID NO: 1878879 - RNA, 19 nt, Artificial Sequence
  Description of Artificial Sequence: Synthetic oligonucleotide
ugucuguucuaguugucug

SEQ ID NO: 1878880 - RNA, 19 nt, Artificial Sequence
  Description of Artificial Sequence: Synthetic oligonucleotide
augucggaucuccaaguac

SEQ ID NO: 1878881 - RNA, 19 nt, Artificial Sequence
  Description of Artificial Sequence: Synthetic oligonucleotide
acaaacgcuggaauuagag

SEQ ID NO: 1878882 - RNA, 19 nt, Artificial Sequence
  Description of Artificial Sequence: Synthetic oligonucleotide
gacauggcgagccacccug

SEQ ID NO: 1878883 - RNA, 19 nt, Artificial Sequence
  Description of Artificial Sequence: Synthetic oligonucleotide
cacagaucgugaugaaccg

SEQ ID NO: 1878884 - RNA, 19 nt, Artificial Sequence
  Description of Artificial Sequence: Synthetic oligonucleotide
ugccuuauauuugauggga

SEQ ID NO: 1878885 - RNA, 19 nt, Artificial Sequence
  Description of Artificial Sequence: Synthetic oligonucleotide
ugaaccgcaggaugcuagg

SEQ ID NO: 1878886 - RNA, 19 nt, Artificial Sequence
  Description of Artificial Sequence: Synthetic oligonucleotide
gcuagcaucucuaucagcc

SEQ ID NO: 1878887 - RNA, 19 nt, Artificial Sequence
  Description of Artificial Sequence: Synthetic oligonucleotide
uugugggacacugcuaucc

SEQ ID NO: 1878888 - RNA, 19 nt, Artificial Sequence
  Description of Artificial Sequence: Synthetic oligonucleotide
aaacuuagucuggaaguca

SEQ ID NO: 1878889 - RNA, 19 nt, Artificial Sequence
  Description of Artificial Sequence: Synthetic oligonucleotide
ugccgguggggucagggcg

SEQ ID NO: 1878890 - RNA, 19 nt, Artificial Sequence
  Description of Artificial Sequence: Synthetic oligonucleotide
acacggaucccucgcacgg

SEQ ID NO: 1878891 - RNA, 19 nt, Artificial Sequence
  Description of Artificial Sequence: Synthetic oligonucleotide
uguagucacagaucgugau

SEQ ID NO: 1878892 - RNA, 19 nt, Artificial Sequence
  Description of Artificial Sequence: Synthetic oligonucleotide
ucacaaacgcuggaauuag

SEQ ID NO: 1878893 - RNA, 19 nt, Artificial Sequence
  Description of Artificial Sequence: Synthetic oligonucleotide
ugccaggcauccaacaaac

SEQ ID NO: 1878894 - RNA, 19 nt, Artificial Sequence
  Description of Artificial Sequence: Synthetic oligonucleotide
uugagcgcggccaagggua

SEQ ID NO: 1878895 - RNA, 19 nt, Artificial Sequence
  Description of Artificial Sequence: Synthetic oligonucleotide
gacacggaucccucgcacg

SEQ ID NO: 1878896 - RNA, 19 nt, Artificial Sequence
  Description of Artificial Sequence: Synthetic oligonucleotide
gcaauauauccucacggcc

SEQ ID NO: 1878897 - RNA, 19 nt, Artificial Sequence
  Description of Artificial Sequence: Synthetic oligonucleotide
cuaccuggagcaaggacac

SEQ ID NO: 1878898 - RNA, 19 nt, Artificial Sequence
  Description of Artificial Sequence: Synthetic oligonucleotide
uccagcaauauauccucac

SEQ ID NO: 1878899 - RNA, 19 nt, Artificial Sequence
  Description of Artificial Sequence: Synthetic oligonucleotide
aaccgcaggaugcuaggga

SEQ ID NO: 1878900 - RNA, 19 nt, Artificial Sequence
  Description of Artificial Sequence: Synthetic oligonucleotide
agaugucggaucuccaagu

SEQ ID NO: 1878901 - RNA, 19 nt, Artificial Sequence
  Description of Artificial Sequence: Synthetic oligonucleotide
acagaucgugaugaaccgc

SEQ ID NO: 1878902 - RNA, 19 nt, Artificial Sequence
  Description of Artificial Sequence: Synthetic oligonucleotide
gcugagagcaaacuuaguc

SEQ ID NO: 1878903 - RNA, 19 nt, Artificial Sequence
  Description of Artificial Sequence: Synthetic oligonucleotide
agagagagcaugugugccu

SEQ ID NO: 1878904 - RNA, 19 nt, Artificial Sequence
  Description of Artificial Sequence: Synthetic oligonucleotide
cucuguagguaaucgucag

SEQ ID NO: 1878905 - RNA, 19 nt, Artificial Sequence
  Description of Artificial Sequence: Synthetic oligonucleotide
ucuagaugucggaucucca

SEQ ID NO: 1878906 - RNA, 19 nt, Artificial Sequence
  Description of Artificial Sequence: Synthetic oligonucleotide
agggcuaccagggccauuc

SEQ ID NO: 1878907 - RNA, 19 nt, Artificial Sequence
  Description of Artificial Sequence: Synthetic oligonucleotide
caaggguagggaagacucg

SEQ ID NO: 1878908 - RNA, 19 nt, Artificial Sequence
  Description of Artificial Sequence: Synthetic oligonucleotide
acggaucccucgcacgggc

SEQ ID NO: 1878909 - RNA, 19 nt, Artificial Sequence
  Description of Artificial Sequence: Synthetic oligonucleotide
uagucugucuguucuaguu

SEQ ID NO: 1878910 - RNA, 19 nt, Artificial Sequence
  Description of Artificial Sequence: Synthetic oligonucleotide
ugcuaucccagucuuccuc

SEQ ID NO: 1878911 - RNA, 19 nt, Artificial Sequence
  Description of Artificial Sequence: Synthetic oligonucleotide
caaacuuagucuggaaguc

SEQ ID NO: 1878912 - RNA, 19 nt, Artificial Sequence
  Description of Artificial Sequence: Synthetic oligonucleotide
uuccuugcucuguagguaa

SEQ ID NO: 1878913 - RNA, 19 nt, Artificial Sequence
  Description of Artificial Sequence: Synthetic oligonucleotide
aacgcuggaauuagaggca

SEQ ID NO: 1878914 - RNA, 19 nt, Artificial Sequence
  Description of Artificial Sequence: Synthetic oligonucleotide
caaggagagcuuucaacuc

SEQ ID NO: 1878915 - RNA, 19 nt, Artificial Sequence
  Description of Artificial Sequence: Synthetic oligonucleotide
caggaugcuagggaagucc

SEQ ID NO: 1878916 - RNA, 19 nt, Artificial Sequence
  Description of Artificial Sequence: Synthetic oligonucleotide
cuugggaguugucccaaag

SEQ ID NO: 1878917 - RNA, 19 nt, Artificial Sequence
  Description of Artificial Sequence: Synthetic oligonucleotide
agaugccugugugugagag

SEQ ID NO: 1878918 - RNA, 19 nt, Artificial Sequence
  Description of Artificial Sequence: Synthetic oligonucleotide
gugccuagggcuaccaggg

SEQ ID NO: 1878919 - RNA, 19 nt, Artificial Sequence
  Description of Artificial Sequence: Synthetic oligonucleotide
cagaucgugaugaaccgca

SEQ ID NO: 1878920 - RNA, 19 nt, Artificial Sequence
  Description of Artificial Sequence: Synthetic oligonucleotide
gauagucucucaugucguc

SEQ ID NO: 1878921 - RNA, 19 nt, Artificial Sequence
  Description of Artificial Sequence: Synthetic oligonucleotide
ucucuaucagccugccgac

SEQ ID NO: 1878922 - RNA, 19 nt, Artificial Sequence
  Description of Artificial Sequence: Synthetic oligonucleotide
uguagguaaucgucagaaa

SEQ ID NO: 1878923 - RNA, 19 nt, Artificial Sequence
  Description of Artificial Sequence: Synthetic oligonucleotide
cugguguuugucccagagg

SEQ ID NO: 1878924 - RNA, 19 nt, Artificial Sequence
  Description of Artificial Sequence: Synthetic oligonucleotide
cuucaggguagggacaaag

SEQ ID NO: 1878925 - RNA, 19 nt, Artificial Sequence
  Description of Artificial Sequence: Synthetic oligonucleotide
acacauguauguaugcaga

SEQ ID NO: 1878926 - RNA, 19 nt, Artificial Sequence
  Description of Artificial Sequence: Synthetic oligonucleotide
gaagacucggaggagucca

SEQ ID NO: 1878927 - RNA, 19 nt, Artificial Sequence
  Description of Artificial Sequence: Synthetic oligonucleotide
ggacaguagcagaugaagg

SEQ ID NO: 1878928 - RNA, 19 nt, Artificial Sequence
  Description of Artificial Sequence: Synthetic oligonucleotide
cugagagcaaacuuagucu

SEQ ID NO: 1878929 - RNA, 19 nt, Artificial Sequence
  Description of Artificial Sequence: Synthetic oligonucleotide
uccggcgacaccuuuucuc

SEQ ID NO: 1878930 - RNA, 19 nt, Artificial Sequence
  Description of Artificial Sequence: Synthetic oligonucleotide
agagagacggcgccgcacu

SEQ ID NO: 1878931 - RNA, 19 nt, Artificial Sequence
  Description of Artificial Sequence: Synthetic oligonucleotide
auauuugaugggaaucagu

SEQ ID NO: 1878932 - RNA, 19 nt, Artificial Sequence
  Description of Artificial Sequence: Synthetic oligonucleotide
cuuggugcaaggguuggug

SEQ ID NO: 1878933 - RNA, 19 nt, Artificial Sequence
  Description of Artificial Sequence: Synthetic oligonucleotide
gacaaagccuuggcaaggc

SEQ ID NO: 1878934 - RNA, 19 nt, Artificial Sequence
  Description of Artificial Sequence: Synthetic oligonucleotide
agguaaucgucagaaacaa

SEQ ID NO: 1878935 - RNA, 19 nt, Artificial Sequence
  Description of Artificial Sequence: Synthetic oligonucleotide
aguugucccaaagcaaaca

SEQ ID NO: 1878936 - RNA, 19 nt, Artificial Sequence
  Description of Artificial Sequence: Synthetic oligonucleotide
ucacauuccuugcucugua

SEQ ID NO: 1878937 - RNA, 19 nt, Artificial Sequence
  Description of Artificial Sequence: Synthetic oligonucleotide
acaccuuuucucaaugagu

SEQ ID NO: 1878938 - RNA, 19 nt, Artificial Sequence
  Description of Artificial Sequence: Synthetic oligonucleotide
gaauuagaggcaagugcca

SEQ ID NO: 1878939 - RNA, 19 nt, Artificial Sequence
  Description of Artificial Sequence: Synthetic oligonucleotide
acucaaugucacugggaca

SEQ ID NO: 1878940 - RNA, 19 nt, Artificial Sequence
  Description of Artificial Sequence: Synthetic oligonucleotide
uccuuuguuugugggacac

SEQ ID NO: 1878941 - RNA, 19 nt, Artificial Sequence
  Description of Artificial Sequence: Synthetic oligonucleotide
acaucacggucggacacac

SEQ ID NO: 1878942 - RNA, 19 nt, Artificial Sequence
  Description of Artificial Sequence: Synthetic oligonucleotide
cugcccuuaaacuuggugu

SEQ ID NO: 1878943 - RNA, 19 nt, Artificial Sequence
  Description of Artificial Sequence: Synthetic oligonucleotide
ccagcaauauauccucacg

SEQ ID NO: 1878944 - RNA, 19 nt, Artificial Sequence
  Description of Artificial Sequence: Synthetic oligonucleotide
gcggcuagcaucucuauca

SEQ ID NO: 1878945 - RNA, 19 nt, Artificial Sequence
  Description of Artificial Sequence: Synthetic oligonucleotide
auagucugucuguucuagu

SEQ ID NO: 1878946 - RNA, 19 nt, Artificial Sequence
  Description of Artificial Sequence: Synthetic oligonucleotide
guguuugucccagaggguc

SEQ ID NO: 1878947 - RNA, 19 nt, Artificial Sequence
  Description of Artificial Sequence: Synthetic oligonucleotide
uuagucuggaagucacauu

SEQ ID NO: 1878948 - RNA, 19 nt, Artificial Sequence
  Description of Artificial Sequence: Synthetic oligonucleotide
accgcaggaugcuagggaa

SEQ ID NO: 1878949 - RNA, 19 nt, Artificial Sequence
  Description of Artificial Sequence: Synthetic oligonucleotide
gaaccgcaggaugcuaggg

SEQ ID NO: 1878950 - RNA, 19 nt, Artificial Sequence
  Description of Artificial Sequence: Synthetic oligonucleotide
cuguagguaaucgucagaa

SEQ ID NO: 1878951 - RNA, 19 nt, Artificial Sequence
  Description of Artificial Sequence: Synthetic oligonucleotide
cuagaugucggaucuccaa

SEQ ID NO: 1878952 - RNA, 19 nt, Artificial Sequence
  Description of Artificial Sequence: Synthetic oligonucleotide
agggcgcgucucuagaugu

SEQ ID NO: 1878953 - RNA, 19 nt, Artificial Sequence
  Description of Artificial Sequence: Synthetic oligonucleotide
gaacgcuuccacucagcca

SEQ ID NO: 1878954 - RNA, 19 nt, Artificial Sequence
  Description of Artificial Sequence: Synthetic oligonucleotide
gguagggacaaagccuugg

SEQ ID NO: 1878955 - RNA, 19 nt, Artificial Sequence
  Description of Artificial Sequence: Synthetic oligonucleotide
cgcacucgcacguugagcg

SEQ ID NO: 1878956 - RNA, 19 nt, Artificial Sequence
  Description of Artificial Sequence: Synthetic oligonucleotide
gguguguagccaaggagag

SEQ ID NO: 1878957 - RNA, 19 nt, Artificial Sequence
  Description of Artificial Sequence: Synthetic oligonucleotide
cgcgcguucaagaacagag

SEQ ID NO: 1878958 - RNA, 19 nt, Artificial Sequence
  Description of Artificial Sequence: Synthetic oligonucleotide
ucauugccuuauauuugau

SEQ ID NO: 1878959 - RNA, 19 nt, Artificial Sequence
  Description of Artificial Sequence: Synthetic oligonucleotide
gaugucggaucuccaagua

SEQ ID NO: 1878960 - RNA, 19 nt, Artificial Sequence
  Description of Artificial Sequence: Synthetic oligonucleotide
gcaucgaaauuuucuggug

SEQ ID NO: 1878961 - RNA, 19 nt, Artificial Sequence
  Description of Artificial Sequence: Synthetic oligonucleotide
gagacggcgccgcacucgc

SEQ ID NO: 1878962 - RNA, 19 nt, Artificial Sequence
  Description of Artificial Sequence: Synthetic oligonucleotide
ucagucgcuucuguuggac

SEQ ID NO: 1878963 - RNA, 19 nt, Artificial Sequence
  Description of Artificial Sequence: Synthetic oligonucleotide
cacucgcacguugagcgcg

SEQ ID NO: 1878964 - RNA, 19 nt, Artificial Sequence
  Description of Artificial Sequence: Synthetic oligonucleotide
agagggucgucaagagugg

SEQ ID NO: 1878965 - RNA, 19 nt, Artificial Sequence
  Description of Artificial Sequence: Synthetic oligonucleotide
gccaaggagagcuuucaac

SEQ ID NO: 1878966 - RNA, 19 nt, Artificial Sequence
  Description of Artificial Sequence: Synthetic oligonucleotide
caucgaaauuuucuggugu

SEQ ID NO: 1878967 - RNA, 19 nt, Artificial Sequence
  Description of Artificial Sequence: Synthetic oligonucleotide
cacuaccuggagcaaggac

SEQ ID NO: 1878968 - RNA, 19 nt, Artificial Sequence
  Description of Artificial Sequence: Synthetic oligonucleotide
uagcagaugaaggcaucga

SEQ ID NO: 1878969 - RNA, 19 nt, Artificial Sequence
  Description of Artificial Sequence: Synthetic oligonucleotide
gucacagaucgugaugaac

SEQ ID NO: 1878970 - RNA, 19 nt, Artificial Sequence
  Description of Artificial Sequence: Synthetic oligonucleotide
gacggcgccgcacucgcac

SEQ ID NO: 1878971 - RNA, 19 nt, Artificial Sequence
  Description of Artificial Sequence: Synthetic oligonucleotide
gucgucaagaguggugaug

SEQ ID NO: 1878972 - RNA, 19 nt, Artificial Sequence
  Description of Artificial Sequence: Synthetic oligonucleotide
acguugagcgcggccaagg

SEQ ID NO: 1878973 - RNA, 19 nt, Artificial Sequence
  Description of Artificial Sequence: Synthetic oligonucleotide
uaccucacaaacgcuggaa

SEQ ID NO: 1878974 - RNA, 19 nt, Artificial Sequence
  Description of Artificial Sequence: Synthetic oligonucleotide
agggaagacucggaggagu

SEQ ID NO: 1878975 - RNA, 19 nt, Artificial Sequence
  Description of Artificial Sequence: Synthetic oligonucleotide
ggggugauagucucucaug

SEQ ID NO: 1878976 - RNA, 19 nt, Artificial Sequence
  Description of Artificial Sequence: Synthetic oligonucleotide
cucacaaacgcuggaauua

SEQ ID NO: 1878977 - RNA, 19 nt, Artificial Sequence
  Description of Artificial Sequence: Synthetic oligonucleotide
ugguguagucacagaucgu

SEQ ID NO: 1878978 - RNA, 19 nt, Artificial Sequence
  Description of Artificial Sequence: Synthetic oligonucleotide
ucgaaauuuucugguguuu

SEQ ID NO: 1878979 - RNA, 19 nt, Artificial Sequence
  Description of Artificial Sequence: Synthetic oligonucleotide
caaacugccggugggguca

SEQ ID NO: 1878980 - RNA, 19 nt, Artificial Sequence
  Description of Artificial Sequence: Synthetic oligonucleotide
aagacucggaggaguccag

SEQ ID NO: 1878981 - RNA, 19 nt, Artificial Sequence
  Description of Artificial Sequence: Synthetic oligonucleotide
cagggacacggaucccucg

SEQ ID NO: 1878982 - RNA, 19 nt, Artificial Sequence
  Description of Artificial Sequence: Synthetic oligonucleotide
cacacacaacuucagccga

SEQ ID NO: 1878983 - RNA, 19 nt, Artificial Sequence
  Description of Artificial Sequence: Synthetic oligonucleotide
guccagucggccgccaccg

SEQ ID NO: 1878984 - RNA, 19 nt, Artificial Sequence
  Description of Artificial Sequence: Synthetic oligonucleotide
cauccggcgacaccuuuuc

SEQ ID NO: 1878985 - RNA, 19 nt, Artificial Sequence
  Description of Artificial Sequence: Synthetic oligonucleotide
acuucagccgauagucugu

SEQ ID NO: 1878986 - RNA, 19 nt, Artificial Sequence
  Description of Artificial Sequence: Synthetic oligonucleotide
ggugcaaggguugguguag

SEQ ID NO: 1878987 - RNA, 19 nt, Artificial Sequence
  Description of Artificial Sequence: Synthetic oligonucleotide
ggugauagucucucauguc

SEQ ID NO: 1878988 - RNA, 19 nt, Artificial Sequence
  Description of Artificial Sequence: Synthetic oligonucleotide
agccugccgaccgucgcgc

SEQ ID NO: 1878989 - RNA, 19 nt, Artificial Sequence
  Description of Artificial Sequence: Synthetic oligonucleotide
cgcguucaagaacagagag

SEQ ID NO: 1878990 - RNA, 19 nt, Artificial Sequence
  Description of Artificial Sequence: Synthetic oligonucleotide
cagacauggcgagccaccc

SEQ ID NO: 1878991 - RNA, 19 nt, Artificial Sequence
  Description of Artificial Sequence: Synthetic oligonucleotide
ccuuaaacuugguguguag

SEQ ID NO: 1878992 - RNA, 19 nt, Artificial Sequence
  Description of Artificial Sequence: Synthetic oligonucleotide
uugucccagagggucguca

SEQ ID NO: 1878993 - RNA, 19 nt, Artificial Sequence
  Description of Artificial Sequence: Synthetic oligonucleotide
ucagggcgcgucucuagau

SEQ ID NO: 1878994 - RNA, 19 nt, Artificial Sequence
  Description of Artificial Sequence: Synthetic oligonucleotide
cacggucggacacacacaa

SEQ ID NO: 1878995 - RNA, 19 nt, Artificial Sequence
  Description of Artificial Sequence: Synthetic oligonucleotide
ucgcuucuguuggacaccu

SEQ ID NO: 1878996 - RNA, 19 nt, Artificial Sequence
  Description of Artificial Sequence: Synthetic oligonucleotide
aggagagcuuucaacuccu

SEQ ID NO: 1878997 - RNA, 19 nt, Artificial Sequence
  Description of Artificial Sequence: Synthetic oligonucleotide
ggcaucgaaauuuucuggu

SEQ ID NO: 1878998 - RNA, 19 nt, Artificial Sequence
  Description of Artificial Sequence: Synthetic oligonucleotide
aggaugcuagggaaguccu

SEQ ID NO: 1878999 - RNA, 19 nt, Artificial Sequence
  Description of Artificial Sequence: Synthetic oligonucleotide
agacauggcgagccacccu

SEQ ID NO: 1879000 - RNA, 19 nt, Artificial Sequence
  Description of Artificial Sequence: Synthetic oligonucleotide
guccgcgcguucaagaaca

SEQ ID NO: 1879001 - RNA, 19 nt, Artificial Sequence
  Description of Artificial Sequence: Synthetic oligonucleotide
ucgugaugaaccgcaggau

SEQ ID NO: 1879002 - RNA, 19 nt, Artificial Sequence
  Description of Artificial Sequence: Synthetic oligonucleotide
ugcaaggguugguguaguc

SEQ ID NO: 1879003 - RNA, 19 nt, Artificial Sequence
  Description of Artificial Sequence: Synthetic oligonucleotide
uccgcgcguucaagaacag

SEQ ID NO: 1879004 - RNA, 19 nt, Artificial Sequence
  Description of Artificial Sequence: Synthetic oligonucleotide
cucccgcagacauggcgag

SEQ ID NO: 1879005 - RNA, 19 nt, Artificial Sequence
  Description of Artificial Sequence: Synthetic oligonucleotide
uagaggcaagugccacuac

SEQ ID NO: 1879006 - RNA, 19 nt, Artificial Sequence
  Description of Artificial Sequence: Synthetic oligonucleotide
cagggcgcgucucuagaug

SEQ ID NO: 1879007 - RNA, 19 nt, Artificial Sequence
  Description of Artificial Sequence: Synthetic oligonucleotide
ucgcacguugagcgcggcc

SEQ ID NO: 1879008 - RNA, 19 nt, Artificial Sequence
  Description of Artificial Sequence: Synthetic oligonucleotide
ccaaggagagcuuucaacu

SEQ ID NO: 1879009 - RNA, 19 nt, Artificial Sequence
  Description of Artificial Sequence: Synthetic oligonucleotide
gggccucccgcagacaugg

SEQ ID NO: 1879010 - RNA, 19 nt, Artificial Sequence
  Description of Artificial Sequence: Synthetic oligonucleotide
uucagccgauagucugucu

SEQ ID NO: 1879011 - RNA, 19 nt, Artificial Sequence
  Description of Artificial Sequence: Synthetic oligonucleotide
gccucccgcagacauggcg

SEQ ID NO: 1879012 - RNA, 19 nt, Artificial Sequence
  Description of Artificial Sequence: Synthetic oligonucleotide
ggcgcgucucuagaugucg

SEQ ID NO: 1879013 - RNA, 19 nt, Artificial Sequence
  Description of Artificial Sequence: Synthetic oligonucleotide
cucgaugcugggccccagc

SEQ ID NO: 1879014 - RNA, 19 nt, Artificial Sequence
  Description of Artificial Sequence: Synthetic oligonucleotide
cgaccgucgcgccagagcg

SEQ ID NO: 1879015 - RNA, 19 nt, Artificial Sequence
  Description of Artificial Sequence: Synthetic oligonucleotide
caagugccacuaccuggag

SEQ ID NO: 1879016 - RNA, 19 nt, Artificial Sequence
  Description of Artificial Sequence: Synthetic oligonucleotide
gggugauagucucucaugu

SEQ ID NO: 1879017 - RNA, 19 nt, Artificial Sequence
  Description of Artificial Sequence: Synthetic oligonucleotide
gcgacaccuuuucucaaug

SEQ ID NO: 1879018 - RNA, 19 nt, Artificial Sequence
  Description of Artificial Sequence: Synthetic oligonucleotide
gucgcuucuguuggacacc

SEQ ID NO: 1879019 - RNA, 19 nt, Artificial Sequence
  Description of Artificial Sequence: Synthetic oligonucleotide
agggucgucaagaguggug

SEQ ID NO: 1879020 - RNA, 19 nt, Artificial Sequence
  Description of Artificial Sequence: Synthetic oligonucleotide
cuuagucuggaagucacau

SEQ ID NO: 1879021 - RNA, 19 nt, Artificial Sequence
  Description of Artificial Sequence: Synthetic oligonucleotide
agccaaggagagcuuucaa

SEQ ID NO: 1879022 - RNA, 19 nt, Artificial Sequence
  Description of Artificial Sequence: Synthetic oligonucleotide
cacaaacgcuggaauuaga

SEQ ID NO: 1879023 - RNA, 19 nt, Artificial Sequence
  Description of Artificial Sequence: Synthetic oligonucleotide
gugugccuagggcuaccag

SEQ ID NO: 1879024 - RNA, 19 nt, Artificial Sequence
  Description of Artificial Sequence: Synthetic oligonucleotide
cagagcgccccugccaggc

SEQ ID NO: 1879025 - RNA, 19 nt, Artificial Sequence
  Description of Artificial Sequence: Synthetic oligonucleotide
aaacugccgguggggucag

SEQ ID NO: 1879026 - RNA, 19 nt, Artificial Sequence
  Description of Artificial Sequence: Synthetic oligonucleotide
caaggcggguccagaacca

SEQ ID NO: 1879027 - RNA, 19 nt, Artificial Sequence
  Description of Artificial Sequence: Synthetic oligonucleotide
gagagagcaugugugccua

SEQ ID NO: 1879028 - RNA, 19 nt, Artificial Sequence
  Description of Artificial Sequence: Synthetic oligonucleotide
cacaacuucagccgauagu

SEQ ID NO: 1879029 - RNA, 19 nt, Artificial Sequence
  Description of Artificial Sequence: Synthetic oligonucleotide
auauauccucacggcccag

SEQ ID NO: 1879030 - RNA, 19 nt, Artificial Sequence
  Description of Artificial Sequence: Synthetic oligonucleotide
aucccucgcacgggccucc

SEQ ID NO: 1879031 - RNA, 19 nt, Artificial Sequence
  Description of Artificial Sequence: Synthetic oligonucleotide
ggcuagcaucucuaucagc

SEQ ID NO: 1879032 - RNA, 19 nt, Artificial Sequence
  Description of Artificial Sequence: Synthetic oligonucleotide
acaccccauuuuguccagg

SEQ ID NO: 1879033 - RNA, 19 nt, Artificial Sequence
  Description of Artificial Sequence: Synthetic oligonucleotide
ucucuagaugucggaucuc

SEQ ID NO: 1879034 - RNA, 19 nt, Artificial Sequence
  Description of Artificial Sequence: Synthetic oligonucleotide
cacauguauguaugcagau

SEQ ID NO: 1879035 - RNA, 19 nt, Artificial Sequence
  Description of Artificial Sequence: Synthetic oligonucleotide
ggaagacucggaggagucc

SEQ ID NO: 1879036 - RNA, 19 nt, Artificial Sequence
  Description of Artificial Sequence: Synthetic oligonucleotide
cacggaucccucgcacggg

SEQ ID NO: 1879037 - RNA, 19 nt, Artificial Sequence
  Description of Artificial Sequence: Synthetic oligonucleotide
gguaaucgucagaaacaac

SEQ ID NO: 1879038 - RNA, 19 nt, Artificial Sequence
  Description of Artificial Sequence: Synthetic oligonucleotide
acucgcacguugagcgcgg

SEQ ID NO: 1879039 - RNA, 19 nt, Artificial Sequence
  Description of Artificial Sequence: Synthetic oligonucleotide
ccccuugauuuuagaacgc

SEQ ID NO: 1879040 - RNA, 19 nt, Artificial Sequence
  Description of Artificial Sequence: Synthetic oligonucleotide
guugagcgcggccaagggu

SEQ ID NO: 1879041 - RNA, 19 nt, Artificial Sequence
  Description of Artificial Sequence: Synthetic oligonucleotide
cccgcagacauggcgagcc

SEQ ID NO: 1879042 - RNA, 19 nt, Artificial Sequence
  Description of Artificial Sequence: Synthetic oligonucleotide
gccuuggcaaggcgggucc

SEQ ID NO: 1879043 - RNA, 19 nt, Artificial Sequence
  Description of Artificial Sequence: Synthetic oligonucleotide
gaugaaccgcaggaugcua

SEQ ID NO: 1879044 - RNA, 19 nt, Artificial Sequence
  Description of Artificial Sequence: Synthetic oligonucleotide
gcuuucaacuccugagucu

SEQ ID NO: 1879045 - RNA, 19 nt, Artificial Sequence
  Description of Artificial Sequence: Synthetic oligonucleotide
cugccgaccgucgcgccag

SEQ ID NO: 1879046 - RNA, 19 nt, Artificial Sequence
  Description of Artificial Sequence: Synthetic oligonucleotide
acggucggacacacacaac

SEQ ID NO: 1879047 - RNA, 19 nt, Artificial Sequence
  Description of Artificial Sequence: Synthetic oligonucleotide
auccggcgacaccuuuucu

SEQ ID NO: 1879048 - RNA, 19 nt, Artificial Sequence
  Description of Artificial Sequence: Synthetic oligonucleotide
gcggccaaggguagggaag

SEQ ID NO: 1879049 - RNA, 19 nt, Artificial Sequence
  Description of Artificial Sequence: Synthetic oligonucleotide
ggcauccaacaaacugccg

SEQ ID NO: 1879050 - RNA, 19 nt, Artificial Sequence
  Description of Artificial Sequence: Synthetic oligonucleotide
caacuucagccgauagucu

SEQ ID NO: 1879051 - RNA, 19 nt, Artificial Sequence
  Description of Artificial Sequence: Synthetic oligonucleotide
cgucucuagaugucggauc

SEQ ID NO: 1879052 - RNA, 19 nt, Artificial Sequence
  Description of Artificial Sequence: Synthetic oligonucleotide
accauccggcgacaccuuu

SEQ ID NO: 1879053 - RNA, 19 nt, Artificial Sequence
  Description of Artificial Sequence: Synthetic oligonucleotide
gaucccucgcacgggccuc

SEQ ID NO: 1879054 - RNA, 19 nt, Artificial Sequence
  Description of Artificial Sequence: Synthetic oligonucleotide
gccgccaccggcguccgcg

SEQ ID NO: 1879055 - RNA, 19 nt, Artificial Sequence
  Description of Artificial Sequence: Synthetic oligonucleotide
gccgauagucugucuguuc

SEQ ID NO: 1879056 - RNA, 19 nt, Artificial Sequence
  Description of Artificial Sequence: Synthetic oligonucleotide
ggcggguccagaaccagga

SEQ ID NO: 1879057 - RNA, 19 nt, Artificial Sequence
  Description of Artificial Sequence: Synthetic oligonucleotide
ccucgcacgggccucccgc

SEQ ID NO: 1879058 - RNA, 19 nt, Artificial Sequence
  Description of Artificial Sequence: Synthetic oligonucleotide
gggaguugucccaaagcaa

SEQ ID NO: 1879059 - RNA, 19 nt, Artificial Sequence
  Description of Artificial Sequence: Synthetic oligonucleotide
cagccgauagucugucugu

SEQ ID NO: 1879060 - RNA, 19 nt, Artificial Sequence
  Description of Artificial Sequence: Synthetic oligonucleotide
ccggcgacaccuuuucuca

SEQ ID NO: 1879061 - RNA, 19 nt, Artificial Sequence
  Description of Artificial Sequence: Synthetic oligonucleotide
ccucccgcagacauggcga

SEQ ID NO: 1879062 - RNA, 19 nt, Artificial Sequence
  Description of Artificial Sequence: Synthetic oligonucleotide
agccgauagucugucuguu

SEQ ID NO: 1879063 - RNA, 19 nt, Artificial Sequence
  Description of Artificial Sequence: Synthetic oligonucleotide
gagcgcggccaaggguagg

SEQ ID NO: 1879064 - RNA, 19 nt, Artificial Sequence
  Description of Artificial Sequence: Synthetic oligonucleotide
agucggccgccaccggcgu

SEQ ID NO: 1879065 - RNA, 19 nt, Artificial Sequence
  Description of Artificial Sequence: Synthetic oligonucleotide
agcgcggcuagcaucucua

SEQ ID NO: 1879066 - RNA, 19 nt, Artificial Sequence
  Description of Artificial Sequence: Synthetic oligonucleotide
accggcguccgcgcguuca

SEQ ID NO: 1879067 - RNA, 19 nt, Artificial Sequence
  Description of Artificial Sequence: Synthetic oligonucleotide
gcacucgcacguugagcgc

SEQ ID NO: 1879068 - RNA, 19 nt, Artificial Sequence
  Description of Artificial Sequence: Synthetic oligonucleotide
cguugagcgcggccaaggg

SEQ ID NO: 1879069 - RNA, 19 nt, Artificial Sequence
  Description of Artificial Sequence: Synthetic oligonucleotide
agcgccccugccaggcauc

SEQ ID NO: 1879070 - RNA, 19 nt, Artificial Sequence
  Description of Artificial Sequence: Synthetic oligonucleotide
guuugucccagagggucgu

SEQ ID NO: 1879071 - RNA, 19 nt, Artificial Sequence
  Description of Artificial Sequence: Synthetic oligonucleotide
aacugccgguggggucagg

SEQ ID NO: 1879072 - RNA, 19 nt, Artificial Sequence
  Description of Artificial Sequence: Synthetic oligonucleotide
gcgcgucucuagaugucgg

SEQ ID NO: 1879073 - RNA, 19 nt, Artificial Sequence
  Description of Artificial Sequence: Synthetic oligonucleotide
ccgaccgucgcgccagagc

SEQ ID NO: 1879074 - RNA, 19 nt, Artificial Sequence
  Description of Artificial Sequence: Synthetic oligonucleotide
cucgcacgggccucccgca

SEQ ID NO: 1879075 - RNA, 19 nt, Artificial Sequence
  Description of Artificial Sequence: Synthetic oligonucleotide
uggggucagggcgcgucuc

SEQ ID NO: 1879076 - RNA, 19 nt, Artificial Sequence
  Description of Artificial Sequence: Synthetic oligonucleotide
ccagggacacggaucccuc

SEQ ID NO: 1879077 - RNA, 19 nt, Artificial Sequence
  Description of Artificial Sequence: Synthetic oligonucleotide
cucgcacguugagcgcggc

SEQ ID NO: 1879078 - RNA, 19 nt, Artificial Sequence
  Description of Artificial Sequence: Synthetic oligonucleotide
cuaucagccugccgaccgu

SEQ ID NO: 1879079 - RNA, 19 nt, Artificial Sequence
  Description of Artificial Sequence: Synthetic oligonucleotide
gagggucgucaagaguggu

SEQ ID NO: 1879080 - RNA, 19 nt, Artificial Sequence
  Description of Artificial Sequence: Synthetic oligonucleotide
caucacggucggacacaca

SEQ ID NO: 1879081 - RNA, 19 nt, Artificial Sequence
  Description of Artificial Sequence: Synthetic oligonucleotide
gcgcguucaagaacagaga

SEQ ID NO: 1879082 - RNA, 19 nt, Artificial Sequence
  Description of Artificial Sequence: Synthetic oligonucleotide
cggucggacacacacaacu

SEQ ID NO: 1879083 - RNA, 19 nt, Artificial Sequence
  Description of Artificial Sequence: Synthetic oligonucleotide
ggcgacaccuuuucucaau

SEQ ID NO: 1879084 - RNA, 19 nt, Artificial Sequence
  Description of Artificial Sequence: Synthetic oligonucleotide
ugccgaccgucgcgccaga

SEQ ID NO: 1879085 - RNA, 19 nt, Artificial Sequence
  Description of Artificial Sequence: Synthetic oligonucleotide
ccagagcgccccugccagg

SEQ ID NO: 1879086 - RNA, 19 nt, Artificial Sequence
  Description of Artificial Sequence: Synthetic oligonucleotide
cugcuaucccagucuuccu

SEQ ID NO: 1879087 - RNA, 19 nt, Artificial Sequence
  Description of Artificial Sequence: Synthetic oligonucleotide
ccuggcaggacaucacggu

SEQ ID NO: 1879088 - RNA, 19 nt, Artificial Sequence
  Description of Artificial Sequence: Synthetic oligonucleotide
gguguuugucccagagggu

SEQ ID NO: 1879089 - RNA, 19 nt, Artificial Sequence
  Description of Artificial Sequence: Synthetic oligonucleotide
ccgcacucgcacguugagc

SEQ ID NO: 1879090 - RNA, 19 nt, Artificial Sequence
  Description of Artificial Sequence: Synthetic oligonucleotide
cguccgcgcguucaagaac

SEQ ID NO: 1879091 - RNA, 19 nt, Artificial Sequence
  Description of Artificial Sequence: Synthetic oligonucleotide
gagcgccccugccaggcau

SEQ ID NO: 1879092 - RNA, 19 nt, Artificial Sequence
  Description of Artificial Sequence: Synthetic oligonucleotide
ucccucgcacgggccuccc

SEQ ID NO: 1879093 - RNA, 19 nt, Artificial Sequence
  Description of Artificial Sequence: Synthetic oligonucleotide
cgacaccuuuucucaauga

SEQ ID NO: 1879094 - RNA, 19 nt, Artificial Sequence
  Description of Artificial Sequence: Synthetic oligonucleotide
gcgccgcacucgcacguug

SEQ ID NO: 1879095 - RNA, 19 nt, Artificial Sequence
  Description of Artificial Sequence: Synthetic oligonucleotide
uagggcuaccagggccauu

SEQ ID NO: 1879096 - RNA, 19 nt, Artificial Sequence
  Description of Artificial Sequence: Synthetic oligonucleotide
cccuuaaacuuggugugua

SEQ ID NO: 1879097 - RNA, 19 nt, Artificial Sequence
  Description of Artificial Sequence: Synthetic oligonucleotide
cgcggcuagcaucucuauc

SEQ ID NO: 1879098 - RNA, 19 nt, Artificial Sequence
  Description of Artificial Sequence: Synthetic oligonucleotide
cgcagacauggcgagccac

SEQ ID NO: 1879099 - RNA, 19 nt, Artificial Sequence
  Description of Artificial Sequence: Synthetic oligonucleotide
cggaucccucgcacgggcc

SEQ ID NO: 1879100 - RNA, 19 nt, Artificial Sequence
  Description of Artificial Sequence: Synthetic oligonucleotide
gccauucuugggaguuguc

SEQ ID NO: 1879101 - RNA, 19 nt, Artificial Sequence
  Description of Artificial Sequence: Synthetic oligonucleotide
cccuugauuuuagaacgcu

SEQ ID NO: 1879102 - RNA, 19 nt, Artificial Sequence
  Description of Artificial Sequence: Synthetic oligonucleotide
ggucgucaagaguggugau

SEQ ID NO: 1879103 - RNA, 19 nt, Artificial Sequence
  Description of Artificial Sequence: Synthetic oligonucleotide
cgucgcgccagagcgcccc

SEQ ID NO: 1879104 - RNA, 19 nt, Artificial Sequence
  Description of Artificial Sequence: Synthetic oligonucleotide
gugccacuaccuggagcaa

SEQ ID NO: 1879105 - RNA, 19 nt, Artificial Sequence
  Description of Artificial Sequence: Synthetic oligonucleotide
gcccuuaaacuuggugugu

SEQ ID NO: 1879106 - RNA, 19 nt, Artificial Sequence
  Description of Artificial Sequence: Synthetic oligonucleotide
cagcgcggcuagcaucucu

SEQ ID NO: 1879107 - RNA, 19 nt, Artificial Sequence
  Description of Artificial Sequence: Synthetic oligonucleotide
gggcuaccagggccauuca

SEQ ID NO: 1879108 - RNA, 19 nt, Artificial Sequence
  Description of Artificial Sequence: Synthetic oligonucleotide
cgcgucucuagaugucgga

SEQ ID NO: 1879109 - RNA, 19 nt, Artificial Sequence
  Description of Artificial Sequence: Synthetic oligonucleotide
gcgucucuagaugucggau

SEQ ID NO: 1879110 - RNA, 19 nt, Artificial Sequence
  Description of Artificial Sequence: Synthetic oligonucleotide
gggcgcgucucuagauguc

SEQ ID NO: 1879111 - RNA, 19 nt, Artificial Sequence
  Description of Artificial Sequence: Synthetic oligonucleotide
agacggcgccgcacucgca

SEQ ID NO: 1879112 - RNA, 19 nt, Artificial Sequence
  Description of Artificial Sequence: Synthetic oligonucleotide
ccugccgaccgucgcgcca

SEQ ID NO: 1879113 - RNA, 19 nt, Artificial Sequence
  Description of Artificial Sequence: Synthetic oligonucleotide
gcgccccugccaggcaucc

SEQ ID NO: 1879114 - RNA, 19 nt, Artificial Sequence
  Description of Artificial Sequence: Synthetic oligonucleotide
cccucgcacgggccucccg

SEQ ID NO: 1879115 - RNA, 19 nt, Artificial Sequence
  Description of Artificial Sequence: Synthetic oligonucleotide
gccgaccgucgcgccagag

SEQ ID NO: 1879116 - RNA, 19 nt, Artificial Sequence
  Description of Artificial Sequence: Synthetic oligonucleotide
acgcuuccacucagccauu

SEQ ID NO: 1879117 - RNA, 19 nt, Artificial Sequence
  Description of Artificial Sequence: Synthetic oligonucleotide
ccacuaccuggagcaagga

SEQ ID NO: 1879118 - RNA, 19 nt, Artificial Sequence
  Description of Artificial Sequence: Synthetic oligonucleotide
ggaugcuagggaaguccuu

SEQ ID NO: 1879119 - RNA, 19 nt, Artificial Sequence
  Description of Artificial Sequence: Synthetic oligonucleotide
guguagccaaggagagcuu

SEQ ID NO: 1879120 - RNA, 19 nt, Artificial Sequence
  Description of Artificial Sequence: Synthetic oligonucleotide
cgcuucuguuggacaccug

SEQ ID NO: 1879121 - RNA, 19 nt, Artificial Sequence
  Description of Artificial Sequence: Synthetic oligonucleotide
gucgcgccagagcgccccu

SEQ ID NO: 1879122 - RNA, 19 nt, Artificial Sequence
  Description of Artificial Sequence: Synthetic oligonucleotide
gccaccggcguccgcgcgu

SEQ ID NO: 1879123 - RNA, 19 nt, Artificial Sequence
  Description of Artificial Sequence: Synthetic oligonucleotide
ccauccggcgacaccuuuu

SEQ ID NO: 1879124 - RNA, 19 nt, Artificial Sequence
  Description of Artificial Sequence: Synthetic oligonucleotide
caccggcguccgcgcguuc

SEQ ID NO: 1879125 - RNA, 19 nt, Artificial Sequence
  Description of Artificial Sequence: Synthetic oligonucleotide
ccgucgcgccagagcgccc

SEQ ID NO: 1879126 - RNA, 19 nt, Artificial Sequence
  Description of Artificial Sequence: Synthetic oligonucleotide
ggccucccgcagacauggc

SEQ ID NO: 1879127 - RNA, 19 nt, Artificial Sequence
  Description of Artificial Sequence: Synthetic oligonucleotide
ggcccagcgcggcuagcau

SEQ ID NO: 1879128 - RNA, 19 nt, Artificial Sequence
  Description of Artificial Sequence: Synthetic oligonucleotide
ccgcgcguucaagaacaga

SEQ ID NO: 1879129 - RNA, 19 nt, Artificial Sequence
  Description of Artificial Sequence: Synthetic oligonucleotide
gcgcggccaaggguaggga

SEQ ID NO: 1879130 - RNA, 19 nt, Artificial Sequence
  Description of Artificial Sequence: Synthetic oligonucleotide
gcgcggcuagcaucucuau

SEQ ID NO: 1879131 - RNA, 19 nt, Artificial Sequence
  Description of Artificial Sequence: Synthetic oligonucleotide
cggcgacaccuuuucucaa

SEQ ID NO: 1879132 - RNA, 19 nt, Artificial Sequence
  Description of Artificial Sequence: Synthetic oligonucleotide
ccggcguccgcgcguucaa

SEQ ID NO: 1879133 - RNA, 19 nt, Artificial Sequence
  Description of Artificial Sequence: Synthetic oligonucleotide
ccagcgcggcuagcaucuc

SEQ ID NO: 1879134 - RNA, 19 nt, Artificial Sequence
  Description of Artificial Sequence: Synthetic oligonucleotide
ggcgccgcacucgcacguu

SEQ ID NO: 1879135 - RNA, 19 nt, Artificial Sequence
  Description of Artificial Sequence: Synthetic oligonucleotide
cggcgccgcacucgcacgu

SEQ ID NO: 1879136 - RNA, 19 nt, Artificial Sequence
  Description of Artificial Sequence: Synthetic oligonucleotide
ccaccggcguccgcgcguu

SEQ ID NO: 1879137 - RNA, 19 nt, Artificial Sequence
  Description of Artificial Sequence: Synthetic oligonucleotide
cgguggggucagggcgcgu

SEQ ID NO: 1879138 - RNA, 19 nt, Artificial Sequence
  Description of Artificial Sequence: Synthetic oligonucleotide
agacuuaauaacuacaucc

SEQ ID NO: 1879139 - RNA, 19 nt, Artificial Sequence
  Description of Artificial Sequence: Synthetic oligonucleotide
aacaagauaacucauggag

SEQ ID NO: 1879140 - RNA, 19 nt, Artificial Sequence
  Description of Artificial Sequence: Synthetic oligonucleotide
auaauuuucaaaucuacac

SEQ ID NO: 1879141 - RNA, 19 nt, Artificial Sequence
  Description of Artificial Sequence: Synthetic oligonucleotide
aauaacuacauccacagcu

SEQ ID NO: 1879142 - RNA, 19 nt, Artificial Sequence
  Description of Artificial Sequence: Synthetic oligonucleotide
aaaugauacuuguagauag

SEQ ID NO: 1879143 - RNA, 19 nt, Artificial Sequence
  Description of Artificial Sequence: Synthetic oligonucleotide
aaauuuuagcugcacuucc

SEQ ID NO: 1879144 - RNA, 19 nt, Artificial Sequence
  Description of Artificial Sequence: Synthetic oligonucleotide
uggaaaaugauacuuguag

SEQ ID NO: 1879145 - RNA, 19 nt, Artificial Sequence
  Description of Artificial Sequence: Synthetic oligonucleotide
uuaauaacuacauccacag

SEQ ID NO: 1879146 - RNA, 19 nt, Artificial Sequence
  Description of Artificial Sequence: Synthetic oligonucleotide
aagcaauuaaauuaaugag

SEQ ID NO: 1879147 - RNA, 19 nt, Artificial Sequence
  Description of Artificial Sequence: Synthetic oligonucleotide
aauacugacuucugcaacg

SEQ ID NO: 1879148 - RNA, 19 nt, Artificial Sequence
  Description of Artificial Sequence: Synthetic oligonucleotide
aaauuucugauaucacccc

SEQ ID NO: 1879149 - RNA, 19 nt, Artificial Sequence
  Description of Artificial Sequence: Synthetic oligonucleotide
aauaucuuaagucuacaga

SEQ ID NO: 1879150 - RNA, 19 nt, Artificial Sequence
  Description of Artificial Sequence: Synthetic oligonucleotide
aagaugaguaguaacaaac

SEQ ID NO: 1879151 - RNA, 19 nt, Artificial Sequence
  Description of Artificial Sequence: Synthetic oligonucleotide
uaaauuagagugaaaugcc

SEQ ID NO: 1879152 - RNA, 19 nt, Artificial Sequence
  Description of Artificial Sequence: Synthetic oligonucleotide
aauuaaauuaaugaggguu

SEQ ID NO: 1879153 - RNA, 19 nt, Artificial Sequence
  Description of Artificial Sequence: Synthetic oligonucleotide
ucaaaucuacacaagaaac

SEQ ID NO: 1879154 - RNA, 19 nt, Artificial Sequence
  Description of Artificial Sequence: Synthetic oligonucleotide
uguagauagacuuaauaac

SEQ ID NO: 1879155 - RNA, 19 nt, Artificial Sequence
  Description of Artificial Sequence: Synthetic oligonucleotide
uggacaguucgucagaacg

SEQ ID NO: 1879156 - RNA, 19 nt, Artificial Sequence
  Description of Artificial Sequence: Synthetic oligonucleotide
caauaguggaaaaugauac

SEQ ID NO: 1879157 - RNA, 19 nt, Artificial Sequence
  Description of Artificial Sequence: Synthetic oligonucleotide
uuuucccuaaacaaagugc

SEQ ID NO: 1879158 - RNA, 19 nt, Artificial Sequence
  Description of Artificial Sequence: Synthetic oligonucleotide
ucugauaucaccccuuuac

SEQ ID NO: 1879159 - RNA, 19 nt, Artificial Sequence
  Description of Artificial Sequence: Synthetic oligonucleotide
aaaucuacacaagaaacug

SEQ ID NO: 1879160 - RNA, 19 nt, Artificial Sequence
  Description of Artificial Sequence: Synthetic oligonucleotide
uuaccgaugacagaaagcc

SEQ ID NO: 1879161 - RNA, 19 nt, Artificial Sequence
  Description of Artificial Sequence: Synthetic oligonucleotide
uuuagcugcacuuccaagc

SEQ ID NO: 1879162 - RNA, 19 nt, Artificial Sequence
  Description of Artificial Sequence: Synthetic oligonucleotide
auaucuuaagucuacagaa

SEQ ID NO: 1879163 - RNA, 19 nt, Artificial Sequence
  Description of Artificial Sequence: Synthetic oligonucleotide
caagcaauuaaauuaauga

SEQ ID NO: 1879164 - RNA, 19 nt, Artificial Sequence
  Description of Artificial Sequence: Synthetic oligonucleotide
ucuaaauuagagugaaaug

SEQ ID NO: 1879165 - RNA, 19 nt, Artificial Sequence
  Description of Artificial Sequence: Synthetic oligonucleotide
ugcagaauaucuuaagucu

SEQ ID NO: 1879166 - RNA, 19 nt, Artificial Sequence
  Description of Artificial Sequence: Synthetic oligonucleotide
uuaaaguaagucuugccac

SEQ ID NO: 1879167 - RNA, 19 nt, Artificial Sequence
  Description of Artificial Sequence: Synthetic oligonucleotide
aaauuaaugaggguuccag

SEQ ID NO: 1879168 - RNA, 19 nt, Artificial Sequence
  Description of Artificial Sequence: Synthetic oligonucleotide
auuaaauuaaugaggguuc

SEQ ID NO: 1879169 - RNA, 19 nt, Artificial Sequence
  Description of Artificial Sequence: Synthetic oligonucleotide
uucucaaggaguuaucuca

SEQ ID NO: 1879170 - RNA, 19 nt, Artificial Sequence
  Description of Artificial Sequence: Synthetic oligonucleotide
acugcaggcaaacuaaauc

SEQ ID NO: 1879171 - RNA, 19 nt, Artificial Sequence
  Description of Artificial Sequence: Synthetic oligonucleotide
gacaacuguggucacaagg

SEQ ID NO: 1879172 - RNA, 19 nt, Artificial Sequence
  Description of Artificial Sequence: Synthetic oligonucleotide
uucaaaucuacacaagaaa

SEQ ID NO: 1879173 - RNA, 19 nt, Artificial Sequence
  Description of Artificial Sequence: Synthetic oligonucleotide
acuuaauaacuacauccac

SEQ ID NO: 1879174 - RNA, 19 nt, Artificial Sequence
  Description of Artificial Sequence: Synthetic oligonucleotide
agcugaagggcuuuucucc

SEQ ID NO: 1879175 - RNA, 19 nt, Artificial Sequence
  Description of Artificial Sequence: Synthetic oligonucleotide
gucuacagaaaacacauug

SEQ ID NO: 1879176 - RNA, 19 nt, Artificial Sequence
  Description of Artificial Sequence: Synthetic oligonucleotide
ucucaaauuucugauauca

SEQ ID NO: 1879177 - RNA, 19 nt, Artificial Sequence
  Description of Artificial Sequence: Synthetic oligonucleotide
aaucuacacaagaaacugc

SEQ ID NO: 1879178 - RNA, 19 nt, Artificial Sequence
  Description of Artificial Sequence: Synthetic oligonucleotide
aauaguggaaaaugauacu

SEQ ID NO: 1879179 - RNA, 19 nt, Artificial Sequence
  Description of Artificial Sequence: Synthetic oligonucleotide
aaggaguuaucucaaauuu

SEQ ID NO: 1879180 - RNA, 19 nt, Artificial Sequence
  Description of Artificial Sequence: Synthetic oligonucleotide
gcaauuaaauuaaugaggg

SEQ ID NO: 1879181 - RNA, 19 nt, Artificial Sequence
  Description of Artificial Sequence: Synthetic oligonucleotide
acaauacauauuuucaccu

SEQ ID NO: 1879182 - RNA, 19 nt, Artificial Sequence
  Description of Artificial Sequence: Synthetic oligonucleotide
aguuaucucaaauuucuga

SEQ ID NO: 1879183 - RNA, 19 nt, Artificial Sequence
  Description of Artificial Sequence: Synthetic oligonucleotide
gaugacggggcacaggcgg

SEQ ID NO: 1879184 - RNA, 19 nt, Artificial Sequence
  Description of Artificial Sequence: Synthetic oligonucleotide
aaggagggaauccgggcgc

SEQ ID NO: 1879185 - RNA, 19 nt, Artificial Sequence
  Description of Artificial Sequence: Synthetic oligonucleotide
aauuaaugaggguuccagu

SEQ ID NO: 1879186 - RNA, 19 nt, Artificial Sequence
  Description of Artificial Sequence: Synthetic oligonucleotide
uuuaccgaugacagaaagc

SEQ ID NO: 1879187 - RNA, 19 nt, Artificial Sequence
  Description of Artificial Sequence: Synthetic oligonucleotide
uaaacaaagugcagaauau

SEQ ID NO: 1879188 - RNA, 19 nt, Artificial Sequence
  Description of Artificial Sequence: Synthetic oligonucleotide
gaaggagggaauccgggcg

SEQ ID NO: 1879189 - RNA, 19 nt, Artificial Sequence
  Description of Artificial Sequence: Synthetic oligonucleotide
ucuuaagucuacagaaaac

SEQ ID NO: 1879190 - RNA, 19 nt, Artificial Sequence
  Description of Artificial Sequence: Synthetic oligonucleotide
aucccugcggaacacaaac

SEQ ID NO: 1879191 - RNA, 19 nt, Artificial Sequence
  Description of Artificial Sequence: Synthetic oligonucleotide
gauacuuguagauagacuu

SEQ ID NO: 1879192 - RNA, 19 nt, Artificial Sequence
  Description of Artificial Sequence: Synthetic oligonucleotide
aagugcagaauaucuuaag

SEQ ID NO: 1879193 - RNA, 19 nt, Artificial Sequence
  Description of Artificial Sequence: Synthetic oligonucleotide
acuuccauuugccaguuug

SEQ ID NO: 1879194 - RNA, 19 nt, Artificial Sequence
  Description of Artificial Sequence: Synthetic oligonucleotide
caccccuuaacaauguacg

SEQ ID NO: 1879195 - RNA, 19 nt, Artificial Sequence
  Description of Artificial Sequence: Synthetic oligonucleotide
aagucuacagaaaacacau

SEQ ID NO: 1879196 - RNA, 19 nt, Artificial Sequence
  Description of Artificial Sequence: Synthetic oligonucleotide
aaacaagauaacucaugga

SEQ ID NO: 1879197 - RNA, 19 nt, Artificial Sequence
  Description of Artificial Sequence: Synthetic oligonucleotide
augaacaacacuggugggc

SEQ ID NO: 1879198 - RNA, 19 nt, Artificial Sequence
  Description of Artificial Sequence: Synthetic oligonucleotide
ugcacuuccaagcaauuaa

SEQ ID NO: 1879199 - RNA, 19 nt, Artificial Sequence
  Description of Artificial Sequence: Synthetic oligonucleotide
uuugggagcuucuuggcug

SEQ ID NO: 1879200 - RNA, 19 nt, Artificial Sequence
  Description of Artificial Sequence: Synthetic oligonucleotide
aagagaccaauacugacuu

SEQ ID NO: 1879201 - RNA, 19 nt, Artificial Sequence
  Description of Artificial Sequence: Synthetic oligonucleotide
aguggaaaaugauacuugu

SEQ ID NO: 1879202 - RNA, 19 nt, Artificial Sequence
  Description of Artificial Sequence: Synthetic oligonucleotide
accaccggagguuuggggc

SEQ ID NO: 1879203 - RNA, 19 nt, Artificial Sequence
  Description of Artificial Sequence: Synthetic oligonucleotide
aaauggucgcuccucauaa

SEQ ID NO: 1879204 - RNA, 19 nt, Artificial Sequence
  Description of Artificial Sequence: Synthetic oligonucleotide
uaaaguaagucuugccaca

SEQ ID NO: 1879205 - RNA, 19 nt, Artificial Sequence
  Description of Artificial Sequence: Synthetic oligonucleotide
uuaaauuaaugaggguucc

SEQ ID NO: 1879206 - RNA, 19 nt, Artificial Sequence
  Description of Artificial Sequence: Synthetic oligonucleotide
agugcagaauaucuuaagu

SEQ ID NO: 1879207 - RNA, 19 nt, Artificial Sequence
  Description of Artificial Sequence: Synthetic oligonucleotide
auuaaugaggguuccaguu

SEQ ID NO: 1879208 - RNA, 19 nt, Artificial Sequence
  Description of Artificial Sequence: Synthetic oligonucleotide
uaaugaggguuccaguucu

SEQ ID NO: 1879209 - RNA, 19 nt, Artificial Sequence
  Description of Artificial Sequence: Synthetic oligonucleotide
aacgagcaaaccuccuuuc

SEQ ID NO: 1879210 - RNA, 19 nt, Artificial Sequence
  Description of Artificial Sequence: Synthetic oligonucleotide
augauacuuguagauagac

SEQ ID NO: 1879211 - RNA, 19 nt, Artificial Sequence
  Description of Artificial Sequence: Synthetic oligonucleotide
caucauuuaacuugcucac

SEQ ID NO: 1879212 - RNA, 19 nt, Artificial Sequence
  Description of Artificial Sequence: Synthetic oligonucleotide
ggcacaacgaacaucacgg

SEQ ID NO: 1879213 - RNA, 19 nt, Artificial Sequence
  Description of Artificial Sequence: Synthetic oligonucleotide
ugacuccucacucuggaug

SEQ ID NO: 1879214 - RNA, 19 nt, Artificial Sequence
  Description of Artificial Sequence: Synthetic oligonucleotide
aauaccaacaauaguggaa

SEQ ID NO: 1879215 - RNA, 19 nt, Artificial Sequence
  Description of Artificial Sequence: Synthetic oligonucleotide
accaauacugacuucugca

SEQ ID NO: 1879216 - RNA, 19 nt, Artificial Sequence
  Description of Artificial Sequence: Synthetic oligonucleotide
ugagugcccaugaacaaca

SEQ ID NO: 1879217 - RNA, 19 nt, Artificial Sequence
  Description of Artificial Sequence: Synthetic oligonucleotide
uaggcgaagagaccaauac

SEQ ID NO: 1879218 - RNA, 19 nt, Artificial Sequence
  Description of Artificial Sequence: Synthetic oligonucleotide
uuaaugaggguuccaguuc

SEQ ID NO: 1879219 - RNA, 19 nt, Artificial Sequence
  Description of Artificial Sequence: Synthetic oligonucleotide
ugacucuugcugccgaagg

SEQ ID NO: 1879220 - RNA, 19 nt, Artificial Sequence
  Description of Artificial Sequence: Synthetic oligonucleotide
augaguaguaacaaacaag

SEQ ID NO: 1879221 - RNA, 19 nt, Artificial Sequence
  Description of Artificial Sequence: Synthetic oligonucleotide
uacauauuuucaccuucag

SEQ ID NO: 1879222 - RNA, 19 nt, Artificial Sequence
  Description of Artificial Sequence: Synthetic oligonucleotide
agauaacucauggagaaga

SEQ ID NO: 1879223 - RNA, 19 nt, Artificial Sequence
  Description of Artificial Sequence: Synthetic oligonucleotide
uagauagacuuaauaacua

SEQ ID NO: 1879224 - RNA, 19 nt, Artificial Sequence
  Description of Artificial Sequence: Synthetic oligonucleotide
aaauuagagugaaaugccu

SEQ ID NO: 1879225 - RNA, 19 nt, Artificial Sequence
  Description of Artificial Sequence: Synthetic oligonucleotide
uuggcauauaauuuucaaa

SEQ ID NO: 1879226 - RNA, 19 nt, Artificial Sequence
  Description of Artificial Sequence: Synthetic oligonucleotide
auuagagugaaaugccuaa

SEQ ID NO: 1879227 - RNA, 19 nt, Artificial Sequence
  Description of Artificial Sequence: Synthetic oligonucleotide
gucacaagggaguuguuug

SEQ ID NO: 1879228 - RNA, 19 nt, Artificial Sequence
  Description of Artificial Sequence: Synthetic oligonucleotide
ggcuccaucauuuaacuug

SEQ ID NO: 1879229 - RNA, 19 nt, Artificial Sequence
  Description of Artificial Sequence: Synthetic oligonucleotide
ucuacacaagaaacugcag

SEQ ID NO: 1879230 - RNA, 19 nt, Artificial Sequence
  Description of Artificial Sequence: Synthetic oligonucleotide
aauguacggcuguucaacu

SEQ ID NO: 1879231 - RNA, 19 nt, Artificial Sequence
  Description of Artificial Sequence: Synthetic oligonucleotide
aggaaggcaaggcaagguc

SEQ ID NO: 1879232 - RNA, 19 nt, Artificial Sequence
  Description of Artificial Sequence: Synthetic oligonucleotide
ugagaccugcagacgaccg

SEQ ID NO: 1879233 - RNA, 19 nt, Artificial Sequence
  Description of Artificial Sequence: Synthetic oligonucleotide
uucugcaacggggacacgg

SEQ ID NO: 1879234 - RNA, 19 nt, Artificial Sequence
  Description of Artificial Sequence: Synthetic oligonucleotide
ucugcaacggggacacggg

SEQ ID NO: 1879235 - RNA, 19 nt, Artificial Sequence
  Description of Artificial Sequence: Synthetic oligonucleotide
cuuccauuugccaguuugg

SEQ ID NO: 1879236 - RNA, 19 nt, Artificial Sequence
  Description of Artificial Sequence: Synthetic oligonucleotide
aaguaagucuugccacauc

SEQ ID NO: 1879237 - RNA, 19 nt, Artificial Sequence
  Description of Artificial Sequence: Synthetic oligonucleotide
cagaauaucuuaagucuac

SEQ ID NO: 1879238 - RNA, 19 nt, Artificial Sequence
  Description of Artificial Sequence: Synthetic oligonucleotide
cuuuaccgaugacagaaag

SEQ ID NO: 1879239 - RNA, 19 nt, Artificial Sequence
  Description of Artificial Sequence: Synthetic oligonucleotide
aaacuaaaucuaaauuaga

SEQ ID NO: 1879240 - RNA, 19 nt, Artificial Sequence
  Description of Artificial Sequence: Synthetic oligonucleotide
gugcagaauaucuuaaguc

SEQ ID NO: 1879241 - RNA, 19 nt, Artificial Sequence
  Description of Artificial Sequence: Synthetic oligonucleotide
aguuguuugcaggaagggg

SEQ ID NO: 1879242 - RNA, 19 nt, Artificial Sequence
  Description of Artificial Sequence: Synthetic oligonucleotide
ugugugcguucucacgugg

SEQ ID NO: 1879243 - RNA, 19 nt, Artificial Sequence
  Description of Artificial Sequence: Synthetic oligonucleotide
auuggcauauaauuuucaa

SEQ ID NO: 1879244 - RNA, 19 nt, Artificial Sequence
  Description of Artificial Sequence: Synthetic oligonucleotide
caagggaguuguuugcagg

SEQ ID NO: 1879245 - RNA, 19 nt, Artificial Sequence
  Description of Artificial Sequence: Synthetic oligonucleotide
accccuuuacaauacauau

SEQ ID NO: 1879246 - RNA, 19 nt, Artificial Sequence
  Description of Artificial Sequence: Synthetic oligonucleotide
aacuacauccacagcugac

SEQ ID NO: 1879247 - RNA, 19 nt, Artificial Sequence
  Description of Artificial Sequence: Synthetic oligonucleotide
uagagugaaaugccuaaau

SEQ ID NO: 1879248 - RNA, 19 nt, Artificial Sequence
  Description of Artificial Sequence: Synthetic oligonucleotide
ucgcacauaggacaggcaa

SEQ ID NO: 1879249 - RNA, 19 nt, Artificial Sequence
  Description of Artificial Sequence: Synthetic oligonucleotide
cuugccacaucccgggugg

SEQ ID NO: 1879250 - RNA, 19 nt, Artificial Sequence
  Description of Artificial Sequence: Synthetic oligonucleotide
uuccauuugccaguuuggg

SEQ ID NO: 1879251 - RNA, 19 nt, Artificial Sequence
  Description of Artificial Sequence: Synthetic oligonucleotide
uaauaacuacauccacagc

SEQ ID NO: 1879252 - RNA, 19 nt, Artificial Sequence
  Description of Artificial Sequence: Synthetic oligonucleotide
ccauuugccaguuugggag

SEQ ID NO: 1879253 - RNA, 19 nt, Artificial Sequence
  Description of Artificial Sequence: Synthetic oligonucleotide
acuguaggcgaagagacca

SEQ ID NO: 1879254 - RNA, 19 nt, Artificial Sequence
  Description of Artificial Sequence: Synthetic oligonucleotide
auagacuuaauaacuacau

SEQ ID NO: 1879255 - RNA, 19 nt, Artificial Sequence
  Description of Artificial Sequence: Synthetic oligonucleotide
auaguggaaaaugauacuu

SEQ ID NO: 1879256 - RNA, 19 nt, Artificial Sequence
  Description of Artificial Sequence: Synthetic oligonucleotide
ucccuaaacaaagugcaga

SEQ ID NO: 1879257 - RNA, 19 nt, Artificial Sequence
  Description of Artificial Sequence: Synthetic oligonucleotide
uuaucucaaauuucugaua

SEQ ID NO: 1879258 - RNA, 19 nt, Artificial Sequence
  Description of Artificial Sequence: Synthetic oligonucleotide
aggguuccaguucuuuugg

SEQ ID NO: 1879259 - RNA, 19 nt, Artificial Sequence
  Description of Artificial Sequence: Synthetic oligonucleotide
aucccggguggcuacagac

SEQ ID NO: 1879260 - RNA, 19 nt, Artificial Sequence
  Description of Artificial Sequence: Synthetic oligonucleotide
uucccuaaacaaagugcag

SEQ ID NO: 1879261 - RNA, 19 nt, Artificial Sequence
  Description of Artificial Sequence: Synthetic oligonucleotide
acaaacaagauaacucaug

SEQ ID NO: 1879262 - RNA, 19 nt, Artificial Sequence
  Description of Artificial Sequence: Synthetic oligonucleotide
ucacaagggaguuguuugc

SEQ ID NO: 1879263 - RNA, 19 nt, Artificial Sequence
  Description of Artificial Sequence: Synthetic oligonucleotide
cagacgaccgucucugagg

SEQ ID NO: 1879264 - RNA, 19 nt, Artificial Sequence
  Description of Artificial Sequence: Synthetic oligonucleotide
gacggucgcacauaggaca

SEQ ID NO: 1879265 - RNA, 19 nt, Artificial Sequence
  Description of Artificial Sequence: Synthetic oligonucleotide
aagauaacucauggagaag

SEQ ID NO: 1879266 - RNA, 19 nt, Artificial Sequence
  Description of Artificial Sequence: Synthetic oligonucleotide
agugaaaugccuaaauuuu

SEQ ID NO: 1879267 - RNA, 19 nt, Artificial Sequence
  Description of Artificial Sequence: Synthetic oligonucleotide
aauuagagugaaaugccua

SEQ ID NO: 1879268 - RNA, 19 nt, Artificial Sequence
  Description of Artificial Sequence: Synthetic oligonucleotide
aucuacacaagaaacugca

SEQ ID NO: 1879269 - RNA, 19 nt, Artificial Sequence
  Description of Artificial Sequence: Synthetic oligonucleotide
caacaauaguggaaaauga

SEQ ID NO: 1879270 - RNA, 19 nt, Artificial Sequence
  Description of Artificial Sequence: Synthetic oligonucleotide
gaccaauacugacuucugc

SEQ ID NO: 1879271 - RNA, 19 nt, Artificial Sequence
  Description of Artificial Sequence: Synthetic oligonucleotide
aggcaaacuaaaucuaaau

SEQ ID NO: 1879272 - RNA, 19 nt, Artificial Sequence
  Description of Artificial Sequence: Synthetic oligonucleotide
aaugauacuuguagauaga

SEQ ID NO: 1879273 - RNA, 19 nt, Artificial Sequence
  Description of Artificial Sequence: Synthetic oligonucleotide
caacuguaaaauaccaaca

SEQ ID NO: 1879274 - RNA, 19 nt, Artificial Sequence
  Description of Artificial Sequence: Synthetic oligonucleotide
accccuuaacaauguacgg

SEQ ID NO: 1879275 - RNA, 19 nt, Artificial Sequence
  Description of Artificial Sequence: Synthetic oligonucleotide
uggggcuuaccaccggagg

SEQ ID NO: 1879276 - RNA, 19 nt, Artificial Sequence
  Description of Artificial Sequence: Synthetic oligonucleotide
guagauagacuuaauaacu

SEQ ID NO: 1879277 - RNA, 19 nt, Artificial Sequence
  Description of Artificial Sequence: Synthetic oligonucleotide
uccucauaaaccgacgguc

SEQ ID NO: 1879278 - RNA, 19 nt, Artificial Sequence
  Description of Artificial Sequence: Synthetic oligonucleotide
guacuguaggcgaagagac

SEQ ID NO: 1879279 - RNA, 19 nt, Artificial Sequence
  Description of Artificial Sequence: Synthetic oligonucleotide
aaacacauuggcauauaau

SEQ ID NO: 1879280 - RNA, 19 nt, Artificial Sequence
  Description of Artificial Sequence: Synthetic oligonucleotide
auaucaccccuuuacaaua

SEQ ID NO: 1879281 - RNA, 19 nt, Artificial Sequence
  Description of Artificial Sequence: Synthetic oligonucleotide
ucucaaggaguuaucucaa

SEQ ID NO: 1879282 - RNA, 19 nt, Artificial Sequence
  Description of Artificial Sequence: Synthetic oligonucleotide
acagacgugacuccucacu

SEQ ID NO: 1879283 - RNA, 19 nt, Artificial Sequence
  Description of Artificial Sequence: Synthetic oligonucleotide
uaaaccgacggucgcacau

SEQ ID NO: 1879284 - RNA, 19 nt, Artificial Sequence
  Description of Artificial Sequence: Synthetic oligonucleotide
aggaguuaucucaaauuuc

SEQ ID NO: 1879285 - RNA, 19 nt, Artificial Sequence
  Description of Artificial Sequence: Synthetic oligonucleotide
acaagauaacucauggaga

SEQ ID NO: 1879286 - RNA, 19 nt, Artificial Sequence
  Description of Artificial Sequence: Synthetic oligonucleotide
uuccaguucuuuuggcacc

SEQ ID NO: 1879287 - RNA, 19 nt, Artificial Sequence
  Description of Artificial Sequence: Synthetic oligonucleotide
ucuugccacaucccgggug

SEQ ID NO: 1879288 - RNA, 19 nt, Artificial Sequence
  Description of Artificial Sequence: Synthetic oligonucleotide
uuggggcucugcacgacgg

SEQ ID NO: 1879289 - RNA, 19 nt, Artificial Sequence
  Description of Artificial Sequence: Synthetic oligonucleotide
ggaaaaugauacuuguaga

SEQ ID NO: 1879290 - RNA, 19 nt, Artificial Sequence
  Description of Artificial Sequence: Synthetic oligonucleotide
aaccgacggucgcacauag

SEQ ID NO: 1879291 - RNA, 19 nt, Artificial Sequence
  Description of Artificial Sequence: Synthetic oligonucleotide
cugcggaacacaaacccac

SEQ ID NO: 1879292 - RNA, 19 nt, Artificial Sequence
  Description of Artificial Sequence: Synthetic oligonucleotide
acgaacaucacggugcccu

SEQ ID NO: 1879293 - RNA, 19 nt, Artificial Sequence
  Description of Artificial Sequence: Synthetic oligonucleotide
caauguacggcuguucaac

SEQ ID NO: 1879294 - RNA, 19 nt, Artificial Sequence
  Description of Artificial Sequence: Synthetic oligonucleotide
gacgugacuccucacucug

SEQ ID NO: 1879295 - RNA, 19 nt, Artificial Sequence
  Description of Artificial Sequence: Synthetic oligonucleotide
cuuguagauagacuuaaua

SEQ ID NO: 1879296 - RNA, 19 nt, Artificial Sequence
  Description of Artificial Sequence: Synthetic oligonucleotide
cucauaaaccgacggucgc

SEQ ID NO: 1879297 - RNA, 19 nt, Artificial Sequence
  Description of Artificial Sequence: Synthetic oligonucleotide
aaaguaagucuugccacau

SEQ ID NO: 1879298 - RNA, 19 nt, Artificial Sequence
  Description of Artificial Sequence: Synthetic oligonucleotide
caguucgucagaacgagca

SEQ ID NO: 1879299 - RNA, 19 nt, Artificial Sequence
  Description of Artificial Sequence: Synthetic oligonucleotide
auacugacuucugcaacgg

SEQ ID NO: 1879300 - RNA, 19 nt, Artificial Sequence
  Description of Artificial Sequence: Synthetic oligonucleotide
agaugaguaguaacaaaca

SEQ ID NO: 1879301 - RNA, 19 nt, Artificial Sequence
  Description of Artificial Sequence: Synthetic oligonucleotide
gucagaacgagcaaaccuc

SEQ ID NO: 1879302 - RNA, 19 nt, Artificial Sequence
  Description of Artificial Sequence: Synthetic oligonucleotide
acgaccgucucugaggaag

SEQ ID NO: 1879303 - RNA, 19 nt, Artificial Sequence
  Description of Artificial Sequence: Synthetic oligonucleotide
gauaucaccccuuuacaau

SEQ ID NO: 1879304 - RNA, 19 nt, Artificial Sequence
  Description of Artificial Sequence: Synthetic oligonucleotide
ggucauacggggcagcacc

SEQ ID NO: 1879305 - RNA, 19 nt, Artificial Sequence
  Description of Artificial Sequence: Synthetic oligonucleotide
gcauauaauuuucaaaucu

SEQ ID NO: 1879306 - RNA, 19 nt, Artificial Sequence
  Description of Artificial Sequence: Synthetic oligonucleotide
ugcacgacgggcuggggca

SEQ ID NO: 1879307 - RNA, 19 nt, Artificial Sequence
  Description of Artificial Sequence: Synthetic oligonucleotide
cugacugggaagaugagua

SEQ ID NO: 1879308 - RNA, 19 nt, Artificial Sequence
  Description of Artificial Sequence: Synthetic oligonucleotide
cuuaccaccggagguuugg

SEQ ID NO: 1879309 - RNA, 19 nt, Artificial Sequence
  Description of Artificial Sequence: Synthetic oligonucleotide
ugcaggcaaacuaaaucua

SEQ ID NO: 1879310 - RNA, 19 nt, Artificial Sequence
  Description of Artificial Sequence: Synthetic oligonucleotide
ccaucauuuaacuugcuca

SEQ ID NO: 1879311 - RNA, 19 nt, Artificial Sequence
  Description of Artificial Sequence: Synthetic oligonucleotide
uccucacucuggaugaauc

SEQ ID NO: 1879312 - RNA, 19 nt, Artificial Sequence
  Description of Artificial Sequence: Synthetic oligonucleotide
ugaaucacucuggggagug

SEQ ID NO: 1879313 - RNA, 19 nt, Artificial Sequence
  Description of Artificial Sequence: Synthetic oligonucleotide
ucauaaaccgacggucgca

SEQ ID NO: 1879314 - RNA, 19 nt, Artificial Sequence
  Description of Artificial Sequence: Synthetic oligonucleotide
agaaaacacauuggcauau

SEQ ID NO: 1879315 - RNA, 19 nt, Artificial Sequence
  Description of Artificial Sequence: Synthetic oligonucleotide
ggaguuguuugcaggaagg

SEQ ID NO: 1879316 - RNA, 19 nt, Artificial Sequence
  Description of Artificial Sequence: Synthetic oligonucleotide
aacaacacuggugggcaga

SEQ ID NO: 1879317 - RNA, 19 nt, Artificial Sequence
  Description of Artificial Sequence: Synthetic oligonucleotide
cuacauccacagcugacug

SEQ ID NO: 1879318 - RNA, 19 nt, Artificial Sequence
  Description of Artificial Sequence: Synthetic oligonucleotide
agacgaccgucucugagga

SEQ ID NO: 1879319 - RNA, 19 nt, Artificial Sequence
  Description of Artificial Sequence: Synthetic oligonucleotide
agaauaucuuaagucuaca

SEQ ID NO: 1879320 - RNA, 19 nt, Artificial Sequence
  Description of Artificial Sequence: Synthetic oligonucleotide
gggcacaacgaacaucacg

SEQ ID NO: 1879321 - RNA, 19 nt, Artificial Sequence
  Description of Artificial Sequence: Synthetic oligonucleotide
gaagagaccaauacugacu

SEQ ID NO: 1879322 - RNA, 19 nt, Artificial Sequence
  Description of Artificial Sequence: Synthetic oligonucleotide
uuggggcuuaccaccggag

SEQ ID NO: 1879323 - RNA, 19 nt, Artificial Sequence
  Description of Artificial Sequence: Synthetic oligonucleotide
ucaccccuuuacaauacau

SEQ ID NO: 1879324 - RNA, 19 nt, Artificial Sequence
  Description of Artificial Sequence: Synthetic oligonucleotide
cacucuggaugaaucacuc

SEQ ID NO: 1879325 - RNA, 19 nt, Artificial Sequence
  Description of Artificial Sequence: Synthetic oligonucleotide
agaccugcagacgaccguc

SEQ ID NO: 1879326 - RNA, 19 nt, Artificial Sequence
  Description of Artificial Sequence: Synthetic oligonucleotide
ucgcuccucauaaaccgac

SEQ ID NO: 1879327 - RNA, 19 nt, Artificial Sequence
  Description of Artificial Sequence: Synthetic oligonucleotide
aggcgaagagaccaauacu

SEQ ID NO: 1879328 - RNA, 19 nt, Artificial Sequence
  Description of Artificial Sequence: Synthetic oligonucleotide
ugcguucucacgugggccu

SEQ ID NO: 1879329 - RNA, 19 nt, Artificial Sequence
  Description of Artificial Sequence: Synthetic oligonucleotide
aucuuucucaaggaguuau

SEQ ID NO: 1879330 - RNA, 19 nt, Artificial Sequence
  Description of Artificial Sequence: Synthetic oligonucleotide
uuagagugaaaugccuaaa

SEQ ID NO: 1879331 - RNA, 19 nt, Artificial Sequence
  Description of Artificial Sequence: Synthetic oligonucleotide
uaccgaugacagaaagcca

SEQ ID NO: 1879332 - RNA, 19 nt, Artificial Sequence
  Description of Artificial Sequence: Synthetic oligonucleotide
ccucauaaaccgacggucg

SEQ ID NO: 1879333 - RNA, 19 nt, Artificial Sequence
  Description of Artificial Sequence: Synthetic oligonucleotide
gaguuaucucaaauuucug

SEQ ID NO: 1879334 - RNA, 19 nt, Artificial Sequence
  Description of Artificial Sequence: Synthetic oligonucleotide
agaacgagcaaaccuccuu

SEQ ID NO: 1879335 - RNA, 19 nt, Artificial Sequence
  Description of Artificial Sequence: Synthetic oligonucleotide
accgaugacagaaagccau

SEQ ID NO: 1879336 - RNA, 19 nt, Artificial Sequence
  Description of Artificial Sequence: Synthetic oligonucleotide
uccaagcaauuaaauuaau

SEQ ID NO: 1879337 - RNA, 19 nt, Artificial Sequence
  Description of Artificial Sequence: Synthetic oligonucleotide
aacgaacaucacggugccc

SEQ ID NO: 1879338 - RNA, 19 nt, Artificial Sequence
  Description of Artificial Sequence: Synthetic oligonucleotide
cauaaaccgacggucgcac

SEQ ID NO: 1879339 - RNA, 19 nt, Artificial Sequence
  Description of Artificial Sequence: Synthetic oligonucleotide
ugccuaaauuuuagcugca

SEQ ID NO: 1879340 - RNA, 19 nt, Artificial Sequence
  Description of Artificial Sequence: Synthetic oligonucleotide
uuaacaauguacggcuguu

SEQ ID NO: 1879341 - RNA, 19 nt, Artificial Sequence
  Description of Artificial Sequence: Synthetic oligonucleotide
uucuuuuggcaccccuuaa

SEQ ID NO: 1879342 - RNA, 19 nt, Artificial Sequence
  Description of Artificial Sequence: Synthetic oligonucleotide
auaggacaggcaaauuucu

SEQ ID NO: 1879343 - RNA, 19 nt, Artificial Sequence
  Description of Artificial Sequence: Synthetic oligonucleotide
aaauuucuucucgccugug

SEQ ID NO: 1879344 - RNA, 19 nt, Artificial Sequence
  Description of Artificial Sequence: Synthetic oligonucleotide
acaauguacggcuguucaa

SEQ ID NO: 1879345 - RNA, 19 nt, Artificial Sequence
  Description of Artificial Sequence: Synthetic oligonucleotide
ucccugcggaacacaaacc

SEQ ID NO: 1879346 - RNA, 19 nt, Artificial Sequence
  Description of Artificial Sequence: Synthetic oligonucleotide
acgagcaaaccuccuuuca

SEQ ID NO: 1879347 - RNA, 19 nt, Artificial Sequence
  Description of Artificial Sequence: Synthetic oligonucleotide
cauuggcauauaauuuuca

SEQ ID NO: 1879348 - RNA, 19 nt, Artificial Sequence
  Description of Artificial Sequence: Synthetic oligonucleotide
ugcggaacacaaacccacu

SEQ ID NO: 1879349 - RNA, 19 nt, Artificial Sequence
  Description of Artificial Sequence: Synthetic oligonucleotide
agugcccaugaacaacacu

SEQ ID NO: 1879350 - RNA, 19 nt, Artificial Sequence
  Description of Artificial Sequence: Synthetic oligonucleotide
gguacuguaggcgaagaga

SEQ ID NO: 1879351 - RNA, 19 nt, Artificial Sequence
  Description of Artificial Sequence: Synthetic oligonucleotide
ugaggguuccaguucuuuu

SEQ ID NO: 1879352 - RNA, 19 nt, Artificial Sequence
  Description of Artificial Sequence: Synthetic oligonucleotide
acaguucgucagaacgagc

SEQ ID NO: 1879353 - RNA, 19 nt, Artificial Sequence
  Description of Artificial Sequence: Synthetic oligonucleotide
guaagucuugccacauccc

SEQ ID NO: 1879354 - RNA, 19 nt, Artificial Sequence
  Description of Artificial Sequence: Synthetic oligonucleotide
ggcaaggcaaggucauacg

SEQ ID NO: 1879355 - RNA, 19 nt, Artificial Sequence
  Description of Artificial Sequence: Synthetic oligonucleotide
aaggucauacggggcagca

SEQ ID NO: 1879356 - RNA, 19 nt, Artificial Sequence
  Description of Artificial Sequence: Synthetic oligonucleotide
gggaguuguuugcaggaag

SEQ ID NO: 1879357 - RNA, 19 nt, Artificial Sequence
  Description of Artificial Sequence: Synthetic oligonucleotide
gucaaauggucgcuccuca

SEQ ID NO: 1879358 - RNA, 19 nt, Artificial Sequence
  Description of Artificial Sequence: Synthetic oligonucleotide
uaacuugcucacuuccauu

SEQ ID NO: 1879359 - RNA, 19 nt, Artificial Sequence
  Description of Artificial Sequence: Synthetic oligonucleotide
caccugagugcccaugaac

SEQ ID NO: 1879360 - RNA, 19 nt, Artificial Sequence
  Description of Artificial Sequence: Synthetic oligonucleotide
acagucuggugccguuggg

SEQ ID NO: 1879361 - RNA, 19 nt, Artificial Sequence
  Description of Artificial Sequence: Synthetic oligonucleotide
cacgggagcuggcugagac

SEQ ID NO: 1879362 - RNA, 19 nt, Artificial Sequence
  Description of Artificial Sequence: Synthetic oligonucleotide
ucaaauggucgcuccucau

SEQ ID NO: 1879363 - RNA, 19 nt, Artificial Sequence
  Description of Artificial Sequence: Synthetic oligonucleotide
cauacggggcagcacccgc

SEQ ID NO: 1879364 - RNA, 19 nt, Artificial Sequence
  Description of Artificial Sequence: Synthetic oligonucleotide
acucuggaugaaucacucu

SEQ ID NO: 1879365 - RNA, 19 nt, Artificial Sequence
  Description of Artificial Sequence: Synthetic oligonucleotide
ucgucagaacgagcaaacc

SEQ ID NO: 1879366 - RNA, 19 nt, Artificial Sequence
  Description of Artificial Sequence: Synthetic oligonucleotide
cugagugcccaugaacaac

SEQ ID NO: 1879367 - RNA, 19 nt, Artificial Sequence
  Description of Artificial Sequence: Synthetic oligonucleotide
cuuaacaauguacggcugu

SEQ ID NO: 1879368 - RNA, 19 nt, Artificial Sequence
  Description of Artificial Sequence: Synthetic oligonucleotide
gagggaauccgggcgcggg

SEQ ID NO: 1879369 - RNA, 19 nt, Artificial Sequence
  Description of Artificial Sequence: Synthetic oligonucleotide
aacugcaggcaaacuaaau

SEQ ID NO: 1879370 - RNA, 19 nt, Artificial Sequence
  Description of Artificial Sequence: Synthetic oligonucleotide
cagucuggugccguugggg

SEQ ID NO: 1879371 - RNA, 19 nt, Artificial Sequence
  Description of Artificial Sequence: Synthetic oligonucleotide
aucaccccuuuacaauaca

SEQ ID NO: 1879372 - RNA, 19 nt, Artificial Sequence
  Description of Artificial Sequence: Synthetic oligonucleotide
uucugauaucaccccuuua

SEQ ID NO: 1879373 - RNA, 19 nt, Artificial Sequence
  Description of Artificial Sequence: Synthetic oligonucleotide
cuacagacgugacuccuca

SEQ ID NO: 1879374 - RNA, 19 nt, Artificial Sequence
  Description of Artificial Sequence: Synthetic oligonucleotide
cugcagacgaccgucucug

SEQ ID NO: 1879375 - RNA, 19 nt, Artificial Sequence
  Description of Artificial Sequence: Synthetic oligonucleotide
gcuccaucauuuaacuugc

SEQ ID NO: 1879376 - RNA, 19 nt, Artificial Sequence
  Description of Artificial Sequence: Synthetic oligonucleotide
gccguuggggcuuaccacc

SEQ ID NO: 1879377 - RNA, 19 nt, Artificial Sequence
  Description of Artificial Sequence: Synthetic oligonucleotide
uguggguucgccggugccu

SEQ ID NO: 1879378 - RNA, 19 nt, Artificial Sequence
  Description of Artificial Sequence: Synthetic oligonucleotide
uggcuacagacgugacucc

SEQ ID NO: 1879379 - RNA, 19 nt, Artificial Sequence
  Description of Artificial Sequence: Synthetic oligonucleotide
uguaggcgaagagaccaau

SEQ ID NO: 1879380 - RNA, 19 nt, Artificial Sequence
  Description of Artificial Sequence: Synthetic oligonucleotide
auaaaccgacggucgcaca

SEQ ID NO: 1879381 - RNA, 19 nt, Artificial Sequence
  Description of Artificial Sequence: Synthetic oligonucleotide
uacggcuguucaacuguaa

SEQ ID NO: 1879382 - RNA, 19 nt, Artificial Sequence
  Description of Artificial Sequence: Synthetic oligonucleotide
gaacgagcaaaccuccuuu

SEQ ID NO: 1879383 - RNA, 19 nt, Artificial Sequence
  Description of Artificial Sequence: Synthetic oligonucleotide
cugugugcguucucacgug

SEQ ID NO: 1879384 - RNA, 19 nt, Artificial Sequence
  Description of Artificial Sequence: Synthetic oligonucleotide
acugggaagaugaguagua

SEQ ID NO: 1879385 - RNA, 19 nt, Artificial Sequence
  Description of Artificial Sequence: Synthetic oligonucleotide
augacggggcacaggcggc

SEQ ID NO: 1879386 - RNA, 19 nt, Artificial Sequence
  Description of Artificial Sequence: Synthetic oligonucleotide
aggucauacggggcagcac

SEQ ID NO: 1879387 - RNA, 19 nt, Artificial Sequence
  Description of Artificial Sequence: Synthetic oligonucleotide
caauuaaauuaaugagggu

SEQ ID NO: 1879388 - RNA, 19 nt, Artificial Sequence
  Description of Artificial Sequence: Synthetic oligonucleotide
gaacaucacggugcccuug

SEQ ID NO: 1879389 - RNA, 19 nt, Artificial Sequence
  Description of Artificial Sequence: Synthetic oligonucleotide
uacggggcagcacccgccu

SEQ ID NO: 1879390 - RNA, 19 nt, Artificial Sequence
  Description of Artificial Sequence: Synthetic oligonucleotide
auacuuguagauagacuua

SEQ ID NO: 1879391 - RNA, 19 nt, Artificial Sequence
  Description of Artificial Sequence: Synthetic oligonucleotide
cuggacaguucgucagaac

SEQ ID NO: 1879392 - RNA, 19 nt, Artificial Sequence
  Description of Artificial Sequence: Synthetic oligonucleotide
ccccuuaacaauguacggc

SEQ ID NO: 1879393 - RNA, 19 nt, Artificial Sequence
  Description of Artificial Sequence: Synthetic oligonucleotide
aacggggacacgggagcug

SEQ ID NO: 1879394 - RNA, 19 nt, Artificial Sequence
  Description of Artificial Sequence: Synthetic oligonucleotide
guucgucagaacgagcaaa

SEQ ID NO: 1879395 - RNA, 19 nt, Artificial Sequence
  Description of Artificial Sequence: Synthetic oligonucleotide
acggucgcacauaggacag

SEQ ID NO: 1879396 - RNA, 19 nt, Artificial Sequence
  Description of Artificial Sequence: Synthetic oligonucleotide
guuggggcuuaccaccgga

SEQ ID NO: 1879397 - RNA, 19 nt, Artificial Sequence
  Description of Artificial Sequence: Synthetic oligonucleotide
ugccaguuugggagcuucu

SEQ ID NO: 1879398 - RNA, 19 nt, Artificial Sequence
  Description of Artificial Sequence: Synthetic oligonucleotide
cacgugggccuucagguga

SEQ ID NO: 1879399 - RNA, 19 nt, Artificial Sequence
  Description of Artificial Sequence: Synthetic oligonucleotide
ggacaggcaaauuucuucu

SEQ ID NO: 1879400 - RNA, 19 nt, Artificial Sequence
  Description of Artificial Sequence: Synthetic oligonucleotide
ggucgcacauaggacaggc

SEQ ID NO: 1879401 - RNA, 19 nt, Artificial Sequence
  Description of Artificial Sequence: Synthetic oligonucleotide
cugccgaaggagggaaucc

SEQ ID NO: 1879402 - RNA, 19 nt, Artificial Sequence
  Description of Artificial Sequence: Synthetic oligonucleotide
gugugcguucucacguggg

SEQ ID NO: 1879403 - RNA, 19 nt, Artificial Sequence
  Description of Artificial Sequence: Synthetic oligonucleotide
ggaaggcaaggcaagguca

SEQ ID NO: 1879404 - RNA, 19 nt, Artificial Sequence
  Description of Artificial Sequence: Synthetic oligonucleotide
gggagugacucuugcugcc

SEQ ID NO: 1879405 - RNA, 19 nt, Artificial Sequence
  Description of Artificial Sequence: Synthetic oligonucleotide
ccgaaggagggaauccggg

SEQ ID NO: 1879406 - RNA, 19 nt, Artificial Sequence
  Description of Artificial Sequence: Synthetic oligonucleotide
gcagacgaccgucucugag

SEQ ID NO: 1879407 - RNA, 19 nt, Artificial Sequence
  Description of Artificial Sequence: Synthetic oligonucleotide
agcugcacuuccaagcaau

SEQ ID NO: 1879408 - RNA, 19 nt, Artificial Sequence
  Description of Artificial Sequence: Synthetic oligonucleotide
uugccaguuugggagcuuc

SEQ ID NO: 1879409 - RNA, 19 nt, Artificial Sequence
  Description of Artificial Sequence: Synthetic oligonucleotide
caaauggucgcuccucaua

SEQ ID NO: 1879410 - RNA, 19 nt, Artificial Sequence
  Description of Artificial Sequence: Synthetic oligonucleotide
gugcguucucacgugggcc

SEQ ID NO: 1879411 - RNA, 19 nt, Artificial Sequence
  Description of Artificial Sequence: Synthetic oligonucleotide
ggguacuguaggcgaagag

SEQ ID NO: 1879412 - RNA, 19 nt, Artificial Sequence
  Description of Artificial Sequence: Synthetic oligonucleotide
aggagggaauccgggcgcg

SEQ ID NO: 1879413 - RNA, 19 nt, Artificial Sequence
  Description of Artificial Sequence: Synthetic oligonucleotide
agaugacggggcacaggcg

SEQ ID NO: 1879414 - RNA, 19 nt, Artificial Sequence
  Description of Artificial Sequence: Synthetic oligonucleotide
cucugcacgacgggcuggg

SEQ ID NO: 1879415 - RNA, 19 nt, Artificial Sequence
  Description of Artificial Sequence: Synthetic oligonucleotide
aaaccgacggucgcacaua

SEQ ID NO: 1879416 - RNA, 19 nt, Artificial Sequence
  Description of Artificial Sequence: Synthetic oligonucleotide
aaaccuccuuucacagccu

SEQ ID NO: 1879417 - RNA, 19 nt, Artificial Sequence
  Description of Artificial Sequence: Synthetic oligonucleotide
gucauacggggcagcaccc

SEQ ID NO: 1879418 - RNA, 19 nt, Artificial Sequence
  Description of Artificial Sequence: Synthetic oligonucleotide
gacugggaagaugaguagu

SEQ ID NO: 1879419 - RNA, 19 nt, Artificial Sequence
  Description of Artificial Sequence: Synthetic oligonucleotide
caccccuuuacaauacaua

SEQ ID NO: 1879420 - RNA, 19 nt, Artificial Sequence
  Description of Artificial Sequence: Synthetic oligonucleotide
ggagugacucuugcugccg

SEQ ID NO: 1879421 - RNA, 19 nt, Artificial Sequence
  Description of Artificial Sequence: Synthetic oligonucleotide
caaggucauacggggcagc

SEQ ID NO: 1879422 - RNA, 19 nt, Artificial Sequence
  Description of Artificial Sequence: Synthetic oligonucleotide
uugcugccgaaggagggaa

SEQ ID NO: 1879423 - RNA, 19 nt, Artificial Sequence
  Description of Artificial Sequence: Synthetic oligonucleotide
accgucucugaggaaggca

SEQ ID NO: 1879424 - RNA, 19 nt, Artificial Sequence
  Description of Artificial Sequence: Synthetic oligonucleotide
ccgacggucgcacauagga

SEQ ID NO: 1879425 - RNA, 19 nt, Artificial Sequence
  Description of Artificial Sequence: Synthetic oligonucleotide
cacaagggaguuguuugca

SEQ ID NO: 1879426 - RNA, 19 nt, Artificial Sequence
  Description of Artificial Sequence: Synthetic oligonucleotide
uggcuccaucauuuaacuu

SEQ ID NO: 1879427 - RNA, 19 nt, Artificial Sequence
  Description of Artificial Sequence: Synthetic oligonucleotide
gcuguucaacuguaaaaua

SEQ ID NO: 1879428 - RNA, 19 nt, Artificial Sequence
  Description of Artificial Sequence: Synthetic oligonucleotide
ggacaguucgucagaacga

SEQ ID NO: 1879429 - RNA, 19 nt, Artificial Sequence
  Description of Artificial Sequence: Synthetic oligonucleotide
acuuguagauagacuuaau

SEQ ID NO: 1879430 - RNA, 19 nt, Artificial Sequence
  Description of Artificial Sequence: Synthetic oligonucleotide
ugcagacgaccgucucuga

SEQ ID NO: 1879431 - RNA, 19 nt, Artificial Sequence
  Description of Artificial Sequence: Synthetic oligonucleotide
ccaauacugacuucugcaa

SEQ ID NO: 1879432 - RNA, 19 nt, Artificial Sequence
  Description of Artificial Sequence: Synthetic oligonucleotide
gcagaauaucuuaagucua

SEQ ID NO: 1879433 - RNA, 19 nt, Artificial Sequence
  Description of Artificial Sequence: Synthetic oligonucleotide
ggcuguucaacuguaaaau

SEQ ID NO: 1879434 - RNA, 19 nt, Artificial Sequence
  Description of Artificial Sequence: Synthetic oligonucleotide
aaugaggguuccaguucuu

SEQ ID NO: 1879435 - RNA, 19 nt, Artificial Sequence
  Description of Artificial Sequence: Synthetic oligonucleotide
cccuuaacaauguacggcu

SEQ ID NO: 1879436 - RNA, 19 nt, Artificial Sequence
  Description of Artificial Sequence: Synthetic oligonucleotide
gaaggcaaggcaaggucau

SEQ ID NO: 1879437 - RNA, 19 nt, Artificial Sequence
  Description of Artificial Sequence: Synthetic oligonucleotide
guggguucgccggugccug

SEQ ID NO: 1879438 - RNA, 19 nt, Artificial Sequence
  Description of Artificial Sequence: Synthetic oligonucleotide
cuugcugccgaaggaggga

SEQ ID NO: 1879439 - RNA, 19 nt, Artificial Sequence
  Description of Artificial Sequence: Synthetic oligonucleotide
cuggggcacaacgaacauc

SEQ ID NO: 1879440 - RNA, 19 nt, Artificial Sequence
  Description of Artificial Sequence: Synthetic oligonucleotide
cugacagguggcgccgggc

SEQ ID NO: 1879441 - RNA, 19 nt, Artificial Sequence
  Description of Artificial Sequence: Synthetic oligonucleotide
gugcccuugggcaccugag

SEQ ID NO: 1879442 - RNA, 19 nt, Artificial Sequence
  Description of Artificial Sequence: Synthetic oligonucleotide
gagaccugcagacgaccgu

SEQ ID NO: 1879443 - RNA, 19 nt, Artificial Sequence
  Description of Artificial Sequence: Synthetic oligonucleotide
cacggugcccuugggcacc

SEQ ID NO: 1879444 - RNA, 19 nt, Artificial Sequence
  Description of Artificial Sequence: Synthetic oligonucleotide
cacuuccaagcaauuaaau

SEQ ID NO: 1879445 - RNA, 19 nt, Artificial Sequence
  Description of Artificial Sequence: Synthetic oligonucleotide
agggaguuguuugcaggaa

SEQ ID NO: 1879446 - RNA, 19 nt, Artificial Sequence
  Description of Artificial Sequence: Synthetic oligonucleotide
augaggguuccaguucuuu

SEQ ID NO: 1879447 - RNA, 19 nt, Artificial Sequence
  Description of Artificial Sequence: Synthetic oligonucleotide
gggacaacuguggucacaa

SEQ ID NO: 1879448 - RNA, 19 nt, Artificial Sequence
  Description of Artificial Sequence: Synthetic oligonucleotide
gguuuggggcucugcacga

SEQ ID NO: 1879449 - RNA, 19 nt, Artificial Sequence
  Description of Artificial Sequence: Synthetic oligonucleotide
gaaucacucuggggaguga

SEQ ID NO: 1879450 - RNA, 19 nt, Artificial Sequence
  Description of Artificial Sequence: Synthetic oligonucleotide
gagugcccaugaacaacac

SEQ ID NO: 1879451 - RNA, 19 nt, Artificial Sequence
  Description of Artificial Sequence: Synthetic oligonucleotide
gcaaggucauacggggcag

SEQ ID NO: 1879452 - RNA, 19 nt, Artificial Sequence
  Description of Artificial Sequence: Synthetic oligonucleotide
cuccucauaaaccgacggu

SEQ ID NO: 1879453 - RNA, 19 nt, Artificial Sequence
  Description of Artificial Sequence: Synthetic oligonucleotide
acaucccggguggcuacag

SEQ ID NO: 1879454 - RNA, 19 nt, Artificial Sequence
  Description of Artificial Sequence: Synthetic oligonucleotide
ggacaacuguggucacaag

SEQ ID NO: 1879455 - RNA, 19 nt, Artificial Sequence
  Description of Artificial Sequence: Synthetic oligonucleotide
guaggcgaagagaccaaua

SEQ ID NO: 1879456 - RNA, 19 nt, Artificial Sequence
  Description of Artificial Sequence: Synthetic oligonucleotide
agucuacagaaaacacauu

SEQ ID NO: 1879457 - RNA, 19 nt, Artificial Sequence
  Description of Artificial Sequence: Synthetic oligonucleotide
guucgccggugccuggaca

SEQ ID NO: 1879458 - RNA, 19 nt, Artificial Sequence
  Description of Artificial Sequence: Synthetic oligonucleotide
ccggugccuggacaguucg

SEQ ID NO: 1879459 - RNA, 19 nt, Artificial Sequence
  Description of Artificial Sequence: Synthetic oligonucleotide
cuguaggcgaagagaccaa

SEQ ID NO: 1879460 - RNA, 19 nt, Artificial Sequence
  Description of Artificial Sequence: Synthetic oligonucleotide
cugggcagaugacggggca

SEQ ID NO: 1879461 - RNA, 19 nt, Artificial Sequence
  Description of Artificial Sequence: Synthetic oligonucleotide
acgugggccuucaggugag

SEQ ID NO: 1879462 - RNA, 19 nt, Artificial Sequence
  Description of Artificial Sequence: Synthetic oligonucleotide
ccgaugacagaaagccauc

SEQ ID NO: 1879463 - RNA, 19 nt, Artificial Sequence
  Description of Artificial Sequence: Synthetic oligonucleotide
cugcaacggggacacggga

SEQ ID NO: 1879464 - RNA, 19 nt, Artificial Sequence
  Description of Artificial Sequence: Synthetic oligonucleotide
gguggcuacagacgugacu

SEQ ID NO: 1879465 - RNA, 19 nt, Artificial Sequence
  Description of Artificial Sequence: Synthetic oligonucleotide
accgacggucgcacauagg

SEQ ID NO: 1879466 - RNA, 19 nt, Artificial Sequence
  Description of Artificial Sequence: Synthetic oligonucleotide
gcacuuccaagcaauuaaa

SEQ ID NO: 1879467 - RNA, 19 nt, Artificial Sequence
  Description of Artificial Sequence: Synthetic oligonucleotide
uggucacaagggaguuguu

SEQ ID NO: 1879468 - RNA, 19 nt, Artificial Sequence
  Description of Artificial Sequence: Synthetic oligonucleotide
gguggagugguggggacaa

SEQ ID NO: 1879469 - RNA, 19 nt, Artificial Sequence
  Description of Artificial Sequence: Synthetic oligonucleotide
ccgucucugaggaaggcaa

SEQ ID NO: 1879470 - RNA, 19 nt, Artificial Sequence
  Description of Artificial Sequence: Synthetic oligonucleotide
cugcacuuccaagcaauua

SEQ ID NO: 1879471 - RNA, 19 nt, Artificial Sequence
  Description of Artificial Sequence: Synthetic oligonucleotide
guucucacgugggccuuca

SEQ ID NO: 1879472 - RNA, 19 nt, Artificial Sequence
  Description of Artificial Sequence: Synthetic oligonucleotide
gggcgugcuuggucaaaug

SEQ ID NO: 1879473 - RNA, 19 nt, Artificial Sequence
  Description of Artificial Sequence: Synthetic oligonucleotide
gcuacagacgugacuccuc

SEQ ID NO: 1879474 - RNA, 19 nt, Artificial Sequence
  Description of Artificial Sequence: Synthetic oligonucleotide
cgaccgucucugaggaagg

SEQ ID NO: 1879475 - RNA, 19 nt, Artificial Sequence
  Description of Artificial Sequence: Synthetic oligonucleotide
gucgcacauaggacaggca

SEQ ID NO: 1879476 - RNA, 19 nt, Artificial Sequence
  Description of Artificial Sequence: Synthetic oligonucleotide
ccugugugcguucucacgu

SEQ ID NO: 1879477 - RNA, 19 nt, Artificial Sequence
  Description of Artificial Sequence: Synthetic oligonucleotide
cauccacagcugacuggga

SEQ ID NO: 1879478 - RNA, 19 nt, Artificial Sequence
  Description of Artificial Sequence: Synthetic oligonucleotide
ggagggaauccgggcgcgg

SEQ ID NO: 1879479 - RNA, 19 nt, Artificial Sequence
  Description of Artificial Sequence: Synthetic oligonucleotide
guacggcuguucaacugua

SEQ ID NO: 1879480 - RNA, 19 nt, Artificial Sequence
  Description of Artificial Sequence: Synthetic oligonucleotide
gcacauaggacaggcaaau

SEQ ID NO: 1879481 - RNA, 19 nt, Artificial Sequence
  Description of Artificial Sequence: Synthetic oligonucleotide
gggcagaugacggggcaca

SEQ ID NO: 1879482 - RNA, 19 nt, Artificial Sequence
  Description of Artificial Sequence: Synthetic oligonucleotide
gacgaccgucucugaggaa

SEQ ID NO: 1879483 - RNA, 19 nt, Artificial Sequence
  Description of Artificial Sequence: Synthetic oligonucleotide
cgucagaacgagcaaaccu

SEQ ID NO: 1879484 - RNA, 19 nt, Artificial Sequence
  Description of Artificial Sequence: Synthetic oligonucleotide
cuucugcaacggggacacg

SEQ ID NO: 1879485 - RNA, 19 nt, Artificial Sequence
  Description of Artificial Sequence: Synthetic oligonucleotide
cgacggucgcacauaggac

SEQ ID NO: 1879486 - RNA, 19 nt, Artificial Sequence
  Description of Artificial Sequence: Synthetic oligonucleotide
caucccggguggcuacaga

SEQ ID NO: 1879487 - RNA, 19 nt, Artificial Sequence
  Description of Artificial Sequence: Synthetic oligonucleotide
ccacaucccggguggcuac

SEQ ID NO: 1879488 - RNA, 19 nt, Artificial Sequence
  Description of Artificial Sequence: Synthetic oligonucleotide
gguucgccggugccuggac

SEQ ID NO: 1879489 - RNA, 19 nt, Artificial Sequence
  Description of Artificial Sequence: Synthetic oligonucleotide
caccggagguuuggggcuc

SEQ ID NO: 1879490 - RNA, 19 nt, Artificial Sequence
  Description of Artificial Sequence: Synthetic oligonucleotide
ccuuuaccgaugacagaaa

SEQ ID NO: 1879491 - RNA, 19 nt, Artificial Sequence
  Description of Artificial Sequence: Synthetic oligonucleotide
gcgugcuuggucaaauggu

SEQ ID NO: 1879492 - RNA, 19 nt, Artificial Sequence
  Description of Artificial Sequence: Synthetic oligonucleotide
gggguacuguaggcgaaga

SEQ ID NO: 1879493 - RNA, 19 nt, Artificial Sequence
  Description of Artificial Sequence: Synthetic oligonucleotide
gaccugcagacgaccgucu

SEQ ID NO: 1879494 - RNA, 19 nt, Artificial Sequence
  Description of Artificial Sequence: Synthetic oligonucleotide
accggagguuuggggcucu

SEQ ID NO: 1879495 - RNA, 19 nt, Artificial Sequence
  Description of Artificial Sequence: Synthetic oligonucleotide
cuccaucauuuaacuugcu

SEQ ID NO: 1879496 - RNA, 19 nt, Artificial Sequence
  Description of Artificial Sequence: Synthetic oligonucleotide
cgcacauaggacaggcaaa

SEQ ID NO: 1879497 - RNA, 19 nt, Artificial Sequence
  Description of Artificial Sequence: Synthetic oligonucleotide
cgccuguguggguucgccg

SEQ ID NO: 1879498 - RNA, 19 nt, Artificial Sequence
  Description of Artificial Sequence: Synthetic oligonucleotide
ggcuacagacgugacuccu

SEQ ID NO: 1879499 - RNA, 19 nt, Artificial Sequence
  Description of Artificial Sequence: Synthetic oligonucleotide
gggagcuucuuggcugaca

SEQ ID NO: 1879500 - RNA, 19 nt, Artificial Sequence
  Description of Artificial Sequence: Synthetic oligonucleotide
ggggacaacuguggucaca

SEQ ID NO: 1879501 - RNA, 19 nt, Artificial Sequence
  Description of Artificial Sequence: Synthetic oligonucleotide
caacacuggugggcagaca

SEQ ID NO: 1879502 - RNA, 19 nt, Artificial Sequence
  Description of Artificial Sequence: Synthetic oligonucleotide
gcaccugagugcccaugaa

SEQ ID NO: 1879503 - RNA, 19 nt, Artificial Sequence
  Description of Artificial Sequence: Synthetic oligonucleotide
gucuugccacaucccgggu

SEQ ID NO: 1879504 - RNA, 19 nt, Artificial Sequence
  Description of Artificial Sequence: Synthetic oligonucleotide
ggguggagugguggggaca

SEQ ID NO: 1879505 - RNA, 19 nt, Artificial Sequence
  Description of Artificial Sequence: Synthetic oligonucleotide
guggagugguggggacaac

SEQ ID NO: 1879506 - RNA, 19 nt, Artificial Sequence
  Description of Artificial Sequence: Synthetic oligonucleotide
gcggaacacaaacccacuu

SEQ ID NO: 1879507 - RNA, 19 nt, Artificial Sequence
  Description of Artificial Sequence: Synthetic oligonucleotide
ccggguggcuacagacgug

SEQ ID NO: 1879508 - RNA, 19 nt, Artificial Sequence
  Description of Artificial Sequence: Synthetic oligonucleotide
cacaucccggguggcuaca

SEQ ID NO: 1879509 - RNA, 19 nt, Artificial Sequence
  Description of Artificial Sequence: Synthetic oligonucleotide
ccuggacaguucgucagaa

SEQ ID NO: 1879510 - RNA, 19 nt, Artificial Sequence
  Description of Artificial Sequence: Synthetic oligonucleotide
acggggcagcacccgccuu

SEQ ID NO: 1879511 - RNA, 19 nt, Artificial Sequence
  Description of Artificial Sequence: Synthetic oligonucleotide
cccggguggcuacagacgu

SEQ ID NO: 1879512 - RNA, 19 nt, Artificial Sequence
  Description of Artificial Sequence: Synthetic oligonucleotide
ccugcagacgaccgucucu

SEQ ID NO: 1879513 - RNA, 19 nt, Artificial Sequence
  Description of Artificial Sequence: Synthetic oligonucleotide
cuguggucacaagggaguu

SEQ ID NO: 1879514 - RNA, 19 nt, Artificial Sequence
  Description of Artificial Sequence: Synthetic oligonucleotide
ggguggcuacagacgugac

SEQ ID NO: 1879515 - RNA, 19 nt, Artificial Sequence
  Description of Artificial Sequence: Synthetic oligonucleotide
ccaccggagguuuggggcu

SEQ ID NO: 1879516 - RNA, 19 nt, Artificial Sequence
  Description of Artificial Sequence: Synthetic oligonucleotide
gcuacagcugaagggcuuu

SEQ ID NO: 1879517 - RNA, 19 nt, Artificial Sequence
  Description of Artificial Sequence: Synthetic oligonucleotide
ggguucgccggugccugga

SEQ ID NO: 1879518 - RNA, 19 nt, Artificial Sequence
  Description of Artificial Sequence: Synthetic oligonucleotide
gggcuuaccaccggagguu

SEQ ID NO: 1879519 - RNA, 19 nt, Artificial Sequence
  Description of Artificial Sequence: Synthetic oligonucleotide
cgggcuggggcacaacgaa

SEQ ID NO: 1879520 - RNA, 19 nt, Artificial Sequence
  Description of Artificial Sequence: Synthetic oligonucleotide
gcacgacgggcuggggcac

SEQ ID NO: 1879521 - RNA, 19 nt, Artificial Sequence
  Description of Artificial Sequence: Synthetic oligonucleotide
gggacagucuggugccguu

SEQ ID NO: 1879522 - RNA, 19 nt, Artificial Sequence
  Description of Artificial Sequence: Synthetic oligonucleotide
cggucgcacauaggacagg

SEQ ID NO: 1879523 - RNA, 19 nt, Artificial Sequence
  Description of Artificial Sequence: Synthetic oligonucleotide
gacggggcacaggcggcau

SEQ ID NO: 1879524 - RNA, 19 nt, Artificial Sequence
  Description of Artificial Sequence: Synthetic oligonucleotide
ggggacagucuggugccgu

SEQ ID NO: 1879525 - RNA, 19 nt, Artificial Sequence
  Description of Artificial Sequence: Synthetic oligonucleotide
ggcuuaccaccggagguuu

SEQ ID NO: 1879526 - RNA, 19 nt, Artificial Sequence
  Description of Artificial Sequence: Synthetic oligonucleotide
cggggacacgggagcuggc

SEQ ID NO: 1879527 - RNA, 19 nt, Artificial Sequence
  Description of Artificial Sequence: Synthetic oligonucleotide
ccggagguuuggggcucug

SEQ ID NO: 1879528 - RNA, 19 nt, Artificial Sequence
  Description of Artificial Sequence: Synthetic oligonucleotide
gcguucucacgugggccuu

SEQ ID NO: 1879529 - RNA, 19 nt, Artificial Sequence
  Description of Artificial Sequence: Synthetic oligonucleotide
ggggaccaucugggcagau

SEQ ID NO: 1879530 - RNA, 19 nt, Artificial Sequence
  Description of Artificial Sequence: Synthetic oligonucleotide
cgggcgugcuuggucaaau

SEQ ID NO: 1879531 - RNA, 19 nt, Artificial Sequence
  Description of Artificial Sequence: Synthetic oligonucleotide
uaaauagccacauauaccg

SEQ ID NO: 1879532 - RNA, 19 nt, Artificial Sequence
  Description of Artificial Sequence: Synthetic oligonucleotide
uuaacagacagacuuagcg

SEQ ID NO: 1879533 - RNA, 19 nt, Artificial Sequence
  Description of Artificial Sequence: Synthetic oligonucleotide
uuuaaaaucguuuuacucu

SEQ ID NO: 1879534 - RNA, 19 nt, Artificial Sequence
  Description of Artificial Sequence: Synthetic oligonucleotide
aaaauagauguagagcugc

SEQ ID NO: 1879535 - RNA, 19 nt, Artificial Sequence
  Description of Artificial Sequence: Synthetic oligonucleotide
aaaucuuaaagccagggaa

SEQ ID NO: 1879536 - RNA, 19 nt, Artificial Sequence
  Description of Artificial Sequence: Synthetic oligonucleotide
aaucguuuuacucuguuca

SEQ ID NO: 1879537 - RNA, 19 nt, Artificial Sequence
  Description of Artificial Sequence: Synthetic oligonucleotide
aauaccggucccuacuucc

SEQ ID NO: 1879538 - RNA, 19 nt, Artificial Sequence
  Description of Artificial Sequence: Synthetic oligonucleotide
aacacaagguugcugaauc

SEQ ID NO: 1879539 - RNA, 19 nt, Artificial Sequence
  Description of Artificial Sequence: Synthetic oligonucleotide
uuuuggauaacuguggugc

SEQ ID NO: 1879540 - RNA, 19 nt, Artificial Sequence
  Description of Artificial Sequence: Synthetic oligonucleotide
uaagucacauuuaaauggg

SEQ ID NO: 1879541 - RNA, 19 nt, Artificial Sequence
  Description of Artificial Sequence: Synthetic oligonucleotide
auauaccgaaccuauacac

SEQ ID NO: 1879542 - RNA, 19 nt, Artificial Sequence
  Description of Artificial Sequence: Synthetic oligonucleotide
auaacuaucaguuccuuca

SEQ ID NO: 1879543 - RNA, 19 nt, Artificial Sequence
  Description of Artificial Sequence: Synthetic oligonucleotide
auagauguagagcugcgac

SEQ ID NO: 1879544 - RNA, 19 nt, Artificial Sequence
  Description of Artificial Sequence: Synthetic oligonucleotide
augauaacaugcucaaugg

SEQ ID NO: 1879545 - RNA, 19 nt, Artificial Sequence
  Description of Artificial Sequence: Synthetic oligonucleotide
ugugauaauauaggcaagg

SEQ ID NO: 1879546 - RNA, 19 nt, Artificial Sequence
  Description of Artificial Sequence: Synthetic oligonucleotide
auaacuguggugcugaagu

SEQ ID NO: 1879547 - RNA, 19 nt, Artificial Sequence
  Description of Artificial Sequence: Synthetic oligonucleotide
ucacccaucagcauuuuag

SEQ ID NO: 1879548 - RNA, 19 nt, Artificial Sequence
  Description of Artificial Sequence: Synthetic oligonucleotide
aguaacacaagguugcuga

SEQ ID NO: 1879549 - RNA, 19 nt, Artificial Sequence
  Description of Artificial Sequence: Synthetic oligonucleotide
auaauauaggcaagggugc

SEQ ID NO: 1879550 - RNA, 19 nt, Artificial Sequence
  Description of Artificial Sequence: Synthetic oligonucleotide
gagaaauagucuuacagga

SEQ ID NO: 1879551 - RNA, 19 nt, Artificial Sequence
  Description of Artificial Sequence: Synthetic oligonucleotide
uaaccuauagaauucuucu

SEQ ID NO: 1879552 - RNA, 19 nt, Artificial Sequence
  Description of Artificial Sequence: Synthetic oligonucleotide
gaaauagucuuacaggaca

SEQ ID NO: 1879553 - RNA, 19 nt, Artificial Sequence
  Description of Artificial Sequence: Synthetic oligonucleotide
auagucuuacaggacaucc

SEQ ID NO: 1879554 - RNA, 19 nt, Artificial Sequence
  Description of Artificial Sequence: Synthetic oligonucleotide
uucaugguaauguucaaac

SEQ ID NO: 1879555 - RNA, 19 nt, Artificial Sequence
  Description of Artificial Sequence: Synthetic oligonucleotide
ucucgcguugcuaagaggc

SEQ ID NO: 1879556 - RNA, 19 nt, Artificial Sequence
  Description of Artificial Sequence: Synthetic oligonucleotide
uucuuuaaccuauagaauu

SEQ ID NO: 1879557 - RNA, 19 nt, Artificial Sequence
  Description of Artificial Sequence: Synthetic oligonucleotide
ucaggaucugucgaaaucg

SEQ ID NO: 1879558 - RNA, 19 nt, Artificial Sequence
  Description of Artificial Sequence: Synthetic oligonucleotide
cauaagucacauuuaaaug

SEQ ID NO: 1879559 - RNA, 19 nt, Artificial Sequence
  Description of Artificial Sequence: Synthetic oligonucleotide
uguucguuaucuuaauggc

SEQ ID NO: 1879560 - RNA, 19 nt, Artificial Sequence
  Description of Artificial Sequence: Synthetic oligonucleotide
gacgggaagauuucaaucc

SEQ ID NO: 1879561 - RNA, 19 nt, Artificial Sequence
  Description of Artificial Sequence: Synthetic oligonucleotide
uuuaaccgagcuuucauga

SEQ ID NO: 1879562 - RNA, 19 nt, Artificial Sequence
  Description of Artificial Sequence: Synthetic oligonucleotide
uggguuaacacggagcugg

SEQ ID NO: 1879563 - RNA, 19 nt, Artificial Sequence
  Description of Artificial Sequence: Synthetic oligonucleotide
aaucgugacugcaacaccg

SEQ ID NO: 1879564 - RNA, 19 nt, Artificial Sequence
  Description of Artificial Sequence: Synthetic oligonucleotide
agcuaaaccagucaauuca

SEQ ID NO: 1879565 - RNA, 19 nt, Artificial Sequence
  Description of Artificial Sequence: Synthetic oligonucleotide
ucccgauaaaucuuaaagc

SEQ ID NO: 1879566 - RNA, 19 nt, Artificial Sequence
  Description of Artificial Sequence: Synthetic oligonucleotide
uuaaccuauagaauucuuc

SEQ ID NO: 1879567 - RNA, 19 nt, Artificial Sequence
  Description of Artificial Sequence: Synthetic oligonucleotide
uaaaucuuaaagccaggga

SEQ ID NO: 1879568 - RNA, 19 nt, Artificial Sequence
  Description of Artificial Sequence: Synthetic oligonucleotide
auaaaucuuaaagccaggg

SEQ ID NO: 1879569 - RNA, 19 nt, Artificial Sequence
  Description of Artificial Sequence: Synthetic oligonucleotide
uugcccgacauccuaacgg

SEQ ID NO: 1879570 - RNA, 19 nt, Artificial Sequence
  Description of Artificial Sequence: Synthetic oligonucleotide
caaugcaggagaaauaguc

SEQ ID NO: 1879571 - RNA, 19 nt, Artificial Sequence
  Description of Artificial Sequence: Synthetic oligonucleotide
gaagauuucaauccggucu

SEQ ID NO: 1879572 - RNA, 19 nt, Artificial Sequence
  Description of Artificial Sequence: Synthetic oligonucleotide
aauagccacauauaccgaa

SEQ ID NO: 1879573 - RNA, 19 nt, Artificial Sequence
  Description of Artificial Sequence: Synthetic oligonucleotide
gauaacaugcucaauggca

SEQ ID NO: 1879574 - RNA, 19 nt, Artificial Sequence
  Description of Artificial Sequence: Synthetic oligonucleotide
uuacaggacaucccgauaa

SEQ ID NO: 1879575 - RNA, 19 nt, Artificial Sequence
  Description of Artificial Sequence: Synthetic oligonucleotide
uuuuaaccgagcuuucaug

SEQ ID NO: 1879576 - RNA, 19 nt, Artificial Sequence
  Description of Artificial Sequence: Synthetic oligonucleotide
ugguaauguucaaacacug

SEQ ID NO: 1879577 - RNA, 19 nt, Artificial Sequence
  Description of Artificial Sequence: Synthetic oligonucleotide
aggacaucccgauaaaucu

SEQ ID NO: 1879578 - RNA, 19 nt, Artificial Sequence
  Description of Artificial Sequence: Synthetic oligonucleotide
uucguuaucuuaauggcuu

SEQ ID NO: 1879579 - RNA, 19 nt, Artificial Sequence
  Description of Artificial Sequence: Synthetic oligonucleotide
ugauaacaugcucaauggc

SEQ ID NO: 1879580 - RNA, 19 nt, Artificial Sequence
  Description of Artificial Sequence: Synthetic oligonucleotide
uucauaacuaucaguuccu

SEQ ID NO: 1879581 - RNA, 19 nt, Artificial Sequence
  Description of Artificial Sequence: Synthetic oligonucleotide
aacggugacuguucggcuc

SEQ ID NO: 1879582 - RNA, 19 nt, Artificial Sequence
  Description of Artificial Sequence: Synthetic oligonucleotide
gaucugucgaaaucgaaga

SEQ ID NO: 1879583 - RNA, 19 nt, Artificial Sequence
  Description of Artificial Sequence: Synthetic oligonucleotide
aauccggggaaugauaaca

SEQ ID NO: 1879584 - RNA, 19 nt, Artificial Sequence
  Description of Artificial Sequence: Synthetic oligonucleotide
uucuuaugccaaaauaaau

SEQ ID NO: 1879585 - RNA, 19 nt, Artificial Sequence
  Description of Artificial Sequence: Synthetic oligonucleotide
auuuaaaugggcagaacug

SEQ ID NO: 1879586 - RNA, 19 nt, Artificial Sequence
  Description of Artificial Sequence: Synthetic oligonucleotide
uuacucgaacagcaggucc

SEQ ID NO: 1879587 - RNA, 19 nt, Artificial Sequence
  Description of Artificial Sequence: Synthetic oligonucleotide
uaacagacagacuuagcgu

SEQ ID NO: 1879588 - RNA, 19 nt, Artificial Sequence
  Description of Artificial Sequence: Synthetic oligonucleotide
aaccgagcuuucaugaugg

SEQ ID NO: 1879589 - RNA, 19 nt, Artificial Sequence
  Description of Artificial Sequence: Synthetic oligonucleotide
uaauguucaaacacuggua

SEQ ID NO: 1879590 - RNA, 19 nt, Artificial Sequence
  Description of Artificial Sequence: Synthetic oligonucleotide
uguagagcugcgaccacag

SEQ ID NO: 1879591 - RNA, 19 nt, Artificial Sequence
  Description of Artificial Sequence: Synthetic oligonucleotide
aaucgaagaguuaaggcau

SEQ ID NO: 1879592 - RNA, 19 nt, Artificial Sequence
  Description of Artificial Sequence: Synthetic oligonucleotide
acagacuuagcgugcaaag

SEQ ID NO: 1879593 - RNA, 19 nt, Artificial Sequence
  Description of Artificial Sequence: Synthetic oligonucleotide
agguugcugaaucacaaug

SEQ ID NO: 1879594 - RNA, 19 nt, Artificial Sequence
  Description of Artificial Sequence: Synthetic oligonucleotide
uaaccgagcuuucaugaug

SEQ ID NO: 1879595 - RNA, 19 nt, Artificial Sequence
  Description of Artificial Sequence: Synthetic oligonucleotide
aaugcaggagaaauagucu

SEQ ID NO: 1879596 - RNA, 19 nt, Artificial Sequence
  Description of Artificial Sequence: Synthetic oligonucleotide
aaauagauguagagcugcg

SEQ ID NO: 1879597 - RNA, 19 nt, Artificial Sequence
  Description of Artificial Sequence: Synthetic oligonucleotide
uucaugauggucugugcca

SEQ ID NO: 1879598 - RNA, 19 nt, Artificial Sequence
  Description of Artificial Sequence: Synthetic oligonucleotide
gucaauucauaacuaucag

SEQ ID NO: 1879599 - RNA, 19 nt, Artificial Sequence
  Description of Artificial Sequence: Synthetic oligonucleotide
ucaauccggggaaugauaa

SEQ ID NO: 1879600 - RNA, 19 nt, Artificial Sequence
  Description of Artificial Sequence: Synthetic oligonucleotide
aguuccacugcuuuggcau

SEQ ID NO: 1879601 - RNA, 19 nt, Artificial Sequence
  Description of Artificial Sequence: Synthetic oligonucleotide
agcucugugauaauauagg

SEQ ID NO: 1879602 - RNA, 19 nt, Artificial Sequence
  Description of Artificial Sequence: Synthetic oligonucleotide
cuaacggugacuguucggc

SEQ ID NO: 1879603 - RNA, 19 nt, Artificial Sequence
  Description of Artificial Sequence: Synthetic oligonucleotide
gauaaaucuuaaagccagg

SEQ ID NO: 1879604 - RNA, 19 nt, Artificial Sequence
  Description of Artificial Sequence: Synthetic oligonucleotide
uagauguagagcugcgacc

SEQ ID NO: 1879605 - RNA, 19 nt, Artificial Sequence
  Description of Artificial Sequence: Synthetic oligonucleotide
gcauuuacacgccuguucg

SEQ ID NO: 1879606 - RNA, 19 nt, Artificial Sequence
  Description of Artificial Sequence: Synthetic oligonucleotide
agaaauagucuuacaggac

SEQ ID NO: 1879607 - RNA, 19 nt, Artificial Sequence
  Description of Artificial Sequence: Synthetic oligonucleotide
auuuuggauaacuguggug

SEQ ID NO: 1879608 - RNA, 19 nt, Artificial Sequence
  Description of Artificial Sequence: Synthetic oligonucleotide
acgggaagauuucaauccg

SEQ ID NO: 1879609 - RNA, 19 nt, Artificial Sequence
  Description of Artificial Sequence: Synthetic oligonucleotide
ucaugguaauguucaaaca

SEQ ID NO: 1879610 - RNA, 19 nt, Artificial Sequence
  Description of Artificial Sequence: Synthetic oligonucleotide
agucugugcuccuuuuaac

SEQ ID NO: 1879611 - RNA, 19 nt, Artificial Sequence
  Description of Artificial Sequence: Synthetic oligonucleotide
ugugcuccuuuuaaccgag

SEQ ID NO: 1879612 - RNA, 19 nt, Artificial Sequence
  Description of Artificial Sequence: Synthetic oligonucleotide
uucacuugugcuuuauuua

SEQ ID NO: 1879613 - RNA, 19 nt, Artificial Sequence
  Description of Artificial Sequence: Synthetic oligonucleotide
uaccgaaccuauacacugg

SEQ ID NO: 1879614 - RNA, 19 nt, Artificial Sequence
  Description of Artificial Sequence: Synthetic oligonucleotide
auuuuagucucuauuauuu

SEQ ID NO: 1879615 - RNA, 19 nt, Artificial Sequence
  Description of Artificial Sequence: Synthetic oligonucleotide
cauuaacagacagacuuag

SEQ ID NO: 1879616 - RNA, 19 nt, Artificial Sequence
  Description of Artificial Sequence: Synthetic oligonucleotide
uuugcccgacauccuaacg

SEQ ID NO: 1879617 - RNA, 19 nt, Artificial Sequence
  Description of Artificial Sequence: Synthetic oligonucleotide
ugcgaccacaguaacacaa

SEQ ID NO: 1879618 - RNA, 19 nt, Artificial Sequence
  Description of Artificial Sequence: Synthetic oligonucleotide
cagcucugugauaauauag

SEQ ID NO: 1879619 - RNA, 19 nt, Artificial Sequence
  Description of Artificial Sequence: Synthetic oligonucleotide
ugaagcuagcuccaccagu

SEQ ID NO: 1879620 - RNA, 19 nt, Artificial Sequence
  Description of Artificial Sequence: Synthetic oligonucleotide
uccuaacggugacuguucg

SEQ ID NO: 1879621 - RNA, 19 nt, Artificial Sequence
  Description of Artificial Sequence: Synthetic oligonucleotide
caagggugcguucaauccg

SEQ ID NO: 1879622 - RNA, 19 nt, Artificial Sequence
  Description of Artificial Sequence: Synthetic oligonucleotide
aagaggcuacggaauaccg

SEQ ID NO: 1879623 - RNA, 19 nt, Artificial Sequence
  Description of Artificial Sequence: Synthetic oligonucleotide
auuaacagacagacuuagc

SEQ ID NO: 1879624 - RNA, 19 nt, Artificial Sequence
  Description of Artificial Sequence: Synthetic oligonucleotide
accgaaccuauacacuggg

SEQ ID NO: 1879625 - RNA, 19 nt, Artificial Sequence
  Description of Artificial Sequence: Synthetic oligonucleotide
uagagcugcgaccacagua

SEQ ID NO: 1879626 - RNA, 19 nt, Artificial Sequence
  Description of Artificial Sequence: Synthetic oligonucleotide
ucuagcuaaaccagucaau

SEQ ID NO: 1879627 - RNA, 19 nt, Artificial Sequence
  Description of Artificial Sequence: Synthetic oligonucleotide
guugcuaagaggcuacgga

SEQ ID NO: 1879628 - RNA, 19 nt, Artificial Sequence
  Description of Artificial Sequence: Synthetic oligonucleotide
aauagauguagagcugcga

SEQ ID NO: 1879629 - RNA, 19 nt, Artificial Sequence
  Description of Artificial Sequence: Synthetic oligonucleotide
aauggcauuuacacgccug

SEQ ID NO: 1879630 - RNA, 19 nt, Artificial Sequence
  Description of Artificial Sequence: Synthetic oligonucleotide
ucuuacaggacaucccgau

SEQ ID NO: 1879631 - RNA, 19 nt, Artificial Sequence
  Description of Artificial Sequence: Synthetic oligonucleotide
agaguuaaggcaucagauu

SEQ ID NO: 1879632 - RNA, 19 nt, Artificial Sequence
  Description of Artificial Sequence: Synthetic oligonucleotide
guugcugaaucacaaugca

SEQ ID NO: 1879633 - RNA, 19 nt, Artificial Sequence
  Description of Artificial Sequence: Synthetic oligonucleotide
cauuuaaaugggcagaacu

SEQ ID NO: 1879634 - RNA, 19 nt, Artificial Sequence
  Description of Artificial Sequence: Synthetic oligonucleotide
cgauaaaucuuaaagccag

SEQ ID NO: 1879635 - RNA, 19 nt, Artificial Sequence
  Description of Artificial Sequence: Synthetic oligonucleotide
gacuguucggcucgggccc

SEQ ID NO: 1879636 - RNA, 19 nt, Artificial Sequence
  Description of Artificial Sequence: Synthetic oligonucleotide
uuuuagucucuauuauuuu

SEQ ID NO: 1879637 - RNA, 19 nt, Artificial Sequence
  Description of Artificial Sequence: Synthetic oligonucleotide
gucugugccauucgcgacg

SEQ ID NO: 1879638 - RNA, 19 nt, Artificial Sequence
  Description of Artificial Sequence: Synthetic oligonucleotide
gucacuugacccucucgcg

SEQ ID NO: 1879639 - RNA, 19 nt, Artificial Sequence
  Description of Artificial Sequence: Synthetic oligonucleotide
aauauaggcaagggugcgu

SEQ ID NO: 1879640 - RNA, 19 nt, Artificial Sequence
  Description of Artificial Sequence: Synthetic oligonucleotide
auagccacauauaccgaac

SEQ ID NO: 1879641 - RNA, 19 nt, Artificial Sequence
  Description of Artificial Sequence: Synthetic oligonucleotide
ucacuugacccucucgcgu

SEQ ID NO: 1879642 - RNA, 19 nt, Artificial Sequence
  Description of Artificial Sequence: Synthetic oligonucleotide
uuuaaccuauagaauucuu

SEQ ID NO: 1879643 - RNA, 19 nt, Artificial Sequence
  Description of Artificial Sequence: Synthetic oligonucleotide
cauaacuaucaguuccuuc

SEQ ID NO: 1879644 - RNA, 19 nt, Artificial Sequence
  Description of Artificial Sequence: Synthetic oligonucleotide
cuuucaugauggucugugc

SEQ ID NO: 1879645 - RNA, 19 nt, Artificial Sequence
  Description of Artificial Sequence: Synthetic oligonucleotide
gaaccuauacacuggguua

SEQ ID NO: 1879646 - RNA, 19 nt, Artificial Sequence
  Description of Artificial Sequence: Synthetic oligonucleotide
ugcuaagaggcuacggaau

SEQ ID NO: 1879647 - RNA, 19 nt, Artificial Sequence
  Description of Artificial Sequence: Synthetic oligonucleotide
guaacaaaggaagucugca

SEQ ID NO: 1879648 - RNA, 19 nt, Artificial Sequence
  Description of Artificial Sequence: Synthetic oligonucleotide
guuucgaccagucugugcu

SEQ ID NO: 1879649 - RNA, 19 nt, Artificial Sequence
  Description of Artificial Sequence: Synthetic oligonucleotide
uggcauaauuccucuucag

SEQ ID NO: 1879650 - RNA, 19 nt, Artificial Sequence
  Description of Artificial Sequence: Synthetic oligonucleotide
guaggguaacaccugcuac

SEQ ID NO: 1879651 - RNA, 19 nt, Artificial Sequence
  Description of Artificial Sequence: Synthetic oligonucleotide
aaggggccguuacucgaac

SEQ ID NO: 1879652 - RNA, 19 nt, Artificial Sequence
  Description of Artificial Sequence: Synthetic oligonucleotide
ggaucugucgaaaucgaag

SEQ ID NO: 1879653 - RNA, 19 nt, Artificial Sequence
  Description of Artificial Sequence: Synthetic oligonucleotide
auggcauuuacacgccugu

SEQ ID NO: 1879654 - RNA, 19 nt, Artificial Sequence
  Description of Artificial Sequence: Synthetic oligonucleotide
aaccuauacacuggguuaa

SEQ ID NO: 1879655 - RNA, 19 nt, Artificial Sequence
  Description of Artificial Sequence: Synthetic oligonucleotide
aauccggucuuugcccgac

SEQ ID NO: 1879656 - RNA, 19 nt, Artificial Sequence
  Description of Artificial Sequence: Synthetic oligonucleotide
cauauaccgaaccuauaca

SEQ ID NO: 1879657 - RNA, 19 nt, Artificial Sequence
  Description of Artificial Sequence: Synthetic oligonucleotide
cucggaucuucacuugugc

SEQ ID NO: 1879658 - RNA, 19 nt, Artificial Sequence
  Description of Artificial Sequence: Synthetic oligonucleotide
uagcuaaaccagucaauuc

SEQ ID NO: 1879659 - RNA, 19 nt, Artificial Sequence
  Description of Artificial Sequence: Synthetic oligonucleotide
augcaggagaaauagucuu

SEQ ID NO: 1879660 - RNA, 19 nt, Artificial Sequence
  Description of Artificial Sequence: Synthetic oligonucleotide
aagcuagcuccaccaguag

SEQ ID NO: 1879661 - RNA, 19 nt, Artificial Sequence
  Description of Artificial Sequence: Synthetic oligonucleotide
gguaauguucaaacacugg

SEQ ID NO: 1879662 - RNA, 19 nt, Artificial Sequence
  Description of Artificial Sequence: Synthetic oligonucleotide
ugugccauucgcgacggga

SEQ ID NO: 1879663 - RNA, 19 nt, Artificial Sequence
  Description of Artificial Sequence: Synthetic oligonucleotide
uucaauccggggaaugaua

SEQ ID NO: 1879664 - RNA, 19 nt, Artificial Sequence
  Description of Artificial Sequence: Synthetic oligonucleotide
ugcucuccgauacuccaac

SEQ ID NO: 1879665 - RNA, 19 nt, Artificial Sequence
  Description of Artificial Sequence: Synthetic oligonucleotide
aagguugcugaaucacaau

SEQ ID NO: 1879666 - RNA, 19 nt, Artificial Sequence
  Description of Artificial Sequence: Synthetic oligonucleotide
cuguucauaagucacauuu

SEQ ID NO: 1879667 - RNA, 19 nt, Artificial Sequence
  Description of Artificial Sequence: Synthetic oligonucleotide
aagucgccugcugugaacu

SEQ ID NO: 1879668 - RNA, 19 nt, Artificial Sequence
  Description of Artificial Sequence: Synthetic oligonucleotide
gaggcuacggaauaccggu

SEQ ID NO: 1879669 - RNA, 19 nt, Artificial Sequence
  Description of Artificial Sequence: Synthetic oligonucleotide
accucuagcuaaaccaguc

SEQ ID NO: 1879670 - RNA, 19 nt, Artificial Sequence
  Description of Artificial Sequence: Synthetic oligonucleotide
ccggggaaugauaacaugc

SEQ ID NO: 1879671 - RNA, 19 nt, Artificial Sequence
  Description of Artificial Sequence: Synthetic oligonucleotide
agaggcuacggaauaccgg

SEQ ID NO: 1879672 - RNA, 19 nt, Artificial Sequence
  Description of Artificial Sequence: Synthetic oligonucleotide
uagaauucuucucgcucuc

SEQ ID NO: 1879673 - RNA, 19 nt, Artificial Sequence
  Description of Artificial Sequence: Synthetic oligonucleotide
gagcaaucgugacugcaac

SEQ ID NO: 1879674 - RNA, 19 nt, Artificial Sequence
  Description of Artificial Sequence: Synthetic oligonucleotide
cugguaggguaacaccugc

SEQ ID NO: 1879675 - RNA, 19 nt, Artificial Sequence
  Description of Artificial Sequence: Synthetic oligonucleotide
cacgggagucagcugacgg

SEQ ID NO: 1879676 - RNA, 19 nt, Artificial Sequence
  Description of Artificial Sequence: Synthetic oligonucleotide
acggaauaccggucccuac

SEQ ID NO: 1879677 - RNA, 19 nt, Artificial Sequence
  Description of Artificial Sequence: Synthetic oligonucleotide
ugccauucgcgacgggaag

SEQ ID NO: 1879678 - RNA, 19 nt, Artificial Sequence
  Description of Artificial Sequence: Synthetic oligonucleotide
caaucgugacugcaacacc

SEQ ID NO: 1879679 - RNA, 19 nt, Artificial Sequence
  Description of Artificial Sequence: Synthetic oligonucleotide
cugaaucacaaugcaggag

SEQ ID NO: 1879680 - RNA, 19 nt, Artificial Sequence
  Description of Artificial Sequence: Synthetic oligonucleotide
ucgugacugcaacaccgcc

SEQ ID NO: 1879681 - RNA, 19 nt, Artificial Sequence
  Description of Artificial Sequence: Synthetic oligonucleotide
uggccucagccaaugaaaa

SEQ ID NO: 1879682 - RNA, 19 nt, Artificial Sequence
  Description of Artificial Sequence: Synthetic oligonucleotide
aucgugacugcaacaccgc

SEQ ID NO: 1879683 - RNA, 19 nt, Artificial Sequence
  Description of Artificial Sequence: Synthetic oligonucleotide
accgccagaacuggcuacc

SEQ ID NO: 1879684 - RNA, 19 nt, Artificial Sequence
  Description of Artificial Sequence: Synthetic oligonucleotide
uccggggaaugauaacaug

SEQ ID NO: 1879685 - RNA, 19 nt, Artificial Sequence
  Description of Artificial Sequence: Synthetic oligonucleotide
ugggucugagggagcaaag

SEQ ID NO: 1879686 - RNA, 19 nt, Artificial Sequence
  Description of Artificial Sequence: Synthetic oligonucleotide
ucgaacagcagguccucgu

SEQ ID NO: 1879687 - RNA, 19 nt, Artificial Sequence
  Description of Artificial Sequence: Synthetic oligonucleotide
uuuacacgccuguucguua

SEQ ID NO: 1879688 - RNA, 19 nt, Artificial Sequence
  Description of Artificial Sequence: Synthetic oligonucleotide
agcaaucgugacugcaaca

SEQ ID NO: 1879689 - RNA, 19 nt, Artificial Sequence
  Description of Artificial Sequence: Synthetic oligonucleotide
cucuccgauacuccaacuc

SEQ ID NO: 1879690 - RNA, 19 nt, Artificial Sequence
  Description of Artificial Sequence: Synthetic oligonucleotide
aaauagccacauauaccga

SEQ ID NO: 1879691 - RNA, 19 nt, Artificial Sequence
  Description of Artificial Sequence: Synthetic oligonucleotide
ggugcguucaauccgggga

SEQ ID NO: 1879692 - RNA, 19 nt, Artificial Sequence
  Description of Artificial Sequence: Synthetic oligonucleotide
uuacacgccuguucguuau

SEQ ID NO: 1879693 - RNA, 19 nt, Artificial Sequence
  Description of Artificial Sequence: Synthetic oligonucleotide
auaggcaagggugcguuca

SEQ ID NO: 1879694 - RNA, 19 nt, Artificial Sequence
  Description of Artificial Sequence: Synthetic oligonucleotide
caugcucaauggcauuuac

SEQ ID NO: 1879695 - RNA, 19 nt, Artificial Sequence
  Description of Artificial Sequence: Synthetic oligonucleotide
cuaagaggcuacggaauac

SEQ ID NO: 1879696 - RNA, 19 nt, Artificial Sequence
  Description of Artificial Sequence: Synthetic oligonucleotide
gaagcuagcuccaccagua

SEQ ID NO: 1879697 - RNA, 19 nt, Artificial Sequence
  Description of Artificial Sequence: Synthetic oligonucleotide
ucguuaucuuaauggcuuc

SEQ ID NO: 1879698 - RNA, 19 nt, Artificial Sequence
  Description of Artificial Sequence: Synthetic oligonucleotide
gcugcgaccacaguaacac

SEQ ID NO: 1879699 - RNA, 19 nt, Artificial Sequence
  Description of Artificial Sequence: Synthetic oligonucleotide
ugaagucgccugcugugaa

SEQ ID NO: 1879700 - RNA, 19 nt, Artificial Sequence
  Description of Artificial Sequence: Synthetic oligonucleotide
gugucacuugacccucucg

SEQ ID NO: 1879701 - RNA, 19 nt, Artificial Sequence
  Description of Artificial Sequence: Synthetic oligonucleotide
cucuagcuaaaccagucaa

SEQ ID NO: 1879702 - RNA, 19 nt, Artificial Sequence
  Description of Artificial Sequence: Synthetic oligonucleotide
uucgcgacgggaagauuuc

SEQ ID NO: 1879703 - RNA, 19 nt, Artificial Sequence
  Description of Artificial Sequence: Synthetic oligonucleotide
cugagggagcaaaggggcc

SEQ ID NO: 1879704 - RNA, 19 nt, Artificial Sequence
  Description of Artificial Sequence: Synthetic oligonucleotide
gaagucgccugcugugaac

SEQ ID NO: 1879705 - RNA, 19 nt, Artificial Sequence
  Description of Artificial Sequence: Synthetic oligonucleotide
acuuagcgugcaaagaaaa

SEQ ID NO: 1879706 - RNA, 19 nt, Artificial Sequence
  Description of Artificial Sequence: Synthetic oligonucleotide
cagugaagcuagcuccacc

SEQ ID NO: 1879707 - RNA, 19 nt, Artificial Sequence
  Description of Artificial Sequence: Synthetic oligonucleotide
uaacggugacuguucggcu

SEQ ID NO: 1879708 - RNA, 19 nt, Artificial Sequence
  Description of Artificial Sequence: Synthetic oligonucleotide
auccuaacggugacuguuc

SEQ ID NO: 1879709 - RNA, 19 nt, Artificial Sequence
  Description of Artificial Sequence: Synthetic oligonucleotide
ggcauuuacacgccuguuc

SEQ ID NO: 1879710 - RNA, 19 nt, Artificial Sequence
  Description of Artificial Sequence: Synthetic oligonucleotide
aucgaagaguuaaggcauc

SEQ ID NO: 1879711 - RNA, 19 nt, Artificial Sequence
  Description of Artificial Sequence: Synthetic oligonucleotide
ggcuacggaauaccggucc

SEQ ID NO: 1879712 - RNA, 19 nt, Artificial Sequence
  Description of Artificial Sequence: Synthetic oligonucleotide
gaauaccggucccuacuuc

SEQ ID NO: 1879713 - RNA, 19 nt, Artificial Sequence
  Description of Artificial Sequence: Synthetic oligonucleotide
gacggugucacuugacccu

SEQ ID NO: 1879714 - RNA, 19 nt, Artificial Sequence
  Description of Artificial Sequence: Synthetic oligonucleotide
gcaaucgugacugcaacac

SEQ ID NO: 1879715 - RNA, 19 nt, Artificial Sequence
  Description of Artificial Sequence: Synthetic oligonucleotide
cucucgcguugcuaagagg

SEQ ID NO: 1879716 - RNA, 19 nt, Artificial Sequence
  Description of Artificial Sequence: Synthetic oligonucleotide
aaacacugguaggguaaca

SEQ ID NO: 1879717 - RNA, 19 nt, Artificial Sequence
  Description of Artificial Sequence: Synthetic oligonucleotide
gcuuucaugauggucugug

SEQ ID NO: 1879718 - RNA, 19 nt, Artificial Sequence
  Description of Artificial Sequence: Synthetic oligonucleotide
acgggagucagcugacggu

SEQ ID NO: 1879719 - RNA, 19 nt, Artificial Sequence
  Description of Artificial Sequence: Synthetic oligonucleotide
auucgcgacgggaagauuu

SEQ ID NO: 1879720 - RNA, 19 nt, Artificial Sequence
  Description of Artificial Sequence: Synthetic oligonucleotide
auaccggucccuacuuccg

SEQ ID NO: 1879721 - RNA, 19 nt, Artificial Sequence
  Description of Artificial Sequence: Synthetic oligonucleotide
ucguuuuacucuguucaua

SEQ ID NO: 1879722 - RNA, 19 nt, Artificial Sequence
  Description of Artificial Sequence: Synthetic oligonucleotide
aucuuaaagccagggaauu

SEQ ID NO: 1879723 - RNA, 19 nt, Artificial Sequence
  Description of Artificial Sequence: Synthetic oligonucleotide
cgaaaucgaagaguuaagg

SEQ ID NO: 1879724 - RNA, 19 nt, Artificial Sequence
  Description of Artificial Sequence: Synthetic oligonucleotide
ggggccguuacucgaacag

SEQ ID NO: 1879725 - RNA, 19 nt, Artificial Sequence
  Description of Artificial Sequence: Synthetic oligonucleotide
accuauacacuggguuaac

SEQ ID NO: 1879726 - RNA, 19 nt, Artificial Sequence
  Description of Artificial Sequence: Synthetic oligonucleotide
auauaggcaagggugcguu

SEQ ID NO: 1879727 - RNA, 19 nt, Artificial Sequence
  Description of Artificial Sequence: Synthetic oligonucleotide
gacuuagcgugcaaagaaa

SEQ ID NO: 1879728 - RNA, 19 nt, Artificial Sequence
  Description of Artificial Sequence: Synthetic oligonucleotide
gacccucucgcguugcuaa

SEQ ID NO: 1879729 - RNA, 19 nt, Artificial Sequence
  Description of Artificial Sequence: Synthetic oligonucleotide
uccgauacuccaacuccuu

SEQ ID NO: 1879730 - RNA, 19 nt, Artificial Sequence
  Description of Artificial Sequence: Synthetic oligonucleotide
caauccggggaaugauaac

SEQ ID NO: 1879731 - RNA, 19 nt, Artificial Sequence
  Description of Artificial Sequence: Synthetic oligonucleotide
gacaucccgauaaaucuua

SEQ ID NO: 1879732 - RNA, 19 nt, Artificial Sequence
  Description of Artificial Sequence: Synthetic oligonucleotide
cugugcuccuuuuaaccga

SEQ ID NO: 1879733 - RNA, 19 nt, Artificial Sequence
  Description of Artificial Sequence: Synthetic oligonucleotide
gacagacuuagcgugcaaa

SEQ ID NO: 1879734 - RNA, 19 nt, Artificial Sequence
  Description of Artificial Sequence: Synthetic oligonucleotide
ccguuacucgaacagcagg

SEQ ID NO: 1879735 - RNA, 19 nt, Artificial Sequence
  Description of Artificial Sequence: Synthetic oligonucleotide
gcugaaucacaaugcagga

SEQ ID NO: 1879736 - RNA, 19 nt, Artificial Sequence
  Description of Artificial Sequence: Synthetic oligonucleotide
acggugucacuugacccuc

SEQ ID NO: 1879737 - RNA, 19 nt, Artificial Sequence
  Description of Artificial Sequence: Synthetic oligonucleotide
uccggucuuugcccgacau

SEQ ID NO: 1879738 - RNA, 19 nt, Artificial Sequence
  Description of Artificial Sequence: Synthetic oligonucleotide
cuauagaauucuucucgcu

SEQ ID NO: 1879739 - RNA, 19 nt, Artificial Sequence
  Description of Artificial Sequence: Synthetic oligonucleotide
cugucgaaaucgaagaguu

SEQ ID NO: 1879740 - RNA, 19 nt, Artificial Sequence
  Description of Artificial Sequence: Synthetic oligonucleotide
cauuuuagucucuauuauu

SEQ ID NO: 1879741 - RNA, 19 nt, Artificial Sequence
  Description of Artificial Sequence: Synthetic oligonucleotide
uuucgaccagucugugcuc

SEQ ID NO: 1879742 - RNA, 19 nt, Artificial Sequence
  Description of Artificial Sequence: Synthetic oligonucleotide
aggguaacaccugcuacau

SEQ ID NO: 1879743 - RNA, 19 nt, Artificial Sequence
  Description of Artificial Sequence: Synthetic oligonucleotide
uaggcaagggugcguucaa

SEQ ID NO: 1879744 - RNA, 19 nt, Artificial Sequence
  Description of Artificial Sequence: Synthetic oligonucleotide
gguuucgaccagucugugc

SEQ ID NO: 1879745 - RNA, 19 nt, Artificial Sequence
  Description of Artificial Sequence: Synthetic oligonucleotide
cuagcuccaccaguaguuc

SEQ ID NO: 1879746 - RNA, 19 nt, Artificial Sequence
  Description of Artificial Sequence: Synthetic oligonucleotide
ggggaaugauaacaugcuc

SEQ ID NO: 1879747 - RNA, 19 nt, Artificial Sequence
  Description of Artificial Sequence: Synthetic oligonucleotide
gccagggaauucuuaugcc

SEQ ID NO: 1879748 - RNA, 19 nt, Artificial Sequence
  Description of Artificial Sequence: Synthetic oligonucleotide
guucguuaucuuaauggcu

SEQ ID NO: 1879749 - RNA, 19 nt, Artificial Sequence
  Description of Artificial Sequence: Synthetic oligonucleotide
cuuuaaccuauagaauucu

SEQ ID NO: 1879750 - RNA, 19 nt, Artificial Sequence
  Description of Artificial Sequence: Synthetic oligonucleotide
cuaaaccagucaauucaua

SEQ ID NO: 1879751 - RNA, 19 nt, Artificial Sequence
  Description of Artificial Sequence: Synthetic oligonucleotide
gaccacaguaacacaaggu

SEQ ID NO: 1879752 - RNA, 19 nt, Artificial Sequence
  Description of Artificial Sequence: Synthetic oligonucleotide
agcugacggugucacuuga

SEQ ID NO: 1879753 - RNA, 19 nt, Artificial Sequence
  Description of Artificial Sequence: Synthetic oligonucleotide
caacaccgccagaacuggc

SEQ ID NO: 1879754 - RNA, 19 nt, Artificial Sequence
  Description of Artificial Sequence: Synthetic oligonucleotide
caggaucugucgaaaucga

SEQ ID NO: 1879755 - RNA, 19 nt, Artificial Sequence
  Description of Artificial Sequence: Synthetic oligonucleotide
uacggaauaccggucccua

SEQ ID NO: 1879756 - RNA, 19 nt, Artificial Sequence
  Description of Artificial Sequence: Synthetic oligonucleotide
acacgccuguucguuaucu

SEQ ID NO: 1879757 - RNA, 19 nt, Artificial Sequence
  Description of Artificial Sequence: Synthetic oligonucleotide
gcuacggaauaccgguccc

SEQ ID NO: 1879758 - RNA, 19 nt, Artificial Sequence
  Description of Artificial Sequence: Synthetic oligonucleotide
cggucuuugcccgacaucc

SEQ ID NO: 1879759 - RNA, 19 nt, Artificial Sequence
  Description of Artificial Sequence: Synthetic oligonucleotide
gcaacaccgccagaacugg

SEQ ID NO: 1879760 - RNA, 19 nt, Artificial Sequence
  Description of Artificial Sequence: Synthetic oligonucleotide
cagcugacggugucacuug

SEQ ID NO: 1879761 - RNA, 19 nt, Artificial Sequence
  Description of Artificial Sequence: Synthetic oligonucleotide
ccuaacggugacuguucgg

SEQ ID NO: 1879762 - RNA, 19 nt, Artificial Sequence
  Description of Artificial Sequence: Synthetic oligonucleotide
ggccucagccaaugaaaag

SEQ ID NO: 1879763 - RNA, 19 nt, Artificial Sequence
  Description of Artificial Sequence: Synthetic oligonucleotide
gguaggguaacaccugcua

SEQ ID NO: 1879764 - RNA, 19 nt, Artificial Sequence
  Description of Artificial Sequence: Synthetic oligonucleotide
cucgaacagcagguccucg

SEQ ID NO: 1879765 - RNA, 19 nt, Artificial Sequence
  Description of Artificial Sequence: Synthetic oligonucleotide
ccagggaauucuuaugcca

SEQ ID NO: 1879766 - RNA, 19 nt, Artificial Sequence
  Description of Artificial Sequence: Synthetic oligonucleotide
uugacccucucgcguugcu

SEQ ID NO: 1879767 - RNA, 19 nt, Artificial Sequence
  Description of Artificial Sequence: Synthetic oligonucleotide
uggcuucauccagaguaac

SEQ ID NO: 1879768 - RNA, 19 nt, Artificial Sequence
  Description of Artificial Sequence: Synthetic oligonucleotide
uacacgccuguucguuauc

SEQ ID NO: 1879769 - RNA, 19 nt, Artificial Sequence
  Description of Artificial Sequence: Synthetic oligonucleotide
gcuaagaggcuacggaaua

SEQ ID NO: 1879770 - RNA, 19 nt, Artificial Sequence
  Description of Artificial Sequence: Synthetic oligonucleotide
caccgccagaacuggcuac

SEQ ID NO: 1879771 - RNA, 19 nt, Artificial Sequence
  Description of Artificial Sequence: Synthetic oligonucleotide
acccucucgcguugcuaag

SEQ ID NO: 1879772 - RNA, 19 nt, Artificial Sequence
  Description of Artificial Sequence: Synthetic oligonucleotide
gucuuugcccgacauccua

SEQ ID NO: 1879773 - RNA, 19 nt, Artificial Sequence
  Description of Artificial Sequence: Synthetic oligonucleotide
cgggaagauuucaauccgg

SEQ ID NO: 1879774 - RNA, 19 nt, Artificial Sequence
  Description of Artificial Sequence: Synthetic oligonucleotide
ucgaccagucugugcuccu

SEQ ID NO: 1879775 - RNA, 19 nt, Artificial Sequence
  Description of Artificial Sequence: Synthetic oligonucleotide
aggggccguuacucgaaca

SEQ ID NO: 1879776 - RNA, 19 nt, Artificial Sequence
  Description of Artificial Sequence: Synthetic oligonucleotide
acaccgccagaacuggcua

SEQ ID NO: 1879777 - RNA, 19 nt, Artificial Sequence
  Description of Artificial Sequence: Synthetic oligonucleotide
auccggggaaugauaacau

SEQ ID NO: 1879778 - RNA, 19 nt, Artificial Sequence
  Description of Artificial Sequence: Synthetic oligonucleotide
gggugcguucaauccgggg

SEQ ID NO: 1879779 - RNA, 19 nt, Artificial Sequence
  Description of Artificial Sequence: Synthetic oligonucleotide
aggcuacggaauaccgguc

SEQ ID NO: 1879780 - RNA, 19 nt, Artificial Sequence
  Description of Artificial Sequence: Synthetic oligonucleotide
ggaauucuuaugccaaaau

SEQ ID NO: 1879781 - RNA, 19 nt, Artificial Sequence
  Description of Artificial Sequence: Synthetic oligonucleotide
gcauuuuagucucuauuau

SEQ ID NO: 1879782 - RNA, 19 nt, Artificial Sequence
  Description of Artificial Sequence: Synthetic oligonucleotide
agacagacuuagcgugcaa

SEQ ID NO: 1879783 - RNA, 19 nt, Artificial Sequence
  Description of Artificial Sequence: Synthetic oligonucleotide
cuccgauacuccaacuccu

SEQ ID NO: 1879784 - RNA, 19 nt, Artificial Sequence
  Description of Artificial Sequence: Synthetic oligonucleotide
ugacugcaacaccgccaga

SEQ ID NO: 1879785 - RNA, 19 nt, Artificial Sequence
  Description of Artificial Sequence: Synthetic oligonucleotide
ggccguuacucgaacagca

SEQ ID NO: 1879786 - RNA, 19 nt, Artificial Sequence
  Description of Artificial Sequence: Synthetic oligonucleotide
gccugcugugaacuuggcc

SEQ ID NO: 1879787 - RNA, 19 nt, Artificial Sequence
  Description of Artificial Sequence: Synthetic oligonucleotide
gcgaccacaguaacacaag

SEQ ID NO: 1879788 - RNA, 19 nt, Artificial Sequence
  Description of Artificial Sequence: Synthetic oligonucleotide
ucgcgacgggaagauuuca

SEQ ID NO: 1879789 - RNA, 19 nt, Artificial Sequence
  Description of Artificial Sequence: Synthetic oligonucleotide
cgacgggaagauuucaauc

SEQ ID NO: 1879790 - RNA, 19 nt, Artificial Sequence
  Description of Artificial Sequence: Synthetic oligonucleotide
aggaucugucgaaaucgaa

SEQ ID NO: 1879791 - RNA, 19 nt, Artificial Sequence
  Description of Artificial Sequence: Synthetic oligonucleotide
ccucucgcguugcuaagag

SEQ ID NO: 1879792 - RNA, 19 nt, Artificial Sequence
  Description of Artificial Sequence: Synthetic oligonucleotide
agcugcgaccacaguaaca

SEQ ID NO: 1879793 - RNA, 19 nt, Artificial Sequence
  Description of Artificial Sequence: Synthetic oligonucleotide
cuggcuaccacagcguccu

SEQ ID NO: 1879794 - RNA, 19 nt, Artificial Sequence
  Description of Artificial Sequence: Synthetic oligonucleotide
accgagcuuucaugauggu

SEQ ID NO: 1879795 - RNA, 19 nt, Artificial Sequence
  Description of Artificial Sequence: Synthetic oligonucleotide
cugaagucgccugcuguga

SEQ ID NO: 1879796 - RNA, 19 nt, Artificial Sequence
  Description of Artificial Sequence: Synthetic oligonucleotide
agguuucgaccagucugug

SEQ ID NO: 1879797 - RNA, 19 nt, Artificial Sequence
  Description of Artificial Sequence: Synthetic oligonucleotide
cagacagacuuagcgugca

SEQ ID NO: 1879798 - RNA, 19 nt, Artificial Sequence
  Description of Artificial Sequence: Synthetic oligonucleotide
gggaauucuuaugccaaaa

SEQ ID NO: 1879799 - RNA, 19 nt, Artificial Sequence
  Description of Artificial Sequence: Synthetic oligonucleotide
cccgacauccuaacgguga

SEQ ID NO: 1879800 - RNA, 19 nt, Artificial Sequence
  Description of Artificial Sequence: Synthetic oligonucleotide
ggagucagcugacgguguc

SEQ ID NO: 1879801 - RNA, 19 nt, Artificial Sequence
  Description of Artificial Sequence: Synthetic oligonucleotide
gguuaacacggagcuggug

SEQ ID NO: 1879802 - RNA, 19 nt, Artificial Sequence
  Description of Artificial Sequence: Synthetic oligonucleotide
cauuuacacgccuguucgu

SEQ ID NO: 1879803 - RNA, 19 nt, Artificial Sequence
  Description of Artificial Sequence: Synthetic oligonucleotide
gugccauucgcgacgggaa

SEQ ID NO: 1879804 - RNA, 19 nt, Artificial Sequence
  Description of Artificial Sequence: Synthetic oligonucleotide
cauccuaacggugacuguu

SEQ ID NO: 1879805 - RNA, 19 nt, Artificial Sequence
  Description of Artificial Sequence: Synthetic oligonucleotide
ccagccgagcaaucgugac

SEQ ID NO: 1879806 - RNA, 19 nt, Artificial Sequence
  Description of Artificial Sequence: Synthetic oligonucleotide
gcucggaucuucacuugug

SEQ ID NO: 1879807 - RNA, 19 nt, Artificial Sequence
  Description of Artificial Sequence: Synthetic oligonucleotide
ccgacauccuaacggugac

SEQ ID NO: 1879808 - RNA, 19 nt, Artificial Sequence
  Description of Artificial Sequence: Synthetic oligonucleotide
ccucuagcuaaaccaguca

SEQ ID NO: 1879809 - RNA, 19 nt, Artificial Sequence
  Description of Artificial Sequence: Synthetic oligonucleotide
gggccguuacucgaacagc

SEQ ID NO: 1879810 - RNA, 19 nt, Artificial Sequence
  Description of Artificial Sequence: Synthetic oligonucleotide
cugcucuccgauacuccaa

SEQ ID NO: 1879811 - RNA, 19 nt, Artificial Sequence
  Description of Artificial Sequence: Synthetic oligonucleotide
cguugcuaagaggcuacgg

SEQ ID NO: 1879812 - RNA, 19 nt, Artificial Sequence
  Description of Artificial Sequence: Synthetic oligonucleotide
caccucuagcuaaaccagu

SEQ ID NO: 1879813 - RNA, 19 nt, Artificial Sequence
  Description of Artificial Sequence: Synthetic oligonucleotide
agucgccugcugugaacuu

SEQ ID NO: 1879814 - RNA, 19 nt, Artificial Sequence
  Description of Artificial Sequence: Synthetic oligonucleotide
ccgauacuccaacuccuuc

SEQ ID NO: 1879815 - RNA, 19 nt, Artificial Sequence
  Description of Artificial Sequence: Synthetic oligonucleotide
ccacauauaccgaaccuau

SEQ ID NO: 1879816 - RNA, 19 nt, Artificial Sequence
  Description of Artificial Sequence: Synthetic oligonucleotide
ggugacuguucggcucggg

SEQ ID NO: 1879817 - RNA, 19 nt, Artificial Sequence
  Description of Artificial Sequence: Synthetic oligonucleotide
cugcgaccacaguaacaca

SEQ ID NO: 1879818 - RNA, 19 nt, Artificial Sequence
  Description of Artificial Sequence: Synthetic oligonucleotide
ccagaguaacaaaggaagu

SEQ ID NO: 1879819 - RNA, 19 nt, Artificial Sequence
  Description of Artificial Sequence: Synthetic oligonucleotide
cgcguugcuaagaggcuac

SEQ ID NO: 1879820 - RNA, 19 nt, Artificial Sequence
  Description of Artificial Sequence: Synthetic oligonucleotide
ccuuuuaaccgagcuuuca

SEQ ID NO: 1879821 - RNA, 19 nt, Artificial Sequence
  Description of Artificial Sequence: Synthetic oligonucleotide
ccgagcuuucaugaugguc

SEQ ID NO: 1879822 - RNA, 19 nt, Artificial Sequence
  Description of Artificial Sequence: Synthetic oligonucleotide
caauggcauuuacacgccu

SEQ ID NO: 1879823 - RNA, 19 nt, Artificial Sequence
  Description of Artificial Sequence: Synthetic oligonucleotide
gcuaaaccagucaauucau

SEQ ID NO: 1879824 - RNA, 19 nt, Artificial Sequence
  Description of Artificial Sequence: Synthetic oligonucleotide
gcguugcuaagaggcuacg

SEQ ID NO: 1879825 - RNA, 19 nt, Artificial Sequence
  Description of Artificial Sequence: Synthetic oligonucleotide
gugcuccuuuuaaccgagc

SEQ ID NO: 1879826 - RNA, 19 nt, Artificial Sequence
  Description of Artificial Sequence: Synthetic oligonucleotide
cugugccauucgcgacggg

SEQ ID NO: 1879827 - RNA, 19 nt, Artificial Sequence
  Description of Artificial Sequence: Synthetic oligonucleotide
ggaauaccggucccuacuu

SEQ ID NO: 1879828 - RNA, 19 nt, Artificial Sequence
  Description of Artificial Sequence: Synthetic oligonucleotide
cgagcaaucgugacugcaa

SEQ ID NO: 1879829 - RNA, 19 nt, Artificial Sequence
  Description of Artificial Sequence: Synthetic oligonucleotide
gcagugaagcuagcuccac

SEQ ID NO: 1879830 - RNA, 19 nt, Artificial Sequence
  Description of Artificial Sequence: Synthetic oligonucleotide
gcugacggugucacuugac

SEQ ID NO: 1879831 - RNA, 19 nt, Artificial Sequence
  Description of Artificial Sequence: Synthetic oligonucleotide
cgggagucagcugacggug

SEQ ID NO: 1879832 - RNA, 19 nt, Artificial Sequence
  Description of Artificial Sequence: Synthetic oligonucleotide
gccauucgcgacgggaaga

SEQ ID NO: 1879833 - RNA, 19 nt, Artificial Sequence
  Description of Artificial Sequence: Synthetic oligonucleotide
guagagcugcgaccacagu

SEQ ID NO: 1879834 - RNA, 19 nt, Artificial Sequence
  Description of Artificial Sequence: Synthetic oligonucleotide
cuacggaauaccggucccu

SEQ ID NO: 1879835 - RNA, 19 nt, Artificial Sequence
  Description of Artificial Sequence: Synthetic oligonucleotide
gcgacgggaagauuucaau

SEQ ID NO: 1879836 - RNA, 19 nt, Artificial Sequence
  Description of Artificial Sequence: Synthetic oligonucleotide
cgaaccuauacacuggguu

SEQ ID NO: 1879837 - RNA, 19 nt, Artificial Sequence
  Description of Artificial Sequence: Synthetic oligonucleotide
cguuaucuuaauggcuuca

SEQ ID NO: 1879838 - RNA, 19 nt, Artificial Sequence
  Description of Artificial Sequence: Synthetic oligonucleotide
cgccuguucguuaucuuaa

SEQ ID NO: 1879839 - RNA, 19 nt, Artificial Sequence
  Description of Artificial Sequence: Synthetic oligonucleotide
gucagcugacggugucacu

SEQ ID NO: 1879840 - RNA, 19 nt, Artificial Sequence
  Description of Artificial Sequence: Synthetic oligonucleotide
cggggaaugauaacaugcu

SEQ ID NO: 1879841 - RNA, 19 nt, Artificial Sequence
  Description of Artificial Sequence: Synthetic oligonucleotide
gcccgacauccuaacggug

SEQ ID NO: 1879842 - RNA, 19 nt, Artificial Sequence
  Description of Artificial Sequence: Synthetic oligonucleotide
ccggucuuugcccgacauc

SEQ ID NO: 1879843 - RNA, 19 nt, Artificial Sequence
  Description of Artificial Sequence: Synthetic oligonucleotide
ggacaucccgauaaaucuu

SEQ ID NO: 1879844 - RNA, 19 nt, Artificial Sequence
  Description of Artificial Sequence: Synthetic oligonucleotide
ccacgggagucagcugacg

SEQ ID NO: 1879845 - RNA, 19 nt, Artificial Sequence
  Description of Artificial Sequence: Synthetic oligonucleotide
ccgagcaaucgugacugca

SEQ ID NO: 1879846 - RNA, 19 nt, Artificial Sequence
  Description of Artificial Sequence: Synthetic oligonucleotide
gccagcuguuccccaccuc

SEQ ID NO: 1879847 - RNA, 19 nt, Artificial Sequence
  Description of Artificial Sequence: Synthetic oligonucleotide
gccuguucguuaucuuaau

SEQ ID NO: 1879848 - RNA, 19 nt, Artificial Sequence
  Description of Artificial Sequence: Synthetic oligonucleotide
gcucuccgauacuccaacu

SEQ ID NO: 1879849 - RNA, 19 nt, Artificial Sequence
  Description of Artificial Sequence: Synthetic oligonucleotide
cggaauaccggucccuacu

SEQ ID NO: 1879850 - RNA, 19 nt, Artificial Sequence
  Description of Artificial Sequence: Synthetic oligonucleotide
cacgccuguucguuaucuu

SEQ ID NO: 1879851 - RNA, 19 nt, Artificial Sequence
  Description of Artificial Sequence: Synthetic oligonucleotide
agggagcaaaggggccguu

SEQ ID NO: 1879852 - RNA, 19 nt, Artificial Sequence
  Description of Artificial Sequence: Synthetic oligonucleotide
cgcgacgggaagauuucaa

SEQ ID NO: 1879853 - RNA, 19 nt, Artificial Sequence
  Description of Artificial Sequence: Synthetic oligonucleotide
cccucucgcguugcuaaga

SEQ ID NO: 1879854 - RNA, 19 nt, Artificial Sequence
  Description of Artificial Sequence: Synthetic oligonucleotide
ccgaaccuauacacugggu

SEQ ID NO: 1879855 - RNA, 19 nt, Artificial Sequence
  Description of Artificial Sequence: Synthetic oligonucleotide
ggguuaacacggagcuggu

SEQ ID NO: 1879856 - RNA, 19 nt, Artificial Sequence
  Description of Artificial Sequence: Synthetic oligonucleotide
ccauucgcgacgggaagau

SEQ ID NO: 1879857 - RNA, 19 nt, Artificial Sequence
  Description of Artificial Sequence: Synthetic oligonucleotide
cauucgcgacgggaagauu

SEQ ID NO: 1879858 - RNA, 19 nt, Artificial Sequence
  Description of Artificial Sequence: Synthetic oligonucleotide
cgacauccuaacggugacu

SEQ ID NO: 1879859 - RNA, 19 nt, Artificial Sequence
  Description of Artificial Sequence: Synthetic oligonucleotide
cggugucacuugacccucu

SEQ ID NO: 1879860 - RNA, 19 nt, Artificial Sequence
  Description of Artificial Sequence: Synthetic oligonucleotide
cgaccagucugugcuccuu

SEQ ID NO: 1879861 - RNA, 19 nt, Artificial Sequence
  Description of Artificial Sequence: Synthetic oligonucleotide
cuuaacuugaguuagagag

SEQ ID NO: 1879862 - RNA, 19 nt, Artificial Sequence
  Description of Artificial Sequence: Synthetic oligonucleotide
gaauaaaaggcauucaggg

SEQ ID NO: 1879863 - RNA, 19 nt, Artificial Sequence
  Description of Artificial Sequence: Synthetic oligonucleotide
auaaaaggcauucagggag

SEQ ID NO: 1879864 - RNA, 19 nt, Artificial Sequence
  Description of Artificial Sequence: Synthetic oligonucleotide
aauugucgaacacaguggg

SEQ ID NO: 1879865 - RNA, 19 nt, Artificial Sequence
  Description of Artificial Sequence: Synthetic oligonucleotide
guaauugucgaacacagug

SEQ ID NO: 1879866 - RNA, 19 nt, Artificial Sequence
  Description of Artificial Sequence: Synthetic oligonucleotide
uaauugucgaacacagugg

SEQ ID NO: 1879867 - RNA, 19 nt, Artificial Sequence
  Description of Artificial Sequence: Synthetic oligonucleotide
uuaacuugaguuagagagg

SEQ ID NO: 1879868 - RNA, 19 nt, Artificial Sequence
  Description of Artificial Sequence: Synthetic oligonucleotide
gagaauaucuuggagagcc

SEQ ID NO: 1879869 - RNA, 19 nt, Artificial Sequence
  Description of Artificial Sequence: Synthetic oligonucleotide
uaggguaucaggcugagcu

SEQ ID NO: 1879870 - RNA, 19 nt, Artificial Sequence
  Description of Artificial Sequence: Synthetic oligonucleotide
uuagucguauagcagauga

SEQ ID NO: 1879871 - RNA, 19 nt, Artificial Sequence
  Description of Artificial Sequence: Synthetic oligonucleotide
cuaggaaguaguaaccugg

SEQ ID NO: 1879872 - RNA, 19 nt, Artificial Sequence
  Description of Artificial Sequence: Synthetic oligonucleotide
aauacuugguauuccuaag

SEQ ID NO: 1879873 - RNA, 19 nt, Artificial Sequence
  Description of Artificial Sequence: Synthetic oligonucleotide
auacuugguauuccuaagc

SEQ ID NO: 1879874 - RNA, 19 nt, Artificial Sequence
  Description of Artificial Sequence: Synthetic oligonucleotide
gaaggcauuagucguauag

SEQ ID NO: 1879875 - RNA, 19 nt, Artificial Sequence
  Description of Artificial Sequence: Synthetic oligonucleotide
gucaacugcacucugggcg

SEQ ID NO: 1879876 - RNA, 19 nt, Artificial Sequence
  Description of Artificial Sequence: Synthetic oligonucleotide
aaggcauuagucguauagc

SEQ ID NO: 1879877 - RNA, 19 nt, Artificial Sequence
  Description of Artificial Sequence: Synthetic oligonucleotide
uuggggaaggcauuagucg

SEQ ID NO: 1879878 - RNA, 19 nt, Artificial Sequence
  Description of Artificial Sequence: Synthetic oligonucleotide
uacuccaagagcaaaggca

SEQ ID NO: 1879879 - RNA, 19 nt, Artificial Sequence
  Description of Artificial Sequence: Synthetic oligonucleotide
uccacuaggaaguaguaac

SEQ ID NO: 1879880 - RNA, 19 nt, Artificial Sequence
  Description of Artificial Sequence: Synthetic oligonucleotide
ugugaugggcgcuugaccc

SEQ ID NO: 1879881 - RNA, 19 nt, Artificial Sequence
  Description of Artificial Sequence: Synthetic oligonucleotide
uaguccuuaaggcacagcu

SEQ ID NO: 1879882 - RNA, 19 nt, Artificial Sequence
  Description of Artificial Sequence: Synthetic oligonucleotide
agagguuugagcccuuaac

SEQ ID NO: 1879883 - RNA, 19 nt, Artificial Sequence
  Description of Artificial Sequence: Synthetic oligonucleotide
cuguaauugucgaacacag

SEQ ID NO: 1879884 - RNA, 19 nt, Artificial Sequence
  Description of Artificial Sequence: Synthetic oligonucleotide
uuggguugagcacugcccg

SEQ ID NO: 1879885 - RNA, 19 nt, Artificial Sequence
  Description of Artificial Sequence: Synthetic oligonucleotide
ucuucuggacuccacuagg

SEQ ID NO: 1879886 - RNA, 19 nt, Artificial Sequence
  Description of Artificial Sequence: Synthetic oligonucleotide
agacguaucaggccugggc

SEQ ID NO: 1879887 - RNA, 19 nt, Artificial Sequence
  Description of Artificial Sequence: Synthetic oligonucleotide
cacagcaugaaucugcuug

SEQ ID NO: 1879888 - RNA, 19 nt, Artificial Sequence
  Description of Artificial Sequence: Synthetic oligonucleotide
ggaaguaguaaccuggugc

SEQ ID NO: 1879889 - RNA, 19 nt, Artificial Sequence
  Description of Artificial Sequence: Synthetic oligonucleotide
ucuuggaaaggucaaccug

SEQ ID NO: 1879890 - RNA, 19 nt, Artificial Sequence
  Description of Artificial Sequence: Synthetic oligonucleotide
caacuuuguggaaagcugg

SEQ ID NO: 1879891 - RNA, 19 nt, Artificial Sequence
  Description of Artificial Sequence: Synthetic oligonucleotide
cacaagaggaugcaggacc

SEQ ID NO: 1879892 - RNA, 19 nt, Artificial Sequence
  Description of Artificial Sequence: Synthetic oligonucleotide
uaacuugaguuagagaggc

SEQ ID NO: 1879893 - RNA, 19 nt, Artificial Sequence
  Description of Artificial Sequence: Synthetic oligonucleotide
ucagucagcagacguauca

SEQ ID NO: 1879894 - RNA, 19 nt, Artificial Sequence
  Description of Artificial Sequence: Synthetic oligonucleotide
aauaucuuggagagccuac

SEQ ID NO: 1879895 - RNA, 19 nt, Artificial Sequence
  Description of Artificial Sequence: Synthetic oligonucleotide
aguggugacacaccucugg

SEQ ID NO: 1879896 - RNA, 19 nt, Artificial Sequence
  Description of Artificial Sequence: Synthetic oligonucleotide
uugguauuccuaagcagag

SEQ ID NO: 1879897 - RNA, 19 nt, Artificial Sequence
  Description of Artificial Sequence: Synthetic oligonucleotide
uacuugguauuccuaagca

SEQ ID NO: 1879898 - RNA, 19 nt, Artificial Sequence
  Description of Artificial Sequence: Synthetic oligonucleotide
aagaggaugcaggaccgcc

SEQ ID NO: 1879899 - RNA, 19 nt, Artificial Sequence
  Description of Artificial Sequence: Synthetic oligonucleotide
uaaggaauaaaaggcauuc

SEQ ID NO: 1879900 - RNA, 19 nt, Artificial Sequence
  Description of Artificial Sequence: Synthetic oligonucleotide
uuagagaggcaccacaaua

SEQ ID NO: 1879901 - RNA, 19 nt, Artificial Sequence
  Description of Artificial Sequence: Synthetic oligonucleotide
ucguauagcagaugagaag

SEQ ID NO: 1879902 - RNA, 19 nt, Artificial Sequence
  Description of Artificial Sequence: Synthetic oligonucleotide
gagggagagaauaucuugg

SEQ ID NO: 1879903 - RNA, 19 nt, Artificial Sequence
  Description of Artificial Sequence: Synthetic oligonucleotide
agugccaggguacacaaga

SEQ ID NO: 1879904 - RNA, 19 nt, Artificial Sequence
  Description of Artificial Sequence: Synthetic oligonucleotide
ucuuggagagccuacucca

SEQ ID NO: 1879905 - RNA, 19 nt, Artificial Sequence
  Description of Artificial Sequence: Synthetic oligonucleotide
ugugcguccgucaacugca

SEQ ID NO: 1879906 - RNA, 19 nt, Artificial Sequence
  Description of Artificial Sequence: Synthetic oligonucleotide
gugccucacauuuucauag

SEQ ID NO: 1879907 - RNA, 19 nt, Artificial Sequence
  Description of Artificial Sequence: Synthetic oligonucleotide
uacacaagaggaugcagga

SEQ ID NO: 1879908 - RNA, 19 nt, Artificial Sequence
  Description of Artificial Sequence: Synthetic oligonucleotide
gaauacuugguauuccuaa

SEQ ID NO: 1879909 - RNA, 19 nt, Artificial Sequence
  Description of Artificial Sequence: Synthetic oligonucleotide
gguauuccuaagcagagug

SEQ ID NO: 1879910 - RNA, 19 nt, Artificial Sequence
  Description of Artificial Sequence: Synthetic oligonucleotide
uuucauaggaggguggacu

SEQ ID NO: 1879911 - RNA, 19 nt, Artificial Sequence
  Description of Artificial Sequence: Synthetic oligonucleotide
ggaauaaaaggcauucagg

SEQ ID NO: 1879912 - RNA, 19 nt, Artificial Sequence
  Description of Artificial Sequence: Synthetic oligonucleotide
agagaggcaccacaauagg

SEQ ID NO: 1879913 - RNA, 19 nt, Artificial Sequence
  Description of Artificial Sequence: Synthetic oligonucleotide
uguguauagcugcuggagu

SEQ ID NO: 1879914 - RNA, 19 nt, Artificial Sequence
  Description of Artificial Sequence: Synthetic oligonucleotide
ucaggcugagcucucaggu

SEQ ID NO: 1879915 - RNA, 19 nt, Artificial Sequence
  Description of Artificial Sequence: Synthetic oligonucleotide
agcuggaugaacuggucag

SEQ ID NO: 1879916 - RNA, 19 nt, Artificial Sequence
  Description of Artificial Sequence: Synthetic oligonucleotide
aucgguguuggguugagca

SEQ ID NO: 1879917 - RNA, 19 nt, Artificial Sequence
  Description of Artificial Sequence: Synthetic oligonucleotide
uuaaggaauaaaaggcauu

SEQ ID NO: 1879918 - RNA, 19 nt, Artificial Sequence
  Description of Artificial Sequence: Synthetic oligonucleotide
ugccaggguacacaagagg

SEQ ID NO: 1879919 - RNA, 19 nt, Artificial Sequence
  Description of Artificial Sequence: Synthetic oligonucleotide
ugagcccuuaacuugaguu

SEQ ID NO: 1879920 - RNA, 19 nt, Artificial Sequence
  Description of Artificial Sequence: Synthetic oligonucleotide
cuugaguuagagaggcacc

SEQ ID NO: 1879921 - RNA, 19 nt, Artificial Sequence
  Description of Artificial Sequence: Synthetic oligonucleotide
uaaccuggugcccuccccg

SEQ ID NO: 1879922 - RNA, 19 nt, Artificial Sequence
  Description of Artificial Sequence: Synthetic oligonucleotide
ucaacugcacucugggcgc

SEQ ID NO: 1879923 - RNA, 19 nt, Artificial Sequence
  Description of Artificial Sequence: Synthetic oligonucleotide
uuaaggcacagcugggagc

SEQ ID NO: 1879924 - RNA, 19 nt, Artificial Sequence
  Description of Artificial Sequence: Synthetic oligonucleotide
agucagcagacguaucagg

SEQ ID NO: 1879925 - RNA, 19 nt, Artificial Sequence
  Description of Artificial Sequence: Synthetic oligonucleotide
uguuggguugagcacugcc

SEQ ID NO: 1879926 - RNA, 19 nt, Artificial Sequence
  Description of Artificial Sequence: Synthetic oligonucleotide
aggcauuagucguauagca

SEQ ID NO: 1879927 - RNA, 19 nt, Artificial Sequence
  Description of Artificial Sequence: Synthetic oligonucleotide
aaguaguaaccuggugccc

SEQ ID NO: 1879928 - RNA, 19 nt, Artificial Sequence
  Description of Artificial Sequence: Synthetic oligonucleotide
uucagguucacugugcguc

SEQ ID NO: 1879929 - RNA, 19 nt, Artificial Sequence
  Description of Artificial Sequence: Synthetic oligonucleotide
uguaccuccuuaaggaaua

SEQ ID NO: 1879930 - RNA, 19 nt, Artificial Sequence
  Description of Artificial Sequence: Synthetic oligonucleotide
ggagagaauaucuuggaga

SEQ ID NO: 1879931 - RNA, 19 nt, Artificial Sequence
  Description of Artificial Sequence: Synthetic oligonucleotide
guguauagcugcuggagug

SEQ ID NO: 1879932 - RNA, 19 nt, Artificial Sequence
  Description of Artificial Sequence: Synthetic oligonucleotide
agagccuacuccaagagca

SEQ ID NO: 1879933 - RNA, 19 nt, Artificial Sequence
  Description of Artificial Sequence: Synthetic oligonucleotide
auggaauacuugguauucc

SEQ ID NO: 1879934 - RNA, 19 nt, Artificial Sequence
  Description of Artificial Sequence: Synthetic oligonucleotide
cuuaaggcacagcugggag

SEQ ID NO: 1879935 - RNA, 19 nt, Artificial Sequence
  Description of Artificial Sequence: Synthetic oligonucleotide
uugacccugcuccuugagg

SEQ ID NO: 1879936 - RNA, 19 nt, Artificial Sequence
  Description of Artificial Sequence: Synthetic oligonucleotide
aaacaccuccuugacgccg

SEQ ID NO: 1879937 - RNA, 19 nt, Artificial Sequence
  Description of Artificial Sequence: Synthetic oligonucleotide
gucaaccuggcuuagguga

SEQ ID NO: 1879938 - RNA, 19 nt, Artificial Sequence
  Description of Artificial Sequence: Synthetic oligonucleotide
cuuggggaaggcauuaguc

SEQ ID NO: 1879939 - RNA, 19 nt, Artificial Sequence
  Description of Artificial Sequence: Synthetic oligonucleotide
agucguauagcagaugaga

SEQ ID NO: 1879940 - RNA, 19 nt, Artificial Sequence
  Description of Artificial Sequence: Synthetic oligonucleotide
uccgucaacugcacucugg

SEQ ID NO: 1879941 - RNA, 19 nt, Artificial Sequence
  Description of Artificial Sequence: Synthetic oligonucleotide
aaggcgccaaggcacaacu

SEQ ID NO: 1879942 - RNA, 19 nt, Artificial Sequence
  Description of Artificial Sequence: Synthetic oligonucleotide
ggaugaacuggucaguagc

SEQ ID NO: 1879943 - RNA, 19 nt, Artificial Sequence
  Description of Artificial Sequence: Synthetic oligonucleotide
uuggagagccuacuccaag

SEQ ID NO: 1879944 - RNA, 19 nt, Artificial Sequence
  Description of Artificial Sequence: Synthetic oligonucleotide
caagggguaggcuccaagc

SEQ ID NO: 1879945 - RNA, 19 nt, Artificial Sequence
  Description of Artificial Sequence: Synthetic oligonucleotide
gacguaucaggccugggca

SEQ ID NO: 1879946 - RNA, 19 nt, Artificial Sequence
  Description of Artificial Sequence: Synthetic oligonucleotide
aguaaccuggugcccuccc

SEQ ID NO: 1879947 - RNA, 19 nt, Artificial Sequence
  Description of Artificial Sequence: Synthetic oligonucleotide
uggaaagcuggaugaacug

SEQ ID NO: 1879948 - RNA, 19 nt, Artificial Sequence
  Description of Artificial Sequence: Synthetic oligonucleotide
uuggaaaggucaaccuggc

SEQ ID NO: 1879949 - RNA, 19 nt, Artificial Sequence
  Description of Artificial Sequence: Synthetic oligonucleotide
uggggaaggcauuagucgu

SEQ ID NO: 1879950 - RNA, 19 nt, Artificial Sequence
  Description of Artificial Sequence: Synthetic oligonucleotide
gaggguaggaaagggugcg

SEQ ID NO: 1879951 - RNA, 19 nt, Artificial Sequence
  Description of Artificial Sequence: Synthetic oligonucleotide
aaggaauaaaaggcauuca

SEQ ID NO: 1879952 - RNA, 19 nt, Artificial Sequence
  Description of Artificial Sequence: Synthetic oligonucleotide
uagucguauagcagaugag

SEQ ID NO: 1879953 - RNA, 19 nt, Artificial Sequence
  Description of Artificial Sequence: Synthetic oligonucleotide
uguaauugucgaacacagu

SEQ ID NO: 1879954 - RNA, 19 nt, Artificial Sequence
  Description of Artificial Sequence: Synthetic oligonucleotide
cacuugaugcucugcauug

SEQ ID NO: 1879955 - RNA, 19 nt, Artificial Sequence
  Description of Artificial Sequence: Synthetic oligonucleotide
aggguacacaagaggaugc

SEQ ID NO: 1879956 - RNA, 19 nt, Artificial Sequence
  Description of Artificial Sequence: Synthetic oligonucleotide
uccuuaaggcacagcuggg

SEQ ID NO: 1879957 - RNA, 19 nt, Artificial Sequence
  Description of Artificial Sequence: Synthetic oligonucleotide
uggccucuuggaaagguca

SEQ ID NO: 1879958 - RNA, 19 nt, Artificial Sequence
  Description of Artificial Sequence: Synthetic oligonucleotide
uuccuaagcagaguggggu

SEQ ID NO: 1879959 - RNA, 19 nt, Artificial Sequence
  Description of Artificial Sequence: Synthetic oligonucleotide
ucauggaauacuugguauu

SEQ ID NO: 1879960 - RNA, 19 nt, Artificial Sequence
  Description of Artificial Sequence: Synthetic oligonucleotide
uguguguauagcugcugga

SEQ ID NO: 1879961 - RNA, 19 nt, Artificial Sequence
  Description of Artificial Sequence: Synthetic oligonucleotide
gguuugagcccuuaacuug

SEQ ID NO: 1879962 - RNA, 19 nt, Artificial Sequence
  Description of Artificial Sequence: Synthetic oligonucleotide
aguggggauguauuccuug

SEQ ID NO: 1879963 - RNA, 19 nt, Artificial Sequence
  Description of Artificial Sequence: Synthetic oligonucleotide
ggugacacaccucuggaug

SEQ ID NO: 1879964 - RNA, 19 nt, Artificial Sequence
  Description of Artificial Sequence: Synthetic oligonucleotide
agaggcaccacaauaggca

SEQ ID NO: 1879965 - RNA, 19 nt, Artificial Sequence
  Description of Artificial Sequence: Synthetic oligonucleotide
cacgcuuuaucgguguugg

SEQ ID NO: 1879966 - RNA, 19 nt, Artificial Sequence
  Description of Artificial Sequence: Synthetic oligonucleotide
ugcugcggugugaugggcg

SEQ ID NO: 1879967 - RNA, 19 nt, Artificial Sequence
  Description of Artificial Sequence: Synthetic oligonucleotide
uaggugaacucauggaaua

SEQ ID NO: 1879968 - RNA, 19 nt, Artificial Sequence
  Description of Artificial Sequence: Synthetic oligonucleotide
ugccucacauuuucauagg

SEQ ID NO: 1879969 - RNA, 19 nt, Artificial Sequence
  Description of Artificial Sequence: Synthetic oligonucleotide
ggcuuaggugaacucaugg

SEQ ID NO: 1879970 - RNA, 19 nt, Artificial Sequence
  Description of Artificial Sequence: Synthetic oligonucleotide
acaguggggauguauuccu

SEQ ID NO: 1879971 - RNA, 19 nt, Artificial Sequence
  Description of Artificial Sequence: Synthetic oligonucleotide
acguaucaggccugggcac

SEQ ID NO: 1879972 - RNA, 19 nt, Artificial Sequence
  Description of Artificial Sequence: Synthetic oligonucleotide
aagcugagugccaggguac

SEQ ID NO: 1879973 - RNA, 19 nt, Artificial Sequence
  Description of Artificial Sequence: Synthetic oligonucleotide
acaagaggaugcaggaccg

SEQ ID NO: 1879974 - RNA, 19 nt, Artificial Sequence
  Description of Artificial Sequence: Synthetic oligonucleotide
uggagagccuacuccaaga

SEQ ID NO: 1879975 - RNA, 19 nt, Artificial Sequence
  Description of Artificial Sequence: Synthetic oligonucleotide
guauuccuaagcagagugg

SEQ ID NO: 1879976 - RNA, 19 nt, Artificial Sequence
  Description of Artificial Sequence: Synthetic oligonucleotide
cugggcgcuguaauugucg

SEQ ID NO: 1879977 - RNA, 19 nt, Artificial Sequence
  Description of Artificial Sequence: Synthetic oligonucleotide
uuggugccuaccaggagga

SEQ ID NO: 1879978 - RNA, 19 nt, Artificial Sequence
  Description of Artificial Sequence: Synthetic oligonucleotide
gugccuaccaggaggauag

SEQ ID NO: 1879979 - RNA, 19 nt, Artificial Sequence
  Description of Artificial Sequence: Synthetic oligonucleotide
uuggucugaggguaggaaa

SEQ ID NO: 1879980 - RNA, 19 nt, Artificial Sequence
  Description of Artificial Sequence: Synthetic oligonucleotide
uguguaccuccuuaaggaa

SEQ ID NO: 1879981 - RNA, 19 nt, Artificial Sequence
  Description of Artificial Sequence: Synthetic oligonucleotide
aguaguaaccuggugcccu

SEQ ID NO: 1879982 - RNA, 19 nt, Artificial Sequence
  Description of Artificial Sequence: Synthetic oligonucleotide
uagcgcacagcaugaaucu

SEQ ID NO: 1879983 - RNA, 19 nt, Artificial Sequence
  Description of Artificial Sequence: Synthetic oligonucleotide
agcccuuaacuugaguuag

SEQ ID NO: 1879984 - RNA, 19 nt, Artificial Sequence
  Description of Artificial Sequence: Synthetic oligonucleotide
uuugagcccuuaacuugag

SEQ ID NO: 1879985 - RNA, 19 nt, Artificial Sequence
  Description of Artificial Sequence: Synthetic oligonucleotide
uggaaggcagcacuggguu

SEQ ID NO: 1879986 - RNA, 19 nt, Artificial Sequence
  Description of Artificial Sequence: Synthetic oligonucleotide
ggagggagagaauaucuug

SEQ ID NO: 1879987 - RNA, 19 nt, Artificial Sequence
  Description of Artificial Sequence: Synthetic oligonucleotide
gcauuagucguauagcaga

SEQ ID NO: 1879988 - RNA, 19 nt, Artificial Sequence
  Description of Artificial Sequence: Synthetic oligonucleotide
gagcacucgagguagcgca

SEQ ID NO: 1879989 - RNA, 19 nt, Artificial Sequence
  Description of Artificial Sequence: Synthetic oligonucleotide
uaucuuggagagccuacuc

SEQ ID NO: 1879990 - RNA, 19 nt, Artificial Sequence
  Description of Artificial Sequence: Synthetic oligonucleotide
gagagccuacuccaagagc

SEQ ID NO: 1879991 - RNA, 19 nt, Artificial Sequence
  Description of Artificial Sequence: Synthetic oligonucleotide
cucagcaaacaccuccuug

SEQ ID NO: 1879992 - RNA, 19 nt, Artificial Sequence
  Description of Artificial Sequence: Synthetic oligonucleotide
aggguaucaggcugagcuc

SEQ ID NO: 1879993 - RNA, 19 nt, Artificial Sequence
  Description of Artificial Sequence: Synthetic oligonucleotide
agggagagaauaucuugga

SEQ ID NO: 1879994 - RNA, 19 nt, Artificial Sequence
  Description of Artificial Sequence: Synthetic oligonucleotide
ggcgccaaggcacaacugg

SEQ ID NO: 1879995 - RNA, 19 nt, Artificial Sequence
  Description of Artificial Sequence: Synthetic oligonucleotide
guguguauagcugcuggag

SEQ ID NO: 1879996 - RNA, 19 nt, Artificial Sequence
  Description of Artificial Sequence: Synthetic oligonucleotide
gcauuguguguauagcugc

SEQ ID NO: 1879997 - RNA, 19 nt, Artificial Sequence
  Description of Artificial Sequence: Synthetic oligonucleotide
agguuugagcccuuaacuu

SEQ ID NO: 1879998 - RNA, 19 nt, Artificial Sequence
  Description of Artificial Sequence: Synthetic oligonucleotide
gaccgcccacgcuuuaucg

SEQ ID NO: 1879999 - RNA, 19 nt, Artificial Sequence
  Description of Artificial Sequence: Synthetic oligonucleotide
uccuaagcagaguggggug

SEQ ID NO: 1880000 - RNA, 19 nt, Artificial Sequence
  Description of Artificial Sequence: Synthetic oligonucleotide
guuggguugagcacugccc

SEQ ID NO: 1880001 - RNA, 19 nt, Artificial Sequence
  Description of Artificial Sequence: Synthetic oligonucleotide
agaaggcaugucuugccca

SEQ ID NO: 1880002 - RNA, 19 nt, Artificial Sequence
  Description of Artificial Sequence: Synthetic oligonucleotide
agaggaugcaggaccgccc

SEQ ID NO: 1880003 - RNA, 19 nt, Artificial Sequence
  Description of Artificial Sequence: Synthetic oligonucleotide
ugcaggaccgcccacgcuu

SEQ ID NO: 1880004 - RNA, 19 nt, Artificial Sequence
  Description of Artificial Sequence: Synthetic oligonucleotide
auuuucauaggagggugga

SEQ ID NO: 1880005 - RNA, 19 nt, Artificial Sequence
  Description of Artificial Sequence: Synthetic oligonucleotide
aggaaauggaaggcagcac

SEQ ID NO: 1880006 - RNA, 19 nt, Artificial Sequence
  Description of Artificial Sequence: Synthetic oligonucleotide
cucuucuggacuccacuag

SEQ ID NO: 1880007 - RNA, 19 nt, Artificial Sequence
  Description of Artificial Sequence: Synthetic oligonucleotide
ggaaagcuggaugaacugg

SEQ ID NO: 1880008 - RNA, 19 nt, Artificial Sequence
  Description of Artificial Sequence: Synthetic oligonucleotide
guagcgcacagcaugaauc

SEQ ID NO: 1880009 - RNA, 19 nt, Artificial Sequence
  Description of Artificial Sequence: Synthetic oligonucleotide
uggguuggccucuuggaaa

SEQ ID NO: 1880010 - RNA, 19 nt, Artificial Sequence
  Description of Artificial Sequence: Synthetic oligonucleotide
gcaugaaucugcuuggcca

SEQ ID NO: 1880011 - RNA, 19 nt, Artificial Sequence
  Description of Artificial Sequence: Synthetic oligonucleotide
acaagggguaggcuccaag

SEQ ID NO: 1880012 - RNA, 19 nt, Artificial Sequence
  Description of Artificial Sequence: Synthetic oligonucleotide
aacacaguggggauguauu

SEQ ID NO: 1880013 - RNA, 19 nt, Artificial Sequence
  Description of Artificial Sequence: Synthetic oligonucleotide
accuccuuaaggaauaaaa

SEQ ID NO: 1880014 - RNA, 19 nt, Artificial Sequence
  Description of Artificial Sequence: Synthetic oligonucleotide
uucuggacuccacuaggaa

SEQ ID NO: 1880015 - RNA, 19 nt, Artificial Sequence
  Description of Artificial Sequence: Synthetic oligonucleotide
ugccacuugugccucacau

SEQ ID NO: 1880016 - RNA, 19 nt, Artificial Sequence
  Description of Artificial Sequence: Synthetic oligonucleotide
aacuuuguggaaagcugga

SEQ ID NO: 1880017 - RNA, 19 nt, Artificial Sequence
  Description of Artificial Sequence: Synthetic oligonucleotide
acacaagaggaugcaggac

SEQ ID NO: 1880018 - RNA, 19 nt, Artificial Sequence
  Description of Artificial Sequence: Synthetic oligonucleotide
ucagggaguccccuggcau

SEQ ID NO: 1880019 - RNA, 19 nt, Artificial Sequence
  Description of Artificial Sequence: Synthetic oligonucleotide
caggguacacaagaggaug

SEQ ID NO: 1880020 - RNA, 19 nt, Artificial Sequence
  Description of Artificial Sequence: Synthetic oligonucleotide
uugugccucacauuuucau

SEQ ID NO: 1880021 - RNA, 19 nt, Artificial Sequence
  Description of Artificial Sequence: Synthetic oligonucleotide
cucgagguagcgcacagca

SEQ ID NO: 1880022 - RNA, 19 nt, Artificial Sequence
  Description of Artificial Sequence: Synthetic oligonucleotide
cugugcguccgucaacugc

SEQ ID NO: 1880023 - RNA, 19 nt, Artificial Sequence
  Description of Artificial Sequence: Synthetic oligonucleotide
uggguugagcacugcccgg

SEQ ID NO: 1880024 - RNA, 19 nt, Artificial Sequence
  Description of Artificial Sequence: Synthetic oligonucleotide
auuccuaagcagagugggg

SEQ ID NO: 1880025 - RNA, 19 nt, Artificial Sequence
  Description of Artificial Sequence: Synthetic oligonucleotide
cauggggugccagaauuag

SEQ ID NO: 1880026 - RNA, 19 nt, Artificial Sequence
  Description of Artificial Sequence: Synthetic oligonucleotide
aaaggucaaccuggcuuag

SEQ ID NO: 1880027 - RNA, 19 nt, Artificial Sequence
  Description of Artificial Sequence: Synthetic oligonucleotide
gggagagaauaucuuggag

SEQ ID NO: 1880028 - RNA, 19 nt, Artificial Sequence
  Description of Artificial Sequence: Synthetic oligonucleotide
agccccuuucccuguguac

SEQ ID NO: 1880029 - RNA, 19 nt, Artificial Sequence
  Description of Artificial Sequence: Synthetic oligonucleotide
uuuucauaggaggguggac

SEQ ID NO: 1880030 - RNA, 19 nt, Artificial Sequence
  Description of Artificial Sequence: Synthetic oligonucleotide
auagcagaugagaaggcau

SEQ ID NO: 1880031 - RNA, 19 nt, Artificial Sequence
  Description of Artificial Sequence: Synthetic oligonucleotide
guuugagcccuuaacuuga

SEQ ID NO: 1880032 - RNA, 19 nt, Artificial Sequence
  Description of Artificial Sequence: Synthetic oligonucleotide
auaucuuggagagccuacu

SEQ ID NO: 1880033 - RNA, 19 nt, Artificial Sequence
  Description of Artificial Sequence: Synthetic oligonucleotide
ggaacaagggguaggcucc

SEQ ID NO: 1880034 - RNA, 19 nt, Artificial Sequence
  Description of Artificial Sequence: Synthetic oligonucleotide
ucgguguuggguugagcac

SEQ ID NO: 1880035 - RNA, 19 nt, Artificial Sequence
  Description of Artificial Sequence: Synthetic oligonucleotide
ggcgucguaggguaucagg

SEQ ID NO: 1880036 - RNA, 19 nt, Artificial Sequence
  Description of Artificial Sequence: Synthetic oligonucleotide
gacauuggucugaggguag

SEQ ID NO: 1880037 - RNA, 19 nt, Artificial Sequence
  Description of Artificial Sequence: Synthetic oligonucleotide
ggagagccuacuccaagag

SEQ ID NO: 1880038 - RNA, 19 nt, Artificial Sequence
  Description of Artificial Sequence: Synthetic oligonucleotide
aaagccccuuucccugugu

SEQ ID NO: 1880039 - RNA, 19 nt, Artificial Sequence
  Description of Artificial Sequence: Synthetic oligonucleotide
uggaaaggucaaccuggcu

SEQ ID NO: 1880040 - RNA, 19 nt, Artificial Sequence
  Description of Artificial Sequence: Synthetic oligonucleotide
gggcgcuugacccugcucc

SEQ ID NO: 1880041 - RNA, 19 nt, Artificial Sequence
  Description of Artificial Sequence: Synthetic oligonucleotide
gagcccuuaacuugaguua

SEQ ID NO: 1880042 - RNA, 19 nt, Artificial Sequence
  Description of Artificial Sequence: Synthetic oligonucleotide
uggcuuaggugaacucaug

SEQ ID NO: 1880043 - RNA, 19 nt, Artificial Sequence
  Description of Artificial Sequence: Synthetic oligonucleotide
auuaguccuuaaggcacag

SEQ ID NO: 1880044 - RNA, 19 nt, Artificial Sequence
  Description of Artificial Sequence: Synthetic oligonucleotide
gguaggaaagggugcggag

SEQ ID NO: 1880045 - RNA, 19 nt, Artificial Sequence
  Description of Artificial Sequence: Synthetic oligonucleotide
aguuagagaggcaccacaa

SEQ ID NO: 1880046 - RNA, 19 nt, Artificial Sequence
  Description of Artificial Sequence: Synthetic oligonucleotide
gagcagacaaggcgccaag

SEQ ID NO: 1880047 - RNA, 19 nt, Artificial Sequence
  Description of Artificial Sequence: Synthetic oligonucleotide
acauuggucugaggguagg

SEQ ID NO: 1880048 - RNA, 19 nt, Artificial Sequence
  Description of Artificial Sequence: Synthetic oligonucleotide
ugggcgcuguaauugucga

SEQ ID NO: 1880049 - RNA, 19 nt, Artificial Sequence
  Description of Artificial Sequence: Synthetic oligonucleotide
gaauaucuuggagagccua

SEQ ID NO: 1880050 - RNA, 19 nt, Artificial Sequence
  Description of Artificial Sequence: Synthetic oligonucleotide
ccacuaggaaguaguaacc

SEQ ID NO: 1880051 - RNA, 19 nt, Artificial Sequence
  Description of Artificial Sequence: Synthetic oligonucleotide
ugucgaacacaguggggau

SEQ ID NO: 1880052 - RNA, 19 nt, Artificial Sequence
  Description of Artificial Sequence: Synthetic oligonucleotide
agggaguccccuggcaugg

SEQ ID NO: 1880053 - RNA, 19 nt, Artificial Sequence
  Description of Artificial Sequence: Synthetic oligonucleotide
ggcauuagucguauagcag

SEQ ID NO: 1880054 - RNA, 19 nt, Artificial Sequence
  Description of Artificial Sequence: Synthetic oligonucleotide
gcagacaaggcgccaaggc

SEQ ID NO: 1880055 - RNA, 19 nt, Artificial Sequence
  Description of Artificial Sequence: Synthetic oligonucleotide
cagacaaggcgccaaggca

SEQ ID NO: 1880056 - RNA, 19 nt, Artificial Sequence
  Description of Artificial Sequence: Synthetic oligonucleotide
ggaaagggugcggaggcgg

SEQ ID NO: 1880057 - RNA, 19 nt, Artificial Sequence
  Description of Artificial Sequence: Synthetic oligonucleotide
gucguauagcagaugagaa

SEQ ID NO: 1880058 - RNA, 19 nt, Artificial Sequence
  Description of Artificial Sequence: Synthetic oligonucleotide
agcagacaaggcgccaagg

SEQ ID NO: 1880059 - RNA, 19 nt, Artificial Sequence
  Description of Artificial Sequence: Synthetic oligonucleotide
ggacuggcaauggagaaac

SEQ ID NO: 1880060 - RNA, 19 nt, Artificial Sequence
  Description of Artificial Sequence: Synthetic oligonucleotide
agcagaugagaaggcaugu

SEQ ID NO: 1880061 - RNA, 19 nt, Artificial Sequence
  Description of Artificial Sequence: Synthetic oligonucleotide
cuucuggacuccacuagga

SEQ ID NO: 1880062 - RNA, 19 nt, Artificial Sequence
  Description of Artificial Sequence: Synthetic oligonucleotide
aguccccuggcauggggug

SEQ ID NO: 1880063 - RNA, 19 nt, Artificial Sequence
  Description of Artificial Sequence: Synthetic oligonucleotide
uugagcccuuaacuugagu

SEQ ID NO: 1880064 - RNA, 19 nt, Artificial Sequence
  Description of Artificial Sequence: Synthetic oligonucleotide
cuugaggcgucguagggua

SEQ ID NO: 1880065 - RNA, 19 nt, Artificial Sequence
  Description of Artificial Sequence: Synthetic oligonucleotide
guaaccuggugcccucccc

SEQ ID NO: 1880066 - RNA, 19 nt, Artificial Sequence
  Description of Artificial Sequence: Synthetic oligonucleotide
aagggugcggaggcgguca

SEQ ID NO: 1880067 - RNA, 19 nt, Artificial Sequence
  Description of Artificial Sequence: Synthetic oligonucleotide
caagcugagugccagggua

SEQ ID NO: 1880068 - RNA, 19 nt, Artificial Sequence
  Description of Artificial Sequence: Synthetic oligonucleotide
acucgagguagcgcacagc

SEQ ID NO: 1880069 - RNA, 19 nt, Artificial Sequence
  Description of Artificial Sequence: Synthetic oligonucleotide
ggcgcuguaauugucgaac

SEQ ID NO: 1880070 - RNA, 19 nt, Artificial Sequence
  Description of Artificial Sequence: Synthetic oligonucleotide
ugaugggcgcuugacccug

SEQ ID NO: 1880071 - RNA, 19 nt, Artificial Sequence
  Description of Artificial Sequence: Synthetic oligonucleotide
gcuguaauugucgaacaca

SEQ ID NO: 1880072 - RNA, 19 nt, Artificial Sequence
  Description of Artificial Sequence: Synthetic oligonucleotide
gacuccacuaggaaguagu

SEQ ID NO: 1880073 - RNA, 19 nt, Artificial Sequence
  Description of Artificial Sequence: Synthetic oligonucleotide
gcuuaggugaacucaugga

SEQ ID NO: 1880074 - RNA, 19 nt, Artificial Sequence
  Description of Artificial Sequence: Synthetic oligonucleotide
uuaucgguguuggguugag

SEQ ID NO: 1880075 - RNA, 19 nt, Artificial Sequence
  Description of Artificial Sequence: Synthetic oligonucleotide
ucugggcgcuguaauuguc

SEQ ID NO: 1880076 - RNA, 19 nt, Artificial Sequence
  Description of Artificial Sequence: Synthetic oligonucleotide
gaugcucugcauugugugu

SEQ ID NO: 1880077 - RNA, 19 nt, Artificial Sequence
  Description of Artificial Sequence: Synthetic oligonucleotide
aacaccuccuugacgccgu

SEQ ID NO: 1880078 - RNA, 19 nt, Artificial Sequence
  Description of Artificial Sequence: Synthetic oligonucleotide
cugcauuguguguauagcu

SEQ ID NO: 1880079 - RNA, 19 nt, Artificial Sequence
  Description of Artificial Sequence: Synthetic oligonucleotide
aggaugcaggaccgcccac

SEQ ID NO: 1880080 - RNA, 19 nt, Artificial Sequence
  Description of Artificial Sequence: Synthetic oligonucleotide
cagggaguccccuggcaug

SEQ ID NO: 1880081 - RNA, 19 nt, Artificial Sequence
  Description of Artificial Sequence: Synthetic oligonucleotide
auaggcacaucugggcagu

SEQ ID NO: 1880082 - RNA, 19 nt, Artificial Sequence
  Description of Artificial Sequence: Synthetic oligonucleotide
guaguaaccuggugcccuc

SEQ ID NO: 1880083 - RNA, 19 nt, Artificial Sequence
  Description of Artificial Sequence: Synthetic oligonucleotide
cauauucuuccuggcccgc

SEQ ID NO: 1880084 - RNA, 19 nt, Artificial Sequence
  Description of Artificial Sequence: Synthetic oligonucleotide
acgcuuuaucgguguuggg

SEQ ID NO: 1880085 - RNA, 19 nt, Artificial Sequence
  Description of Artificial Sequence: Synthetic oligonucleotide
guggaaagcuggaugaacu

SEQ ID NO: 1880086 - RNA, 19 nt, Artificial Sequence
  Description of Artificial Sequence: Synthetic oligonucleotide
ggcacgauggggcagguua

SEQ ID NO: 1880087 - RNA, 19 nt, Artificial Sequence
  Description of Artificial Sequence: Synthetic oligonucleotide
uccuugacgccguccugcu

SEQ ID NO: 1880088 - RNA, 19 nt, Artificial Sequence
  Description of Artificial Sequence: Synthetic oligonucleotide
ccgucaacugcacucuggg

SEQ ID NO: 1880089 - RNA, 19 nt, Artificial Sequence
  Description of Artificial Sequence: Synthetic oligonucleotide
uccuuggggaaggcauuag

SEQ ID NO: 1880090 - RNA, 19 nt, Artificial Sequence
  Description of Artificial Sequence: Synthetic oligonucleotide
ugcucugcauuguguguau

SEQ ID NO: 1880091 - RNA, 19 nt, Artificial Sequence
  Description of Artificial Sequence: Synthetic oligonucleotide
aucaggccugggcacgaug

SEQ ID NO: 1880092 - RNA, 19 nt, Artificial Sequence
  Description of Artificial Sequence: Synthetic oligonucleotide
ggaugcaggaccgcccacg

SEQ ID NO: 1880093 - RNA, 19 nt, Artificial Sequence
  Description of Artificial Sequence: Synthetic oligonucleotide
aggguaggaaagggugcgg

SEQ ID NO: 1880094 - RNA, 19 nt, Artificial Sequence
  Description of Artificial Sequence: Synthetic oligonucleotide
ugcuccuugaggcgucgua

SEQ ID NO: 1880095 - RNA, 19 nt, Artificial Sequence
  Description of Artificial Sequence: Synthetic oligonucleotide
aagccccuuucccugugua

SEQ ID NO: 1880096 - RNA, 19 nt, Artificial Sequence
  Description of Artificial Sequence: Synthetic oligonucleotide
cacucgagguagcgcacag

SEQ ID NO: 1880097 - RNA, 19 nt, Artificial Sequence
  Description of Artificial Sequence: Synthetic oligonucleotide
caggaggauaggcacaucu

SEQ ID NO: 1880098 - RNA, 19 nt, Artificial Sequence
  Description of Artificial Sequence: Synthetic oligonucleotide
guggacuggcaauggagaa

SEQ ID NO: 1880099 - RNA, 19 nt, Artificial Sequence
  Description of Artificial Sequence: Synthetic oligonucleotide
aggguggacuggcaaugga

SEQ ID NO: 1880100 - RNA, 19 nt, Artificial Sequence
  Description of Artificial Sequence: Synthetic oligonucleotide
ucgagguagcgcacagcau

SEQ ID NO: 1880101 - RNA, 19 nt, Artificial Sequence
  Description of Artificial Sequence: Synthetic oligonucleotide
ggguggacuggcaauggag

SEQ ID NO: 1880102 - RNA, 19 nt, Artificial Sequence
  Description of Artificial Sequence: Synthetic oligonucleotide
gagagguuugagcccuuaa

SEQ ID NO: 1880103 - RNA, 19 nt, Artificial Sequence
  Description of Artificial Sequence: Synthetic oligonucleotide
gcgucguaggguaucaggc

SEQ ID NO: 1880104 - RNA, 19 nt, Artificial Sequence
  Description of Artificial Sequence: Synthetic oligonucleotide
agaauaucuuggagagccu

SEQ ID NO: 1880105 - RNA, 19 nt, Artificial Sequence
  Description of Artificial Sequence: Synthetic oligonucleotide
agcacucgagguagcgcac

SEQ ID NO: 1880106 - RNA, 19 nt, Artificial Sequence
  Description of Artificial Sequence: Synthetic oligonucleotide
uaguaaccuggugcccucc

SEQ ID NO: 1880107 - RNA, 19 nt, Artificial Sequence
  Description of Artificial Sequence: Synthetic oligonucleotide
augcucugcauugugugua

SEQ ID NO: 1880108 - RNA, 19 nt, Artificial Sequence
  Description of Artificial Sequence: Synthetic oligonucleotide
ccuaagcagaguggggugg

SEQ ID NO: 1880109 - RNA, 19 nt, Artificial Sequence
  Description of Artificial Sequence: Synthetic oligonucleotide
uaucgguguuggguugagc

SEQ ID NO: 1880110 - RNA, 19 nt, Artificial Sequence
  Description of Artificial Sequence: Synthetic oligonucleotide
acgccguccugcugcagug

SEQ ID NO: 1880111 - RNA, 19 nt, Artificial Sequence
  Description of Artificial Sequence: Synthetic oligonucleotide
acugugcguccgucaacug

SEQ ID NO: 1880112 - RNA, 19 nt, Artificial Sequence
  Description of Artificial Sequence: Synthetic oligonucleotide
guugagcacugcccggaca

SEQ ID NO: 1880113 - RNA, 19 nt, Artificial Sequence
  Description of Artificial Sequence: Synthetic oligonucleotide
gguggacuggcaauggaga

SEQ ID NO: 1880114 - RNA, 19 nt, Artificial Sequence
  Description of Artificial Sequence: Synthetic oligonucleotide
ugcguccgucaacugcacu

SEQ ID NO: 1880115 - RNA, 19 nt, Artificial Sequence
  Description of Artificial Sequence: Synthetic oligonucleotide
cauuagucguauagcagau

SEQ ID NO: 1880116 - RNA, 19 nt, Artificial Sequence
  Description of Artificial Sequence: Synthetic oligonucleotide
cccuuaacuugaguuagag

SEQ ID NO: 1880117 - RNA, 19 nt, Artificial Sequence
  Description of Artificial Sequence: Synthetic oligonucleotide
uugacgccguccugcugca

SEQ ID NO: 1880118 - RNA, 19 nt, Artificial Sequence
  Description of Artificial Sequence: Synthetic oligonucleotide
cagcaugaaucugcuuggc

SEQ ID NO: 1880119 - RNA, 19 nt, Artificial Sequence
  Description of Artificial Sequence: Synthetic oligonucleotide
gcuccuugaggcgucguag

SEQ ID NO: 1880120 - RNA, 19 nt, Artificial Sequence
  Description of Artificial Sequence: Synthetic oligonucleotide
ggaguccccuggcaugggg

SEQ ID NO: 1880121 - RNA, 19 nt, Artificial Sequence
  Description of Artificial Sequence: Synthetic oligonucleotide
cauuguguguauagcugcu

SEQ ID NO: 1880122 - RNA, 19 nt, Artificial Sequence
  Description of Artificial Sequence: Synthetic oligonucleotide
cuuggagagccuacuccaa

SEQ ID NO: 1880123 - RNA, 19 nt, Artificial Sequence
  Description of Artificial Sequence: Synthetic oligonucleotide
gagucagucagcagacgua

SEQ ID NO: 1880124 - RNA, 19 nt, Artificial Sequence
  Description of Artificial Sequence: Synthetic oligonucleotide
gcguccgucaacugcacuc

SEQ ID NO: 1880125 - RNA, 19 nt, Artificial Sequence
  Description of Artificial Sequence: Synthetic oligonucleotide
cagguucacugugcguccg

SEQ ID NO: 1880126 - RNA, 19 nt, Artificial Sequence
  Description of Artificial Sequence: Synthetic oligonucleotide
gcgcacagcaugaaucugc

SEQ ID NO: 1880127 - RNA, 19 nt, Artificial Sequence
  Description of Artificial Sequence: Synthetic oligonucleotide
gcugcggugugaugggcgc

SEQ ID NO: 1880128 - RNA, 19 nt, Artificial Sequence
  Description of Artificial Sequence: Synthetic oligonucleotide
guuagagaggcaccacaau

SEQ ID NO: 1880129 - RNA, 19 nt, Artificial Sequence
  Description of Artificial Sequence: Synthetic oligonucleotide
uccccuggcauggggugcc

SEQ ID NO: 1880130 - RNA, 19 nt, Artificial Sequence
  Description of Artificial Sequence: Synthetic oligonucleotide
cagcagacguaucaggccu

SEQ ID NO: 1880131 - RNA, 19 nt, Artificial Sequence
  Description of Artificial Sequence: Synthetic oligonucleotide
agcgcacagcaugaaucug

SEQ ID NO: 1880132 - RNA, 19 nt, Artificial Sequence
  Description of Artificial Sequence: Synthetic oligonucleotide
ggcagguuaggguacauuu

SEQ ID NO: 1880133 - RNA, 19 nt, Artificial Sequence
  Description of Artificial Sequence: Synthetic oligonucleotide
gccccuuucccuguguacc

SEQ ID NO: 1880134 - RNA, 19 nt, Artificial Sequence
  Description of Artificial Sequence: Synthetic oligonucleotide
agguucacugugcguccgu

SEQ ID NO: 1880135 - RNA, 19 nt, Artificial Sequence
  Description of Artificial Sequence: Synthetic oligonucleotide
ccugcugcggugugauggg

SEQ ID NO: 1880136 - RNA, 19 nt, Artificial Sequence
  Description of Artificial Sequence: Synthetic oligonucleotide
gccucacauuuucauagga

SEQ ID NO: 1880137 - RNA, 19 nt, Artificial Sequence
  Description of Artificial Sequence: Synthetic oligonucleotide
uggugcccuccccgcgacg

SEQ ID NO: 1880138 - RNA, 19 nt, Artificial Sequence
  Description of Artificial Sequence: Synthetic oligonucleotide
uugaggcgucguaggguau

SEQ ID NO: 1880139 - RNA, 19 nt, Artificial Sequence
  Description of Artificial Sequence: Synthetic oligonucleotide
cacuaggaaguaguaaccu

SEQ ID NO: 1880140 - RNA, 19 nt, Artificial Sequence
  Description of Artificial Sequence: Synthetic oligonucleotide
aggcagcacuggguuggcc

SEQ ID NO: 1880141 - RNA, 19 nt, Artificial Sequence
  Description of Artificial Sequence: Synthetic oligonucleotide
cuggcuuaggugaacucau

SEQ ID NO: 1880142 - RNA, 19 nt, Artificial Sequence
  Description of Artificial Sequence: Synthetic oligonucleotide
agcugagugccaggguaca

SEQ ID NO: 1880143 - RNA, 19 nt, Artificial Sequence
  Description of Artificial Sequence: Synthetic oligonucleotide
gcagacguaucaggccugg

SEQ ID NO: 1880144 - RNA, 19 nt, Artificial Sequence
  Description of Artificial Sequence: Synthetic oligonucleotide
ccuuaacuugaguuagaga

SEQ ID NO: 1880145 - RNA, 19 nt, Artificial Sequence
  Description of Artificial Sequence: Synthetic oligonucleotide
caaggcgccaaggcacaac

SEQ ID NO: 1880146 - RNA, 19 nt, Artificial Sequence
  Description of Artificial Sequence: Synthetic oligonucleotide
gguguuggguugagcacug

SEQ ID NO: 1880147 - RNA, 19 nt, Artificial Sequence
  Description of Artificial Sequence: Synthetic oligonucleotide
guccgucaacugcacucug

SEQ ID NO: 1880148 - RNA, 19 nt, Artificial Sequence
  Description of Artificial Sequence: Synthetic oligonucleotide
ugccuaccaggaggauagg

SEQ ID NO: 1880149 - RNA, 19 nt, Artificial Sequence
  Description of Artificial Sequence: Synthetic oligonucleotide
ugggcgcuugacccugcuc

SEQ ID NO: 1880150 - RNA, 19 nt, Artificial Sequence
  Description of Artificial Sequence: Synthetic oligonucleotide
cuccacuaggaaguaguaa

SEQ ID NO: 1880151 - RNA, 19 nt, Artificial Sequence
  Description of Artificial Sequence: Synthetic oligonucleotide
gaacacaguggggauguau

SEQ ID NO: 1880152 - RNA, 19 nt, Artificial Sequence
  Description of Artificial Sequence: Synthetic oligonucleotide
gcuuuaucgguguuggguu

SEQ ID NO: 1880153 - RNA, 19 nt, Artificial Sequence
  Description of Artificial Sequence: Synthetic oligonucleotide
cagacguaucaggccuggg

SEQ ID NO: 1880154 - RNA, 19 nt, Artificial Sequence
  Description of Artificial Sequence: Synthetic oligonucleotide
uggacuccacuaggaagua

SEQ ID NO: 1880155 - RNA, 19 nt, Artificial Sequence
  Description of Artificial Sequence: Synthetic oligonucleotide
guaggguaucaggcugagc

SEQ ID NO: 1880156 - RNA, 19 nt, Artificial Sequence
  Description of Artificial Sequence: Synthetic oligonucleotide
gggugccagaauuaguccu

SEQ ID NO: 1880157 - RNA, 19 nt, Artificial Sequence
  Description of Artificial Sequence: Synthetic oligonucleotide
auggggugccagaauuagu

SEQ ID NO: 1880158 - RNA, 19 nt, Artificial Sequence
  Description of Artificial Sequence: Synthetic oligonucleotide
ggugaacucauggaauacu

SEQ ID NO: 1880159 - RNA, 19 nt, Artificial Sequence
  Description of Artificial Sequence: Synthetic oligonucleotide
auaggaggguggacuggca

SEQ ID NO: 1880160 - RNA, 19 nt, Artificial Sequence
  Description of Artificial Sequence: Synthetic oligonucleotide
cauuggucugaggguagga

SEQ ID NO: 1880161 - RNA, 19 nt, Artificial Sequence
  Description of Artificial Sequence: Synthetic oligonucleotide
guucagguucacugugcgu

SEQ ID NO: 1880162 - RNA, 19 nt, Artificial Sequence
  Description of Artificial Sequence: Synthetic oligonucleotide
guuggccucuuggaaaggu

SEQ ID NO: 1880163 - RNA, 19 nt, Artificial Sequence
  Description of Artificial Sequence: Synthetic oligonucleotide
gccuaccaggaggauaggc

SEQ ID NO: 1880164 - RNA, 19 nt, Artificial Sequence
  Description of Artificial Sequence: Synthetic oligonucleotide
gguugagcacugcccggac

SEQ ID NO: 1880165 - RNA, 19 nt, Artificial Sequence
  Description of Artificial Sequence: Synthetic oligonucleotide
gaugggcgcuugacccugc

SEQ ID NO: 1880166 - RNA, 19 nt, Artificial Sequence
  Description of Artificial Sequence: Synthetic oligonucleotide
gagccuacuccaagagcaa

SEQ ID NO: 1880167 - RNA, 19 nt, Artificial Sequence
  Description of Artificial Sequence: Synthetic oligonucleotide
gcacgauggggcagguuag

SEQ ID NO: 1880168 - RNA, 19 nt, Artificial Sequence
  Description of Artificial Sequence: Synthetic oligonucleotide
augggcgcuugacccugcu

SEQ ID NO: 1880169 - RNA, 19 nt, Artificial Sequence
  Description of Artificial Sequence: Synthetic oligonucleotide
gcgcuguaauugucgaaca

SEQ ID NO: 1880170 - RNA, 19 nt, Artificial Sequence
  Description of Artificial Sequence: Synthetic oligonucleotide
gcagaugagaaggcauguc

SEQ ID NO: 1880171 - RNA, 19 nt, Artificial Sequence
  Description of Artificial Sequence: Synthetic oligonucleotide
ggacuccacuaggaaguag

SEQ ID NO: 1880172 - RNA, 19 nt, Artificial Sequence
  Description of Artificial Sequence: Synthetic oligonucleotide
guaucaggccugggcacga

SEQ ID NO: 1880173 - RNA, 19 nt, Artificial Sequence
  Description of Artificial Sequence: Synthetic oligonucleotide
cguaucaggccugggcacg

SEQ ID NO: 1880174 - RNA, 19 nt, Artificial Sequence
  Description of Artificial Sequence: Synthetic oligonucleotide
cacugugcguccgucaacu

SEQ ID NO: 1880175 - RNA, 19 nt, Artificial Sequence
  Description of Artificial Sequence: Synthetic oligonucleotide
cuggugcccuccccgcgac

SEQ ID NO: 1880176 - RNA, 19 nt, Artificial Sequence
  Description of Artificial Sequence: Synthetic oligonucleotide
gugaugggcgcuugacccu

SEQ ID NO: 1880177 - RNA, 19 nt, Artificial Sequence
  Description of Artificial Sequence: Synthetic oligonucleotide
agagagguuugagcccuua

SEQ ID NO: 1880178 - RNA, 19 nt, Artificial Sequence
  Description of Artificial Sequence: Synthetic oligonucleotide
cuggcauggggugccagaa

SEQ ID NO: 1880179 - RNA, 19 nt, Artificial Sequence
  Description of Artificial Sequence: Synthetic oligonucleotide
guccccuggcauggggugc

SEQ ID NO: 1880180 - RNA, 19 nt, Artificial Sequence
  Description of Artificial Sequence: Synthetic oligonucleotide
cugcugcggugugaugggc

SEQ ID NO: 1880181 - RNA, 19 nt, Artificial Sequence
  Description of Artificial Sequence: Synthetic oligonucleotide
gaaagggugcggaggcggu

SEQ ID NO: 1880182 - RNA, 19 nt, Artificial Sequence
  Description of Artificial Sequence: Synthetic oligonucleotide
ggguaucaggcugagcucu

SEQ ID NO: 1880183 - RNA, 19 nt, Artificial Sequence
  Description of Artificial Sequence: Synthetic oligonucleotide
gucagucagcagacguauc

SEQ ID NO: 1880184 - RNA, 19 nt, Artificial Sequence
  Description of Artificial Sequence: Synthetic oligonucleotide
cucugggcgcuguaauugu

SEQ ID NO: 1880185 - RNA, 19 nt, Artificial Sequence
  Description of Artificial Sequence: Synthetic oligonucleotide
uggggcccaaagccccuuu

SEQ ID NO: 1880186 - RNA, 19 nt, Artificial Sequence
  Description of Artificial Sequence: Synthetic oligonucleotide
ggugccuaccaggaggaua

SEQ ID NO: 1880187 - RNA, 19 nt, Artificial Sequence
  Description of Artificial Sequence: Synthetic oligonucleotide
aggcgucguaggguaucag

SEQ ID NO: 1880188 - RNA, 19 nt, Artificial Sequence
  Description of Artificial Sequence: Synthetic oligonucleotide
cuuucccuguguaccuccu

SEQ ID NO: 1880189 - RNA, 19 nt, Artificial Sequence
  Description of Artificial Sequence: Synthetic oligonucleotide
ggaccgcccacgcuuuauc

SEQ ID NO: 1880190 - RNA, 19 nt, Artificial Sequence
  Description of Artificial Sequence: Synthetic oligonucleotide
ggagcagacaaggcgccaa

SEQ ID NO: 1880191 - RNA, 19 nt, Artificial Sequence
  Description of Artificial Sequence: Synthetic oligonucleotide
gguucacugugcguccguc

SEQ ID NO: 1880192 - RNA, 19 nt, Artificial Sequence
  Description of Artificial Sequence: Synthetic oligonucleotide
ccuuaaggcacagcuggga

SEQ ID NO: 1880193 - RNA, 19 nt, Artificial Sequence
  Description of Artificial Sequence: Synthetic oligonucleotide
gguagcgcacagcaugaau

SEQ ID NO: 1880194 - RNA, 19 nt, Artificial Sequence
  Description of Artificial Sequence: Synthetic oligonucleotide
gaguccccuggcauggggu

SEQ ID NO: 1880195 - RNA, 19 nt, Artificial Sequence
  Description of Artificial Sequence: Synthetic oligonucleotide
guguuggguugagcacugc

SEQ ID NO: 1880196 - RNA, 19 nt, Artificial Sequence
  Description of Artificial Sequence: Synthetic oligonucleotide
ggguugagcacugcccgga

SEQ ID NO: 1880197 - RNA, 19 nt, Artificial Sequence
  Description of Artificial Sequence: Synthetic oligonucleotide
ccacgcuuuaucgguguug

SEQ ID NO: 1880198 - RNA, 19 nt, Artificial Sequence
  Description of Artificial Sequence: Synthetic oligonucleotide
aggaccgcccacgcuuuau

SEQ ID NO: 1880199 - RNA, 19 nt, Artificial Sequence
  Description of Artificial Sequence: Synthetic oligonucleotide
aggcgccaaggcacaacug

SEQ ID NO: 1880200 - RNA, 19 nt, Artificial Sequence
  Description of Artificial Sequence: Synthetic oligonucleotide
cgccaaggcacaacuggug

SEQ ID NO: 1880201 - RNA, 19 nt, Artificial Sequence
  Description of Artificial Sequence: Synthetic oligonucleotide
gguaucaggcugagcucuc

SEQ ID NO: 1880202 - RNA, 19 nt, Artificial Sequence
  Description of Artificial Sequence: Synthetic oligonucleotide
cagcaacaacuuuguggaa

SEQ ID NO: 1880203 - RNA, 19 nt, Artificial Sequence
  Description of Artificial Sequence: Synthetic oligonucleotide
ugacgccguccugcugcag

SEQ ID NO: 1880204 - RNA, 19 nt, Artificial Sequence
  Description of Artificial Sequence: Synthetic oligonucleotide
agguagcgcacagcaugaa

SEQ ID NO: 1880205 - RNA, 19 nt, Artificial Sequence
  Description of Artificial Sequence: Synthetic oligonucleotide
gugccagaauuaguccuua

SEQ ID NO: 1880206 - RNA, 19 nt, Artificial Sequence
  Description of Artificial Sequence: Synthetic oligonucleotide
agggugcggaggcggucau

SEQ ID NO: 1880207 - RNA, 19 nt, Artificial Sequence
  Description of Artificial Sequence: Synthetic oligonucleotide
ggugcggaggcggucauau

SEQ ID NO: 1880208 - RNA, 19 nt, Artificial Sequence
  Description of Artificial Sequence: Synthetic oligonucleotide
ccacaauaggcagcaacaa

SEQ ID NO: 1880209 - RNA, 19 nt, Artificial Sequence
  Description of Artificial Sequence: Synthetic oligonucleotide
gugcguccgucaacugcac

SEQ ID NO: 1880210 - RNA, 19 nt, Artificial Sequence
  Description of Artificial Sequence: Synthetic oligonucleotide
uggugccuaccaggaggau

SEQ ID NO: 1880211 - RNA, 19 nt, Artificial Sequence
  Description of Artificial Sequence: Synthetic oligonucleotide
ggaugccacuugugccuca

SEQ ID NO: 1880212 - RNA, 19 nt, Artificial Sequence
  Description of Artificial Sequence: Synthetic oligonucleotide
ggaaggcauuagucguaua

SEQ ID NO: 1880213 - RNA, 19 nt, Artificial Sequence
  Description of Artificial Sequence: Synthetic oligonucleotide
gggcgcuguaauugucgaa

SEQ ID NO: 1880214 - RNA, 19 nt, Artificial Sequence
  Description of Artificial Sequence: Synthetic oligonucleotide
gggaguccccuggcauggg

SEQ ID NO: 1880215 - RNA, 19 nt, Artificial Sequence
  Description of Artificial Sequence: Synthetic oligonucleotide
gcacucgagguagcgcaca

SEQ ID NO: 1880216 - RNA, 19 nt, Artificial Sequence
  Description of Artificial Sequence: Synthetic oligonucleotide
gcauggggugccagaauua

SEQ ID NO: 1880217 - RNA, 19 nt, Artificial Sequence
  Description of Artificial Sequence: Synthetic oligonucleotide
gggaaggcauuagucguau

SEQ ID NO: 1880218 - RNA, 19 nt, Artificial Sequence
  Description of Artificial Sequence: Synthetic oligonucleotide
cgcuuuaucgguguugggu

SEQ ID NO: 1880219 - RNA, 19 nt, Artificial Sequence
  Description of Artificial Sequence: Synthetic oligonucleotide
gcccuuaacuugaguuaga

SEQ ID NO: 1880220 - RNA, 19 nt, Artificial Sequence
  Description of Artificial Sequence: Synthetic oligonucleotide
ccuuggggaaggcauuagu

SEQ ID NO: 1880221 - RNA, 19 nt, Artificial Sequence
  Description of Artificial Sequence: Synthetic oligonucleotide
gcagguuaggguacauuuu

SEQ ID NO: 1880222 - RNA, 19 nt, Artificial Sequence
  Description of Artificial Sequence: Synthetic oligonucleotide
ggcauucagggaguccccu

SEQ ID NO: 1880223 - RNA, 19 nt, Artificial Sequence
  Description of Artificial Sequence: Synthetic oligonucleotide
ccuggugcccuccccgcga

SEQ ID NO: 1880224 - RNA, 19 nt, Artificial Sequence
  Description of Artificial Sequence: Synthetic oligonucleotide
caguggggauguauuccuu

SEQ ID NO: 1880225 - RNA, 19 nt, Artificial Sequence
  Description of Artificial Sequence: Synthetic oligonucleotide
cccugcuccuugaggcguc

SEQ ID NO: 1880226 - RNA, 19 nt, Artificial Sequence
  Description of Artificial Sequence: Synthetic oligonucleotide
gcccacgcuuuaucggugu

SEQ ID NO: 1880227 - RNA, 19 nt, Artificial Sequence
  Description of Artificial Sequence: Synthetic oligonucleotide
cgcccacgcuuuaucggug

SEQ ID NO: 1880228 - RNA, 19 nt, Artificial Sequence
  Description of Artificial Sequence: Synthetic oligonucleotide
gcggugugaugggcgcuug

SEQ ID NO: 1880229 - RNA, 19 nt, Artificial Sequence
  Description of Artificial Sequence: Synthetic oligonucleotide
gcgccaaggcacaacuggu

SEQ ID NO: 1880230 - RNA, 19 nt, Artificial Sequence
  Description of Artificial Sequence: Synthetic oligonucleotide
cgcacagcaugaaucugcu

SEQ ID NO: 1880231 - RNA, 19 nt, Artificial Sequence
  Description of Artificial Sequence: Synthetic oligonucleotide
ccgcccacgcuuuaucggu

SEQ ID NO: 1880232 - RNA, 19 nt, Artificial Sequence
  Description of Artificial Sequence: Synthetic oligonucleotide
ccuugaggcgucguagggu

SEQ ID NO: 1880233 - RNA, 19 nt, Artificial Sequence
  Description of Artificial Sequence: Synthetic oligonucleotide
ccccuuucccuguguaccu

SEQ ID NO: 1880234 - RNA, 19 nt, Artificial Sequence
  Description of Artificial Sequence: Synthetic oligonucleotide
gcucugcauuguguguaua

SEQ ID NO: 1880235 - RNA, 19 nt, Artificial Sequence
  Description of Artificial Sequence: Synthetic oligonucleotide
caggaccgcccacgcuuua

SEQ ID NO: 1880236 - RNA, 19 nt, Artificial Sequence
  Description of Artificial Sequence: Synthetic oligonucleotide
cagagagguuugagcccuu

SEQ ID NO: 1880237 - RNA, 19 nt, Artificial Sequence
  Description of Artificial Sequence: Synthetic oligonucleotide
gugcggaggcggucauauu

SEQ ID NO: 1880238 - RNA, 19 nt, Artificial Sequence
  Description of Artificial Sequence: Synthetic oligonucleotide
cguccgucaacugcacucu

SEQ ID NO: 1880239 - RNA, 19 nt, Artificial Sequence
  Description of Artificial Sequence: Synthetic oligonucleotide
gggcagguuaggguacauu

SEQ ID NO: 1880240 - RNA, 19 nt, Artificial Sequence
  Description of Artificial Sequence: Synthetic oligonucleotide
cugcuccuugaggcgucgu

SEQ ID NO: 1880241 - RNA, 19 nt, Artificial Sequence
  Description of Artificial Sequence: Synthetic oligonucleotide
gcaggaccgcccacgcuuu

SEQ ID NO: 1880242 - RNA, 19 nt, Artificial Sequence
  Description of Artificial Sequence: Synthetic oligonucleotide
gggugcggaggcggucaua

SEQ ID NO: 1880243 - RNA, 19 nt, Artificial Sequence
  Description of Artificial Sequence: Synthetic oligonucleotide
cccacgcuuuaucgguguu

SEQ ID NO: 1880244 - RNA, 19 nt, Artificial Sequence
  Description of Artificial Sequence: Synthetic oligonucleotide
gcgcuugacccugcuccuu

SEQ ID NO: 1880245 - RNA, 19 nt, Artificial Sequence
  Description of Artificial Sequence: Synthetic oligonucleotide
ccgcagugucccacagguu

SEQ ID NO: 1880246 - RNA, 19 nt, Artificial Sequence
  Description of Artificial Sequence: Synthetic oligonucleotide
gaugcuguaaccuucaggg

SEQ ID NO: 1880247 - RNA, 19 nt, Artificial Sequence
  Description of Artificial Sequence: Synthetic oligonucleotide
gaauuuaaggcucaggggc

SEQ ID NO: 1880248 - RNA, 19 nt, Artificial Sequence
  Description of Artificial Sequence: Synthetic oligonucleotide
aguaccacagaccugaggg

SEQ ID NO: 1880249 - RNA, 19 nt, Artificial Sequence
  Description of Artificial Sequence: Synthetic oligonucleotide
agugaagguaaucucauac

SEQ ID NO: 1880250 - RNA, 19 nt, Artificial Sequence
  Description of Artificial Sequence: Synthetic oligonucleotide
gaauacucacacuugaugc

SEQ ID NO: 1880251 - RNA, 19 nt, Artificial Sequence
  Description of Artificial Sequence: Synthetic oligonucleotide
agucaggagacuuaggcac

SEQ ID NO: 1880252 - RNA, 19 nt, Artificial Sequence
  Description of Artificial Sequence: Synthetic oligonucleotide
cagaauuuaaggcucaggg

SEQ ID NO: 1880253 - RNA, 19 nt, Artificial Sequence
  Description of Artificial Sequence: Synthetic oligonucleotide
aucacacgcacacaggugc

SEQ ID NO: 1880254 - RNA, 19 nt, Artificial Sequence
  Description of Artificial Sequence: Synthetic oligonucleotide
aagguaaucucauaccugu

SEQ ID NO: 1880255 - RNA, 19 nt, Artificial Sequence
  Description of Artificial Sequence: Synthetic oligonucleotide
cagcuuuucaucaaagugg

SEQ ID NO: 1880256 - RNA, 19 nt, Artificial Sequence
  Description of Artificial Sequence: Synthetic oligonucleotide
agaauuuaaggcucagggg

SEQ ID NO: 1880257 - RNA, 19 nt, Artificial Sequence
  Description of Artificial Sequence: Synthetic oligonucleotide
uugacuagaaagcuguugu

SEQ ID NO: 1880258 - RNA, 19 nt, Artificial Sequence
  Description of Artificial Sequence: Synthetic oligonucleotide
aaagcuguugucacucucc

SEQ ID NO: 1880259 - RNA, 19 nt, Artificial Sequence
  Description of Artificial Sequence: Synthetic oligonucleotide
aauacucacacuugaugcu

SEQ ID NO: 1880260 - RNA, 19 nt, Artificial Sequence
  Description of Artificial Sequence: Synthetic oligonucleotide
ucucagauaagccuccaug

SEQ ID NO: 1880261 - RNA, 19 nt, Artificial Sequence
  Description of Artificial Sequence: Synthetic oligonucleotide
aaagcggauacuucggacu

SEQ ID NO: 1880262 - RNA, 19 nt, Artificial Sequence
  Description of Artificial Sequence: Synthetic oligonucleotide
agaccugagggguaggagc

SEQ ID NO: 1880263 - RNA, 19 nt, Artificial Sequence
  Description of Artificial Sequence: Synthetic oligonucleotide
gauacuucggacucugggc

SEQ ID NO: 1880264 - RNA, 19 nt, Artificial Sequence
  Description of Artificial Sequence: Synthetic oligonucleotide
aacccauuucuucagucag

SEQ ID NO: 1880265 - RNA, 19 nt, Artificial Sequence
  Description of Artificial Sequence: Synthetic oligonucleotide
ucacacagacaguagagcc

SEQ ID NO: 1880266 - RNA, 19 nt, Artificial Sequence
  Description of Artificial Sequence: Synthetic oligonucleotide
ugagacgacaauagcagca

SEQ ID NO: 1880267 - RNA, 19 nt, Artificial Sequence
  Description of Artificial Sequence: Synthetic oligonucleotide
gauuccuccucucagauaa

SEQ ID NO: 1880268 - RNA, 19 nt, Artificial Sequence
  Description of Artificial Sequence: Synthetic oligonucleotide
ugucacacagacaguagag

SEQ ID NO: 1880269 - RNA, 19 nt, Artificial Sequence
  Description of Artificial Sequence: Synthetic oligonucleotide
uggugagacgacaauagca

SEQ ID NO: 1880270 - RNA, 19 nt, Artificial Sequence
  Description of Artificial Sequence: Synthetic oligonucleotide
aggagcuugaggugcaagc

SEQ ID NO: 1880271 - RNA, 19 nt, Artificial Sequence
  Description of Artificial Sequence: Synthetic oligonucleotide
aucaaaguggacauggcuc

SEQ ID NO: 1880272 - RNA, 19 nt, Artificial Sequence
  Description of Artificial Sequence: Synthetic oligonucleotide
aagcggauacuucggacuc

SEQ ID NO: 1880273 - RNA, 19 nt, Artificial Sequence
  Description of Artificial Sequence: Synthetic oligonucleotide
gacacugccacucaagcuc

SEQ ID NO: 1880274 - RNA, 19 nt, Artificial Sequence
  Description of Artificial Sequence: Synthetic oligonucleotide
aaccuugcgggagagcacc

SEQ ID NO: 1880275 - RNA, 19 nt, Artificial Sequence
  Description of Artificial Sequence: Synthetic oligonucleotide
uauuaaggacucuauccca

SEQ ID NO: 1880276 - RNA, 19 nt, Artificial Sequence
  Description of Artificial Sequence: Synthetic oligonucleotide
ucaaaguggacauggcucu

SEQ ID NO: 1880277 - RNA, 19 nt, Artificial Sequence
  Description of Artificial Sequence: Synthetic oligonucleotide
aaggacucuaucccaacca

SEQ ID NO: 1880278 - RNA, 19 nt, Artificial Sequence
  Description of Artificial Sequence: Synthetic oligonucleotide
ucacggaugucuuugcuca

SEQ ID NO: 1880279 - RNA, 19 nt, Artificial Sequence
  Description of Artificial Sequence: Synthetic oligonucleotide
cugcaaagcggauacuucg

SEQ ID NO: 1880280 - RNA, 19 nt, Artificial Sequence
  Description of Artificial Sequence: Synthetic oligonucleotide
ugcaaagcggauacuucgg

SEQ ID NO: 1880281 - RNA, 19 nt, Artificial Sequence
  Description of Artificial Sequence: Synthetic oligonucleotide
cacaccaucacgcagcaug

SEQ ID NO: 1880282 - RNA, 19 nt, Artificial Sequence
  Description of Artificial Sequence: Synthetic oligonucleotide
uguaccguggugucggucc

SEQ ID NO: 1880283 - RNA, 19 nt, Artificial Sequence
  Description of Artificial Sequence: Synthetic oligonucleotide
aauggggcaucaaugucac

SEQ ID NO: 1880284 - RNA, 19 nt, Artificial Sequence
  Description of Artificial Sequence: Synthetic oligonucleotide
auacuccagagacacuggc

SEQ ID NO: 1880285 - RNA, 19 nt, Artificial Sequence
  Description of Artificial Sequence: Synthetic oligonucleotide
agauaagccuccaugggac

SEQ ID NO: 1880286 - RNA, 19 nt, Artificial Sequence
  Description of Artificial Sequence: Synthetic oligonucleotide
ucuuugcucagccugcgca

SEQ ID NO: 1880287 - RNA, 19 nt, Artificial Sequence
  Description of Artificial Sequence: Synthetic oligonucleotide
cuuugugugcugaauacuc

SEQ ID NO: 1880288 - RNA, 19 nt, Artificial Sequence
  Description of Artificial Sequence: Synthetic oligonucleotide
accaucacgcagcaugucg

SEQ ID NO: 1880289 - RNA, 19 nt, Artificial Sequence
  Description of Artificial Sequence: Synthetic oligonucleotide
gagacuuaggcacauggga

SEQ ID NO: 1880290 - RNA, 19 nt, Artificial Sequence
  Description of Artificial Sequence: Synthetic oligonucleotide
uccagauuccuccucucag

SEQ ID NO: 1880291 - RNA, 19 nt, Artificial Sequence
  Description of Artificial Sequence: Synthetic oligonucleotide
ugcuguaaccuucagggau

SEQ ID NO: 1880292 - RNA, 19 nt, Artificial Sequence
  Description of Artificial Sequence: Synthetic oligonucleotide
ugagucaugcagcuuuuca

SEQ ID NO: 1880293 - RNA, 19 nt, Artificial Sequence
  Description of Artificial Sequence: Synthetic oligonucleotide
uuugugugcugaauacuca

SEQ ID NO: 1880294 - RNA, 19 nt, Artificial Sequence
  Description of Artificial Sequence: Synthetic oligonucleotide
uucugagucguacuccagc

SEQ ID NO: 1880295 - RNA, 19 nt, Artificial Sequence
  Description of Artificial Sequence: Synthetic oligonucleotide
aaguaccacagaccugagg

SEQ ID NO: 1880296 - RNA, 19 nt, Artificial Sequence
  Description of Artificial Sequence: Synthetic oligonucleotide
gaagcaggcagaauuuaag

SEQ ID NO: 1880297 - RNA, 19 nt, Artificial Sequence
  Description of Artificial Sequence: Synthetic oligonucleotide
gaggagguaaauccacucc

SEQ ID NO: 1880298 - RNA, 19 nt, Artificial Sequence
  Description of Artificial Sequence: Synthetic oligonucleotide
uguguucugagucguacuc

SEQ ID NO: 1880299 - RNA, 19 nt, Artificial Sequence
  Description of Artificial Sequence: Synthetic oligonucleotide
agcaauggggcaucaaugu

SEQ ID NO: 1880300 - RNA, 19 nt, Artificial Sequence
  Description of Artificial Sequence: Synthetic oligonucleotide
aaguggacauggcucuggg

SEQ ID NO: 1880301 - RNA, 19 nt, Artificial Sequence
  Description of Artificial Sequence: Synthetic oligonucleotide
aguaaccaugaccacugag

SEQ ID NO: 1880302 - RNA, 19 nt, Artificial Sequence
  Description of Artificial Sequence: Synthetic oligonucleotide
aaaguggacauggcucugg

SEQ ID NO: 1880303 - RNA, 19 nt, Artificial Sequence
  Description of Artificial Sequence: Synthetic oligonucleotide
ucgggaagcaggcagaauu

SEQ ID NO: 1880304 - RNA, 19 nt, Artificial Sequence
  Description of Artificial Sequence: Synthetic oligonucleotide
ggcuuauugccucuguugg

SEQ ID NO: 1880305 - RNA, 19 nt, Artificial Sequence
  Description of Artificial Sequence: Synthetic oligonucleotide
auacuucggacucugggcu

SEQ ID NO: 1880306 - RNA, 19 nt, Artificial Sequence
  Description of Artificial Sequence: Synthetic oligonucleotide
guggacaggggccucacgg

SEQ ID NO: 1880307 - RNA, 19 nt, Artificial Sequence
  Description of Artificial Sequence: Synthetic oligonucleotide
cacugggcaagucacacag

SEQ ID NO: 1880308 - RNA, 19 nt, Artificial Sequence
  Description of Artificial Sequence: Synthetic oligonucleotide
ugcugaauacucacacuug

SEQ ID NO: 1880309 - RNA, 19 nt, Artificial Sequence
  Description of Artificial Sequence: Synthetic oligonucleotide
ucugagucguacuccagcu

SEQ ID NO: 1880310 - RNA, 19 nt, Artificial Sequence
  Description of Artificial Sequence: Synthetic oligonucleotide
caugucgggaagcaggcag

SEQ ID NO: 1880311 - RNA, 19 nt, Artificial Sequence
  Description of Artificial Sequence: Synthetic oligonucleotide
aauuuaaggcucaggggcu

SEQ ID NO: 1880312 - RNA, 19 nt, Artificial Sequence
  Description of Artificial Sequence: Synthetic oligonucleotide
accgcagagguggagaugg

SEQ ID NO: 1880313 - RNA, 19 nt, Artificial Sequence
  Description of Artificial Sequence: Synthetic oligonucleotide
ucaaagccgugccagucgc

SEQ ID NO: 1880314 - RNA, 19 nt, Artificial Sequence
  Description of Artificial Sequence: Synthetic oligonucleotide
cuccucaccacaugaacag

SEQ ID NO: 1880315 - RNA, 19 nt, Artificial Sequence
  Description of Artificial Sequence: Synthetic oligonucleotide
gguaaucucauaccugugc

SEQ ID NO: 1880316 - RNA, 19 nt, Artificial Sequence
  Description of Artificial Sequence: Synthetic oligonucleotide
agguaaauccacuccagau

SEQ ID NO: 1880317 - RNA, 19 nt, Artificial Sequence
  Description of Artificial Sequence: Synthetic oligonucleotide
ccaaccuugacuagaaagc

SEQ ID NO: 1880318 - RNA, 19 nt, Artificial Sequence
  Description of Artificial Sequence: Synthetic oligonucleotide
guaaucucauaccugugca

SEQ ID NO: 1880319 - RNA, 19 nt, Artificial Sequence
  Description of Artificial Sequence: Synthetic oligonucleotide
cucuuugugugcugaauac

SEQ ID NO: 1880320 - RNA, 19 nt, Artificial Sequence
  Description of Artificial Sequence: Synthetic oligonucleotide
ucagcgcccacacacuuga

SEQ ID NO: 1880321 - RNA, 19 nt, Artificial Sequence
  Description of Artificial Sequence: Synthetic oligonucleotide
gaagguaaucucauaccug

SEQ ID NO: 1880322 - RNA, 19 nt, Artificial Sequence
  Description of Artificial Sequence: Synthetic oligonucleotide
aaauccacuccagauuccu

SEQ ID NO: 1880323 - RNA, 19 nt, Artificial Sequence
  Description of Artificial Sequence: Synthetic oligonucleotide
ucggacucugggcuuauug

SEQ ID NO: 1880324 - RNA, 19 nt, Artificial Sequence
  Description of Artificial Sequence: Synthetic oligonucleotide
aggaagccaaccuugacua

SEQ ID NO: 1880325 - RNA, 19 nt, Artificial Sequence
  Description of Artificial Sequence: Synthetic oligonucleotide
ggauacuucggacucuggg

SEQ ID NO: 1880326 - RNA, 19 nt, Artificial Sequence
  Description of Artificial Sequence: Synthetic oligonucleotide
gggcaagucacacagcucc

SEQ ID NO: 1880327 - RNA, 19 nt, Artificial Sequence
  Description of Artificial Sequence: Synthetic oligonucleotide
ggugagacgacaauagcag

SEQ ID NO: 1880328 - RNA, 19 nt, Artificial Sequence
  Description of Artificial Sequence: Synthetic oligonucleotide
aggacucuaucccaaccag

SEQ ID NO: 1880329 - RNA, 19 nt, Artificial Sequence
  Description of Artificial Sequence: Synthetic oligonucleotide
agauggagggaccgcagag

SEQ ID NO: 1880330 - RNA, 19 nt, Artificial Sequence
  Description of Artificial Sequence: Synthetic oligonucleotide
gucgcuguguucugagucg

SEQ ID NO: 1880331 - RNA, 19 nt, Artificial Sequence
  Description of Artificial Sequence: Synthetic oligonucleotide
aaccaugaccacugaguca

SEQ ID NO: 1880332 - RNA, 19 nt, Artificial Sequence
  Description of Artificial Sequence: Synthetic oligonucleotide
gaagugggaggcaugagca

SEQ ID NO: 1880333 - RNA, 19 nt, Artificial Sequence
  Description of Artificial Sequence: Synthetic oligonucleotide
ugaggugcaagcuguggac

SEQ ID NO: 1880334 - RNA, 19 nt, Artificial Sequence
  Description of Artificial Sequence: Synthetic oligonucleotide
gccaaccuugacuagaaag

SEQ ID NO: 1880335 - RNA, 19 nt, Artificial Sequence
  Description of Artificial Sequence: Synthetic oligonucleotide
gucaaagccgugccagucg

SEQ ID NO: 1880336 - RNA, 19 nt, Artificial Sequence
  Description of Artificial Sequence: Synthetic oligonucleotide
uguaccuccucaccacaug

SEQ ID NO: 1880337 - RNA, 19 nt, Artificial Sequence
  Description of Artificial Sequence: Synthetic oligonucleotide
ggagccuucugcaucaugg

SEQ ID NO: 1880338 - RNA, 19 nt, Artificial Sequence
  Description of Artificial Sequence: Synthetic oligonucleotide
agacuuaggcacaugggag

SEQ ID NO: 1880339 - RNA, 19 nt, Artificial Sequence
  Description of Artificial Sequence: Synthetic oligonucleotide
uagaaagcuguugucacuc

SEQ ID NO: 1880340 - RNA, 19 nt, Artificial Sequence
  Description of Artificial Sequence: Synthetic oligonucleotide
ugaggacucccucuuugug

SEQ ID NO: 1880341 - RNA, 19 nt, Artificial Sequence
  Description of Artificial Sequence: Synthetic oligonucleotide
ucguacuccagcucagcgc

SEQ ID NO: 1880342 - RNA, 19 nt, Artificial Sequence
  Description of Artificial Sequence: Synthetic oligonucleotide
aagugggaggcaugagcag

SEQ ID NO: 1880343 - RNA, 19 nt, Artificial Sequence
  Description of Artificial Sequence: Synthetic oligonucleotide
gagacgacaauagcagcag

SEQ ID NO: 1880344 - RNA, 19 nt, Artificial Sequence
  Description of Artificial Sequence: Synthetic oligonucleotide
caauggggcaucaauguca

SEQ ID NO: 1880345 - RNA, 19 nt, Artificial Sequence
  Description of Artificial Sequence: Synthetic oligonucleotide
aggagaggcaggauggugg

SEQ ID NO: 1880346 - RNA, 19 nt, Artificial Sequence
  Description of Artificial Sequence: Synthetic oligonucleotide
cauacuccagagacacugg

SEQ ID NO: 1880347 - RNA, 19 nt, Artificial Sequence
  Description of Artificial Sequence: Synthetic oligonucleotide
uucagucaggagacuuagg

SEQ ID NO: 1880348 - RNA, 19 nt, Artificial Sequence
  Description of Artificial Sequence: Synthetic oligonucleotide
agaggugaggaagccacac

SEQ ID NO: 1880349 - RNA, 19 nt, Artificial Sequence
  Description of Artificial Sequence: Synthetic oligonucleotide
gauggagggaccgcagagg

SEQ ID NO: 1880350 - RNA, 19 nt, Artificial Sequence
  Description of Artificial Sequence: Synthetic oligonucleotide
gugugcugaauacucacac

SEQ ID NO: 1880351 - RNA, 19 nt, Artificial Sequence
  Description of Artificial Sequence: Synthetic oligonucleotide
aggacucccucuuugugug

SEQ ID NO: 1880352 - RNA, 19 nt, Artificial Sequence
  Description of Artificial Sequence: Synthetic oligonucleotide
gacucuaucccaaccaguc

SEQ ID NO: 1880353 - RNA, 19 nt, Artificial Sequence
  Description of Artificial Sequence: Synthetic oligonucleotide
augggacucaacccauuuc

SEQ ID NO: 1880354 - RNA, 19 nt, Artificial Sequence
  Description of Artificial Sequence: Synthetic oligonucleotide
ucaacccauuucuucaguc

SEQ ID NO: 1880355 - RNA, 19 nt, Artificial Sequence
  Description of Artificial Sequence: Synthetic oligonucleotide
cuugacuagaaagcuguug

SEQ ID NO: 1880356 - RNA, 19 nt, Artificial Sequence
  Description of Artificial Sequence: Synthetic oligonucleotide
cauggccugcugcaaagcg

SEQ ID NO: 1880357 - RNA, 19 nt, Artificial Sequence
  Description of Artificial Sequence: Synthetic oligonucleotide
gucguacuccagcucagcg

SEQ ID NO: 1880358 - RNA, 19 nt, Artificial Sequence
  Description of Artificial Sequence: Synthetic oligonucleotide
uuaaggacucuaucccaac

SEQ ID NO: 1880359 - RNA, 19 nt, Artificial Sequence
  Description of Artificial Sequence: Synthetic oligonucleotide
agcaugucgggaagcaggc

SEQ ID NO: 1880360 - RNA, 19 nt, Artificial Sequence
  Description of Artificial Sequence: Synthetic oligonucleotide
ugccacucaagcucagcag

SEQ ID NO: 1880361 - RNA, 19 nt, Artificial Sequence
  Description of Artificial Sequence: Synthetic oligonucleotide
caaagcggauacuucggac

SEQ ID NO: 1880362 - RNA, 19 nt, Artificial Sequence
  Description of Artificial Sequence: Synthetic oligonucleotide
ggagggaccgcagaggugg

SEQ ID NO: 1880363 - RNA, 19 nt, Artificial Sequence
  Description of Artificial Sequence: Synthetic oligonucleotide
guaaccuucagggauggga

SEQ ID NO: 1880364 - RNA, 19 nt, Artificial Sequence
  Description of Artificial Sequence: Synthetic oligonucleotide
accuugacuagaaagcugu

SEQ ID NO: 1880365 - RNA, 19 nt, Artificial Sequence
  Description of Artificial Sequence: Synthetic oligonucleotide
aggaagccacaccaucacg

SEQ ID NO: 1880366 - RNA, 19 nt, Artificial Sequence
  Description of Artificial Sequence: Synthetic oligonucleotide
ucuuugugugcugaauacu

SEQ ID NO: 1880367 - RNA, 19 nt, Artificial Sequence
  Description of Artificial Sequence: Synthetic oligonucleotide
guugucacucuccugagua

SEQ ID NO: 1880368 - RNA, 19 nt, Artificial Sequence
  Description of Artificial Sequence: Synthetic oligonucleotide
cuugcgggagagcaccgcg

SEQ ID NO: 1880369 - RNA, 19 nt, Artificial Sequence
  Description of Artificial Sequence: Synthetic oligonucleotide
acacuugaugcuguaaccu

SEQ ID NO: 1880370 - RNA, 19 nt, Artificial Sequence
  Description of Artificial Sequence: Synthetic oligonucleotide
ugacacugccacucaagcu

SEQ ID NO: 1880371 - RNA, 19 nt, Artificial Sequence
  Description of Artificial Sequence: Synthetic oligonucleotide
ugggaacuguaccuccuca

SEQ ID NO: 1880372 - RNA, 19 nt, Artificial Sequence
  Description of Artificial Sequence: Synthetic oligonucleotide
cuucagucaggagacuuag

SEQ ID NO: 1880373 - RNA, 19 nt, Artificial Sequence
  Description of Artificial Sequence: Synthetic oligonucleotide
auacucacacuugaugcug

SEQ ID NO: 1880374 - RNA, 19 nt, Artificial Sequence
  Description of Artificial Sequence: Synthetic oligonucleotide
agcagcauuuccucuuuga

SEQ ID NO: 1880375 - RNA, 19 nt, Artificial Sequence
  Description of Artificial Sequence: Synthetic oligonucleotide
agacaguagagccccuaug

SEQ ID NO: 1880376 - RNA, 19 nt, Artificial Sequence
  Description of Artificial Sequence: Synthetic oligonucleotide
auggguguaccgugguguc

SEQ ID NO: 1880377 - RNA, 19 nt, Artificial Sequence
  Description of Artificial Sequence: Synthetic oligonucleotide
auaagccuccaugggacuc

SEQ ID NO: 1880378 - RNA, 19 nt, Artificial Sequence
  Description of Artificial Sequence: Synthetic oligonucleotide
uugcgggagagcaccgcgg

SEQ ID NO: 1880379 - RNA, 19 nt, Artificial Sequence
  Description of Artificial Sequence: Synthetic oligonucleotide
gagguaaauccacuccaga

SEQ ID NO: 1880380 - RNA, 19 nt, Artificial Sequence
  Description of Artificial Sequence: Synthetic oligonucleotide
gacaccuucccugccacug

SEQ ID NO: 1880381 - RNA, 19 nt, Artificial Sequence
  Description of Artificial Sequence: Synthetic oligonucleotide
gaagccaaccuugacuaga

SEQ ID NO: 1880382 - RNA, 19 nt, Artificial Sequence
  Description of Artificial Sequence: Synthetic oligonucleotide
cucacggaugucuuugcuc

SEQ ID NO: 1880383 - RNA, 19 nt, Artificial Sequence
  Description of Artificial Sequence: Synthetic oligonucleotide
ugucacucuccugaguaac

SEQ ID NO: 1880384 - RNA, 19 nt, Artificial Sequence
  Description of Artificial Sequence: Synthetic oligonucleotide
cuugaggugcaagcugugg

SEQ ID NO: 1880385 - RNA, 19 nt, Artificial Sequence
  Description of Artificial Sequence: Synthetic oligonucleotide
ugccugcaccaucacacgc

SEQ ID NO: 1880386 - RNA, 19 nt, Artificial Sequence
  Description of Artificial Sequence: Synthetic oligonucleotide
uggugucgguccaugacuc

SEQ ID NO: 1880387 - RNA, 19 nt, Artificial Sequence
  Description of Artificial Sequence: Synthetic oligonucleotide
ugucgguccaugacucgug

SEQ ID NO: 1880388 - RNA, 19 nt, Artificial Sequence
  Description of Artificial Sequence: Synthetic oligonucleotide
acacaggugcccgugucac

SEQ ID NO: 1880389 - RNA, 19 nt, Artificial Sequence
  Description of Artificial Sequence: Synthetic oligonucleotide
caucacgcagcaugucggg

SEQ ID NO: 1880390 - RNA, 19 nt, Artificial Sequence
  Description of Artificial Sequence: Synthetic oligonucleotide
aucucauaccugugcagga

SEQ ID NO: 1880391 - RNA, 19 nt, Artificial Sequence
  Description of Artificial Sequence: Synthetic oligonucleotide
ugucuuugcucagccugcg

SEQ ID NO: 1880392 - RNA, 19 nt, Artificial Sequence
  Description of Artificial Sequence: Synthetic oligonucleotide
aaccuucagggaugggagu

SEQ ID NO: 1880393 - RNA, 19 nt, Artificial Sequence
  Description of Artificial Sequence: Synthetic oligonucleotide
ucacacgcacacaggugcc

SEQ ID NO: 1880394 - RNA, 19 nt, Artificial Sequence
  Description of Artificial Sequence: Synthetic oligonucleotide
uguugucacucuccugagu

SEQ ID NO: 1880395 - RNA, 19 nt, Artificial Sequence
  Description of Artificial Sequence: Synthetic oligonucleotide
ucacucuccugaguaacca

SEQ ID NO: 1880396 - RNA, 19 nt, Artificial Sequence
  Description of Artificial Sequence: Synthetic oligonucleotide
cagauaagccuccauggga

SEQ ID NO: 1880397 - RNA, 19 nt, Artificial Sequence
  Description of Artificial Sequence: Synthetic oligonucleotide
caugaccacugagucaugc

SEQ ID NO: 1880398 - RNA, 19 nt, Artificial Sequence
  Description of Artificial Sequence: Synthetic oligonucleotide
ucacgcagcaugucgggaa

SEQ ID NO: 1880399 - RNA, 19 nt, Artificial Sequence
  Description of Artificial Sequence: Synthetic oligonucleotide
acucuaucccaaccaguca

SEQ ID NO: 1880400 - RNA, 19 nt, Artificial Sequence
  Description of Artificial Sequence: Synthetic oligonucleotide
auuaaggacucuaucccaa

SEQ ID NO: 1880401 - RNA, 19 nt, Artificial Sequence
  Description of Artificial Sequence: Synthetic oligonucleotide
caggcgggcaggaacgacc

SEQ ID NO: 1880402 - RNA, 19 nt, Artificial Sequence
  Description of Artificial Sequence: Synthetic oligonucleotide
guaaccaugaccacugagu

SEQ ID NO: 1880403 - RNA, 19 nt, Artificial Sequence
  Description of Artificial Sequence: Synthetic oligonucleotide
caucacacgcacacaggug

SEQ ID NO: 1880404 - RNA, 19 nt, Artificial Sequence
  Description of Artificial Sequence: Synthetic oligonucleotide
agucguacuccagcucagc

SEQ ID NO: 1880405 - RNA, 19 nt, Artificial Sequence
  Description of Artificial Sequence: Synthetic oligonucleotide
acaggggccucacggaugu

SEQ ID NO: 1880406 - RNA, 19 nt, Artificial Sequence
  Description of Artificial Sequence: Synthetic oligonucleotide
gugcaagcuguggacaggg

SEQ ID NO: 1880407 - RNA, 19 nt, Artificial Sequence
  Description of Artificial Sequence: Synthetic oligonucleotide
gcugaauacucacacuuga

SEQ ID NO: 1880408 - RNA, 19 nt, Artificial Sequence
  Description of Artificial Sequence: Synthetic oligonucleotide
caacccauuucuucaguca

SEQ ID NO: 1880409 - RNA, 19 nt, Artificial Sequence
  Description of Artificial Sequence: Synthetic oligonucleotide
uaucccaaccagucauuaa

SEQ ID NO: 1880410 - RNA, 19 nt, Artificial Sequence
  Description of Artificial Sequence: Synthetic oligonucleotide
uggagauggugagacgaca

SEQ ID NO: 1880411 - RNA, 19 nt, Artificial Sequence
  Description of Artificial Sequence: Synthetic oligonucleotide
agccccuauggcuuggggu

SEQ ID NO: 1880412 - RNA, 19 nt, Artificial Sequence
  Description of Artificial Sequence: Synthetic oligonucleotide
ugaaggcagagugaaggua

SEQ ID NO: 1880413 - RNA, 19 nt, Artificial Sequence
  Description of Artificial Sequence: Synthetic oligonucleotide
cucauaccugugcaggauc

SEQ ID NO: 1880414 - RNA, 19 nt, Artificial Sequence
  Description of Artificial Sequence: Synthetic oligonucleotide
ucuaucccaaccagucauu

SEQ ID NO: 1880415 - RNA, 19 nt, Artificial Sequence
  Description of Artificial Sequence: Synthetic oligonucleotide
agcgcccacacacuugaca

SEQ ID NO: 1880416 - RNA, 19 nt, Artificial Sequence
  Description of Artificial Sequence: Synthetic oligonucleotide
ggagacuuaggcacauggg

SEQ ID NO: 1880417 - RNA, 19 nt, Artificial Sequence
  Description of Artificial Sequence: Synthetic oligonucleotide
uccaugggacucaacccau

SEQ ID NO: 1880418 - RNA, 19 nt, Artificial Sequence
  Description of Artificial Sequence: Synthetic oligonucleotide
gcccgugucaccuucgcag

SEQ ID NO: 1880419 - RNA, 19 nt, Artificial Sequence
  Description of Artificial Sequence: Synthetic oligonucleotide
guaccuccucaccacauga

SEQ ID NO: 1880420 - RNA, 19 nt, Artificial Sequence
  Description of Artificial Sequence: Synthetic oligonucleotide
ugcugcaaagcggauacuu

SEQ ID NO: 1880421 - RNA, 19 nt, Artificial Sequence
  Description of Artificial Sequence: Synthetic oligonucleotide
gccacucaagcucagcagc

SEQ ID NO: 1880422 - RNA, 19 nt, Artificial Sequence
  Description of Artificial Sequence: Synthetic oligonucleotide
agauggugagacgacaaua

SEQ ID NO: 1880423 - RNA, 19 nt, Artificial Sequence
  Description of Artificial Sequence: Synthetic oligonucleotide
acucuccugaguaaccaug

SEQ ID NO: 1880424 - RNA, 19 nt, Artificial Sequence
  Description of Artificial Sequence: Synthetic oligonucleotide
ccauacuccagagacacug

SEQ ID NO: 1880425 - RNA, 19 nt, Artificial Sequence
  Description of Artificial Sequence: Synthetic oligonucleotide
ccaucacgcagcaugucgg

SEQ ID NO: 1880426 - RNA, 19 nt, Artificial Sequence
  Description of Artificial Sequence: Synthetic oligonucleotide
agcagcauggguguaccgu

SEQ ID NO: 1880427 - RNA, 19 nt, Artificial Sequence
  Description of Artificial Sequence: Synthetic oligonucleotide
cagucaggagacuuaggca

SEQ ID NO: 1880428 - RNA, 19 nt, Artificial Sequence
  Description of Artificial Sequence: Synthetic oligonucleotide
ggcaugagcagggucaagc

SEQ ID NO: 1880429 - RNA, 19 nt, Artificial Sequence
  Description of Artificial Sequence: Synthetic oligonucleotide
agcuugaggugcaagcugu

SEQ ID NO: 1880430 - RNA, 19 nt, Artificial Sequence
  Description of Artificial Sequence: Synthetic oligonucleotide
cuguaaccuucagggaugg

SEQ ID NO: 1880431 - RNA, 19 nt, Artificial Sequence
  Description of Artificial Sequence: Synthetic oligonucleotide
acacuggcaggaaccuugc

SEQ ID NO: 1880432 - RNA, 19 nt, Artificial Sequence
  Description of Artificial Sequence: Synthetic oligonucleotide
gaggacucccucuuugugu

SEQ ID NO: 1880433 - RNA, 19 nt, Artificial Sequence
  Description of Artificial Sequence: Synthetic oligonucleotide
uggguguaccguggugucg

SEQ ID NO: 1880434 - RNA, 19 nt, Artificial Sequence
  Description of Artificial Sequence: Synthetic oligonucleotide
cagccugcgcacugaaggc

SEQ ID NO: 1880435 - RNA, 19 nt, Artificial Sequence
  Description of Artificial Sequence: Synthetic oligonucleotide
acccauuucuucagucagg

SEQ ID NO: 1880436 - RNA, 19 nt, Artificial Sequence
  Description of Artificial Sequence: Synthetic oligonucleotide
ucgugccugcaccaucaca

SEQ ID NO: 1880437 - RNA, 19 nt, Artificial Sequence
  Description of Artificial Sequence: Synthetic oligonucleotide
acgacaauagcagcagcaa

SEQ ID NO: 1880438 - RNA, 19 nt, Artificial Sequence
  Description of Artificial Sequence: Synthetic oligonucleotide
ugucaccuucgcaggccag

SEQ ID NO: 1880439 - RNA, 19 nt, Artificial Sequence
  Description of Artificial Sequence: Synthetic oligonucleotide
gcgcacugaaggcagagug

SEQ ID NO: 1880440 - RNA, 19 nt, Artificial Sequence
  Description of Artificial Sequence: Synthetic oligonucleotide
ggaggagguaaauccacuc

SEQ ID NO: 1880441 - RNA, 19 nt, Artificial Sequence
  Description of Artificial Sequence: Synthetic oligonucleotide
cuauggcuugggguggagg

SEQ ID NO: 1880442 - RNA, 19 nt, Artificial Sequence
  Description of Artificial Sequence: Synthetic oligonucleotide
uaccuccucaccacaugaa

SEQ ID NO: 1880443 - RNA, 19 nt, Artificial Sequence
  Description of Artificial Sequence: Synthetic oligonucleotide
ugggcuuauugccucuguu

SEQ ID NO: 1880444 - RNA, 19 nt, Artificial Sequence
  Description of Artificial Sequence: Synthetic oligonucleotide
cagagacacuggcaggaac

SEQ ID NO: 1880445 - RNA, 19 nt, Artificial Sequence
  Description of Artificial Sequence: Synthetic oligonucleotide
aagccaaccuugacuagaa

SEQ ID NO: 1880446 - RNA, 19 nt, Artificial Sequence
  Description of Artificial Sequence: Synthetic oligonucleotide
ucgcaggccagcagcauuu

SEQ ID NO: 1880447 - RNA, 19 nt, Artificial Sequence
  Description of Artificial Sequence: Synthetic oligonucleotide
gugcugaauacucacacuu

SEQ ID NO: 1880448 - RNA, 19 nt, Artificial Sequence
  Description of Artificial Sequence: Synthetic oligonucleotide
ucgguccaugacucgugcc

SEQ ID NO: 1880449 - RNA, 19 nt, Artificial Sequence
  Description of Artificial Sequence: Synthetic oligonucleotide
gccccuauggcuuggggug

SEQ ID NO: 1880450 - RNA, 19 nt, Artificial Sequence
  Description of Artificial Sequence: Synthetic oligonucleotide
ccaaguaccacagaccuga

SEQ ID NO: 1880451 - RNA, 19 nt, Artificial Sequence
  Description of Artificial Sequence: Synthetic oligonucleotide
cagggucaagcccugccac

SEQ ID NO: 1880452 - RNA, 19 nt, Artificial Sequence
  Description of Artificial Sequence: Synthetic oligonucleotide
aagccgugccagucgcugu

SEQ ID NO: 1880453 - RNA, 19 nt, Artificial Sequence
  Description of Artificial Sequence: Synthetic oligonucleotide
ccuccaugggacucaaccc

SEQ ID NO: 1880454 - RNA, 19 nt, Artificial Sequence
  Description of Artificial Sequence: Synthetic oligonucleotide
uguaaccuucagggauggg

SEQ ID NO: 1880455 - RNA, 19 nt, Artificial Sequence
  Description of Artificial Sequence: Synthetic oligonucleotide
aggugcccgugucaccuuc

SEQ ID NO: 1880456 - RNA, 19 nt, Artificial Sequence
  Description of Artificial Sequence: Synthetic oligonucleotide
caucaaaguggacauggcu

SEQ ID NO: 1880457 - RNA, 19 nt, Artificial Sequence
  Description of Artificial Sequence: Synthetic oligonucleotide
cugccacucaagcucagca

SEQ ID NO: 1880458 - RNA, 19 nt, Artificial Sequence
  Description of Artificial Sequence: Synthetic oligonucleotide
gucgguccaugacucgugc

SEQ ID NO: 1880459 - RNA, 19 nt, Artificial Sequence
  Description of Artificial Sequence: Synthetic oligonucleotide
guagagccccuauggcuug

SEQ ID NO: 1880460 - RNA, 19 nt, Artificial Sequence
  Description of Artificial Sequence: Synthetic oligonucleotide
gcuuauugccucuguuggc

SEQ ID NO: 1880461 - RNA, 19 nt, Artificial Sequence
  Description of Artificial Sequence: Synthetic oligonucleotide
gucacucuccugaguaacc

SEQ ID NO: 1880462 - RNA, 19 nt, Artificial Sequence
  Description of Artificial Sequence: Synthetic oligonucleotide
agccauggacaccuucccu

SEQ ID NO: 1880463 - RNA, 19 nt, Artificial Sequence
  Description of Artificial Sequence: Synthetic oligonucleotide
gaggagcuugaggugcaag

SEQ ID NO: 1880464 - RNA, 19 nt, Artificial Sequence
  Description of Artificial Sequence: Synthetic oligonucleotide
gagucguacuccagcucag

SEQ ID NO: 1880465 - RNA, 19 nt, Artificial Sequence
  Description of Artificial Sequence: Synthetic oligonucleotide
gcuguaaccuucagggaug

SEQ ID NO: 1880466 - RNA, 19 nt, Artificial Sequence
  Description of Artificial Sequence: Synthetic oligonucleotide
cucagcgcccacacacuug

SEQ ID NO: 1880467 - RNA, 19 nt, Artificial Sequence
  Description of Artificial Sequence: Synthetic oligonucleotide
agccgugccagucgcugug

SEQ ID NO: 1880468 - RNA, 19 nt, Artificial Sequence
  Description of Artificial Sequence: Synthetic oligonucleotide
gugggagaggaggccauag

SEQ ID NO: 1880469 - RNA, 19 nt, Artificial Sequence
  Description of Artificial Sequence: Synthetic oligonucleotide
ucaggagacuuaggcacau

SEQ ID NO: 1880470 - RNA, 19 nt, Artificial Sequence
  Description of Artificial Sequence: Synthetic oligonucleotide
acucgugccugcaccauca

SEQ ID NO: 1880471 - RNA, 19 nt, Artificial Sequence
  Description of Artificial Sequence: Synthetic oligonucleotide
guccaugacucgugccugc

SEQ ID NO: 1880472 - RNA, 19 nt, Artificial Sequence
  Description of Artificial Sequence: Synthetic oligonucleotide
accauccagcagcaugggu

SEQ ID NO: 1880473 - RNA, 19 nt, Artificial Sequence
  Description of Artificial Sequence: Synthetic oligonucleotide
gauaagccuccaugggacu

SEQ ID NO: 1880474 - RNA, 19 nt, Artificial Sequence
  Description of Artificial Sequence: Synthetic oligonucleotide
acgcagcaugucgggaagc

SEQ ID NO: 1880475 - RNA, 19 nt, Artificial Sequence
  Description of Artificial Sequence: Synthetic oligonucleotide
cugagucguacuccagcuc

SEQ ID NO: 1880476 - RNA, 19 nt, Artificial Sequence
  Description of Artificial Sequence: Synthetic oligonucleotide
caguagagccccuauggcu

SEQ ID NO: 1880477 - RNA, 19 nt, Artificial Sequence
  Description of Artificial Sequence: Synthetic oligonucleotide
gacucgugccugcaccauc

SEQ ID NO: 1880478 - RNA, 19 nt, Artificial Sequence
  Description of Artificial Sequence: Synthetic oligonucleotide
ccacucaagcucagcagcc

SEQ ID NO: 1880479 - RNA, 19 nt, Artificial Sequence
  Description of Artificial Sequence: Synthetic oligonucleotide
cucagccugcgcacugaag

SEQ ID NO: 1880480 - RNA, 19 nt, Artificial Sequence
  Description of Artificial Sequence: Synthetic oligonucleotide
ggugucgguccaugacucg

SEQ ID NO: 1880481 - RNA, 19 nt, Artificial Sequence
  Description of Artificial Sequence: Synthetic oligonucleotide
gucaccuucgcaggccagc

SEQ ID NO: 1880482 - RNA, 19 nt, Artificial Sequence
  Description of Artificial Sequence: Synthetic oligonucleotide
accgcggccaggcgggcag

SEQ ID NO: 1880483 - RNA, 19 nt, Artificial Sequence
  Description of Artificial Sequence: Synthetic oligonucleotide
guggugucgguccaugacu

SEQ ID NO: 1880484 - RNA, 19 nt, Artificial Sequence
  Description of Artificial Sequence: Synthetic oligonucleotide
cagaccugagggguaggag

SEQ ID NO: 1880485 - RNA, 19 nt, Artificial Sequence
  Description of Artificial Sequence: Synthetic oligonucleotide
gcaagucacacagcucccg

SEQ ID NO: 1880486 - RNA, 19 nt, Artificial Sequence
  Description of Artificial Sequence: Synthetic oligonucleotide
cucuaucccaaccagucau

SEQ ID NO: 1880487 - RNA, 19 nt, Artificial Sequence
  Description of Artificial Sequence: Synthetic oligonucleotide
cacggaugucuuugcucag

SEQ ID NO: 1880488 - RNA, 19 nt, Artificial Sequence
  Description of Artificial Sequence: Synthetic oligonucleotide
gagugaagguaaucucaua

SEQ ID NO: 1880489 - RNA, 19 nt, Artificial Sequence
  Description of Artificial Sequence: Synthetic oligonucleotide
cugggaacuguaccuccuc

SEQ ID NO: 1880490 - RNA, 19 nt, Artificial Sequence
  Description of Artificial Sequence: Synthetic oligonucleotide
uccaugacucgugccugca

SEQ ID NO: 1880491 - RNA, 19 nt, Artificial Sequence
  Description of Artificial Sequence: Synthetic oligonucleotide
aaggcagagugaagguaau

SEQ ID NO: 1880492 - RNA, 19 nt, Artificial Sequence
  Description of Artificial Sequence: Synthetic oligonucleotide
ccauggacaccuucccugc

SEQ ID NO: 1880493 - RNA, 19 nt, Artificial Sequence
  Description of Artificial Sequence: Synthetic oligonucleotide
agauuccuccucucagaua

SEQ ID NO: 1880494 - RNA, 19 nt, Artificial Sequence
  Description of Artificial Sequence: Synthetic oligonucleotide
agguaaucucauaccugug

SEQ ID NO: 1880495 - RNA, 19 nt, Artificial Sequence
  Description of Artificial Sequence: Synthetic oligonucleotide
auugccucuguuggcugca

SEQ ID NO: 1880496 - RNA, 19 nt, Artificial Sequence
  Description of Artificial Sequence: Synthetic oligonucleotide
gucuuugcucagccugcgc

SEQ ID NO: 1880497 - RNA, 19 nt, Artificial Sequence
  Description of Artificial Sequence: Synthetic oligonucleotide
acagaccugagggguagga

SEQ ID NO: 1880498 - RNA, 19 nt, Artificial Sequence
  Description of Artificial Sequence: Synthetic oligonucleotide
ggcagagugaagguaaucu

SEQ ID NO: 1880499 - RNA, 19 nt, Artificial Sequence
  Description of Artificial Sequence: Synthetic oligonucleotide
ugucgggaagcaggcagaa

SEQ ID NO: 1880500 - RNA, 19 nt, Artificial Sequence
  Description of Artificial Sequence: Synthetic oligonucleotide
ucgcuguguucugagucgu

SEQ ID NO: 1880501 - RNA, 19 nt, Artificial Sequence
  Description of Artificial Sequence: Synthetic oligonucleotide
guucugagucguacuccag

SEQ ID NO: 1880502 - RNA, 19 nt, Artificial Sequence
  Description of Artificial Sequence: Synthetic oligonucleotide
cugaguaaccaugaccacu

SEQ ID NO: 1880503 - RNA, 19 nt, Artificial Sequence
  Description of Artificial Sequence: Synthetic oligonucleotide
cacaggugcccgugucacc

SEQ ID NO: 1880504 - RNA, 19 nt, Artificial Sequence
  Description of Artificial Sequence: Synthetic oligonucleotide
gcaauggggcaucaauguc

SEQ ID NO: 1880505 - RNA, 19 nt, Artificial Sequence
  Description of Artificial Sequence: Synthetic oligonucleotide
gguggaggagguaaaucca

SEQ ID NO: 1880506 - RNA, 19 nt, Artificial Sequence
  Description of Artificial Sequence: Synthetic oligonucleotide
ggugcaagcuguggacagg

SEQ ID NO: 1880507 - RNA, 19 nt, Artificial Sequence
  Description of Artificial Sequence: Synthetic oligonucleotide
caaaguggacauggcucug

SEQ ID NO: 1880508 - RNA, 19 nt, Artificial Sequence
  Description of Artificial Sequence: Synthetic oligonucleotide
cacugagucaugcagcuuu

SEQ ID NO: 1880509 - RNA, 19 nt, Artificial Sequence
  Description of Artificial Sequence: Synthetic oligonucleotide
cacuggcaggaaccuugcg

SEQ ID NO: 1880510 - RNA, 19 nt, Artificial Sequence
  Description of Artificial Sequence: Synthetic oligonucleotide
uacuucggacucugggcuu

SEQ ID NO: 1880511 - RNA, 19 nt, Artificial Sequence
  Description of Artificial Sequence: Synthetic oligonucleotide
cacacgcacacaggugccc

SEQ ID NO: 1880512 - RNA, 19 nt, Artificial Sequence
  Description of Artificial Sequence: Synthetic oligonucleotide
caaccuugacuagaaagcu

SEQ ID NO: 1880513 - RNA, 19 nt, Artificial Sequence
  Description of Artificial Sequence: Synthetic oligonucleotide
cauggguguaccguggugu

SEQ ID NO: 1880514 - RNA, 19 nt, Artificial Sequence
  Description of Artificial Sequence: Synthetic oligonucleotide
cggacucugggcuuauugc

SEQ ID NO: 1880515 - RNA, 19 nt, Artificial Sequence
  Description of Artificial Sequence: Synthetic oligonucleotide
gcaaagcggauacuucgga

SEQ ID NO: 1880516 - RNA, 19 nt, Artificial Sequence
  Description of Artificial Sequence: Synthetic oligonucleotide
acucacacuugaugcugua

SEQ ID NO: 1880517 - RNA, 19 nt, Artificial Sequence
  Description of Artificial Sequence: Synthetic oligonucleotide
cauggcucugggagccuuc

SEQ ID NO: 1880518 - RNA, 19 nt, Artificial Sequence
  Description of Artificial Sequence: Synthetic oligonucleotide
cugcgcacugaaggcagag

SEQ ID NO: 1880519 - RNA, 19 nt, Artificial Sequence
  Description of Artificial Sequence: Synthetic oligonucleotide
cccgugucaccuucgcagg

SEQ ID NO: 1880520 - RNA, 19 nt, Artificial Sequence
  Description of Artificial Sequence: Synthetic oligonucleotide
ggcagaauuuaaggcucag

SEQ ID NO: 1880521 - RNA, 19 nt, Artificial Sequence
  Description of Artificial Sequence: Synthetic oligonucleotide
cugaauacucacacuugau

SEQ ID NO: 1880522 - RNA, 19 nt, Artificial Sequence
  Description of Artificial Sequence: Synthetic oligonucleotide
agccugcgcacugaaggca

SEQ ID NO: 1880523 - RNA, 19 nt, Artificial Sequence
  Description of Artificial Sequence: Synthetic oligonucleotide
aucacgcagcaugucggga

SEQ ID NO: 1880524 - RNA, 19 nt, Artificial Sequence
  Description of Artificial Sequence: Synthetic oligonucleotide
augucgggaagcaggcaga

SEQ ID NO: 1880525 - RNA, 19 nt, Artificial Sequence
  Description of Artificial Sequence: Synthetic oligonucleotide
aggcagaauuuaaggcuca

SEQ ID NO: 1880526 - RNA, 19 nt, Artificial Sequence
  Description of Artificial Sequence: Synthetic oligonucleotide
ugccagucgcuguguucug

SEQ ID NO: 1880527 - RNA, 19 nt, Artificial Sequence
  Description of Artificial Sequence: Synthetic oligonucleotide
gugccagucgcuguguucu

SEQ ID NO: 1880528 - RNA, 19 nt, Artificial Sequence
  Description of Artificial Sequence: Synthetic oligonucleotide
gguccaugacucgugccug

SEQ ID NO: 1880529 - RNA, 19 nt, Artificial Sequence
  Description of Artificial Sequence: Synthetic oligonucleotide
gcagaagugggaggcauga

SEQ ID NO: 1880530 - RNA, 19 nt, Artificial Sequence
  Description of Artificial Sequence: Synthetic oligonucleotide
caggaaccuugcgggagag

SEQ ID NO: 1880531 - RNA, 19 nt, Artificial Sequence
  Description of Artificial Sequence: Synthetic oligonucleotide
gagacacuggcaggaaccu

SEQ ID NO: 1880532 - RNA, 19 nt, Artificial Sequence
  Description of Artificial Sequence: Synthetic oligonucleotide
gugcccgugucaccuucgc

SEQ ID NO: 1880533 - RNA, 19 nt, Artificial Sequence
  Description of Artificial Sequence: Synthetic oligonucleotide
gaccgcagagguggagaug

SEQ ID NO: 1880534 - RNA, 19 nt, Artificial Sequence
  Description of Artificial Sequence: Synthetic oligonucleotide
ggaagcaggcagaauuuaa

SEQ ID NO: 1880535 - RNA, 19 nt, Artificial Sequence
  Description of Artificial Sequence: Synthetic oligonucleotide
ccugaguaaccaugaccac

SEQ ID NO: 1880536 - RNA, 19 nt, Artificial Sequence
  Description of Artificial Sequence: Synthetic oligonucleotide
ggagauggugagacgacaa

SEQ ID NO: 1880537 - RNA, 19 nt, Artificial Sequence
  Description of Artificial Sequence: Synthetic oligonucleotide
agccaaccuugacuagaaa

SEQ ID NO: 1880538 - RNA, 19 nt, Artificial Sequence
  Description of Artificial Sequence: Synthetic oligonucleotide
accguggugucgguccaug

SEQ ID NO: 1880539 - RNA, 19 nt, Artificial Sequence
  Description of Artificial Sequence: Synthetic oligonucleotide
guaccguggugucggucca

SEQ ID NO: 1880540 - RNA, 19 nt, Artificial Sequence
  Description of Artificial Sequence: Synthetic oligonucleotide
gcacugaaggcagagugaa

SEQ ID NO: 1880541 - RNA, 19 nt, Artificial Sequence
  Description of Artificial Sequence: Synthetic oligonucleotide
gaggcaugagcagggucaa

SEQ ID NO: 1880542 - RNA, 19 nt, Artificial Sequence
  Description of Artificial Sequence: Synthetic oligonucleotide
acuucggacucugggcuua

SEQ ID NO: 1880543 - RNA, 19 nt, Artificial Sequence
  Description of Artificial Sequence: Synthetic oligonucleotide
gcauggguguaccguggug

SEQ ID NO: 1880544 - RNA, 19 nt, Artificial Sequence
  Description of Artificial Sequence: Synthetic oligonucleotide
gcucccgcuugacacugcc

SEQ ID NO: 1880545 - RNA, 19 nt, Artificial Sequence
  Description of Artificial Sequence: Synthetic oligonucleotide
gcagcaauggggcaucaau

SEQ ID NO: 1880546 - RNA, 19 nt, Artificial Sequence
  Description of Artificial Sequence: Synthetic oligonucleotide
ggcaucaaugucacacaga

SEQ ID NO: 1880547 - RNA, 19 nt, Artificial Sequence
  Description of Artificial Sequence: Synthetic oligonucleotide
acgcacacaggugcccgug

SEQ ID NO: 1880548 - RNA, 19 nt, Artificial Sequence
  Description of Artificial Sequence: Synthetic oligonucleotide
accuugcgggagagcaccg

SEQ ID NO: 1880549 - RNA, 19 nt, Artificial Sequence
  Description of Artificial Sequence: Synthetic oligonucleotide
gacucccucuuugugugcu

SEQ ID NO: 1880550 - RNA, 19 nt, Artificial Sequence
  Description of Artificial Sequence: Synthetic oligonucleotide
acugagucaugcagcuuuu

SEQ ID NO: 1880551 - RNA, 19 nt, Artificial Sequence
  Description of Artificial Sequence: Synthetic oligonucleotide
cagcucccgcuugacacug

SEQ ID NO: 1880552 - RNA, 19 nt, Artificial Sequence
  Description of Artificial Sequence: Synthetic oligonucleotide
cacuugaugcuguaaccuu

SEQ ID NO: 1880553 - RNA, 19 nt, Artificial Sequence
  Description of Artificial Sequence: Synthetic oligonucleotide
gcaggaaccuugcgggaga

SEQ ID NO: 1880554 - RNA, 19 nt, Artificial Sequence
  Description of Artificial Sequence: Synthetic oligonucleotide
gcauuuccucuuugaggac

SEQ ID NO: 1880555 - RNA, 19 nt, Artificial Sequence
  Description of Artificial Sequence: Synthetic oligonucleotide
ccacacacuugacaccauc

SEQ ID NO: 1880556 - RNA, 19 nt, Artificial Sequence
  Description of Artificial Sequence: Synthetic oligonucleotide
agcucagcgcccacacacu

SEQ ID NO: 1880557 - RNA, 19 nt, Artificial Sequence
  Description of Artificial Sequence: Synthetic oligonucleotide
ccagcagcauggguguacc

SEQ ID NO: 1880558 - RNA, 19 nt, Artificial Sequence
  Description of Artificial Sequence: Synthetic oligonucleotide
agcucccgcuugacacugc

SEQ ID NO: 1880559 - RNA, 19 nt, Artificial Sequence
  Description of Artificial Sequence: Synthetic oligonucleotide
gccucacggaugucuuugc

SEQ ID NO: 1880560 - RNA, 19 nt, Artificial Sequence
  Description of Artificial Sequence: Synthetic oligonucleotide
agggaccgcagagguggag

SEQ ID NO: 1880561 - RNA, 19 nt, Artificial Sequence
  Description of Artificial Sequence: Synthetic oligonucleotide
cucgugccugcaccaucac

SEQ ID NO: 1880562 - RNA, 19 nt, Artificial Sequence
  Description of Artificial Sequence: Synthetic oligonucleotide
gggaggcaugagcaggguc

SEQ ID NO: 1880563 - RNA, 19 nt, Artificial Sequence
  Description of Artificial Sequence: Synthetic oligonucleotide
ggugcccgugucaccuucg

SEQ ID NO: 1880564 - RNA, 19 nt, Artificial Sequence
  Description of Artificial Sequence: Synthetic oligonucleotide
cguggugucgguccaugac

SEQ ID NO: 1880565 - RNA, 19 nt, Artificial Sequence
  Description of Artificial Sequence: Synthetic oligonucleotide
cucccucuuugugugcuga

SEQ ID NO: 1880566 - RNA, 19 nt, Artificial Sequence
  Description of Artificial Sequence: Synthetic oligonucleotide
caugggacucaacccauuu

SEQ ID NO: 1880567 - RNA, 19 nt, Artificial Sequence
  Description of Artificial Sequence: Synthetic oligonucleotide
ggacucccucuuugugugc

SEQ ID NO: 1880568 - RNA, 19 nt, Artificial Sequence
  Description of Artificial Sequence: Synthetic oligonucleotide
aggcaugagcagggucaag

SEQ ID NO: 1880569 - RNA, 19 nt, Artificial Sequence
  Description of Artificial Sequence: Synthetic oligonucleotide
accacagaccugaggggua

SEQ ID NO: 1880570 - RNA, 19 nt, Artificial Sequence
  Description of Artificial Sequence: Synthetic oligonucleotide
gggaccgcagagguggaga

SEQ ID NO: 1880571 - RNA, 19 nt, Artificial Sequence
  Description of Artificial Sequence: Synthetic oligonucleotide
gugucgguccaugacucgu

SEQ ID NO: 1880572 - RNA, 19 nt, Artificial Sequence
  Description of Artificial Sequence: Synthetic oligonucleotide
acauggcucugggagccuu

SEQ ID NO: 1880573 - RNA, 19 nt, Artificial Sequence
  Description of Artificial Sequence: Synthetic oligonucleotide
gcuugacacugccacucaa

SEQ ID NO: 1880574 - RNA, 19 nt, Artificial Sequence
  Description of Artificial Sequence: Synthetic oligonucleotide
gcacacaggugcccguguc

SEQ ID NO: 1880575 - RNA, 19 nt, Artificial Sequence
  Description of Artificial Sequence: Synthetic oligonucleotide
gcuugaggugcaagcugug

SEQ ID NO: 1880576 - RNA, 19 nt, Artificial Sequence
  Description of Artificial Sequence: Synthetic oligonucleotide
ccgugucaccuucgcaggc

SEQ ID NO: 1880577 - RNA, 19 nt, Artificial Sequence
  Description of Artificial Sequence: Synthetic oligonucleotide
cuguaccuccucaccacau

SEQ ID NO: 1880578 - RNA, 19 nt, Artificial Sequence
  Description of Artificial Sequence: Synthetic oligonucleotide
cagucaaagccgugccagu

SEQ ID NO: 1880579 - RNA, 19 nt, Artificial Sequence
  Description of Artificial Sequence: Synthetic oligonucleotide
guguaccguggugucgguc

SEQ ID NO: 1880580 - RNA, 19 nt, Artificial Sequence
  Description of Artificial Sequence: Synthetic oligonucleotide
ccacccaggggagagguga

SEQ ID NO: 1880581 - RNA, 19 nt, Artificial Sequence
  Description of Artificial Sequence: Synthetic oligonucleotide
ccaugacucgugccugcac

SEQ ID NO: 1880582 - RNA, 19 nt, Artificial Sequence
  Description of Artificial Sequence: Synthetic oligonucleotide
cugcaccaucacacgcaca

SEQ ID NO: 1880583 - RNA, 19 nt, Artificial Sequence
  Description of Artificial Sequence: Synthetic oligonucleotide
ggaugucuuugcucagccu

SEQ ID NO: 1880584 - RNA, 19 nt, Artificial Sequence
  Description of Artificial Sequence: Synthetic oligonucleotide
cacucuccugaguaaccau

SEQ ID NO: 1880585 - RNA, 19 nt, Artificial Sequence
  Description of Artificial Sequence: Synthetic oligonucleotide
cgcacugaaggcagaguga

SEQ ID NO: 1880586 - RNA, 19 nt, Artificial Sequence
  Description of Artificial Sequence: Synthetic oligonucleotide
cagcgcccacacacuugac

SEQ ID NO: 1880587 - RNA, 19 nt, Artificial Sequence
  Description of Artificial Sequence: Synthetic oligonucleotide
ccccuauggcuuggggugg

SEQ ID NO: 1880588 - RNA, 19 nt, Artificial Sequence
  Description of Artificial Sequence: Synthetic oligonucleotide
gggaagcaggcagaauuua

SEQ ID NO: 1880589 - RNA, 19 nt, Artificial Sequence
  Description of Artificial Sequence: Synthetic oligonucleotide
uaccguggugucgguccau

SEQ ID NO: 1880590 - RNA, 19 nt, Artificial Sequence
  Description of Artificial Sequence: Synthetic oligonucleotide
ggacucuaucccaaccagu

SEQ ID NO: 1880591 - RNA, 19 nt, Artificial Sequence
  Description of Artificial Sequence: Synthetic oligonucleotide
cggauacuucggacucugg

SEQ ID NO: 1880592 - RNA, 19 nt, Artificial Sequence
  Description of Artificial Sequence: Synthetic oligonucleotide
cacucaagcucagcagccu

SEQ ID NO: 1880593 - RNA, 19 nt, Artificial Sequence
  Description of Artificial Sequence: Synthetic oligonucleotide
ccuugcgggagagcaccgc

SEQ ID NO: 1880594 - RNA, 19 nt, Artificial Sequence
  Description of Artificial Sequence: Synthetic oligonucleotide
gccugccauacuccagaga

SEQ ID NO: 1880595 - RNA, 19 nt, Artificial Sequence
  Description of Artificial Sequence: Synthetic oligonucleotide
uucggacucugggcuuauu

SEQ ID NO: 1880596 - RNA, 19 nt, Artificial Sequence
  Description of Artificial Sequence: Synthetic oligonucleotide
caaagccgugccagucgcu

SEQ ID NO: 1880597 - RNA, 19 nt, Artificial Sequence
  Description of Artificial Sequence: Synthetic oligonucleotide
cagucgcuguguucugagu

SEQ ID NO: 1880598 - RNA, 19 nt, Artificial Sequence
  Description of Artificial Sequence: Synthetic oligonucleotide
gggaugggagugacacuga

SEQ ID NO: 1880599 - RNA, 19 nt, Artificial Sequence
  Description of Artificial Sequence: Synthetic oligonucleotide
ugggagccuucugcaucau

SEQ ID NO: 1880600 - RNA, 19 nt, Artificial Sequence
  Description of Artificial Sequence: Synthetic oligonucleotide
ggaccgcagagguggagau

SEQ ID NO: 1880601 - RNA, 19 nt, Artificial Sequence
  Description of Artificial Sequence: Synthetic oligonucleotide
gcacaugggagaggaggaa

SEQ ID NO: 1880602 - RNA, 19 nt, Artificial Sequence
  Description of Artificial Sequence: Synthetic oligonucleotide
ggugaggaagccacaccau

SEQ ID NO: 1880603 - RNA, 19 nt, Artificial Sequence
  Description of Artificial Sequence: Synthetic oligonucleotide
ccuauggcuugggguggag

SEQ ID NO: 1880604 - RNA, 19 nt, Artificial Sequence
  Description of Artificial Sequence: Synthetic oligonucleotide
gccagucgcuguguucuga

SEQ ID NO: 1880605 - RNA, 19 nt, Artificial Sequence
  Description of Artificial Sequence: Synthetic oligonucleotide
gcugggaacuguaccuccu

SEQ ID NO: 1880606 - RNA, 19 nt, Artificial Sequence
  Description of Artificial Sequence: Synthetic oligonucleotide
ggccucagucaaagccgug

SEQ ID NO: 1880607 - RNA, 19 nt, Artificial Sequence
  Description of Artificial Sequence: Synthetic oligonucleotide
gcaugucgggaagcaggca

SEQ ID NO: 1880608 - RNA, 19 nt, Artificial Sequence
  Description of Artificial Sequence: Synthetic oligonucleotide
cacagacaguagagccccu

SEQ ID NO: 1880609 - RNA, 19 nt, Artificial Sequence
  Description of Artificial Sequence: Synthetic oligonucleotide
cauaccugugcaggaucuu

SEQ ID NO: 1880610 - RNA, 19 nt, Artificial Sequence
  Description of Artificial Sequence: Synthetic oligonucleotide
cgguccaugacucgugccu

SEQ ID NO: 1880611 - RNA, 19 nt, Artificial Sequence
  Description of Artificial Sequence: Synthetic oligonucleotide
ccaggcgggcaggaacgac

SEQ ID NO: 1880612 - RNA, 19 nt, Artificial Sequence
  Description of Artificial Sequence: Synthetic oligonucleotide
ccugcgcacugaaggcaga

SEQ ID NO: 1880613 - RNA, 19 nt, Artificial Sequence
  Description of Artificial Sequence: Synthetic oligonucleotide
gcucagcgcccacacacuu

SEQ ID NO: 1880614 - RNA, 19 nt, Artificial Sequence
  Description of Artificial Sequence: Synthetic oligonucleotide
ccguggugucgguccauga

SEQ ID NO: 1880615 - RNA, 19 nt, Artificial Sequence
  Description of Artificial Sequence: Synthetic oligonucleotide
gggacucaacccauuucuu

SEQ ID NO: 1880616 - RNA, 19 nt, Artificial Sequence
  Description of Artificial Sequence: Synthetic oligonucleotide
gguguaccguggugucggu

SEQ ID NO: 1880617 - RNA, 19 nt, Artificial Sequence
  Description of Artificial Sequence: Synthetic oligonucleotide
ccucacggaugucuuugcu

SEQ ID NO: 1880618 - RNA, 19 nt, Artificial Sequence
  Description of Artificial Sequence: Synthetic oligonucleotide
ggacaccuucccugccacu

SEQ ID NO: 1880619 - RNA, 19 nt, Artificial Sequence
  Description of Artificial Sequence: Synthetic oligonucleotide
gucgggaagcaggcagaau

SEQ ID NO: 1880620 - RNA, 19 nt, Artificial Sequence
  Description of Artificial Sequence: Synthetic oligonucleotide
cuucgcaggccagcagcau

SEQ ID NO: 1880621 - RNA, 19 nt, Artificial Sequence
  Description of Artificial Sequence: Synthetic oligonucleotide
cgcuugacacugccacuca

SEQ ID NO: 1880622 - RNA, 19 nt, Artificial Sequence
  Description of Artificial Sequence: Synthetic oligonucleotide
ccuugacuagaaagcuguu

SEQ ID NO: 1880623 - RNA, 19 nt, Artificial Sequence
  Description of Artificial Sequence: Synthetic oligonucleotide
caggggccucacggauguc

SEQ ID NO: 1880624 - RNA, 19 nt, Artificial Sequence
  Description of Artificial Sequence: Synthetic oligonucleotide
cccgcuugacacugccacu

SEQ ID NO: 1880625 - RNA, 19 nt, Artificial Sequence
  Description of Artificial Sequence: Synthetic oligonucleotide
caccgcggccaggcgggca

SEQ ID NO: 1880626 - RNA, 19 nt, Artificial Sequence
  Description of Artificial Sequence: Synthetic oligonucleotide
cuucggacucugggcuuau

SEQ ID NO: 1880627 - RNA, 19 nt, Artificial Sequence
  Description of Artificial Sequence: Synthetic oligonucleotide
cccuauggcuuggggugga

SEQ ID NO: 1880628 - RNA, 19 nt, Artificial Sequence
  Description of Artificial Sequence: Synthetic oligonucleotide
gccauacuccagagacacu

SEQ ID NO: 1880629 - RNA, 19 nt, Artificial Sequence
  Description of Artificial Sequence: Synthetic oligonucleotide
ccaugggacucaacccauu

SEQ ID NO: 1880630 - RNA, 19 nt, Artificial Sequence
  Description of Artificial Sequence: Synthetic oligonucleotide
gccgugccagucgcugugu

SEQ ID NO: 1880631 - RNA, 19 nt, Artificial Sequence
  Description of Artificial Sequence: Synthetic oligonucleotide
ccgcggccaggcgggcagg

SEQ ID NO: 1880632 - RNA, 19 nt, Artificial Sequence
  Description of Artificial Sequence: Synthetic oligonucleotide
cgcuguguucugagucgua

SEQ ID NO: 1880633 - RNA, 19 nt, Artificial Sequence
  Description of Artificial Sequence: Synthetic oligonucleotide
cugcagccauggacaccuu

SEQ ID NO: 1880634 - RNA, 19 nt, Artificial Sequence
  Description of Artificial Sequence: Synthetic oligonucleotide
cgcacacaggugcccgugu

SEQ ID NO: 1880635 - RNA, 19 nt, Artificial Sequence
  Description of Artificial Sequence: Synthetic oligonucleotide
ccacaccaucacgcagcau

SEQ ID NO: 1880636 - RNA, 19 nt, Artificial Sequence
  Description of Artificial Sequence: Synthetic oligonucleotide
aauugaauauacugaaugg

SEQ ID NO: 1880637 - RNA, 19 nt, Artificial Sequence
  Description of Artificial Sequence: Synthetic oligonucleotide
uuagacuuuacucccaagg

SEQ ID NO: 1880638 - RNA, 19 nt, Artificial Sequence
  Description of Artificial Sequence: Synthetic oligonucleotide
uugguauucaucacaaagg

SEQ ID NO: 1880639 - RNA, 19 nt, Artificial Sequence
  Description of Artificial Sequence: Synthetic oligonucleotide
uaaacuuuagacuuuacuc

SEQ ID NO: 1880640 - RNA, 19 nt, Artificial Sequence
  Description of Artificial Sequence: Synthetic oligonucleotide
uauaaaugaagcuugucca

SEQ ID NO: 1880641 - RNA, 19 nt, Artificial Sequence
  Description of Artificial Sequence: Synthetic oligonucleotide
auuaagacaaaauggcuuc

SEQ ID NO: 1880642 - RNA, 19 nt, Artificial Sequence
  Description of Artificial Sequence: Synthetic oligonucleotide
aaaugaagcuuguccaccc

SEQ ID NO: 1880643 - RNA, 19 nt, Artificial Sequence
  Description of Artificial Sequence: Synthetic oligonucleotide
ugguauucaucacaaaggg

SEQ ID NO: 1880644 - RNA, 19 nt, Artificial Sequence
  Description of Artificial Sequence: Synthetic oligonucleotide
aaagggaccauguuggaca

SEQ ID NO: 1880645 - RNA, 19 nt, Artificial Sequence
  Description of Artificial Sequence: Synthetic oligonucleotide
uauacgucuccagagaugg

SEQ ID NO: 1880646 - RNA, 19 nt, Artificial Sequence
  Description of Artificial Sequence: Synthetic oligonucleotide
gagagaguaaccuucuuag

SEQ ID NO: 1880647 - RNA, 19 nt, Artificial Sequence
  Description of Artificial Sequence: Synthetic oligonucleotide
aagaacgguuugcagagcg

SEQ ID NO: 1880648 - RNA, 19 nt, Artificial Sequence
  Description of Artificial Sequence: Synthetic oligonucleotide
agaguaaccuucuuagagg

SEQ ID NO: 1880649 - RNA, 19 nt, Artificial Sequence
  Description of Artificial Sequence: Synthetic oligonucleotide
auaaaugaagcuuguccac

SEQ ID NO: 1880650 - RNA, 19 nt, Artificial Sequence
  Description of Artificial Sequence: Synthetic oligonucleotide
cacaaagggaccauguugg

SEQ ID NO: 1880651 - RNA, 19 nt, Artificial Sequence
  Description of Artificial Sequence: Synthetic oligonucleotide
cacagcuuagggaagaacg

SEQ ID NO: 1880652 - RNA, 19 nt, Artificial Sequence
  Description of Artificial Sequence: Synthetic oligonucleotide
ucauuuuaccaacaugccc

SEQ ID NO: 1880653 - RNA, 19 nt, Artificial Sequence
  Description of Artificial Sequence: Synthetic oligonucleotide
guauucaucacaaagggac

SEQ ID NO: 1880654 - RNA, 19 nt, Artificial Sequence
  Description of Artificial Sequence: Synthetic oligonucleotide
gaauauacugaauggucag

SEQ ID NO: 1880655 - RNA, 19 nt, Artificial Sequence
  Description of Artificial Sequence: Synthetic oligonucleotide
ucacaaagggaccauguug

SEQ ID NO: 1880656 - RNA, 19 nt, Artificial Sequence
  Description of Artificial Sequence: Synthetic oligonucleotide
cuuuggaaauugaauauac

SEQ ID NO: 1880657 - RNA, 19 nt, Artificial Sequence
  Description of Artificial Sequence: Synthetic oligonucleotide
acagaagucuucaugggcc

SEQ ID NO: 1880658 - RNA, 19 nt, Artificial Sequence
  Description of Artificial Sequence: Synthetic oligonucleotide
aauuaagacaaaauggcuu

SEQ ID NO: 1880659 - RNA, 19 nt, Artificial Sequence
  Description of Artificial Sequence: Synthetic oligonucleotide
uucauuuuaccaacaugcc

SEQ ID NO: 1880660 - RNA, 19 nt, Artificial Sequence
  Description of Artificial Sequence: Synthetic oligonucleotide
augacagcgacugucacac

SEQ ID NO: 1880661 - RNA, 19 nt, Artificial Sequence
  Description of Artificial Sequence: Synthetic oligonucleotide
uuuccaaucuuugacuucc

SEQ ID NO: 1880662 - RNA, 19 nt, Artificial Sequence
  Description of Artificial Sequence: Synthetic oligonucleotide
gagucucuaggucucaggg

SEQ ID NO: 1880663 - RNA, 19 nt, Artificial Sequence
  Description of Artificial Sequence: Synthetic oligonucleotide
aaaugacagcgacugucac

SEQ ID NO: 1880664 - RNA, 19 nt, Artificial Sequence
  Description of Artificial Sequence: Synthetic oligonucleotide
gaagguaagauaccguuuc

SEQ ID NO: 1880665 - RNA, 19 nt, Artificial Sequence
  Description of Artificial Sequence: Synthetic oligonucleotide
uauucaucacaaagggacc

SEQ ID NO: 1880666 - RNA, 19 nt, Artificial Sequence
  Description of Artificial Sequence: Synthetic oligonucleotide
uaccguuucaaaaccucgg

SEQ ID NO: 1880667 - RNA, 19 nt, Artificial Sequence
  Description of Artificial Sequence: Synthetic oligonucleotide
ucugccaaugcuucugcgg

SEQ ID NO: 1880668 - RNA, 19 nt, Artificial Sequence
  Description of Artificial Sequence: Synthetic oligonucleotide
uccagauauaaggugggcg

SEQ ID NO: 1880669 - RNA, 19 nt, Artificial Sequence
  Description of Artificial Sequence: Synthetic oligonucleotide
aaaaccucgguguggguga

SEQ ID NO: 1880670 - RNA, 19 nt, Artificial Sequence
  Description of Artificial Sequence: Synthetic oligonucleotide
uuuggaaauugaauauacu

SEQ ID NO: 1880671 - RNA, 19 nt, Artificial Sequence
  Description of Artificial Sequence: Synthetic oligonucleotide
auauacugaauggucaguc

SEQ ID NO: 1880672 - RNA, 19 nt, Artificial Sequence
  Description of Artificial Sequence: Synthetic oligonucleotide
ucaagaauggccucagaaa

SEQ ID NO: 1880673 - RNA, 19 nt, Artificial Sequence
  Description of Artificial Sequence: Synthetic oligonucleotide
acaacugguucucuuaaug

SEQ ID NO: 1880674 - RNA, 19 nt, Artificial Sequence
  Description of Artificial Sequence: Synthetic oligonucleotide
agaggaucccauuuugaag

SEQ ID NO: 1880675 - RNA, 19 nt, Artificial Sequence
  Description of Artificial Sequence: Synthetic oligonucleotide
gcaauuaagacaaaauggc

SEQ ID NO: 1880676 - RNA, 19 nt, Artificial Sequence
  Description of Artificial Sequence: Synthetic oligonucleotide
ucuuaaugguuccccagca

SEQ ID NO: 1880677 - RNA, 19 nt, Artificial Sequence
  Description of Artificial Sequence: Synthetic oligonucleotide
uuugacuuccagguuuugg

SEQ ID NO: 1880678 - RNA, 19 nt, Artificial Sequence
  Description of Artificial Sequence: Synthetic oligonucleotide
auuuuaccaacaugcccac

SEQ ID NO: 1880679 - RNA, 19 nt, Artificial Sequence
  Description of Artificial Sequence: Synthetic oligonucleotide
uugcauuccugaaaucaag

SEQ ID NO: 1880680 - RNA, 19 nt, Artificial Sequence
  Description of Artificial Sequence: Synthetic oligonucleotide
aagucuucaugggccaugc

SEQ ID NO: 1880681 - RNA, 19 nt, Artificial Sequence
  Description of Artificial Sequence: Synthetic oligonucleotide
uuaggaauaggcugggaau

SEQ ID NO: 1880682 - RNA, 19 nt, Artificial Sequence
  Description of Artificial Sequence: Synthetic oligonucleotide
auauauacgucuccagaga

SEQ ID NO: 1880683 - RNA, 19 nt, Artificial Sequence
  Description of Artificial Sequence: Synthetic oligonucleotide
ugcuccuugguccaacuug

SEQ ID NO: 1880684 - RNA, 19 nt, Artificial Sequence
  Description of Artificial Sequence: Synthetic oligonucleotide
uauaaggugggcgugcgug

SEQ ID NO: 1880685 - RNA, 19 nt, Artificial Sequence
  Description of Artificial Sequence: Synthetic oligonucleotide
acccuuuaggaauaggcug

SEQ ID NO: 1880686 - RNA, 19 nt, Artificial Sequence
  Description of Artificial Sequence: Synthetic oligonucleotide
ucguuguuuggccucgggg

SEQ ID NO: 1880687 - RNA, 19 nt, Artificial Sequence
  Description of Artificial Sequence: Synthetic oligonucleotide
uuauuuacccuagguuugg

SEQ ID NO: 1880688 - RNA, 19 nt, Artificial Sequence
  Description of Artificial Sequence: Synthetic oligonucleotide
uaaaugaagcuuguccacc

SEQ ID NO: 1880689 - RNA, 19 nt, Artificial Sequence
  Description of Artificial Sequence: Synthetic oligonucleotide
uuugcagagcgccagucgu

SEQ ID NO: 1880690 - RNA, 19 nt, Artificial Sequence
  Description of Artificial Sequence: Synthetic oligonucleotide
ucaggcccaauauauacgu

SEQ ID NO: 1880691 - RNA, 19 nt, Artificial Sequence
  Description of Artificial Sequence: Synthetic oligonucleotide
auacugaauggucagucca

SEQ ID NO: 1880692 - RNA, 19 nt, Artificial Sequence
  Description of Artificial Sequence: Synthetic oligonucleotide
agauauaaggugggcgugc

SEQ ID NO: 1880693 - RNA, 19 nt, Artificial Sequence
  Description of Artificial Sequence: Synthetic oligonucleotide
caucaggcccaauauauac

SEQ ID NO: 1880694 - RNA, 19 nt, Artificial Sequence
  Description of Artificial Sequence: Synthetic oligonucleotide
aucaagaauggccucagaa

SEQ ID NO: 1880695 - RNA, 19 nt, Artificial Sequence
  Description of Artificial Sequence: Synthetic oligonucleotide
uuagaggaucccauuuuga

SEQ ID NO: 1880696 - RNA, 19 nt, Artificial Sequence
  Description of Artificial Sequence: Synthetic oligonucleotide
ugagagaguaaccuucuua

SEQ ID NO: 1880697 - RNA, 19 nt, Artificial Sequence
  Description of Artificial Sequence: Synthetic oligonucleotide
uuacccuagguuuggauuc

SEQ ID NO: 1880698 - RNA, 19 nt, Artificial Sequence
  Description of Artificial Sequence: Synthetic oligonucleotide
uaguuuccaaucuuugacu

SEQ ID NO: 1880699 - RNA, 19 nt, Artificial Sequence
  Description of Artificial Sequence: Synthetic oligonucleotide
ucucuuaaugguuccccag

SEQ ID NO: 1880700 - RNA, 19 nt, Artificial Sequence
  Description of Artificial Sequence: Synthetic oligonucleotide
ggaagaacgguuugcagag

SEQ ID NO: 1880701 - RNA, 19 nt, Artificial Sequence
  Description of Artificial Sequence: Synthetic oligonucleotide
gaguaaccuucuuagagga

SEQ ID NO: 1880702 - RNA, 19 nt, Artificial Sequence
  Description of Artificial Sequence: Synthetic oligonucleotide
ucauuaguuuccaaucuuu

SEQ ID NO: 1880703 - RNA, 19 nt, Artificial Sequence
  Description of Artificial Sequence: Synthetic oligonucleotide
uuuacccuagguuuggauu

SEQ ID NO: 1880704 - RNA, 19 nt, Artificial Sequence
  Description of Artificial Sequence: Synthetic oligonucleotide
ugacacucccuuuauuuac

SEQ ID NO: 1880705 - RNA, 19 nt, Artificial Sequence
  Description of Artificial Sequence: Synthetic oligonucleotide
aggcccaauauauacgucu

SEQ ID NO: 1880706 - RNA, 19 nt, Artificial Sequence
  Description of Artificial Sequence: Synthetic oligonucleotide
aauauacugaauggucagu

SEQ ID NO: 1880707 - RNA, 19 nt, Artificial Sequence
  Description of Artificial Sequence: Synthetic oligonucleotide
aaaagaacguucugcugua

SEQ ID NO: 1880708 - RNA, 19 nt, Artificial Sequence
  Description of Artificial Sequence: Synthetic oligonucleotide
ugcagucauccacuguagg

SEQ ID NO: 1880709 - RNA, 19 nt, Artificial Sequence
  Description of Artificial Sequence: Synthetic oligonucleotide
gaggaucccauuuugaagu

SEQ ID NO: 1880710 - RNA, 19 nt, Artificial Sequence
  Description of Artificial Sequence: Synthetic oligonucleotide
aagcuuguccacccuuuag

SEQ ID NO: 1880711 - RNA, 19 nt, Artificial Sequence
  Description of Artificial Sequence: Synthetic oligonucleotide
gauauaaggugggcgugcg

SEQ ID NO: 1880712 - RNA, 19 nt, Artificial Sequence
  Description of Artificial Sequence: Synthetic oligonucleotide
aacaugcccacagaagucu

SEQ ID NO: 1880713 - RNA, 19 nt, Artificial Sequence
  Description of Artificial Sequence: Synthetic oligonucleotide
guuucaaaaccucggugug

SEQ ID NO: 1880714 - RNA, 19 nt, Artificial Sequence
  Description of Artificial Sequence: Synthetic oligonucleotide
agucucuaggucucagggg

SEQ ID NO: 1880715 - RNA, 19 nt, Artificial Sequence
  Description of Artificial Sequence: Synthetic oligonucleotide
gucacaccauccuugguag

SEQ ID NO: 1880716 - RNA, 19 nt, Artificial Sequence
  Description of Artificial Sequence: Synthetic oligonucleotide
uaggaauaggcugggaaug

SEQ ID NO: 1880717 - RNA, 19 nt, Artificial Sequence
  Description of Artificial Sequence: Synthetic oligonucleotide
uggucaguccauccaaaug

SEQ ID NO: 1880718 - RNA, 19 nt, Artificial Sequence
  Description of Artificial Sequence: Synthetic oligonucleotide
uccuugguccaacuugaag

SEQ ID NO: 1880719 - RNA, 19 nt, Artificial Sequence
  Description of Artificial Sequence: Synthetic oligonucleotide
uucauuaguuuccaaucuu

SEQ ID NO: 1880720 - RNA, 19 nt, Artificial Sequence
  Description of Artificial Sequence: Synthetic oligonucleotide
uuuagacuuuacucccaag

SEQ ID NO: 1880721 - RNA, 19 nt, Artificial Sequence
  Description of Artificial Sequence: Synthetic oligonucleotide
uagaggaucccauuuugaa

SEQ ID NO: 1880722 - RNA, 19 nt, Artificial Sequence
  Description of Artificial Sequence: Synthetic oligonucleotide
ucgucagucagcgugacuc

SEQ ID NO: 1880723 - RNA, 19 nt, Artificial Sequence
  Description of Artificial Sequence: Synthetic oligonucleotide
cucuuaaugguuccccagc

SEQ ID NO: 1880724 - RNA, 19 nt, Artificial Sequence
  Description of Artificial Sequence: Synthetic oligonucleotide
uguugagcaucaucaggcc

SEQ ID NO: 1880725 - RNA, 19 nt, Artificial Sequence
  Description of Artificial Sequence: Synthetic oligonucleotide
aagguaagauaccguuuca

SEQ ID NO: 1880726 - RNA, 19 nt, Artificial Sequence
  Description of Artificial Sequence: Synthetic oligonucleotide
cuuuauuuacccuagguuu

SEQ ID NO: 1880727 - RNA, 19 nt, Artificial Sequence
  Description of Artificial Sequence: Synthetic oligonucleotide
aucuuugacuuccagguuu

SEQ ID NO: 1880728 - RNA, 19 nt, Artificial Sequence
  Description of Artificial Sequence: Synthetic oligonucleotide
aggaauaggcugggaaugc

SEQ ID NO: 1880729 - RNA, 19 nt, Artificial Sequence
  Description of Artificial Sequence: Synthetic oligonucleotide
ugguuccccagcaauuaag

SEQ ID NO: 1880730 - RNA, 19 nt, Artificial Sequence
  Description of Artificial Sequence: Synthetic oligonucleotide
uccuggguucauuuuacca

SEQ ID NO: 1880731 - RNA, 19 nt, Artificial Sequence
  Description of Artificial Sequence: Synthetic oligonucleotide
cacugagagaguaaccuuc

SEQ ID NO: 1880732 - RNA, 19 nt, Artificial Sequence
  Description of Artificial Sequence: Synthetic oligonucleotide
uuagggaagaacgguuugc

SEQ ID NO: 1880733 - RNA, 19 nt, Artificial Sequence
  Description of Artificial Sequence: Synthetic oligonucleotide
auccuugguagguuuuggg

SEQ ID NO: 1880734 - RNA, 19 nt, Artificial Sequence
  Description of Artificial Sequence: Synthetic oligonucleotide
acagcuuagggaagaacgg

SEQ ID NO: 1880735 - RNA, 19 nt, Artificial Sequence
  Description of Artificial Sequence: Synthetic oligonucleotide
gcguguguaaacuuuagac

SEQ ID NO: 1880736 - RNA, 19 nt, Artificial Sequence
  Description of Artificial Sequence: Synthetic oligonucleotide
cauguuggacaacugguuc

SEQ ID NO: 1880737 - RNA, 19 nt, Artificial Sequence
  Description of Artificial Sequence: Synthetic oligonucleotide
guuugcagagcgccagucg

SEQ ID NO: 1880738 - RNA, 19 nt, Artificial Sequence
  Description of Artificial Sequence: Synthetic oligonucleotide
cuggguucauuuuaccaac

SEQ ID NO: 1880739 - RNA, 19 nt, Artificial Sequence
  Description of Artificial Sequence: Synthetic oligonucleotide
auaccguuucaaaaccucg

SEQ ID NO: 1880740 - RNA, 19 nt, Artificial Sequence
  Description of Artificial Sequence: Synthetic oligonucleotide
gaugguauaaaugaagcuu

SEQ ID NO: 1880741 - RNA, 19 nt, Artificial Sequence
  Description of Artificial Sequence: Synthetic oligonucleotide
aaugcuucugcggacccga

SEQ ID NO: 1880742 - RNA, 19 nt, Artificial Sequence
  Description of Artificial Sequence: Synthetic oligonucleotide
uucucuuaaugguucccca

SEQ ID NO: 1880743 - RNA, 19 nt, Artificial Sequence
  Description of Artificial Sequence: Synthetic oligonucleotide
cuugguagguuuugggauc

SEQ ID NO: 1880744 - RNA, 19 nt, Artificial Sequence
  Description of Artificial Sequence: Synthetic oligonucleotide
caaggcuucuccugaaaug

SEQ ID NO: 1880745 - RNA, 19 nt, Artificial Sequence
  Description of Artificial Sequence: Synthetic oligonucleotide
agcgugacucagcacuucg

SEQ ID NO: 1880746 - RNA, 19 nt, Artificial Sequence
  Description of Artificial Sequence: Synthetic oligonucleotide
gaacgguuugcagagcgcc

SEQ ID NO: 1880747 - RNA, 19 nt, Artificial Sequence
  Description of Artificial Sequence: Synthetic oligonucleotide
gauaccguuucaaaaccuc

SEQ ID NO: 1880748 - RNA, 19 nt, Artificial Sequence
  Description of Artificial Sequence: Synthetic oligonucleotide
aaccuucuuagaggauccc

SEQ ID NO: 1880749 - RNA, 19 nt, Artificial Sequence
  Description of Artificial Sequence: Synthetic oligonucleotide
accagcgucagggacacag

SEQ ID NO: 1880750 - RNA, 19 nt, Artificial Sequence
  Description of Artificial Sequence: Synthetic oligonucleotide
cuuagggaagaacgguuug

SEQ ID NO: 1880751 - RNA, 19 nt, Artificial Sequence
  Description of Artificial Sequence: Synthetic oligonucleotide
uucguuguuuggccucggg

SEQ ID NO: 1880752 - RNA, 19 nt, Artificial Sequence
  Description of Artificial Sequence: Synthetic oligonucleotide
uccuuauuuuccaccugga

SEQ ID NO: 1880753 - RNA, 19 nt, Artificial Sequence
  Description of Artificial Sequence: Synthetic oligonucleotide
ucggugugggugaucagga

SEQ ID NO: 1880754 - RNA, 19 nt, Artificial Sequence
  Description of Artificial Sequence: Synthetic oligonucleotide
aaugguuccccagcaauua

SEQ ID NO: 1880755 - RNA, 19 nt, Artificial Sequence
  Description of Artificial Sequence: Synthetic oligonucleotide
ccugaaaugacagcgacug

SEQ ID NO: 1880756 - RNA, 19 nt, Artificial Sequence
  Description of Artificial Sequence: Synthetic oligonucleotide
uuggacagggugacacucc

SEQ ID NO: 1880757 - RNA, 19 nt, Artificial Sequence
  Description of Artificial Sequence: Synthetic oligonucleotide
gugaucaggaaacccuccc

SEQ ID NO: 1880758 - RNA, 19 nt, Artificial Sequence
  Description of Artificial Sequence: Synthetic oligonucleotide
ucagucagcgugacucagc

SEQ ID NO: 1880759 - RNA, 19 nt, Artificial Sequence
  Description of Artificial Sequence: Synthetic oligonucleotide
aucaggcccaauauauacg

SEQ ID NO: 1880760 - RNA, 19 nt, Artificial Sequence
  Description of Artificial Sequence: Synthetic oligonucleotide
ucuaucuuuuguugagcau

SEQ ID NO: 1880761 - RNA, 19 nt, Artificial Sequence
  Description of Artificial Sequence: Synthetic oligonucleotide
agagaguaaccuucuuaga

SEQ ID NO: 1880762 - RNA, 19 nt, Artificial Sequence
  Description of Artificial Sequence: Synthetic oligonucleotide
uuaagacaaaauggcuucu

SEQ ID NO: 1880763 - RNA, 19 nt, Artificial Sequence
  Description of Artificial Sequence: Synthetic oligonucleotide
auucaucacaaagggacca

SEQ ID NO: 1880764 - RNA, 19 nt, Artificial Sequence
  Description of Artificial Sequence: Synthetic oligonucleotide
uccugaaaugacagcgacu

SEQ ID NO: 1880765 - RNA, 19 nt, Artificial Sequence
  Description of Artificial Sequence: Synthetic oligonucleotide
cuucauugguauucaucac

SEQ ID NO: 1880766 - RNA, 19 nt, Artificial Sequence
  Description of Artificial Sequence: Synthetic oligonucleotide
uacugagguuccaccaucu

SEQ ID NO: 1880767 - RNA, 19 nt, Artificial Sequence
  Description of Artificial Sequence: Synthetic oligonucleotide
aguccagauauaagguggg

SEQ ID NO: 1880768 - RNA, 19 nt, Artificial Sequence
  Description of Artificial Sequence: Synthetic oligonucleotide
cccuuuaggaauaggcugg

SEQ ID NO: 1880769 - RNA, 19 nt, Artificial Sequence
  Description of Artificial Sequence: Synthetic oligonucleotide
uccugaaaucaagaauggc

SEQ ID NO: 1880770 - RNA, 19 nt, Artificial Sequence
  Description of Artificial Sequence: Synthetic oligonucleotide
accguuucaaaaccucggu

SEQ ID NO: 1880771 - RNA, 19 nt, Artificial Sequence
  Description of Artificial Sequence: Synthetic oligonucleotide
guucucuuaaugguucccc

SEQ ID NO: 1880772 - RNA, 19 nt, Artificial Sequence
  Description of Artificial Sequence: Synthetic oligonucleotide
aauucacccacagcuguaa

SEQ ID NO: 1880773 - RNA, 19 nt, Artificial Sequence
  Description of Artificial Sequence: Synthetic oligonucleotide
acucaggucugccaaugcu

SEQ ID NO: 1880774 - RNA, 19 nt, Artificial Sequence
  Description of Artificial Sequence: Synthetic oligonucleotide
gacacucccuuuauuuacc

SEQ ID NO: 1880775 - RNA, 19 nt, Artificial Sequence
  Description of Artificial Sequence: Synthetic oligonucleotide
gagggaagccaccagcguc

SEQ ID NO: 1880776 - RNA, 19 nt, Artificial Sequence
  Description of Artificial Sequence: Synthetic oligonucleotide
aauaggcugggaaugcuuu

SEQ ID NO: 1880777 - RNA, 19 nt, Artificial Sequence
  Description of Artificial Sequence: Synthetic oligonucleotide
ugguucucuuaaugguucc

SEQ ID NO: 1880778 - RNA, 19 nt, Artificial Sequence
  Description of Artificial Sequence: Synthetic oligonucleotide
gugacucagcacuucguug

SEQ ID NO: 1880779 - RNA, 19 nt, Artificial Sequence
  Description of Artificial Sequence: Synthetic oligonucleotide
uguguggugggguucuauc

SEQ ID NO: 1880780 - RNA, 19 nt, Artificial Sequence
  Description of Artificial Sequence: Synthetic oligonucleotide
ccacccuuuaggaauaggc

SEQ ID NO: 1880781 - RNA, 19 nt, Artificial Sequence
  Description of Artificial Sequence: Synthetic oligonucleotide
agaauggccucagaaauuu

SEQ ID NO: 1880782 - RNA, 19 nt, Artificial Sequence
  Description of Artificial Sequence: Synthetic oligonucleotide
cuccugaaaugacagcgac

SEQ ID NO: 1880783 - RNA, 19 nt, Artificial Sequence
  Description of Artificial Sequence: Synthetic oligonucleotide
gucagcgugacucagcacu

SEQ ID NO: 1880784 - RNA, 19 nt, Artificial Sequence
  Description of Artificial Sequence: Synthetic oligonucleotide
caauuaagacaaaauggcu

SEQ ID NO: 1880785 - RNA, 19 nt, Artificial Sequence
  Description of Artificial Sequence: Synthetic oligonucleotide
uggacauugucaccuucuc

SEQ ID NO: 1880786 - RNA, 19 nt, Artificial Sequence
  Description of Artificial Sequence: Synthetic oligonucleotide
agcgacugucacaccaucc

SEQ ID NO: 1880787 - RNA, 19 nt, Artificial Sequence
  Description of Artificial Sequence: Synthetic oligonucleotide
ugaagcuuguccacccuuu

SEQ ID NO: 1880788 - RNA, 19 nt, Artificial Sequence
  Description of Artificial Sequence: Synthetic oligonucleotide
uggacaacugguucucuua

SEQ ID NO: 1880789 - RNA, 19 nt, Artificial Sequence
  Description of Artificial Sequence: Synthetic oligonucleotide
auuuacccuagguuuggau

SEQ ID NO: 1880790 - RNA, 19 nt, Artificial Sequence
  Description of Artificial Sequence: Synthetic oligonucleotide
ucucuaggucucaggggcc

SEQ ID NO: 1880791 - RNA, 19 nt, Artificial Sequence
  Description of Artificial Sequence: Synthetic oligonucleotide
ucaucaggcccaauauaua

SEQ ID NO: 1880792 - RNA, 19 nt, Artificial Sequence
  Description of Artificial Sequence: Synthetic oligonucleotide
agaacgguuugcagagcgc

SEQ ID NO: 1880793 - RNA, 19 nt, Artificial Sequence
  Description of Artificial Sequence: Synthetic oligonucleotide
auaggcugggaaugcuuug

SEQ ID NO: 1880794 - RNA, 19 nt, Artificial Sequence
  Description of Artificial Sequence: Synthetic oligonucleotide
uugucaccuucuccaagca

SEQ ID NO: 1880795 - RNA, 19 nt, Artificial Sequence
  Description of Artificial Sequence: Synthetic oligonucleotide
ucccauuuugaaguguaaa

SEQ ID NO: 1880796 - RNA, 19 nt, Artificial Sequence
  Description of Artificial Sequence: Synthetic oligonucleotide
acuucguuguuuggccucg

SEQ ID NO: 1880797 - RNA, 19 nt, Artificial Sequence
  Description of Artificial Sequence: Synthetic oligonucleotide
cagucauccacuguagguc

SEQ ID NO: 1880798 - RNA, 19 nt, Artificial Sequence
  Description of Artificial Sequence: Synthetic oligonucleotide
caugcagaaugccccggcc

SEQ ID NO: 1880799 - RNA, 19 nt, Artificial Sequence
  Description of Artificial Sequence: Synthetic oligonucleotide
auaaggugggcgugcgugu

SEQ ID NO: 1880800 - RNA, 19 nt, Artificial Sequence
  Description of Artificial Sequence: Synthetic oligonucleotide
caagaauggccucagaaau

SEQ ID NO: 1880801 - RNA, 19 nt, Artificial Sequence
  Description of Artificial Sequence: Synthetic oligonucleotide
uuugcuccuugguccaacu

SEQ ID NO: 1880802 - RNA, 19 nt, Artificial Sequence
  Description of Artificial Sequence: Synthetic oligonucleotide
uuguuuggccucggggagg

SEQ ID NO: 1880803 - RNA, 19 nt, Artificial Sequence
  Description of Artificial Sequence: Synthetic oligonucleotide
uacgucuccagagauggua

SEQ ID NO: 1880804 - RNA, 19 nt, Artificial Sequence
  Description of Artificial Sequence: Synthetic oligonucleotide
ccagucgucagucagcgug

SEQ ID NO: 1880805 - RNA, 19 nt, Artificial Sequence
  Description of Artificial Sequence: Synthetic oligonucleotide
augcagaaugccccggccu

SEQ ID NO: 1880806 - RNA, 19 nt, Artificial Sequence
  Description of Artificial Sequence: Synthetic oligonucleotide
uucugcggacccgagcucc

SEQ ID NO: 1880807 - RNA, 19 nt, Artificial Sequence
  Description of Artificial Sequence: Synthetic oligonucleotide
agcaccgcugugugguggg

SEQ ID NO: 1880808 - RNA, 19 nt, Artificial Sequence
  Description of Artificial Sequence: Synthetic oligonucleotide
ccaauauauacgucuccag

SEQ ID NO: 1880809 - RNA, 19 nt, Artificial Sequence
  Description of Artificial Sequence: Synthetic oligonucleotide
aggaucccauuuugaagug

SEQ ID NO: 1880810 - RNA, 19 nt, Artificial Sequence
  Description of Artificial Sequence: Synthetic oligonucleotide
guuccccagcaauuaagac

SEQ ID NO: 1880811 - RNA, 19 nt, Artificial Sequence
  Description of Artificial Sequence: Synthetic oligonucleotide
gggguucuaucuuuuguug

SEQ ID NO: 1880812 - RNA, 19 nt, Artificial Sequence
  Description of Artificial Sequence: Synthetic oligonucleotide
auauacgucuccagagaug

SEQ ID NO: 1880813 - RNA, 19 nt, Artificial Sequence
  Description of Artificial Sequence: Synthetic oligonucleotide
uguuuggccucggggaggc

SEQ ID NO: 1880814 - RNA, 19 nt, Artificial Sequence
  Description of Artificial Sequence: Synthetic oligonucleotide
uugguagguuuugggaucu

SEQ ID NO: 1880815 - RNA, 19 nt, Artificial Sequence
  Description of Artificial Sequence: Synthetic oligonucleotide
gguagguuuugggaucucg

SEQ ID NO: 1880816 - RNA, 19 nt, Artificial Sequence
  Description of Artificial Sequence: Synthetic oligonucleotide
uguccacccuuuaggaaua

SEQ ID NO: 1880817 - RNA, 19 nt, Artificial Sequence
  Description of Artificial Sequence: Synthetic oligonucleotide
aauggucaguccauccaaa

SEQ ID NO: 1880818 - RNA, 19 nt, Artificial Sequence
  Description of Artificial Sequence: Synthetic oligonucleotide
caaagggaccauguuggac

SEQ ID NO: 1880819 - RNA, 19 nt, Artificial Sequence
  Description of Artificial Sequence: Synthetic oligonucleotide
ugcagagcgccagucguca

SEQ ID NO: 1880820 - RNA, 19 nt, Artificial Sequence
  Description of Artificial Sequence: Synthetic oligonucleotide
agucagcgugacucagcac

SEQ ID NO: 1880821 - RNA, 19 nt, Artificial Sequence
  Description of Artificial Sequence: Synthetic oligonucleotide
gucaguccauccaaauggc

SEQ ID NO: 1880822 - RNA, 19 nt, Artificial Sequence
  Description of Artificial Sequence: Synthetic oligonucleotide
acaaagggaccauguugga

SEQ ID NO: 1880823 - RNA, 19 nt, Artificial Sequence
  Description of Artificial Sequence: Synthetic oligonucleotide
ucaacucaggucugccaau

SEQ ID NO: 1880824 - RNA, 19 nt, Artificial Sequence
  Description of Artificial Sequence: Synthetic oligonucleotide
auggucaguccauccaaau

SEQ ID NO: 1880825 - RNA, 19 nt, Artificial Sequence
  Description of Artificial Sequence: Synthetic oligonucleotide
cugccaaugcuucugcgga

SEQ ID NO: 1880826 - RNA, 19 nt, Artificial Sequence
  Description of Artificial Sequence: Synthetic oligonucleotide
uacucccaaggcuucuccu

SEQ ID NO: 1880827 - RNA, 19 nt, Artificial Sequence
  Description of Artificial Sequence: Synthetic oligonucleotide
guacugagguuccaccauc

SEQ ID NO: 1880828 - RNA, 19 nt, Artificial Sequence
  Description of Artificial Sequence: Synthetic oligonucleotide
uuggacaacugguucucuu

SEQ ID NO: 1880829 - RNA, 19 nt, Artificial Sequence
  Description of Artificial Sequence: Synthetic oligonucleotide
uccacccuuuaggaauagg

SEQ ID NO: 1880830 - RNA, 19 nt, Artificial Sequence
  Description of Artificial Sequence: Synthetic oligonucleotide
cagauauaaggugggcgug

SEQ ID NO: 1880831 - RNA, 19 nt, Artificial Sequence
  Description of Artificial Sequence: Synthetic oligonucleotide
acgguuugcagagcgccag

SEQ ID NO: 1880832 - RNA, 19 nt, Artificial Sequence
  Description of Artificial Sequence: Synthetic oligonucleotide
uauuuacccuagguuugga

SEQ ID NO: 1880833 - RNA, 19 nt, Artificial Sequence
  Description of Artificial Sequence: Synthetic oligonucleotide
agguaagauaccguuucaa

SEQ ID NO: 1880834 - RNA, 19 nt, Artificial Sequence
  Description of Artificial Sequence: Synthetic oligonucleotide
ucagcgugacucagcacuu

SEQ ID NO: 1880835 - RNA, 19 nt, Artificial Sequence
  Description of Artificial Sequence: Synthetic oligonucleotide
augaagcuuguccacccuu

SEQ ID NO: 1880836 - RNA, 19 nt, Artificial Sequence
  Description of Artificial Sequence: Synthetic oligonucleotide
auauaaggugggcgugcgu

SEQ ID NO: 1880837 - RNA, 19 nt, Artificial Sequence
  Description of Artificial Sequence: Synthetic oligonucleotide
ugggcgugcguguguaaac

SEQ ID NO: 1880838 - RNA, 19 nt, Artificial Sequence
  Description of Artificial Sequence: Synthetic oligonucleotide
gaaugcuuugcuccuuggu

SEQ ID NO: 1880839 - RNA, 19 nt, Artificial Sequence
  Description of Artificial Sequence: Synthetic oligonucleotide
accucggugugggugauca

SEQ ID NO: 1880840 - RNA, 19 nt, Artificial Sequence
  Description of Artificial Sequence: Synthetic oligonucleotide
gagcacugagagaguaacc

SEQ ID NO: 1880841 - RNA, 19 nt, Artificial Sequence
  Description of Artificial Sequence: Synthetic oligonucleotide
uaaggugggcgugcgugug

SEQ ID NO: 1880842 - RNA, 19 nt, Artificial Sequence
  Description of Artificial Sequence: Synthetic oligonucleotide
agaagguaagauaccguuu

SEQ ID NO: 1880843 - RNA, 19 nt, Artificial Sequence
  Description of Artificial Sequence: Synthetic oligonucleotide
aacgguuugcagagcgcca

SEQ ID NO: 1880844 - RNA, 19 nt, Artificial Sequence
  Description of Artificial Sequence: Synthetic oligonucleotide
cuccaagcaccgcugugug

SEQ ID NO: 1880845 - RNA, 19 nt, Artificial Sequence
  Description of Artificial Sequence: Synthetic oligonucleotide
cagucagcgugacucagca

SEQ ID NO: 1880846 - RNA, 19 nt, Artificial Sequence
  Description of Artificial Sequence: Synthetic oligonucleotide
gaagaacgguuugcagagc

SEQ ID NO: 1880847 - RNA, 19 nt, Artificial Sequence
  Description of Artificial Sequence: Synthetic oligonucleotide
caacucaggucugccaaug

SEQ ID NO: 1880848 - RNA, 19 nt, Artificial Sequence
  Description of Artificial Sequence: Synthetic oligonucleotide
ggguucuaucuuuuguuga

SEQ ID NO: 1880849 - RNA, 19 nt, Artificial Sequence
  Description of Artificial Sequence: Synthetic oligonucleotide
uuuuaccaacaugcccaca

SEQ ID NO: 1880850 - RNA, 19 nt, Artificial Sequence
  Description of Artificial Sequence: Synthetic oligonucleotide
cuuaaugguuccccagcaa

SEQ ID NO: 1880851 - RNA, 19 nt, Artificial Sequence
  Description of Artificial Sequence: Synthetic oligonucleotide
cagaagguaagauaccguu

SEQ ID NO: 1880852 - RNA, 19 nt, Artificial Sequence
  Description of Artificial Sequence: Synthetic oligonucleotide
gguauaaaugaagcuuguc

SEQ ID NO: 1880853 - RNA, 19 nt, Artificial Sequence
  Description of Artificial Sequence: Synthetic oligonucleotide
caucacaaagggaccaugu

SEQ ID NO: 1880854 - RNA, 19 nt, Artificial Sequence
  Description of Artificial Sequence: Synthetic oligonucleotide
gcuuguccacccuuuagga

SEQ ID NO: 1880855 - RNA, 19 nt, Artificial Sequence
  Description of Artificial Sequence: Synthetic oligonucleotide
ucugcggacccgagcucca

SEQ ID NO: 1880856 - RNA, 19 nt, Artificial Sequence
  Description of Artificial Sequence: Synthetic oligonucleotide
ggugugggugaucaggaaa

SEQ ID NO: 1880857 - RNA, 19 nt, Artificial Sequence
  Description of Artificial Sequence: Synthetic oligonucleotide
cacccuuuaggaauaggcu

SEQ ID NO: 1880858 - RNA, 19 nt, Artificial Sequence
  Description of Artificial Sequence: Synthetic oligonucleotide
gucagucagcgugacucag

SEQ ID NO: 1880859 - RNA, 19 nt, Artificial Sequence
  Description of Artificial Sequence: Synthetic oligonucleotide
gguauucaucacaaaggga

SEQ ID NO: 1880860 - RNA, 19 nt, Artificial Sequence
  Description of Artificial Sequence: Synthetic oligonucleotide
guaagccaugggcuggcuc

SEQ ID NO: 1880861 - RNA, 19 nt, Artificial Sequence
  Description of Artificial Sequence: Synthetic oligonucleotide
ggugacacucccuuuauuu

SEQ ID NO: 1880862 - RNA, 19 nt, Artificial Sequence
  Description of Artificial Sequence: Synthetic oligonucleotide
guagggucugcuguagcuc

SEQ ID NO: 1880863 - RNA, 19 nt, Artificial Sequence
  Description of Artificial Sequence: Synthetic oligonucleotide
cuguaagccaugggcuggc

SEQ ID NO: 1880864 - RNA, 19 nt, Artificial Sequence
  Description of Artificial Sequence: Synthetic oligonucleotide
gugcguguguaaacuuuag

SEQ ID NO: 1880865 - RNA, 19 nt, Artificial Sequence
  Description of Artificial Sequence: Synthetic oligonucleotide
cccggcugagcacugagag

SEQ ID NO: 1880866 - RNA, 19 nt, Artificial Sequence
  Description of Artificial Sequence: Synthetic oligonucleotide
gaacguucugcuguagggu

SEQ ID NO: 1880867 - RNA, 19 nt, Artificial Sequence
  Description of Artificial Sequence: Synthetic oligonucleotide
agcuuagggaagaacgguu

SEQ ID NO: 1880868 - RNA, 19 nt, Artificial Sequence
  Description of Artificial Sequence: Synthetic oligonucleotide
uacccuagguuuggauucu

SEQ ID NO: 1880869 - RNA, 19 nt, Artificial Sequence
  Description of Artificial Sequence: Synthetic oligonucleotide
guccagauauaaggugggc

SEQ ID NO: 1880870 - RNA, 19 nt, Artificial Sequence
  Description of Artificial Sequence: Synthetic oligonucleotide
ggugggguucuaucuuuug

SEQ ID NO: 1880871 - RNA, 19 nt, Artificial Sequence
  Description of Artificial Sequence: Synthetic oligonucleotide
gccuuccuccuuuaaacuc

SEQ ID NO: 1880872 - RNA, 19 nt, Artificial Sequence
  Description of Artificial Sequence: Synthetic oligonucleotide
ugcggacccgagcuccaac

SEQ ID NO: 1880873 - RNA, 19 nt, Artificial Sequence
  Description of Artificial Sequence: Synthetic oligonucleotide
cuggacauugucaccuucu

SEQ ID NO: 1880874 - RNA, 19 nt, Artificial Sequence
  Description of Artificial Sequence: Synthetic oligonucleotide
cucccaaggcuucuccuga

SEQ ID NO: 1880875 - RNA, 19 nt, Artificial Sequence
  Description of Artificial Sequence: Synthetic oligonucleotide
acugagguuccaccaucuu

SEQ ID NO: 1880876 - RNA, 19 nt, Artificial Sequence
  Description of Artificial Sequence: Synthetic oligonucleotide
caggcccaauauauacguc

SEQ ID NO: 1880877 - RNA, 19 nt, Artificial Sequence
  Description of Artificial Sequence: Synthetic oligonucleotide
gaggcgggagucucuaggu

SEQ ID NO: 1880878 - RNA, 19 nt, Artificial Sequence
  Description of Artificial Sequence: Synthetic oligonucleotide
ccguuucaaaaccucggug

SEQ ID NO: 1880879 - RNA, 19 nt, Artificial Sequence
  Description of Artificial Sequence: Synthetic oligonucleotide
guguggugggguucuaucu

SEQ ID NO: 1880880 - RNA, 19 nt, Artificial Sequence
  Description of Artificial Sequence: Synthetic oligonucleotide
ccaacaugcccacagaagu

SEQ ID NO: 1880881 - RNA, 19 nt, Artificial Sequence
  Description of Artificial Sequence: Synthetic oligonucleotide
cagucgucagucagcguga

SEQ ID NO: 1880882 - RNA, 19 nt, Artificial Sequence
  Description of Artificial Sequence: Synthetic oligonucleotide
ggacaacugguucucuuaa

SEQ ID NO: 1880883 - RNA, 19 nt, Artificial Sequence
  Description of Artificial Sequence: Synthetic oligonucleotide
gguuuugggaucucgucau

SEQ ID NO: 1880884 - RNA, 19 nt, Artificial Sequence
  Description of Artificial Sequence: Synthetic oligonucleotide
cuaggucucaggggccuug

SEQ ID NO: 1880885 - RNA, 19 nt, Artificial Sequence
  Description of Artificial Sequence: Synthetic oligonucleotide
ccagauauaaggugggcgu

SEQ ID NO: 1880886 - RNA, 19 nt, Artificial Sequence
  Description of Artificial Sequence: Synthetic oligonucleotide
gcuucugcggacccgagcu

SEQ ID NO: 1880887 - RNA, 19 nt, Artificial Sequence
  Description of Artificial Sequence: Synthetic oligonucleotide
guagguuuugggaucucgu

SEQ ID NO: 1880888 - RNA, 19 nt, Artificial Sequence
  Description of Artificial Sequence: Synthetic oligonucleotide
acccacagcuguaagccau

SEQ ID NO: 1880889 - RNA, 19 nt, Artificial Sequence
  Description of Artificial Sequence: Synthetic oligonucleotide
ccuuuaggaauaggcuggg

SEQ ID NO: 1880890 - RNA, 19 nt, Artificial Sequence
  Description of Artificial Sequence: Synthetic oligonucleotide
gacaacugguucucuuaau

SEQ ID NO: 1880891 - RNA, 19 nt, Artificial Sequence
  Description of Artificial Sequence: Synthetic oligonucleotide
agguuuuggcgcccucaaa

SEQ ID NO: 1880892 - RNA, 19 nt, Artificial Sequence
  Description of Artificial Sequence: Synthetic oligonucleotide
acgucuccagagaugguau

SEQ ID NO: 1880893 - RNA, 19 nt, Artificial Sequence
  Description of Artificial Sequence: Synthetic oligonucleotide
accgcuguguggugggguu

SEQ ID NO: 1880894 - RNA, 19 nt, Artificial Sequence
  Description of Artificial Sequence: Synthetic oligonucleotide
ccuuccagaagguaagaua

SEQ ID NO: 1880895 - RNA, 19 nt, Artificial Sequence
  Description of Artificial Sequence: Synthetic oligonucleotide
ugacagcgacugucacacc

SEQ ID NO: 1880896 - RNA, 19 nt, Artificial Sequence
  Description of Artificial Sequence: Synthetic oligonucleotide
aaccucggugugggugauc

SEQ ID NO: 1880897 - RNA, 19 nt, Artificial Sequence
  Description of Artificial Sequence: Synthetic oligonucleotide
cggccuuccuccuuuaaac

SEQ ID NO: 1880898 - RNA, 19 nt, Artificial Sequence
  Description of Artificial Sequence: Synthetic oligonucleotide
uguaagccaugggcuggcu

SEQ ID NO: 1880899 - RNA, 19 nt, Artificial Sequence
  Description of Artificial Sequence: Synthetic oligonucleotide
aguaaccuucuuagaggau

SEQ ID NO: 1880900 - RNA, 19 nt, Artificial Sequence
  Description of Artificial Sequence: Synthetic oligonucleotide
cuucguuguuuggccucgg

SEQ ID NO: 1880901 - RNA, 19 nt, Artificial Sequence
  Description of Artificial Sequence: Synthetic oligonucleotide
acccuagguuuggauucuc

SEQ ID NO: 1880902 - RNA, 19 nt, Artificial Sequence
  Description of Artificial Sequence: Synthetic oligonucleotide
cagcgacugucacaccauc

SEQ ID NO: 1880903 - RNA, 19 nt, Artificial Sequence
  Description of Artificial Sequence: Synthetic oligonucleotide
acagcgacugucacaccau

SEQ ID NO: 1880904 - RNA, 19 nt, Artificial Sequence
  Description of Artificial Sequence: Synthetic oligonucleotide
cuucugcggacccgagcuc

SEQ ID NO: 1880905 - RNA, 19 nt, Artificial Sequence
  Description of Artificial Sequence: Synthetic oligonucleotide
ccaaugcuucugcggaccc

SEQ ID NO: 1880906 - RNA, 19 nt, Artificial Sequence
  Description of Artificial Sequence: Synthetic oligonucleotide
aaaccucggugugggugau

SEQ ID NO: 1880907 - RNA, 19 nt, Artificial Sequence
  Description of Artificial Sequence: Synthetic oligonucleotide
gaauaggcugggaaugcuu

SEQ ID NO: 1880908 - RNA, 19 nt, Artificial Sequence
  Description of Artificial Sequence: Synthetic oligonucleotide
caggaaacccucccggccu

SEQ ID NO: 1880909 - RNA, 19 nt, Artificial Sequence
  Description of Artificial Sequence: Synthetic oligonucleotide
caccuggacauugucaccu

SEQ ID NO: 1880910 - RNA, 19 nt, Artificial Sequence
  Description of Artificial Sequence: Synthetic oligonucleotide
ggcgggagucucuaggucu

SEQ ID NO: 1880911 - RNA, 19 nt, Artificial Sequence
  Description of Artificial Sequence: Synthetic oligonucleotide
ccggccugcagucauccac

SEQ ID NO: 1880912 - RNA, 19 nt, Artificial Sequence
  Description of Artificial Sequence: Synthetic oligonucleotide
cugagguuccaccaucuuu

SEQ ID NO: 1880913 - RNA, 19 nt, Artificial Sequence
  Description of Artificial Sequence: Synthetic oligonucleotide
gguccaacuugaaguccag

SEQ ID NO: 1880914 - RNA, 19 nt, Artificial Sequence
  Description of Artificial Sequence: Synthetic oligonucleotide
ccuuuauuuacccuagguu

SEQ ID NO: 1880915 - RNA, 19 nt, Artificial Sequence
  Description of Artificial Sequence: Synthetic oligonucleotide
gggacacagcuuagggaag

SEQ ID NO: 1880916 - RNA, 19 nt, Artificial Sequence
  Description of Artificial Sequence: Synthetic oligonucleotide
gcgacugucacaccauccu

SEQ ID NO: 1880917 - RNA, 19 nt, Artificial Sequence
  Description of Artificial Sequence: Synthetic oligonucleotide
gguuugcagagcgccaguc

SEQ ID NO: 1880918 - RNA, 19 nt, Artificial Sequence
  Description of Artificial Sequence: Synthetic oligonucleotide
gguacugagguuccaccau

SEQ ID NO: 1880919 - RNA, 19 nt, Artificial Sequence
  Description of Artificial Sequence: Synthetic oligonucleotide
ccaccuggacauugucacc

SEQ ID NO: 1880920 - RNA, 19 nt, Artificial Sequence
  Description of Artificial Sequence: Synthetic oligonucleotide
gggagucucuaggucucag

SEQ ID NO: 1880921 - RNA, 19 nt, Artificial Sequence
  Description of Artificial Sequence: Synthetic oligonucleotide
agcgucagggacacagcuu

SEQ ID NO: 1880922 - RNA, 19 nt, Artificial Sequence
  Description of Artificial Sequence: Synthetic oligonucleotide
ucuaggucucaggggccuu

SEQ ID NO: 1880923 - RNA, 19 nt, Artificial Sequence
  Description of Artificial Sequence: Synthetic oligonucleotide
cagggcaucucagcaugca

SEQ ID NO: 1880924 - RNA, 19 nt, Artificial Sequence
  Description of Artificial Sequence: Synthetic oligonucleotide
cagcgucagggacacagcu

SEQ ID NO: 1880925 - RNA, 19 nt, Artificial Sequence
  Description of Artificial Sequence: Synthetic oligonucleotide
gugggcgugcguguguaaa

SEQ ID NO: 1880926 - RNA, 19 nt, Artificial Sequence
  Description of Artificial Sequence: Synthetic oligonucleotide
cagcuuagggaagaacggu

SEQ ID NO: 1880927 - RNA, 19 nt, Artificial Sequence
  Description of Artificial Sequence: Synthetic oligonucleotide
ggguucauuuuaccaacau

SEQ ID NO: 1880928 - RNA, 19 nt, Artificial Sequence
  Description of Artificial Sequence: Synthetic oligonucleotide
guggugggguucuaucuuu

SEQ ID NO: 1880929 - RNA, 19 nt, Artificial Sequence
  Description of Artificial Sequence: Synthetic oligonucleotide
ggccuuccuccuuuaaacu

SEQ ID NO: 1880930 - RNA, 19 nt, Artificial Sequence
  Description of Artificial Sequence: Synthetic oligonucleotide
auacgucuccagagauggu

SEQ ID NO: 1880931 - RNA, 19 nt, Artificial Sequence
  Description of Artificial Sequence: Synthetic oligonucleotide
cgccagucgucagucagcg

SEQ ID NO: 1880932 - RNA, 19 nt, Artificial Sequence
  Description of Artificial Sequence: Synthetic oligonucleotide
ugguagguuuugggaucuc

SEQ ID NO: 1880933 - RNA, 19 nt, Artificial Sequence
  Description of Artificial Sequence: Synthetic oligonucleotide
cagcgugacucagcacuuc

SEQ ID NO: 1880934 - RNA, 19 nt, Artificial Sequence
  Description of Artificial Sequence: Synthetic oligonucleotide
gacucagcacuucguuguu

SEQ ID NO: 1880935 - RNA, 19 nt, Artificial Sequence
  Description of Artificial Sequence: Synthetic oligonucleotide
uggcgcccucaaaaccauu

SEQ ID NO: 1880936 - RNA, 19 nt, Artificial Sequence
  Description of Artificial Sequence: Synthetic oligonucleotide
gggaggcgggagucucuag

SEQ ID NO: 1880937 - RNA, 19 nt, Artificial Sequence
  Description of Artificial Sequence: Synthetic oligonucleotide
guuuggccucggggaggcg

SEQ ID NO: 1880938 - RNA, 19 nt, Artificial Sequence
  Description of Artificial Sequence: Synthetic oligonucleotide
ccagaagguaagauaccgu

SEQ ID NO: 1880939 - RNA, 19 nt, Artificial Sequence
  Description of Artificial Sequence: Synthetic oligonucleotide
ccaagcaccgcuguguggu

SEQ ID NO: 1880940 - RNA, 19 nt, Artificial Sequence
  Description of Artificial Sequence: Synthetic oligonucleotide
cagagcgccagucgucagu

SEQ ID NO: 1880941 - RNA, 19 nt, Artificial Sequence
  Description of Artificial Sequence: Synthetic oligonucleotide
guuuugggaucucgucauu

SEQ ID NO: 1880942 - RNA, 19 nt, Artificial Sequence
  Description of Artificial Sequence: Synthetic oligonucleotide
gcgccagucgucagucagc

SEQ ID NO: 1880943 - RNA, 19 nt, Artificial Sequence
  Description of Artificial Sequence: Synthetic oligonucleotide
cgugcguguguaaacuuua

SEQ ID NO: 1880944 - RNA, 19 nt, Artificial Sequence
  Description of Artificial Sequence: Synthetic oligonucleotide
gcgggagucucuaggucuc

SEQ ID NO: 1880945 - RNA, 19 nt, Artificial Sequence
  Description of Artificial Sequence: Synthetic oligonucleotide
gcacugagagaguaaccuu

SEQ ID NO: 1880946 - RNA, 19 nt, Artificial Sequence
  Description of Artificial Sequence: Synthetic oligonucleotide
cugagagaguaaccuucuu

SEQ ID NO: 1880947 - RNA, 19 nt, Artificial Sequence
  Description of Artificial Sequence: Synthetic oligonucleotide
cugucacaccauccuuggu

SEQ ID NO: 1880948 - RNA, 19 nt, Artificial Sequence
  Description of Artificial Sequence: Synthetic oligonucleotide
ccggccuuccuccuuuaaa

SEQ ID NO: 1880949 - RNA, 19 nt, Artificial Sequence
  Description of Artificial Sequence: Synthetic oligonucleotide
gggcgugcguguguaaacu

SEQ ID NO: 1880950 - RNA, 19 nt, Artificial Sequence
  Description of Artificial Sequence: Synthetic oligonucleotide
gcaccgcuguguggugggg

SEQ ID NO: 1880951 - RNA, 19 nt, Artificial Sequence
  Description of Artificial Sequence: Synthetic oligonucleotide
ccggcugagcacugagaga

SEQ ID NO: 1880952 - RNA, 19 nt, Artificial Sequence
  Description of Artificial Sequence: Synthetic oligonucleotide
augccccggccugcaguca

SEQ ID NO: 1880953 - RNA, 19 nt, Artificial Sequence
  Description of Artificial Sequence: Synthetic oligonucleotide
cgucagucagcgugacuca

SEQ ID NO: 1880954 - RNA, 19 nt, Artificial Sequence
  Description of Artificial Sequence: Synthetic oligonucleotide
ggcgcccucaaaaccauuu

SEQ ID NO: 1880955 - RNA, 19 nt, Artificial Sequence
  Description of Artificial Sequence: Synthetic oligonucleotide
ggugggcgugcguguguaa

SEQ ID NO: 1880956 - RNA, 19 nt, Artificial Sequence
  Description of Artificial Sequence: Synthetic oligonucleotide
ggcgugcguguguaaacuu

SEQ ID NO: 1880957 - RNA, 19 nt, Artificial Sequence
  Description of Artificial Sequence: Synthetic oligonucleotide
ccuuggacagggugacacu

SEQ ID NO: 1880958 - RNA, 19 nt, Artificial Sequence
  Description of Artificial Sequence: Synthetic oligonucleotide
cucccggccuuccuccuuu

SEQ ID NO: 1880959 - RNA, 19 nt, Artificial Sequence
  Description of Artificial Sequence: Synthetic oligonucleotide
ggggaggcgggagucucua

SEQ ID NO: 1880960 - RNA, 19 nt, Artificial Sequence
  Description of Artificial Sequence: Synthetic oligonucleotide
caccgcugugugguggggu

SEQ ID NO: 1880961 - RNA, 19 nt, Artificial Sequence
  Description of Artificial Sequence: Synthetic oligonucleotide
cgugacucagcacuucguu

SEQ ID NO: 1880962 - RNA, 19 nt, Artificial Sequence
  Description of Artificial Sequence: Synthetic oligonucleotide
gcgugacucagcacuucgu

SEQ ID NO: 1880963 - RNA, 19 nt, Artificial Sequence
  Description of Artificial Sequence: Synthetic oligonucleotide
cugcggacccgagcuccaa

SEQ ID NO: 1880964 - RNA, 19 nt, Artificial Sequence
  Description of Artificial Sequence: Synthetic oligonucleotide
gccagucgucagucagcgu

SEQ ID NO: 1880965 - RNA, 19 nt, Artificial Sequence
  Description of Artificial Sequence: Synthetic oligonucleotide
gcuguguggugggguucua

SEQ ID NO: 1880966 - RNA, 19 nt, Artificial Sequence
  Description of Artificial Sequence: Synthetic oligonucleotide
cccggccuuccuccuuuaa

SEQ ID NO: 1880967 - RNA, 19 nt, Artificial Sequence
  Description of Artificial Sequence: Synthetic oligonucleotide
ccccagcaauuaagacaaa

SEQ ID NO: 1880968 - RNA, 19 nt, Artificial Sequence
  Description of Artificial Sequence: Synthetic oligonucleotide
cgggagucucuaggucuca

SEQ ID NO: 1880969 - RNA, 19 nt, Artificial Sequence
  Description of Artificial Sequence: Synthetic oligonucleotide
cgguuugcagagcgccagu

SEQ ID NO: 1880970 - RNA, 19 nt, Artificial Sequence
  Description of Artificial Sequence: Synthetic oligonucleotide
aaauaaccaucauucaccc

SEQ ID NO: 1880971 - RNA, 19 nt, Artificial Sequence
  Description of Artificial Sequence: Synthetic oligonucleotide
auaaugauugccucguucc

SEQ ID NO: 1880972 - RNA, 19 nt, Artificial Sequence
  Description of Artificial Sequence: Synthetic oligonucleotide
aaagguaugugcucgcagc

SEQ ID NO: 1880973 - RNA, 19 nt, Artificial Sequence
  Description of Artificial Sequence: Synthetic oligonucleotide
augguuguaauauucauuc

SEQ ID NO: 1880974 - RNA, 19 nt, Artificial Sequence
  Description of Artificial Sequence: Synthetic oligonucleotide
aaggcauuaaucugcuucc

SEQ ID NO: 1880975 - RNA, 19 nt, Artificial Sequence
  Description of Artificial Sequence: Synthetic oligonucleotide
aauaaugauugccucguuc

SEQ ID NO: 1880976 - RNA, 19 nt, Artificial Sequence
  Description of Artificial Sequence: Synthetic oligonucleotide
  modified_base (6)..(6): a, c, u, g, unknown or other
aguccnguuuucuugagcc

SEQ ID NO: 1880977 - RNA, 19 nt, Artificial Sequence
  Description of Artificial Sequence: Synthetic oligonucleotide
gguuauuaaaucuggaugg

SEQ ID NO: 1880978 - RNA, 19 nt, Artificial Sequence
  Description of Artificial Sequence: Synthetic oligonucleotide
uaugucucuacaaccagcg

SEQ ID NO: 1880979 - RNA, 19 nt, Artificial Sequence
  Description of Artificial Sequence: Synthetic oligonucleotide
ugucucuacaaccagcggg

SEQ ID NO: 1880980 - RNA, 19 nt, Artificial Sequence
  Description of Artificial Sequence: Synthetic oligonucleotide
aacagaaagcgcuuuuccg

SEQ ID NO: 1880981 - RNA, 19 nt, Artificial Sequence
  Description of Artificial Sequence: Synthetic oligonucleotide
ucuguaaacagugagugag

SEQ ID NO: 1880982 - RNA, 19 nt, Artificial Sequence
  Description of Artificial Sequence: Synthetic oligonucleotide
auaaccaucauucacccca

SEQ ID NO: 1880983 - RNA, 19 nt, Artificial Sequence
  Description of Artificial Sequence: Synthetic oligonucleotide
uaugacuauacaaauugca

SEQ ID NO: 1880984 - RNA, 19 nt, Artificial Sequence
  Description of Artificial Sequence: Synthetic oligonucleotide
caaauugcacauuuuacag

SEQ ID NO: 1880985 - RNA, 19 nt, Artificial Sequence
  Description of Artificial Sequence: Synthetic oligonucleotide
aaccaagcggcucugcggc

SEQ ID NO: 1880986 - RNA, 19 nt, Artificial Sequence
  Description of Artificial Sequence: Synthetic oligonucleotide
agguuauuaaaucuggaug

SEQ ID NO: 1880987 - RNA, 19 nt, Artificial Sequence
  Description of Artificial Sequence: Synthetic oligonucleotide
acaaauugcacauuuuaca

SEQ ID NO: 1880988 - RNA, 19 nt, Artificial Sequence
  Description of Artificial Sequence: Synthetic oligonucleotide
uaauaaagagguaucucug

SEQ ID NO: 1880989 - RNA, 19 nt, Artificial Sequence
  Description of Artificial Sequence: Synthetic oligonucleotide
uuggguucacaaaagagca

SEQ ID NO: 1880990 - RNA, 19 nt, Artificial Sequence
  Description of Artificial Sequence: Synthetic oligonucleotide
ugacuauacaaauugcaca

SEQ ID NO: 1880991 - RNA, 19 nt, Artificial Sequence
  Description of Artificial Sequence: Synthetic oligonucleotide
ucuagcacgacagaaacca

SEQ ID NO: 1880992 - RNA, 19 nt, Artificial Sequence
  Description of Artificial Sequence: Synthetic oligonucleotide
aggagaaugacgaagauca

SEQ ID NO: 1880993 - RNA, 19 nt, Artificial Sequence
  Description of Artificial Sequence: Synthetic oligonucleotide
aauaaccaucauucacccc

SEQ ID NO: 1880994 - RNA, 19 nt, Artificial Sequence
  Description of Artificial Sequence: Synthetic oligonucleotide
cauuaaucugcuuccaacc

SEQ ID NO: 1880995 - RNA, 19 nt, Artificial Sequence
  Description of Artificial Sequence: Synthetic oligonucleotide
agcuuugcauaauaaagag

SEQ ID NO: 1880996 - RNA, 19 nt, Artificial Sequence
  Description of Artificial Sequence: Synthetic oligonucleotide
  modified_base (10)..(10): a, c, u, g, unknown or other
aaccaguccnguuuucuug

SEQ ID NO: 1880997 - RNA, 19 nt, Artificial Sequence
  Description of Artificial Sequence: Synthetic oligonucleotide
acgacagaaaccaagcggc

SEQ ID NO: 1880998 - RNA, 19 nt, Artificial Sequence
  Description of Artificial Sequence: Synthetic oligonucleotide
uuaaucugcuuccaaccag

SEQ ID NO: 1880999 - RNA, 19 nt, Artificial Sequence
  Description of Artificial Sequence: Synthetic oligonucleotide
uccguaauaaugauugccu

SEQ ID NO: 1881000 - RNA, 19 nt, Artificial Sequence
  Description of Artificial Sequence: Synthetic oligonucleotide
gagguuaucucuaggaucc

SEQ ID NO: 1881001 - RNA, 19 nt, Artificial Sequence
  Description of Artificial Sequence: Synthetic oligonucleotide
gaucuguaaacagugagug

SEQ ID NO: 1881002 - RNA, 19 nt, Artificial Sequence
  Description of Artificial Sequence: Synthetic oligonucleotide
aaaagguaugugcucgcag

SEQ ID NO: 1881003 - RNA, 19 nt, Artificial Sequence
  Description of Artificial Sequence: Synthetic oligonucleotide
aaaccaagcggcucugcgg

SEQ ID NO: 1881004 - RNA, 19 nt, Artificial Sequence
  Description of Artificial Sequence: Synthetic oligonucleotide
auugccucguuccaaacag

SEQ ID NO: 1881005 - RNA, 19 nt, Artificial Sequence
  Description of Artificial Sequence: Synthetic oligonucleotide
cauuuuacagcacagcauc

SEQ ID NO: 1881006 - RNA, 19 nt, Artificial Sequence
  Description of Artificial Sequence: Synthetic oligonucleotide
cacaaaagagcagucaugg

SEQ ID NO: 1881007 - RNA, 19 nt, Artificial Sequence
  Description of Artificial Sequence: Synthetic oligonucleotide
uuacagcacagcaucacag

SEQ ID NO: 1881008 - RNA, 19 nt, Artificial Sequence
  Description of Artificial Sequence: Synthetic oligonucleotide
ugcgucaaggcauuaaucu

SEQ ID NO: 1881009 - RNA, 19 nt, Artificial Sequence
  Description of Artificial Sequence: Synthetic oligonucleotide
aauaacuaugguuguaaua

SEQ ID NO: 1881010 - RNA, 19 nt, Artificial Sequence
  Description of Artificial Sequence: Synthetic oligonucleotide
ucacauuggguucacaaaa

SEQ ID NO: 1881011 - RNA, 19 nt, Artificial Sequence
  Description of Artificial Sequence: Synthetic oligonucleotide
augacuauacaaauugcac

SEQ ID NO: 1881012 - RNA, 19 nt, Artificial Sequence
  Description of Artificial Sequence: Synthetic oligonucleotide
aaaagagcagucauggcca

SEQ ID NO: 1881013 - RNA, 19 nt, Artificial Sequence
  Description of Artificial Sequence: Synthetic oligonucleotide
ucugcugauacauacggau

SEQ ID NO: 1881014 - RNA, 19 nt, Artificial Sequence
  Description of Artificial Sequence: Synthetic oligonucleotide
ugacgaagaucacugccgg

SEQ ID NO: 1881015 - RNA, 19 nt, Artificial Sequence
  Description of Artificial Sequence: Synthetic oligonucleotide
ugcauaauaaagagguauc

SEQ ID NO: 1881016 - RNA, 19 nt, Artificial Sequence
  Description of Artificial Sequence: Synthetic oligonucleotide
cacgacagaaaccaagcgg

SEQ ID NO: 1881017 - RNA, 19 nt, Artificial Sequence
  Description of Artificial Sequence: Synthetic oligonucleotide
agugagguuaucucuagga

SEQ ID NO: 1881018 - RNA, 19 nt, Artificial Sequence
  Description of Artificial Sequence: Synthetic oligonucleotide
ugcuaugucucuacaacca

SEQ ID NO: 1881019 - RNA, 19 nt, Artificial Sequence
  Description of Artificial Sequence: Synthetic oligonucleotide
agaaugacgaagaucacug

SEQ ID NO: 1881020 - RNA, 19 nt, Artificial Sequence
  Description of Artificial Sequence: Synthetic oligonucleotide
auaugacuauacaaauugc

SEQ ID NO: 1881021 - RNA, 19 nt, Artificial Sequence
  Description of Artificial Sequence: Synthetic oligonucleotide
gaaaccaagcggcucugcg

SEQ ID NO: 1881022 - RNA, 19 nt, Artificial Sequence
  Description of Artificial Sequence: Synthetic oligonucleotide
uuucacauuggguucacaa

SEQ ID NO: 1881023 - RNA, 19 nt, Artificial Sequence
  Description of Artificial Sequence: Synthetic oligonucleotide
aaaugucuccugcuauguc

SEQ ID NO: 1881024 - RNA, 19 nt, Artificial Sequence
  Description of Artificial Sequence: Synthetic oligonucleotide
agaagcuacuggcagcagg

SEQ ID NO: 1881025 - RNA, 19 nt, Artificial Sequence
  Description of Artificial Sequence: Synthetic oligonucleotide
acagaaagcgcuuuuccga

SEQ ID NO: 1881026 - RNA, 19 nt, Artificial Sequence
  Description of Artificial Sequence: Synthetic oligonucleotide
uugcauaauaaagagguau

SEQ ID NO: 1881027 - RNA, 19 nt, Artificial Sequence
  Description of Artificial Sequence: Synthetic oligonucleotide
auuaaucugcuuccaacca

SEQ ID NO: 1881028 - RNA, 19 nt, Artificial Sequence
  Description of Artificial Sequence: Synthetic oligonucleotide
ugagguuaucucuaggauc

SEQ ID NO: 1881029 - RNA, 19 nt, Artificial Sequence
  Description of Artificial Sequence: Synthetic oligonucleotide
aaaucccaaguuuucugcu

SEQ ID NO: 1881030 - RNA, 19 nt, Artificial Sequence
  Description of Artificial Sequence: Synthetic oligonucleotide
auggguguggcguacuccg

SEQ ID NO: 1881031 - RNA, 19 nt, Artificial Sequence
  Description of Artificial Sequence: Synthetic oligonucleotide
gaaagcgcuuuuccgacag

SEQ ID NO: 1881032 - RNA, 19 nt, Artificial Sequence
  Description of Artificial Sequence: Synthetic oligonucleotide
ugcgaugaucccugcaugg

SEQ ID NO: 1881033 - RNA, 19 nt, Artificial Sequence
  Description of Artificial Sequence: Synthetic oligonucleotide
agccucugcugauacauac

SEQ ID NO: 1881034 - RNA, 19 nt, Artificial Sequence
  Description of Artificial Sequence: Synthetic oligonucleotide
ugucgcuccacgaugggug

SEQ ID NO: 1881035 - RNA, 19 nt, Artificial Sequence
  Description of Artificial Sequence: Synthetic oligonucleotide
uaugguuguaauauucauu

SEQ ID NO: 1881036 - RNA, 19 nt, Artificial Sequence
  Description of Artificial Sequence: Synthetic oligonucleotide
ugauacauacggauuuccu

SEQ ID NO: 1881037 - RNA, 19 nt, Artificial Sequence
  Description of Artificial Sequence: Synthetic oligonucleotide
auacauacggauuuccuuu

SEQ ID NO: 1881038 - RNA, 19 nt, Artificial Sequence
  Description of Artificial Sequence: Synthetic oligonucleotide
agcacgacagaaaccaagc

SEQ ID NO: 1881039 - RNA, 19 nt, Artificial Sequence
  Description of Artificial Sequence: Synthetic oligonucleotide
ucauauucccagaaauguc

SEQ ID NO: 1881040 - RNA, 19 nt, Artificial Sequence
  Description of Artificial Sequence: Synthetic oligonucleotide
aagcgcuuuuccgacaggg

SEQ ID NO: 1881041 - RNA, 19 nt, Artificial Sequence
  Description of Artificial Sequence: Synthetic oligonucleotide
uuguaauauucauuccugu

SEQ ID NO: 1881042 - RNA, 19 nt, Artificial Sequence
  Description of Artificial Sequence: Synthetic oligonucleotide
cuaugucucuacaaccagc

SEQ ID NO: 1881043 - RNA, 19 nt, Artificial Sequence
  Description of Artificial Sequence: Synthetic oligonucleotide
ucauguuaaauaugacuau

SEQ ID NO: 1881044 - RNA, 19 nt, Artificial Sequence
  Description of Artificial Sequence: Synthetic oligonucleotide
cagggucggaacaaaaccc

SEQ ID NO: 1881045 - RNA, 19 nt, Artificial Sequence
  Description of Artificial Sequence: Synthetic oligonucleotide
aagguaugugcucgcagca

SEQ ID NO: 1881046 - RNA, 19 nt, Artificial Sequence
  Description of Artificial Sequence: Synthetic oligonucleotide
ucugcgaugaucccugcau

SEQ ID NO: 1881047 - RNA, 19 nt, Artificial Sequence
  Description of Artificial Sequence: Synthetic oligonucleotide
aucccaaguuuucugcuuc

SEQ ID NO: 1881048 - RNA, 19 nt, Artificial Sequence
  Description of Artificial Sequence: Synthetic oligonucleotide
aaagggaguguuugugagu

SEQ ID NO: 1881049 - RNA, 19 nt, Artificial Sequence
  Description of Artificial Sequence: Synthetic oligonucleotide
augacgaagaucacugccg

SEQ ID NO: 1881050 - RNA, 19 nt, Artificial Sequence
  Description of Artificial Sequence: Synthetic oligonucleotide
uguaaacagugagugaggu

SEQ ID NO: 1881051 - RNA, 19 nt, Artificial Sequence
  Description of Artificial Sequence: Synthetic oligonucleotide
cugcuaugucucuacaacc

SEQ ID NO: 1881052 - RNA, 19 nt, Artificial Sequence
  Description of Artificial Sequence: Synthetic oligonucleotide
uccugcguggaaaagguau

SEQ ID NO: 1881053 - RNA, 19 nt, Artificial Sequence
  Description of Artificial Sequence: Synthetic oligonucleotide
ucugauagccuuugcucug

SEQ ID NO: 1881054 - RNA, 19 nt, Artificial Sequence
  Description of Artificial Sequence: Synthetic oligonucleotide
uaaugauugccucguucca

SEQ ID NO: 1881055 - RNA, 19 nt, Artificial Sequence
  Description of Artificial Sequence: Synthetic oligonucleotide
cauaauaaagagguaucuc

SEQ ID NO: 1881056 - RNA, 19 nt, Artificial Sequence
  Description of Artificial Sequence: Synthetic oligonucleotide
acugccggaauaacuaugg

SEQ ID NO: 1881057 - RNA, 19 nt, Artificial Sequence
  Description of Artificial Sequence: Synthetic oligonucleotide
cuccguaauaaugauugcc

SEQ ID NO: 1881058 - RNA, 19 nt, Artificial Sequence
  Description of Artificial Sequence: Synthetic oligonucleotide
ugagugagguuaucucuag

SEQ ID NO: 1881059 - RNA, 19 nt, Artificial Sequence
  Description of Artificial Sequence: Synthetic oligonucleotide
aaaacccgcugcucagauc

SEQ ID NO: 1881060 - RNA, 19 nt, Artificial Sequence
  Description of Artificial Sequence: Synthetic oligonucleotide
uauucccagaaaugucucc

SEQ ID NO: 1881061 - RNA, 19 nt, Artificial Sequence
  Description of Artificial Sequence: Synthetic oligonucleotide
aucacaguuagcaacgaga

SEQ ID NO: 1881062 - RNA, 19 nt, Artificial Sequence
  Description of Artificial Sequence: Synthetic oligonucleotide
ucggaacaaaacccgcugc

SEQ ID NO: 1881063 - RNA, 19 nt, Artificial Sequence
  Description of Artificial Sequence: Synthetic oligonucleotide
cagaaggagaaugacgaag

SEQ ID NO: 1881064 - RNA, 19 nt, Artificial Sequence
  Description of Artificial Sequence: Synthetic oligonucleotide
uccuuguucuagcacgaca

SEQ ID NO: 1881065 - RNA, 19 nt, Artificial Sequence
  Description of Artificial Sequence: Synthetic oligonucleotide
ugacucgccgcagagcacg

SEQ ID NO: 1881066 - RNA, 19 nt, Artificial Sequence
  Description of Artificial Sequence: Synthetic oligonucleotide
aguuagcaacgagaaaagg

SEQ ID NO: 1881067 - RNA, 19 nt, Artificial Sequence
  Description of Artificial Sequence: Synthetic oligonucleotide
gaguguuugugagugggcc

SEQ ID NO: 1881068 - RNA, 19 nt, Artificial Sequence
  Description of Artificial Sequence: Synthetic oligonucleotide
uccuguggagguaaacaga

SEQ ID NO: 1881069 - RNA, 19 nt, Artificial Sequence
  Description of Artificial Sequence: Synthetic oligonucleotide
auaaagagguaucucugua

SEQ ID NO: 1881070 - RNA, 19 nt, Artificial Sequence
  Description of Artificial Sequence: Synthetic oligonucleotide
acauuggguucacaaaaga

SEQ ID NO: 1881071 - RNA, 19 nt, Artificial Sequence
  Description of Artificial Sequence: Synthetic oligonucleotide
ugguuguaauauucauucc

SEQ ID NO: 1881072 - RNA, 19 nt, Artificial Sequence
  Description of Artificial Sequence: Synthetic oligonucleotide
gaaugacgaagaucacugc

SEQ ID NO: 1881073 - RNA, 19 nt, Artificial Sequence
  Description of Artificial Sequence: Synthetic oligonucleotide
cagcuuugcauaauaaaga

SEQ ID NO: 1881074 - RNA, 19 nt, Artificial Sequence
  Description of Artificial Sequence: Synthetic oligonucleotide
uguggcguacuccgguucc

SEQ ID NO: 1881075 - RNA, 19 nt, Artificial Sequence
  Description of Artificial Sequence: Synthetic oligonucleotide
uccgagugcgucaaggcau

SEQ ID NO: 1881076 - RNA, 19 nt, Artificial Sequence
  Description of Artificial Sequence: Synthetic oligonucleotide
uccacgauggguguggcgu

SEQ ID NO: 1881077 - RNA, 19 nt, Artificial Sequence
  Description of Artificial Sequence: Synthetic oligonucleotide
uggguucacaaaagagcag

SEQ ID NO: 1881078 - RNA, 19 nt, Artificial Sequence
  Description of Artificial Sequence: Synthetic oligonucleotide
ugggugcuaaauaaccauc

SEQ ID NO: 1881079 - RNA, 19 nt, Artificial Sequence
  Description of Artificial Sequence: Synthetic oligonucleotide
uuccgagugcgucaaggca

SEQ ID NO: 1881080 - RNA, 19 nt, Artificial Sequence
  Description of Artificial Sequence: Synthetic oligonucleotide
ugcaauugaggggaggggu

SEQ ID NO: 1881081 - RNA, 19 nt, Artificial Sequence
  Description of Artificial Sequence: Synthetic oligonucleotide
aaucccaaguuuucugcuu

SEQ ID NO: 1881082 - RNA, 19 nt, Artificial Sequence
  Description of Artificial Sequence: Synthetic oligonucleotide
ugccucguuccaaacaggu

SEQ ID NO: 1881083 - RNA, 19 nt, Artificial Sequence
  Description of Artificial Sequence: Synthetic oligonucleotide
aacgagaaaaggucuccuu

SEQ ID NO: 1881084 - RNA, 19 nt, Artificial Sequence
  Description of Artificial Sequence: Synthetic oligonucleotide
aaagcgcuuuuccgacagg

SEQ ID NO: 1881085 - RNA, 19 nt, Artificial Sequence
  Description of Artificial Sequence: Synthetic oligonucleotide
ccuuguucuagcacgacag

SEQ ID NO: 1881086 - RNA, 19 nt, Artificial Sequence
  Description of Artificial Sequence: Synthetic oligonucleotide
acuaugguuguaauauuca

SEQ ID NO: 1881087 - RNA, 19 nt, Artificial Sequence
  Description of Artificial Sequence: Synthetic oligonucleotide
guggagguaaacagaaagc

SEQ ID NO: 1881088 - RNA, 19 nt, Artificial Sequence
  Description of Artificial Sequence: Synthetic oligonucleotide
cguaauaaugauugccucg

SEQ ID NO: 1881089 - RNA, 19 nt, Artificial Sequence
  Description of Artificial Sequence: Synthetic oligonucleotide
  modified_base (4)..(4): a, c, u, g, unknown or other
uccnguuuucuugagccuc

SEQ ID NO: 1881090 - RNA, 19 nt, Artificial Sequence
  Description of Artificial Sequence: Synthetic oligonucleotide
cugguugaggggugcaagg

SEQ ID NO: 1881091 - RNA, 19 nt, Artificial Sequence
  Description of Artificial Sequence: Synthetic oligonucleotide
auaaugacugaugccuuug

SEQ ID NO: 1881092 - RNA, 19 nt, Artificial Sequence
  Description of Artificial Sequence: Synthetic oligonucleotide
ucugguugaggggugcaag

SEQ ID NO: 1881093 - RNA, 19 nt, Artificial Sequence
  Description of Artificial Sequence: Synthetic oligonucleotide
agugcgucaaggcauuaau

SEQ ID NO: 1881094 - RNA, 19 nt, Artificial Sequence
  Description of Artificial Sequence: Synthetic oligonucleotide
ucauaaugacugaugccuu

SEQ ID NO: 1881095 - RNA, 19 nt, Artificial Sequence
  Description of Artificial Sequence: Synthetic oligonucleotide
gucggaacaaaacccgcug

SEQ ID NO: 1881096 - RNA, 19 nt, Artificial Sequence
  Description of Artificial Sequence: Synthetic oligonucleotide
gauugccucguuccaaaca

SEQ ID NO: 1881097 - RNA, 19 nt, Artificial Sequence
  Description of Artificial Sequence: Synthetic oligonucleotide
  modified_base (9)..(9): a, c, u, g, unknown or other
accaguccnguuuucuuga

SEQ ID NO: 1881098 - RNA, 19 nt, Artificial Sequence
  Description of Artificial Sequence: Synthetic oligonucleotide
aggggugcaaggccguuuc

SEQ ID NO: 1881099 - RNA, 19 nt, Artificial Sequence
  Description of Artificial Sequence: Synthetic oligonucleotide
agggucggaacaaaacccg

SEQ ID NO: 1881100 - RNA, 19 nt, Artificial Sequence
  Description of Artificial Sequence: Synthetic oligonucleotide
uugccucguuccaaacagg

SEQ ID NO: 1881101 - RNA, 19 nt, Artificial Sequence
  Description of Artificial Sequence: Synthetic oligonucleotide
aucauucaccccaggaguc

SEQ ID NO: 1881102 - RNA, 19 nt, Artificial Sequence
  Description of Artificial Sequence: Synthetic oligonucleotide
uuuuccgacagggagccau

SEQ ID NO: 1881103 - RNA, 19 nt, Artificial Sequence
  Description of Artificial Sequence: Synthetic oligonucleotide
accuaguucgucugcgaug

SEQ ID NO: 1881104 - RNA, 19 nt, Artificial Sequence
  Description of Artificial Sequence: Synthetic oligonucleotide
gcauuaaucugcuuccaac

SEQ ID NO: 1881105 - RNA, 19 nt, Artificial Sequence
  Description of Artificial Sequence: Synthetic oligonucleotide
agcaacgagaaaaggucuc

SEQ ID NO: 1881106 - RNA, 19 nt, Artificial Sequence
  Description of Artificial Sequence: Synthetic oligonucleotide
ggagucaucugcaauugag

SEQ ID NO: 1881107 - RNA, 19 nt, Artificial Sequence
  Description of Artificial Sequence: Synthetic oligonucleotide
caggacuccuucauaauga

SEQ ID NO: 1881108 - RNA, 19 nt, Artificial Sequence
  Description of Artificial Sequence: Synthetic oligonucleotide
uacuccgguuccgagugcg

SEQ ID NO: 1881109 - RNA, 19 nt, Artificial Sequence
  Description of Artificial Sequence: Synthetic oligonucleotide
aucuguaaacagugaguga

SEQ ID NO: 1881110 - RNA, 19 nt, Artificial Sequence
  Description of Artificial Sequence: Synthetic oligonucleotide
gguuguaauauucauuccu

SEQ ID NO: 1881111 - RNA, 19 nt, Artificial Sequence
  Description of Artificial Sequence: Synthetic oligonucleotide
aggaaagggaguguuugug

SEQ ID NO: 1881112 - RNA, 19 nt, Artificial Sequence
  Description of Artificial Sequence: Synthetic oligonucleotide
gauacccuccggaggaaag

SEQ ID NO: 1881113 - RNA, 19 nt, Artificial Sequence
  Description of Artificial Sequence: Synthetic oligonucleotide
  modified_base (7)..(7): a, c, u, g, unknown or other
caguccnguuuucuugagc

SEQ ID NO: 1881114 - RNA, 19 nt, Artificial Sequence
  Description of Artificial Sequence: Synthetic oligonucleotide
acagugagugagguuaucu

SEQ ID NO: 1881115 - RNA, 19 nt, Artificial Sequence
  Description of Artificial Sequence: Synthetic oligonucleotide
uacccuccggaggaaaggg

SEQ ID NO: 1881116 - RNA, 19 nt, Artificial Sequence
  Description of Artificial Sequence: Synthetic oligonucleotide
guuccgagugcgucaaggc

SEQ ID NO: 1881117 - RNA, 19 nt, Artificial Sequence
  Description of Artificial Sequence: Synthetic oligonucleotide
gguugauguggccaccuag

SEQ ID NO: 1881118 - RNA, 19 nt, Artificial Sequence
  Description of Artificial Sequence: Synthetic oligonucleotide
agagacacacacgcaugcg

SEQ ID NO: 1881119 - RNA, 19 nt, Artificial Sequence
  Description of Artificial Sequence: Synthetic oligonucleotide
gcguggaaaagguaugugc

SEQ ID NO: 1881120 - RNA, 19 nt, Artificial Sequence
  Description of Artificial Sequence: Synthetic oligonucleotide
cuugcuggccucugauagc

SEQ ID NO: 1881121 - RNA, 19 nt, Artificial Sequence
  Description of Artificial Sequence: Synthetic oligonucleotide
augugcucgcagcaggugu

SEQ ID NO: 1881122 - RNA, 19 nt, Artificial Sequence
  Description of Artificial Sequence: Synthetic oligonucleotide
gacucgguagccguccugc

SEQ ID NO: 1881123 - RNA, 19 nt, Artificial Sequence
  Description of Artificial Sequence: Synthetic oligonucleotide
caucacaguuagcaacgag

SEQ ID NO: 1881124 - RNA, 19 nt, Artificial Sequence
  Description of Artificial Sequence: Synthetic oligonucleotide
guaauaaugauugccucgu

SEQ ID NO: 1881125 - RNA, 19 nt, Artificial Sequence
  Description of Artificial Sequence: Synthetic oligonucleotide
augauugccucguuccaaa

SEQ ID NO: 1881126 - RNA, 19 nt, Artificial Sequence
  Description of Artificial Sequence: Synthetic oligonucleotide
agaucacugccggaauaac

SEQ ID NO: 1881127 - RNA, 19 nt, Artificial Sequence
  Description of Artificial Sequence: Synthetic oligonucleotide
aaagagcagucauggccau

SEQ ID NO: 1881128 - RNA, 19 nt, Artificial Sequence
  Description of Artificial Sequence: Synthetic oligonucleotide
agcggggcagaauuugcug

SEQ ID NO: 1881129 - RNA, 19 nt, Artificial Sequence
  Description of Artificial Sequence: Synthetic oligonucleotide
ccaucauucaccccaggag

SEQ ID NO: 1881130 - RNA, 19 nt, Artificial Sequence
  Description of Artificial Sequence: Synthetic oligonucleotide
acuccuucauaaugacuga

SEQ ID NO: 1881131 - RNA, 19 nt, Artificial Sequence
  Description of Artificial Sequence: Synthetic oligonucleotide
ugugcucgcagcagguguc

SEQ ID NO: 1881132 - RNA, 19 nt, Artificial Sequence
  Description of Artificial Sequence: Synthetic oligonucleotide
acgaagaucacugccggaa

SEQ ID NO: 1881133 - RNA, 19 nt, Artificial Sequence
  Description of Artificial Sequence: Synthetic oligonucleotide
uccugcagcaaggggauac

SEQ ID NO: 1881134 - RNA, 19 nt, Artificial Sequence
  Description of Artificial Sequence: Synthetic oligonucleotide
ccugcuaugucucuacaac

SEQ ID NO: 1881135 - RNA, 19 nt, Artificial Sequence
  Description of Artificial Sequence: Synthetic oligonucleotide
auacccuccggaggaaagg

SEQ ID NO: 1881136 - RNA, 19 nt, Artificial Sequence
  Description of Artificial Sequence: Synthetic oligonucleotide
gauggguguggcguacucc

SEQ ID NO: 1881137 - RNA, 19 nt, Artificial Sequence
  Description of Artificial Sequence: Synthetic oligonucleotide
uccagugacucgccgcaga

SEQ ID NO: 1881138 - RNA, 19 nt, Artificial Sequence
  Description of Artificial Sequence: Synthetic oligonucleotide
cgucaaggcauuaaucugc

SEQ ID NO: 1881139 - RNA, 19 nt, Artificial Sequence
  Description of Artificial Sequence: Synthetic oligonucleotide
aucacugccggaauaacua

SEQ ID NO: 1881140 - RNA, 19 nt, Artificial Sequence
  Description of Artificial Sequence: Synthetic oligonucleotide
gcuaaauaaccaucauuca

SEQ ID NO: 1881141 - RNA, 19 nt, Artificial Sequence
  Description of Artificial Sequence: Synthetic oligonucleotide
uacauacggauuuccuuuu

SEQ ID NO: 1881142 - RNA, 19 nt, Artificial Sequence
  Description of Artificial Sequence: Synthetic oligonucleotide
ucauucaccccaggaguca

SEQ ID NO: 1881143 - RNA, 19 nt, Artificial Sequence
  Description of Artificial Sequence: Synthetic oligonucleotide
uguuugugagugggccugg

SEQ ID NO: 1881144 - RNA, 19 nt, Artificial Sequence
  Description of Artificial Sequence: Synthetic oligonucleotide
gccagaaggagaaugacga

SEQ ID NO: 1881145 - RNA, 19 nt, Artificial Sequence
  Description of Artificial Sequence: Synthetic oligonucleotide
gcuaugucucuacaaccag

SEQ ID NO: 1881146 - RNA, 19 nt, Artificial Sequence
  Description of Artificial Sequence: Synthetic oligonucleotide
uccgguuccgagugcguca

SEQ ID NO: 1881147 - RNA, 19 nt, Artificial Sequence
  Description of Artificial Sequence: Synthetic oligonucleotide
ugcguggaaaagguaugug

SEQ ID NO: 1881148 - RNA, 19 nt, Artificial Sequence
  Description of Artificial Sequence: Synthetic oligonucleotide
ucugcggcagggucggaac

SEQ ID NO: 1881149 - RNA, 19 nt, Artificial Sequence
  Description of Artificial Sequence: Synthetic oligonucleotide
uccgacagggagccaugcc

SEQ ID NO: 1881150 - RNA, 19 nt, Artificial Sequence
  Description of Artificial Sequence: Synthetic oligonucleotide
gagaaugacgaagaucacu

SEQ ID NO: 1881151 - RNA, 19 nt, Artificial Sequence
  Description of Artificial Sequence: Synthetic oligonucleotide
aggcuugucauagccacca

SEQ ID NO: 1881152 - RNA, 19 nt, Artificial Sequence
  Description of Artificial Sequence: Synthetic oligonucleotide
gaaaagguaugugcucgca

SEQ ID NO: 1881153 - RNA, 19 nt, Artificial Sequence
  Description of Artificial Sequence: Synthetic oligonucleotide
uaauaaugauugccucguu

SEQ ID NO: 1881154 - RNA, 19 nt, Artificial Sequence
  Description of Artificial Sequence: Synthetic oligonucleotide
cacugccggaauaacuaug

SEQ ID NO: 1881155 - RNA, 19 nt, Artificial Sequence
  Description of Artificial Sequence: Synthetic oligonucleotide
ucccaaguuuucugcuuca

SEQ ID NO: 1881156 - RNA, 19 nt, Artificial Sequence
  Description of Artificial Sequence: Synthetic oligonucleotide
caagaagcuacuggcagca

SEQ ID NO: 1881157 - RNA, 19 nt, Artificial Sequence
  Description of Artificial Sequence: Synthetic oligonucleotide
auuuuacagcacagcauca

SEQ ID NO: 1881158 - RNA, 19 nt, Artificial Sequence
  Description of Artificial Sequence: Synthetic oligonucleotide
ugauugccucguuccaaac

SEQ ID NO: 1881159 - RNA, 19 nt, Artificial Sequence
  Description of Artificial Sequence: Synthetic oligonucleotide
gcgcuuuuccgacagggag

SEQ ID NO: 1881160 - RNA, 19 nt, Artificial Sequence
  Description of Artificial Sequence: Synthetic oligonucleotide
caucauucaccccaggagu

SEQ ID NO: 1881161 - RNA, 19 nt, Artificial Sequence
  Description of Artificial Sequence: Synthetic oligonucleotide
gguugaggggugcaaggcc

SEQ ID NO: 1881162 - RNA, 19 nt, Artificial Sequence
  Description of Artificial Sequence: Synthetic oligonucleotide
gguuccgagugcgucaagg

SEQ ID NO: 1881163 - RNA, 19 nt, Artificial Sequence
  Description of Artificial Sequence: Synthetic oligonucleotide
ucacugccggaauaacuau

SEQ ID NO: 1881164 - RNA, 19 nt, Artificial Sequence
  Description of Artificial Sequence: Synthetic oligonucleotide
gcacgacagaaaccaagcg

SEQ ID NO: 1881165 - RNA, 19 nt, Artificial Sequence
  Description of Artificial Sequence: Synthetic oligonucleotide
uaguucgucugcgaugauc

SEQ ID NO: 1881166 - RNA, 19 nt, Artificial Sequence
  Description of Artificial Sequence: Synthetic oligonucleotide
ccucugauagccuuugcuc

SEQ ID NO: 1881167 - RNA, 19 nt, Artificial Sequence
  Description of Artificial Sequence: Synthetic oligonucleotide
ucaccccuguguagaaaac

SEQ ID NO: 1881168 - RNA, 19 nt, Artificial Sequence
  Description of Artificial Sequence: Synthetic oligonucleotide
ccgacagggagccaugccg

SEQ ID NO: 1881169 - RNA, 19 nt, Artificial Sequence
  Description of Artificial Sequence: Synthetic oligonucleotide
caggugucgcuccacgaug

SEQ ID NO: 1881170 - RNA, 19 nt, Artificial Sequence
  Description of Artificial Sequence: Synthetic oligonucleotide
ccaagaagcuacuggcagc

SEQ ID NO: 1881171 - RNA, 19 nt, Artificial Sequence
  Description of Artificial Sequence: Synthetic oligonucleotide
ccuguguagaaaacaaaca

SEQ ID NO: 1881172 - RNA, 19 nt, Artificial Sequence
  Description of Artificial Sequence: Synthetic oligonucleotide
gcgucaaggcauuaaucug

SEQ ID NO: 1881173 - RNA, 19 nt, Artificial Sequence
  Description of Artificial Sequence: Synthetic oligonucleotide
cagguuauuaaaucuggau

SEQ ID NO: 1881174 - RNA, 19 nt, Artificial Sequence
  Description of Artificial Sequence: Synthetic oligonucleotide
cugcgaugaucccugcaug

SEQ ID NO: 1881175 - RNA, 19 nt, Artificial Sequence
  Description of Artificial Sequence: Synthetic oligonucleotide
uugaggggugcaaggccgu

SEQ ID NO: 1881176 - RNA, 19 nt, Artificial Sequence
  Description of Artificial Sequence: Synthetic oligonucleotide
cacgcucaguaccacagca

SEQ ID NO: 1881177 - RNA, 19 nt, Artificial Sequence
  Description of Artificial Sequence: Synthetic oligonucleotide
gcuuuuccgacagggagcc

SEQ ID NO: 1881178 - RNA, 19 nt, Artificial Sequence
  Description of Artificial Sequence: Synthetic oligonucleotide
caaggggauacccuccgga

SEQ ID NO: 1881179 - RNA, 19 nt, Artificial Sequence
  Description of Artificial Sequence: Synthetic oligonucleotide
cuggauggucacugcuggc

SEQ ID NO: 1881180 - RNA, 19 nt, Artificial Sequence
  Description of Artificial Sequence: Synthetic oligonucleotide
cagagcacgcucaguacca

SEQ ID NO: 1881181 - RNA, 19 nt, Artificial Sequence
  Description of Artificial Sequence: Synthetic oligonucleotide
cuaugguuguaauauucau

SEQ ID NO: 1881182 - RNA, 19 nt, Artificial Sequence
  Description of Artificial Sequence: Synthetic oligonucleotide
accagcggggcagaauuug

SEQ ID NO: 1881183 - RNA, 19 nt, Artificial Sequence
  Description of Artificial Sequence: Synthetic oligonucleotide
gcaacgagaaaaggucucc

SEQ ID NO: 1881184 - RNA, 19 nt, Artificial Sequence
  Description of Artificial Sequence: Synthetic oligonucleotide
cauuccuguggagguaaac

SEQ ID NO: 1881185 - RNA, 19 nt, Artificial Sequence
  Description of Artificial Sequence: Synthetic oligonucleotide
gagccaugccgggagagca

SEQ ID NO: 1881186 - RNA, 19 nt, Artificial Sequence
  Description of Artificial Sequence: Synthetic oligonucleotide
guuugugagugggccuggg

SEQ ID NO: 1881187 - RNA, 19 nt, Artificial Sequence
  Description of Artificial Sequence: Synthetic oligonucleotide
gcaugcgcgcacuucuucc

SEQ ID NO: 1881188 - RNA, 19 nt, Artificial Sequence
  Description of Artificial Sequence: Synthetic oligonucleotide
cuccacgauggguguggcg

SEQ ID NO: 1881189 - RNA, 19 nt, Artificial Sequence
  Description of Artificial Sequence: Synthetic oligonucleotide
aagcuacuggcagcaggcu

SEQ ID NO: 1881190 - RNA, 19 nt, Artificial Sequence
  Description of Artificial Sequence: Synthetic oligonucleotide
ccguaauaaugauugccuc

SEQ ID NO: 1881191 - RNA, 19 nt, Artificial Sequence
  Description of Artificial Sequence: Synthetic oligonucleotide
gaggaaagggaguguuugu

SEQ ID NO: 1881192 - RNA, 19 nt, Artificial Sequence
  Description of Artificial Sequence: Synthetic oligonucleotide
cugcucagaucuguaaaca

SEQ ID NO: 1881193 - RNA, 19 nt, Artificial Sequence
  Description of Artificial Sequence: Synthetic oligonucleotide
acacgcaugcgcgcacuuc

SEQ ID NO: 1881194 - RNA, 19 nt, Artificial Sequence
  Description of Artificial Sequence: Synthetic oligonucleotide
cauggauggcagcuuugca

SEQ ID NO: 1881195 - RNA, 19 nt, Artificial Sequence
  Description of Artificial Sequence: Synthetic oligonucleotide
cugcagcaaggggauaccc

SEQ ID NO: 1881196 - RNA, 19 nt, Artificial Sequence
  Description of Artificial Sequence: Synthetic oligonucleotide
acgcucaguaccacagcag

SEQ ID NO: 1881197 - RNA, 19 nt, Artificial Sequence
  Description of Artificial Sequence: Synthetic oligonucleotide
cucgccgcagagcacgcuc

SEQ ID NO: 1881198 - RNA, 19 nt, Artificial Sequence
  Description of Artificial Sequence: Synthetic oligonucleotide
ccucguuccaaacagguua

SEQ ID NO: 1881199 - RNA, 19 nt, Artificial Sequence
  Description of Artificial Sequence: Synthetic oligonucleotide
caugcgcgcacuucuucca

SEQ ID NO: 1881200 - RNA, 19 nt, Artificial Sequence
  Description of Artificial Sequence: Synthetic oligonucleotide
  modified_base (15)..(15): a, c, u, g, unknown or other
cuuccaaccaguccnguuu

SEQ ID NO: 1881201 - RNA, 19 nt, Artificial Sequence
  Description of Artificial Sequence: Synthetic oligonucleotide
cccuccggaggaaagggag

SEQ ID NO: 1881202 - RNA, 19 nt, Artificial Sequence
  Description of Artificial Sequence: Synthetic oligonucleotide
cucgcagcaggugucgcuc

SEQ ID NO: 1881203 - RNA, 19 nt, Artificial Sequence
  Description of Artificial Sequence: Synthetic oligonucleotide
cucuacaaccagcggggca

SEQ ID NO: 1881204 - RNA, 19 nt, Artificial Sequence
  Description of Artificial Sequence: Synthetic oligonucleotide
uugaggggaggggucucug

SEQ ID NO: 1881205 - RNA, 19 nt, Artificial Sequence
  Description of Artificial Sequence: Synthetic oligonucleotide
auugaggggaggggucucu

SEQ ID NO: 1881206 - RNA, 19 nt, Artificial Sequence
  Description of Artificial Sequence: Synthetic oligonucleotide
cgggagagcacaccguugg

SEQ ID NO: 1881207 - RNA, 19 nt, Artificial Sequence
  Description of Artificial Sequence: Synthetic oligonucleotide
gugcgucaaggcauuaauc

SEQ ID NO: 1881208 - RNA, 19 nt, Artificial Sequence
  Description of Artificial Sequence: Synthetic oligonucleotide
aggcauuaaucugcuucca

SEQ ID NO: 1881209 - RNA, 19 nt, Artificial Sequence
  Description of Artificial Sequence: Synthetic oligonucleotide
uuccagugacucgccgcag

SEQ ID NO: 1881210 - RNA, 19 nt, Artificial Sequence
  Description of Artificial Sequence: Synthetic oligonucleotide
ccuaguucgucugcgauga

SEQ ID NO: 1881211 - RNA, 19 nt, Artificial Sequence
  Description of Artificial Sequence: Synthetic oligonucleotide
cguacuccgguuccgagug

SEQ ID NO: 1881212 - RNA, 19 nt, Artificial Sequence
  Description of Artificial Sequence: Synthetic oligonucleotide
ucaaggcauuaaucugcuu

SEQ ID NO: 1881213 - RNA, 19 nt, Artificial Sequence
  Description of Artificial Sequence: Synthetic oligonucleotide
ggcauuaaucugcuuccaa

SEQ ID NO: 1881214 - RNA, 19 nt, Artificial Sequence
  Description of Artificial Sequence: Synthetic oligonucleotide
gugcucgcagcaggugucg

SEQ ID NO: 1881215 - RNA, 19 nt, Artificial Sequence
  Description of Artificial Sequence: Synthetic oligonucleotide
guggcguacuccgguuccg

SEQ ID NO: 1881216 - RNA, 19 nt, Artificial Sequence
  Description of Artificial Sequence: Synthetic oligonucleotide
ggaguguuugugagugggc

SEQ ID NO: 1881217 - RNA, 19 nt, Artificial Sequence
  Description of Artificial Sequence: Synthetic oligonucleotide
ccuccguaauaaugauugc

SEQ ID NO: 1881218 - RNA, 19 nt, Artificial Sequence
  Description of Artificial Sequence: Synthetic oligonucleotide
cauaaugacugaugccuuu

SEQ ID NO: 1881219 - RNA, 19 nt, Artificial Sequence
  Description of Artificial Sequence: Synthetic oligonucleotide
cagugacucgccgcagagc

SEQ ID NO: 1881220 - RNA, 19 nt, Artificial Sequence
  Description of Artificial Sequence: Synthetic oligonucleotide
cagaaaccaagcggcucug

SEQ ID NO: 1881221 - RNA, 19 nt, Artificial Sequence
  Description of Artificial Sequence: Synthetic oligonucleotide
cauggccaucugguugagg

SEQ ID NO: 1881222 - RNA, 19 nt, Artificial Sequence
  Description of Artificial Sequence: Synthetic oligonucleotide
ccagcggggcagaauuugc

SEQ ID NO: 1881223 - RNA, 19 nt, Artificial Sequence
  Description of Artificial Sequence: Synthetic oligonucleotide
gagugcgucaaggcauuaa

SEQ ID NO: 1881224 - RNA, 19 nt, Artificial Sequence
  Description of Artificial Sequence: Synthetic oligonucleotide
  modified_base (17)..(17): a, c, u, g, unknown or other
ugcuuccaaccaguccngu

SEQ ID NO: 1881225 - RNA, 19 nt, Artificial Sequence
  Description of Artificial Sequence: Synthetic oligonucleotide
cuagcacgacagaaaccaa

SEQ ID NO: 1881226 - RNA, 19 nt, Artificial Sequence
  Description of Artificial Sequence: Synthetic oligonucleotide
ccguccugcguggaaaagg

SEQ ID NO: 1881227 - RNA, 19 nt, Artificial Sequence
  Description of Artificial Sequence: Synthetic oligonucleotide
ggcguacuccgguuccgag

SEQ ID NO: 1881228 - RNA, 19 nt, Artificial Sequence
  Description of Artificial Sequence: Synthetic oligonucleotide
cucguuccaaacagguuau

SEQ ID NO: 1881229 - RNA, 19 nt, Artificial Sequence
  Description of Artificial Sequence: Synthetic oligonucleotide
guacuccgguuccgagugc

SEQ ID NO: 1881230 - RNA, 19 nt, Artificial Sequence
  Description of Artificial Sequence: Synthetic oligonucleotide
gggucggaacaaaacccgc

SEQ ID NO: 1881231 - RNA, 19 nt, Artificial Sequence
  Description of Artificial Sequence: Synthetic oligonucleotide
accaagcggcucugcggca

SEQ ID NO: 1881232 - RNA, 19 nt, Artificial Sequence
  Description of Artificial Sequence: Synthetic oligonucleotide
  modified_base (5)..(5): a, c, u, g, unknown or other
guccnguuuucuugagccu

SEQ ID NO: 1881233 - RNA, 19 nt, Artificial Sequence
  Description of Artificial Sequence: Synthetic oligonucleotide
cacgcaugcgcgcacuucu

SEQ ID NO: 1881234 - RNA, 19 nt, Artificial Sequence
  Description of Artificial Sequence: Synthetic oligonucleotide
gcaauugaggggagggguc

SEQ ID NO: 1881235 - RNA, 19 nt, Artificial Sequence
  Description of Artificial Sequence: Synthetic oligonucleotide
cuccuuguucuagcacgac

SEQ ID NO: 1881236 - RNA, 19 nt, Artificial Sequence
  Description of Artificial Sequence: Synthetic oligonucleotide
gggagagcacaccguuggc

SEQ ID NO: 1881237 - RNA, 19 nt, Artificial Sequence
  Description of Artificial Sequence: Synthetic oligonucleotide
guagccguccugcguggaa

SEQ ID NO: 1881238 - RNA, 19 nt, Artificial Sequence
  Description of Artificial Sequence: Synthetic oligonucleotide
  modified_base (8)..(8): a, c, u, g, unknown or other
ccaguccnguuuucuugag

SEQ ID NO: 1881239 - RNA, 19 nt, Artificial Sequence
  Description of Artificial Sequence: Synthetic oligonucleotide
gccucugauagccuuugcu

SEQ ID NO: 1881240 - RNA, 19 nt, Artificial Sequence
  Description of Artificial Sequence: Synthetic oligonucleotide
gacucgccgcagagcacgc

SEQ ID NO: 1881241 - RNA, 19 nt, Artificial Sequence
  Description of Artificial Sequence: Synthetic oligonucleotide
aaccagcggggcagaauuu

SEQ ID NO: 1881242 - RNA, 19 nt, Artificial Sequence
  Description of Artificial Sequence: Synthetic oligonucleotide
caauugaggggaggggucu

SEQ ID NO: 1881243 - RNA, 19 nt, Artificial Sequence
  Description of Artificial Sequence: Synthetic oligonucleotide
ggggacucgguagccgucc

SEQ ID NO: 1881244 - RNA, 19 nt, Artificial Sequence
  Description of Artificial Sequence: Synthetic oligonucleotide
ggcccggggacucgguagc

SEQ ID NO: 1881245 - RNA, 19 nt, Artificial Sequence
  Description of Artificial Sequence: Synthetic oligonucleotide
guaugugcucgcagcaggu

SEQ ID NO: 1881246 - RNA, 19 nt, Artificial Sequence
  Description of Artificial Sequence: Synthetic oligonucleotide
caaaacccgcugcucagau

SEQ ID NO: 1881247 - RNA, 19 nt, Artificial Sequence
  Description of Artificial Sequence: Synthetic oligonucleotide
gggagccaugccgggagag

SEQ ID NO: 1881248 - RNA, 19 nt, Artificial Sequence
  Description of Artificial Sequence: Synthetic oligonucleotide
  modified_base (11)..(11): a, c, u, g, unknown or other
caaccaguccnguuuucuu

SEQ ID NO: 1881249 - RNA, 19 nt, Artificial Sequence
  Description of Artificial Sequence: Synthetic oligonucleotide
ggacucgguagccguccug

SEQ ID NO: 1881250 - RNA, 19 nt, Artificial Sequence
  Description of Artificial Sequence: Synthetic oligonucleotide
ucguuccaaacagguuauu

SEQ ID NO: 1881251 - RNA, 19 nt, Artificial Sequence
  Description of Artificial Sequence: Synthetic oligonucleotide
cugcggcagggucggaaca

SEQ ID NO: 1881252 - RNA, 19 nt, Artificial Sequence
  Description of Artificial Sequence: Synthetic oligonucleotide
cugcguggaaaagguaugu

SEQ ID NO: 1881253 - RNA, 19 nt, Artificial Sequence
  Description of Artificial Sequence: Synthetic oligonucleotide
gcgaugaucccugcaugga

SEQ ID NO: 1881254 - RNA, 19 nt, Artificial Sequence
  Description of Artificial Sequence: Synthetic oligonucleotide
ggucggaacaaaacccgcu

SEQ ID NO: 1881255 - RNA, 19 nt, Artificial Sequence
  Description of Artificial Sequence: Synthetic oligonucleotide
gcggggcagaauuugcugu

SEQ ID NO: 1881256 - RNA, 19 nt, Artificial Sequence
  Description of Artificial Sequence: Synthetic oligonucleotide
cccaaguuuucugcuucac

SEQ ID NO: 1881257 - RNA, 19 nt, Artificial Sequence
  Description of Artificial Sequence: Synthetic oligonucleotide
caccuaguucgucugcgau

SEQ ID NO: 1881258 - RNA, 19 nt, Artificial Sequence
  Description of Artificial Sequence: Synthetic oligonucleotide
  modified_base (16)..(16): a, c, u, g, unknown or other
gcuuccaaccaguccnguu

SEQ ID NO: 1881259 - RNA, 19 nt, Artificial Sequence
  Description of Artificial Sequence: Synthetic oligonucleotide
gugacucgccgcagagcac

SEQ ID NO: 1881260 - RNA, 19 nt, Artificial Sequence
  Description of Artificial Sequence: Synthetic oligonucleotide
ccaagcggcucugcggcag

SEQ ID NO: 1881261 - RNA, 19 nt, Artificial Sequence
  Description of Artificial Sequence: Synthetic oligonucleotide
ccgggagagcacaccguug

SEQ ID NO: 1881262 - RNA, 19 nt, Artificial Sequence
  Description of Artificial Sequence: Synthetic oligonucleotide
cuacaaccagcggggcaga

SEQ ID NO: 1881263 - RNA, 19 nt, Artificial Sequence
  Description of Artificial Sequence: Synthetic oligonucleotide
  modified_base (3)..(3): a, c, u, g, unknown or other
ccnguuuucuugagccucu

SEQ ID NO: 1881264 - RNA, 19 nt, Artificial Sequence
  Description of Artificial Sequence: Synthetic oligonucleotide
cugccggaauaacuauggu

SEQ ID NO: 1881265 - RNA, 19 nt, Artificial Sequence
  Description of Artificial Sequence: Synthetic oligonucleotide
cucugcggcagggucggaa

SEQ ID NO: 1881266 - RNA, 19 nt, Artificial Sequence
  Description of Artificial Sequence: Synthetic oligonucleotide
guaucucuguagccaucuu

SEQ ID NO: 1881267 - RNA, 19 nt, Artificial Sequence
  Description of Artificial Sequence: Synthetic oligonucleotide
cguuucugggugcuaaaua

SEQ ID NO: 1881268 - RNA, 19 nt, Artificial Sequence
  Description of Artificial Sequence: Synthetic oligonucleotide
ccaccuaguucgucugcga

SEQ ID NO: 1881269 - RNA, 19 nt, Artificial Sequence
  Description of Artificial Sequence: Synthetic oligonucleotide
cauucaccccaggagucau

SEQ ID NO: 1881270 - RNA, 19 nt, Artificial Sequence
  Description of Artificial Sequence: Synthetic oligonucleotide
ccaugccgggagagcacac

SEQ ID NO: 1881271 - RNA, 19 nt, Artificial Sequence
  Description of Artificial Sequence: Synthetic oligonucleotide
cguccugcguggaaaaggu

SEQ ID NO: 1881272 - RNA, 19 nt, Artificial Sequence
  Description of Artificial Sequence: Synthetic oligonucleotide
guccugcguggaaaaggua

SEQ ID NO: 1881273 - RNA, 19 nt, Artificial Sequence
  Description of Artificial Sequence: Synthetic oligonucleotide
gguguggcguacuccgguu

SEQ ID NO: 1881274 - RNA, 19 nt, Artificial Sequence
  Description of Artificial Sequence: Synthetic oligonucleotide
gaggggugcaaggccguuu

SEQ ID NO: 1881275 - RNA, 19 nt, Artificial Sequence
  Description of Artificial Sequence: Synthetic oligonucleotide
acgcaugcgcgcacuucuu

SEQ ID NO: 1881276 - RNA, 19 nt, Artificial Sequence
  Description of Artificial Sequence: Synthetic oligonucleotide
ccugggcccggggacucgg

SEQ ID NO: 1881277 - RNA, 19 nt, Artificial Sequence
  Description of Artificial Sequence: Synthetic oligonucleotide
cuuuuccgacagggagcca

SEQ ID NO: 1881278 - RNA, 19 nt, Artificial Sequence
  Description of Artificial Sequence: Synthetic oligonucleotide
cgcaugcgcgcacuucuuc

SEQ ID NO: 1881279 - RNA, 19 nt, Artificial Sequence
  Description of Artificial Sequence: Synthetic oligonucleotide
cgauggguguggcguacuc

SEQ ID NO: 1881280 - RNA, 19 nt, Artificial Sequence
  Description of Artificial Sequence: Synthetic oligonucleotide
gguagccguccugcgugga

SEQ ID NO: 1881281 - RNA, 19 nt, Artificial Sequence
  Description of Artificial Sequence: Synthetic oligonucleotide
gccgggagagcacaccguu

SEQ ID NO: 1881282 - RNA, 19 nt, Artificial Sequence
  Description of Artificial Sequence: Synthetic oligonucleotide
gggauacccuccggaggaa

SEQ ID NO: 1881283 - RNA, 19 nt, Artificial Sequence
  Description of Artificial Sequence: Synthetic oligonucleotide
cggaauaacuaugguugua

SEQ ID NO: 1881284 - RNA, 19 nt, Artificial Sequence
  Description of Artificial Sequence: Synthetic oligonucleotide
ccacgauggguguggcgua

SEQ ID NO: 1881285 - RNA, 19 nt, Artificial Sequence
  Description of Artificial Sequence: Synthetic oligonucleotide
cgaugaucccugcauggau

SEQ ID NO: 1881286 - RNA, 19 nt, Artificial Sequence
  Description of Artificial Sequence: Synthetic oligonucleotide
cuaguucgucugcgaugau

SEQ ID NO: 1881287 - RNA, 19 nt, Artificial Sequence
  Description of Artificial Sequence: Synthetic oligonucleotide
ggggugcaaggccguuucu

SEQ ID NO: 1881288 - RNA, 19 nt, Artificial Sequence
  Description of Artificial Sequence: Synthetic oligonucleotide
gcggcagggucggaacaaa

SEQ ID NO: 1881289 - RNA, 19 nt, Artificial Sequence
  Description of Artificial Sequence: Synthetic oligonucleotide
cggggacucgguagccguc

SEQ ID NO: 1881290 - RNA, 19 nt, Artificial Sequence
  Description of Artificial Sequence: Synthetic oligonucleotide
ccggggacucgguagccgu

SEQ ID NO: 1881291 - RNA, 19 nt, Artificial Sequence
  Description of Artificial Sequence: Synthetic oligonucleotide
cgaagaucacugccggaau

SEQ ID NO: 1881292 - RNA, 19 nt, Artificial Sequence
  Description of Artificial Sequence: Synthetic oligonucleotide
ccgguuccgagugcgucaa

SEQ ID NO: 1881293 - RNA, 19 nt, Artificial Sequence
  Description of Artificial Sequence: Synthetic oligonucleotide
cgcgcacuucuuccaguga

SEQ ID NO: 1881294 - RNA, 19 nt, Artificial Sequence
  Description of Artificial Sequence: Synthetic oligonucleotide
gccucguuccaaacagguu

SEQ ID NO: 1881295 - RNA, 19 nt, Artificial Sequence
  Description of Artificial Sequence: Synthetic oligonucleotide
ccgagugcgucaaggcauu

SEQ ID NO: 1881296 - RNA, 19 nt, Artificial Sequence
  Description of Artificial Sequence: Synthetic oligonucleotide
cugggcccggggacucggu

SEQ ID NO: 1881297 - RNA, 19 nt, Artificial Sequence
  Description of Artificial Sequence: Synthetic oligonucleotide
ccguuucugggugcuaaau

SEQ ID NO: 1881298 - RNA, 19 nt, Artificial Sequence
  Description of Artificial Sequence: Synthetic oligonucleotide
cgguuccgagugcgucaag

SEQ ID NO: 1881299 - RNA, 19 nt, Artificial Sequence
  Description of Artificial Sequence: Synthetic oligonucleotide
gcucugcggcagggucgga

SEQ ID NO: 1881300 - RNA, 19 nt, Artificial Sequence
  Description of Artificial Sequence: Synthetic oligonucleotide
cgagugcgucaaggcauua

SEQ ID NO: 1881301 - RNA, 19 nt, Artificial Sequence
  Description of Artificial Sequence: Synthetic oligonucleotide
aauauugacaaauggauac

SEQ ID NO: 1881302 - RNA, 19 nt, Artificial Sequence
  Description of Artificial Sequence: Synthetic oligonucleotide
aagaaugagggacauaucc

SEQ ID NO: 1881303 - RNA, 19 nt, Artificial Sequence
  Description of Artificial Sequence: Synthetic oligonucleotide
aaagguauauccuaggguc

SEQ ID NO: 1881304 - RNA, 19 nt, Artificial Sequence
  Description of Artificial Sequence: Synthetic oligonucleotide
agaaaauauugacaaaugg

SEQ ID NO: 1881305 - RNA, 19 nt, Artificial Sequence
  Description of Artificial Sequence: Synthetic oligonucleotide
aauacauagcgccauucac

SEQ ID NO: 1881306 - RNA, 19 nt, Artificial Sequence
  Description of Artificial Sequence: Synthetic oligonucleotide
aagucuaagagacggugcc

SEQ ID NO: 1881307 - RNA, 19 nt, Artificial Sequence
  Description of Artificial Sequence: Synthetic oligonucleotide
cucacuaauacauagcgcc

SEQ ID NO: 1881308 - RNA, 19 nt, Artificial Sequence
  Description of Artificial Sequence: Synthetic oligonucleotide
cuuagcaagaagaaugagg

SEQ ID NO: 1881309 - RNA, 19 nt, Artificial Sequence
  Description of Artificial Sequence: Synthetic oligonucleotide
aaaauauugacaaauggau

SEQ ID NO: 1881310 - RNA, 19 nt, Artificial Sequence
  Description of Artificial Sequence: Synthetic oligonucleotide
aagcaacacagucagcagc

SEQ ID NO: 1881311 - RNA, 19 nt, Artificial Sequence
  Description of Artificial Sequence: Synthetic oligonucleotide
uguaaggacggcaaugucc

SEQ ID NO: 1881312 - RNA, 19 nt, Artificial Sequence
  Description of Artificial Sequence: Synthetic oligonucleotide
uaugcuccuaguaacaagc

SEQ ID NO: 1881313 - RNA, 19 nt, Artificial Sequence
  Description of Artificial Sequence: Synthetic oligonucleotide
uaagacuagaaaauauuga

SEQ ID NO: 1881314 - RNA, 19 nt, Artificial Sequence
  Description of Artificial Sequence: Synthetic oligonucleotide
auagaagucacagucacuc

SEQ ID NO: 1881315 - RNA, 19 nt, Artificial Sequence
  Description of Artificial Sequence: Synthetic oligonucleotide
auaagacugucauugcuac

SEQ ID NO: 1881316 - RNA, 19 nt, Artificial Sequence
  Description of Artificial Sequence: Synthetic oligonucleotide
cacaacaaagcccagaaac

SEQ ID NO: 1881317 - RNA, 19 nt, Artificial Sequence
  Description of Artificial Sequence: Synthetic oligonucleotide
uuauagaagucacagucac

SEQ ID NO: 1881318 - RNA, 19 nt, Artificial Sequence
  Description of Artificial Sequence: Synthetic oligonucleotide
cuaguaacaagcagcaaag

SEQ ID NO: 1881319 - RNA, 19 nt, Artificial Sequence
  Description of Artificial Sequence: Synthetic oligonucleotide
uauuaagacuagaaaauau

SEQ ID NO: 1881320 - RNA, 19 nt, Artificial Sequence
  Description of Artificial Sequence: Synthetic oligonucleotide
acagaagucuaagagacgg

SEQ ID NO: 1881321 - RNA, 19 nt, Artificial Sequence
  Description of Artificial Sequence: Synthetic oligonucleotide
acuaacguuccacugggac

SEQ ID NO: 1881322 - RNA, 19 nt, Artificial Sequence
  Description of Artificial Sequence: Synthetic oligonucleotide
uguuacuuccucuggauug

SEQ ID NO: 1881323 - RNA, 19 nt, Artificial Sequence
  Description of Artificial Sequence: Synthetic oligonucleotide
aggaagauaaagcagacuu

SEQ ID NO: 1881324 - RNA, 19 nt, Artificial Sequence
  Description of Artificial Sequence: Synthetic oligonucleotide
ugacuaacguuccacuggg

SEQ ID NO: 1881325 - RNA, 19 nt, Artificial Sequence
  Description of Artificial Sequence: Synthetic oligonucleotide
ucaaucucaaagugcagcc

SEQ ID NO: 1881326 - RNA, 19 nt, Artificial Sequence
  Description of Artificial Sequence: Synthetic oligonucleotide
aguaacaagcagcaaaggu

SEQ ID NO: 1881327 - RNA, 19 nt, Artificial Sequence
  Description of Artificial Sequence: Synthetic oligonucleotide
aaagugcagccucagagga

SEQ ID NO: 1881328 - RNA, 19 nt, Artificial Sequence
  Description of Artificial Sequence: Synthetic oligonucleotide
uuguaugguguaaggacgg

SEQ ID NO: 1881329 - RNA, 19 nt, Artificial Sequence
  Description of Artificial Sequence: Synthetic oligonucleotide
uguuuaugcuccuaguaac

SEQ ID NO: 1881330 - RNA, 19 nt, Artificial Sequence
  Description of Artificial Sequence: Synthetic oligonucleotide
uaacaagcagcaaagguau

SEQ ID NO: 1881331 - RNA, 19 nt, Artificial Sequence
  Description of Artificial Sequence: Synthetic oligonucleotide
gguuauagaagucacaguc

SEQ ID NO: 1881332 - RNA, 19 nt, Artificial Sequence
  Description of Artificial Sequence: Synthetic oligonucleotide
uuuagguuauuaagacuag

SEQ ID NO: 1881333 - RNA, 19 nt, Artificial Sequence
  Description of Artificial Sequence: Synthetic oligonucleotide
uaagaggugucccaacacc

SEQ ID NO: 1881334 - RNA, 19 nt, Artificial Sequence
  Description of Artificial Sequence: Synthetic oligonucleotide
uucacuguaugccuagggc

SEQ ID NO: 1881335 - RNA, 19 nt, Artificial Sequence
  Description of Artificial Sequence: Synthetic oligonucleotide
auuguaugguguaaggacg

SEQ ID NO: 1881336 - RNA, 19 nt, Artificial Sequence
  Description of Artificial Sequence: Synthetic oligonucleotide
uaaagcagacuuucucugg

SEQ ID NO: 1881337 - RNA, 19 nt, Artificial Sequence
  Description of Artificial Sequence: Synthetic oligonucleotide
gguuauuaagacuagaaaa

SEQ ID NO: 1881338 - RNA, 19 nt, Artificial Sequence
  Description of Artificial Sequence: Synthetic oligonucleotide
ucacuguaugccuagggcc

SEQ ID NO: 1881339 - RNA, 19 nt, Artificial Sequence
  Description of Artificial Sequence: Synthetic oligonucleotide
auaaagcagacuuucucug

SEQ ID NO: 1881340 - RNA, 19 nt, Artificial Sequence
  Description of Artificial Sequence: Synthetic oligonucleotide
aagguauauccuagggucc

SEQ ID NO: 1881341 - RNA, 19 nt, Artificial Sequence
  Description of Artificial Sequence: Synthetic oligonucleotide
cuaacguuccacugggacg

SEQ ID NO: 1881342 - RNA, 19 nt, Artificial Sequence
  Description of Artificial Sequence: Synthetic oligonucleotide
gauggccacguuuacuugg

SEQ ID NO: 1881343 - RNA, 19 nt, Artificial Sequence
  Description of Artificial Sequence: Synthetic oligonucleotide
agcagacuuucucuggacc

SEQ ID NO: 1881344 - RNA, 19 nt, Artificial Sequence
  Description of Artificial Sequence: Synthetic oligonucleotide
aaugaggcacagccccucc

SEQ ID NO: 1881345 - RNA, 19 nt, Artificial Sequence
  Description of Artificial Sequence: Synthetic oligonucleotide
aaagcagacuuucucugga

SEQ ID NO: 1881346 - RNA, 19 nt, Artificial Sequence
  Description of Artificial Sequence: Synthetic oligonucleotide
uauccuaggguccuuugug

SEQ ID NO: 1881347 - RNA, 19 nt, Artificial Sequence
  Description of Artificial Sequence: Synthetic oligonucleotide
acugcuuggugauucggac

SEQ ID NO: 1881348 - RNA, 19 nt, Artificial Sequence
  Description of Artificial Sequence: Synthetic oligonucleotide
cauagcgccauucacuccc

SEQ ID NO: 1881349 - RNA, 19 nt, Artificial Sequence
  Description of Artificial Sequence: Synthetic oligonucleotide
aauggauacauggugccca

SEQ ID NO: 1881350 - RNA, 19 nt, Artificial Sequence
  Description of Artificial Sequence: Synthetic oligonucleotide
cauuaagucugcuuccggc

SEQ ID NO: 1881351 - RNA, 19 nt, Artificial Sequence
  Description of Artificial Sequence: Synthetic oligonucleotide
aagagacggugccagagug

SEQ ID NO: 1881352 - RNA, 19 nt, Artificial Sequence
  Description of Artificial Sequence: Synthetic oligonucleotide
cuuuguggucacuaagagg

SEQ ID NO: 1881353 - RNA, 19 nt, Artificial Sequence
  Description of Artificial Sequence: Synthetic oligonucleotide
caaauggauacauggugcc

SEQ ID NO: 1881354 - RNA, 19 nt, Artificial Sequence
  Description of Artificial Sequence: Synthetic oligonucleotide
cugacuaacguuccacugg

SEQ ID NO: 1881355 - RNA, 19 nt, Artificial Sequence
  Description of Artificial Sequence: Synthetic oligonucleotide
caaagugcagccucagagg

SEQ ID NO: 1881356 - RNA, 19 nt, Artificial Sequence
  Description of Artificial Sequence: Synthetic oligonucleotide
caaguucaggcacaaacag

SEQ ID NO: 1881357 - RNA, 19 nt, Artificial Sequence
  Description of Artificial Sequence: Synthetic oligonucleotide
ugcugguacaucaaagccu

SEQ ID NO: 1881358 - RNA, 19 nt, Artificial Sequence
  Description of Artificial Sequence: Synthetic oligonucleotide
ucauuaagucugcuuccgg

SEQ ID NO: 1881359 - RNA, 19 nt, Artificial Sequence
  Description of Artificial Sequence: Synthetic oligonucleotide
aagacugucauugcuacau

SEQ ID NO: 1881360 - RNA, 19 nt, Artificial Sequence
  Description of Artificial Sequence: Synthetic oligonucleotide
aacaaagcccagaaacuuc

SEQ ID NO: 1881361 - RNA, 19 nt, Artificial Sequence
  Description of Artificial Sequence: Synthetic oligonucleotide
uccacaacaaagcccagaa

SEQ ID NO: 1881362 - RNA, 19 nt, Artificial Sequence
  Description of Artificial Sequence: Synthetic oligonucleotide
uaugguguaaggacggcaa

SEQ ID NO: 1881363 - RNA, 19 nt, Artificial Sequence
  Description of Artificial Sequence: Synthetic oligonucleotide
aagcagacuuucucuggac

SEQ ID NO: 1881364 - RNA, 19 nt, Artificial Sequence
  Description of Artificial Sequence: Synthetic oligonucleotide
agcaaagguauauccuagg

SEQ ID NO: 1881365 - RNA, 19 nt, Artificial Sequence
  Description of Artificial Sequence: Synthetic oligonucleotide
auuaagucugcuuccggcu

SEQ ID NO: 1881366 - RNA, 19 nt, Artificial Sequence
  Description of Artificial Sequence: Synthetic oligonucleotide
uggcucuugguuauagaag

SEQ ID NO: 1881367 - RNA, 19 nt, Artificial Sequence
  Description of Artificial Sequence: Synthetic oligonucleotide
agaagucacagucacucca

SEQ ID NO: 1881368 - RNA, 19 nt, Artificial Sequence
  Description of Artificial Sequence: Synthetic oligonucleotide
cugcacauagccaaagaug

SEQ ID NO: 1881369 - RNA, 19 nt, Artificial Sequence
  Description of Artificial Sequence: Synthetic oligonucleotide
ugcuccuaguaacaagcag

SEQ ID NO: 1881370 - RNA, 19 nt, Artificial Sequence
  Description of Artificial Sequence: Synthetic oligonucleotide
uggcaauucacuguaugcc

SEQ ID NO: 1881371 - RNA, 19 nt, Artificial Sequence
  Description of Artificial Sequence: Synthetic oligonucleotide
ugacugugcucacuaauac

SEQ ID NO: 1881372 - RNA, 19 nt, Artificial Sequence
  Description of Artificial Sequence: Synthetic oligonucleotide
aaauauugacaaauggaua

SEQ ID NO: 1881373 - RNA, 19 nt, Artificial Sequence
  Description of Artificial Sequence: Synthetic oligonucleotide
ugguacaucaaagccuggg

SEQ ID NO: 1881374 - RNA, 19 nt, Artificial Sequence
  Description of Artificial Sequence: Synthetic oligonucleotide
ucacuaauacauagcgcca

SEQ ID NO: 1881375 - RNA, 19 nt, Artificial Sequence
  Description of Artificial Sequence: Synthetic oligonucleotide
cccagaaacuucuugagcc

SEQ ID NO: 1881376 - RNA, 19 nt, Artificial Sequence
  Description of Artificial Sequence: Synthetic oligonucleotide
gaggccaccgcccauaaga

SEQ ID NO: 1881377 - RNA, 19 nt, Artificial Sequence
  Description of Artificial Sequence: Synthetic oligonucleotide
aagauagcagagguggcug

SEQ ID NO: 1881378 - RNA, 19 nt, Artificial Sequence
  Description of Artificial Sequence: Synthetic oligonucleotide
accccucuuugccugaggc

SEQ ID NO: 1881379 - RNA, 19 nt, Artificial Sequence
  Description of Artificial Sequence: Synthetic oligonucleotide
acuaagaggugucccaaca

SEQ ID NO: 1881380 - RNA, 19 nt, Artificial Sequence
  Description of Artificial Sequence: Synthetic oligonucleotide
guggcaauucacuguaugc

SEQ ID NO: 1881381 - RNA, 19 nt, Artificial Sequence
  Description of Artificial Sequence: Synthetic oligonucleotide
agaagucuaagagacggug

SEQ ID NO: 1881382 - RNA, 19 nt, Artificial Sequence
  Description of Artificial Sequence: Synthetic oligonucleotide
ugcaaccguagauggaucc

SEQ ID NO: 1881383 - RNA, 19 nt, Artificial Sequence
  Description of Artificial Sequence: Synthetic oligonucleotide
auccuaggguccuuugugg

SEQ ID NO: 1881384 - RNA, 19 nt, Artificial Sequence
  Description of Artificial Sequence: Synthetic oligonucleotide
uaacguuccacugggacgu

SEQ ID NO: 1881385 - RNA, 19 nt, Artificial Sequence
  Description of Artificial Sequence: Synthetic oligonucleotide
ucaacugcuuggugauucg

SEQ ID NO: 1881386 - RNA, 19 nt, Artificial Sequence
  Description of Artificial Sequence: Synthetic oligonucleotide
cuugguuggccgcuggucc

SEQ ID NO: 1881387 - RNA, 19 nt, Artificial Sequence
  Description of Artificial Sequence: Synthetic oligonucleotide
aaacuucuugagccagcuc

SEQ ID NO: 1881388 - RNA, 19 nt, Artificial Sequence
  Description of Artificial Sequence: Synthetic oligonucleotide
agggucaacugcuugguga

SEQ ID NO: 1881389 - RNA, 19 nt, Artificial Sequence
  Description of Artificial Sequence: Synthetic oligonucleotide
acggcaauguccuugggau

SEQ ID NO: 1881390 - RNA, 19 nt, Artificial Sequence
  Description of Artificial Sequence: Synthetic oligonucleotide
cccaggaaaagcaacacag

SEQ ID NO: 1881391 - RNA, 19 nt, Artificial Sequence
  Description of Artificial Sequence: Synthetic oligonucleotide
guaguugggagcucuucag

SEQ ID NO: 1881392 - RNA, 19 nt, Artificial Sequence
  Description of Artificial Sequence: Synthetic oligonucleotide
gagacggugccagaguggg

SEQ ID NO: 1881393 - RNA, 19 nt, Artificial Sequence
  Description of Artificial Sequence: Synthetic oligonucleotide
aauucacuguaugccuagg

SEQ ID NO: 1881394 - RNA, 19 nt, Artificial Sequence
  Description of Artificial Sequence: Synthetic oligonucleotide
gaagucuaagagacggugc

SEQ ID NO: 1881395 - RNA, 19 nt, Artificial Sequence
  Description of Artificial Sequence: Synthetic oligonucleotide
guuacuuccucuggauugg

SEQ ID NO: 1881396 - RNA, 19 nt, Artificial Sequence
  Description of Artificial Sequence: Synthetic oligonucleotide
ucugacugugcucacuaau

SEQ ID NO: 1881397 - RNA, 19 nt, Artificial Sequence
  Description of Artificial Sequence: Synthetic oligonucleotide
uuagguuauuaagacuaga

SEQ ID NO: 1881398 - RNA, 19 nt, Artificial Sequence
  Description of Artificial Sequence: Synthetic oligonucleotide
cauugcuacaugacugcag

SEQ ID NO: 1881399 - RNA, 19 nt, Artificial Sequence
  Description of Artificial Sequence: Synthetic oligonucleotide
guaacaagcagcaaaggua

SEQ ID NO: 1881400 - RNA, 19 nt, Artificial Sequence
  Description of Artificial Sequence: Synthetic oligonucleotide
gucacagucacuccaguga

SEQ ID NO: 1881401 - RNA, 19 nt, Artificial Sequence
  Description of Artificial Sequence: Synthetic oligonucleotide
aaggacggcaauguccuug

SEQ ID NO: 1881402 - RNA, 19 nt, Artificial Sequence
  Description of Artificial Sequence: Synthetic oligonucleotide
ugcuacaugacugcagcca

SEQ ID NO: 1881403 - RNA, 19 nt, Artificial Sequence
  Description of Artificial Sequence: Synthetic oligonucleotide
uuaagucugcuuccggcuc

SEQ ID NO: 1881404 - RNA, 19 nt, Artificial Sequence
  Description of Artificial Sequence: Synthetic oligonucleotide
uaguaacaagcagcaaagg

SEQ ID NO: 1881405 - RNA, 19 nt, Artificial Sequence
  Description of Artificial Sequence: Synthetic oligonucleotide
ucuguuacuuccucuggau

SEQ ID NO: 1881406 - RNA, 19 nt, Artificial Sequence
  Description of Artificial Sequence: Synthetic oligonucleotide
ugccuagggccuuagcaag

SEQ ID NO: 1881407 - RNA, 19 nt, Artificial Sequence
  Description of Artificial Sequence: Synthetic oligonucleotide
gucauuaagucugcuuccg

SEQ ID NO: 1881408 - RNA, 19 nt, Artificial Sequence
  Description of Artificial Sequence: Synthetic oligonucleotide
caauucacuguaugccuag

SEQ ID NO: 1881409 - RNA, 19 nt, Artificial Sequence
  Description of Artificial Sequence: Synthetic oligonucleotide
uaagagacggugccagagu

SEQ ID NO: 1881410 - RNA, 19 nt, Artificial Sequence
  Description of Artificial Sequence: Synthetic oligonucleotide
uauauccuaggguccuuug

SEQ ID NO: 1881411 - RNA, 19 nt, Artificial Sequence
  Description of Artificial Sequence: Synthetic oligonucleotide
cuaagagacggugccagag

SEQ ID NO: 1881412 - RNA, 19 nt, Artificial Sequence
  Description of Artificial Sequence: Synthetic oligonucleotide
aagaggugucccaacacca

SEQ ID NO: 1881413 - RNA, 19 nt, Artificial Sequence
  Description of Artificial Sequence: Synthetic oligonucleotide
uaagucugcuuccggcuca

SEQ ID NO: 1881414 - RNA, 19 nt, Artificial Sequence
  Description of Artificial Sequence: Synthetic oligonucleotide
agggacauauccucagcug

SEQ ID NO: 1881415 - RNA, 19 nt, Artificial Sequence
  Description of Artificial Sequence: Synthetic oligonucleotide
agaaacuucuugagccagc

SEQ ID NO: 1881416 - RNA, 19 nt, Artificial Sequence
  Description of Artificial Sequence: Synthetic oligonucleotide
acauagcgccauucacucc

SEQ ID NO: 1881417 - RNA, 19 nt, Artificial Sequence
  Description of Artificial Sequence: Synthetic oligonucleotide
uuuaugcuccuaguaacaa

SEQ ID NO: 1881418 - RNA, 19 nt, Artificial Sequence
  Description of Artificial Sequence: Synthetic oligonucleotide
agagguggcugacuaacgu

SEQ ID NO: 1881419 - RNA, 19 nt, Artificial Sequence
  Description of Artificial Sequence: Synthetic oligonucleotide
agauggauccucaaucuca

SEQ ID NO: 1881420 - RNA, 19 nt, Artificial Sequence
  Description of Artificial Sequence: Synthetic oligonucleotide
cuaagaggugucccaacac

SEQ ID NO: 1881421 - RNA, 19 nt, Artificial Sequence
  Description of Artificial Sequence: Synthetic oligonucleotide
agugaccccucuuugccug

SEQ ID NO: 1881422 - RNA, 19 nt, Artificial Sequence
  Description of Artificial Sequence: Synthetic oligonucleotide
auauccuaggguccuuugu

SEQ ID NO: 1881423 - RNA, 19 nt, Artificial Sequence
  Description of Artificial Sequence: Synthetic oligonucleotide
auauugacaaauggauaca

SEQ ID NO: 1881424 - RNA, 19 nt, Artificial Sequence
  Description of Artificial Sequence: Synthetic oligonucleotide
agugcaaccguagauggau

SEQ ID NO: 1881425 - RNA, 19 nt, Artificial Sequence
  Description of Artificial Sequence: Synthetic oligonucleotide
ggcacaaacaggaagguca

SEQ ID NO: 1881426 - RNA, 19 nt, Artificial Sequence
  Description of Artificial Sequence: Synthetic oligonucleotide
augacugcagccaguauug

SEQ ID NO: 1881427 - RNA, 19 nt, Artificial Sequence
  Description of Artificial Sequence: Synthetic oligonucleotide
ugaggcacagccccuccug

SEQ ID NO: 1881428 - RNA, 19 nt, Artificial Sequence
  Description of Artificial Sequence: Synthetic oligonucleotide
gccacguuuacuugguggg

SEQ ID NO: 1881429 - RNA, 19 nt, Artificial Sequence
  Description of Artificial Sequence: Synthetic oligonucleotide
uagauggauccucaaucuc

SEQ ID NO: 1881430 - RNA, 19 nt, Artificial Sequence
  Description of Artificial Sequence: Synthetic oligonucleotide
auucggaccaccucuguua

SEQ ID NO: 1881431 - RNA, 19 nt, Artificial Sequence
  Description of Artificial Sequence: Synthetic oligonucleotide
cacagaagucuaagagacg

SEQ ID NO: 1881432 - RNA, 19 nt, Artificial Sequence
  Description of Artificial Sequence: Synthetic oligonucleotide
uugggauccacugucuggu

SEQ ID NO: 1881433 - RNA, 19 nt, Artificial Sequence
  Description of Artificial Sequence: Synthetic oligonucleotide
uauccucagcugcugguac

SEQ ID NO: 1881434 - RNA, 19 nt, Artificial Sequence
  Description of Artificial Sequence: Synthetic oligonucleotide
cauaagacugucauugcua

SEQ ID NO: 1881435 - RNA, 19 nt, Artificial Sequence
  Description of Artificial Sequence: Synthetic oligonucleotide
uauuggggcgucucccaag

SEQ ID NO: 1881436 - RNA, 19 nt, Artificial Sequence
  Description of Artificial Sequence: Synthetic oligonucleotide
gucuaagagacggugccag

SEQ ID NO: 1881437 - RNA, 19 nt, Artificial Sequence
  Description of Artificial Sequence: Synthetic oligonucleotide
cauggugcccagugcaacc

SEQ ID NO: 1881438 - RNA, 19 nt, Artificial Sequence
  Description of Artificial Sequence: Synthetic oligonucleotide
agguggcugacuaacguuc

SEQ ID NO: 1881439 - RNA, 19 nt, Artificial Sequence
  Description of Artificial Sequence: Synthetic oligonucleotide
cuccuaguaacaagcagca

SEQ ID NO: 1881440 - RNA, 19 nt, Artificial Sequence
  Description of Artificial Sequence: Synthetic oligonucleotide
agcuguggcaauucacugu

SEQ ID NO: 1881441 - RNA, 19 nt, Artificial Sequence
  Description of Artificial Sequence: Synthetic oligonucleotide
cagccugcgcauuguaugg

SEQ ID NO: 1881442 - RNA, 19 nt, Artificial Sequence
  Description of Artificial Sequence: Synthetic oligonucleotide
agcagcucuccuugccagc

SEQ ID NO: 1881443 - RNA, 19 nt, Artificial Sequence
  Description of Artificial Sequence: Synthetic oligonucleotide
gugucccaacaccaaaugc

SEQ ID NO: 1881444 - RNA, 19 nt, Artificial Sequence
  Description of Artificial Sequence: Synthetic oligonucleotide
aguauuggggcgucuccca

SEQ ID NO: 1881445 - RNA, 19 nt, Artificial Sequence
  Description of Artificial Sequence: Synthetic oligonucleotide
guccuuuguggucacuaag

SEQ ID NO: 1881446 - RNA, 19 nt, Artificial Sequence
  Description of Artificial Sequence: Synthetic oligonucleotide
uaagaggugcuagcuuuag

SEQ ID NO: 1881447 - RNA, 19 nt, Artificial Sequence
  Description of Artificial Sequence: Synthetic oligonucleotide
gcuccuaguaacaagcagc

SEQ ID NO: 1881448 - RNA, 19 nt, Artificial Sequence
  Description of Artificial Sequence: Synthetic oligonucleotide
cuguuuaugcuccuaguaa

SEQ ID NO: 1881449 - RNA, 19 nt, Artificial Sequence
  Description of Artificial Sequence: Synthetic oligonucleotide
cuaauacauagcgccauuc

SEQ ID NO: 1881450 - RNA, 19 nt, Artificial Sequence
  Description of Artificial Sequence: Synthetic oligonucleotide
aggugcuagcuuuagguua

SEQ ID NO: 1881451 - RNA, 19 nt, Artificial Sequence
  Description of Artificial Sequence: Synthetic oligonucleotide
agacuuucucuggacccgc

SEQ ID NO: 1881452 - RNA, 19 nt, Artificial Sequence
  Description of Artificial Sequence: Synthetic oligonucleotide
acaagcagcaaagguauau

SEQ ID NO: 1881453 - RNA, 19 nt, Artificial Sequence
  Description of Artificial Sequence: Synthetic oligonucleotide
ggccacguuuacuuggugg

SEQ ID NO: 1881454 - RNA, 19 nt, Artificial Sequence
  Description of Artificial Sequence: Synthetic oligonucleotide
cuugguuauagaagucaca

SEQ ID NO: 1881455 - RNA, 19 nt, Artificial Sequence
  Description of Artificial Sequence: Synthetic oligonucleotide
gacggcaauguccuuggga

SEQ ID NO: 1881456 - RNA, 19 nt, Artificial Sequence
  Description of Artificial Sequence: Synthetic oligonucleotide
auuggggcgucucccaaga

SEQ ID NO: 1881457 - RNA, 19 nt, Artificial Sequence
  Description of Artificial Sequence: Synthetic oligonucleotide
uccuguuuaugcuccuagu

SEQ ID NO: 1881458 - RNA, 19 nt, Artificial Sequence
  Description of Artificial Sequence: Synthetic oligonucleotide
uuggccauucugaguggcc

SEQ ID NO: 1881459 - RNA, 19 nt, Artificial Sequence
  Description of Artificial Sequence: Synthetic oligonucleotide
agcaacacagucagcagca

SEQ ID NO: 1881460 - RNA, 19 nt, Artificial Sequence
  Description of Artificial Sequence: Synthetic oligonucleotide
gucccaacaccaaaugccc

SEQ ID NO: 1881461 - RNA, 19 nt, Artificial Sequence
  Description of Artificial Sequence: Synthetic oligonucleotide
agucacuccagugaccccu

SEQ ID NO: 1881462 - RNA, 19 nt, Artificial Sequence
  Description of Artificial Sequence: Synthetic oligonucleotide
uugcuacaugacugcagcc

SEQ ID NO: 1881463 - RNA, 19 nt, Artificial Sequence
  Description of Artificial Sequence: Synthetic oligonucleotide
ucuaagagacggugccaga

SEQ ID NO: 1881464 - RNA, 19 nt, Artificial Sequence
  Description of Artificial Sequence: Synthetic oligonucleotide
gcuacaugacugcagccag

SEQ ID NO: 1881465 - RNA, 19 nt, Artificial Sequence
  Description of Artificial Sequence: Synthetic oligonucleotide
uggccauucugaguggccc

SEQ ID NO: 1881466 - RNA, 19 nt, Artificial Sequence
  Description of Artificial Sequence: Synthetic oligonucleotide
uccuaggguccuuuguggu

SEQ ID NO: 1881467 - RNA, 19 nt, Artificial Sequence
  Description of Artificial Sequence: Synthetic oligonucleotide
cagacuuucucuggacccg

SEQ ID NO: 1881468 - RNA, 19 nt, Artificial Sequence
  Description of Artificial Sequence: Synthetic oligonucleotide
cagagguggcugacuaacg

SEQ ID NO: 1881469 - RNA, 19 nt, Artificial Sequence
  Description of Artificial Sequence: Synthetic oligonucleotide
gaggcccuugcugauugcg

SEQ ID NO: 1881470 - RNA, 19 nt, Artificial Sequence
  Description of Artificial Sequence: Synthetic oligonucleotide
cuggcucuugguuauagaa

SEQ ID NO: 1881471 - RNA, 19 nt, Artificial Sequence
  Description of Artificial Sequence: Synthetic oligonucleotide
ucauugcuacaugacugca

SEQ ID NO: 1881472 - RNA, 19 nt, Artificial Sequence
  Description of Artificial Sequence: Synthetic oligonucleotide
caugacccagaaugcuggg

SEQ ID NO: 1881473 - RNA, 19 nt, Artificial Sequence
  Description of Artificial Sequence: Synthetic oligonucleotide
cucaggaagaggccaccgc

SEQ ID NO: 1881474 - RNA, 19 nt, Artificial Sequence
  Description of Artificial Sequence: Synthetic oligonucleotide
guacaucaaagccugggua

SEQ ID NO: 1881475 - RNA, 19 nt, Artificial Sequence
  Description of Artificial Sequence: Synthetic oligonucleotide
gcgucucccaagaagauag

SEQ ID NO: 1881476 - RNA, 19 nt, Artificial Sequence
  Description of Artificial Sequence: Synthetic oligonucleotide
uagcagagguggcugacua

SEQ ID NO: 1881477 - RNA, 19 nt, Artificial Sequence
  Description of Artificial Sequence: Synthetic oligonucleotide
acuaauacauagcgccauu

SEQ ID NO: 1881478 - RNA, 19 nt, Artificial Sequence
  Description of Artificial Sequence: Synthetic oligonucleotide
cuuggugauucggaccacc

SEQ ID NO: 1881479 - RNA, 19 nt, Artificial Sequence
  Description of Artificial Sequence: Synthetic oligonucleotide
cuugcugauugcggcagcc

SEQ ID NO: 1881480 - RNA, 19 nt, Artificial Sequence
  Description of Artificial Sequence: Synthetic oligonucleotide
ccuaguaacaagcagcaaa

SEQ ID NO: 1881481 - RNA, 19 nt, Artificial Sequence
  Description of Artificial Sequence: Synthetic oligonucleotide
gucaacugcuuggugauuc

SEQ ID NO: 1881482 - RNA, 19 nt, Artificial Sequence
  Description of Artificial Sequence: Synthetic oligonucleotide
aaugccccaggaaaagcaa

SEQ ID NO: 1881483 - RNA, 19 nt, Artificial Sequence
  Description of Artificial Sequence: Synthetic oligonucleotide
acuccagugaccccucuuu

SEQ ID NO: 1881484 - RNA, 19 nt, Artificial Sequence
  Description of Artificial Sequence: Synthetic oligonucleotide
agacugucauugcuacaug

SEQ ID NO: 1881485 - RNA, 19 nt, Artificial Sequence
  Description of Artificial Sequence: Synthetic oligonucleotide
guccuugggauccacuguc

SEQ ID NO: 1881486 - RNA, 19 nt, Artificial Sequence
  Description of Artificial Sequence: Synthetic oligonucleotide
ugggcgcuucagaucaggc

SEQ ID NO: 1881487 - RNA, 19 nt, Artificial Sequence
  Description of Artificial Sequence: Synthetic oligonucleotide
cugauugcggcagccugcg

SEQ ID NO: 1881488 - RNA, 19 nt, Artificial Sequence
  Description of Artificial Sequence: Synthetic oligonucleotide
gauggauccucaaucucaa

SEQ ID NO: 1881489 - RNA, 19 nt, Artificial Sequence
  Description of Artificial Sequence: Synthetic oligonucleotide
gcaugacccagaaugcugg

SEQ ID NO: 1881490 - RNA, 19 nt, Artificial Sequence
  Description of Artificial Sequence: Synthetic oligonucleotide
acucuuggggcauguucug

SEQ ID NO: 1881491 - RNA, 19 nt, Artificial Sequence
  Description of Artificial Sequence: Synthetic oligonucleotide
auggugcccagugcaaccg

SEQ ID NO: 1881492 - RNA, 19 nt, Artificial Sequence
  Description of Artificial Sequence: Synthetic oligonucleotide
caagcagcaaagguauauc

SEQ ID NO: 1881493 - RNA, 19 nt, Artificial Sequence
  Description of Artificial Sequence: Synthetic oligonucleotide
caaagguauauccuagggu

SEQ ID NO: 1881494 - RNA, 19 nt, Artificial Sequence
  Description of Artificial Sequence: Synthetic oligonucleotide
uggggcauguucugacugu

SEQ ID NO: 1881495 - RNA, 19 nt, Artificial Sequence
  Description of Artificial Sequence: Synthetic oligonucleotide
gcugacuaacguuccacug

SEQ ID NO: 1881496 - RNA, 19 nt, Artificial Sequence
  Description of Artificial Sequence: Synthetic oligonucleotide
caguauuggggcgucuccc

SEQ ID NO: 1881497 - RNA, 19 nt, Artificial Sequence
  Description of Artificial Sequence: Synthetic oligonucleotide
guaaggacggcaauguccu

SEQ ID NO: 1881498 - RNA, 19 nt, Artificial Sequence
  Description of Artificial Sequence: Synthetic oligonucleotide
agguauauccuaggguccu

SEQ ID NO: 1881499 - RNA, 19 nt, Artificial Sequence
  Description of Artificial Sequence: Synthetic oligonucleotide
uccuugggauccacugucu

SEQ ID NO: 1881500 - RNA, 19 nt, Artificial Sequence
  Description of Artificial Sequence: Synthetic oligonucleotide
ggugucccaacaccaaaug

SEQ ID NO: 1881501 - RNA, 19 nt, Artificial Sequence
  Description of Artificial Sequence: Synthetic oligonucleotide
gaagauagcagagguggcu

SEQ ID NO: 1881502 - RNA, 19 nt, Artificial Sequence
  Description of Artificial Sequence: Synthetic oligonucleotide
cagaggagucucauuccug

SEQ ID NO: 1881503 - RNA, 19 nt, Artificial Sequence
  Description of Artificial Sequence: Synthetic oligonucleotide
aaccguagauggauccuca

SEQ ID NO: 1881504 - RNA, 19 nt, Artificial Sequence
  Description of Artificial Sequence: Synthetic oligonucleotide
ugcccagugcaaccguaga

SEQ ID NO: 1881505 - RNA, 19 nt, Artificial Sequence
  Description of Artificial Sequence: Synthetic oligonucleotide
gagggacauauccucagcu

SEQ ID NO: 1881506 - RNA, 19 nt, Artificial Sequence
  Description of Artificial Sequence: Synthetic oligonucleotide
uguucugacugugcucacu

SEQ ID NO: 1881507 - RNA, 19 nt, Artificial Sequence
  Description of Artificial Sequence: Synthetic oligonucleotide
ggugauucggaccaccucu

SEQ ID NO: 1881508 - RNA, 19 nt, Artificial Sequence
  Description of Artificial Sequence: Synthetic oligonucleotide
uagcaguacauggucccca

SEQ ID NO: 1881509 - RNA, 19 nt, Artificial Sequence
  Description of Artificial Sequence: Synthetic oligonucleotide
agcgccauucacuccccug

SEQ ID NO: 1881510 - RNA, 19 nt, Artificial Sequence
  Description of Artificial Sequence: Synthetic oligonucleotide
cugacugugcucacuaaua

SEQ ID NO: 1881511 - RNA, 19 nt, Artificial Sequence
  Description of Artificial Sequence: Synthetic oligonucleotide
uugccauccucgguggaca

SEQ ID NO: 1881512 - RNA, 19 nt, Artificial Sequence
  Description of Artificial Sequence: Synthetic oligonucleotide
cacuaagaggugucccaac

SEQ ID NO: 1881513 - RNA, 19 nt, Artificial Sequence
  Description of Artificial Sequence: Synthetic oligonucleotide
ggcucuugguuauagaagu

SEQ ID NO: 1881514 - RNA, 19 nt, Artificial Sequence
  Description of Artificial Sequence: Synthetic oligonucleotide
cuccacucaaguucaggca

SEQ ID NO: 1881515 - RNA, 19 nt, Artificial Sequence
  Description of Artificial Sequence: Synthetic oligonucleotide
uggcugacuaacguuccac

SEQ ID NO: 1881516 - RNA, 19 nt, Artificial Sequence
  Description of Artificial Sequence: Synthetic oligonucleotide
uguaugccuagggccuuag

SEQ ID NO: 1881517 - RNA, 19 nt, Artificial Sequence
  Description of Artificial Sequence: Synthetic oligonucleotide
accaaaugccccaggaaaa

SEQ ID NO: 1881518 - RNA, 19 nt, Artificial Sequence
  Description of Artificial Sequence: Synthetic oligonucleotide
auagcgccauucacucccc

SEQ ID NO: 1881519 - RNA, 19 nt, Artificial Sequence
  Description of Artificial Sequence: Synthetic oligonucleotide
guaugguguaaggacggca

SEQ ID NO: 1881520 - RNA, 19 nt, Artificial Sequence
  Description of Artificial Sequence: Synthetic oligonucleotide
gggauccacugucuggucc

SEQ ID NO: 1881521 - RNA, 19 nt, Artificial Sequence
  Description of Artificial Sequence: Synthetic oligonucleotide
gccaccgcccauaagacug

SEQ ID NO: 1881522 - RNA, 19 nt, Artificial Sequence
  Description of Artificial Sequence: Synthetic oligonucleotide
gaggugucccaacaccaaa

SEQ ID NO: 1881523 - RNA, 19 nt, Artificial Sequence
  Description of Artificial Sequence: Synthetic oligonucleotide
guagcaguacauggucccc

SEQ ID NO: 1881524 - RNA, 19 nt, Artificial Sequence
  Description of Artificial Sequence: Synthetic oligonucleotide
ugcgcauuguaugguguaa

SEQ ID NO: 1881525 - RNA, 19 nt, Artificial Sequence
  Description of Artificial Sequence: Synthetic oligonucleotide
agucuaagagacggugcca

SEQ ID NO: 1881526 - RNA, 19 nt, Artificial Sequence
  Description of Artificial Sequence: Synthetic oligonucleotide
gggugggcgcuucagauca

SEQ ID NO: 1881527 - RNA, 19 nt, Artificial Sequence
  Description of Artificial Sequence: Synthetic oligonucleotide
cccucuuugccugaggccc

SEQ ID NO: 1881528 - RNA, 19 nt, Artificial Sequence
  Description of Artificial Sequence: Synthetic oligonucleotide
caaccguagauggauccuc

SEQ ID NO: 1881529 - RNA, 19 nt, Artificial Sequence
  Description of Artificial Sequence: Synthetic oligonucleotide
cugguacaucaaagccugg

SEQ ID NO: 1881530 - RNA, 19 nt, Artificial Sequence
  Description of Artificial Sequence: Synthetic oligonucleotide
cccaguaagaggugcuagc

SEQ ID NO: 1881531 - RNA, 19 nt, Artificial Sequence
  Description of Artificial Sequence: Synthetic oligonucleotide
caugacugcagccaguauu

SEQ ID NO: 1881532 - RNA, 19 nt, Artificial Sequence
  Description of Artificial Sequence: Synthetic oligonucleotide
ggucacuaagagguguccc

SEQ ID NO: 1881533 - RNA, 19 nt, Artificial Sequence
  Description of Artificial Sequence: Synthetic oligonucleotide
gcaagaagaaugagggaca

SEQ ID NO: 1881534 - RNA, 19 nt, Artificial Sequence
  Description of Artificial Sequence: Synthetic oligonucleotide
cgcauuguaugguguaagg

SEQ ID NO: 1881535 - RNA, 19 nt, Artificial Sequence
  Description of Artificial Sequence: Synthetic oligonucleotide
gugauucggaccaccucug

SEQ ID NO: 1881536 - RNA, 19 nt, Artificial Sequence
  Description of Artificial Sequence: Synthetic oligonucleotide
aagaagaaugagggacaua

SEQ ID NO: 1881537 - RNA, 19 nt, Artificial Sequence
  Description of Artificial Sequence: Synthetic oligonucleotide
ggauccacugucuggucca

SEQ ID NO: 1881538 - RNA, 19 nt, Artificial Sequence
  Description of Artificial Sequence: Synthetic oligonucleotide
gcucacuaauacauagcgc

SEQ ID NO: 1881539 - RNA, 19 nt, Artificial Sequence
  Description of Artificial Sequence: Synthetic oligonucleotide
cacuguaugccuagggccu

SEQ ID NO: 1881540 - RNA, 19 nt, Artificial Sequence
  Description of Artificial Sequence: Synthetic oligonucleotide
caaaggggcccaccuccag

SEQ ID NO: 1881541 - RNA, 19 nt, Artificial Sequence
  Description of Artificial Sequence: Synthetic oligonucleotide
ggcaauucacuguaugccu

SEQ ID NO: 1881542 - RNA, 19 nt, Artificial Sequence
  Description of Artificial Sequence: Synthetic oligonucleotide
gggcgcuucagaucaggcc

SEQ ID NO: 1881543 - RNA, 19 nt, Artificial Sequence
  Description of Artificial Sequence: Synthetic oligonucleotide
uccccuggcucuugguuau

SEQ ID NO: 1881544 - RNA, 19 nt, Artificial Sequence
  Description of Artificial Sequence: Synthetic oligonucleotide
agggccuuagcaagaagaa

SEQ ID NO: 1881545 - RNA, 19 nt, Artificial Sequence
  Description of Artificial Sequence: Synthetic oligonucleotide
guguaaggacggcaauguc

SEQ ID NO: 1881546 - RNA, 19 nt, Artificial Sequence
  Description of Artificial Sequence: Synthetic oligonucleotide
auauccucagcugcuggua

SEQ ID NO: 1881547 - RNA, 19 nt, Artificial Sequence
  Description of Artificial Sequence: Synthetic oligonucleotide
aggcccuugcugauugcgg

SEQ ID NO: 1881548 - RNA, 19 nt, Artificial Sequence
  Description of Artificial Sequence: Synthetic oligonucleotide
caggaaggucauuaagucu

SEQ ID NO: 1881549 - RNA, 19 nt, Artificial Sequence
  Description of Artificial Sequence: Synthetic oligonucleotide
gggguccacaacaaagccc

SEQ ID NO: 1881550 - RNA, 19 nt, Artificial Sequence
  Description of Artificial Sequence: Synthetic oligonucleotide
gguacaucaaagccugggu

SEQ ID NO: 1881551 - RNA, 19 nt, Artificial Sequence
  Description of Artificial Sequence: Synthetic oligonucleotide
uggccacguuuacuuggug

SEQ ID NO: 1881552 - RNA, 19 nt, Artificial Sequence
  Description of Artificial Sequence: Synthetic oligonucleotide
ggagucucauuccuguuua

SEQ ID NO: 1881553 - RNA, 19 nt, Artificial Sequence
  Description of Artificial Sequence: Synthetic oligonucleotide
gggacgugugagcuguggc

SEQ ID NO: 1881554 - RNA, 19 nt, Artificial Sequence
  Description of Artificial Sequence: Synthetic oligonucleotide
gcagagguggcugacuaac

SEQ ID NO: 1881555 - RNA, 19 nt, Artificial Sequence
  Description of Artificial Sequence: Synthetic oligonucleotide
gugggcgcuucagaucagg

SEQ ID NO: 1881556 - RNA, 19 nt, Artificial Sequence
  Description of Artificial Sequence: Synthetic oligonucleotide
cccauaagacugucauugc

SEQ ID NO: 1881557 - RNA, 19 nt, Artificial Sequence
  Description of Artificial Sequence: Synthetic oligonucleotide
guaugccuagggccuuagc

SEQ ID NO: 1881558 - RNA, 19 nt, Artificial Sequence
  Description of Artificial Sequence: Synthetic oligonucleotide
augacccagaaugcugggu

SEQ ID NO: 1881559 - RNA, 19 nt, Artificial Sequence
  Description of Artificial Sequence: Synthetic oligonucleotide
accguagauggauccucaa

SEQ ID NO: 1881560 - RNA, 19 nt, Artificial Sequence
  Description of Artificial Sequence: Synthetic oligonucleotide
agcagagguggcugacuaa

SEQ ID NO: 1881561 - RNA, 19 nt, Artificial Sequence
  Description of Artificial Sequence: Synthetic oligonucleotide
caaagaugacagagcagcu

SEQ ID NO: 1881562 - RNA, 19 nt, Artificial Sequence
  Description of Artificial Sequence: Synthetic oligonucleotide
caaugaggcacagccccuc

SEQ ID NO: 1881563 - RNA, 19 nt, Artificial Sequence
  Description of Artificial Sequence: Synthetic oligonucleotide
cucaaagugcagccucaga

SEQ ID NO: 1881564 - RNA, 19 nt, Artificial Sequence
  Description of Artificial Sequence: Synthetic oligonucleotide
ccagaaugcugggugggcg

SEQ ID NO: 1881565 - RNA, 19 nt, Artificial Sequence
  Description of Artificial Sequence: Synthetic oligonucleotide
ugauugcggcagccugcgc

SEQ ID NO: 1881566 - RNA, 19 nt, Artificial Sequence
  Description of Artificial Sequence: Synthetic oligonucleotide
guggucacuaagagguguc

SEQ ID NO: 1881567 - RNA, 19 nt, Artificial Sequence
  Description of Artificial Sequence: Synthetic oligonucleotide
aggugucccaacaccaaau

SEQ ID NO: 1881568 - RNA, 19 nt, Artificial Sequence
  Description of Artificial Sequence: Synthetic oligonucleotide
guacaaggcugugcugggc

SEQ ID NO: 1881569 - RNA, 19 nt, Artificial Sequence
  Description of Artificial Sequence: Synthetic oligonucleotide
uccuaguaacaagcagcaa

SEQ ID NO: 1881570 - RNA, 19 nt, Artificial Sequence
  Description of Artificial Sequence: Synthetic oligonucleotide
acggugccagagugggcag

SEQ ID NO: 1881571 - RNA, 19 nt, Artificial Sequence
  Description of Artificial Sequence: Synthetic oligonucleotide
cauauccucagcugcuggu

SEQ ID NO: 1881572 - RNA, 19 nt, Artificial Sequence
  Description of Artificial Sequence: Synthetic oligonucleotide
gcagcagcguagcaguaca

SEQ ID NO: 1881573 - RNA, 19 nt, Artificial Sequence
  Description of Artificial Sequence: Synthetic oligonucleotide
cccagugcaaccguagaug

SEQ ID NO: 1881574 - RNA, 19 nt, Artificial Sequence
  Description of Artificial Sequence: Synthetic oligonucleotide
gugcccagugcaaccguag

SEQ ID NO: 1881575 - RNA, 19 nt, Artificial Sequence
  Description of Artificial Sequence: Synthetic oligonucleotide
acaugacugcagccaguau

SEQ ID NO: 1881576 - RNA, 19 nt, Artificial Sequence
  Description of Artificial Sequence: Synthetic oligonucleotide
augcuccuaguaacaagca

SEQ ID NO: 1881577 - RNA, 19 nt, Artificial Sequence
  Description of Artificial Sequence: Synthetic oligonucleotide
ugccauccucgguggacac

SEQ ID NO: 1881578 - RNA, 19 nt, Artificial Sequence
  Description of Artificial Sequence: Synthetic oligonucleotide
gguggcugacuaacguucc

SEQ ID NO: 1881579 - RNA, 19 nt, Artificial Sequence
  Description of Artificial Sequence: Synthetic oligonucleotide
gaagaggccaccgcccaua

SEQ ID NO: 1881580 - RNA, 19 nt, Artificial Sequence
  Description of Artificial Sequence: Synthetic oligonucleotide
cagucacuccagugacccc

SEQ ID NO: 1881581 - RNA, 19 nt, Artificial Sequence
  Description of Artificial Sequence: Synthetic oligonucleotide
gcauguucugacugugcuc

SEQ ID NO: 1881582 - RNA, 19 nt, Artificial Sequence
  Description of Artificial Sequence: Synthetic oligonucleotide
ucacuccagugaccccucu

SEQ ID NO: 1881583 - RNA, 19 nt, Artificial Sequence
  Description of Artificial Sequence: Synthetic oligonucleotide
guccacaacaaagcccaga

SEQ ID NO: 1881584 - RNA, 19 nt, Artificial Sequence
  Description of Artificial Sequence: Synthetic oligonucleotide
gauucggaccaccucuguu

SEQ ID NO: 1881585 - RNA, 19 nt, Artificial Sequence
  Description of Artificial Sequence: Synthetic oligonucleotide
gccuuagcaagaagaauga

SEQ ID NO: 1881586 - RNA, 19 nt, Artificial Sequence
  Description of Artificial Sequence: Synthetic oligonucleotide
cacugggacgugugagcug

SEQ ID NO: 1881587 - RNA, 19 nt, Artificial Sequence
  Description of Artificial Sequence: Synthetic oligonucleotide
cauucugaguggcccagua

SEQ ID NO: 1881588 - RNA, 19 nt, Artificial Sequence
  Description of Artificial Sequence: Synthetic oligonucleotide
agacggugccagagugggc

SEQ ID NO: 1881589 - RNA, 19 nt, Artificial Sequence
  Description of Artificial Sequence: Synthetic oligonucleotide
guauuggggcgucucccaa

SEQ ID NO: 1881590 - RNA, 19 nt, Artificial Sequence
  Description of Artificial Sequence: Synthetic oligonucleotide
aacaagcagcaaagguaua

SEQ ID NO: 1881591 - RNA, 19 nt, Artificial Sequence
  Description of Artificial Sequence: Synthetic oligonucleotide
guggcugacuaacguucca

SEQ ID NO: 1881592 - RNA, 19 nt, Artificial Sequence
  Description of Artificial Sequence: Synthetic oligonucleotide
gcgcauuguaugguguaag

SEQ ID NO: 1881593 - RNA, 19 nt, Artificial Sequence
  Description of Artificial Sequence: Synthetic oligonucleotide
cucuccuugccagcaugac

SEQ ID NO: 1881594 - RNA, 19 nt, Artificial Sequence
  Description of Artificial Sequence: Synthetic oligonucleotide
cauucacuccccuggcucu

SEQ ID NO: 1881595 - RNA, 19 nt, Artificial Sequence
  Description of Artificial Sequence: Synthetic oligonucleotide
uggcccuggaguucucauu

SEQ ID NO: 1881596 - RNA, 19 nt, Artificial Sequence
  Description of Artificial Sequence: Synthetic oligonucleotide
gcucaggaagaggccaccg

SEQ ID NO: 1881597 - RNA, 19 nt, Artificial Sequence
  Description of Artificial Sequence: Synthetic oligonucleotide
uggguaguugggagcucuu

SEQ ID NO: 1881598 - RNA, 19 nt, Artificial Sequence
  Description of Artificial Sequence: Synthetic oligonucleotide
ucguggcccugcacauagc

SEQ ID NO: 1881599 - RNA, 19 nt, Artificial Sequence
  Description of Artificial Sequence: Synthetic oligonucleotide
acgugugagcuguggcaau

SEQ ID NO: 1881600 - RNA, 19 nt, Artificial Sequence
  Description of Artificial Sequence: Synthetic oligonucleotide
acaucacucuuggggcaug

SEQ ID NO: 1881601 - RNA, 19 nt, Artificial Sequence
  Description of Artificial Sequence: Synthetic oligonucleotide
guaagaggugcuagcuuua

SEQ ID NO: 1881602 - RNA, 19 nt, Artificial Sequence
  Description of Artificial Sequence: Synthetic oligonucleotide
ccuguuuaugcuccuagua

SEQ ID NO: 1881603 - RNA, 19 nt, Artificial Sequence
  Description of Artificial Sequence: Synthetic oligonucleotide
uggauacauggugcccagu

SEQ ID NO: 1881604 - RNA, 19 nt, Artificial Sequence
  Description of Artificial Sequence: Synthetic oligonucleotide
cuccccuggcucuugguua

SEQ ID NO: 1881605 - RNA, 19 nt, Artificial Sequence
  Description of Artificial Sequence: Synthetic oligonucleotide
caacaaagcccagaaacuu

SEQ ID NO: 1881606 - RNA, 19 nt, Artificial Sequence
  Description of Artificial Sequence: Synthetic oligonucleotide
gccugcgcauuguauggug

SEQ ID NO: 1881607 - RNA, 19 nt, Artificial Sequence
  Description of Artificial Sequence: Synthetic oligonucleotide
gcucuugguuggccgcugg

SEQ ID NO: 1881608 - RNA, 19 nt, Artificial Sequence
  Description of Artificial Sequence: Synthetic oligonucleotide
aacguuccacugggacgug

SEQ ID NO: 1881609 - RNA, 19 nt, Artificial Sequence
  Description of Artificial Sequence: Synthetic oligonucleotide
cugugcucacuaauacaua

SEQ ID NO: 1881610 - RNA, 19 nt, Artificial Sequence
  Description of Artificial Sequence: Synthetic oligonucleotide
uuggggcgucucccaagaa

SEQ ID NO: 1881611 - RNA, 19 nt, Artificial Sequence
  Description of Artificial Sequence: Synthetic oligonucleotide
gugugagcuguggcaauuc

SEQ ID NO: 1881612 - RNA, 19 nt, Artificial Sequence
  Description of Artificial Sequence: Synthetic oligonucleotide
gcccaguaagaggugcuag

SEQ ID NO: 1881613 - RNA, 19 nt, Artificial Sequence
  Description of Artificial Sequence: Synthetic oligonucleotide
aguggcccaguaagaggug

SEQ ID NO: 1881614 - RNA, 19 nt, Artificial Sequence
  Description of Artificial Sequence: Synthetic oligonucleotide
cugcgcauuguauggugua

SEQ ID NO: 1881615 - RNA, 19 nt, Artificial Sequence
  Description of Artificial Sequence: Synthetic oligonucleotide
gacuaacguuccacuggga

SEQ ID NO: 1881616 - RNA, 19 nt, Artificial Sequence
  Description of Artificial Sequence: Synthetic oligonucleotide
ugguuggccgcugguccac

SEQ ID NO: 1881617 - RNA, 19 nt, Artificial Sequence
  Description of Artificial Sequence: Synthetic oligonucleotide
gaaggucauuaagucugcu

SEQ ID NO: 1881618 - RNA, 19 nt, Artificial Sequence
  Description of Artificial Sequence: Synthetic oligonucleotide
ugccagcaugacccagaau

SEQ ID NO: 1881619 - RNA, 19 nt, Artificial Sequence
  Description of Artificial Sequence: Synthetic oligonucleotide
ccacguuuacuuggugggg

SEQ ID NO: 1881620 - RNA, 19 nt, Artificial Sequence
  Description of Artificial Sequence: Synthetic oligonucleotide
cagagugggcagcagcgua

SEQ ID NO: 1881621 - RNA, 19 nt, Artificial Sequence
  Description of Artificial Sequence: Synthetic oligonucleotide
uaaggacggcaauguccuu

SEQ ID NO: 1881622 - RNA, 19 nt, Artificial Sequence
  Description of Artificial Sequence: Synthetic oligonucleotide
cagaagucuaagagacggu

SEQ ID NO: 1881623 - RNA, 19 nt, Artificial Sequence
  Description of Artificial Sequence: Synthetic oligonucleotide
acuguaugccuagggccuu

SEQ ID NO: 1881624 - RNA, 19 nt, Artificial Sequence
  Description of Artificial Sequence: Synthetic oligonucleotide
cacuaauacauagcgccau

SEQ ID NO: 1881625 - RNA, 19 nt, Artificial Sequence
  Description of Artificial Sequence: Synthetic oligonucleotide
agccugcgcauuguauggu

SEQ ID NO: 1881626 - RNA, 19 nt, Artificial Sequence
  Description of Artificial Sequence: Synthetic oligonucleotide
ccgcugguccacaucacuc

SEQ ID NO: 1881627 - RNA, 19 nt, Artificial Sequence
  Description of Artificial Sequence: Synthetic oligonucleotide
agccucagaggagucucau

SEQ ID NO: 1881628 - RNA, 19 nt, Artificial Sequence
  Description of Artificial Sequence: Synthetic oligonucleotide
ccucgguggacaccagcag

SEQ ID NO: 1881629 - RNA, 19 nt, Artificial Sequence
  Description of Artificial Sequence: Synthetic oligonucleotide
cugggugggcgcuucagau

SEQ ID NO: 1881630 - RNA, 19 nt, Artificial Sequence
  Description of Artificial Sequence: Synthetic oligonucleotide
gugcaaccguagauggauc

SEQ ID NO: 1881631 - RNA, 19 nt, Artificial Sequence
  Description of Artificial Sequence: Synthetic oligonucleotide
cuacaugacugcagccagu

SEQ ID NO: 1881632 - RNA, 19 nt, Artificial Sequence
  Description of Artificial Sequence: Synthetic oligonucleotide
ggcugacuaacguuccacu

SEQ ID NO: 1881633 - RNA, 19 nt, Artificial Sequence
  Description of Artificial Sequence: Synthetic oligonucleotide
gcaauucacuguaugccua

SEQ ID NO: 1881634 - RNA, 19 nt, Artificial Sequence
  Description of Artificial Sequence: Synthetic oligonucleotide
ggacggcaauguccuuggg

SEQ ID NO: 1881635 - RNA, 19 nt, Artificial Sequence
  Description of Artificial Sequence: Synthetic oligonucleotide
ccauaagacugucauugcu

SEQ ID NO: 1881636 - RNA, 19 nt, Artificial Sequence
  Description of Artificial Sequence: Synthetic oligonucleotide
ggaagauaaagcagacuuu

SEQ ID NO: 1881637 - RNA, 19 nt, Artificial Sequence
  Description of Artificial Sequence: Synthetic oligonucleotide
acguuccacugggacgugu

SEQ ID NO: 1881638 - RNA, 19 nt, Artificial Sequence
  Description of Artificial Sequence: Synthetic oligonucleotide
ggugcuagcuuuagguuau

SEQ ID NO: 1881639 - RNA, 19 nt, Artificial Sequence
  Description of Artificial Sequence: Synthetic oligonucleotide
gcucuugguuauagaaguc

SEQ ID NO: 1881640 - RNA, 19 nt, Artificial Sequence
  Description of Artificial Sequence: Synthetic oligonucleotide
accgcccauaagacuguca

SEQ ID NO: 1881641 - RNA, 19 nt, Artificial Sequence
  Description of Artificial Sequence: Synthetic oligonucleotide
gagucucauuccuguuuau

SEQ ID NO: 1881642 - RNA, 19 nt, Artificial Sequence
  Description of Artificial Sequence: Synthetic oligonucleotide
gggucaacugcuuggugau

SEQ ID NO: 1881643 - RNA, 19 nt, Artificial Sequence
  Description of Artificial Sequence: Synthetic oligonucleotide
gggugauggccacguuuac

SEQ ID NO: 1881644 - RNA, 19 nt, Artificial Sequence
  Description of Artificial Sequence: Synthetic oligonucleotide
gugaccccucuuugccuga

SEQ ID NO: 1881645 - RNA, 19 nt, Artificial Sequence
  Description of Artificial Sequence: Synthetic oligonucleotide
gaggagucucauuccuguu

SEQ ID NO: 1881646 - RNA, 19 nt, Artificial Sequence
  Description of Artificial Sequence: Synthetic oligonucleotide
cuggguaguugggagcucu

SEQ ID NO: 1881647 - RNA, 19 nt, Artificial Sequence
  Description of Artificial Sequence: Synthetic oligonucleotide
gccccaggaaaagcaacac

SEQ ID NO: 1881648 - RNA, 19 nt, Artificial Sequence
  Description of Artificial Sequence: Synthetic oligonucleotide
gccaguauuggggcgucuc

SEQ ID NO: 1881649 - RNA, 19 nt, Artificial Sequence
  Description of Artificial Sequence: Synthetic oligonucleotide
ggugauggccacguuuacu

SEQ ID NO: 1881650 - RNA, 19 nt, Artificial Sequence
  Description of Artificial Sequence: Synthetic oligonucleotide
guauauccuaggguccuuu

SEQ ID NO: 1881651 - RNA, 19 nt, Artificial Sequence
  Description of Artificial Sequence: Synthetic oligonucleotide
cccagaaugcugggugggc

SEQ ID NO: 1881652 - RNA, 19 nt, Artificial Sequence
  Description of Artificial Sequence: Synthetic oligonucleotide
cugggacgugugagcugug

SEQ ID NO: 1881653 - RNA, 19 nt, Artificial Sequence
  Description of Artificial Sequence: Synthetic oligonucleotide
cagccaguauuggggcguc

SEQ ID NO: 1881654 - RNA, 19 nt, Artificial Sequence
  Description of Artificial Sequence: Synthetic oligonucleotide
gcucuccuugccagcauga

SEQ ID NO: 1881655 - RNA, 19 nt, Artificial Sequence
  Description of Artificial Sequence: Synthetic oligonucleotide
cgucucccaagaagauagc

SEQ ID NO: 1881656 - RNA, 19 nt, Artificial Sequence
  Description of Artificial Sequence: Synthetic oligonucleotide
agccaguauuggggcgucu

SEQ ID NO: 1881657 - RNA, 19 nt, Artificial Sequence
  Description of Artificial Sequence: Synthetic oligonucleotide
ccaguaagaggugcuagcu

SEQ ID NO: 1881658 - RNA, 19 nt, Artificial Sequence
  Description of Artificial Sequence: Synthetic oligonucleotide
ggcgucucccaagaagaua

SEQ ID NO: 1881659 - RNA, 19 nt, Artificial Sequence
  Description of Artificial Sequence: Synthetic oligonucleotide
caccgcccauaagacuguc

SEQ ID NO: 1881660 - RNA, 19 nt, Artificial Sequence
  Description of Artificial Sequence: Synthetic oligonucleotide
cucuugguuggccgcuggu

SEQ ID NO: 1881661 - RNA, 19 nt, Artificial Sequence
  Description of Artificial Sequence: Synthetic oligonucleotide
caaagcccagaaacuucuu

SEQ ID NO: 1881662 - RNA, 19 nt, Artificial Sequence
  Description of Artificial Sequence: Synthetic oligonucleotide
gcaaccguagauggauccu

SEQ ID NO: 1881663 - RNA, 19 nt, Artificial Sequence
  Description of Artificial Sequence: Synthetic oligonucleotide
ccacaacaaagcccagaaa

SEQ ID NO: 1881664 - RNA, 19 nt, Artificial Sequence
  Description of Artificial Sequence: Synthetic oligonucleotide
cacaucacucuuggggcau

SEQ ID NO: 1881665 - RNA, 19 nt, Artificial Sequence
  Description of Artificial Sequence: Synthetic oligonucleotide
ccgcccauaagacugucau

SEQ ID NO: 1881666 - RNA, 19 nt, Artificial Sequence
  Description of Artificial Sequence: Synthetic oligonucleotide
ggugggcgcuucagaucag

SEQ ID NO: 1881667 - RNA, 19 nt, Artificial Sequence
  Description of Artificial Sequence: Synthetic oligonucleotide
gugcagccucagaggaguc

SEQ ID NO: 1881668 - RNA, 19 nt, Artificial Sequence
  Description of Artificial Sequence: Synthetic oligonucleotide
ccugcgcauuguauggugu

SEQ ID NO: 1881669 - RNA, 19 nt, Artificial Sequence
  Description of Artificial Sequence: Synthetic oligonucleotide
gcccagugcaaccguagau

SEQ ID NO: 1881670 - RNA, 19 nt, Artificial Sequence
  Description of Artificial Sequence: Synthetic oligonucleotide
caucacucuuggggcaugu

SEQ ID NO: 1881671 - RNA, 19 nt, Artificial Sequence
  Description of Artificial Sequence: Synthetic oligonucleotide
cggcaauguccuugggauc

SEQ ID NO: 1881672 - RNA, 19 nt, Artificial Sequence
  Description of Artificial Sequence: Synthetic oligonucleotide
guuggccgcugguccacau

SEQ ID NO: 1881673 - RNA, 19 nt, Artificial Sequence
  Description of Artificial Sequence: Synthetic oligonucleotide
gggccuuagcaagaagaau

SEQ ID NO: 1881674 - RNA, 19 nt, Artificial Sequence
  Description of Artificial Sequence: Synthetic oligonucleotide
ggccaccgcccauaagacu

SEQ ID NO: 1881675 - RNA, 19 nt, Artificial Sequence
  Description of Artificial Sequence: Synthetic oligonucleotide
ggcccaguaagaggugcua

SEQ ID NO: 1881676 - RNA, 19 nt, Artificial Sequence
  Description of Artificial Sequence: Synthetic oligonucleotide
cagcagcguagcaguacau

SEQ ID NO: 1881677 - RNA, 19 nt, Artificial Sequence
  Description of Artificial Sequence: Synthetic oligonucleotide
gaaugcugggugggcgcuu

SEQ ID NO: 1881678 - RNA, 19 nt, Artificial Sequence
  Description of Artificial Sequence: Synthetic oligonucleotide
cacuccagugaccccucuu

SEQ ID NO: 1881679 - RNA, 19 nt, Artificial Sequence
  Description of Artificial Sequence: Synthetic oligonucleotide
cacuccccuggcucuuggu

SEQ ID NO: 1881680 - RNA, 19 nt, Artificial Sequence
  Description of Artificial Sequence: Synthetic oligonucleotide
gguuggccgcugguccaca

SEQ ID NO: 1881681 - RNA, 19 nt, Artificial Sequence
  Description of Artificial Sequence: Synthetic oligonucleotide
ccacugggacgugugagcu

SEQ ID NO: 1881682 - RNA, 19 nt, Artificial Sequence
  Description of Artificial Sequence: Synthetic oligonucleotide
gccucagaggagucucauu

SEQ ID NO: 1881683 - RNA, 19 nt, Artificial Sequence
  Description of Artificial Sequence: Synthetic oligonucleotide
ccaccgcccauaagacugu

SEQ ID NO: 1881684 - RNA, 19 nt, Artificial Sequence
  Description of Artificial Sequence: Synthetic oligonucleotide
gcucguggcccugcacaua

SEQ ID NO: 1881685 - RNA, 19 nt, Artificial Sequence
  Description of Artificial Sequence: Synthetic oligonucleotide
ggucaacugcuuggugauu

SEQ ID NO: 1881686 - RNA, 19 nt, Artificial Sequence
  Description of Artificial Sequence: Synthetic oligonucleotide
gcggcagccugcgcauugu

SEQ ID NO: 1881687 - RNA, 19 nt, Artificial Sequence
  Description of Artificial Sequence: Synthetic oligonucleotide
ccauucugaguggcccagu

SEQ ID NO: 1881688 - RNA, 19 nt, Artificial Sequence
  Description of Artificial Sequence: Synthetic oligonucleotide
ccgcaccuucucagcaggu

SEQ ID NO: 1881689 - RNA, 19 nt, Artificial Sequence
  Description of Artificial Sequence: Synthetic oligonucleotide
cgcccauaagacugucauu

SEQ ID NO: 1881690 - RNA, 19 nt, Artificial Sequence
  Description of Artificial Sequence: Synthetic oligonucleotide
gggcccaccuccagcucuu

SEQ ID NO: 1881691 - RNA, 19 nt, Artificial Sequence
  Description of Artificial Sequence: Synthetic oligonucleotide
ccccuggcucuugguuaua

SEQ ID NO: 1881692 - RNA, 19 nt, Artificial Sequence
  Description of Artificial Sequence: Synthetic oligonucleotide
uguucugucacccaaaaga

SEQ ID NO: 1881693 - RNA, 19 nt, Artificial Sequence
  Description of Artificial Sequence: Synthetic oligonucleotide
uguguuaccauuaugugug

SEQ ID NO: 1881694 - RNA, 19 nt, Artificial Sequence
  Description of Artificial Sequence: Synthetic oligonucleotide
uaaaguaucugaagcaugg

SEQ ID NO: 1881695 - RNA, 19 nt, Artificial Sequence
  Description of Artificial Sequence: Synthetic oligonucleotide
aucaguauuuccuugcacc

SEQ ID NO: 1881696 - RNA, 19 nt, Artificial Sequence
  Description of Artificial Sequence: Synthetic oligonucleotide
gaggaauccaaccaaaggg

SEQ ID NO: 1881697 - RNA, 19 nt, Artificial Sequence
  Description of Artificial Sequence: Synthetic oligonucleotide
ugauauaagauucuggauc

SEQ ID NO: 1881698 - RNA, 19 nt, Artificial Sequence
  Description of Artificial Sequence: Synthetic oligonucleotide
gauauaagauucuggaucc

SEQ ID NO: 1881699 - RNA, 19 nt, Artificial Sequence
  Description of Artificial Sequence: Synthetic oligonucleotide
cuuuacaucagguucaggc

SEQ ID NO: 1881700 - RNA, 19 nt, Artificial Sequence
  Description of Artificial Sequence: Synthetic oligonucleotide
aaugauaucacugaggcuu

SEQ ID NO: 1881701 - RNA, 19 nt, Artificial Sequence
  Description of Artificial Sequence: Synthetic oligonucleotide
acuaaaucugcccuuuugc

SEQ ID NO: 1881702 - RNA, 19 nt, Artificial Sequence
  Description of Artificial Sequence: Synthetic oligonucleotide
uauauacacacacacacac

SEQ ID NO: 1881703 - RNA, 19 nt, Artificial Sequence
  Description of Artificial Sequence: Synthetic oligonucleotide
ucuaugucuacauuuaaca

SEQ ID NO: 1881704 - RNA, 19 nt, Artificial Sequence
  Description of Artificial Sequence: Synthetic oligonucleotide
caaacuuugagcaaaagca

SEQ ID NO: 1881705 - RNA, 19 nt, Artificial Sequence
  Description of Artificial Sequence: Synthetic oligonucleotide
uuaacaacagaucuuggac

SEQ ID NO: 1881706 - RNA, 19 nt, Artificial Sequence
  Description of Artificial Sequence: Synthetic oligonucleotide
aaagcaguaacaccuaaga

SEQ ID NO: 1881707 - RNA, 19 nt, Artificial Sequence
  Description of Artificial Sequence: Synthetic oligonucleotide
aacaacaaugcucuagcag

SEQ ID NO: 1881708 - RNA, 19 nt, Artificial Sequence
  Description of Artificial Sequence: Synthetic oligonucleotide
uuaauguccucugugaagg

SEQ ID NO: 1881709 - RNA, 19 nt, Artificial Sequence
  Description of Artificial Sequence: Synthetic oligonucleotide
uauacacacacacacacac

SEQ ID NO: 1881710 - RNA, 19 nt, Artificial Sequence
  Description of Artificial Sequence: Synthetic oligonucleotide
aacaccuaagaaaacuucc

SEQ ID NO: 1881711 - RNA, 19 nt, Artificial Sequence
  Description of Artificial Sequence: Synthetic oligonucleotide
ucuuuugcaaacuuugagc

SEQ ID NO: 1881712 - RNA, 19 nt, Artificial Sequence
  Description of Artificial Sequence: Synthetic oligonucleotide
aaugucaccaauaccacuc

SEQ ID NO: 1881713 - RNA, 19 nt, Artificial Sequence
  Description of Artificial Sequence: Synthetic oligonucleotide
ugaggcuugauccauaacu

SEQ ID NO: 1881714 - RNA, 19 nt, Artificial Sequence
  Description of Artificial Sequence: Synthetic oligonucleotide
uguuccgaguaccacaugg

SEQ ID NO: 1881715 - RNA, 19 nt, Artificial Sequence
  Description of Artificial Sequence: Synthetic oligonucleotide
ugaauuaauguccucugug

SEQ ID NO: 1881716 - RNA, 19 nt, Artificial Sequence
  Description of Artificial Sequence: Synthetic oligonucleotide
cauaacaucacucacuauc

SEQ ID NO: 1881717 - RNA, 19 nt, Artificial Sequence
  Description of Artificial Sequence: Synthetic oligonucleotide
uuucgauuucuuuacauca

SEQ ID NO: 1881718 - RNA, 19 nt, Artificial Sequence
  Description of Artificial Sequence: Synthetic oligonucleotide
uuauuucugguuuugaguc

SEQ ID NO: 1881719 - RNA, 19 nt, Artificial Sequence
  Description of Artificial Sequence: Synthetic oligonucleotide
cuugugagaacaugaaucc

SEQ ID NO: 1881720 - RNA, 19 nt, Artificial Sequence
  Description of Artificial Sequence: Synthetic oligonucleotide
acuaaauugucuaauaaug

SEQ ID NO: 1881721 - RNA, 19 nt, Artificial Sequence
  Description of Artificial Sequence: Synthetic oligonucleotide
uaugugugcaucuaugucu

SEQ ID NO: 1881722 - RNA, 19 nt, Artificial Sequence
  Description of Artificial Sequence: Synthetic oligonucleotide
uggggagacacucaaaagc

SEQ ID NO: 1881723 - RNA, 19 nt, Artificial Sequence
  Description of Artificial Sequence: Synthetic oligonucleotide
guugauauaagauucugga

SEQ ID NO: 1881724 - RNA, 19 nt, Artificial Sequence
  Description of Artificial Sequence: Synthetic oligonucleotide
uucuuuugcaaacuuugag

SEQ ID NO: 1881725 - RNA, 19 nt, Artificial Sequence
  Description of Artificial Sequence: Synthetic oligonucleotide
acaacaaugcucuagcagu

SEQ ID NO: 1881726 - RNA, 19 nt, Artificial Sequence
  Description of Artificial Sequence: Synthetic oligonucleotide
aaauugucuaauaauguca

SEQ ID NO: 1881727 - RNA, 19 nt, Artificial Sequence
  Description of Artificial Sequence: Synthetic oligonucleotide
cucaaaguaaaacuaaauc

SEQ ID NO: 1881728 - RNA, 19 nt, Artificial Sequence
  Description of Artificial Sequence: Synthetic oligonucleotide
aagcacuggcaccauaugg

SEQ ID NO: 1881729 - RNA, 19 nt, Artificial Sequence
  Description of Artificial Sequence: Synthetic oligonucleotide
aguggaaagaaaugcagug

SEQ ID NO: 1881730 - RNA, 19 nt, Artificial Sequence
  Description of Artificial Sequence: Synthetic oligonucleotide
ggagagacuagcuuuaagg

SEQ ID NO: 1881731 - RNA, 19 nt, Artificial Sequence
  Description of Artificial Sequence: Synthetic oligonucleotide
aguauuuccuugcacccac

SEQ ID NO: 1881732 - RNA, 19 nt, Artificial Sequence
  Description of Artificial Sequence: Synthetic oligonucleotide
ggaaugauaucacugaggc

SEQ ID NO: 1881733 - RNA, 19 nt, Artificial Sequence
  Description of Artificial Sequence: Synthetic oligonucleotide
uugucuaauaaugucacca

SEQ ID NO: 1881734 - RNA, 19 nt, Artificial Sequence
  Description of Artificial Sequence: Synthetic oligonucleotide
ugagucacagcuuuguaga

SEQ ID NO: 1881735 - RNA, 19 nt, Artificial Sequence
  Description of Artificial Sequence: Synthetic oligonucleotide
uagcuuuaaggauauaaca

SEQ ID NO: 1881736 - RNA, 19 nt, Artificial Sequence
  Description of Artificial Sequence: Synthetic oligonucleotide
aauaaaguaucugaagcau

SEQ ID NO: 1881737 - RNA, 19 nt, Artificial Sequence
  Description of Artificial Sequence: Synthetic oligonucleotide
uacacacacacacacacac

SEQ ID NO: 1881738 - RNA, 19 nt, Artificial Sequence
  Description of Artificial Sequence: Synthetic oligonucleotide
cauggcauuccuauggagg

SEQ ID NO: 1881739 - RNA, 19 nt, Artificial Sequence
  Description of Artificial Sequence: Synthetic oligonucleotide
ucgauuucuuuacaucagg

SEQ ID NO: 1881740 - RNA, 19 nt, Artificial Sequence
  Description of Artificial Sequence: Synthetic oligonucleotide
aagcgaguguuucuuuccc

SEQ ID NO: 1881741 - RNA, 19 nt, Artificial Sequence
  Description of Artificial Sequence: Synthetic oligonucleotide
uauaacaucacaggaguga

SEQ ID NO: 1881742 - RNA, 19 nt, Artificial Sequence
  Description of Artificial Sequence: Synthetic oligonucleotide
ucacccaaaagaaggaaug

SEQ ID NO: 1881743 - RNA, 19 nt, Artificial Sequence
  Description of Artificial Sequence: Synthetic oligonucleotide
aaguaucugaagcauggca

SEQ ID NO: 1881744 - RNA, 19 nt, Artificial Sequence
  Description of Artificial Sequence: Synthetic oligonucleotide
aacuaaaucugcccuuuug

SEQ ID NO: 1881745 - RNA, 19 nt, Artificial Sequence
  Description of Artificial Sequence: Synthetic oligonucleotide
aaacuuugagcaaaagcag

SEQ ID NO: 1881746 - RNA, 19 nt, Artificial Sequence
  Description of Artificial Sequence: Synthetic oligonucleotide
uuagcaaucuuccaagcua

SEQ ID NO: 1881747 - RNA, 19 nt, Artificial Sequence
  Description of Artificial Sequence: Synthetic oligonucleotide
aauuaauguccucugugaa

SEQ ID NO: 1881748 - RNA, 19 nt, Artificial Sequence
  Description of Artificial Sequence: Synthetic oligonucleotide
cuagcuuuaaggauauaac

SEQ ID NO: 1881749 - RNA, 19 nt, Artificial Sequence
  Description of Artificial Sequence: Synthetic oligonucleotide
cauuuaacaacagaucuug

SEQ ID NO: 1881750 - RNA, 19 nt, Artificial Sequence
  Description of Artificial Sequence: Synthetic oligonucleotide
auguguauuccgaagaggg

SEQ ID NO: 1881751 - RNA, 19 nt, Artificial Sequence
  Description of Artificial Sequence: Synthetic oligonucleotide
auccuuucgauuucuuuac

SEQ ID NO: 1881752 - RNA, 19 nt, Artificial Sequence
  Description of Artificial Sequence: Synthetic oligonucleotide
gauauaacaucacaggagu

SEQ ID NO: 1881753 - RNA, 19 nt, Artificial Sequence
  Description of Artificial Sequence: Synthetic oligonucleotide
gagggaauaaaguaucuga

SEQ ID NO: 1881754 - RNA, 19 nt, Artificial Sequence
  Description of Artificial Sequence: Synthetic oligonucleotide
gaaggaaugauaucacuga

SEQ ID NO: 1881755 - RNA, 19 nt, Artificial Sequence
  Description of Artificial Sequence: Synthetic oligonucleotide
uuuacaucagguucaggcu

SEQ ID NO: 1881756 - RNA, 19 nt, Artificial Sequence
  Description of Artificial Sequence: Synthetic oligonucleotide
aaaguaucugaagcauggc

SEQ ID NO: 1881757 - RNA, 19 nt, Artificial Sequence
  Description of Artificial Sequence: Synthetic oligonucleotide
uuccgaagagggaauaaag

SEQ ID NO: 1881758 - RNA, 19 nt, Artificial Sequence
  Description of Artificial Sequence: Synthetic oligonucleotide
agugguugaucauagugug

SEQ ID NO: 1881759 - RNA, 19 nt, Artificial Sequence
  Description of Artificial Sequence: Synthetic oligonucleotide
ugauccauaacugcaagcu

SEQ ID NO: 1881760 - RNA, 19 nt, Artificial Sequence
  Description of Artificial Sequence: Synthetic oligonucleotide
uucgauuucuuuacaucag

SEQ ID NO: 1881761 - RNA, 19 nt, Artificial Sequence
  Description of Artificial Sequence: Synthetic oligonucleotide
ucaguauuuccuugcaccc

SEQ ID NO: 1881762 - RNA, 19 nt, Artificial Sequence
  Description of Artificial Sequence: Synthetic oligonucleotide
ugagcaaaagcaguaacac

SEQ ID NO: 1881763 - RNA, 19 nt, Artificial Sequence
  Description of Artificial Sequence: Synthetic oligonucleotide
ugugaaggaagacuaaauu

SEQ ID NO: 1881764 - RNA, 19 nt, Artificial Sequence
  Description of Artificial Sequence: Synthetic oligonucleotide
agauucuggauccagacuu

SEQ ID NO: 1881765 - RNA, 19 nt, Artificial Sequence
  Description of Artificial Sequence: Synthetic oligonucleotide
ucuuccaaagcauccuucc

SEQ ID NO: 1881766 - RNA, 19 nt, Artificial Sequence
  Description of Artificial Sequence: Synthetic oligonucleotide
ugaagcauggcauuccuau

SEQ ID NO: 1881767 - RNA, 19 nt, Artificial Sequence
  Description of Artificial Sequence: Synthetic oligonucleotide
aauguguuccgaguaccac

SEQ ID NO: 1881768 - RNA, 19 nt, Artificial Sequence
  Description of Artificial Sequence: Synthetic oligonucleotide
ugguugaucauagugugcc

SEQ ID NO: 1881769 - RNA, 19 nt, Artificial Sequence
  Description of Artificial Sequence: Synthetic oligonucleotide
aacuagguggcccugccca

SEQ ID NO: 1881770 - RNA, 19 nt, Artificial Sequence
  Description of Artificial Sequence: Synthetic oligonucleotide
agaauguguuccgaguacc

SEQ ID NO: 1881771 - RNA, 19 nt, Artificial Sequence
  Description of Artificial Sequence: Synthetic oligonucleotide
aaagaaaugcagugcucca

SEQ ID NO: 1881772 - RNA, 19 nt, Artificial Sequence
  Description of Artificial Sequence: Synthetic oligonucleotide
auugucaucggcuguguug

SEQ ID NO: 1881773 - RNA, 19 nt, Artificial Sequence
  Description of Artificial Sequence: Synthetic oligonucleotide
ucugagaauguguuccgag

SEQ ID NO: 1881774 - RNA, 19 nt, Artificial Sequence
  Description of Artificial Sequence: Synthetic oligonucleotide
ugcauaacaucacucacua

SEQ ID NO: 1881775 - RNA, 19 nt, Artificial Sequence
  Description of Artificial Sequence: Synthetic oligonucleotide
uuuccuacugucugaagac

SEQ ID NO: 1881776 - RNA, 19 nt, Artificial Sequence
  Description of Artificial Sequence: Synthetic oligonucleotide
auaucacugaggcuugauc

SEQ ID NO: 1881777 - RNA, 19 nt, Artificial Sequence
  Description of Artificial Sequence: Synthetic oligonucleotide
aauccaaccaaagggaaaa

SEQ ID NO: 1881778 - RNA, 19 nt, Artificial Sequence
  Description of Artificial Sequence: Synthetic oligonucleotide
uauaagauucuggauccag

SEQ ID NO: 1881779 - RNA, 19 nt, Artificial Sequence
  Description of Artificial Sequence: Synthetic oligonucleotide
auuccuauggaggaauggg

SEQ ID NO: 1881780 - RNA, 19 nt, Artificial Sequence
  Description of Artificial Sequence: Synthetic oligonucleotide
uucauagcuugugagaaca

SEQ ID NO: 1881781 - RNA, 19 nt, Artificial Sequence
  Description of Artificial Sequence: Synthetic oligonucleotide
uuugcaaacuuugagcaaa

SEQ ID NO: 1881782 - RNA, 19 nt, Artificial Sequence
  Description of Artificial Sequence: Synthetic oligonucleotide
ugugagaacaugaauccuu

SEQ ID NO: 1881783 - RNA, 19 nt, Artificial Sequence
  Description of Artificial Sequence: Synthetic oligonucleotide
agcacuggcaccauauggc

SEQ ID NO: 1881784 - RNA, 19 nt, Artificial Sequence
  Description of Artificial Sequence: Synthetic oligonucleotide
ugcccuuuugcuaguagag

SEQ ID NO: 1881785 - RNA, 19 nt, Artificial Sequence
  Description of Artificial Sequence: Synthetic oligonucleotide
gagagacuagcuuuaagga

SEQ ID NO: 1881786 - RNA, 19 nt, Artificial Sequence
  Description of Artificial Sequence: Synthetic oligonucleotide
ugcaucuaugucuacauuu

SEQ ID NO: 1881787 - RNA, 19 nt, Artificial Sequence
  Description of Artificial Sequence: Synthetic oligonucleotide
uuuuagcaaucuuccaagc

SEQ ID NO: 1881788 - RNA, 19 nt, Artificial Sequence
  Description of Artificial Sequence: Synthetic oligonucleotide
ugugcuugccaacuaggug

SEQ ID NO: 1881789 - RNA, 19 nt, Artificial Sequence
  Description of Artificial Sequence: Synthetic oligonucleotide
uucuucauagcuugugaga

SEQ ID NO: 1881790 - RNA, 19 nt, Artificial Sequence
  Description of Artificial Sequence: Synthetic oligonucleotide
uggagugauacuuaauuuu

SEQ ID NO: 1881791 - RNA, 19 nt, Artificial Sequence
  Description of Artificial Sequence: Synthetic oligonucleotide
ucuucauagcuugugagaa

SEQ ID NO: 1881792 - RNA, 19 nt, Artificial Sequence
  Description of Artificial Sequence: Synthetic oligonucleotide
auccauaacugcaagcuuc

SEQ ID NO: 1881793 - RNA, 19 nt, Artificial Sequence
  Description of Artificial Sequence: Synthetic oligonucleotide
caaucuuccaagcuaguuc

SEQ ID NO: 1881794 - RNA, 19 nt, Artificial Sequence
  Description of Artificial Sequence: Synthetic oligonucleotide
cuuucgauuucuuuacauc

SEQ ID NO: 1881795 - RNA, 19 nt, Artificial Sequence
  Description of Artificial Sequence: Synthetic oligonucleotide
cacacacacacacacacac

SEQ ID NO: 1881796 - RNA, 19 nt, Artificial Sequence
  Description of Artificial Sequence: Synthetic oligonucleotide
uguccguugauauaagauu

SEQ ID NO: 1881797 - RNA, 19 nt, Artificial Sequence
  Description of Artificial Sequence: Synthetic oligonucleotide
agacuaaauugucuaauaa

SEQ ID NO: 1881798 - RNA, 19 nt, Artificial Sequence
  Description of Artificial Sequence: Synthetic oligonucleotide
uaacaccuaagaaaacuuc

SEQ ID NO: 1881799 - RNA, 19 nt, Artificial Sequence
  Description of Artificial Sequence: Synthetic oligonucleotide
acucacuaucauuuuagca

SEQ ID NO: 1881800 - RNA, 19 nt, Artificial Sequence
  Description of Artificial Sequence: Synthetic oligonucleotide
guuuccuacugucugaaga

SEQ ID NO: 1881801 - RNA, 19 nt, Artificial Sequence
  Description of Artificial Sequence: Synthetic oligonucleotide
gaagagggaauaaaguauc

SEQ ID NO: 1881802 - RNA, 19 nt, Artificial Sequence
  Description of Artificial Sequence: Synthetic oligonucleotide
acuagcuuuaaggauauaa

SEQ ID NO: 1881803 - RNA, 19 nt, Artificial Sequence
  Description of Artificial Sequence: Synthetic oligonucleotide
uugauauaagauucuggau

SEQ ID NO: 1881804 - RNA, 19 nt, Artificial Sequence
  Description of Artificial Sequence: Synthetic oligonucleotide
gaugaacugccccaaguca

SEQ ID NO: 1881805 - RNA, 19 nt, Artificial Sequence
  Description of Artificial Sequence: Synthetic oligonucleotide
uagauuucucuagugguug

SEQ ID NO: 1881806 - RNA, 19 nt, Artificial Sequence
  Description of Artificial Sequence: Synthetic oligonucleotide
caacuaagcagcagggcag

SEQ ID NO: 1881807 - RNA, 19 nt, Artificial Sequence
  Description of Artificial Sequence: Synthetic oligonucleotide
ugucuaauaaugucaccaa

SEQ ID NO: 1881808 - RNA, 19 nt, Artificial Sequence
  Description of Artificial Sequence: Synthetic oligonucleotide
ggauauaacaucacaggag

SEQ ID NO: 1881809 - RNA, 19 nt, Artificial Sequence
  Description of Artificial Sequence: Synthetic oligonucleotide
uugaugcucaaaguaaaac

SEQ ID NO: 1881810 - RNA, 19 nt, Artificial Sequence
  Description of Artificial Sequence: Synthetic oligonucleotide
aaugcucuagcaguggaaa

SEQ ID NO: 1881811 - RNA, 19 nt, Artificial Sequence
  Description of Artificial Sequence: Synthetic oligonucleotide
agcgaguguuucuuucccc

SEQ ID NO: 1881812 - RNA, 19 nt, Artificial Sequence
  Description of Artificial Sequence: Synthetic oligonucleotide
uugauccauaacugcaagc

SEQ ID NO: 1881813 - RNA, 19 nt, Artificial Sequence
  Description of Artificial Sequence: Synthetic oligonucleotide
ucauuuuagcaaucuucca

SEQ ID NO: 1881814 - RNA, 19 nt, Artificial Sequence
  Description of Artificial Sequence: Synthetic oligonucleotide
uguguauuccgaagaggga

SEQ ID NO: 1881815 - RNA, 19 nt, Artificial Sequence
  Description of Artificial Sequence: Synthetic oligonucleotide
uaaaacuaaaucugcccuu

SEQ ID NO: 1881816 - RNA, 19 nt, Artificial Sequence
  Description of Artificial Sequence: Synthetic oligonucleotide
guaaaacuaaaucugcccu

SEQ ID NO: 1881817 - RNA, 19 nt, Artificial Sequence
  Description of Artificial Sequence: Synthetic oligonucleotide
gaaaugcagugcuccauug

SEQ ID NO: 1881818 - RNA, 19 nt, Artificial Sequence
  Description of Artificial Sequence: Synthetic oligonucleotide
caagcuaguuccucuuggg

SEQ ID NO: 1881819 - RNA, 19 nt, Artificial Sequence
  Description of Artificial Sequence: Synthetic oligonucleotide
acucaaaagcgaguguuuc

SEQ ID NO: 1881820 - RNA, 19 nt, Artificial Sequence
  Description of Artificial Sequence: Synthetic oligonucleotide
augaacugccccaagucac

SEQ ID NO: 1881821 - RNA, 19 nt, Artificial Sequence
  Description of Artificial Sequence: Synthetic oligonucleotide
uuccuauggaggaaugggu

SEQ ID NO: 1881822 - RNA, 19 nt, Artificial Sequence
  Description of Artificial Sequence: Synthetic oligonucleotide
auaacaucacucacuauca

SEQ ID NO: 1881823 - RNA, 19 nt, Artificial Sequence
  Description of Artificial Sequence: Synthetic oligonucleotide
aaaacuaaaucugcccuuu

SEQ ID NO: 1881824 - RNA, 19 nt, Artificial Sequence
  Description of Artificial Sequence: Synthetic oligonucleotide
aggaaugauaucacugagg

SEQ ID NO: 1881825 - RNA, 19 nt, Artificial Sequence
  Description of Artificial Sequence: Synthetic oligonucleotide
uccuauggaggaauggguc

SEQ ID NO: 1881826 - RNA, 19 nt, Artificial Sequence
  Description of Artificial Sequence: Synthetic oligonucleotide
uugcuaguagaggagagac

SEQ ID NO: 1881827 - RNA, 19 nt, Artificial Sequence
  Description of Artificial Sequence: Synthetic oligonucleotide
uaguagaggagagacuagc

SEQ ID NO: 1881828 - RNA, 19 nt, Artificial Sequence
  Description of Artificial Sequence: Synthetic oligonucleotide
ucuuuccccaccuuauuaa

SEQ ID NO: 1881829 - RNA, 19 nt, Artificial Sequence
  Description of Artificial Sequence: Synthetic oligonucleotide
cucuagugguugaucauag

SEQ ID NO: 1881830 - RNA, 19 nt, Artificial Sequence
  Description of Artificial Sequence: Synthetic oligonucleotide
aaagccaacuaagcagcag

SEQ ID NO: 1881831 - RNA, 19 nt, Artificial Sequence
  Description of Artificial Sequence: Synthetic oligonucleotide
cauuuuagcaaucuuccaa

SEQ ID NO: 1881832 - RNA, 19 nt, Artificial Sequence
  Description of Artificial Sequence: Synthetic oligonucleotide
uguguuccgaguaccacau

SEQ ID NO: 1881833 - RNA, 19 nt, Artificial Sequence
  Description of Artificial Sequence: Synthetic oligonucleotide
agcuuuaaggauauaacau

SEQ ID NO: 1881834 - RNA, 19 nt, Artificial Sequence
  Description of Artificial Sequence: Synthetic oligonucleotide
aguguuucuuuccccaccu

SEQ ID NO: 1881835 - RNA, 19 nt, Artificial Sequence
  Description of Artificial Sequence: Synthetic oligonucleotide
uauguccguugauauaaga

SEQ ID NO: 1881836 - RNA, 19 nt, Artificial Sequence
  Description of Artificial Sequence: Synthetic oligonucleotide
gagaauguguuccgaguac

SEQ ID NO: 1881837 - RNA, 19 nt, Artificial Sequence
  Description of Artificial Sequence: Synthetic oligonucleotide
aaucauguucugucaccca

SEQ ID NO: 1881838 - RNA, 19 nt, Artificial Sequence
  Description of Artificial Sequence: Synthetic oligonucleotide
cugguuuugagucacagcu

SEQ ID NO: 1881839 - RNA, 19 nt, Artificial Sequence
  Description of Artificial Sequence: Synthetic oligonucleotide
gauucucggaugaacugcc

SEQ ID NO: 1881840 - RNA, 19 nt, Artificial Sequence
  Description of Artificial Sequence: Synthetic oligonucleotide
gacuaaauugucuaauaau

SEQ ID NO: 1881841 - RNA, 19 nt, Artificial Sequence
  Description of Artificial Sequence: Synthetic oligonucleotide
uugugacucacuguguuac

SEQ ID NO: 1881842 - RNA, 19 nt, Artificial Sequence
  Description of Artificial Sequence: Synthetic oligonucleotide
cuaaauugucuaauaaugu

SEQ ID NO: 1881843 - RNA, 19 nt, Artificial Sequence
  Description of Artificial Sequence: Synthetic oligonucleotide
uuccgaguaccacauggga

SEQ ID NO: 1881844 - RNA, 19 nt, Artificial Sequence
  Description of Artificial Sequence: Synthetic oligonucleotide
ucuugugacucacuguguu

SEQ ID NO: 1881845 - RNA, 19 nt, Artificial Sequence
  Description of Artificial Sequence: Synthetic oligonucleotide
gcuuuaaggauauaacauc

SEQ ID NO: 1881846 - RNA, 19 nt, Artificial Sequence
  Description of Artificial Sequence: Synthetic oligonucleotide
agacacucaaaagcgagug

SEQ ID NO: 1881847 - RNA, 19 nt, Artificial Sequence
  Description of Artificial Sequence: Synthetic oligonucleotide
auaaaguaucugaagcaug

SEQ ID NO: 1881848 - RNA, 19 nt, Artificial Sequence
  Description of Artificial Sequence: Synthetic oligonucleotide
uguauuccgaagagggaau

SEQ ID NO: 1881849 - RNA, 19 nt, Artificial Sequence
  Description of Artificial Sequence: Synthetic oligonucleotide
uccguugauauaagauucu

SEQ ID NO: 1881850 - RNA, 19 nt, Artificial Sequence
  Description of Artificial Sequence: Synthetic oligonucleotide
cauguguauuccgaagagg

SEQ ID NO: 1881851 - RNA, 19 nt, Artificial Sequence
  Description of Artificial Sequence: Synthetic oligonucleotide
ucaccaauaccacucugua

SEQ ID NO: 1881852 - RNA, 19 nt, Artificial Sequence
  Description of Artificial Sequence: Synthetic oligonucleotide
aguaucugaagcauggcau

SEQ ID NO: 1881853 - RNA, 19 nt, Artificial Sequence
  Description of Artificial Sequence: Synthetic oligonucleotide
auguguuccgaguaccaca

SEQ ID NO: 1881854 - RNA, 19 nt, Artificial Sequence
  Description of Artificial Sequence: Synthetic oligonucleotide
uccgaguaccacaugggaa

SEQ ID NO: 1881855 - RNA, 19 nt, Artificial Sequence
  Description of Artificial Sequence: Synthetic oligonucleotide
gagugugcuugccaacuag

SEQ ID NO: 1881856 - RNA, 19 nt, Artificial Sequence
  Description of Artificial Sequence: Synthetic oligonucleotide
uaccauuaugugugcaucu

SEQ ID NO: 1881857 - RNA, 19 nt, Artificial Sequence
  Description of Artificial Sequence: Synthetic oligonucleotide
ugcucuagcaguggaaaga

SEQ ID NO: 1881858 - RNA, 19 nt, Artificial Sequence
  Description of Artificial Sequence: Synthetic oligonucleotide
ggaaacaacaaugcucuag

SEQ ID NO: 1881859 - RNA, 19 nt, Artificial Sequence
  Description of Artificial Sequence: Synthetic oligonucleotide
uuugcuaguagaggagaga

SEQ ID NO: 1881860 - RNA, 19 nt, Artificial Sequence
  Description of Artificial Sequence: Synthetic oligonucleotide
gagacuagcuuuaaggaua

SEQ ID NO: 1881861 - RNA, 19 nt, Artificial Sequence
  Description of Artificial Sequence: Synthetic oligonucleotide
aucauguucugucacccaa

SEQ ID NO: 1881862 - RNA, 19 nt, Artificial Sequence
  Description of Artificial Sequence: Synthetic oligonucleotide
ucuuggacugucucucgca

SEQ ID NO: 1881863 - RNA, 19 nt, Artificial Sequence
  Description of Artificial Sequence: Synthetic oligonucleotide
auuuaacaacagaucuugg

SEQ ID NO: 1881864 - RNA, 19 nt, Artificial Sequence
  Description of Artificial Sequence: Synthetic oligonucleotide
cagcgagugaguuuccuac

SEQ ID NO: 1881865 - RNA, 19 nt, Artificial Sequence
  Description of Artificial Sequence: Synthetic oligonucleotide
uuaccauuaugugugcauc

SEQ ID NO: 1881866 - RNA, 19 nt, Artificial Sequence
  Description of Artificial Sequence: Synthetic oligonucleotide
ucaaaagcgaguguuucuu

SEQ ID NO: 1881867 - RNA, 19 nt, Artificial Sequence
  Description of Artificial Sequence: Synthetic oligonucleotide
gagugaguuuccuacuguc

SEQ ID NO: 1881868 - RNA, 19 nt, Artificial Sequence
  Description of Artificial Sequence: Synthetic oligonucleotide
ucugcccuuuugcuaguag

SEQ ID NO: 1881869 - RNA, 19 nt, Artificial Sequence
  Description of Artificial Sequence: Synthetic oligonucleotide
gcuugugagaacaugaauc

SEQ ID NO: 1881870 - RNA, 19 nt, Artificial Sequence
  Description of Artificial Sequence: Synthetic oligonucleotide
accacucuguaucuuguga

SEQ ID NO: 1881871 - RNA, 19 nt, Artificial Sequence
  Description of Artificial Sequence: Synthetic oligonucleotide
agagggaauaaaguaucug

SEQ ID NO: 1881872 - RNA, 19 nt, Artificial Sequence
  Description of Artificial Sequence: Synthetic oligonucleotide
guugaucauagugugccug

SEQ ID NO: 1881873 - RNA, 19 nt, Artificial Sequence
  Description of Artificial Sequence: Synthetic oligonucleotide
aaaggcgacugcacaguuc

SEQ ID NO: 1881874 - RNA, 19 nt, Artificial Sequence
  Description of Artificial Sequence: Synthetic oligonucleotide
cacucacuaucauuuuagc

SEQ ID NO: 1881875 - RNA, 19 nt, Artificial Sequence
  Description of Artificial Sequence: Synthetic oligonucleotide
acaaugcucuagcagugga

SEQ ID NO: 1881876 - RNA, 19 nt, Artificial Sequence
  Description of Artificial Sequence: Synthetic oligonucleotide
cuaguagaggagagacuag

SEQ ID NO: 1881877 - RNA, 19 nt, Artificial Sequence
  Description of Artificial Sequence: Synthetic oligonucleotide
cagauucucggaugaacug

SEQ ID NO: 1881878 - RNA, 19 nt, Artificial Sequence
  Description of Artificial Sequence: Synthetic oligonucleotide
guccguugauauaagauuc

SEQ ID NO: 1881879 - RNA, 19 nt, Artificial Sequence
  Description of Artificial Sequence: Synthetic oligonucleotide
uagcuugugagaacaugaa

SEQ ID NO: 1881880 - RNA, 19 nt, Artificial Sequence
  Description of Artificial Sequence: Synthetic oligonucleotide
uuugagucacagcuuugua

SEQ ID NO: 1881881 - RNA, 19 nt, Artificial Sequence
  Description of Artificial Sequence: Synthetic oligonucleotide
uucuuuacaucagguucag

SEQ ID NO: 1881882 - RNA, 19 nt, Artificial Sequence
  Description of Artificial Sequence: Synthetic oligonucleotide
aagagggaauaaaguaucu

SEQ ID NO: 1881883 - RNA, 19 nt, Artificial Sequence
  Description of Artificial Sequence: Synthetic oligonucleotide
gacugcacaguucccacuc

SEQ ID NO: 1881884 - RNA, 19 nt, Artificial Sequence
  Description of Artificial Sequence: Synthetic oligonucleotide
agugugcuugccaacuagg

SEQ ID NO: 1881885 - RNA, 19 nt, Artificial Sequence
  Description of Artificial Sequence: Synthetic oligonucleotide
aaaaggcgacugcacaguu

SEQ ID NO: 1881886 - RNA, 19 nt, Artificial Sequence
  Description of Artificial Sequence: Synthetic oligonucleotide
ugucaccaauaccacucug

SEQ ID NO: 1881887 - RNA, 19 nt, Artificial Sequence
  Description of Artificial Sequence: Synthetic oligonucleotide
aagaaaugcagugcuccau

SEQ ID NO: 1881888 - RNA, 19 nt, Artificial Sequence
  Description of Artificial Sequence: Synthetic oligonucleotide
cucucgcacucuuucuugg

SEQ ID NO: 1881889 - RNA, 19 nt, Artificial Sequence
  Description of Artificial Sequence: Synthetic oligonucleotide
ugcuaguagaggagagacu

SEQ ID NO: 1881890 - RNA, 19 nt, Artificial Sequence
  Description of Artificial Sequence: Synthetic oligonucleotide
ugugacucacuguguuacc

SEQ ID NO: 1881891 - RNA, 19 nt, Artificial Sequence
  Description of Artificial Sequence: Synthetic oligonucleotide
cuucauagcuugugagaac

SEQ ID NO: 1881892 - RNA, 19 nt, Artificial Sequence
  Description of Artificial Sequence: Synthetic oligonucleotide
auguucugucacccaaaag

SEQ ID NO: 1881893 - RNA, 19 nt, Artificial Sequence
  Description of Artificial Sequence: Synthetic oligonucleotide
guuccgaguaccacauggg

SEQ ID NO: 1881894 - RNA, 19 nt, Artificial Sequence
  Description of Artificial Sequence: Synthetic oligonucleotide
cucagauucucggaugaac

SEQ ID NO: 1881895 - RNA, 19 nt, Artificial Sequence
  Description of Artificial Sequence: Synthetic oligonucleotide
ucggcuguguugaggaauc

SEQ ID NO: 1881896 - RNA, 19 nt, Artificial Sequence
  Description of Artificial Sequence: Synthetic oligonucleotide
auaagauucuggauccaga

SEQ ID NO: 1881897 - RNA, 19 nt, Artificial Sequence
  Description of Artificial Sequence: Synthetic oligonucleotide
agauuucucuagugguuga

SEQ ID NO: 1881898 - RNA, 19 nt, Artificial Sequence
  Description of Artificial Sequence: Synthetic oligonucleotide
cacacacacacauauauau

SEQ ID NO: 1881899 - RNA, 19 nt, Artificial Sequence
  Description of Artificial Sequence: Synthetic oligonucleotide
uccuuucgauuucuuuaca

SEQ ID NO: 1881900 - RNA, 19 nt, Artificial Sequence
  Description of Artificial Sequence: Synthetic oligonucleotide
agcuugugagaacaugaau

SEQ ID NO: 1881901 - RNA, 19 nt, Artificial Sequence
  Description of Artificial Sequence: Synthetic oligonucleotide
gaaugggucuugaugcuca

SEQ ID NO: 1881902 - RNA, 19 nt, Artificial Sequence
  Description of Artificial Sequence: Synthetic oligonucleotide
ugcaaacuuugagcaaaag

SEQ ID NO: 1881903 - RNA, 19 nt, Artificial Sequence
  Description of Artificial Sequence: Synthetic oligonucleotide
uuccuuauuucugguuuug

SEQ ID NO: 1881904 - RNA, 19 nt, Artificial Sequence
  Description of Artificial Sequence: Synthetic oligonucleotide
ucucuagugguugaucaua

SEQ ID NO: 1881905 - RNA, 19 nt, Artificial Sequence
  Description of Artificial Sequence: Synthetic oligonucleotide
acaccuaagaaaacuuccu

SEQ ID NO: 1881906 - RNA, 19 nt, Artificial Sequence
  Description of Artificial Sequence: Synthetic oligonucleotide
ggugcaaagccaacuaagc

SEQ ID NO: 1881907 - RNA, 19 nt, Artificial Sequence
  Description of Artificial Sequence: Synthetic oligonucleotide
aacuuccuuucucucuaaa

SEQ ID NO: 1881908 - RNA, 19 nt, Artificial Sequence
  Description of Artificial Sequence: Synthetic oligonucleotide
ucuagugguugaucauagu

SEQ ID NO: 1881909 - RNA, 19 nt, Artificial Sequence
  Description of Artificial Sequence: Synthetic oligonucleotide
uagugugccugcugcauaa

SEQ ID NO: 1881910 - RNA, 19 nt, Artificial Sequence
  Description of Artificial Sequence: Synthetic oligonucleotide
gcacaguucccacucacag

SEQ ID NO: 1881911 - RNA, 19 nt, Artificial Sequence
  Description of Artificial Sequence: Synthetic oligonucleotide
uacugucugaagacagaaa

SEQ ID NO: 1881912 - RNA, 19 nt, Artificial Sequence
  Description of Artificial Sequence: Synthetic oligonucleotide
auauaacaucacaggagug

SEQ ID NO: 1881913 - RNA, 19 nt, Artificial Sequence
  Description of Artificial Sequence: Synthetic oligonucleotide
uugcaaacuuugagcaaaa

SEQ ID NO: 1881914 - RNA, 19 nt, Artificial Sequence
  Description of Artificial Sequence: Synthetic oligonucleotide
uaucugaagcauggcauuc

SEQ ID NO: 1881915 - RNA, 19 nt, Artificial Sequence
  Description of Artificial Sequence: Synthetic oligonucleotide
uguuaccauuaugugugca

SEQ ID NO: 1881916 - RNA, 19 nt, Artificial Sequence
  Description of Artificial Sequence: Synthetic oligonucleotide
agccaacuaagcagcaggg

SEQ ID NO: 1881917 - RNA, 19 nt, Artificial Sequence
  Description of Artificial Sequence: Synthetic oligonucleotide
guguauuccgaagagggaa

SEQ ID NO: 1881918 - RNA, 19 nt, Artificial Sequence
  Description of Artificial Sequence: Synthetic oligonucleotide
uugccaacuagguggcccu

SEQ ID NO: 1881919 - RNA, 19 nt, Artificial Sequence
  Description of Artificial Sequence: Synthetic oligonucleotide
acugaggcuugauccauaa

SEQ ID NO: 1881920 - RNA, 19 nt, Artificial Sequence
  Description of Artificial Sequence: Synthetic oligonucleotide
ugucucucgcacucuuucu

SEQ ID NO: 1881921 - RNA, 19 nt, Artificial Sequence
  Description of Artificial Sequence: Synthetic oligonucleotide
aaacuuccuuucucucuaa

SEQ ID NO: 1881922 - RNA, 19 nt, Artificial Sequence
  Description of Artificial Sequence: Synthetic oligonucleotide
ucuuuacaucagguucagg

SEQ ID NO: 1881923 - RNA, 19 nt, Artificial Sequence
  Description of Artificial Sequence: Synthetic oligonucleotide
uuucuuuccccaccuuauu

SEQ ID NO: 1881924 - RNA, 19 nt, Artificial Sequence
  Description of Artificial Sequence: Synthetic oligonucleotide
agugaguuuccuacugucu

SEQ ID NO: 1881925 - RNA, 19 nt, Artificial Sequence
  Description of Artificial Sequence: Synthetic oligonucleotide
auguccguugauauaagau

SEQ ID NO: 1881926 - RNA, 19 nt, Artificial Sequence
  Description of Artificial Sequence: Synthetic oligonucleotide
ucgcacucuuucuuggaaa

SEQ ID NO: 1881927 - RNA, 19 nt, Artificial Sequence
  Description of Artificial Sequence: Synthetic oligonucleotide
gucuugaugcucaaaguaa

SEQ ID NO: 1881928 - RNA, 19 nt, Artificial Sequence
  Description of Artificial Sequence: Synthetic oligonucleotide
uauuccgaagagggaauaa

SEQ ID NO: 1881929 - RNA, 19 nt, Artificial Sequence
  Description of Artificial Sequence: Synthetic oligonucleotide
ugacucacuguguuaccau

SEQ ID NO: 1881930 - RNA, 19 nt, Artificial Sequence
  Description of Artificial Sequence: Synthetic oligonucleotide
uaauguccucugugaagga

SEQ ID NO: 1881931 - RNA, 19 nt, Artificial Sequence
  Description of Artificial Sequence: Synthetic oligonucleotide
acuuugagcaaaagcagua

SEQ ID NO: 1881932 - RNA, 19 nt, Artificial Sequence
  Description of Artificial Sequence: Synthetic oligonucleotide
uauggaggaaugggucuug

SEQ ID NO: 1881933 - RNA, 19 nt, Artificial Sequence
  Description of Artificial Sequence: Synthetic oligonucleotide
cugcugcauaacaucacuc

SEQ ID NO: 1881934 - RNA, 19 nt, Artificial Sequence
  Description of Artificial Sequence: Synthetic oligonucleotide
auauacacacacacacaca

SEQ ID NO: 1881935 - RNA, 19 nt, Artificial Sequence
  Description of Artificial Sequence: Synthetic oligonucleotide
gaacaugaauccuuucgau

SEQ ID NO: 1881936 - RNA, 19 nt, Artificial Sequence
  Description of Artificial Sequence: Synthetic oligonucleotide
ugguuuugagucacagcuu

SEQ ID NO: 1881937 - RNA, 19 nt, Artificial Sequence
  Description of Artificial Sequence: Synthetic oligonucleotide
cuuuugcuaguagaggaga

SEQ ID NO: 1881938 - RNA, 19 nt, Artificial Sequence
  Description of Artificial Sequence: Synthetic oligonucleotide
auuccgaagagggaauaaa

SEQ ID NO: 1881939 - RNA, 19 nt, Artificial Sequence
  Description of Artificial Sequence: Synthetic oligonucleotide
caaagggaaaaguuguuau

SEQ ID NO: 1881940 - RNA, 19 nt, Artificial Sequence
  Description of Artificial Sequence: Synthetic oligonucleotide
ucauagcuugugagaacau

SEQ ID NO: 1881941 - RNA, 19 nt, Artificial Sequence
  Description of Artificial Sequence: Synthetic oligonucleotide
gaauguguuccgaguacca

SEQ ID NO: 1881942 - RNA, 19 nt, Artificial Sequence
  Description of Artificial Sequence: Synthetic oligonucleotide
agcgagugaguuuccuacu

SEQ ID NO: 1881943 - RNA, 19 nt, Artificial Sequence
  Description of Artificial Sequence: Synthetic oligonucleotide
ucucgcacucuuucuugga

SEQ ID NO: 1881944 - RNA, 19 nt, Artificial Sequence
  Description of Artificial Sequence: Synthetic oligonucleotide
ugaagacuggggagacacu

SEQ ID NO: 1881945 - RNA, 19 nt, Artificial Sequence
  Description of Artificial Sequence: Synthetic oligonucleotide
auucucggaugaacugccc

SEQ ID NO: 1881946 - RNA, 19 nt, Artificial Sequence
  Description of Artificial Sequence: Synthetic oligonucleotide
uuucugguuuugagucaca

SEQ ID NO: 1881947 - RNA, 19 nt, Artificial Sequence
  Description of Artificial Sequence: Synthetic oligonucleotide
cacacacacacacauauau

SEQ ID NO: 1881948 - RNA, 19 nt, Artificial Sequence
  Description of Artificial Sequence: Synthetic oligonucleotide
aggggagugugcuugccaa

SEQ ID NO: 1881949 - RNA, 19 nt, Artificial Sequence
  Description of Artificial Sequence: Synthetic oligonucleotide
agacuggggagacacucaa

SEQ ID NO: 1881950 - RNA, 19 nt, Artificial Sequence
  Description of Artificial Sequence: Synthetic oligonucleotide
gaauccaaccaaagggaaa

SEQ ID NO: 1881951 - RNA, 19 nt, Artificial Sequence
  Description of Artificial Sequence: Synthetic oligonucleotide
caucacaggagugagugaa

SEQ ID NO: 1881952 - RNA, 19 nt, Artificial Sequence
  Description of Artificial Sequence: Synthetic oligonucleotide
guuaccauuaugugugcau

SEQ ID NO: 1881953 - RNA, 19 nt, Artificial Sequence
  Description of Artificial Sequence: Synthetic oligonucleotide
acccaaaagaaggaaugau

SEQ ID NO: 1881954 - RNA, 19 nt, Artificial Sequence
  Description of Artificial Sequence: Synthetic oligonucleotide
cacacacacacacacauau

SEQ ID NO: 1881955 - RNA, 19 nt, Artificial Sequence
  Description of Artificial Sequence: Synthetic oligonucleotide
gcuaguagaggagagacua

SEQ ID NO: 1881956 - RNA, 19 nt, Artificial Sequence
  Description of Artificial Sequence: Synthetic oligonucleotide
aagcauccuucccugcgua

SEQ ID NO: 1881957 - RNA, 19 nt, Artificial Sequence
  Description of Artificial Sequence: Synthetic oligonucleotide
ccaacuaagcagcagggca

SEQ ID NO: 1881958 - RNA, 19 nt, Artificial Sequence
  Description of Artificial Sequence: Synthetic oligonucleotide
gaaugauaucacugaggcu

SEQ ID NO: 1881959 - RNA, 19 nt, Artificial Sequence
  Description of Artificial Sequence: Synthetic oligonucleotide
acaucacaggagugaguga

SEQ ID NO: 1881960 - RNA, 19 nt, Artificial Sequence
  Description of Artificial Sequence: Synthetic oligonucleotide
auagugugccugcugcaua

SEQ ID NO: 1881961 - RNA, 19 nt, Artificial Sequence
  Description of Artificial Sequence: Synthetic oligonucleotide
ggcaccauauggccagggg

SEQ ID NO: 1881962 - RNA, 19 nt, Artificial Sequence
  Description of Artificial Sequence: Synthetic oligonucleotide
cugcccuuuugcuaguaga

SEQ ID NO: 1881963 - RNA, 19 nt, Artificial Sequence
  Description of Artificial Sequence: Synthetic oligonucleotide
acuaagcagcagggcagcg

SEQ ID NO: 1881964 - RNA, 19 nt, Artificial Sequence
  Description of Artificial Sequence: Synthetic oligonucleotide
ggaagacuaaauugucuaa

SEQ ID NO: 1881965 - RNA, 19 nt, Artificial Sequence
  Description of Artificial Sequence: Synthetic oligonucleotide
guuuugagucacagcuuug

SEQ ID NO: 1881966 - RNA, 19 nt, Artificial Sequence
  Description of Artificial Sequence: Synthetic oligonucleotide
cugcauaacaucacucacu

SEQ ID NO: 1881967 - RNA, 19 nt, Artificial Sequence
  Description of Artificial Sequence: Synthetic oligonucleotide
ucccacucacagugaagac

SEQ ID NO: 1881968 - RNA, 19 nt, Artificial Sequence
  Description of Artificial Sequence: Synthetic oligonucleotide
guauguccguugauauaag

SEQ ID NO: 1881969 - RNA, 19 nt, Artificial Sequence
  Description of Artificial Sequence: Synthetic oligonucleotide
caacuagguggcccugccc

SEQ ID NO: 1881970 - RNA, 19 nt, Artificial Sequence
  Description of Artificial Sequence: Synthetic oligonucleotide
cacacacacacacacacau

SEQ ID NO: 1881971 - RNA, 19 nt, Artificial Sequence
  Description of Artificial Sequence: Synthetic oligonucleotide
acugcacaguucccacuca

SEQ ID NO: 1881972 - RNA, 19 nt, Artificial Sequence
  Description of Artificial Sequence: Synthetic oligonucleotide
gcacuggcaccauauggcc

SEQ ID NO: 1881973 - RNA, 19 nt, Artificial Sequence
  Description of Artificial Sequence: Synthetic oligonucleotide
gugacucacuguguuacca

SEQ ID NO: 1881974 - RNA, 19 nt, Artificial Sequence
  Description of Artificial Sequence: Synthetic oligonucleotide
auccaaccaaagggaaaag

SEQ ID NO: 1881975 - RNA, 19 nt, Artificial Sequence
  Description of Artificial Sequence: Synthetic oligonucleotide
cuuugagcaaaagcaguaa

SEQ ID NO: 1881976 - RNA, 19 nt, Artificial Sequence
  Description of Artificial Sequence: Synthetic oligonucleotide
cuacugucugaagacagaa

SEQ ID NO: 1881977 - RNA, 19 nt, Artificial Sequence
  Description of Artificial Sequence: Synthetic oligonucleotide
caguggaaagaaaugcagu

SEQ ID NO: 1881978 - RNA, 19 nt, Artificial Sequence
  Description of Artificial Sequence: Synthetic oligonucleotide
uccuugcacccacuucuuc

SEQ ID NO: 1881979 - RNA, 19 nt, Artificial Sequence
  Description of Artificial Sequence: Synthetic oligonucleotide
caucuaugucuacauuuaa

SEQ ID NO: 1881980 - RNA, 19 nt, Artificial Sequence
  Description of Artificial Sequence: Synthetic oligonucleotide
auacacacacacacacaca

SEQ ID NO: 1881981 - RNA, 19 nt, Artificial Sequence
  Description of Artificial Sequence: Synthetic oligonucleotide
gucuaauaaugucaccaau

SEQ ID NO: 1881982 - RNA, 19 nt, Artificial Sequence
  Description of Artificial Sequence: Synthetic oligonucleotide
agacuagcuuuaaggauau

SEQ ID NO: 1881983 - RNA, 19 nt, Artificial Sequence
  Description of Artificial Sequence: Synthetic oligonucleotide
ggcuugauccauaacugca

SEQ ID NO: 1881984 - RNA, 19 nt, Artificial Sequence
  Description of Artificial Sequence: Synthetic oligonucleotide
ugauaucacugaggcuuga

SEQ ID NO: 1881985 - RNA, 19 nt, Artificial Sequence
  Description of Artificial Sequence: Synthetic oligonucleotide
auauggccaggggagugug

SEQ ID NO: 1881986 - RNA, 19 nt, Artificial Sequence
  Description of Artificial Sequence: Synthetic oligonucleotide
gcgagugaguuuccuacug

SEQ ID NO: 1881987 - RNA, 19 nt, Artificial Sequence
  Description of Artificial Sequence: Synthetic oligonucleotide
agugugccugcugcauaac

SEQ ID NO: 1881988 - RNA, 19 nt, Artificial Sequence
  Description of Artificial Sequence: Synthetic oligonucleotide
caaagccaacuaagcagca

SEQ ID NO: 1881989 - RNA, 19 nt, Artificial Sequence
  Description of Artificial Sequence: Synthetic oligonucleotide
aucugagaauguguuccga

SEQ ID NO: 1881990 - RNA, 19 nt, Artificial Sequence
  Description of Artificial Sequence: Synthetic oligonucleotide
agaggagagacuagcuuua

SEQ ID NO: 1881991 - RNA, 19 nt, Artificial Sequence
  Description of Artificial Sequence: Synthetic oligonucleotide
gcauggcauuccuauggag

SEQ ID NO: 1881992 - RNA, 19 nt, Artificial Sequence
  Description of Artificial Sequence: Synthetic oligonucleotide
cuugugacucacuguguua

SEQ ID NO: 1881993 - RNA, 19 nt, Artificial Sequence
  Description of Artificial Sequence: Synthetic oligonucleotide
guaacaccuaagaaaacuu

SEQ ID NO: 1881994 - RNA, 19 nt, Artificial Sequence
  Description of Artificial Sequence: Synthetic oligonucleotide
cuuccaagcuaguuccucu

SEQ ID NO: 1881995 - RNA, 19 nt, Artificial Sequence
  Description of Artificial Sequence: Synthetic oligonucleotide
ccgaagagggaauaaagua

SEQ ID NO: 1881996 - RNA, 19 nt, Artificial Sequence
  Description of Artificial Sequence: Synthetic oligonucleotide
gauccauaacugcaagcuu

SEQ ID NO: 1881997 - RNA, 19 nt, Artificial Sequence
  Description of Artificial Sequence: Synthetic oligonucleotide
gcccuuuugcuaguagagg

SEQ ID NO: 1881998 - RNA, 19 nt, Artificial Sequence
  Description of Artificial Sequence: Synthetic oligonucleotide
cugaauuaauguccucugu

SEQ ID NO: 1881999 - RNA, 19 nt, Artificial Sequence
  Description of Artificial Sequence: Synthetic oligonucleotide
gguuuugagucacagcuuu

SEQ ID NO: 1882000 - RNA, 19 nt, Artificial Sequence
  Description of Artificial Sequence: Synthetic oligonucleotide
cccaaaagaaggaaugaua

SEQ ID NO: 1882001 - RNA, 19 nt, Artificial Sequence
  Description of Artificial Sequence: Synthetic oligonucleotide
gcgaguguuucuuucccca

SEQ ID NO: 1882002 - RNA, 19 nt, Artificial Sequence
  Description of Artificial Sequence: Synthetic oligonucleotide
cugugaaggaagacuaaau

SEQ ID NO: 1882003 - RNA, 19 nt, Artificial Sequence
  Description of Artificial Sequence: Synthetic oligonucleotide
cugaggcuugauccauaac

SEQ ID NO: 1882004 - RNA, 19 nt, Artificial Sequence
  Description of Artificial Sequence: Synthetic oligonucleotide
ggaaagaaaugcagugcuc

SEQ ID NO: 1882005 - RNA, 19 nt, Artificial Sequence
  Description of Artificial Sequence: Synthetic oligonucleotide
cuggagugauacuuaauuu

SEQ ID NO: 1882006 - RNA, 19 nt, Artificial Sequence
  Description of Artificial Sequence: Synthetic oligonucleotide
acucacuguguuaccauua

SEQ ID NO: 1882007 - RNA, 19 nt, Artificial Sequence
  Description of Artificial Sequence: Synthetic oligonucleotide
acacacacacacauauaua

SEQ ID NO: 1882008 - RNA, 19 nt, Artificial Sequence
  Description of Artificial Sequence: Synthetic oligonucleotide
acacacacacacacacaca

SEQ ID NO: 1882009 - RNA, 19 nt, Artificial Sequence
  Description of Artificial Sequence: Synthetic oligonucleotide
gagacacucaaaagcgagu

SEQ ID NO: 1882010 - RNA, 19 nt, Artificial Sequence
  Description of Artificial Sequence: Synthetic oligonucleotide
ggagugagugaaaugugaa

SEQ ID NO: 1882011 - RNA, 19 nt, Artificial Sequence
  Description of Artificial Sequence: Synthetic oligonucleotide
ccgaguaccacaugggaaa

SEQ ID NO: 1882012 - RNA, 19 nt, Artificial Sequence
  Description of Artificial Sequence: Synthetic oligonucleotide
cuaagcagcagggcagcga

SEQ ID NO: 1882013 - RNA, 19 nt, Artificial Sequence
  Description of Artificial Sequence: Synthetic oligonucleotide
agcauccuucccugcguau

SEQ ID NO: 1882014 - RNA, 19 nt, Artificial Sequence
  Description of Artificial Sequence: Synthetic oligonucleotide
cucugugaaggaagacuaa

SEQ ID NO: 1882015 - RNA, 19 nt, Artificial Sequence
  Description of Artificial Sequence: Synthetic oligonucleotide
ggaauccaaccaaagggaa

SEQ ID NO: 1882016 - RNA, 19 nt, Artificial Sequence
  Description of Artificial Sequence: Synthetic oligonucleotide
ccuugcacccacuucuuca

SEQ ID NO: 1882017 - RNA, 19 nt, Artificial Sequence
  Description of Artificial Sequence: Synthetic oligonucleotide
caguauuuccuugcaccca

SEQ ID NO: 1882018 - RNA, 19 nt, Artificial Sequence
  Description of Artificial Sequence: Synthetic oligonucleotide
ccucugugaaggaagacua

SEQ ID NO: 1882019 - RNA, 19 nt, Artificial Sequence
  Description of Artificial Sequence: Synthetic oligonucleotide
accaaagggaaaaguuguu

SEQ ID NO: 1882020 - RNA, 19 nt, Artificial Sequence
  Description of Artificial Sequence: Synthetic oligonucleotide
gacucacuguguuaccauu

SEQ ID NO: 1882021 - RNA, 19 nt, Artificial Sequence
  Description of Artificial Sequence: Synthetic oligonucleotide
ucccugcguauguccguug

SEQ ID NO: 1882022 - RNA, 19 nt, Artificial Sequence
  Description of Artificial Sequence: Synthetic oligonucleotide
auggaggaaugggucuuga

SEQ ID NO: 1882023 - RNA, 19 nt, Artificial Sequence
  Description of Artificial Sequence: Synthetic oligonucleotide
cguauguccguugauauaa

SEQ ID NO: 1882024 - RNA, 19 nt, Artificial Sequence
  Description of Artificial Sequence: Synthetic oligonucleotide
ccaacuagguggcccugcc

SEQ ID NO: 1882025 - RNA, 19 nt, Artificial Sequence
  Description of Artificial Sequence: Synthetic oligonucleotide
gcaucuaugucuacauuua

SEQ ID NO: 1882026 - RNA, 19 nt, Artificial Sequence
  Description of Artificial Sequence: Synthetic oligonucleotide
cgcacucuuucuuggaaac

SEQ ID NO: 1882027 - RNA, 19 nt, Artificial Sequence
  Description of Artificial Sequence: Synthetic oligonucleotide
ccguugauauaagauucug

SEQ ID NO: 1882028 - RNA, 19 nt, Artificial Sequence
  Description of Artificial Sequence: Synthetic oligonucleotide
cuugcacccacuucuucau

SEQ ID NO: 1882029 - RNA, 19 nt, Artificial Sequence
  Description of Artificial Sequence: Synthetic oligonucleotide
gcauccuucccugcguaug

SEQ ID NO: 1882030 - RNA, 19 nt, Artificial Sequence
  Description of Artificial Sequence: Synthetic oligonucleotide
uucccugcguauguccguu

SEQ ID NO: 1882031 - RNA, 19 nt, Artificial Sequence
  Description of Artificial Sequence: Synthetic oligonucleotide
gauaucacugaggcuugau

SEQ ID NO: 1882032 - RNA, 19 nt, Artificial Sequence
  Description of Artificial Sequence: Synthetic oligonucleotide
guauuccgaagagggaaua

SEQ ID NO: 1882033 - RNA, 19 nt, Artificial Sequence
  Description of Artificial Sequence: Synthetic oligonucleotide
gagucacagcuuuguagau

SEQ ID NO: 1882034 - RNA, 19 nt, Artificial Sequence
  Description of Artificial Sequence: Synthetic oligonucleotide
ggaaugggucuugaugcuc

SEQ ID NO: 1882035 - RNA, 19 nt, Artificial Sequence
  Description of Artificial Sequence: Synthetic oligonucleotide
gcgacugcacaguucccac

SEQ ID NO: 1882036 - RNA, 19 nt, Artificial Sequence
  Description of Artificial Sequence: Synthetic oligonucleotide
ggccaggggagugugcuug

SEQ ID NO: 1882037 - RNA, 19 nt, Artificial Sequence
  Description of Artificial Sequence: Synthetic oligonucleotide
aggcgacugcacaguuccc

SEQ ID NO: 1882038 - RNA, 19 nt, Artificial Sequence
  Description of Artificial Sequence: Synthetic oligonucleotide
cgugccacaggugcaaagc

SEQ ID NO: 1882039 - RNA, 19 nt, Artificial Sequence
  Description of Artificial Sequence: Synthetic oligonucleotide
cucuagcaguggaaagaaa

SEQ ID NO: 1882040 - RNA, 19 nt, Artificial Sequence
  Description of Artificial Sequence: Synthetic oligonucleotide
aucacaggagugagugaaa

SEQ ID NO: 1882041 - RNA, 19 nt, Artificial Sequence
  Description of Artificial Sequence: Synthetic oligonucleotide
cugcguauguccguugaua

SEQ ID NO: 1882042 - RNA, 19 nt, Artificial Sequence
  Description of Artificial Sequence: Synthetic oligonucleotide
cacaguucccacucacagu

SEQ ID NO: 1882043 - RNA, 19 nt, Artificial Sequence
  Description of Artificial Sequence: Synthetic oligonucleotide
caggggagugugcuugcca

SEQ ID NO: 1882044 - RNA, 19 nt, Artificial Sequence
  Description of Artificial Sequence: Synthetic oligonucleotide
guguuccgaguaccacaug

SEQ ID NO: 1882045 - RNA, 19 nt, Artificial Sequence
  Description of Artificial Sequence: Synthetic oligonucleotide
ccuacugucugaagacaga

SEQ ID NO: 1882046 - RNA, 19 nt, Artificial Sequence
  Description of Artificial Sequence: Synthetic oligonucleotide
ugccaacuagguggcccug

SEQ ID NO: 1882047 - RNA, 19 nt, Artificial Sequence
  Description of Artificial Sequence: Synthetic oligonucleotide
caccuaagaaaacuuccuu

SEQ ID NO: 1882048 - RNA, 19 nt, Artificial Sequence
  Description of Artificial Sequence: Synthetic oligonucleotide
cugaagcauggcauuccua

SEQ ID NO: 1882049 - RNA, 19 nt, Artificial Sequence
  Description of Artificial Sequence: Synthetic oligonucleotide
ggcgacugcacaguuccca

SEQ ID NO: 1882050 - RNA, 19 nt, Artificial Sequence
  Description of Artificial Sequence: Synthetic oligonucleotide
acacacacacacacauaua

SEQ ID NO: 1882051 - RNA, 19 nt, Artificial Sequence
  Description of Artificial Sequence: Synthetic oligonucleotide
cacaggugcaaagccaacu

SEQ ID NO: 1882052 - RNA, 19 nt, Artificial Sequence
  Description of Artificial Sequence: Synthetic oligonucleotide
gugugcuugccaacuaggu

SEQ ID NO: 1882053 - RNA, 19 nt, Artificial Sequence
  Description of Artificial Sequence: Synthetic oligonucleotide
acacacacacacacacaua

SEQ ID NO: 1882054 - RNA, 19 nt, Artificial Sequence
  Description of Artificial Sequence: Synthetic oligonucleotide
ccuauggaggaaugggucu

SEQ ID NO: 1882055 - RNA, 19 nt, Artificial Sequence
  Description of Artificial Sequence: Synthetic oligonucleotide
caccaauaccacucuguau

SEQ ID NO: 1882056 - RNA, 19 nt, Artificial Sequence
  Description of Artificial Sequence: Synthetic oligonucleotide
caguucccacucacaguga

SEQ ID NO: 1882057 - RNA, 19 nt, Artificial Sequence
  Description of Artificial Sequence: Synthetic oligonucleotide
caaaagcgaguguuucuuu

SEQ ID NO: 1882058 - RNA, 19 nt, Artificial Sequence
  Description of Artificial Sequence: Synthetic oligonucleotide
augggucuugaugcucaaa

SEQ ID NO: 1882059 - RNA, 19 nt, Artificial Sequence
  Description of Artificial Sequence: Synthetic oligonucleotide
ccauauggccaggggagug

SEQ ID NO: 1882060 - RNA, 19 nt, Artificial Sequence
  Description of Artificial Sequence: Synthetic oligonucleotide
cauagugugccugcugcau

SEQ ID NO: 1882061 - RNA, 19 nt, Artificial Sequence
  Description of Artificial Sequence: Synthetic oligonucleotide
gguugaucauagugugccu

SEQ ID NO: 1882062 - RNA, 19 nt, Artificial Sequence
  Description of Artificial Sequence: Synthetic oligonucleotide
cgaguguuucuuuccccac

SEQ ID NO: 1882063 - RNA, 19 nt, Artificial Sequence
  Description of Artificial Sequence: Synthetic oligonucleotide
cauauggccaggggagugu

SEQ ID NO: 1882064 - RNA, 19 nt, Artificial Sequence
  Description of Artificial Sequence: Synthetic oligonucleotide
gccaacuagguggcccugc

SEQ ID NO: 1882065 - RNA, 19 nt, Artificial Sequence
  Description of Artificial Sequence: Synthetic oligonucleotide
ccuuucgauuucuuuacau

SEQ ID NO: 1882066 - RNA, 19 nt, Artificial Sequence
  Description of Artificial Sequence: Synthetic oligonucleotide
augccgugccacaggugca

SEQ ID NO: 1882067 - RNA, 19 nt, Artificial Sequence
  Description of Artificial Sequence: Synthetic oligonucleotide
cuucccugcguauguccgu

SEQ ID NO: 1882068 - RNA, 19 nt, Artificial Sequence
  Description of Artificial Sequence: Synthetic oligonucleotide
ccgugccacaggugcaaag

SEQ ID NO: 1882069 - RNA, 19 nt, Artificial Sequence
  Description of Artificial Sequence: Synthetic oligonucleotide
ccugcugcauaacaucacu

SEQ ID NO: 1882070 - RNA, 19 nt, Artificial Sequence
  Description of Artificial Sequence: Synthetic oligonucleotide
caucggcuguguugaggaa

SEQ ID NO: 1882071 - RNA, 19 nt, Artificial Sequence
  Description of Artificial Sequence: Synthetic oligonucleotide
gggagugugcuugccaacu

SEQ ID NO: 1882072 - RNA, 19 nt, Artificial Sequence
  Description of Artificial Sequence: Synthetic oligonucleotide
gcguauguccguugauaua

SEQ ID NO: 1882073 - RNA, 19 nt, Artificial Sequence
  Description of Artificial Sequence: Synthetic oligonucleotide
gugcaucuaugucuacauu

SEQ ID NO: 1882074 - RNA, 19 nt, Artificial Sequence
  Description of Artificial Sequence: Synthetic oligonucleotide
cuugggccucaucaguauu

SEQ ID NO: 1882075 - RNA, 19 nt, Artificial Sequence
  Description of Artificial Sequence: Synthetic oligonucleotide
aucugcccuuuugcuagua

SEQ ID NO: 1882076 - RNA, 19 nt, Artificial Sequence
  Description of Artificial Sequence: Synthetic oligonucleotide
guauuuccuugcacccacu

SEQ ID NO: 1882077 - RNA, 19 nt, Artificial Sequence
  Description of Artificial Sequence: Synthetic oligonucleotide
gcaaucuuccaagcuaguu

SEQ ID NO: 1882078 - RNA, 19 nt, Artificial Sequence
  Description of Artificial Sequence: Synthetic oligonucleotide
gacuagcuuuaaggauaua

SEQ ID NO: 1882079 - RNA, 19 nt, Artificial Sequence
  Description of Artificial Sequence: Synthetic oligonucleotide
ccaugccgugccacaggug

SEQ ID NO: 1882080 - RNA, 19 nt, Artificial Sequence
  Description of Artificial Sequence: Synthetic oligonucleotide
cccacucacagugaagacu

SEQ ID NO: 1882081 - RNA, 19 nt, Artificial Sequence
  Description of Artificial Sequence: Synthetic oligonucleotide
cauugucaucggcuguguu

SEQ ID NO: 1882082 - RNA, 19 nt, Artificial Sequence
  Description of Artificial Sequence: Synthetic oligonucleotide
cccugcguauguccguuga

SEQ ID NO: 1882083 - RNA, 19 nt, Artificial Sequence
  Description of Artificial Sequence: Synthetic oligonucleotide
cagggcagcgagugaguuu

SEQ ID NO: 1882084 - RNA, 19 nt, Artificial Sequence
  Description of Artificial Sequence: Synthetic oligonucleotide
ggcagcgagugaguuuccu

SEQ ID NO: 1882085 - RNA, 19 nt, Artificial Sequence
  Description of Artificial Sequence: Synthetic oligonucleotide
cgagugaguuuccuacugu

SEQ ID NO: 1882086 - RNA, 19 nt, Artificial Sequence
  Description of Artificial Sequence: Synthetic oligonucleotide
gggcagcgagugaguuucc

SEQ ID NO: 1882087 - RNA, 19 nt, Artificial Sequence
  Description of Artificial Sequence: Synthetic oligonucleotide
ccccaagucacugacucuu

SEQ ID NO: 1882088 - RNA, 19 nt, Artificial Sequence
  Description of Artificial Sequence: Synthetic oligonucleotide
ccugcguauguccguugau

SEQ ID NO: 1882089 - RNA, 19 nt, Artificial Sequence
  Description of Artificial Sequence: Synthetic oligonucleotide
ccauugucaucggcugugu

SEQ ID NO: 1882090 - RNA, 19 nt, Artificial Sequence
  Description of Artificial Sequence: Synthetic oligonucleotide
gccgugccacaggugcaaa

SEQ ID NO: 1882091 - RNA, 19 nt, Artificial Sequence
  Description of Artificial Sequence: Synthetic oligonucleotide
aauguuggauguuuguugc

SEQ ID NO: 1882092 - RNA, 19 nt, Artificial Sequence
  Description of Artificial Sequence: Synthetic oligonucleotide
aauauaugaaggcuacuac

SEQ ID NO: 1882093 - RNA, 19 nt, Artificial Sequence
  Description of Artificial Sequence: Synthetic oligonucleotide
ugaauuuuaaaccauuugu

SEQ ID NO: 1882094 - RNA, 19 nt, Artificial Sequence
  Description of Artificial Sequence: Synthetic oligonucleotide
gacacgguagauuagaugc

SEQ ID NO: 1882095 - RNA, 19 nt, Artificial Sequence
  Description of Artificial Sequence: Synthetic oligonucleotide
aauucuuagaagcccacuc

SEQ ID NO: 1882096 - RNA, 19 nt, Artificial Sequence
  Description of Artificial Sequence: Synthetic oligonucleotide
aucaugauuauggauaucc

SEQ ID NO: 1882097 - RNA, 19 nt, Artificial Sequence
  Description of Artificial Sequence: Synthetic oligonucleotide
aauuauaaaccaugaaacu

SEQ ID NO: 1882098 - RNA, 19 nt, Artificial Sequence
  Description of Artificial Sequence: Synthetic oligonucleotide
uuauggauuacaaccaugc

SEQ ID NO: 1882099 - RNA, 19 nt, Artificial Sequence
  Description of Artificial Sequence: Synthetic oligonucleotide
aacaugucccgucuuaugg

SEQ ID NO: 1882100 - RNA, 19 nt, Artificial Sequence
  Description of Artificial Sequence: Synthetic oligonucleotide
auuacaaccaugccaauag

SEQ ID NO: 1882101 - RNA, 19 nt, Artificial Sequence
  Description of Artificial Sequence: Synthetic oligonucleotide
aaucuucaacgguaaaccc

SEQ ID NO: 1882102 - RNA, 19 nt, Artificial Sequence
  Description of Artificial Sequence: Synthetic oligonucleotide
aaggcuacuacaugaugcc

SEQ ID NO: 1882103 - RNA, 19 nt, Artificial Sequence
  Description of Artificial Sequence: Synthetic oligonucleotide
aaauguuggauguuuguug

SEQ ID NO: 1882104 - RNA, 19 nt, Artificial Sequence
  Description of Artificial Sequence: Synthetic oligonucleotide
uagagaauuauaaaccaug

SEQ ID NO: 1882105 - RNA, 19 nt, Artificial Sequence
  Description of Artificial Sequence: Synthetic oligonucleotide
uuauaaaccaugaaacuaa

SEQ ID NO: 1882106 - RNA, 19 nt, Artificial Sequence
  Description of Artificial Sequence: Synthetic oligonucleotide
cuuucagcaaaguuggugg

SEQ ID NO: 1882107 - RNA, 19 nt, Artificial Sequence
  Description of Artificial Sequence: Synthetic oligonucleotide
caugcuuucagcaaaguug

SEQ ID NO: 1882108 - RNA, 19 nt, Artificial Sequence
  Description of Artificial Sequence: Synthetic oligonucleotide
acuccaagcuaccagaugg

SEQ ID NO: 1882109 - RNA, 19 nt, Artificial Sequence
  Description of Artificial Sequence: Synthetic oligonucleotide
agcgcauuaguauaucacc

SEQ ID NO: 1882110 - RNA, 19 nt, Artificial Sequence
  Description of Artificial Sequence: Synthetic oligonucleotide
ucaacgguaaaccccaugc

SEQ ID NO: 1882111 - RNA, 19 nt, Artificial Sequence
  Description of Artificial Sequence: Synthetic oligonucleotide
uaugaaggcuacuacauga

SEQ ID NO: 1882112 - RNA, 19 nt, Artificial Sequence
  Description of Artificial Sequence: Synthetic oligonucleotide
auugaguaaauguuggaug

SEQ ID NO: 1882113 - RNA, 19 nt, Artificial Sequence
  Description of Artificial Sequence: Synthetic oligonucleotide
aaaccauuuguggaugugc

SEQ ID NO: 1882114 - RNA, 19 nt, Artificial Sequence
  Description of Artificial Sequence: Synthetic oligonucleotide
auuuuaaaccauuugugga

SEQ ID NO: 1882115 - RNA, 19 nt, Artificial Sequence
  Description of Artificial Sequence: Synthetic oligonucleotide
cauuaguauaucaccaucc

SEQ ID NO: 1882116 - RNA, 19 nt, Artificial Sequence
  Description of Artificial Sequence: Synthetic oligonucleotide
uguugugugguccaggacu

SEQ ID NO: 1882117 - RNA, 19 nt, Artificial Sequence
  Description of Artificial Sequence: Synthetic oligonucleotide
ucuuaaaaggccaaguguu

SEQ ID NO: 1882118 - RNA, 19 nt, Artificial Sequence
  Description of Artificial Sequence: Synthetic oligonucleotide
guagacaaaucuucaacgg

SEQ ID NO: 1882119 - RNA, 19 nt, Artificial Sequence
  Description of Artificial Sequence: Synthetic oligonucleotide
aucacauuggcacauauaa

SEQ ID NO: 1882120 - RNA, 19 nt, Artificial Sequence
  Description of Artificial Sequence: Synthetic oligonucleotide
uuuguugcaagcagcacca

SEQ ID NO: 1882121 - RNA, 19 nt, Artificial Sequence
  Description of Artificial Sequence: Synthetic oligonucleotide
uauaucaccauccccugug

SEQ ID NO: 1882122 - RNA, 19 nt, Artificial Sequence
  Description of Artificial Sequence: Synthetic oligonucleotide
uccuccaaagccuacagug

SEQ ID NO: 1882123 - RNA, 19 nt, Artificial Sequence
  Description of Artificial Sequence: Synthetic oligonucleotide
aaguguugaggacuagggg

SEQ ID NO: 1882124 - RNA, 19 nt, Artificial Sequence
  Description of Artificial Sequence: Synthetic oligonucleotide
ucuucaacgguaaacccca

SEQ ID NO: 1882125 - RNA, 19 nt, Artificial Sequence
  Description of Artificial Sequence: Synthetic oligonucleotide
uuuuaaaccauuuguggau

SEQ ID NO: 1882126 - RNA, 19 nt, Artificial Sequence
  Description of Artificial Sequence: Synthetic oligonucleotide
gguagacaaaucuucaacg

SEQ ID NO: 1882127 - RNA, 19 nt, Artificial Sequence
  Description of Artificial Sequence: Synthetic oligonucleotide
acaguuagcuuacacauga

SEQ ID NO: 1882128 - RNA, 19 nt, Artificial Sequence
  Description of Artificial Sequence: Synthetic oligonucleotide
aauucguagagaauuauaa

SEQ ID NO: 1882129 - RNA, 19 nt, Artificial Sequence
  Description of Artificial Sequence: Synthetic oligonucleotide
auggauuacaaccaugcca

SEQ ID NO: 1882130 - RNA, 19 nt, Artificial Sequence
  Description of Artificial Sequence: Synthetic oligonucleotide
auauaugaaggcuacuaca

SEQ ID NO: 1882131 - RNA, 19 nt, Artificial Sequence
  Description of Artificial Sequence: Synthetic oligonucleotide
cuagcuuuaguuucucucc

SEQ ID NO: 1882132 - RNA, 19 nt, Artificial Sequence
  Description of Artificial Sequence: Synthetic oligonucleotide
auuauggauauccacuugu

SEQ ID NO: 1882133 - RNA, 19 nt, Artificial Sequence
  Description of Artificial Sequence: Synthetic oligonucleotide
auauaauagccccaaagaa

SEQ ID NO: 1882134 - RNA, 19 nt, Artificial Sequence
  Description of Artificial Sequence: Synthetic oligonucleotide
ugaaacuaaauugaguaaa

SEQ ID NO: 1882135 - RNA, 19 nt, Artificial Sequence
  Description of Artificial Sequence: Synthetic oligonucleotide
agcaccauaacuucccauc

SEQ ID NO: 1882136 - RNA, 19 nt, Artificial Sequence
  Description of Artificial Sequence: Synthetic oligonucleotide
agaaauagcccacuccaag

SEQ ID NO: 1882137 - RNA, 19 nt, Artificial Sequence
  Description of Artificial Sequence: Synthetic oligonucleotide
agaagcaacaaggaccggc

SEQ ID NO: 1882138 - RNA, 19 nt, Artificial Sequence
  Description of Artificial Sequence: Synthetic oligonucleotide
aaauagcccacuccaagcu

SEQ ID NO: 1882139 - RNA, 19 nt, Artificial Sequence
  Description of Artificial Sequence: Synthetic oligonucleotide
acuaauguccgccaugcug

SEQ ID NO: 1882140 - RNA, 19 nt, Artificial Sequence
  Description of Artificial Sequence: Synthetic oligonucleotide
aaccauuuguggaugugcc

SEQ ID NO: 1882141 - RNA, 19 nt, Artificial Sequence
  Description of Artificial Sequence: Synthetic oligonucleotide
gaaauagcccacuccaagc

SEQ ID NO: 1882142 - RNA, 19 nt, Artificial Sequence
  Description of Artificial Sequence: Synthetic oligonucleotide
uguuugugggcagaaauag

SEQ ID NO: 1882143 - RNA, 19 nt, Artificial Sequence
  Description of Artificial Sequence: Synthetic oligonucleotide
aaauauaugaaggcuacua

SEQ ID NO: 1882144 - RNA, 19 nt, Artificial Sequence
  Description of Artificial Sequence: Synthetic oligonucleotide
guuuguugcaagcagcacc

SEQ ID NO: 1882145 - RNA, 19 nt, Artificial Sequence
  Description of Artificial Sequence: Synthetic oligonucleotide
caaguguugaggacuaggg

SEQ ID NO: 1882146 - RNA, 19 nt, Artificial Sequence
  Description of Artificial Sequence: Synthetic oligonucleotide
acuacaugaugccagucag

SEQ ID NO: 1882147 - RNA, 19 nt, Artificial Sequence
  Description of Artificial Sequence: Synthetic oligonucleotide
uucucaacugcauccacag

SEQ ID NO: 1882148 - RNA, 19 nt, Artificial Sequence
  Description of Artificial Sequence: Synthetic oligonucleotide
ugguuuauaggguccacag

SEQ ID NO: 1882149 - RNA, 19 nt, Artificial Sequence
  Description of Artificial Sequence: Synthetic oligonucleotide
aaccaugaaacuaaauuga

SEQ ID NO: 1882150 - RNA, 19 nt, Artificial Sequence
  Description of Artificial Sequence: Synthetic oligonucleotide
caugccaauaguaucauga

SEQ ID NO: 1882151 - RNA, 19 nt, Artificial Sequence
  Description of Artificial Sequence: Synthetic oligonucleotide
gaucauggcguccagggug

SEQ ID NO: 1882152 - RNA, 19 nt, Artificial Sequence
  Description of Artificial Sequence: Synthetic oligonucleotide
cauauaauagccccaaaga

SEQ ID NO: 1882153 - RNA, 19 nt, Artificial Sequence
  Description of Artificial Sequence: Synthetic oligonucleotide
uuagcuuacacaugaacuu

SEQ ID NO: 1882154 - RNA, 19 nt, Artificial Sequence
  Description of Artificial Sequence: Synthetic oligonucleotide
caugauuauggauauccac

SEQ ID NO: 1882155 - RNA, 19 nt, Artificial Sequence
  Description of Artificial Sequence: Synthetic oligonucleotide
aucuucaacgguaaacccc

SEQ ID NO: 1882156 - RNA, 19 nt, Artificial Sequence
  Description of Artificial Sequence: Synthetic oligonucleotide
uggcacauauaauagcccc

SEQ ID NO: 1882157 - RNA, 19 nt, Artificial Sequence
  Description of Artificial Sequence: Synthetic oligonucleotide
uacuacaugaugccaguca

SEQ ID NO: 1882158 - RNA, 19 nt, Artificial Sequence
  Description of Artificial Sequence: Synthetic oligonucleotide
aguaucaugauuauggaua

SEQ ID NO: 1882159 - RNA, 19 nt, Artificial Sequence
  Description of Artificial Sequence: Synthetic oligonucleotide
aaagcguguguguugugug

SEQ ID NO: 1882160 - RNA, 19 nt, Artificial Sequence
  Description of Artificial Sequence: Synthetic oligonucleotide
aaagcgcauuaguauauca

SEQ ID NO: 1882161 - RNA, 19 nt, Artificial Sequence
  Description of Artificial Sequence: Synthetic oligonucleotide
uccguagcguucuuaaaag

SEQ ID NO: 1882162 - RNA, 19 nt, Artificial Sequence
  Description of Artificial Sequence: Synthetic oligonucleotide
uagacaaaucuucaacggu

SEQ ID NO: 1882163 - RNA, 19 nt, Artificial Sequence
  Description of Artificial Sequence: Synthetic oligonucleotide
guucuuaaaaggccaagug

SEQ ID NO: 1882164 - RNA, 19 nt, Artificial Sequence
  Description of Artificial Sequence: Synthetic oligonucleotide
aagcgcauuaguauaucac

SEQ ID NO: 1882165 - RNA, 19 nt, Artificial Sequence
  Description of Artificial Sequence: Synthetic oligonucleotide
ggcaagagaagcaacaagg

SEQ ID NO: 1882166 - RNA, 19 nt, Artificial Sequence
  Description of Artificial Sequence: Synthetic oligonucleotide
uaacagacacgguagauua

SEQ ID NO: 1882167 - RNA, 19 nt, Artificial Sequence
  Description of Artificial Sequence: Synthetic oligonucleotide
guuuauaggguccacagua

SEQ ID NO: 1882168 - RNA, 19 nt, Artificial Sequence
  Description of Artificial Sequence: Synthetic oligonucleotide
gaguccccuacuaaaagcg

SEQ ID NO: 1882169 - RNA, 19 nt, Artificial Sequence
  Description of Artificial Sequence: Synthetic oligonucleotide
gguagcuuggcagaaagcg

SEQ ID NO: 1882170 - RNA, 19 nt, Artificial Sequence
  Description of Artificial Sequence: Synthetic oligonucleotide
cuacagugccuucacaccg

SEQ ID NO: 1882171 - RNA, 19 nt, Artificial Sequence
  Description of Artificial Sequence: Synthetic oligonucleotide
uacacaugaacuugaaaua

SEQ ID NO: 1882172 - RNA, 19 nt, Artificial Sequence
  Description of Artificial Sequence: Synthetic oligonucleotide
uuuaaaccauuuguggaug

SEQ ID NO: 1882173 - RNA, 19 nt, Artificial Sequence
  Description of Artificial Sequence: Synthetic oligonucleotide
aaaccccaugcuuucagca

SEQ ID NO: 1882174 - RNA, 19 nt, Artificial Sequence
  Description of Artificial Sequence: Synthetic oligonucleotide
auuagaugcagucuacuuu

SEQ ID NO: 1882175 - RNA, 19 nt, Artificial Sequence
  Description of Artificial Sequence: Synthetic oligonucleotide
ugugcccgcagcaacaugu

SEQ ID NO: 1882176 - RNA, 19 nt, Artificial Sequence
  Description of Artificial Sequence: Synthetic oligonucleotide
agugccuucacaccgcucu

SEQ ID NO: 1882177 - RNA, 19 nt, Artificial Sequence
  Description of Artificial Sequence: Synthetic oligonucleotide
uggauauccacuuguuugu

SEQ ID NO: 1882178 - RNA, 19 nt, Artificial Sequence
  Description of Artificial Sequence: Synthetic oligonucleotide
ugaguccccuacuaaaagc

SEQ ID NO: 1882179 - RNA, 19 nt, Artificial Sequence
  Description of Artificial Sequence: Synthetic oligonucleotide
cgucuuauggauuacaacc

SEQ ID NO: 1882180 - RNA, 19 nt, Artificial Sequence
  Description of Artificial Sequence: Synthetic oligonucleotide
aacgguaaaccccaugcuu

SEQ ID NO: 1882181 - RNA, 19 nt, Artificial Sequence
  Description of Artificial Sequence: Synthetic oligonucleotide
ucaugauuauggauaucca

SEQ ID NO: 1882182 - RNA, 19 nt, Artificial Sequence
  Description of Artificial Sequence: Synthetic oligonucleotide
aaccaugccaauaguauca

SEQ ID NO: 1882183 - RNA, 19 nt, Artificial Sequence
  Description of Artificial Sequence: Synthetic oligonucleotide
guauuggugagucuccuac

SEQ ID NO: 1882184 - RNA, 19 nt, Artificial Sequence
  Description of Artificial Sequence: Synthetic oligonucleotide
cucaacugcauccacagca

SEQ ID NO: 1882185 - RNA, 19 nt, Artificial Sequence
  Description of Artificial Sequence: Synthetic oligonucleotide
uuuggcaagcggugguugg

SEQ ID NO: 1882186 - RNA, 19 nt, Artificial Sequence
  Description of Artificial Sequence: Synthetic oligonucleotide
accggcucaacuuccgcgc

SEQ ID NO: 1882187 - RNA, 19 nt, Artificial Sequence
  Description of Artificial Sequence: Synthetic oligonucleotide
ucuuagaagcccacucuga

SEQ ID NO: 1882188 - RNA, 19 nt, Artificial Sequence
  Description of Artificial Sequence: Synthetic oligonucleotide
uggugguagacaaaucuuc

SEQ ID NO: 1882189 - RNA, 19 nt, Artificial Sequence
  Description of Artificial Sequence: Synthetic oligonucleotide
cuuauggauuacaaccaug

SEQ ID NO: 1882190 - RNA, 19 nt, Artificial Sequence
  Description of Artificial Sequence: Synthetic oligonucleotide
ucaacuuccgcgccauagc

SEQ ID NO: 1882191 - RNA, 19 nt, Artificial Sequence
  Description of Artificial Sequence: Synthetic oligonucleotide
aaaagcguguguguugugu

SEQ ID NO: 1882192 - RNA, 19 nt, Artificial Sequence
  Description of Artificial Sequence: Synthetic oligonucleotide
auaauagccccaaagaauu

SEQ ID NO: 1882193 - RNA, 19 nt, Artificial Sequence
  Description of Artificial Sequence: Synthetic oligonucleotide
uagcguucuuaaaaggcca

SEQ ID NO: 1882194 - RNA, 19 nt, Artificial Sequence
  Description of Artificial Sequence: Synthetic oligonucleotide
cuccagacacuaauguccg

SEQ ID NO: 1882195 - RNA, 19 nt, Artificial Sequence
  Description of Artificial Sequence: Synthetic oligonucleotide
uuuauaggguccacaguau

SEQ ID NO: 1882196 - RNA, 19 nt, Artificial Sequence
  Description of Artificial Sequence: Synthetic oligonucleotide
accauaacuucccaucaca

SEQ ID NO: 1882197 - RNA, 19 nt, Artificial Sequence
  Description of Artificial Sequence: Synthetic oligonucleotide
uuuccuagcuuuaguuucu

SEQ ID NO: 1882198 - RNA, 19 nt, Artificial Sequence
  Description of Artificial Sequence: Synthetic oligonucleotide
guagauuagaugcagucua

SEQ ID NO: 1882199 - RNA, 19 nt, Artificial Sequence
  Description of Artificial Sequence: Synthetic oligonucleotide
augaaacuaaauugaguaa

SEQ ID NO: 1882200 - RNA, 19 nt, Artificial Sequence
  Description of Artificial Sequence: Synthetic oligonucleotide
aaagccuacagugccuuca

SEQ ID NO: 1882201 - RNA, 19 nt, Artificial Sequence
  Description of Artificial Sequence: Synthetic oligonucleotide
ccuccagacacuaaugucc

SEQ ID NO: 1882202 - RNA, 19 nt, Artificial Sequence
  Description of Artificial Sequence: Synthetic oligonucleotide
augccagucagcaacuuuc

SEQ ID NO: 1882203 - RNA, 19 nt, Artificial Sequence
  Description of Artificial Sequence: Synthetic oligonucleotide
uuaaaccauuuguggaugu

SEQ ID NO: 1882204 - RNA, 19 nt, Artificial Sequence
  Description of Artificial Sequence: Synthetic oligonucleotide
auguccgccaugcugcguc

SEQ ID NO: 1882205 - RNA, 19 nt, Artificial Sequence
  Description of Artificial Sequence: Synthetic oligonucleotide
uguggaugugcccgcagca

SEQ ID NO: 1882206 - RNA, 19 nt, Artificial Sequence
  Description of Artificial Sequence: Synthetic oligonucleotide
auaucaccauccccugugg

SEQ ID NO: 1882207 - RNA, 19 nt, Artificial Sequence
  Description of Artificial Sequence: Synthetic oligonucleotide
uuguuugugggcagaaaua

SEQ ID NO: 1882208 - RNA, 19 nt, Artificial Sequence
  Description of Artificial Sequence: Synthetic oligonucleotide
cagaugguuuauagggucc

SEQ ID NO: 1882209 - RNA, 19 nt, Artificial Sequence
  Description of Artificial Sequence: Synthetic oligonucleotide
gacacuaauguccgccaug

SEQ ID NO: 1882210 - RNA, 19 nt, Artificial Sequence
  Description of Artificial Sequence: Synthetic oligonucleotide
uaguaucaugauuauggau

SEQ ID NO: 1882211 - RNA, 19 nt, Artificial Sequence
  Description of Artificial Sequence: Synthetic oligonucleotide
auauauuccacagcuuggu

SEQ ID NO: 1882212 - RNA, 19 nt, Artificial Sequence
  Description of Artificial Sequence: Synthetic oligonucleotide
uucaguuggcugaauucgu

SEQ ID NO: 1882213 - RNA, 19 nt, Artificial Sequence
  Description of Artificial Sequence: Synthetic oligonucleotide
ucagcauaggccccggcuc

SEQ ID NO: 1882214 - RNA, 19 nt, Artificial Sequence
  Description of Artificial Sequence: Synthetic oligonucleotide
guaaaccccaugcuuucag

SEQ ID NO: 1882215 - RNA, 19 nt, Artificial Sequence
  Description of Artificial Sequence: Synthetic oligonucleotide
aagcaacaaggaccggcuc

SEQ ID NO: 1882216 - RNA, 19 nt, Artificial Sequence
  Description of Artificial Sequence: Synthetic oligonucleotide
agacacgguagauuagaug

SEQ ID NO: 1882217 - RNA, 19 nt, Artificial Sequence
  Description of Artificial Sequence: Synthetic oligonucleotide
gaccggcucaacuuccgcg

SEQ ID NO: 1882218 - RNA, 19 nt, Artificial Sequence
  Description of Artificial Sequence: Synthetic oligonucleotide
uaaaccccaugcuuucagc

SEQ ID NO: 1882219 - RNA, 19 nt, Artificial Sequence
  Description of Artificial Sequence: Synthetic oligonucleotide
auagcccacuccaagcuac

SEQ ID NO: 1882220 - RNA, 19 nt, Artificial Sequence
  Description of Artificial Sequence: Synthetic oligonucleotide
cagcuugguagcuuggcag

SEQ ID NO: 1882221 - RNA, 19 nt, Artificial Sequence
  Description of Artificial Sequence: Synthetic oligonucleotide
aguuggcugaauucguaga

SEQ ID NO: 1882222 - RNA, 19 nt, Artificial Sequence
  Description of Artificial Sequence: Synthetic oligonucleotide
uccccuacuaaaagcgugu

SEQ ID NO: 1882223 - RNA, 19 nt, Artificial Sequence
  Description of Artificial Sequence: Synthetic oligonucleotide
aaacacaugcuaacagaca

SEQ ID NO: 1882224 - RNA, 19 nt, Artificial Sequence
  Description of Artificial Sequence: Synthetic oligonucleotide
acaugaacuugaaauauau

SEQ ID NO: 1882225 - RNA, 19 nt, Artificial Sequence
  Description of Artificial Sequence: Synthetic oligonucleotide
aauagccccaaagaauuuu

SEQ ID NO: 1882226 - RNA, 19 nt, Artificial Sequence
  Description of Artificial Sequence: Synthetic oligonucleotide
uggcaauucuuagaagccc

SEQ ID NO: 1882227 - RNA, 19 nt, Artificial Sequence
  Description of Artificial Sequence: Synthetic oligonucleotide
gaaggaucugguguaacuc

SEQ ID NO: 1882228 - RNA, 19 nt, Artificial Sequence
  Description of Artificial Sequence: Synthetic oligonucleotide
ucagcaacuuuccuagcuu

SEQ ID NO: 1882229 - RNA, 19 nt, Artificial Sequence
  Description of Artificial Sequence: Synthetic oligonucleotide
gccauucucaacugcaucc

SEQ ID NO: 1882230 - RNA, 19 nt, Artificial Sequence
  Description of Artificial Sequence: Synthetic oligonucleotide
acuuuccuagcuuuaguuu

SEQ ID NO: 1882231 - RNA, 19 nt, Artificial Sequence
  Description of Artificial Sequence: Synthetic oligonucleotide
uuauaggguccacaguauu

SEQ ID NO: 1882232 - RNA, 19 nt, Artificial Sequence
  Description of Artificial Sequence: Synthetic oligonucleotide
ccuacuaaaagcgugugug

SEQ ID NO: 1882233 - RNA, 19 nt, Artificial Sequence
  Description of Artificial Sequence: Synthetic oligonucleotide
uuacaaccaugccaauagu

SEQ ID NO: 1882234 - RNA, 19 nt, Artificial Sequence
  Description of Artificial Sequence: Synthetic oligonucleotide
acacaugaacuugaaauau

SEQ ID NO: 1882235 - RNA, 19 nt, Artificial Sequence
  Description of Artificial Sequence: Synthetic oligonucleotide
aauagcccacuccaagcua

SEQ ID NO: 1882236 - RNA, 19 nt, Artificial Sequence
  Description of Artificial Sequence: Synthetic oligonucleotide
uggcagaaagcgcauuagu

SEQ ID NO: 1882237 - RNA, 19 nt, Artificial Sequence
  Description of Artificial Sequence: Synthetic oligonucleotide
caguuggcugaauucguag

SEQ ID NO: 1882238 - RNA, 19 nt, Artificial Sequence
  Description of Artificial Sequence: Synthetic oligonucleotide
guugcaagcagcaccauaa

SEQ ID NO: 1882239 - RNA, 19 nt, Artificial Sequence
  Description of Artificial Sequence: Synthetic oligonucleotide
uccuacacgaccagguauu

SEQ ID NO: 1882240 - RNA, 19 nt, Artificial Sequence
  Description of Artificial Sequence: Synthetic oligonucleotide
uauccacuuguuugugggc

SEQ ID NO: 1882241 - RNA, 19 nt, Artificial Sequence
  Description of Artificial Sequence: Synthetic oligonucleotide
cuacaugaugccagucagc

SEQ ID NO: 1882242 - RNA, 19 nt, Artificial Sequence
  Description of Artificial Sequence: Synthetic oligonucleotide
cugaguccccuacuaaaag

SEQ ID NO: 1882243 - RNA, 19 nt, Artificial Sequence
  Description of Artificial Sequence: Synthetic oligonucleotide
uaaaccauuuguggaugug

SEQ ID NO: 1882244 - RNA, 19 nt, Artificial Sequence
  Description of Artificial Sequence: Synthetic oligonucleotide
ugccagucagcaacuuucc

SEQ ID NO: 1882245 - RNA, 19 nt, Artificial Sequence
  Description of Artificial Sequence: Synthetic oligonucleotide
ugucccgucuuauggauua

SEQ ID NO: 1882246 - RNA, 19 nt, Artificial Sequence
  Description of Artificial Sequence: Synthetic oligonucleotide
ugccaauaguaucaugauu

SEQ ID NO: 1882247 - RNA, 19 nt, Artificial Sequence
  Description of Artificial Sequence: Synthetic oligonucleotide
cuugaaauauaugaaggcu

SEQ ID NO: 1882248 - RNA, 19 nt, Artificial Sequence
  Description of Artificial Sequence: Synthetic oligonucleotide
caagcuaccagaugguuua

SEQ ID NO: 1882249 - RNA, 19 nt, Artificial Sequence
  Description of Artificial Sequence: Synthetic oligonucleotide
agucccuccagacacuaau

SEQ ID NO: 1882250 - RNA, 19 nt, Artificial Sequence
  Description of Artificial Sequence: Synthetic oligonucleotide
ugaauucguagagaauuau

SEQ ID NO: 1882251 - RNA, 19 nt, Artificial Sequence
  Description of Artificial Sequence: Synthetic oligonucleotide
uggaugugcccgcagcaac

SEQ ID NO: 1882252 - RNA, 19 nt, Artificial Sequence
  Description of Artificial Sequence: Synthetic oligonucleotide
aaccccaugcuuucagcaa

SEQ ID NO: 1882253 - RNA, 19 nt, Artificial Sequence
  Description of Artificial Sequence: Synthetic oligonucleotide
acagacacgguagauuaga

SEQ ID NO: 1882254 - RNA, 19 nt, Artificial Sequence
  Description of Artificial Sequence: Synthetic oligonucleotide
cagguauuggugagucucc

SEQ ID NO: 1882255 - RNA, 19 nt, Artificial Sequence
  Description of Artificial Sequence: Synthetic oligonucleotide
cucaacuuccgcgccauag

SEQ ID NO: 1882256 - RNA, 19 nt, Artificial Sequence
  Description of Artificial Sequence: Synthetic oligonucleotide
acagcuugguagcuuggca

SEQ ID NO: 1882257 - RNA, 19 nt, Artificial Sequence
  Description of Artificial Sequence: Synthetic oligonucleotide
uguugcaagcagcaccaua

SEQ ID NO: 1882258 - RNA, 19 nt, Artificial Sequence
  Description of Artificial Sequence: Synthetic oligonucleotide
ucaguuggcugaauucgua

SEQ ID NO: 1882259 - RNA, 19 nt, Artificial Sequence
  Description of Artificial Sequence: Synthetic oligonucleotide
gccaauaguaucaugauua

SEQ ID NO: 1882260 - RNA, 19 nt, Artificial Sequence
  Description of Artificial Sequence: Synthetic oligonucleotide
acgaccagguauuuugaau

SEQ ID NO: 1882261 - RNA, 19 nt, Artificial Sequence
  Description of Artificial Sequence: Synthetic oligonucleotide
ugguguaacucuucuccaa

SEQ ID NO: 1882262 - RNA, 19 nt, Artificial Sequence
  Description of Artificial Sequence: Synthetic oligonucleotide
ugguagcuuggcagaaagc

SEQ ID NO: 1882263 - RNA, 19 nt, Artificial Sequence
  Description of Artificial Sequence: Synthetic oligonucleotide
agcuugguagcuuggcaga

SEQ ID NO: 1882264 - RNA, 19 nt, Artificial Sequence
  Description of Artificial Sequence: Synthetic oligonucleotide
ugaucauggcguccagggu

SEQ ID NO: 1882265 - RNA, 19 nt, Artificial Sequence
  Description of Artificial Sequence: Synthetic oligonucleotide
guagcuuggcagaaagcgc

SEQ ID NO: 1882266 - RNA, 19 nt, Artificial Sequence
  Description of Artificial Sequence: Synthetic oligonucleotide
agccuugcgccagagggac

SEQ ID NO: 1882267 - RNA, 19 nt, Artificial Sequence
  Description of Artificial Sequence: Synthetic oligonucleotide
ggcagaaauagcccacucc

SEQ ID NO: 1882268 - RNA, 19 nt, Artificial Sequence
  Description of Artificial Sequence: Synthetic oligonucleotide
uuggcugaauucguagaga

SEQ ID NO: 1882269 - RNA, 19 nt, Artificial Sequence
  Description of Artificial Sequence: Synthetic oligonucleotide
aauuuggcuggcaauucuu

SEQ ID NO: 1882270 - RNA, 19 nt, Artificial Sequence
  Description of Artificial Sequence: Synthetic oligonucleotide
uaggguccacaguauuuug

SEQ ID NO: 1882271 - RNA, 19 nt, Artificial Sequence
  Description of Artificial Sequence: Synthetic oligonucleotide
cacgguagauuagaugcag

SEQ ID NO: 1882272 - RNA, 19 nt, Artificial Sequence
  Description of Artificial Sequence: Synthetic oligonucleotide
auagccccaaagaauuuug

SEQ ID NO: 1882273 - RNA, 19 nt, Artificial Sequence
  Description of Artificial Sequence: Synthetic oligonucleotide
guaaauguuggauguuugu

SEQ ID NO: 1882274 - RNA, 19 nt, Artificial Sequence
  Description of Artificial Sequence: Synthetic oligonucleotide
gauuacaaccaugccaaua

SEQ ID NO: 1882275 - RNA, 19 nt, Artificial Sequence
  Description of Artificial Sequence: Synthetic oligonucleotide
cugucucacagacagcaca

SEQ ID NO: 1882276 - RNA, 19 nt, Artificial Sequence
  Description of Artificial Sequence: Synthetic oligonucleotide
uaguuucucuccucuuuaa

SEQ ID NO: 1882277 - RNA, 19 nt, Artificial Sequence
  Description of Artificial Sequence: Synthetic oligonucleotide
gaauucguagagaauuaua

SEQ ID NO: 1882278 - RNA, 19 nt, Artificial Sequence
  Description of Artificial Sequence: Synthetic oligonucleotide
caacaugucccgucuuaug

SEQ ID NO: 1882279 - RNA, 19 nt, Artificial Sequence
  Description of Artificial Sequence: Synthetic oligonucleotide
guuugugggcagaaauagc

SEQ ID NO: 1882280 - RNA, 19 nt, Artificial Sequence
  Description of Artificial Sequence: Synthetic oligonucleotide
uaauagccccaaagaauuu

SEQ ID NO: 1882281 - RNA, 19 nt, Artificial Sequence
  Description of Artificial Sequence: Synthetic oligonucleotide
gaaacuaaauugaguaaau

SEQ ID NO: 1882282 - RNA, 19 nt, Artificial Sequence
  Description of Artificial Sequence: Synthetic oligonucleotide
ggucuccccaacuucauca

SEQ ID NO: 1882283 - RNA, 19 nt, Artificial Sequence
  Description of Artificial Sequence: Synthetic oligonucleotide
uguguguugugugguccag

SEQ ID NO: 1882284 - RNA, 19 nt, Artificial Sequence
  Description of Artificial Sequence: Synthetic oligonucleotide
ucuccuacacgaccaggua

SEQ ID NO: 1882285 - RNA, 19 nt, Artificial Sequence
  Description of Artificial Sequence: Synthetic oligonucleotide
ggcuacuacaugaugccag

SEQ ID NO: 1882286 - RNA, 19 nt, Artificial Sequence
  Description of Artificial Sequence: Synthetic oligonucleotide
agaugguuuauagggucca

SEQ ID NO: 1882287 - RNA, 19 nt, Artificial Sequence
  Description of Artificial Sequence: Synthetic oligonucleotide
auaggguccacaguauuuu

SEQ ID NO: 1882288 - RNA, 19 nt, Artificial Sequence
  Description of Artificial Sequence: Synthetic oligonucleotide
uguuuguugcaagcagcac

SEQ ID NO: 1882289 - RNA, 19 nt, Artificial Sequence
  Description of Artificial Sequence: Synthetic oligonucleotide
gcauuaguauaucaccauc

SEQ ID NO: 1882290 - RNA, 19 nt, Artificial Sequence
  Description of Artificial Sequence: Synthetic oligonucleotide
cauucucaacugcauccac

SEQ ID NO: 1882291 - RNA, 19 nt, Artificial Sequence
  Description of Artificial Sequence: Synthetic oligonucleotide
agaaagcgcauuaguauau

SEQ ID NO: 1882292 - RNA, 19 nt, Artificial Sequence
  Description of Artificial Sequence: Synthetic oligonucleotide
gagucuccuacacgaccag

SEQ ID NO: 1882293 - RNA, 19 nt, Artificial Sequence
  Description of Artificial Sequence: Synthetic oligonucleotide
ugguuggguggucuccucu

SEQ ID NO: 1882294 - RNA, 19 nt, Artificial Sequence
  Description of Artificial Sequence: Synthetic oligonucleotide
aggccaaguguugaggacu

SEQ ID NO: 1882295 - RNA, 19 nt, Artificial Sequence
  Description of Artificial Sequence: Synthetic oligonucleotide
augguuuauaggguccaca

SEQ ID NO: 1882296 - RNA, 19 nt, Artificial Sequence
  Description of Artificial Sequence: Synthetic oligonucleotide
cuuguuugugggcagaaau

SEQ ID NO: 1882297 - RNA, 19 nt, Artificial Sequence
  Description of Artificial Sequence: Synthetic oligonucleotide
agcaacaugucccgucuua

SEQ ID NO: 1882298 - RNA, 19 nt, Artificial Sequence
  Description of Artificial Sequence: Synthetic oligonucleotide
ccuacagugccuucacacc

SEQ ID NO: 1882299 - RNA, 19 nt, Artificial Sequence
  Description of Artificial Sequence: Synthetic oligonucleotide
cgcucugucucacagacag

SEQ ID NO: 1882300 - RNA, 19 nt, Artificial Sequence
  Description of Artificial Sequence: Synthetic oligonucleotide
gaaagcgcauuaguauauc

SEQ ID NO: 1882301 - RNA, 19 nt, Artificial Sequence
  Description of Artificial Sequence: Synthetic oligonucleotide
auguuggauguuuguugca

SEQ ID NO: 1882302 - RNA, 19 nt, Artificial Sequence
  Description of Artificial Sequence: Synthetic oligonucleotide
gguggcgccauccaugauc

SEQ ID NO: 1882303 - RNA, 19 nt, Artificial Sequence
  Description of Artificial Sequence: Synthetic oligonucleotide
aacuuccgcgccauagcug

SEQ ID NO: 1882304 - RNA, 19 nt, Artificial Sequence
  Description of Artificial Sequence: Synthetic oligonucleotide
caccauaacuucccaucac

SEQ ID NO: 1882305 - RNA, 19 nt, Artificial Sequence
  Description of Artificial Sequence: Synthetic oligonucleotide
uaaaagcguguguguugug

SEQ ID NO: 1882306 - RNA, 19 nt, Artificial Sequence
  Description of Artificial Sequence: Synthetic oligonucleotide
ucuucagcauaggccccgg

SEQ ID NO: 1882307 - RNA, 19 nt, Artificial Sequence
  Description of Artificial Sequence: Synthetic oligonucleotide
agcaaaguugguggcugag

SEQ ID NO: 1882308 - RNA, 19 nt, Artificial Sequence
  Description of Artificial Sequence: Synthetic oligonucleotide
cagcauaggccccggcucc

SEQ ID NO: 1882309 - RNA, 19 nt, Artificial Sequence
  Description of Artificial Sequence: Synthetic oligonucleotide
cauccaugaucauggcguc

SEQ ID NO: 1882310 - RNA, 19 nt, Artificial Sequence
  Description of Artificial Sequence: Synthetic oligonucleotide
uugaaggaucugguguaac

SEQ ID NO: 1882311 - RNA, 19 nt, Artificial Sequence
  Description of Artificial Sequence: Synthetic oligonucleotide
agcuuacacaugaacuuga

SEQ ID NO: 1882312 - RNA, 19 nt, Artificial Sequence
  Description of Artificial Sequence: Synthetic oligonucleotide
agucuccuacacgaccagg

SEQ ID NO: 1882313 - RNA, 19 nt, Artificial Sequence
  Description of Artificial Sequence: Synthetic oligonucleotide
gaggucucccacugcuccc

SEQ ID NO: 1882314 - RNA, 19 nt, Artificial Sequence
  Description of Artificial Sequence: Synthetic oligonucleotide
auaggccccggcuccaggu

SEQ ID NO: 1882315 - RNA, 19 nt, Artificial Sequence
  Description of Artificial Sequence: Synthetic oligonucleotide
ucuccgugccacuccgaug

SEQ ID NO: 1882316 - RNA, 19 nt, Artificial Sequence
  Description of Artificial Sequence: Synthetic oligonucleotide
cugaauucguagagaauua

SEQ ID NO: 1882317 - RNA, 19 nt, Artificial Sequence
  Description of Artificial Sequence: Synthetic oligonucleotide
guccccuacuaaaagcgug

SEQ ID NO: 1882318 - RNA, 19 nt, Artificial Sequence
  Description of Artificial Sequence: Synthetic oligonucleotide
gaagcaacaaggaccggcu

SEQ ID NO: 1882319 - RNA, 19 nt, Artificial Sequence
  Description of Artificial Sequence: Synthetic oligonucleotide
gcaagcggugguugggugg

SEQ ID NO: 1882320 - RNA, 19 nt, Artificial Sequence
  Description of Artificial Sequence: Synthetic oligonucleotide
gaugguuuauaggguccac

SEQ ID NO: 1882321 - RNA, 19 nt, Artificial Sequence
  Description of Artificial Sequence: Synthetic oligonucleotide
ccagacacuaauguccgcc

SEQ ID NO: 1882322 - RNA, 19 nt, Artificial Sequence
  Description of Artificial Sequence: Synthetic oligonucleotide
gcaacuuuccuagcuuuag

SEQ ID NO: 1882323 - RNA, 19 nt, Artificial Sequence
  Description of Artificial Sequence: Synthetic oligonucleotide
agacacuaauguccgccau

SEQ ID NO: 1882324 - RNA, 19 nt, Artificial Sequence
  Description of Artificial Sequence: Synthetic oligonucleotide
uccagacacuaauguccgc

SEQ ID NO: 1882325 - RNA, 19 nt, Artificial Sequence
  Description of Artificial Sequence: Synthetic oligonucleotide
acgguaaaccccaugcuuu

SEQ ID NO: 1882326 - RNA, 19 nt, Artificial Sequence
  Description of Artificial Sequence: Synthetic oligonucleotide
cuuggcagaaagcgcauua

SEQ ID NO: 1882327 - RNA, 19 nt, Artificial Sequence
  Description of Artificial Sequence: Synthetic oligonucleotide
uagcccacuccaagcuacc

SEQ ID NO: 1882328 - RNA, 19 nt, Artificial Sequence
  Description of Artificial Sequence: Synthetic oligonucleotide
cacagcuugguagcuuggc

SEQ ID NO: 1882329 - RNA, 19 nt, Artificial Sequence
  Description of Artificial Sequence: Synthetic oligonucleotide
ugggcagaaauagcccacu

SEQ ID NO: 1882330 - RNA, 19 nt, Artificial Sequence
  Description of Artificial Sequence: Synthetic oligonucleotide
ugugugguccaggacucuc

SEQ ID NO: 1882331 - RNA, 19 nt, Artificial Sequence
  Description of Artificial Sequence: Synthetic oligonucleotide
ccaaguguugaggacuagg

SEQ ID NO: 1882332 - RNA, 19 nt, Artificial Sequence
  Description of Artificial Sequence: Synthetic oligonucleotide
cacuccaagcuaccagaug

SEQ ID NO: 1882333 - RNA, 19 nt, Artificial Sequence
  Description of Artificial Sequence: Synthetic oligonucleotide
uggcugaguccccuacuaa

SEQ ID NO: 1882334 - RNA, 19 nt, Artificial Sequence
  Description of Artificial Sequence: Synthetic oligonucleotide
cagacacuaauguccgcca

SEQ ID NO: 1882335 - RNA, 19 nt, Artificial Sequence
  Description of Artificial Sequence: Synthetic oligonucleotide
caguauuuugaaggaucug

SEQ ID NO: 1882336 - RNA, 19 nt, Artificial Sequence
  Description of Artificial Sequence: Synthetic oligonucleotide
ugccccaaucaugucuuca

SEQ ID NO: 1882337 - RNA, 19 nt, Artificial Sequence
  Description of Artificial Sequence: Synthetic oligonucleotide
uccagguauuggugagucu

SEQ ID NO: 1882338 - RNA, 19 nt, Artificial Sequence
  Description of Artificial Sequence: Synthetic oligonucleotide
uggucuccccaacuucauc

SEQ ID NO: 1882339 - RNA, 19 nt, Artificial Sequence
  Description of Artificial Sequence: Synthetic oligonucleotide
ucccgucuuauggauuaca

SEQ ID NO: 1882340 - RNA, 19 nt, Artificial Sequence
  Description of Artificial Sequence: Synthetic oligonucleotide
agcccacucugaaugaaga

SEQ ID NO: 1882341 - RNA, 19 nt, Artificial Sequence
  Description of Artificial Sequence: Synthetic oligonucleotide
cuacuaaaagcgugugugu

SEQ ID NO: 1882342 - RNA, 19 nt, Artificial Sequence
  Description of Artificial Sequence: Synthetic oligonucleotide
ccguagcguucuuaaaagg

SEQ ID NO: 1882343 - RNA, 19 nt, Artificial Sequence
  Description of Artificial Sequence: Synthetic oligonucleotide
ugcugcguccguagcguuc

SEQ ID NO: 1882344 - RNA, 19 nt, Artificial Sequence
  Description of Artificial Sequence: Synthetic oligonucleotide
ggcaauucuuagaagccca

SEQ ID NO: 1882345 - RNA, 19 nt, Artificial Sequence
  Description of Artificial Sequence: Synthetic oligonucleotide
guguguguuguguggucca

SEQ ID NO: 1882346 - RNA, 19 nt, Artificial Sequence
  Description of Artificial Sequence: Synthetic oligonucleotide
acauucaugguggcgccau

SEQ ID NO: 1882347 - RNA, 19 nt, Artificial Sequence
  Description of Artificial Sequence: Synthetic oligonucleotide
agcguguguguuguguggu

SEQ ID NO: 1882348 - RNA, 19 nt, Artificial Sequence
  Description of Artificial Sequence: Synthetic oligonucleotide
cauaggccccggcuccagg

SEQ ID NO: 1882349 - RNA, 19 nt, Artificial Sequence
  Description of Artificial Sequence: Synthetic oligonucleotide
aggguccacaguauuuuga

SEQ ID NO: 1882350 - RNA, 19 nt, Artificial Sequence
  Description of Artificial Sequence: Synthetic oligonucleotide
aggguggucuccccaacuu

SEQ ID NO: 1882351 - RNA, 19 nt, Artificial Sequence
  Description of Artificial Sequence: Synthetic oligonucleotide
cagaaauagcccacuccaa

SEQ ID NO: 1882352 - RNA, 19 nt, Artificial Sequence
  Description of Artificial Sequence: Synthetic oligonucleotide
cauccccuguggcugcagc

SEQ ID NO: 1882353 - RNA, 19 nt, Artificial Sequence
  Description of Artificial Sequence: Synthetic oligonucleotide
gcaccauaacuucccauca

SEQ ID NO: 1882354 - RNA, 19 nt, Artificial Sequence
  Description of Artificial Sequence: Synthetic oligonucleotide
acacgguagauuagaugca

SEQ ID NO: 1882355 - RNA, 19 nt, Artificial Sequence
  Description of Artificial Sequence: Synthetic oligonucleotide
acggcaagagaagcaacaa

SEQ ID NO: 1882356 - RNA, 19 nt, Artificial Sequence
  Description of Artificial Sequence: Synthetic oligonucleotide
caucacauuggcacauaua

SEQ ID NO: 1882357 - RNA, 19 nt, Artificial Sequence
  Description of Artificial Sequence: Synthetic oligonucleotide
auuuguggaugugcccgca

SEQ ID NO: 1882358 - RNA, 19 nt, Artificial Sequence
  Description of Artificial Sequence: Synthetic oligonucleotide
ccgucuuauggauuacaac

SEQ ID NO: 1882359 - RNA, 19 nt, Artificial Sequence
  Description of Artificial Sequence: Synthetic oligonucleotide
ggcgccauccaugaucaug

SEQ ID NO: 1882360 - RNA, 19 nt, Artificial Sequence
  Description of Artificial Sequence: Synthetic oligonucleotide
cuacuacaugaugccaguc

SEQ ID NO: 1882361 - RNA, 19 nt, Artificial Sequence
  Description of Artificial Sequence: Synthetic oligonucleotide
ggguccacaguauuuugaa

SEQ ID NO: 1882362 - RNA, 19 nt, Artificial Sequence
  Description of Artificial Sequence: Synthetic oligonucleotide
gucccuccagacacuaaug

SEQ ID NO: 1882363 - RNA, 19 nt, Artificial Sequence
  Description of Artificial Sequence: Synthetic oligonucleotide
aguccccuacuaaaagcgu

SEQ ID NO: 1882364 - RNA, 19 nt, Artificial Sequence
  Description of Artificial Sequence: Synthetic oligonucleotide
accagguauuuugaauuuu

SEQ ID NO: 1882365 - RNA, 19 nt, Artificial Sequence
  Description of Artificial Sequence: Synthetic oligonucleotide
gguccaggacucuccgugc

SEQ ID NO: 1882366 - RNA, 19 nt, Artificial Sequence
  Description of Artificial Sequence: Synthetic oligonucleotide
cgguagauuagaugcaguc

SEQ ID NO: 1882367 - RNA, 19 nt, Artificial Sequence
  Description of Artificial Sequence: Synthetic oligonucleotide
cuucagcauaggccccggc

SEQ ID NO: 1882368 - RNA, 19 nt, Artificial Sequence
  Description of Artificial Sequence: Synthetic oligonucleotide
gcgcauuaguauaucacca

SEQ ID NO: 1882369 - RNA, 19 nt, Artificial Sequence
  Description of Artificial Sequence: Synthetic oligonucleotide
caaagccuacagugccuuc

SEQ ID NO: 1882370 - RNA, 19 nt, Artificial Sequence
  Description of Artificial Sequence: Synthetic oligonucleotide
ggcugaguccccuacuaaa

SEQ ID NO: 1882371 - RNA, 19 nt, Artificial Sequence
  Description of Artificial Sequence: Synthetic oligonucleotide
acuuguuugugggcagaaa

SEQ ID NO: 1882372 - RNA, 19 nt, Artificial Sequence
  Description of Artificial Sequence: Synthetic oligonucleotide
acgguagauuagaugcagu

SEQ ID NO: 1882373 - RNA, 19 nt, Artificial Sequence
  Description of Artificial Sequence: Synthetic oligonucleotide
agccuacagugccuucaca

SEQ ID NO: 1882374 - RNA, 19 nt, Artificial Sequence
  Description of Artificial Sequence: Synthetic oligonucleotide
gaugccagucagcaacuuu

SEQ ID NO: 1882375 - RNA, 19 nt, Artificial Sequence
  Description of Artificial Sequence: Synthetic oligonucleotide
guggcugaguccccuacua

SEQ ID NO: 1882376 - RNA, 19 nt, Artificial Sequence
  Description of Artificial Sequence: Synthetic oligonucleotide
accaugccaauaguaucau

SEQ ID NO: 1882377 - RNA, 19 nt, Artificial Sequence
  Description of Artificial Sequence: Synthetic oligonucleotide
ggcacauauaauagcccca

SEQ ID NO: 1882378 - RNA, 19 nt, Artificial Sequence
  Description of Artificial Sequence: Synthetic oligonucleotide
ugccacuccgauggcauuu

SEQ ID NO: 1882379 - RNA, 19 nt, Artificial Sequence
  Description of Artificial Sequence: Synthetic oligonucleotide
augugcccgcagcaacaug

SEQ ID NO: 1882380 - RNA, 19 nt, Artificial Sequence
  Description of Artificial Sequence: Synthetic oligonucleotide
agcguucuuaaaaggccaa

SEQ ID NO: 1882381 - RNA, 19 nt, Artificial Sequence
  Description of Artificial Sequence: Synthetic oligonucleotide
ccacauucaugguggcgcc

SEQ ID NO: 1882382 - RNA, 19 nt, Artificial Sequence
  Description of Artificial Sequence: Synthetic oligonucleotide
cuaacagacacgguagauu

SEQ ID NO: 1882383 - RNA, 19 nt, Artificial Sequence
  Description of Artificial Sequence: Synthetic oligonucleotide
ccuugcgccagagggaccc

SEQ ID NO: 1882384 - RNA, 19 nt, Artificial Sequence
  Description of Artificial Sequence: Synthetic oligonucleotide
guauaucaccauccccugu

SEQ ID NO: 1882385 - RNA, 19 nt, Artificial Sequence
  Description of Artificial Sequence: Synthetic oligonucleotide
cauucaugguggcgccauc

SEQ ID NO: 1882386 - RNA, 19 nt, Artificial Sequence
  Description of Artificial Sequence: Synthetic oligonucleotide
caacuuccgcgccauagcu

SEQ ID NO: 1882387 - RNA, 19 nt, Artificial Sequence
  Description of Artificial Sequence: Synthetic oligonucleotide
agcaacuuuccuagcuuua

SEQ ID NO: 1882388 - RNA, 19 nt, Artificial Sequence
  Description of Artificial Sequence: Synthetic oligonucleotide
cacauauaauagccccaaa

SEQ ID NO: 1882389 - RNA, 19 nt, Artificial Sequence
  Description of Artificial Sequence: Synthetic oligonucleotide
uccgugccacuccgauggc

SEQ ID NO: 1882390 - RNA, 19 nt, Artificial Sequence
  Description of Artificial Sequence: Synthetic oligonucleotide
gcguucuuaaaaggccaag

SEQ ID NO: 1882391 - RNA, 19 nt, Artificial Sequence
  Description of Artificial Sequence: Synthetic oligonucleotide
gguuuauaggguccacagu

SEQ ID NO: 1882392 - RNA, 19 nt, Artificial Sequence
  Description of Artificial Sequence: Synthetic oligonucleotide
agcggugguuggguggucu

SEQ ID NO: 1882393 - RNA, 19 nt, Artificial Sequence
  Description of Artificial Sequence: Synthetic oligonucleotide
caugucccgucuuauggau

SEQ ID NO: 1882394 - RNA, 19 nt, Artificial Sequence
  Description of Artificial Sequence: Synthetic oligonucleotide
ggcaagcggugguugggug

SEQ ID NO: 1882395 - RNA, 19 nt, Artificial Sequence
  Description of Artificial Sequence: Synthetic oligonucleotide
aagcggugguugggugguc

SEQ ID NO: 1882396 - RNA, 19 nt, Artificial Sequence
  Description of Artificial Sequence: Synthetic oligonucleotide
uuccacagcuugguagcuu

SEQ ID NO: 1882397 - RNA, 19 nt, Artificial Sequence
  Description of Artificial Sequence: Synthetic oligonucleotide
caacgguaaaccccaugcu

SEQ ID NO: 1882398 - RNA, 19 nt, Artificial Sequence
  Description of Artificial Sequence: Synthetic oligonucleotide
uugguggcugaguccccua

SEQ ID NO: 1882399 - RNA, 19 nt, Artificial Sequence
  Description of Artificial Sequence: Synthetic oligonucleotide
cagcaaaguugguggcuga

SEQ ID NO: 1882400 - RNA, 19 nt, Artificial Sequence
  Description of Artificial Sequence: Synthetic oligonucleotide
acaugcuaacagacacggu

SEQ ID NO: 1882401 - RNA, 19 nt, Artificial Sequence
  Description of Artificial Sequence: Synthetic oligonucleotide
cuccuacacgaccagguau

SEQ ID NO: 1882402 - RNA, 19 nt, Artificial Sequence
  Description of Artificial Sequence: Synthetic oligonucleotide
cucauauauuccacagcuu

SEQ ID NO: 1882403 - RNA, 19 nt, Artificial Sequence
  Description of Artificial Sequence: Synthetic oligonucleotide
cggcaagagaagcaacaag

SEQ ID NO: 1882404 - RNA, 19 nt, Artificial Sequence
  Description of Artificial Sequence: Synthetic oligonucleotide
ggaucugguguaacucuuc

SEQ ID NO: 1882405 - RNA, 19 nt, Artificial Sequence
  Description of Artificial Sequence: Synthetic oligonucleotide
ugaugccagucagcaacuu

SEQ ID NO: 1882406 - RNA, 19 nt, Artificial Sequence
  Description of Artificial Sequence: Synthetic oligonucleotide
ggaugugcccgcagcaaca

SEQ ID NO: 1882407 - RNA, 19 nt, Artificial Sequence
  Description of Artificial Sequence: Synthetic oligonucleotide
aggccccggcuccagguau

SEQ ID NO: 1882408 - RNA, 19 nt, Artificial Sequence
  Description of Artificial Sequence: Synthetic oligonucleotide
gguauuggugagucuccua

SEQ ID NO: 1882409 - RNA, 19 nt, Artificial Sequence
  Description of Artificial Sequence: Synthetic oligonucleotide
ggguggucuccucuucuca

SEQ ID NO: 1882410 - RNA, 19 nt, Artificial Sequence
  Description of Artificial Sequence: Synthetic oligonucleotide
ccacagcuugguagcuugg

SEQ ID NO: 1882411 - RNA, 19 nt, Artificial Sequence
  Description of Artificial Sequence: Synthetic oligonucleotide
gcagcaacaugucccgucu

SEQ ID NO: 1882412 - RNA, 19 nt, Artificial Sequence
  Description of Artificial Sequence: Synthetic oligonucleotide
ugcguccguagcguucuua

SEQ ID NO: 1882413 - RNA, 19 nt, Artificial Sequence
  Description of Artificial Sequence: Synthetic oligonucleotide
ccaugccaauaguaucaug

SEQ ID NO: 1882414 - RNA, 19 nt, Artificial Sequence
  Description of Artificial Sequence: Synthetic oligonucleotide
gcaacaaggaccggcucaa

SEQ ID NO: 1882415 - RNA, 19 nt, Artificial Sequence
  Description of Artificial Sequence: Synthetic oligonucleotide
guggaugugcccgcagcaa

SEQ ID NO: 1882416 - RNA, 19 nt, Artificial Sequence
  Description of Artificial Sequence: Synthetic oligonucleotide
gcguccguagcguucuuaa

SEQ ID NO: 1882417 - RNA, 19 nt, Artificial Sequence
  Description of Artificial Sequence: Synthetic oligonucleotide
guggugguagacaaaucuu

SEQ ID NO: 1882418 - RNA, 19 nt, Artificial Sequence
  Description of Artificial Sequence: Synthetic oligonucleotide
uuguugcaagcagcaccau

SEQ ID NO: 1882419 - RNA, 19 nt, Artificial Sequence
  Description of Artificial Sequence: Synthetic oligonucleotide
cagcaacuuuccuagcuuu

SEQ ID NO: 1882420 - RNA, 19 nt, Artificial Sequence
  Description of Artificial Sequence: Synthetic oligonucleotide
cccgucuuauggauuacaa

SEQ ID NO: 1882421 - RNA, 19 nt, Artificial Sequence
  Description of Artificial Sequence: Synthetic oligonucleotide
agcuuggcagaaagcgcau

SEQ ID NO: 1882422 - RNA, 19 nt, Artificial Sequence
  Description of Artificial Sequence: Synthetic oligonucleotide
cagugccuucacaccgcuc

SEQ ID NO: 1882423 - RNA, 19 nt, Artificial Sequence
  Description of Artificial Sequence: Synthetic oligonucleotide
cuugcgccagagggacccc

SEQ ID NO: 1882424 - RNA, 19 nt, Artificial Sequence
  Description of Artificial Sequence: Synthetic oligonucleotide
cagacacgguagauuagau

SEQ ID NO: 1882425 - RNA, 19 nt, Artificial Sequence
  Description of Artificial Sequence: Synthetic oligonucleotide
gcuuacacaugaacuugaa

SEQ ID NO: 1882426 - RNA, 19 nt, Artificial Sequence
  Description of Artificial Sequence: Synthetic oligonucleotide
augcugcguccguagcguu

SEQ ID NO: 1882427 - RNA, 19 nt, Artificial Sequence
  Description of Artificial Sequence: Synthetic oligonucleotide
cacauucaugguggcgcca

SEQ ID NO: 1882428 - RNA, 19 nt, Artificial Sequence
  Description of Artificial Sequence: Synthetic oligonucleotide
ugguggcgccauccaugau

SEQ ID NO: 1882429 - RNA, 19 nt, Artificial Sequence
  Description of Artificial Sequence: Synthetic oligonucleotide
cagccauucucaacugcau

SEQ ID NO: 1882430 - RNA, 19 nt, Artificial Sequence
  Description of Artificial Sequence: Synthetic oligonucleotide
ccaauaguaucaugauuau

SEQ ID NO: 1882431 - RNA, 19 nt, Artificial Sequence
  Description of Artificial Sequence: Synthetic oligonucleotide
augucccgucuuauggauu

SEQ ID NO: 1882432 - RNA, 19 nt, Artificial Sequence
  Description of Artificial Sequence: Synthetic oligonucleotide
caagcggugguuggguggu

SEQ ID NO: 1882433 - RNA, 19 nt, Artificial Sequence
  Description of Artificial Sequence: Synthetic oligonucleotide
gcguguguguugugugguc

SEQ ID NO: 1882434 - RNA, 19 nt, Artificial Sequence
  Description of Artificial Sequence: Synthetic oligonucleotide
ccggcucaacuuccgcgcc

SEQ ID NO: 1882435 - RNA, 19 nt, Artificial Sequence
  Description of Artificial Sequence: Synthetic oligonucleotide
cagacagcacagccauucu

SEQ ID NO: 1882436 - RNA, 19 nt, Artificial Sequence
  Description of Artificial Sequence: Synthetic oligonucleotide
cgaccagguauuuugaauu

SEQ ID NO: 1882437 - RNA, 19 nt, Artificial Sequence
  Description of Artificial Sequence: Synthetic oligonucleotide
cucuccgugccacuccgau

SEQ ID NO: 1882438 - RNA, 19 nt, Artificial Sequence
  Description of Artificial Sequence: Synthetic oligonucleotide
gcguccaggguggucuccc

SEQ ID NO: 1882439 - RNA, 19 nt, Artificial Sequence
  Description of Artificial Sequence: Synthetic oligonucleotide
gcuaacagacacgguagau

SEQ ID NO: 1882440 - RNA, 19 nt, Artificial Sequence
  Description of Artificial Sequence: Synthetic oligonucleotide
ccccuacuaaaagcgugug

SEQ ID NO: 1882441 - RNA, 19 nt, Artificial Sequence
  Description of Artificial Sequence: Synthetic oligonucleotide
gguggcugaguccccuacu

SEQ ID NO: 1882442 - RNA, 19 nt, Artificial Sequence
  Description of Artificial Sequence: Synthetic oligonucleotide
cagcaccauaacuucccau

SEQ ID NO: 1882443 - RNA, 19 nt, Artificial Sequence
  Description of Artificial Sequence: Synthetic oligonucleotide
gcuugguagcuuggcagaa

SEQ ID NO: 1882444 - RNA, 19 nt, Artificial Sequence
  Description of Artificial Sequence: Synthetic oligonucleotide
caggguggucuccccaacu

SEQ ID NO: 1882445 - RNA, 19 nt, Artificial Sequence
  Description of Artificial Sequence: Synthetic oligonucleotide
ccaagcuaccagaugguuu

SEQ ID NO: 1882446 - RNA, 19 nt, Artificial Sequence
  Description of Artificial Sequence: Synthetic oligonucleotide
ccaggguggucuccccaac

SEQ ID NO: 1882447 - RNA, 19 nt, Artificial Sequence
  Description of Artificial Sequence: Synthetic oligonucleotide
ggccaaguguugaggacua

SEQ ID NO: 1882448 - RNA, 19 nt, Artificial Sequence
  Description of Artificial Sequence: Synthetic oligonucleotide
cacuaauguccgccaugcu

SEQ ID NO: 1882449 - RNA, 19 nt, Artificial Sequence
  Description of Artificial Sequence: Synthetic oligonucleotide
ggucuccucuucucauaua

SEQ ID NO: 1882450 - RNA, 19 nt, Artificial Sequence
  Description of Artificial Sequence: Synthetic oligonucleotide
acucuccgugccacuccga

SEQ ID NO: 1882451 - RNA, 19 nt, Artificial Sequence
  Description of Artificial Sequence: Synthetic oligonucleotide
gcggugguuggguggucuc

SEQ ID NO: 1882452 - RNA, 19 nt, Artificial Sequence
  Description of Artificial Sequence: Synthetic oligonucleotide
gcugcguccguagcguucu

SEQ ID NO: 1882453 - RNA, 19 nt, Artificial Sequence
  Description of Artificial Sequence: Synthetic oligonucleotide
gcaacaugucccgucuuau

SEQ ID NO: 1882454 - RNA, 19 nt, Artificial Sequence
  Description of Artificial Sequence: Synthetic oligonucleotide
gccagucagcaacuuuccu

SEQ ID NO: 1882455 - RNA, 19 nt, Artificial Sequence
  Description of Artificial Sequence: Synthetic oligonucleotide
uggcgccauccaugaucau

SEQ ID NO: 1882456 - RNA, 19 nt, Artificial Sequence
  Description of Artificial Sequence: Synthetic oligonucleotide
cuucaacgguaaaccccau

SEQ ID NO: 1882457 - RNA, 19 nt, Artificial Sequence
  Description of Artificial Sequence: Synthetic oligonucleotide
cgcauuaguauaucaccau

SEQ ID NO: 1882458 - RNA, 19 nt, Artificial Sequence
  Description of Artificial Sequence: Synthetic oligonucleotide
cugcagcugccccaaucau

SEQ ID NO: 1882459 - RNA, 19 nt, Artificial Sequence
  Description of Artificial Sequence: Synthetic oligonucleotide
cccuacuaaaagcgugugu

SEQ ID NO: 1882460 - RNA, 19 nt, Artificial Sequence
  Description of Artificial Sequence: Synthetic oligonucleotide
ggcugaauucguagagaau

SEQ ID NO: 1882461 - RNA, 19 nt, Artificial Sequence
  Description of Artificial Sequence: Synthetic oligonucleotide
caggacucuccgugccacu

SEQ ID NO: 1882462 - RNA, 19 nt, Artificial Sequence
  Description of Artificial Sequence: Synthetic oligonucleotide
ccccaacuucaucaggacu

SEQ ID NO: 1882463 - RNA, 19 nt, Artificial Sequence
  Description of Artificial Sequence: Synthetic oligonucleotide
ccaucacauuggcacauau

SEQ ID NO: 1882464 - RNA, 19 nt, Artificial Sequence
  Description of Artificial Sequence: Synthetic oligonucleotide
gccccggcuccagguauug

SEQ ID NO: 1882465 - RNA, 19 nt, Artificial Sequence
  Description of Artificial Sequence: Synthetic oligonucleotide
gugccacuccgauggcauu

SEQ ID NO: 1882466 - RNA, 19 nt, Artificial Sequence
  Description of Artificial Sequence: Synthetic oligonucleotide
ccgugccacuccgauggca

SEQ ID NO: 1882467 - RNA, 19 nt, Artificial Sequence
  Description of Artificial Sequence: Synthetic oligonucleotide
cggcucaacuuccgcgcca

SEQ ID NO: 1882468 - RNA, 19 nt, Artificial Sequence
  Description of Artificial Sequence: Synthetic oligonucleotide
gccacuccgauggcauuuu

SEQ ID NO: 1882469 - RNA, 19 nt, Artificial Sequence
  Description of Artificial Sequence: Synthetic oligonucleotide
cugcguccguagcguucuu

SEQ ID NO: 1882470 - RNA, 19 nt, Artificial Sequence
  Description of Artificial Sequence: Synthetic oligonucleotide
ggccccggcuccagguauu

SEQ ID NO: 1882471 - RNA, 19 nt, Artificial Sequence
  Description of Artificial Sequence: Synthetic oligonucleotide
ccgcagcaacaugucccgu

SEQ ID NO: 1882472 - RNA, 19 nt, Artificial Sequence
  Description of Artificial Sequence: Synthetic oligonucleotide
aagauuauuucuuaaauac

SEQ ID NO: 1882473 - RNA, 19 nt, Artificial Sequence
  Description of Artificial Sequence: Synthetic oligonucleotide
acauuaguuacucagaguc

SEQ ID NO: 1882474 - RNA, 19 nt, Artificial Sequence
  Description of Artificial Sequence: Synthetic oligonucleotide
uuuuauucauccaagaacu

SEQ ID NO: 1882475 - RNA, 19 nt, Artificial Sequence
  Description of Artificial Sequence: Synthetic oligonucleotide
aaugaaccaguccuggucc

SEQ ID NO: 1882476 - RNA, 19 nt, Artificial Sequence
  Description of Artificial Sequence: Synthetic oligonucleotide
aaauaaaaggggaaacugc

SEQ ID NO: 1882477 - RNA, 19 nt, Artificial Sequence
  Description of Artificial Sequence: Synthetic oligonucleotide
uuguaauuguagaauaggg

SEQ ID NO: 1882478 - RNA, 19 nt, Artificial Sequence
  Description of Artificial Sequence: Synthetic oligonucleotide
guuacuuuugcucaaaaug

SEQ ID NO: 1882479 - RNA, 19 nt, Artificial Sequence
  Description of Artificial Sequence: Synthetic oligonucleotide
guaauuguagaauagggug

SEQ ID NO: 1882480 - RNA, 19 nt, Artificial Sequence
  Description of Artificial Sequence: Synthetic oligonucleotide
cagaacauaccuuacaagg

SEQ ID NO: 1882481 - RNA, 19 nt, Artificial Sequence
  Description of Artificial Sequence: Synthetic oligonucleotide
ucuuaagcuuuccagaugc

SEQ ID NO: 1882482 - RNA, 19 nt, Artificial Sequence
  Description of Artificial Sequence: Synthetic oligonucleotide
uucaucauggaaaugucag

SEQ ID NO: 1882483 - RNA, 19 nt, Artificial Sequence
  Description of Artificial Sequence: Synthetic oligonucleotide
gauuauuucuuaaauacug

SEQ ID NO: 1882484 - RNA, 19 nt, Artificial Sequence
  Description of Artificial Sequence: Synthetic oligonucleotide
uuacuuuugcucaaaaugu

SEQ ID NO: 1882485 - RNA, 19 nt, Artificial Sequence
  Description of Artificial Sequence: Synthetic oligonucleotide
acaguauccaguuaaacca

SEQ ID NO: 1882486 - RNA, 19 nt, Artificial Sequence
  Description of Artificial Sequence: Synthetic oligonucleotide
uugcauuucacacugggug

SEQ ID NO: 1882487 - RNA, 19 nt, Artificial Sequence
  Description of Artificial Sequence: Synthetic oligonucleotide
uucauuauggagauucuug

SEQ ID NO: 1882488 - RNA, 19 nt, Artificial Sequence
  Description of Artificial Sequence: Synthetic oligonucleotide
uccaagaacuuucaaaucu

SEQ ID NO: 1882489 - RNA, 19 nt, Artificial Sequence
  Description of Artificial Sequence: Synthetic oligonucleotide
uguaauuguagaauagggu

SEQ ID NO: 1882490 - RNA, 19 nt, Artificial Sequence
  Description of Artificial Sequence: Synthetic oligonucleotide
uggagauucuugcagagcc

SEQ ID NO: 1882491 - RNA, 19 nt, Artificial Sequence
  Description of Artificial Sequence: Synthetic oligonucleotide
agaacuuucaaaucugugu

SEQ ID NO: 1882492 - RNA, 19 nt, Artificial Sequence
  Description of Artificial Sequence: Synthetic oligonucleotide
uuuuguacauugcuggccc

SEQ ID NO: 1882493 - RNA, 19 nt, Artificial Sequence
  Description of Artificial Sequence: Synthetic oligonucleotide
ucuuguaauuguagaauag

SEQ ID NO: 1882494 - RNA, 19 nt, Artificial Sequence
  Description of Artificial Sequence: Synthetic oligonucleotide
aaugcagacagaacauacc

SEQ ID NO: 1882495 - RNA, 19 nt, Artificial Sequence
  Description of Artificial Sequence: Synthetic oligonucleotide
aacucuugguccucuuugc

SEQ ID NO: 1882496 - RNA, 19 nt, Artificial Sequence
  Description of Artificial Sequence: Synthetic oligonucleotide
auuaguuacucagagucac

SEQ ID NO: 1882497 - RNA, 19 nt, Artificial Sequence
  Description of Artificial Sequence: Synthetic oligonucleotide
aauaaaaggggaaacugcu

SEQ ID NO: 1882498 - RNA, 19 nt, Artificial Sequence
  Description of Artificial Sequence: Synthetic oligonucleotide
ugauguacuugccacacug

SEQ ID NO: 1882499 - RNA, 19 nt, Artificial Sequence
  Description of Artificial Sequence: Synthetic oligonucleotide
ucauuauggagauucuugc

SEQ ID NO: 1882500 - RNA, 19 nt, Artificial Sequence
  Description of Artificial Sequence: Synthetic oligonucleotide
cacaguauccaguuaaacc

SEQ ID NO: 1882501 - RNA, 19 nt, Artificial Sequence
  Description of Artificial Sequence: Synthetic oligonucleotide
caauugauguacaacuugc

SEQ ID NO: 1882502 - RNA, 19 nt, Artificial Sequence
  Description of Artificial Sequence: Synthetic oligonucleotide
auccaauugauguacaacu

SEQ ID NO: 1882503 - RNA, 19 nt, Artificial Sequence
  Description of Artificial Sequence: Synthetic oligonucleotide
agaagagccaugcucagag

SEQ ID NO: 1882504 - RNA, 19 nt, Artificial Sequence
  Description of Artificial Sequence: Synthetic oligonucleotide
gaacaaaucagcagaacag

SEQ ID NO: 1882505 - RNA, 19 nt, Artificial Sequence
  Description of Artificial Sequence: Synthetic oligonucleotide
uuccuuaaacuccaaaaga

SEQ ID NO: 1882506 - RNA, 19 nt, Artificial Sequence
  Description of Artificial Sequence: Synthetic oligonucleotide
uugauguacaacuugcuuc

SEQ ID NO: 1882507 - RNA, 19 nt, Artificial Sequence
  Description of Artificial Sequence: Synthetic oligonucleotide
guuccuuaaacuccaaaag

SEQ ID NO: 1882508 - RNA, 19 nt, Artificial Sequence
  Description of Artificial Sequence: Synthetic oligonucleotide
auccaguuaaaccaccuuc

SEQ ID NO: 1882509 - RNA, 19 nt, Artificial Sequence
  Description of Artificial Sequence: Synthetic oligonucleotide
uggaauaaacuccuuggca

SEQ ID NO: 1882510 - RNA, 19 nt, Artificial Sequence
  Description of Artificial Sequence: Synthetic oligonucleotide
aguuaaaccaccuucccaa

SEQ ID NO: 1882511 - RNA, 19 nt, Artificial Sequence
  Description of Artificial Sequence: Synthetic oligonucleotide
cuuguaauuguagaauagg

SEQ ID NO: 1882512 - RNA, 19 nt, Artificial Sequence
  Description of Artificial Sequence: Synthetic oligonucleotide
ucagauucaugacugucgc

SEQ ID NO: 1882513 - RNA, 19 nt, Artificial Sequence
  Description of Artificial Sequence: Synthetic oligonucleotide
ucgguagguacacagcagg

SEQ ID NO: 1882514 - RNA, 19 nt, Artificial Sequence
  Description of Artificial Sequence: Synthetic oligonucleotide
acuggauccauucauuaug

SEQ ID NO: 1882515 - RNA, 19 nt, Artificial Sequence
  Description of Artificial Sequence: Synthetic oligonucleotide
uccauguaacucuuggucc

SEQ ID NO: 1882516 - RNA, 19 nt, Artificial Sequence
  Description of Artificial Sequence: Synthetic oligonucleotide
ucucgugcuggaaugaacc

SEQ ID NO: 1882517 - RNA, 19 nt, Artificial Sequence
  Description of Artificial Sequence: Synthetic oligonucleotide
aauccauuuaacugcugcu

SEQ ID NO: 1882518 - RNA, 19 nt, Artificial Sequence
  Description of Artificial Sequence: Synthetic oligonucleotide
uccuggauccaauugaugu

SEQ ID NO: 1882519 - RNA, 19 nt, Artificial Sequence
  Description of Artificial Sequence: Synthetic oligonucleotide
uucagguuacuuuugcuca

SEQ ID NO: 1882520 - RNA, 19 nt, Artificial Sequence
  Description of Artificial Sequence: Synthetic oligonucleotide
auagggugcuuacuaagac

SEQ ID NO: 1882521 - RNA, 19 nt, Artificial Sequence
  Description of Artificial Sequence: Synthetic oligonucleotide
uuacuaagacccaggcugg

SEQ ID NO: 1882522 - RNA, 19 nt, Artificial Sequence
  Description of Artificial Sequence: Synthetic oligonucleotide
ucaaaucuguguuuucuug

SEQ ID NO: 1882523 - RNA, 19 nt, Artificial Sequence
  Description of Artificial Sequence: Synthetic oligonucleotide
acugacaauccauuuaacu

SEQ ID NO: 1882524 - RNA, 19 nt, Artificial Sequence
  Description of Artificial Sequence: Synthetic oligonucleotide
cuugaguagaguucaggcc

SEQ ID NO: 1882525 - RNA, 19 nt, Artificial Sequence
  Description of Artificial Sequence: Synthetic oligonucleotide
ucauggaaaugucaggggu

SEQ ID NO: 1882526 - RNA, 19 nt, Artificial Sequence
  Description of Artificial Sequence: Synthetic oligonucleotide
gaagcagcgguccaagaag

SEQ ID NO: 1882527 - RNA, 19 nt, Artificial Sequence
  Description of Artificial Sequence: Synthetic oligonucleotide
ucaucauggaaaugucagg

SEQ ID NO: 1882528 - RNA, 19 nt, Artificial Sequence
  Description of Artificial Sequence: Synthetic oligonucleotide
gaauagggugcuuacuaag

SEQ ID NO: 1882529 - RNA, 19 nt, Artificial Sequence
  Description of Artificial Sequence: Synthetic oligonucleotide
caucauggaaaugucaggg

SEQ ID NO: 1882530 - RNA, 19 nt, Artificial Sequence
  Description of Artificial Sequence: Synthetic oligonucleotide
uuaaacuccaaaagagauc

SEQ ID NO: 1882531 - RNA, 19 nt, Artificial Sequence
  Description of Artificial Sequence: Synthetic oligonucleotide
cuuugcauuucacacuggg

SEQ ID NO: 1882532 - RNA, 19 nt, Artificial Sequence
  Description of Artificial Sequence: Synthetic oligonucleotide
uaagcuuuccagaugcccu

SEQ ID NO: 1882533 - RNA, 19 nt, Artificial Sequence
  Description of Artificial Sequence: Synthetic oligonucleotide
aguuccuuaaacuccaaaa

SEQ ID NO: 1882534 - RNA, 19 nt, Artificial Sequence
  Description of Artificial Sequence: Synthetic oligonucleotide
uuuuccuuggucaucuuau

SEQ ID NO: 1882535 - RNA, 19 nt, Artificial Sequence
  Description of Artificial Sequence: Synthetic oligonucleotide
agacaaguccuucuggaag

SEQ ID NO: 1882536 - RNA, 19 nt, Artificial Sequence
  Description of Artificial Sequence: Synthetic oligonucleotide
auguccauguaacucuugg

SEQ ID NO: 1882537 - RNA, 19 nt, Artificial Sequence
  Description of Artificial Sequence: Synthetic oligonucleotide
aguaguaccucgcacauua

SEQ ID NO: 1882538 - RNA, 19 nt, Artificial Sequence
  Description of Artificial Sequence: Synthetic oligonucleotide
caauccauuuaacugcugc

SEQ ID NO: 1882539 - RNA, 19 nt, Artificial Sequence
  Description of Artificial Sequence: Synthetic oligonucleotide
aauuguagaauagggugcu

SEQ ID NO: 1882540 - RNA, 19 nt, Artificial Sequence
  Description of Artificial Sequence: Synthetic oligonucleotide
uaacucuugguccucuuug

SEQ ID NO: 1882541 - RNA, 19 nt, Artificial Sequence
  Description of Artificial Sequence: Synthetic oligonucleotide
augacugucgcugacugac

SEQ ID NO: 1882542 - RNA, 19 nt, Artificial Sequence
  Description of Artificial Sequence: Synthetic oligonucleotide
aacaaaucagcagaacaga

SEQ ID NO: 1882543 - RNA, 19 nt, Artificial Sequence
  Description of Artificial Sequence: Synthetic oligonucleotide
ucucgguagguacacagca

SEQ ID NO: 1882544 - RNA, 19 nt, Artificial Sequence
  Description of Artificial Sequence: Synthetic oligonucleotide
gaacagaagagccaugcuc

SEQ ID NO: 1882545 - RNA, 19 nt, Artificial Sequence
  Description of Artificial Sequence: Synthetic oligonucleotide
uagaauagggugcuuacua

SEQ ID NO: 1882546 - RNA, 19 nt, Artificial Sequence
  Description of Artificial Sequence: Synthetic oligonucleotide
gaagauuauuucuuaaaua

SEQ ID NO: 1882547 - RNA, 19 nt, Artificial Sequence
  Description of Artificial Sequence: Synthetic oligonucleotide
agaacauaccuuacaaggg

SEQ ID NO: 1882548 - RNA, 19 nt, Artificial Sequence
  Description of Artificial Sequence: Synthetic oligonucleotide
agauucaugacugucgcug

SEQ ID NO: 1882549 - RNA, 19 nt, Artificial Sequence
  Description of Artificial Sequence: Synthetic oligonucleotide
cuuggagaguaguaccucg

SEQ ID NO: 1882550 - RNA, 19 nt, Artificial Sequence
  Description of Artificial Sequence: Synthetic oligonucleotide
gaacauaccuuacaaggga

SEQ ID NO: 1882551 - RNA, 19 nt, Artificial Sequence
  Description of Artificial Sequence: Synthetic oligonucleotide
acagaacauaccuuacaag

SEQ ID NO: 1882552 - RNA, 19 nt, Artificial Sequence
  Description of Artificial Sequence: Synthetic oligonucleotide
agaagucuugcucuugcag

SEQ ID NO: 1882553 - RNA, 19 nt, Artificial Sequence
  Description of Artificial Sequence: Synthetic oligonucleotide
aagucuugcucuugcagcu

SEQ ID NO: 1882554 - RNA, 19 nt, Artificial Sequence
  Description of Artificial Sequence: Synthetic oligonucleotide
uuaaaccaccuucccaacc

SEQ ID NO: 1882555 - RNA, 19 nt, Artificial Sequence
  Description of Artificial Sequence: Synthetic oligonucleotide
uccuggaauaaacuccuug

SEQ ID NO: 1882556 - RNA, 19 nt, Artificial Sequence
  Description of Artificial Sequence: Synthetic oligonucleotide
aacagcucaguacuucacu

SEQ ID NO: 1882557 - RNA, 19 nt, Artificial Sequence
  Description of Artificial Sequence: Synthetic oligonucleotide
ugcaguuccuuaaacucca

SEQ ID NO: 1882558 - RNA, 19 nt, Artificial Sequence
  Description of Artificial Sequence: Synthetic oligonucleotide
aaacuucuuaagcuuucca

SEQ ID NO: 1882559 - RNA, 19 nt, Artificial Sequence
  Description of Artificial Sequence: Synthetic oligonucleotide
gacaagacaaguccuucug

SEQ ID NO: 1882560 - RNA, 19 nt, Artificial Sequence
  Description of Artificial Sequence: Synthetic oligonucleotide
aauaaacuccuuggcaucu

SEQ ID NO: 1882561 - RNA, 19 nt, Artificial Sequence
  Description of Artificial Sequence: Synthetic oligonucleotide
uguagaauagggugcuuac

SEQ ID NO: 1882562 - RNA, 19 nt, Artificial Sequence
  Description of Artificial Sequence: Synthetic oligonucleotide
cucaguacuucacuccugg

SEQ ID NO: 1882563 - RNA, 19 nt, Artificial Sequence
  Description of Artificial Sequence: Synthetic oligonucleotide
gaaugaaccaguccugguc

SEQ ID NO: 1882564 - RNA, 19 nt, Artificial Sequence
  Description of Artificial Sequence: Synthetic oligonucleotide
ugcuuacuaagacccaggc

SEQ ID NO: 1882565 - RNA, 19 nt, Artificial Sequence
  Description of Artificial Sequence: Synthetic oligonucleotide
aaguccuucuggaagcuuc

SEQ ID NO: 1882566 - RNA, 19 nt, Artificial Sequence
  Description of Artificial Sequence: Synthetic oligonucleotide
cucuuugcauuucacacug

SEQ ID NO: 1882567 - RNA, 19 nt, Artificial Sequence
  Description of Artificial Sequence: Synthetic oligonucleotide
uguacaacuugcuuccauc

SEQ ID NO: 1882568 - RNA, 19 nt, Artificial Sequence
  Description of Artificial Sequence: Synthetic oligonucleotide
gguacuucaguucaucaug

SEQ ID NO: 1882569 - RNA, 19 nt, Artificial Sequence
  Description of Artificial Sequence: Synthetic oligonucleotide
aacccaacccgccuggcug

SEQ ID NO: 1882570 - RNA, 19 nt, Artificial Sequence
  Description of Artificial Sequence: Synthetic oligonucleotide
uguauucugcaaauggguu

SEQ ID NO: 1882571 - RNA, 19 nt, Artificial Sequence
  Description of Artificial Sequence: Synthetic oligonucleotide
cuguaagugucccauaguc

SEQ ID NO: 1882572 - RNA, 19 nt, Artificial Sequence
  Description of Artificial Sequence: Synthetic oligonucleotide
uuugcauuucacacugggu

SEQ ID NO: 1882573 - RNA, 19 nt, Artificial Sequence
  Description of Artificial Sequence: Synthetic oligonucleotide
aaugcagcuugguguagug

SEQ ID NO: 1882574 - RNA, 19 nt, Artificial Sequence
  Description of Artificial Sequence: Synthetic oligonucleotide
auccaagaacuuucaaauc

SEQ ID NO: 1882575 - RNA, 19 nt, Artificial Sequence
  Description of Artificial Sequence: Synthetic oligonucleotide
uguagugcuugcauagcac

SEQ ID NO: 1882576 - RNA, 19 nt, Artificial Sequence
  Description of Artificial Sequence: Synthetic oligonucleotide
ggauccauucauuauggag

SEQ ID NO: 1882577 - RNA, 19 nt, Artificial Sequence
  Description of Artificial Sequence: Synthetic oligonucleotide
gacagaacauaccuuacaa

SEQ ID NO: 1882578 - RNA, 19 nt, Artificial Sequence
  Description of Artificial Sequence: Synthetic oligonucleotide
ugcauuucacacuggguga

SEQ ID NO: 1882579 - RNA, 19 nt, Artificial Sequence
  Description of Artificial Sequence: Synthetic oligonucleotide
gagaguaguaccucgcaca

SEQ ID NO: 1882580 - RNA, 19 nt, Artificial Sequence
  Description of Artificial Sequence: Synthetic oligonucleotide
uuuugcuugaaugcagaca

SEQ ID NO: 1882581 - RNA, 19 nt, Artificial Sequence
  Description of Artificial Sequence: Synthetic oligonucleotide
aauagggugcuuacuaaga

SEQ ID NO: 1882582 - RNA, 19 nt, Artificial Sequence
  Description of Artificial Sequence: Synthetic oligonucleotide
agcagggaagauuauuucu

SEQ ID NO: 1882583 - RNA, 19 nt, Artificial Sequence
  Description of Artificial Sequence: Synthetic oligonucleotide
guuacucagagucacagua

SEQ ID NO: 1882584 - RNA, 19 nt, Artificial Sequence
  Description of Artificial Sequence: Synthetic oligonucleotide
guacaacuugcuuccaucc

SEQ ID NO: 1882585 - RNA, 19 nt, Artificial Sequence
  Description of Artificial Sequence: Synthetic oligonucleotide
ccuggaauaaacuccuugg

SEQ ID NO: 1882586 - RNA, 19 nt, Artificial Sequence
  Description of Artificial Sequence: Synthetic oligonucleotide
gaagcuuccaacagcucag

SEQ ID NO: 1882587 - RNA, 19 nt, Artificial Sequence
  Description of Artificial Sequence: Synthetic oligonucleotide
guacuugccacacuggauc

SEQ ID NO: 1882588 - RNA, 19 nt, Artificial Sequence
  Description of Artificial Sequence: Synthetic oligonucleotide
cuucacuccuggaauaaac

SEQ ID NO: 1882589 - RNA, 19 nt, Artificial Sequence
  Description of Artificial Sequence: Synthetic oligonucleotide
ugaguagaguucaggccag

SEQ ID NO: 1882590 - RNA, 19 nt, Artificial Sequence
  Description of Artificial Sequence: Synthetic oligonucleotide
ugggugauguacuugccac

SEQ ID NO: 1882591 - RNA, 19 nt, Artificial Sequence
  Description of Artificial Sequence: Synthetic oligonucleotide
ugcauagcacaugugaggu

SEQ ID NO: 1882592 - RNA, 19 nt, Artificial Sequence
  Description of Artificial Sequence: Synthetic oligonucleotide
aagaacuuucaaaucugug

SEQ ID NO: 1882593 - RNA, 19 nt, Artificial Sequence
  Description of Artificial Sequence: Synthetic oligonucleotide
aagcuuuccagaugcccug

SEQ ID NO: 1882594 - RNA, 19 nt, Artificial Sequence
  Description of Artificial Sequence: Synthetic oligonucleotide
uacucagagucacaguauc

SEQ ID NO: 1882595 - RNA, 19 nt, Artificial Sequence
  Description of Artificial Sequence: Synthetic oligonucleotide
aacagcugcaguuccuuaa

SEQ ID NO: 1882596 - RNA, 19 nt, Artificial Sequence
  Description of Artificial Sequence: Synthetic oligonucleotide
auugauguacaacuugcuu

SEQ ID NO: 1882597 - RNA, 19 nt, Artificial Sequence
  Description of Artificial Sequence: Synthetic oligonucleotide
aauugauguacaacuugcu

SEQ ID NO: 1882598 - RNA, 19 nt, Artificial Sequence
  Description of Artificial Sequence: Synthetic oligonucleotide
aguauccaguuaaaccacc

SEQ ID NO: 1882599 - RNA, 19 nt, Artificial Sequence
  Description of Artificial Sequence: Synthetic oligonucleotide
aagacaaguccuucuggaa

SEQ ID NO: 1882600 - RNA, 19 nt, Artificial Sequence
  Description of Artificial Sequence: Synthetic oligonucleotide
uacauugcuggccccaggu

SEQ ID NO: 1882601 - RNA, 19 nt, Artificial Sequence
  Description of Artificial Sequence: Synthetic oligonucleotide
cugcucugaacaaaucagc

SEQ ID NO: 1882602 - RNA, 19 nt, Artificial Sequence
  Description of Artificial Sequence: Synthetic oligonucleotide
uuggagaguaguaccucgc

SEQ ID NO: 1882603 - RNA, 19 nt, Artificial Sequence
  Description of Artificial Sequence: Synthetic oligonucleotide
ugucccauagucugaggca

SEQ ID NO: 1882604 - RNA, 19 nt, Artificial Sequence
  Description of Artificial Sequence: Synthetic oligonucleotide
aacuccuuggcaucuggau

SEQ ID NO: 1882605 - RNA, 19 nt, Artificial Sequence
  Description of Artificial Sequence: Synthetic oligonucleotide
uacaacuugcuuccaucca

SEQ ID NO: 1882606 - RNA, 19 nt, Artificial Sequence
  Description of Artificial Sequence: Synthetic oligonucleotide
agggcuuggagaguaguac

SEQ ID NO: 1882607 - RNA, 19 nt, Artificial Sequence
  Description of Artificial Sequence: Synthetic oligonucleotide
cuuugugggcuacugguac

SEQ ID NO: 1882608 - RNA, 19 nt, Artificial Sequence
  Description of Artificial Sequence: Synthetic oligonucleotide
agacaagggcuuugugggc

SEQ ID NO: 1882609 - RNA, 19 nt, Artificial Sequence
  Description of Artificial Sequence: Synthetic oligonucleotide
uagcucuuguaauuguaga

SEQ ID NO: 1882610 - RNA, 19 nt, Artificial Sequence
  Description of Artificial Sequence: Synthetic oligonucleotide
ugcaaauggguuuuccuuu

SEQ ID NO: 1882611 - RNA, 19 nt, Artificial Sequence
  Description of Artificial Sequence: Synthetic oligonucleotide
ugggcuacugguacuucag

SEQ ID NO: 1882612 - RNA, 19 nt, Artificial Sequence
  Description of Artificial Sequence: Synthetic oligonucleotide
agauuauuucuuaaauacu

SEQ ID NO: 1882613 - RNA, 19 nt, Artificial Sequence
  Description of Artificial Sequence: Synthetic oligonucleotide
cugccucucgccuucaccc

SEQ ID NO: 1882614 - RNA, 19 nt, Artificial Sequence
  Description of Artificial Sequence: Synthetic oligonucleotide
auagcucuuguaauuguag

SEQ ID NO: 1882615 - RNA, 19 nt, Artificial Sequence
  Description of Artificial Sequence: Synthetic oligonucleotide
accuucccaacccaacccg

SEQ ID NO: 1882616 - RNA, 19 nt, Artificial Sequence
  Description of Artificial Sequence: Synthetic oligonucleotide
uuaguuacucagagucaca

SEQ ID NO: 1882617 - RNA, 19 nt, Artificial Sequence
  Description of Artificial Sequence: Synthetic oligonucleotide
auaaaaggggaaacugcuc

SEQ ID NO: 1882618 - RNA, 19 nt, Artificial Sequence
  Description of Artificial Sequence: Synthetic oligonucleotide
acuugcuuccauccaaagu

SEQ ID NO: 1882619 - RNA, 19 nt, Artificial Sequence
  Description of Artificial Sequence: Synthetic oligonucleotide
cuuaaacuccaaaagagau

SEQ ID NO: 1882620 - RNA, 19 nt, Artificial Sequence
  Description of Artificial Sequence: Synthetic oligonucleotide
uuauucauccaagaacuuu

SEQ ID NO: 1882621 - RNA, 19 nt, Artificial Sequence
  Description of Artificial Sequence: Synthetic oligonucleotide
uaccucgcacauuaguuac

SEQ ID NO: 1882622 - RNA, 19 nt, Artificial Sequence
  Description of Artificial Sequence: Synthetic oligonucleotide
uguacuugccacacuggau

SEQ ID NO: 1882623 - RNA, 19 nt, Artificial Sequence
  Description of Artificial Sequence: Synthetic oligonucleotide
ugcuugaaugcagacagaa

SEQ ID NO: 1882624 - RNA, 19 nt, Artificial Sequence
  Description of Artificial Sequence: Synthetic oligonucleotide
agagucacaguauccaguu

SEQ ID NO: 1882625 - RNA, 19 nt, Artificial Sequence
  Description of Artificial Sequence: Synthetic oligonucleotide
uccaauugauguacaacuu

SEQ ID NO: 1882626 - RNA, 19 nt, Artificial Sequence
  Description of Artificial Sequence: Synthetic oligonucleotide
ugucuauugaaauccucuu

SEQ ID NO: 1882627 - RNA, 19 nt, Artificial Sequence
  Description of Artificial Sequence: Synthetic oligonucleotide
agguccuggauccaauuga

SEQ ID NO: 1882628 - RNA, 19 nt, Artificial Sequence
  Description of Artificial Sequence: Synthetic oligonucleotide
ugaguguugcagcugguuu

SEQ ID NO: 1882629 - RNA, 19 nt, Artificial Sequence
  Description of Artificial Sequence: Synthetic oligonucleotide
uaagugucccauagucuga

SEQ ID NO: 1882630 - RNA, 19 nt, Artificial Sequence
  Description of Artificial Sequence: Synthetic oligonucleotide
uaguaccucgcacauuagu

SEQ ID NO: 1882631 - RNA, 19 nt, Artificial Sequence
  Description of Artificial Sequence: Synthetic oligonucleotide
agaauagggugcuuacuaa

SEQ ID NO: 1882632 - RNA, 19 nt, Artificial Sequence
  Description of Artificial Sequence: Synthetic oligonucleotide
gagauucuugcagagccug

SEQ ID NO: 1882633 - RNA, 19 nt, Artificial Sequence
  Description of Artificial Sequence: Synthetic oligonucleotide
ggggaaacugcucugaaca

SEQ ID NO: 1882634 - RNA, 19 nt, Artificial Sequence
  Description of Artificial Sequence: Synthetic oligonucleotide
uuacucagagucacaguau

SEQ ID NO: 1882635 - RNA, 19 nt, Artificial Sequence
  Description of Artificial Sequence: Synthetic oligonucleotide
ucuuugcauuucacacugg

SEQ ID NO: 1882636 - RNA, 19 nt, Artificial Sequence
  Description of Artificial Sequence: Synthetic oligonucleotide
gcacauuaguuacucagag

SEQ ID NO: 1882637 - RNA, 19 nt, Artificial Sequence
  Description of Artificial Sequence: Synthetic oligonucleotide
cuaagacccaggcuggcac

SEQ ID NO: 1882638 - RNA, 19 nt, Artificial Sequence
  Description of Artificial Sequence: Synthetic oligonucleotide
uggagaguaguaccucgca

SEQ ID NO: 1882639 - RNA, 19 nt, Artificial Sequence
  Description of Artificial Sequence: Synthetic oligonucleotide
auggagauucuugcagagc

SEQ ID NO: 1882640 - RNA, 19 nt, Artificial Sequence
  Description of Artificial Sequence: Synthetic oligonucleotide
aggccuggaaugcagcuug

SEQ ID NO: 1882641 - RNA, 19 nt, Artificial Sequence
  Description of Artificial Sequence: Synthetic oligonucleotide
acugguacuucaguucauc

SEQ ID NO: 1882642 - RNA, 19 nt, Artificial Sequence
  Description of Artificial Sequence: Synthetic oligonucleotide
uuuauucauccaagaacuu

SEQ ID NO: 1882643 - RNA, 19 nt, Artificial Sequence
  Description of Artificial Sequence: Synthetic oligonucleotide
cauccaagaacuuucaaau

SEQ ID NO: 1882644 - RNA, 19 nt, Artificial Sequence
  Description of Artificial Sequence: Synthetic oligonucleotide
uguccauguaacucuuggu

SEQ ID NO: 1882645 - RNA, 19 nt, Artificial Sequence
  Description of Artificial Sequence: Synthetic oligonucleotide
gauucuugcagagccugug

SEQ ID NO: 1882646 - RNA, 19 nt, Artificial Sequence
  Description of Artificial Sequence: Synthetic oligonucleotide
ugguacuucaguucaucau

SEQ ID NO: 1882647 - RNA, 19 nt, Artificial Sequence
  Description of Artificial Sequence: Synthetic oligonucleotide
ucuugguccucuuugcauu

SEQ ID NO: 1882648 - RNA, 19 nt, Artificial Sequence
  Description of Artificial Sequence: Synthetic oligonucleotide
gaagagccaugcucagagg

SEQ ID NO: 1882649 - RNA, 19 nt, Artificial Sequence
  Description of Artificial Sequence: Synthetic oligonucleotide
cuggauccaauugauguac

SEQ ID NO: 1882650 - RNA, 19 nt, Artificial Sequence
  Description of Artificial Sequence: Synthetic oligonucleotide
caguauccaguuaaaccac

SEQ ID NO: 1882651 - RNA, 19 nt, Artificial Sequence
  Description of Artificial Sequence: Synthetic oligonucleotide
caagacaaguccuucugga

SEQ ID NO: 1882652 - RNA, 19 nt, Artificial Sequence
  Description of Artificial Sequence: Synthetic oligonucleotide
uggaaugcagcuuggugua

SEQ ID NO: 1882653 - RNA, 19 nt, Artificial Sequence
  Description of Artificial Sequence: Synthetic oligonucleotide
uuccuucuuaccacccagc

SEQ ID NO: 1882654 - RNA, 19 nt, Artificial Sequence
  Description of Artificial Sequence: Synthetic oligonucleotide
guagguacacagcagggaa

SEQ ID NO: 1882655 - RNA, 19 nt, Artificial Sequence
  Description of Artificial Sequence: Synthetic oligonucleotide
aaaccaccuucccaaccca

SEQ ID NO: 1882656 - RNA, 19 nt, Artificial Sequence
  Description of Artificial Sequence: Synthetic oligonucleotide
aaacugcucugaacaaauc

SEQ ID NO: 1882657 - RNA, 19 nt, Artificial Sequence
  Description of Artificial Sequence: Synthetic oligonucleotide
agaguaguaccucgcacau

SEQ ID NO: 1882658 - RNA, 19 nt, Artificial Sequence
  Description of Artificial Sequence: Synthetic oligonucleotide
cuuaagcuuuccagaugcc

SEQ ID NO: 1882659 - RNA, 19 nt, Artificial Sequence
  Description of Artificial Sequence: Synthetic oligonucleotide
ccauucauuauggagauuc

SEQ ID NO: 1882660 - RNA, 19 nt, Artificial Sequence
  Description of Artificial Sequence: Synthetic oligonucleotide
gauucaugacugucgcuga

SEQ ID NO: 1882661 - RNA, 19 nt, Artificial Sequence
  Description of Artificial Sequence: Synthetic oligonucleotide
ugucgcugacugacaaucc

SEQ ID NO: 1882662 - RNA, 19 nt, Artificial Sequence
  Description of Artificial Sequence: Synthetic oligonucleotide
uuuguacauugcuggcccc

SEQ ID NO: 1882663 - RNA, 19 nt, Artificial Sequence
  Description of Artificial Sequence: Synthetic oligonucleotide
aacauaccuuacaagggaa

SEQ ID NO: 1882664 - RNA, 19 nt, Artificial Sequence
  Description of Artificial Sequence: Synthetic oligonucleotide
ucgugcuggaaugaaccag

SEQ ID NO: 1882665 - RNA, 19 nt, Artificial Sequence
  Description of Artificial Sequence: Synthetic oligonucleotide
ggaagcuuccaacagcuca

SEQ ID NO: 1882666 - RNA, 19 nt, Artificial Sequence
  Description of Artificial Sequence: Synthetic oligonucleotide
cuacugguacuucaguuca

SEQ ID NO: 1882667 - RNA, 19 nt, Artificial Sequence
  Description of Artificial Sequence: Synthetic oligonucleotide
caaacuucuuaagcuuucc

SEQ ID NO: 1882668 - RNA, 19 nt, Artificial Sequence
  Description of Artificial Sequence: Synthetic oligonucleotide
aaaacagcugcaguuccuu

SEQ ID NO: 1882669 - RNA, 19 nt, Artificial Sequence
  Description of Artificial Sequence: Synthetic oligonucleotide
cauuauggagauucuugca

SEQ ID NO: 1882670 - RNA, 19 nt, Artificial Sequence
  Description of Artificial Sequence: Synthetic oligonucleotide
uacggggacaagacaaguc

SEQ ID NO: 1882671 - RNA, 19 nt, Artificial Sequence
  Description of Artificial Sequence: Synthetic oligonucleotide
cuggaaugaaccaguccug

SEQ ID NO: 1882672 - RNA, 19 nt, Artificial Sequence
  Description of Artificial Sequence: Synthetic oligonucleotide
uuugugggcuacugguacu

SEQ ID NO: 1882673 - RNA, 19 nt, Artificial Sequence
  Description of Artificial Sequence: Synthetic oligonucleotide
uagucugaggcaggucucg

SEQ ID NO: 1882674 - RNA, 19 nt, Artificial Sequence
  Description of Artificial Sequence: Synthetic oligonucleotide
cauuaguuacucagaguca

SEQ ID NO: 1882675 - RNA, 19 nt, Artificial Sequence
  Description of Artificial Sequence: Synthetic oligonucleotide
cuuccaacagcucaguacu

SEQ ID NO: 1882676 - RNA, 19 nt, Artificial Sequence
  Description of Artificial Sequence: Synthetic oligonucleotide
uauccaguuaaaccaccuu

SEQ ID NO: 1882677 - RNA, 19 nt, Artificial Sequence
  Description of Artificial Sequence: Synthetic oligonucleotide
gcucugaacaaaucagcag

SEQ ID NO: 1882678 - RNA, 19 nt, Artificial Sequence
  Description of Artificial Sequence: Synthetic oligonucleotide
uggauccaauugauguaca

SEQ ID NO: 1882679 - RNA, 19 nt, Artificial Sequence
  Description of Artificial Sequence: Synthetic oligonucleotide
auuucacacugggugaugu

SEQ ID NO: 1882680 - RNA, 19 nt, Artificial Sequence
  Description of Artificial Sequence: Synthetic oligonucleotide
uacuguuuuccuuggucau

SEQ ID NO: 1882681 - RNA, 19 nt, Artificial Sequence
  Description of Artificial Sequence: Synthetic oligonucleotide
cucuuguaauuguagaaua

SEQ ID NO: 1882682 - RNA, 19 nt, Artificial Sequence
  Description of Artificial Sequence: Synthetic oligonucleotide
gcugguuuacaucuccuug

SEQ ID NO: 1882683 - RNA, 19 nt, Artificial Sequence
  Description of Artificial Sequence: Synthetic oligonucleotide
acccaacccgccuggcugc

SEQ ID NO: 1882684 - RNA, 19 nt, Artificial Sequence
  Description of Artificial Sequence: Synthetic oligonucleotide
cuggaaugcagcuuggugu

SEQ ID NO: 1882685 - RNA, 19 nt, Artificial Sequence
  Description of Artificial Sequence: Synthetic oligonucleotide
agggaagauuauuucuuaa

SEQ ID NO: 1882686 - RNA, 19 nt, Artificial Sequence
  Description of Artificial Sequence: Synthetic oligonucleotide
uguacauugcuggccccag

SEQ ID NO: 1882687 - RNA, 19 nt, Artificial Sequence
  Description of Artificial Sequence: Synthetic oligonucleotide
cuucccaacccaacccgcc

SEQ ID NO: 1882688 - RNA, 19 nt, Artificial Sequence
  Description of Artificial Sequence: Synthetic oligonucleotide
cagacagaacauaccuuac

SEQ ID NO: 1882689 - RNA, 19 nt, Artificial Sequence
  Description of Artificial Sequence: Synthetic oligonucleotide
cucgguagguacacagcag

SEQ ID NO: 1882690 - RNA, 19 nt, Artificial Sequence
  Description of Artificial Sequence: Synthetic oligonucleotide
aacccgccuggcugcacac

SEQ ID NO: 1882691 - RNA, 19 nt, Artificial Sequence
  Description of Artificial Sequence: Synthetic oligonucleotide
agugcuugcauagcacaug

SEQ ID NO: 1882692 - RNA, 19 nt, Artificial Sequence
  Description of Artificial Sequence: Synthetic oligonucleotide
cucucgguagguacacagc

SEQ ID NO: 1882693 - RNA, 19 nt, Artificial Sequence
  Description of Artificial Sequence: Synthetic oligonucleotide
ggaauaaacuccuuggcau

SEQ ID NO: 1882694 - RNA, 19 nt, Artificial Sequence
  Description of Artificial Sequence: Synthetic oligonucleotide
uuuuccucauguccaugua

SEQ ID NO: 1882695 - RNA, 19 nt, Artificial Sequence
  Description of Artificial Sequence: Synthetic oligonucleotide
cugucgcugacugacaauc

SEQ ID NO: 1882696 - RNA, 19 nt, Artificial Sequence
  Description of Artificial Sequence: Synthetic oligonucleotide
cugucuauugaaauccucu

SEQ ID NO: 1882697 - RNA, 19 nt, Artificial Sequence
  Description of Artificial Sequence: Synthetic oligonucleotide
ucagcgucgucaucugccu

SEQ ID NO: 1882698 - RNA, 19 nt, Artificial Sequence
  Description of Artificial Sequence: Synthetic oligonucleotide
ccaagaacuuucaaaucug

SEQ ID NO: 1882699 - RNA, 19 nt, Artificial Sequence
  Description of Artificial Sequence: Synthetic oligonucleotide
gagccuguguucagcgucg

SEQ ID NO: 1882700 - RNA, 19 nt, Artificial Sequence
  Description of Artificial Sequence: Synthetic oligonucleotide
gacccaggcuggcacaggc

SEQ ID NO: 1882701 - RNA, 19 nt, Artificial Sequence
  Description of Artificial Sequence: Synthetic oligonucleotide
aguaccucgcacauuaguu

SEQ ID NO: 1882702 - RNA, 19 nt, Artificial Sequence
  Description of Artificial Sequence: Synthetic oligonucleotide
acaaaucagcagaacagaa

SEQ ID NO: 1882703 - RNA, 19 nt, Artificial Sequence
  Description of Artificial Sequence: Synthetic oligonucleotide
uucaugacugucgcugacu

SEQ ID NO: 1882704 - RNA, 19 nt, Artificial Sequence
  Description of Artificial Sequence: Synthetic oligonucleotide
acacuggauccauucauua

SEQ ID NO: 1882705 - RNA, 19 nt, Artificial Sequence
  Description of Artificial Sequence: Synthetic oligonucleotide
ucgcugacugacaauccau

SEQ ID NO: 1882706 - RNA, 19 nt, Artificial Sequence
  Description of Artificial Sequence: Synthetic oligonucleotide
acagcagggaagauuauuu

SEQ ID NO: 1882707 - RNA, 19 nt, Artificial Sequence
  Description of Artificial Sequence: Synthetic oligonucleotide
ggaagauuauuucuuaaau

SEQ ID NO: 1882708 - RNA, 19 nt, Artificial Sequence
  Description of Artificial Sequence: Synthetic oligonucleotide
gaguguugcagcugguuua

SEQ ID NO: 1882709 - RNA, 19 nt, Artificial Sequence
  Description of Artificial Sequence: Synthetic oligonucleotide
auagucugaggcaggucuc

SEQ ID NO: 1882710 - RNA, 19 nt, Artificial Sequence
  Description of Artificial Sequence: Synthetic oligonucleotide
aagcagcgguccaagaagu

SEQ ID NO: 1882711 - RNA, 19 nt, Artificial Sequence
  Description of Artificial Sequence: Synthetic oligonucleotide
uuguacauugcuggcccca

SEQ ID NO: 1882712 - RNA, 19 nt, Artificial Sequence
  Description of Artificial Sequence: Synthetic oligonucleotide
gugcuuacuaagacccagg

SEQ ID NO: 1882713 - RNA, 19 nt, Artificial Sequence
  Description of Artificial Sequence: Synthetic oligonucleotide
uggauccauucauuaugga

SEQ ID NO: 1882714 - RNA, 19 nt, Artificial Sequence
  Description of Artificial Sequence: Synthetic oligonucleotide
ggugcuuacuaagacccag

SEQ ID NO: 1882715 - RNA, 19 nt, Artificial Sequence
  Description of Artificial Sequence: Synthetic oligonucleotide
aguucaggccaggagacaa

SEQ ID NO: 1882716 - RNA, 19 nt, Artificial Sequence
  Description of Artificial Sequence: Synthetic oligonucleotide
aaacagcugcaguuccuua

SEQ ID NO: 1882717 - RNA, 19 nt, Artificial Sequence
  Description of Artificial Sequence: Synthetic oligonucleotide
ucaguacuucacuccugga

SEQ ID NO: 1882718 - RNA, 19 nt, Artificial Sequence
  Description of Artificial Sequence: Synthetic oligonucleotide
gcucucgguagguacacag

SEQ ID NO: 1882719 - RNA, 19 nt, Artificial Sequence
  Description of Artificial Sequence: Synthetic oligonucleotide
agguacggggacaagacaa

SEQ ID NO: 1882720 - RNA, 19 nt, Artificial Sequence
  Description of Artificial Sequence: Synthetic oligonucleotide
ugcagagccuguguucagc

SEQ ID NO: 1882721 - RNA, 19 nt, Artificial Sequence
  Description of Artificial Sequence: Synthetic oligonucleotide
gggaagauuauuucuuaaa

SEQ ID NO: 1882722 - RNA, 19 nt, Artificial Sequence
  Description of Artificial Sequence: Synthetic oligonucleotide
auucauuauggagauucuu

SEQ ID NO: 1882723 - RNA, 19 nt, Artificial Sequence
  Description of Artificial Sequence: Synthetic oligonucleotide
ugcuugcauagcacaugug

SEQ ID NO: 1882724 - RNA, 19 nt, Artificial Sequence
  Description of Artificial Sequence: Synthetic oligonucleotide
caguuaaaccaccuuccca

SEQ ID NO: 1882725 - RNA, 19 nt, Artificial Sequence
  Description of Artificial Sequence: Synthetic oligonucleotide
uuccauccaaaguuuuauu

SEQ ID NO: 1882726 - RNA, 19 nt, Artificial Sequence
  Description of Artificial Sequence: Synthetic oligonucleotide
ccaaucauagcucuuguaa

SEQ ID NO: 1882727 - RNA, 19 nt, Artificial Sequence
  Description of Artificial Sequence: Synthetic oligonucleotide
cacccagcugccaaacuuc

SEQ ID NO: 1882728 - RNA, 19 nt, Artificial Sequence
  Description of Artificial Sequence: Synthetic oligonucleotide
guacauugcuggccccagg

SEQ ID NO: 1882729 - RNA, 19 nt, Artificial Sequence
  Description of Artificial Sequence: Synthetic oligonucleotide
uugcuugaaugcagacaga

SEQ ID NO: 1882730 - RNA, 19 nt, Artificial Sequence
  Description of Artificial Sequence: Synthetic oligonucleotide
gucgcugacugacaaucca

SEQ ID NO: 1882731 - RNA, 19 nt, Artificial Sequence
  Description of Artificial Sequence: Synthetic oligonucleotide
cuuaccacccagcugccaa

SEQ ID NO: 1882732 - RNA, 19 nt, Artificial Sequence
  Description of Artificial Sequence: Synthetic oligonucleotide
guaccucgcacauuaguua

SEQ ID NO: 1882733 - RNA, 19 nt, Artificial Sequence
  Description of Artificial Sequence: Synthetic oligonucleotide
cugguacuucaguucauca

SEQ ID NO: 1882734 - RNA, 19 nt, Artificial Sequence
  Description of Artificial Sequence: Synthetic oligonucleotide
ccuuaaacuccaaaagaga

SEQ ID NO: 1882735 - RNA, 19 nt, Artificial Sequence
  Description of Artificial Sequence: Synthetic oligonucleotide
ggagaguaguaccucgcac

SEQ ID NO: 1882736 - RNA, 19 nt, Artificial Sequence
  Description of Artificial Sequence: Synthetic oligonucleotide
cauagcucuuguaauugua

SEQ ID NO: 1882737 - RNA, 19 nt, Artificial Sequence
  Description of Artificial Sequence: Synthetic oligonucleotide
ugacugucgcugacugaca

SEQ ID NO: 1882738 - RNA, 19 nt, Artificial Sequence
  Description of Artificial Sequence: Synthetic oligonucleotide
aguagaguucaggccagga

SEQ ID NO: 1882739 - RNA, 19 nt, Artificial Sequence
  Description of Artificial Sequence: Synthetic oligonucleotide
cauaccuuacaagggaaaa

SEQ ID NO: 1882740 - RNA, 19 nt, Artificial Sequence
  Description of Artificial Sequence: Synthetic oligonucleotide
gggcuuggagaguaguacc

SEQ ID NO: 1882741 - RNA, 19 nt, Artificial Sequence
  Description of Artificial Sequence: Synthetic oligonucleotide
cuuuccagaugcccugcuc

SEQ ID NO: 1882742 - RNA, 19 nt, Artificial Sequence
  Description of Artificial Sequence: Synthetic oligonucleotide
gacugucgcugacugacaa

SEQ ID NO: 1882743 - RNA, 19 nt, Artificial Sequence
  Description of Artificial Sequence: Synthetic oligonucleotide
uuccagaugcccugcucuc

SEQ ID NO: 1882744 - RNA, 19 nt, Artificial Sequence
  Description of Artificial Sequence: Synthetic oligonucleotide
aggagacaagggcuuugug

SEQ ID NO: 1882745 - RNA, 19 nt, Artificial Sequence
  Description of Artificial Sequence: Synthetic oligonucleotide
cauguccauguaacucuug

SEQ ID NO: 1882746 - RNA, 19 nt, Artificial Sequence
  Description of Artificial Sequence: Synthetic oligonucleotide
agguuacuuuugcucaaaa

SEQ ID NO: 1882747 - RNA, 19 nt, Artificial Sequence
  Description of Artificial Sequence: Synthetic oligonucleotide
auaaacuccuuggcaucug

SEQ ID NO: 1882748 - RNA, 19 nt, Artificial Sequence
  Description of Artificial Sequence: Synthetic oligonucleotide
caaucauagcucuuguaau

SEQ ID NO: 1882749 - RNA, 19 nt, Artificial Sequence
  Description of Artificial Sequence: Synthetic oligonucleotide
gacugacaauccauuuaac

SEQ ID NO: 1882750 - RNA, 19 nt, Artificial Sequence
  Description of Artificial Sequence: Synthetic oligonucleotide
guauucugcaaauggguuu

SEQ ID NO: 1882751 - RNA, 19 nt, Artificial Sequence
  Description of Artificial Sequence: Synthetic oligonucleotide
acuaagacccaggcuggca

SEQ ID NO: 1882752 - RNA, 19 nt, Artificial Sequence
  Description of Artificial Sequence: Synthetic oligonucleotide
caagaacuuucaaaucugu

SEQ ID NO: 1882753 - RNA, 19 nt, Artificial Sequence
  Description of Artificial Sequence: Synthetic oligonucleotide
gaguagaguucaggccagg

SEQ ID NO: 1882754 - RNA, 19 nt, Artificial Sequence
  Description of Artificial Sequence: Synthetic oligonucleotide
aggccaggagacaagggcu

SEQ ID NO: 1882755 - RNA, 19 nt, Artificial Sequence
  Description of Artificial Sequence: Synthetic oligonucleotide
cuucacccuuucaggugcc

SEQ ID NO: 1882756 - RNA, 19 nt, Artificial Sequence
  Description of Artificial Sequence: Synthetic oligonucleotide
uguaacucuugguccucuu

SEQ ID NO: 1882757 - RNA, 19 nt, Artificial Sequence
  Description of Artificial Sequence: Synthetic oligonucleotide
gugggcuacugguacuuca

SEQ ID NO: 1882758 - RNA, 19 nt, Artificial Sequence
  Description of Artificial Sequence: Synthetic oligonucleotide
guucagcgucgucaucugc

SEQ ID NO: 1882759 - RNA, 19 nt, Artificial Sequence
  Description of Artificial Sequence: Synthetic oligonucleotide
uguguucagcgucgucauc

SEQ ID NO: 1882760 - RNA, 19 nt, Artificial Sequence
  Description of Artificial Sequence: Synthetic oligonucleotide
cuggaagcagcgguccaag

SEQ ID NO: 1882761 - RNA, 19 nt, Artificial Sequence
  Description of Artificial Sequence: Synthetic oligonucleotide
acauaccuuacaagggaaa

SEQ ID NO: 1882762 - RNA, 19 nt, Artificial Sequence
  Description of Artificial Sequence: Synthetic oligonucleotide
uggaagcuuccaacagcuc

SEQ ID NO: 1882763 - RNA, 19 nt, Artificial Sequence
  Description of Artificial Sequence: Synthetic oligonucleotide
ccuggaaugcagcuuggug

SEQ ID NO: 1882764 - RNA, 19 nt, Artificial Sequence
  Description of Artificial Sequence: Synthetic oligonucleotide
acugucgcugacugacaau

SEQ ID NO: 1882765 - RNA, 19 nt, Artificial Sequence
  Description of Artificial Sequence: Synthetic oligonucleotide
gguacggggacaagacaag

SEQ ID NO: 1882766 - RNA, 19 nt, Artificial Sequence
  Description of Artificial Sequence: Synthetic oligonucleotide
gugcuugcauagcacaugu

SEQ ID NO: 1882767 - RNA, 19 nt, Artificial Sequence
  Description of Artificial Sequence: Synthetic oligonucleotide
uggcaucuggauucagguu

SEQ ID NO: 1882768 - RNA, 19 nt, Artificial Sequence
  Description of Artificial Sequence: Synthetic oligonucleotide
cucgugcuggaaugaacca

SEQ ID NO: 1882769 - RNA, 19 nt, Artificial Sequence
  Description of Artificial Sequence: Synthetic oligonucleotide
caacuugcuuccauccaaa

SEQ ID NO: 1882770 - RNA, 19 nt, Artificial Sequence
  Description of Artificial Sequence: Synthetic oligonucleotide
cagcugcaguuccuuaaac

SEQ ID NO: 1882771 - RNA, 19 nt, Artificial Sequence
  Description of Artificial Sequence: Synthetic oligonucleotide
guucaggccaggagacaag

SEQ ID NO: 1882772 - RNA, 19 nt, Artificial Sequence
  Description of Artificial Sequence: Synthetic oligonucleotide
ucucgccuucacccuuuca

SEQ ID NO: 1882773 - RNA, 19 nt, Artificial Sequence
  Description of Artificial Sequence: Synthetic oligonucleotide
ccaccugucuauugaaauc

SEQ ID NO: 1882774 - RNA, 19 nt, Artificial Sequence
  Description of Artificial Sequence: Synthetic oligonucleotide
cacauuaguuacucagagu

SEQ ID NO: 1882775 - RNA, 19 nt, Artificial Sequence
  Description of Artificial Sequence: Synthetic oligonucleotide
cauuucacacugggugaug

SEQ ID NO: 1882776 - RNA, 19 nt, Artificial Sequence
  Description of Artificial Sequence: Synthetic oligonucleotide
ccucauguccauguaacuc

SEQ ID NO: 1882777 - RNA, 19 nt, Artificial Sequence
  Description of Artificial Sequence: Synthetic oligonucleotide
gguagguacacagcaggga

SEQ ID NO: 1882778 - RNA, 19 nt, Artificial Sequence
  Description of Artificial Sequence: Synthetic oligonucleotide
ugccucucgccuucacccu

SEQ ID NO: 1882779 - RNA, 19 nt, Artificial Sequence
  Description of Artificial Sequence: Synthetic oligonucleotide
cauucauuauggagauucu

SEQ ID NO: 1882780 - RNA, 19 nt, Artificial Sequence
  Description of Artificial Sequence: Synthetic oligonucleotide
gauguacaacuugcuucca

SEQ ID NO: 1882781 - RNA, 19 nt, Artificial Sequence
  Description of Artificial Sequence: Synthetic oligonucleotide
uugugggcuacugguacuu

SEQ ID NO: 1882782 - RNA, 19 nt, Artificial Sequence
  Description of Artificial Sequence: Synthetic oligonucleotide
guaguaccucgcacauuag

SEQ ID NO: 1882783 - RNA, 19 nt, Artificial Sequence
  Description of Artificial Sequence: Synthetic oligonucleotide
cuugguguagugcuugcau

SEQ ID NO: 1882784 - RNA, 19 nt, Artificial Sequence
  Description of Artificial Sequence: Synthetic oligonucleotide
agaugcccugcucucggua

SEQ ID NO: 1882785 - RNA, 19 nt, Artificial Sequence
  Description of Artificial Sequence: Synthetic oligonucleotide
ccagaugcccugcucucgg

SEQ ID NO: 1882786 - RNA, 19 nt, Artificial Sequence
  Description of Artificial Sequence: Synthetic oligonucleotide
gucucgugcuggaaugaac

SEQ ID NO: 1882787 - RNA, 19 nt, Artificial Sequence
  Description of Artificial Sequence: Synthetic oligonucleotide
aaacuccaaaagagaucau

SEQ ID NO: 1882788 - RNA, 19 nt, Artificial Sequence
  Description of Artificial Sequence: Synthetic oligonucleotide
cuuccauccaaaguuuuau

SEQ ID NO: 1882789 - RNA, 19 nt, Artificial Sequence
  Description of Artificial Sequence: Synthetic oligonucleotide
gaaugcagcuugguguagu

SEQ ID NO: 1882790 - RNA, 19 nt, Artificial Sequence
  Description of Artificial Sequence: Synthetic oligonucleotide
accugucuauugaaauccu

SEQ ID NO: 1882791 - RNA, 19 nt, Artificial Sequence
  Description of Artificial Sequence: Synthetic oligonucleotide
ccuguguucagcgucguca

SEQ ID NO: 1882792 - RNA, 19 nt, Artificial Sequence
  Description of Artificial Sequence: Synthetic oligonucleotide
gcacaugugagguccugga

SEQ ID NO: 1882793 - RNA, 19 nt, Artificial Sequence
  Description of Artificial Sequence: Synthetic oligonucleotide
guagaauagggugcuuacu

SEQ ID NO: 1882794 - RNA, 19 nt, Artificial Sequence
  Description of Artificial Sequence: Synthetic oligonucleotide
aaccaccuucccaacccaa

SEQ ID NO: 1882795 - RNA, 19 nt, Artificial Sequence
  Description of Artificial Sequence: Synthetic oligonucleotide
acaagggcuuugugggcua

SEQ ID NO: 1882796 - RNA, 19 nt, Artificial Sequence
  Description of Artificial Sequence: Synthetic oligonucleotide
cucgcacauuaguuacuca

SEQ ID NO: 1882797 - RNA, 19 nt, Artificial Sequence
  Description of Artificial Sequence: Synthetic oligonucleotide
caguuccuuaaacuccaaa

SEQ ID NO: 1882798 - RNA, 19 nt, Artificial Sequence
  Description of Artificial Sequence: Synthetic oligonucleotide
cugcucucgguagguacac

SEQ ID NO: 1882799 - RNA, 19 nt, Artificial Sequence
  Description of Artificial Sequence: Synthetic oligonucleotide
cagcugccaaacuucuuaa

SEQ ID NO: 1882800 - RNA, 19 nt, Artificial Sequence
  Description of Artificial Sequence: Synthetic oligonucleotide
ugugggcuacugguacuuc

SEQ ID NO: 1882801 - RNA, 19 nt, Artificial Sequence
  Description of Artificial Sequence: Synthetic oligonucleotide
cgguagguacacagcaggg

SEQ ID NO: 1882802 - RNA, 19 nt, Artificial Sequence
  Description of Artificial Sequence: Synthetic oligonucleotide
ggacaagacaaguccuucu

SEQ ID NO: 1882803 - RNA, 19 nt, Artificial Sequence
  Description of Artificial Sequence: Synthetic oligonucleotide
gggacaagacaaguccuuc

SEQ ID NO: 1882804 - RNA, 19 nt, Artificial Sequence
  Description of Artificial Sequence: Synthetic oligonucleotide
aggucucgugcuggaauga

SEQ ID NO: 1882805 - RNA, 19 nt, Artificial Sequence
  Description of Artificial Sequence: Synthetic oligonucleotide
gggaaacugcucugaacaa

SEQ ID NO: 1882806 - RNA, 19 nt, Artificial Sequence
  Description of Artificial Sequence: Synthetic oligonucleotide
uucacccuuucaggugccu

SEQ ID NO: 1882807 - RNA, 19 nt, Artificial Sequence
  Description of Artificial Sequence: Synthetic oligonucleotide
cucuugguccucuuugcau

SEQ ID NO: 1882808 - RNA, 19 nt, Artificial Sequence
  Description of Artificial Sequence: Synthetic oligonucleotide
auuguagaauagggugcuu

SEQ ID NO: 1882809 - RNA, 19 nt, Artificial Sequence
  Description of Artificial Sequence: Synthetic oligonucleotide
gaaccaguccugguccucu

SEQ ID NO: 1882810 - RNA, 19 nt, Artificial Sequence
  Description of Artificial Sequence: Synthetic oligonucleotide
aggcaggucucgugcugga

SEQ ID NO: 1882811 - RNA, 19 nt, Artificial Sequence
  Description of Artificial Sequence: Synthetic oligonucleotide
cccugcucucgguagguac

SEQ ID NO: 1882812 - RNA, 19 nt, Artificial Sequence
  Description of Artificial Sequence: Synthetic oligonucleotide
gcucuuguaauuguagaau

SEQ ID NO: 1882813 - RNA, 19 nt, Artificial Sequence
  Description of Artificial Sequence: Synthetic oligonucleotide
cacuggauccauucauuau

SEQ ID NO: 1882814 - RNA, 19 nt, Artificial Sequence
  Description of Artificial Sequence: Synthetic oligonucleotide
accucgcacauuaguuacu

SEQ ID NO: 1882815 - RNA, 19 nt, Artificial Sequence
  Description of Artificial Sequence: Synthetic oligonucleotide
gcauagcacaugugagguc

SEQ ID NO: 1882816 - RNA, 19 nt, Artificial Sequence
  Description of Artificial Sequence: Synthetic oligonucleotide
ccucgcacauuaguuacuc

SEQ ID NO: 1882817 - RNA, 19 nt, Artificial Sequence
  Description of Artificial Sequence: Synthetic oligonucleotide
gugcuggaaugaaccaguc

SEQ ID NO: 1882818 - RNA, 19 nt, Artificial Sequence
  Description of Artificial Sequence: Synthetic oligonucleotide
cacacuggauccauucauu

SEQ ID NO: 1882819 - RNA, 19 nt, Artificial Sequence
  Description of Artificial Sequence: Synthetic oligonucleotide
caagggcuuugugggcuac

SEQ ID NO: 1882820 - RNA, 19 nt, Artificial Sequence
  Description of Artificial Sequence: Synthetic oligonucleotide
cgcacauuaguuacucaga

SEQ ID NO: 1882821 - RNA, 19 nt, Artificial Sequence
  Description of Artificial Sequence: Synthetic oligonucleotide
ccugcucucgguagguaca

SEQ ID NO: 1882822 - RNA, 19 nt, Artificial Sequence
  Description of Artificial Sequence: Synthetic oligonucleotide
cagcgucgucaucugccuc

SEQ ID NO: 1882823 - RNA, 19 nt, Artificial Sequence
  Description of Artificial Sequence: Synthetic oligonucleotide
ccauuuaacugcugcugua

SEQ ID NO: 1882824 - RNA, 19 nt, Artificial Sequence
  Description of Artificial Sequence: Synthetic oligonucleotide
cagcgguccaagaagucuu

SEQ ID NO: 1882825 - RNA, 19 nt, Artificial Sequence
  Description of Artificial Sequence: Synthetic oligonucleotide
cagcugguuuacaucuccu

SEQ ID NO: 1882826 - RNA, 19 nt, Artificial Sequence
  Description of Artificial Sequence: Synthetic oligonucleotide
gcugacugacaauccauuu

SEQ ID NO: 1882827 - RNA, 19 nt, Artificial Sequence
  Description of Artificial Sequence: Synthetic oligonucleotide
gcaaauggguuuuccuuuu

SEQ ID NO: 1882828 - RNA, 19 nt, Artificial Sequence
  Description of Artificial Sequence: Synthetic oligonucleotide
cacacugggugauguacuu

SEQ ID NO: 1882829 - RNA, 19 nt, Artificial Sequence
  Description of Artificial Sequence: Synthetic oligonucleotide
gucaucugccucucgccuu

SEQ ID NO: 1882830 - RNA, 19 nt, Artificial Sequence
  Description of Artificial Sequence: Synthetic oligonucleotide
cugcuguaagugucccaua

SEQ ID NO: 1882831 - RNA, 19 nt, Artificial Sequence
  Description of Artificial Sequence: Synthetic oligonucleotide
agccuguguucagcgucgu

SEQ ID NO: 1882832 - RNA, 19 nt, Artificial Sequence
  Description of Artificial Sequence: Synthetic oligonucleotide
gcuugguguagugcuugca

SEQ ID NO: 1882833 - RNA, 19 nt, Artificial Sequence
  Description of Artificial Sequence: Synthetic oligonucleotide
caggagacaagggcuuugu

SEQ ID NO: 1882834 - RNA, 19 nt, Artificial Sequence
  Description of Artificial Sequence: Synthetic oligonucleotide
cacagcagggaagauuauu

SEQ ID NO: 1882835 - RNA, 19 nt, Artificial Sequence
  Description of Artificial Sequence: Synthetic oligonucleotide
cgugcuggaaugaaccagu

SEQ ID NO: 1882836 - RNA, 19 nt, Artificial Sequence
  Description of Artificial Sequence: Synthetic oligonucleotide
ccuccaccugucuauugaa

SEQ ID NO: 1882837 - RNA, 19 nt, Artificial Sequence
  Description of Artificial Sequence: Synthetic oligonucleotide
ggucucgugcuggaaugaa

SEQ ID NO: 1882838 - RNA, 19 nt, Artificial Sequence
  Description of Artificial Sequence: Synthetic oligonucleotide
gggugcuuacuaagaccca

SEQ ID NO: 1882839 - RNA, 19 nt, Artificial Sequence
  Description of Artificial Sequence: Synthetic oligonucleotide
cugaguguugcagcugguu

SEQ ID NO: 1882840 - RNA, 19 nt, Artificial Sequence
  Description of Artificial Sequence: Synthetic oligonucleotide
gcauuucacacugggugau

SEQ ID NO: 1882841 - RNA, 19 nt, Artificial Sequence
  Description of Artificial Sequence: Synthetic oligonucleotide
gaguaguaccucgcacauu

SEQ ID NO: 1882842 - RNA, 19 nt, Artificial Sequence
  Description of Artificial Sequence: Synthetic oligonucleotide
ccaacccaacccgccuggc

SEQ ID NO: 1882843 - RNA, 19 nt, Artificial Sequence
  Description of Artificial Sequence: Synthetic oligonucleotide
ccuggaagcagcgguccaa

SEQ ID NO: 1882844 - RNA, 19 nt, Artificial Sequence
  Description of Artificial Sequence: Synthetic oligonucleotide
caucuggauucagguuacu

SEQ ID NO: 1882845 - RNA, 19 nt, Artificial Sequence
  Description of Artificial Sequence: Synthetic oligonucleotide
gccccagguacggggacaa

SEQ ID NO: 1882846 - RNA, 19 nt, Artificial Sequence
  Description of Artificial Sequence: Synthetic oligonucleotide
cgccuucacccuuucaggu

SEQ ID NO: 1882847 - RNA, 19 nt, Artificial Sequence
  Description of Artificial Sequence: Synthetic oligonucleotide
ggccaggagacaagggcuu

SEQ ID NO: 1882848 - RNA, 19 nt, Artificial Sequence
  Description of Artificial Sequence: Synthetic oligonucleotide
gccuggaaugcagcuuggu

SEQ ID NO: 1882849 - RNA, 19 nt, Artificial Sequence
  Description of Artificial Sequence: Synthetic oligonucleotide
gccucucgccuucacccuu

SEQ ID NO: 1882850 - RNA, 19 nt, Artificial Sequence
  Description of Artificial Sequence: Synthetic oligonucleotide
gcccugcucucgguaggua

SEQ ID NO: 1882851 - RNA, 19 nt, Artificial Sequence
  Description of Artificial Sequence: Synthetic oligonucleotide
cccaacccgccuggcugca

SEQ ID NO: 1882852 - RNA, 19 nt, Artificial Sequence
  Description of Artificial Sequence: Synthetic oligonucleotide
uguuauuucuuauauaagg

SEQ ID NO: 1882853 - RNA, 19 nt, Artificial Sequence
  Description of Artificial Sequence: Synthetic oligonucleotide
uauuagauaggucaaaucc

SEQ ID NO: 1882854 - RNA, 19 nt, Artificial Sequence
  Description of Artificial Sequence: Synthetic oligonucleotide
caaaauagcaaucauaacc

SEQ ID NO: 1882855 - RNA, 19 nt, Artificial Sequence
  Description of Artificial Sequence: Synthetic oligonucleotide
uucaacauccccaugaacg

SEQ ID NO: 1882856 - RNA, 19 nt, Artificial Sequence
  Description of Artificial Sequence: Synthetic oligonucleotide
gauaaagccacuacgaugg

SEQ ID NO: 1882857 - RNA, 19 nt, Artificial Sequence
  Description of Artificial Sequence: Synthetic oligonucleotide
uaaauaacgaccucugggg

SEQ ID NO: 1882858 - RNA, 19 nt, Artificial Sequence
  Description of Artificial Sequence: Synthetic oligonucleotide
auaaauaacgaccucuggg

SEQ ID NO: 1882859 - RNA, 19 nt, Artificial Sequence
  Description of Artificial Sequence: Synthetic oligonucleotide
aagcauauauucgugauac

SEQ ID NO: 1882860 - RNA, 19 nt, Artificial Sequence
  Description of Artificial Sequence: Synthetic oligonucleotide
aaucauaaccaucaggaga

SEQ ID NO: 1882861 - RNA, 19 nt, Artificial Sequence
  Description of Artificial Sequence: Synthetic oligonucleotide
aaaauagcaaucauaacca

SEQ ID NO: 1882862 - RNA, 19 nt, Artificial Sequence
  Description of Artificial Sequence: Synthetic oligonucleotide
uguuugaaaacucuccacc

SEQ ID NO: 1882863 - RNA, 19 nt, Artificial Sequence
  Description of Artificial Sequence: Synthetic oligonucleotide
uucgaugcaauucucaugu

SEQ ID NO: 1882864 - RNA, 19 nt, Artificial Sequence
  Description of Artificial Sequence: Synthetic oligonucleotide
uguacagaagcucacagaa

SEQ ID NO: 1882865 - RNA, 19 nt, Artificial Sequence
  Description of Artificial Sequence: Synthetic oligonucleotide
cauauauucgugauacugg

SEQ ID NO: 1882866 - RNA, 19 nt, Artificial Sequence
  Description of Artificial Sequence: Synthetic oligonucleotide
uucaguagucuucaacucg

SEQ ID NO: 1882867 - RNA, 19 nt, Artificial Sequence
  Description of Artificial Sequence: Synthetic oligonucleotide
auuagauaggucaaauccc

SEQ ID NO: 1882868 - RNA, 19 nt, Artificial Sequence
  Description of Artificial Sequence: Synthetic oligonucleotide
aguacgguuguacugagag

SEQ ID NO: 1882869 - RNA, 19 nt, Artificial Sequence
  Description of Artificial Sequence: Synthetic oligonucleotide
ucaagcaggccaaaguagg

SEQ ID NO: 1882870 - RNA, 19 nt, Artificial Sequence
  Description of Artificial Sequence: Synthetic oligonucleotide
aaagccacuacgaugguuc

SEQ ID NO: 1882871 - RNA, 19 nt, Artificial Sequence
  Description of Artificial Sequence: Synthetic oligonucleotide
cuuaagauaggcaaccuuc

SEQ ID NO: 1882872 - RNA, 19 nt, Artificial Sequence
  Description of Artificial Sequence: Synthetic oligonucleotide
uuuacugucuuguaguuaa

SEQ ID NO: 1882873 - RNA, 19 nt, Artificial Sequence
  Description of Artificial Sequence: Synthetic oligonucleotide
aguucaguagucuucaacu

SEQ ID NO: 1882874 - RNA, 19 nt, Artificial Sequence
  Description of Artificial Sequence: Synthetic oligonucleotide
ugauaaauaacgaccucug

SEQ ID NO: 1882875 - RNA, 19 nt, Artificial Sequence
  Description of Artificial Sequence: Synthetic oligonucleotide
ugggauauaacaguguuug

SEQ ID NO: 1882876 - RNA, 19 nt, Artificial Sequence
  Description of Artificial Sequence: Synthetic oligonucleotide
auuuuacccucugagaccc

SEQ ID NO: 1882877 - RNA, 19 nt, Artificial Sequence
  Description of Artificial Sequence: Synthetic oligonucleotide
cacacauagauuuuauuag

SEQ ID NO: 1882878 - RNA, 19 nt, Artificial Sequence
  Description of Artificial Sequence: Synthetic oligonucleotide
caucaagucugucagagcc

SEQ ID NO: 1882879 - RNA, 19 nt, Artificial Sequence
  Description of Artificial Sequence: Synthetic oligonucleotide
acugucuuguaguuaaagg

SEQ ID NO: 1882880 - RNA, 19 nt, Artificial Sequence
  Description of Artificial Sequence: Synthetic oligonucleotide
uguacugagagauggcucc

SEQ ID NO: 1882881 - RNA, 19 nt, Artificial Sequence
  Description of Artificial Sequence: Synthetic oligonucleotide
uuagauaggucaaaucccu

SEQ ID NO: 1882882 - RNA, 19 nt, Artificial Sequence
  Description of Artificial Sequence: Synthetic oligonucleotide
cugcugauaaauaacgacc

SEQ ID NO: 1882883 - RNA, 19 nt, Artificial Sequence
  Description of Artificial Sequence: Synthetic oligonucleotide
aagauaggcaaccuucuca

SEQ ID NO: 1882884 - RNA, 19 nt, Artificial Sequence
  Description of Artificial Sequence: Synthetic oligonucleotide
acagaugucaagcaggcca

SEQ ID NO: 1882885 - RNA, 19 nt, Artificial Sequence
  Description of Artificial Sequence: Synthetic oligonucleotide
ugauaaagccacuacgaug

SEQ ID NO: 1882886 - RNA, 19 nt, Artificial Sequence
  Description of Artificial Sequence: Synthetic oligonucleotide
uauauaaggcaguauacau

SEQ ID NO: 1882887 - RNA, 19 nt, Artificial Sequence
  Description of Artificial Sequence: Synthetic oligonucleotide
uccuucaagcauauauucg

SEQ ID NO: 1882888 - RNA, 19 nt, Artificial Sequence
  Description of Artificial Sequence: Synthetic oligonucleotide
uaaucuuccagugaugaug

SEQ ID NO: 1882889 - RNA, 19 nt, Artificial Sequence
  Description of Artificial Sequence: Synthetic oligonucleotide
gaugaaccccuccauacgg

SEQ ID NO: 1882890 - RNA, 19 nt, Artificial Sequence
  Description of Artificial Sequence: Synthetic oligonucleotide
gaaguuacugucaguaggg

SEQ ID NO: 1882891 - RNA, 19 nt, Artificial Sequence
  Description of Artificial Sequence: Synthetic oligonucleotide
aauggaaugugauguccag

SEQ ID NO: 1882892 - RNA, 19 nt, Artificial Sequence
  Description of Artificial Sequence: Synthetic oligonucleotide
uauaacaguguuugaaaac

SEQ ID NO: 1882893 - RNA, 19 nt, Artificial Sequence
  Description of Artificial Sequence: Synthetic oligonucleotide
gaugcaauucucauguaag

SEQ ID NO: 1882894 - RNA, 19 nt, Artificial Sequence
  Description of Artificial Sequence: Synthetic oligonucleotide
uguaaggauccacagagau

SEQ ID NO: 1882895 - RNA, 19 nt, Artificial Sequence
  Description of Artificial Sequence: Synthetic oligonucleotide
agauuuucuccuuucaaca

SEQ ID NO: 1882896 - RNA, 19 nt, Artificial Sequence
  Description of Artificial Sequence: Synthetic oligonucleotide
cauuauuuaagggugggag

SEQ ID NO: 1882897 - RNA, 19 nt, Artificial Sequence
  Description of Artificial Sequence: Synthetic oligonucleotide
acuacgaugguuccugcgg

SEQ ID NO: 1882898 - RNA, 19 nt, Artificial Sequence
  Description of Artificial Sequence: Synthetic oligonucleotide
uuauauaaggcaguauaca

SEQ ID NO: 1882899 - RNA, 19 nt, Artificial Sequence
  Description of Artificial Sequence: Synthetic oligonucleotide
uguuucuccacccuucaca

SEQ ID NO: 1882900 - RNA, 19 nt, Artificial Sequence
  Description of Artificial Sequence: Synthetic oligonucleotide
ugucagagccuucuggcgg

SEQ ID NO: 1882901 - RNA, 19 nt, Artificial Sequence
  Description of Artificial Sequence: Synthetic oligonucleotide
gauaggucaaaucccuugc

SEQ ID NO: 1882902 - RNA, 19 nt, Artificial Sequence
  Description of Artificial Sequence: Synthetic oligonucleotide
uccgagcuucuuaagauag

SEQ ID NO: 1882903 - RNA, 19 nt, Artificial Sequence
  Description of Artificial Sequence: Synthetic oligonucleotide
uggcaauucuuccaaaugu

SEQ ID NO: 1882904 - RNA, 19 nt, Artificial Sequence
  Description of Artificial Sequence: Synthetic oligonucleotide
acgaugaaccccuccauac

SEQ ID NO: 1882905 - RNA, 19 nt, Artificial Sequence
  Description of Artificial Sequence: Synthetic oligonucleotide
auaaccaucaggagaggcc

SEQ ID NO: 1882906 - RNA, 19 nt, Artificial Sequence
  Description of Artificial Sequence: Synthetic oligonucleotide
aacaucgaauccgagcuuc

SEQ ID NO: 1882907 - RNA, 19 nt, Artificial Sequence
  Description of Artificial Sequence: Synthetic oligonucleotide
guuacugucaguagggaag

SEQ ID NO: 1882908 - RNA, 19 nt, Artificial Sequence
  Description of Artificial Sequence: Synthetic oligonucleotide
auaggcaaccuucucauca

SEQ ID NO: 1882909 - RNA, 19 nt, Artificial Sequence
  Description of Artificial Sequence: Synthetic oligonucleotide
uuaagauaggcaaccuucu

SEQ ID NO: 1882910 - RNA, 19 nt, Artificial Sequence
  Description of Artificial Sequence: Synthetic oligonucleotide
ugagacccaauucaucaag

SEQ ID NO: 1882911 - RNA, 19 nt, Artificial Sequence
  Description of Artificial Sequence: Synthetic oligonucleotide
aauccgagcuucuuaagau

SEQ ID NO: 1882912 - RNA, 19 nt, Artificial Sequence
  Description of Artificial Sequence: Synthetic oligonucleotide
accuacauugucaaaauag

SEQ ID NO: 1882913 - RNA, 19 nt, Artificial Sequence
  Description of Artificial Sequence: Synthetic oligonucleotide
acauugucaaaauagcaau

SEQ ID NO: 1882914 - RNA, 19 nt, Artificial Sequence
  Description of Artificial Sequence: Synthetic oligonucleotide
auauauucgugauacugga

SEQ ID NO: 1882915 - RNA, 19 nt, Artificial Sequence
  Description of Artificial Sequence: Synthetic oligonucleotide
cuugagcuuagcuaucugc

SEQ ID NO: 1882916 - RNA, 19 nt, Artificial Sequence
  Description of Artificial Sequence: Synthetic oligonucleotide
cagcgaguaacgaugaacc

SEQ ID NO: 1882917 - RNA, 19 nt, Artificial Sequence
  Description of Artificial Sequence: Synthetic oligonucleotide
ugauacuggauuuuacccu

SEQ ID NO: 1882918 - RNA, 19 nt, Artificial Sequence
  Description of Artificial Sequence: Synthetic oligonucleotide
ucaguagucuucaacucga

SEQ ID NO: 1882919 - RNA, 19 nt, Artificial Sequence
  Description of Artificial Sequence: Synthetic oligonucleotide
aguguuugaaaacucucca

SEQ ID NO: 1882920 - RNA, 19 nt, Artificial Sequence
  Description of Artificial Sequence: Synthetic oligonucleotide
cuggauuuuacccucugag

SEQ ID NO: 1882921 - RNA, 19 nt, Artificial Sequence
  Description of Artificial Sequence: Synthetic oligonucleotide
agaaauggaaugugauguc

SEQ ID NO: 1882922 - RNA, 19 nt, Artificial Sequence
  Description of Artificial Sequence: Synthetic oligonucleotide
agcuucuuaagauaggcaa

SEQ ID NO: 1882923 - RNA, 19 nt, Artificial Sequence
  Description of Artificial Sequence: Synthetic oligonucleotide
cauccuaucacccuccuuc

SEQ ID NO: 1882924 - RNA, 19 nt, Artificial Sequence
  Description of Artificial Sequence: Synthetic oligonucleotide
auuauuuaagggugggagu

SEQ ID NO: 1882925 - RNA, 19 nt, Artificial Sequence
  Description of Artificial Sequence: Synthetic oligonucleotide
agacuuuacugucuuguag

SEQ ID NO: 1882926 - RNA, 19 nt, Artificial Sequence
  Description of Artificial Sequence: Synthetic oligonucleotide
gucaaaauagcaaucauaa

SEQ ID NO: 1882927 - RNA, 19 nt, Artificial Sequence
  Description of Artificial Sequence: Synthetic oligonucleotide
cuucuuaagauaggcaacc

SEQ ID NO: 1882928 - RNA, 19 nt, Artificial Sequence
  Description of Artificial Sequence: Synthetic oligonucleotide
auauucgugauacuggauu

SEQ ID NO: 1882929 - RNA, 19 nt, Artificial Sequence
  Description of Artificial Sequence: Synthetic oligonucleotide
uuagcuaucugccccacua

SEQ ID NO: 1882930 - RNA, 19 nt, Artificial Sequence
  Description of Artificial Sequence: Synthetic oligonucleotide
caguguuugaaaacucucc

SEQ ID NO: 1882931 - RNA, 19 nt, Artificial Sequence
  Description of Artificial Sequence: Synthetic oligonucleotide
uuauuagauaggucaaauc

SEQ ID NO: 1882932 - RNA, 19 nt, Artificial Sequence
  Description of Artificial Sequence: Synthetic oligonucleotide
aaagacagugguaacuugu

SEQ ID NO: 1882933 - RNA, 19 nt, Artificial Sequence
  Description of Artificial Sequence: Synthetic oligonucleotide
uucaagcauauauucguga

SEQ ID NO: 1882934 - RNA, 19 nt, Artificial Sequence
  Description of Artificial Sequence: Synthetic oligonucleotide
ucauguaaggauccacaga

SEQ ID NO: 1882935 - RNA, 19 nt, Artificial Sequence
  Description of Artificial Sequence: Synthetic oligonucleotide
uuuccucaguccauucccg

SEQ ID NO: 1882936 - RNA, 19 nt, Artificial Sequence
  Description of Artificial Sequence: Synthetic oligonucleotide
ugagagauggcuccacaga

SEQ ID NO: 1882937 - RNA, 19 nt, Artificial Sequence
  Description of Artificial Sequence: Synthetic oligonucleotide
ugcaccauccugauguaca

SEQ ID NO: 1882938 - RNA, 19 nt, Artificial Sequence
  Description of Artificial Sequence: Synthetic oligonucleotide
ugucaagcaggccaaagua

SEQ ID NO: 1882939 - RNA, 19 nt, Artificial Sequence
  Description of Artificial Sequence: Synthetic oligonucleotide
agcgaguaacgaugaaccc

SEQ ID NO: 1882940 - RNA, 19 nt, Artificial Sequence
  Description of Artificial Sequence: Synthetic oligonucleotide
aaccccuccauacggagcu

SEQ ID NO: 1882941 - RNA, 19 nt, Artificial Sequence
  Description of Artificial Sequence: Synthetic oligonucleotide
uacgguuguacugagagau

SEQ ID NO: 1882942 - RNA, 19 nt, Artificial Sequence
  Description of Artificial Sequence: Synthetic oligonucleotide
aagccacuacgaugguucc

SEQ ID NO: 1882943 - RNA, 19 nt, Artificial Sequence
  Description of Artificial Sequence: Synthetic oligonucleotide
uuucgaugcaauucucaug

SEQ ID NO: 1882944 - RNA, 19 nt, Artificial Sequence
  Description of Artificial Sequence: Synthetic oligonucleotide
gaagccuucaaagugcuuc

SEQ ID NO: 1882945 - RNA, 19 nt, Artificial Sequence
  Description of Artificial Sequence: Synthetic oligonucleotide
ucaaaauagcaaucauaac

SEQ ID NO: 1882946 - RNA, 19 nt, Artificial Sequence
  Description of Artificial Sequence: Synthetic oligonucleotide
ucaagcauauauucgugau

SEQ ID NO: 1882947 - RNA, 19 nt, Artificial Sequence
  Description of Artificial Sequence: Synthetic oligonucleotide
aacuugucuggccacucug

SEQ ID NO: 1882948 - RNA, 19 nt, Artificial Sequence
  Description of Artificial Sequence: Synthetic oligonucleotide
ggggacauggaccaguacg

SEQ ID NO: 1882949 - RNA, 19 nt, Artificial Sequence
  Description of Artificial Sequence: Synthetic oligonucleotide
uggauuuuacccucugaga

SEQ ID NO: 1882950 - RNA, 19 nt, Artificial Sequence
  Description of Artificial Sequence: Synthetic oligonucleotide
aaggcuaaucuuccaguga

SEQ ID NO: 1882951 - RNA, 19 nt, Artificial Sequence
  Description of Artificial Sequence: Synthetic oligonucleotide
cucauguaaggauccacag

SEQ ID NO: 1882952 - RNA, 19 nt, Artificial Sequence
  Description of Artificial Sequence: Synthetic oligonucleotide
agacccaauucaucaaguc

SEQ ID NO: 1882953 - RNA, 19 nt, Artificial Sequence
  Description of Artificial Sequence: Synthetic oligonucleotide
aaauagcaaucauaaccau

SEQ ID NO: 1882954 - RNA, 19 nt, Artificial Sequence
  Description of Artificial Sequence: Synthetic oligonucleotide
gaugaacagggcuuccagc

SEQ ID NO: 1882955 - RNA, 19 nt, Artificial Sequence
  Description of Artificial Sequence: Synthetic oligonucleotide
uagucuucaacucgaaguu

SEQ ID NO: 1882956 - RNA, 19 nt, Artificial Sequence
  Description of Artificial Sequence: Synthetic oligonucleotide
aagacagugguaacuuguc

SEQ ID NO: 1882957 - RNA, 19 nt, Artificial Sequence
  Description of Artificial Sequence: Synthetic oligonucleotide
uccaaagacuuuacugucu

SEQ ID NO: 1882958 - RNA, 19 nt, Artificial Sequence
  Description of Artificial Sequence: Synthetic oligonucleotide
uuugaaaacucuccaccua

SEQ ID NO: 1882959 - RNA, 19 nt, Artificial Sequence
  Description of Artificial Sequence: Synthetic oligonucleotide
guagucuucaacucgaagu

SEQ ID NO: 1882960 - RNA, 19 nt, Artificial Sequence
  Description of Artificial Sequence: Synthetic oligonucleotide
ugagcuuagcuaucugccc

SEQ ID NO: 1882961 - RNA, 19 nt, Artificial Sequence
  Description of Artificial Sequence: Synthetic oligonucleotide
uccaccuacauugucaaaa

SEQ ID NO: 1882962 - RNA, 19 nt, Artificial Sequence
  Description of Artificial Sequence: Synthetic oligonucleotide
aguagucuucaacucgaag

SEQ ID NO: 1882963 - RNA, 19 nt, Artificial Sequence
  Description of Artificial Sequence: Synthetic oligonucleotide
gcaaucauaaccaucagga

SEQ ID NO: 1882964 - RNA, 19 nt, Artificial Sequence
  Description of Artificial Sequence: Synthetic oligonucleotide
aaauggaaugugaugucca

SEQ ID NO: 1882965 - RNA, 19 nt, Artificial Sequence
  Description of Artificial Sequence: Synthetic oligonucleotide
acccaauucaucaagucug

SEQ ID NO: 1882966 - RNA, 19 nt, Artificial Sequence
  Description of Artificial Sequence: Synthetic oligonucleotide
caaucauaaccaucaggag

SEQ ID NO: 1882967 - RNA, 19 nt, Artificial Sequence
  Description of Artificial Sequence: Synthetic oligonucleotide
agccugauaaagccacuac

SEQ ID NO: 1882968 - RNA, 19 nt, Artificial Sequence
  Description of Artificial Sequence: Synthetic oligonucleotide
agauaggcaaccuucucau

SEQ ID NO: 1882969 - RNA, 19 nt, Artificial Sequence
  Description of Artificial Sequence: Synthetic oligonucleotide
ucgaaguuacugucaguag

SEQ ID NO: 1882970 - RNA, 19 nt, Artificial Sequence
  Description of Artificial Sequence: Synthetic oligonucleotide
cuacauugucaaaauagca

SEQ ID NO: 1882971 - RNA, 19 nt, Artificial Sequence
  Description of Artificial Sequence: Synthetic oligonucleotide
uaaccaucaggagaggcca

SEQ ID NO: 1882972 - RNA, 19 nt, Artificial Sequence
  Description of Artificial Sequence: Synthetic oligonucleotide
ccuacauugucaaaauagc

SEQ ID NO: 1882973 - RNA, 19 nt, Artificial Sequence
  Description of Artificial Sequence: Synthetic oligonucleotide
caucugggauauaacagug

SEQ ID NO: 1882974 - RNA, 19 nt, Artificial Sequence
  Description of Artificial Sequence: Synthetic oligonucleotide
guaacgaugaaccccucca

SEQ ID NO: 1882975 - RNA, 19 nt, Artificial Sequence
  Description of Artificial Sequence: Synthetic oligonucleotide
ucuuaagauaggcaaccuu

SEQ ID NO: 1882976 - RNA, 19 nt, Artificial Sequence
  Description of Artificial Sequence: Synthetic oligonucleotide
cuucaagcauauauucgug

SEQ ID NO: 1882977 - RNA, 19 nt, Artificial Sequence
  Description of Artificial Sequence: Synthetic oligonucleotide
uuuuauuagauaggucaaa

SEQ ID NO: 1882978 - RNA, 19 nt, Artificial Sequence
  Description of Artificial Sequence: Synthetic oligonucleotide
aagaccuccccauuauuua

SEQ ID NO: 1882979 - RNA, 19 nt, Artificial Sequence
  Description of Artificial Sequence: Synthetic oligonucleotide
acauagauuuuauuagaua

SEQ ID NO: 1882980 - RNA, 19 nt, Artificial Sequence
  Description of Artificial Sequence: Synthetic oligonucleotide
aauccuucaagcauauauu

SEQ ID NO: 1882981 - RNA, 19 nt, Artificial Sequence
  Description of Artificial Sequence: Synthetic oligonucleotide
ugaccaucacuguuucucc

SEQ ID NO: 1882982 - RNA, 19 nt, Artificial Sequence
  Description of Artificial Sequence: Synthetic oligonucleotide
uccauucccgucagaaaug

SEQ ID NO: 1882983 - RNA, 19 nt, Artificial Sequence
  Description of Artificial Sequence: Synthetic oligonucleotide
ucgaauccgagcuucuuaa

SEQ ID NO: 1882984 - RNA, 19 nt, Artificial Sequence
  Description of Artificial Sequence: Synthetic oligonucleotide
auguccagccugauaaagc

SEQ ID NO: 1882985 - RNA, 19 nt, Artificial Sequence
  Description of Artificial Sequence: Synthetic oligonucleotide
uauucgugauacuggauuu

SEQ ID NO: 1882986 - RNA, 19 nt, Artificial Sequence
  Description of Artificial Sequence: Synthetic oligonucleotide
ugaaccccuccauacggag

SEQ ID NO: 1882987 - RNA, 19 nt, Artificial Sequence
  Description of Artificial Sequence: Synthetic oligonucleotide
ucacagaaacuccuucccu

SEQ ID NO: 1882988 - RNA, 19 nt, Artificial Sequence
  Description of Artificial Sequence: Synthetic oligonucleotide
gacuuuacugucuuguagu

SEQ ID NO: 1882989 - RNA, 19 nt, Artificial Sequence
  Description of Artificial Sequence: Synthetic oligonucleotide
uaacacacauagauuuuau

SEQ ID NO: 1882990 - RNA, 19 nt, Artificial Sequence
  Description of Artificial Sequence: Synthetic oligonucleotide
aaugugauguccagccuga

SEQ ID NO: 1882991 - RNA, 19 nt, Artificial Sequence
  Description of Artificial Sequence: Synthetic oligonucleotide
uuacugucaguagggaagc

SEQ ID NO: 1882992 - RNA, 19 nt, Artificial Sequence
  Description of Artificial Sequence: Synthetic oligonucleotide
uaagauaggcaaccuucuc

SEQ ID NO: 1882993 - RNA, 19 nt, Artificial Sequence
  Description of Artificial Sequence: Synthetic oligonucleotide
cuaucacccuccuucaguc

SEQ ID NO: 1882994 - RNA, 19 nt, Artificial Sequence
  Description of Artificial Sequence: Synthetic oligonucleotide
aggcuaaucuuccagugau

SEQ ID NO: 1882995 - RNA, 19 nt, Artificial Sequence
  Description of Artificial Sequence: Synthetic oligonucleotide
caaaguaggcagugaggcc

SEQ ID NO: 1882996 - RNA, 19 nt, Artificial Sequence
  Description of Artificial Sequence: Synthetic oligonucleotide
gcauauauucgugauacug

SEQ ID NO: 1882997 - RNA, 19 nt, Artificial Sequence
  Description of Artificial Sequence: Synthetic oligonucleotide
aagacuuuacugucuugua

SEQ ID NO: 1882998 - RNA, 19 nt, Artificial Sequence
  Description of Artificial Sequence: Synthetic oligonucleotide
cuacgaugguuccugcggg

SEQ ID NO: 1882999 - RNA, 19 nt, Artificial Sequence
  Description of Artificial Sequence: Synthetic oligonucleotide
uuucuuauauaaggcagua

SEQ ID NO: 1883000 - RNA, 19 nt, Artificial Sequence
  Description of Artificial Sequence: Synthetic oligonucleotide
ugggaguucaguagucuuc

SEQ ID NO: 1883001 - RNA, 19 nt, Artificial Sequence
  Description of Artificial Sequence: Synthetic oligonucleotide
gaccaguacgguuguacug

SEQ ID NO: 1883002 - RNA, 19 nt, Artificial Sequence
  Description of Artificial Sequence: Synthetic oligonucleotide
uuuaagggugggaguucag

SEQ ID NO: 1883003 - RNA, 19 nt, Artificial Sequence
  Description of Artificial Sequence: Synthetic oligonucleotide
uauauucgugauacuggau

SEQ ID NO: 1883004 - RNA, 19 nt, Artificial Sequence
  Description of Artificial Sequence: Synthetic oligonucleotide
aggauccacagagaugaac

SEQ ID NO: 1883005 - RNA, 19 nt, Artificial Sequence
  Description of Artificial Sequence: Synthetic oligonucleotide
uacgaugguuccugcgggg

SEQ ID NO: 1883006 - RNA, 19 nt, Artificial Sequence
  Description of Artificial Sequence: Synthetic oligonucleotide
ucccgucagaaauggaaug

SEQ ID NO: 1883007 - RNA, 19 nt, Artificial Sequence
  Description of Artificial Sequence: Synthetic oligonucleotide
cuucuggcggacaucuccc

SEQ ID NO: 1883008 - RNA, 19 nt, Artificial Sequence
  Description of Artificial Sequence: Synthetic oligonucleotide
cauaaccaucaggagaggc

SEQ ID NO: 1883009 - RNA, 19 nt, Artificial Sequence
  Description of Artificial Sequence: Synthetic oligonucleotide
uucccgucagaaauggaau

SEQ ID NO: 1883010 - RNA, 19 nt, Artificial Sequence
  Description of Artificial Sequence: Synthetic oligonucleotide
caucauccuaucacccucc

SEQ ID NO: 1883011 - RNA, 19 nt, Artificial Sequence
  Description of Artificial Sequence: Synthetic oligonucleotide
cugucagagccuucuggcg

SEQ ID NO: 1883012 - RNA, 19 nt, Artificial Sequence
  Description of Artificial Sequence: Synthetic oligonucleotide
ucaucaagucugucagagc

SEQ ID NO: 1883013 - RNA, 19 nt, Artificial Sequence
  Description of Artificial Sequence: Synthetic oligonucleotide
cagaagcucacagaaacuc

SEQ ID NO: 1883014 - RNA, 19 nt, Artificial Sequence
  Description of Artificial Sequence: Synthetic oligonucleotide
gcaguauacauuuguacca

SEQ ID NO: 1883015 - RNA, 19 nt, Artificial Sequence
  Description of Artificial Sequence: Synthetic oligonucleotide
agaaacuccuucccuggga

SEQ ID NO: 1883016 - RNA, 19 nt, Artificial Sequence
  Description of Artificial Sequence: Synthetic oligonucleotide
gcugcguugaccaucacug

SEQ ID NO: 1883017 - RNA, 19 nt, Artificial Sequence
  Description of Artificial Sequence: Synthetic oligonucleotide
ucuuuucgaugcaauucuc

SEQ ID NO: 1883018 - RNA, 19 nt, Artificial Sequence
  Description of Artificial Sequence: Synthetic oligonucleotide
caucagacccugcugcacc

SEQ ID NO: 1883019 - RNA, 19 nt, Artificial Sequence
  Description of Artificial Sequence: Synthetic oligonucleotide
ugauguacagaagcucaca

SEQ ID NO: 1883020 - RNA, 19 nt, Artificial Sequence
  Description of Artificial Sequence: Synthetic oligonucleotide
aaggcaacaucgaauccga

SEQ ID NO: 1883021 - RNA, 19 nt, Artificial Sequence
  Description of Artificial Sequence: Synthetic oligonucleotide
ugcugcguugaccaucacu

SEQ ID NO: 1883022 - RNA, 19 nt, Artificial Sequence
  Description of Artificial Sequence: Synthetic oligonucleotide
ggcaacaucgaauccgagc

SEQ ID NO: 1883023 - RNA, 19 nt, Artificial Sequence
  Description of Artificial Sequence: Synthetic oligonucleotide
gucaagcaggccaaaguag

SEQ ID NO: 1883024 - RNA, 19 nt, Artificial Sequence
  Description of Artificial Sequence: Synthetic oligonucleotide
guucaguagucuucaacuc

SEQ ID NO: 1883025 - RNA, 19 nt, Artificial Sequence
  Description of Artificial Sequence: Synthetic oligonucleotide
uuaagggugggaguucagu

SEQ ID NO: 1883026 - RNA, 19 nt, Artificial Sequence
  Description of Artificial Sequence: Synthetic oligonucleotide
agccaaagacagugguaac

SEQ ID NO: 1883027 - RNA, 19 nt, Artificial Sequence
  Description of Artificial Sequence: Synthetic oligonucleotide
cagaaauggaaugugaugu

SEQ ID NO: 1883028 - RNA, 19 nt, Artificial Sequence
  Description of Artificial Sequence: Synthetic oligonucleotide
ucgugauacuggauuuuac

SEQ ID NO: 1883029 - RNA, 19 nt, Artificial Sequence
  Description of Artificial Sequence: Synthetic oligonucleotide
caaagacagugguaacuug

SEQ ID NO: 1883030 - RNA, 19 nt, Artificial Sequence
  Description of Artificial Sequence: Synthetic oligonucleotide
acauuuguaccaaauguua

SEQ ID NO: 1883031 - RNA, 19 nt, Artificial Sequence
  Description of Artificial Sequence: Synthetic oligonucleotide
uccacagauggcaauucuu

SEQ ID NO: 1883032 - RNA, 19 nt, Artificial Sequence
  Description of Artificial Sequence: Synthetic oligonucleotide
auuuaagggugggaguuca

SEQ ID NO: 1883033 - RNA, 19 nt, Artificial Sequence
  Description of Artificial Sequence: Synthetic oligonucleotide
guuugaaaacucuccaccu

SEQ ID NO: 1883034 - RNA, 19 nt, Artificial Sequence
  Description of Artificial Sequence: Synthetic oligonucleotide
acccaucauccuaucaccc

SEQ ID NO: 1883035 - RNA, 19 nt, Artificial Sequence
  Description of Artificial Sequence: Synthetic oligonucleotide
accaguacgguuguacuga

SEQ ID NO: 1883036 - RNA, 19 nt, Artificial Sequence
  Description of Artificial Sequence: Synthetic oligonucleotide
cgaaguuacugucaguagg

SEQ ID NO: 1883037 - RNA, 19 nt, Artificial Sequence
  Description of Artificial Sequence: Synthetic oligonucleotide
uacuggauuuuacccucug

SEQ ID NO: 1883038 - RNA, 19 nt, Artificial Sequence
  Description of Artificial Sequence: Synthetic oligonucleotide
uccacccuucacaccacag

SEQ ID NO: 1883039 - RNA, 19 nt, Artificial Sequence
  Description of Artificial Sequence: Synthetic oligonucleotide
gaugguuccugcggggaag

SEQ ID NO: 1883040 - RNA, 19 nt, Artificial Sequence
  Description of Artificial Sequence: Synthetic oligonucleotide
acuggauuuuacccucuga

SEQ ID NO: 1883041 - RNA, 19 nt, Artificial Sequence
  Description of Artificial Sequence: Synthetic oligonucleotide
gacccaauucaucaagucu

SEQ ID NO: 1883042 - RNA, 19 nt, Artificial Sequence
  Description of Artificial Sequence: Synthetic oligonucleotide
gugguaacuugucuggcca

SEQ ID NO: 1883043 - RNA, 19 nt, Artificial Sequence
  Description of Artificial Sequence: Synthetic oligonucleotide
uaacuugucuggccacucu

SEQ ID NO: 1883044 - RNA, 19 nt, Artificial Sequence
  Description of Artificial Sequence: Synthetic oligonucleotide
cuuguaguuaaaggcaaca

SEQ ID NO: 1883045 - RNA, 19 nt, Artificial Sequence
  Description of Artificial Sequence: Synthetic oligonucleotide
agcuaucugccccacuaca

SEQ ID NO: 1883046 - RNA, 19 nt, Artificial Sequence
  Description of Artificial Sequence: Synthetic oligonucleotide
uggaccaguacgguuguac

SEQ ID NO: 1883047 - RNA, 19 nt, Artificial Sequence
  Description of Artificial Sequence: Synthetic oligonucleotide
auucccgucagaaauggaa

SEQ ID NO: 1883048 - RNA, 19 nt, Artificial Sequence
  Description of Artificial Sequence: Synthetic oligonucleotide
uacggagcugcugauaaau

SEQ ID NO: 1883049 - RNA, 19 nt, Artificial Sequence
  Description of Artificial Sequence: Synthetic oligonucleotide
guaaggauccacagagaug

SEQ ID NO: 1883050 - RNA, 19 nt, Artificial Sequence
  Description of Artificial Sequence: Synthetic oligonucleotide
gggacauggaccaguacgg

SEQ ID NO: 1883051 - RNA, 19 nt, Artificial Sequence
  Description of Artificial Sequence: Synthetic oligonucleotide
ugaugaugcacaugucauu

SEQ ID NO: 1883052 - RNA, 19 nt, Artificial Sequence
  Description of Artificial Sequence: Synthetic oligonucleotide
ugugauguccagccugaua

SEQ ID NO: 1883053 - RNA, 19 nt, Artificial Sequence
  Description of Artificial Sequence: Synthetic oligonucleotide
cacuacgaugguuccugcg

SEQ ID NO: 1883054 - RNA, 19 nt, Artificial Sequence
  Description of Artificial Sequence: Synthetic oligonucleotide
ugcguugaccaucacuguu

SEQ ID NO: 1883055 - RNA, 19 nt, Artificial Sequence
  Description of Artificial Sequence: Synthetic oligonucleotide
gucuuuucgaugcaauucu

SEQ ID NO: 1883056 - RNA, 19 nt, Artificial Sequence
  Description of Artificial Sequence: Synthetic oligonucleotide
auauaaggcaguauacauu

SEQ ID NO: 1883057 - RNA, 19 nt, Artificial Sequence
  Description of Artificial Sequence: Synthetic oligonucleotide
acaccacagaugucaagca

SEQ ID NO: 1883058 - RNA, 19 nt, Artificial Sequence
  Description of Artificial Sequence: Synthetic oligonucleotide
uggcaucuuuucaaauccu

SEQ ID NO: 1883059 - RNA, 19 nt, Artificial Sequence
  Description of Artificial Sequence: Synthetic oligonucleotide
aaguuacugucaguaggga

SEQ ID NO: 1883060 - RNA, 19 nt, Artificial Sequence
  Description of Artificial Sequence: Synthetic oligonucleotide
aguauacauuuguaccaaa

SEQ ID NO: 1883061 - RNA, 19 nt, Artificial Sequence
  Description of Artificial Sequence: Synthetic oligonucleotide
cauacggagcugcugauaa

SEQ ID NO: 1883062 - RNA, 19 nt, Artificial Sequence
  Description of Artificial Sequence: Synthetic oligonucleotide
cgugauacuggauuuuacc

SEQ ID NO: 1883063 - RNA, 19 nt, Artificial Sequence
  Description of Artificial Sequence: Synthetic oligonucleotide
uccuaucacccuccuucag

SEQ ID NO: 1883064 - RNA, 19 nt, Artificial Sequence
  Description of Artificial Sequence: Synthetic oligonucleotide
uucuuaagauaggcaaccu

SEQ ID NO: 1883065 - RNA, 19 nt, Artificial Sequence
  Description of Artificial Sequence: Synthetic oligonucleotide
ucacaccacagaugucaag

SEQ ID NO: 1883066 - RNA, 19 nt, Artificial Sequence
  Description of Artificial Sequence: Synthetic oligonucleotide
uugucuggccacucugcug

SEQ ID NO: 1883067 - RNA, 19 nt, Artificial Sequence
  Description of Artificial Sequence: Synthetic oligonucleotide
acugucaguagggaagccu

SEQ ID NO: 1883068 - RNA, 19 nt, Artificial Sequence
  Description of Artificial Sequence: Synthetic oligonucleotide
gcaacaucgaauccgagcu

SEQ ID NO: 1883069 - RNA, 19 nt, Artificial Sequence
  Description of Artificial Sequence: Synthetic oligonucleotide
ccugauaaagccacuacga

SEQ ID NO: 1883070 - RNA, 19 nt, Artificial Sequence
  Description of Artificial Sequence: Synthetic oligonucleotide
aucgaauccgagcuucuua

SEQ ID NO: 1883071 - RNA, 19 nt, Artificial Sequence
  Description of Artificial Sequence: Synthetic oligonucleotide
auucaucaagucugucaga

SEQ ID NO: 1883072 - RNA, 19 nt, Artificial Sequence
  Description of Artificial Sequence: Synthetic oligonucleotide
ucauaaccaucaggagagg

SEQ ID NO: 1883073 - RNA, 19 nt, Artificial Sequence
  Description of Artificial Sequence: Synthetic oligonucleotide
cuccccauuauuuaagggu

SEQ ID NO: 1883074 - RNA, 19 nt, Artificial Sequence
  Description of Artificial Sequence: Synthetic oligonucleotide
uauuuaagggugggaguuc

SEQ ID NO: 1883075 - RNA, 19 nt, Artificial Sequence
  Description of Artificial Sequence: Synthetic oligonucleotide
ugccagcgaguaacgauga

SEQ ID NO: 1883076 - RNA, 19 nt, Artificial Sequence
  Description of Artificial Sequence: Synthetic oligonucleotide
uagcuaucugccccacuac

SEQ ID NO: 1883077 - RNA, 19 nt, Artificial Sequence
  Description of Artificial Sequence: Synthetic oligonucleotide
agaccuccccauuauuuaa

SEQ ID NO: 1883078 - RNA, 19 nt, Artificial Sequence
  Description of Artificial Sequence: Synthetic oligonucleotide
cucccugccagcgaguaac

SEQ ID NO: 1883079 - RNA, 19 nt, Artificial Sequence
  Description of Artificial Sequence: Synthetic oligonucleotide
agcaagaccuccccauuau

SEQ ID NO: 1883080 - RNA, 19 nt, Artificial Sequence
  Description of Artificial Sequence: Synthetic oligonucleotide
cucgaaguuacugucagua

SEQ ID NO: 1883081 - RNA, 19 nt, Artificial Sequence
  Description of Artificial Sequence: Synthetic oligonucleotide
cacucugcuggcaguuucc

SEQ ID NO: 1883082 - RNA, 19 nt, Artificial Sequence
  Description of Artificial Sequence: Synthetic oligonucleotide
gaccuccccauuauuuaag

SEQ ID NO: 1883083 - RNA, 19 nt, Artificial Sequence
  Description of Artificial Sequence: Synthetic oligonucleotide
uucuuauauaaggcaguau

SEQ ID NO: 1883084 - RNA, 19 nt, Artificial Sequence
  Description of Artificial Sequence: Synthetic oligonucleotide
cuccauacggagcugcuga

SEQ ID NO: 1883085 - RNA, 19 nt, Artificial Sequence
  Description of Artificial Sequence: Synthetic oligonucleotide
uucgugauacuggauuuua

SEQ ID NO: 1883086 - RNA, 19 nt, Artificial Sequence
  Description of Artificial Sequence: Synthetic oligonucleotide
agcauauauucgugauacu

SEQ ID NO: 1883087 - RNA, 19 nt, Artificial Sequence
  Description of Artificial Sequence: Synthetic oligonucleotide
caccaacaacuuugcagcc

SEQ ID NO: 1883088 - RNA, 19 nt, Artificial Sequence
  Description of Artificial Sequence: Synthetic oligonucleotide
agagccuucuggcggacau

SEQ ID NO: 1883089 - RNA, 19 nt, Artificial Sequence
  Description of Artificial Sequence: Synthetic oligonucleotide
ugguaacuugucuggccac

SEQ ID NO: 1883090 - RNA, 19 nt, Artificial Sequence
  Description of Artificial Sequence: Synthetic oligonucleotide
uacccucugagacccaauu

SEQ ID NO: 1883091 - RNA, 19 nt, Artificial Sequence
  Description of Artificial Sequence: Synthetic oligonucleotide
uuuacccucugagacccaa

SEQ ID NO: 1883092 - RNA, 19 nt, Artificial Sequence
  Description of Artificial Sequence: Synthetic oligonucleotide
gcgaguaacgaugaacccc

SEQ ID NO: 1883093 - RNA, 19 nt, Artificial Sequence
  Description of Artificial Sequence: Synthetic oligonucleotide
uagauaggucaaaucccuu

SEQ ID NO: 1883094 - RNA, 19 nt, Artificial Sequence
  Description of Artificial Sequence: Synthetic oligonucleotide
ucccugccagcgaguaacg

SEQ ID NO: 1883095 - RNA, 19 nt, Artificial Sequence
  Description of Artificial Sequence: Synthetic oligonucleotide
acccugcugcaccaacaac

SEQ ID NO: 1883096 - RNA, 19 nt, Artificial Sequence
  Description of Artificial Sequence: Synthetic oligonucleotide
cuaucugccccacuacaga

SEQ ID NO: 1883097 - RNA, 19 nt, Artificial Sequence
  Description of Artificial Sequence: Synthetic oligonucleotide
guagggaagccuucaaagu

SEQ ID NO: 1883098 - RNA, 19 nt, Artificial Sequence
  Description of Artificial Sequence: Synthetic oligonucleotide
augaacgcugcuggcaucu

SEQ ID NO: 1883099 - RNA, 19 nt, Artificial Sequence
  Description of Artificial Sequence: Synthetic oligonucleotide
gaaaacucuccaccuacau

SEQ ID NO: 1883100 - RNA, 19 nt, Artificial Sequence
  Description of Artificial Sequence: Synthetic oligonucleotide
cuggccacucugcuggcag

SEQ ID NO: 1883101 - RNA, 19 nt, Artificial Sequence
  Description of Artificial Sequence: Synthetic oligonucleotide
aguccauucccgucagaaa

SEQ ID NO: 1883102 - RNA, 19 nt, Artificial Sequence
  Description of Artificial Sequence: Synthetic oligonucleotide
uccucaguccauucccguc

SEQ ID NO: 1883103 - RNA, 19 nt, Artificial Sequence
  Description of Artificial Sequence: Synthetic oligonucleotide
guccauucccgucagaaau

SEQ ID NO: 1883104 - RNA, 19 nt, Artificial Sequence
  Description of Artificial Sequence: Synthetic oligonucleotide
ugcggggaaggcuggauuu

SEQ ID NO: 1883105 - RNA, 19 nt, Artificial Sequence
  Description of Artificial Sequence: Synthetic oligonucleotide
uaucacccuccuucagucu

SEQ ID NO: 1883106 - RNA, 19 nt, Artificial Sequence
  Description of Artificial Sequence: Synthetic oligonucleotide
aacgcugcuggcaucuuuu

SEQ ID NO: 1883107 - RNA, 19 nt, Artificial Sequence
  Description of Artificial Sequence: Synthetic oligonucleotide
uuacugucuuguaguuaaa

SEQ ID NO: 1883108 - RNA, 19 nt, Artificial Sequence
  Description of Artificial Sequence: Synthetic oligonucleotide
uggcggacaucucccugcc

SEQ ID NO: 1883109 - RNA, 19 nt, Artificial Sequence
  Description of Artificial Sequence: Synthetic oligonucleotide
acaacucuggccacuugcu

SEQ ID NO: 1883110 - RNA, 19 nt, Artificial Sequence
  Description of Artificial Sequence: Synthetic oligonucleotide
gagaugaacagggcuucca

SEQ ID NO: 1883111 - RNA, 19 nt, Artificial Sequence
  Description of Artificial Sequence: Synthetic oligonucleotide
acagaagcucacagaaacu

SEQ ID NO: 1883112 - RNA, 19 nt, Artificial Sequence
  Description of Artificial Sequence: Synthetic oligonucleotide
cucaguccauucccgucag

SEQ ID NO: 1883113 - RNA, 19 nt, Artificial Sequence
  Description of Artificial Sequence: Synthetic oligonucleotide
cccacuacagaccccacug

SEQ ID NO: 1883114 - RNA, 19 nt, Artificial Sequence
  Description of Artificial Sequence: Synthetic oligonucleotide
ugcuggcaucuuuucaaau

SEQ ID NO: 1883115 - RNA, 19 nt, Artificial Sequence
  Description of Artificial Sequence: Synthetic oligonucleotide
gaaccccuccauacggagc

SEQ ID NO: 1883116 - RNA, 19 nt, Artificial Sequence
  Description of Artificial Sequence: Synthetic oligonucleotide
acucgaaguuacugucagu

SEQ ID NO: 1883117 - RNA, 19 nt, Artificial Sequence
  Description of Artificial Sequence: Synthetic oligonucleotide
aucauccuaucacccuccu

SEQ ID NO: 1883118 - RNA, 19 nt, Artificial Sequence
  Description of Artificial Sequence: Synthetic oligonucleotide
caaagccaaagacaguggu

SEQ ID NO: 1883119 - RNA, 19 nt, Artificial Sequence
  Description of Artificial Sequence: Synthetic oligonucleotide
gcuaucugccccacuacag

SEQ ID NO: 1883120 - RNA, 19 nt, Artificial Sequence
  Description of Artificial Sequence: Synthetic oligonucleotide
ggacaucucccugccagcg

SEQ ID NO: 1883121 - RNA, 19 nt, Artificial Sequence
  Description of Artificial Sequence: Synthetic oligonucleotide
aucaagucugucagagccu

SEQ ID NO: 1883122 - RNA, 19 nt, Artificial Sequence
  Description of Artificial Sequence: Synthetic oligonucleotide
auaaggcaguauacauuug

SEQ ID NO: 1883123 - RNA, 19 nt, Artificial Sequence
  Description of Artificial Sequence: Synthetic oligonucleotide
gcaauucucauguaaggau

SEQ ID NO: 1883124 - RNA, 19 nt, Artificial Sequence
  Description of Artificial Sequence: Synthetic oligonucleotide
guacgguuguacugagaga

SEQ ID NO: 1883125 - RNA, 19 nt, Artificial Sequence
  Description of Artificial Sequence: Synthetic oligonucleotide
ccccauuauuuaagggugg

SEQ ID NO: 1883126 - RNA, 19 nt, Artificial Sequence
  Description of Artificial Sequence: Synthetic oligonucleotide
uccauacggagcugcugau

SEQ ID NO: 1883127 - RNA, 19 nt, Artificial Sequence
  Description of Artificial Sequence: Synthetic oligonucleotide
cccauuauuuaaggguggg

SEQ ID NO: 1883128 - RNA, 19 nt, Artificial Sequence
  Description of Artificial Sequence: Synthetic oligonucleotide
ccuucaagcauauauucgu

SEQ ID NO: 1883129 - RNA, 19 nt, Artificial Sequence
  Description of Artificial Sequence: Synthetic oligonucleotide
uuacccucugagacccaau

SEQ ID NO: 1883130 - RNA, 19 nt, Artificial Sequence
  Description of Artificial Sequence: Synthetic oligonucleotide
gccacuacgaugguuccug

SEQ ID NO: 1883131 - RNA, 19 nt, Artificial Sequence
  Description of Artificial Sequence: Synthetic oligonucleotide
gcugauaaauaacgaccuc

SEQ ID NO: 1883132 - RNA, 19 nt, Artificial Sequence
  Description of Artificial Sequence: Synthetic oligonucleotide
uacugagagauggcuccac

SEQ ID NO: 1883133 - RNA, 19 nt, Artificial Sequence
  Description of Artificial Sequence: Synthetic oligonucleotide
caugaacgcugcuggcauc

SEQ ID NO: 1883134 - RNA, 19 nt, Artificial Sequence
  Description of Artificial Sequence: Synthetic oligonucleotide
ucauccuaucacccuccuu

SEQ ID NO: 1883135 - RNA, 19 nt, Artificial Sequence
  Description of Artificial Sequence: Synthetic oligonucleotide
ucuccacccuucacaccac

SEQ ID NO: 1883136 - RNA, 19 nt, Artificial Sequence
  Description of Artificial Sequence: Synthetic oligonucleotide
cgguuguacugagagaugg

SEQ ID NO: 1883137 - RNA, 19 nt, Artificial Sequence
  Description of Artificial Sequence: Synthetic oligonucleotide
guaacuugucuggccacuc

SEQ ID NO: 1883138 - RNA, 19 nt, Artificial Sequence
  Description of Artificial Sequence: Synthetic oligonucleotide
uacugucaguagggaagcc

SEQ ID NO: 1883139 - RNA, 19 nt, Artificial Sequence
  Description of Artificial Sequence: Synthetic oligonucleotide
cagcccuugagcuuagcua

SEQ ID NO: 1883140 - RNA, 19 nt, Artificial Sequence
  Description of Artificial Sequence: Synthetic oligonucleotide
ccauucccgucagaaaugg

SEQ ID NO: 1883141 - RNA, 19 nt, Artificial Sequence
  Description of Artificial Sequence: Synthetic oligonucleotide
gcuggcaguuuccucaguc

SEQ ID NO: 1883142 - RNA, 19 nt, Artificial Sequence
  Description of Artificial Sequence: Synthetic oligonucleotide
auucgugauacuggauuuu

SEQ ID NO: 1883143 - RNA, 19 nt, Artificial Sequence
  Description of Artificial Sequence: Synthetic oligonucleotide
uggggacauggaccaguac

SEQ ID NO: 1883144 - RNA, 19 nt, Artificial Sequence
  Description of Artificial Sequence: Synthetic oligonucleotide
ccaucauccuaucacccuc

SEQ ID NO: 1883145 - RNA, 19 nt, Artificial Sequence
  Description of Artificial Sequence: Synthetic oligonucleotide
augcuuucacuauggccuu

SEQ ID NO: 1883146 - RNA, 19 nt, Artificial Sequence
  Description of Artificial Sequence: Synthetic oligonucleotide
ucaguccauucccgucaga

SEQ ID NO: 1883147 - RNA, 19 nt, Artificial Sequence
  Description of Artificial Sequence: Synthetic oligonucleotide
ccagcgaguaacgaugaac

SEQ ID NO: 1883148 - RNA, 19 nt, Artificial Sequence
  Description of Artificial Sequence: Synthetic oligonucleotide
auguaaggauccacagaga

SEQ ID NO: 1883149 - RNA, 19 nt, Artificial Sequence
  Description of Artificial Sequence: Synthetic oligonucleotide
cacagaugucaagcaggcc

SEQ ID NO: 1883150 - RNA, 19 nt, Artificial Sequence
  Description of Artificial Sequence: Synthetic oligonucleotide
gguuguacugagagauggc

SEQ ID NO: 1883151 - RNA, 19 nt, Artificial Sequence
  Description of Artificial Sequence: Synthetic oligonucleotide
cugagacccaauucaucaa

SEQ ID NO: 1883152 - RNA, 19 nt, Artificial Sequence
  Description of Artificial Sequence: Synthetic oligonucleotide
cagugaugaugcacauguc

SEQ ID NO: 1883153 - RNA, 19 nt, Artificial Sequence
  Description of Artificial Sequence: Synthetic oligonucleotide
cugauaaagccacuacgau

SEQ ID NO: 1883154 - RNA, 19 nt, Artificial Sequence
  Description of Artificial Sequence: Synthetic oligonucleotide
auacggagcugcugauaaa

SEQ ID NO: 1883155 - RNA, 19 nt, Artificial Sequence
  Description of Artificial Sequence: Synthetic oligonucleotide
gacauggaccaguacgguu

SEQ ID NO: 1883156 - RNA, 19 nt, Artificial Sequence
  Description of Artificial Sequence: Synthetic oligonucleotide
caguagggaagccuucaaa

SEQ ID NO: 1883157 - RNA, 19 nt, Artificial Sequence
  Description of Artificial Sequence: Synthetic oligonucleotide
acgaugguuccugcgggga

SEQ ID NO: 1883158 - RNA, 19 nt, Artificial Sequence
  Description of Artificial Sequence: Synthetic oligonucleotide
acccuucacaccacagaug

SEQ ID NO: 1883159 - RNA, 19 nt, Artificial Sequence
  Description of Artificial Sequence: Synthetic oligonucleotide
cagacccugcugcaccaac

SEQ ID NO: 1883160 - RNA, 19 nt, Artificial Sequence
  Description of Artificial Sequence: Synthetic oligonucleotide
gcugcaccaacaacuuugc

SEQ ID NO: 1883161 - RNA, 19 nt, Artificial Sequence
  Description of Artificial Sequence: Synthetic oligonucleotide
cgaugaaccccuccauacg

SEQ ID NO: 1883162 - RNA, 19 nt, Artificial Sequence
  Description of Artificial Sequence: Synthetic oligonucleotide
ccgagcuucuuaagauagg

SEQ ID NO: 1883163 - RNA, 19 nt, Artificial Sequence
  Description of Artificial Sequence: Synthetic oligonucleotide
uugcagcccuugagcuuag

SEQ ID NO: 1883164 - RNA, 19 nt, Artificial Sequence
  Description of Artificial Sequence: Synthetic oligonucleotide
auacuggauuuuacccucu

SEQ ID NO: 1883165 - RNA, 19 nt, Artificial Sequence
  Description of Artificial Sequence: Synthetic oligonucleotide
ucgaugcaauucucaugua

SEQ ID NO: 1883166 - RNA, 19 nt, Artificial Sequence
  Description of Artificial Sequence: Synthetic oligonucleotide
cuuuacugucuuguaguua

SEQ ID NO: 1883167 - RNA, 19 nt, Artificial Sequence
  Description of Artificial Sequence: Synthetic oligonucleotide
caugccaacuguccccaaa

SEQ ID NO: 1883168 - RNA, 19 nt, Artificial Sequence
  Description of Artificial Sequence: Synthetic oligonucleotide
gggauauaacaguguuuga

SEQ ID NO: 1883169 - RNA, 19 nt, Artificial Sequence
  Description of Artificial Sequence: Synthetic oligonucleotide
ccauccugauguacagaag

SEQ ID NO: 1883170 - RNA, 19 nt, Artificial Sequence
  Description of Artificial Sequence: Synthetic oligonucleotide
cacuacagaccccacugcu

SEQ ID NO: 1883171 - RNA, 19 nt, Artificial Sequence
  Description of Artificial Sequence: Synthetic oligonucleotide
cugucaguagggaagccuu

SEQ ID NO: 1883172 - RNA, 19 nt, Artificial Sequence
  Description of Artificial Sequence: Synthetic oligonucleotide
cuugucuggccacucugcu

SEQ ID NO: 1883173 - RNA, 19 nt, Artificial Sequence
  Description of Artificial Sequence: Synthetic oligonucleotide
ggcuaaucuuccagugaug

SEQ ID NO: 1883174 - RNA, 19 nt, Artificial Sequence
  Description of Artificial Sequence: Synthetic oligonucleotide
ccaguacgguuguacugag

SEQ ID NO: 1883175 - RNA, 19 nt, Artificial Sequence
  Description of Artificial Sequence: Synthetic oligonucleotide
cauucccgucagaaaugga

SEQ ID NO: 1883176 - RNA, 19 nt, Artificial Sequence
  Description of Artificial Sequence: Synthetic oligonucleotide
ccucaguccauucccguca

SEQ ID NO: 1883177 - RNA, 19 nt, Artificial Sequence
  Description of Artificial Sequence: Synthetic oligonucleotide
ccgucagaaauggaaugug

SEQ ID NO: 1883178 - RNA, 19 nt, Artificial Sequence
  Description of Artificial Sequence: Synthetic oligonucleotide
agccacuacgaugguuccu

SEQ ID NO: 1883179 - RNA, 19 nt, Artificial Sequence
  Description of Artificial Sequence: Synthetic oligonucleotide
cugggauauaacaguguuu

SEQ ID NO: 1883180 - RNA, 19 nt, Artificial Sequence
  Description of Artificial Sequence: Synthetic oligonucleotide
ggaccaguacgguuguacu

SEQ ID NO: 1883181 - RNA, 19 nt, Artificial Sequence
  Description of Artificial Sequence: Synthetic oligonucleotide
cagcaagaccuccccauua

SEQ ID NO: 1883182 - RNA, 19 nt, Artificial Sequence
  Description of Artificial Sequence: Synthetic oligonucleotide
caguagucuucaacucgaa

SEQ ID NO: 1883183 - RNA, 19 nt, Artificial Sequence
  Description of Artificial Sequence: Synthetic oligonucleotide
gcugcugcguugaccauca

SEQ ID NO: 1883184 - RNA, 19 nt, Artificial Sequence
  Description of Artificial Sequence: Synthetic oligonucleotide
caguacgguuguacugaga

SEQ ID NO: 1883185 - RNA, 19 nt, Artificial Sequence
  Description of Artificial Sequence: Synthetic oligonucleotide
accaucaggagaggccauu

SEQ ID NO: 1883186 - RNA, 19 nt, Artificial Sequence
  Description of Artificial Sequence: Synthetic oligonucleotide
aggcaacaucgaauccgag

SEQ ID NO: 1883187 - RNA, 19 nt, Artificial Sequence
  Description of Artificial Sequence: Synthetic oligonucleotide
cuugcucacccaucauccu

SEQ ID NO: 1883188 - RNA, 19 nt, Artificial Sequence
  Description of Artificial Sequence: Synthetic oligonucleotide
ugguuccugcggggaaggc

SEQ ID NO: 1883189 - RNA, 19 nt, Artificial Sequence
  Description of Artificial Sequence: Synthetic oligonucleotide
gccaaagacagugguaacu

SEQ ID NO: 1883190 - RNA, 19 nt, Artificial Sequence
  Description of Artificial Sequence: Synthetic oligonucleotide
cgaguaacgaugaaccccu

SEQ ID NO: 1883191 - RNA, 19 nt, Artificial Sequence
  Description of Artificial Sequence: Synthetic oligonucleotide
guugaccaucacuguuucu

SEQ ID NO: 1883192 - RNA, 19 nt, Artificial Sequence
  Description of Artificial Sequence: Synthetic oligonucleotide
cugccccacuacagacccc

SEQ ID NO: 1883193 - RNA, 19 nt, Artificial Sequence
  Description of Artificial Sequence: Synthetic oligonucleotide
cgaauccgagcuucuuaag

SEQ ID NO: 1883194 - RNA, 19 nt, Artificial Sequence
  Description of Artificial Sequence: Synthetic oligonucleotide
cgaugcaauucucauguaa

SEQ ID NO: 1883195 - RNA, 19 nt, Artificial Sequence
  Description of Artificial Sequence: Synthetic oligonucleotide
cugcaccaacaacuuugca

SEQ ID NO: 1883196 - RNA, 19 nt, Artificial Sequence
  Description of Artificial Sequence: Synthetic oligonucleotide
gaguaacgaugaaccccuc

SEQ ID NO: 1883197 - RNA, 19 nt, Artificial Sequence
  Description of Artificial Sequence: Synthetic oligonucleotide
acggagcugcugauaaaua

SEQ ID NO: 1883198 - RNA, 19 nt, Artificial Sequence
  Description of Artificial Sequence: Synthetic oligonucleotide
cguugaccaucacuguuuc

SEQ ID NO: 1883199 - RNA, 19 nt, Artificial Sequence
  Description of Artificial Sequence: Synthetic oligonucleotide
cauggaccaguacgguugu

SEQ ID NO: 1883200 - RNA, 19 nt, Artificial Sequence
  Description of Artificial Sequence: Synthetic oligonucleotide
gaacgcugcuggcaucuuu

SEQ ID NO: 1883201 - RNA, 19 nt, Artificial Sequence
  Description of Artificial Sequence: Synthetic oligonucleotide
ccacuacgaugguuccugc

SEQ ID NO: 1883202 - RNA, 19 nt, Artificial Sequence
  Description of Artificial Sequence: Synthetic oligonucleotide
cggagcugcugauaaauaa

SEQ ID NO: 1883203 - RNA, 19 nt, Artificial Sequence
  Description of Artificial Sequence: Synthetic oligonucleotide
ccauuauuuaaggguggga

SEQ ID NO: 1883204 - RNA, 19 nt, Artificial Sequence
  Description of Artificial Sequence: Synthetic oligonucleotide
gguaacuugucuggccacu

SEQ ID NO: 1883205 - RNA, 19 nt, Artificial Sequence
  Description of Artificial Sequence: Synthetic oligonucleotide
cuuagcuaucugccccacu

SEQ ID NO: 1883206 - RNA, 19 nt, Artificial Sequence
  Description of Artificial Sequence: Synthetic oligonucleotide
cagugaggccuggcaugcc

SEQ ID NO: 1883207 - RNA, 19 nt, Artificial Sequence
  Description of Artificial Sequence: Synthetic oligonucleotide
augugauguccagccugau

SEQ ID NO: 1883208 - RNA, 19 nt, Artificial Sequence
  Description of Artificial Sequence: Synthetic oligonucleotide
ccccaugaacgcugcuggc

SEQ ID NO: 1883209 - RNA, 19 nt, Artificial Sequence
  Description of Artificial Sequence: Synthetic oligonucleotide
ugaacgcugcuggcaucuu

SEQ ID NO: 1883210 - RNA, 19 nt, Artificial Sequence
  Description of Artificial Sequence: Synthetic oligonucleotide
cugcguugaccaucacugu

SEQ ID NO: 1883211 - RNA, 19 nt, Artificial Sequence
  Description of Artificial Sequence: Synthetic oligonucleotide
cuccaccuacauugucaaa

SEQ ID NO: 1883212 - RNA, 19 nt, Artificial Sequence
  Description of Artificial Sequence: Synthetic oligonucleotide
cccaauucaucaagucugu

SEQ ID NO: 1883213 - RNA, 19 nt, Artificial Sequence
  Description of Artificial Sequence: Synthetic oligonucleotide
gcuuagcuaucugccccac

SEQ ID NO: 1883214 - RNA, 19 nt, Artificial Sequence
  Description of Artificial Sequence: Synthetic oligonucleotide
cccaucauccuaucacccu

SEQ ID NO: 1883215 - RNA, 19 nt, Artificial Sequence
  Description of Artificial Sequence: Synthetic oligonucleotide
ccacaacucuggccacuug

SEQ ID NO: 1883216 - RNA, 19 nt, Artificial Sequence
  Description of Artificial Sequence: Synthetic oligonucleotide
ggacauggaccaguacggu

SEQ ID NO: 1883217 - RNA, 19 nt, Artificial Sequence
  Description of Artificial Sequence: Synthetic oligonucleotide
ccaugaacgcugcuggcau

SEQ ID NO: 1883218 - RNA, 19 nt, Artificial Sequence
  Description of Artificial Sequence: Synthetic oligonucleotide
cccgucagaaauggaaugu

SEQ ID NO: 1883219 - RNA, 19 nt, Artificial Sequence
  Description of Artificial Sequence: Synthetic oligonucleotide
gcguugaccaucacuguuu

SEQ ID NO: 1883220 - RNA, 19 nt, Artificial Sequence
  Description of Artificial Sequence: Synthetic oligonucleotide
cugcugcguugaccaucac

SEQ ID NO: 1883221 - RNA, 19 nt, Artificial Sequence
  Description of Artificial Sequence: Synthetic oligonucleotide
auggaccaguacgguugua

SEQ ID NO: 1883222 - RNA, 19 nt, Artificial Sequence
  Description of Artificial Sequence: Synthetic oligonucleotide
cugcggggaaggcuggauu

SEQ ID NO: 1883223 - RNA, 19 nt, Artificial Sequence
  Description of Artificial Sequence: Synthetic oligonucleotide
caucgaauccgagcuucuu

SEQ ID NO: 1883224 - RNA, 19 nt, Artificial Sequence
  Description of Artificial Sequence: Synthetic oligonucleotide
ggcggacaucucccugcca

SEQ ID NO: 1883225 - RNA, 19 nt, Artificial Sequence
  Description of Artificial Sequence: Synthetic oligonucleotide
ggcuccacagauggcaauu

SEQ ID NO: 1883226 - RNA, 19 nt, Artificial Sequence
  Description of Artificial Sequence: Synthetic oligonucleotide
gcccuugagcuuagcuauc

SEQ ID NO: 1883227 - RNA, 19 nt, Artificial Sequence
  Description of Artificial Sequence: Synthetic oligonucleotide
cauccccaugaacgcugcu

SEQ ID NO: 1883228 - RNA, 19 nt, Artificial Sequence
  Description of Artificial Sequence: Synthetic oligonucleotide
ccauacggagcugcugaua

SEQ ID NO: 1883229 - RNA, 19 nt, Artificial Sequence
  Description of Artificial Sequence: Synthetic oligonucleotide
cuauggccuuccccagauu

SEQ ID NO: 1883230 - RNA, 19 nt, Artificial Sequence
  Description of Artificial Sequence: Synthetic oligonucleotide
cgaugguuccugcggggaa

SEQ ID NO: 1883231 - RNA, 19 nt, Artificial Sequence
  Description of Artificial Sequence: Synthetic oligonucleotide
gcaugccaacuguccccaa

SEQ ID NO: 1883232 - RNA, 19 nt, Artificial Sequence
  Description of Artificial Sequence: Synthetic oligonucleotide
ggccuuccccagauuuucu

SEQ ID NO: 1883233 - RNA, 19 nt, Artificial Sequence
  Description of Artificial Sequence: Synthetic oligonucleotide
gcggggaaggcuggauuuu

SEQ ID NO: 1883234 - RNA, 19 nt, Artificial Sequence
  Description of Artificial Sequence: Synthetic oligonucleotide
ccugcggggaaggcuggau

SEQ ID NO: 1883235 - RNA, 19 nt, Artificial Sequence
  Description of Artificial Sequence: Synthetic oligonucleotide
  modified_base (9)..(9): a, c, u, g, unknown or other
auuagaaunaaccuaguac

SEQ ID NO: 1883236 - RNA, 19 nt, Artificial Sequence
  Description of Artificial Sequence: Synthetic oligonucleotide
agguuuaguaaacagagcc

SEQ ID NO: 1883237 - RNA, 19 nt, Artificial Sequence
  Description of Artificial Sequence: Synthetic oligonucleotide
  modified_base (8)..(8): a, c, u, g, unknown or other
uuagaaunaaccuaguaca

SEQ ID NO: 1883238 - RNA, 19 nt, Artificial Sequence
  Description of Artificial Sequence: Synthetic oligonucleotide
aaaagaacaacugggaggg

SEQ ID NO: 1883239 - RNA, 19 nt, Artificial Sequence
  Description of Artificial Sequence: Synthetic oligonucleotide
  modified_base (19)..(19): a, c, u, g, unknown or other
ugaaaauguaauuagaaun

SEQ ID NO: 1883240 - RNA, 19 nt, Artificial Sequence
  Description of Artificial Sequence: Synthetic oligonucleotide
uuugaagggaacaacguag

SEQ ID NO: 1883241 - RNA, 19 nt, Artificial Sequence
  Description of Artificial Sequence: Synthetic oligonucleotide
aaagguuuaguaaacagag

SEQ ID NO: 1883242 - RNA, 19 nt, Artificial Sequence
  Description of Artificial Sequence: Synthetic oligonucleotide
aggagaaacaccuucugcc

SEQ ID NO: 1883243 - RNA, 19 nt, Artificial Sequence
  Description of Artificial Sequence: Synthetic oligonucleotide
auugauaucuuucuuucgg

SEQ ID NO: 1883244 - RNA, 19 nt, Artificial Sequence
  Description of Artificial Sequence: Synthetic oligonucleotide
  modified_base (16)..(16): a, c, u, g, unknown or other
aaauguaauuagaaunaac

SEQ ID NO: 1883245 - RNA, 19 nt, Artificial Sequence
  Description of Artificial Sequence: Synthetic oligonucleotide
  modified_base (13)..(13): a, c, u, g, unknown or other
uguaauuagaaunaaccua

SEQ ID NO: 1883246 - RNA, 19 nt, Artificial Sequence
  Description of Artificial Sequence: Synthetic oligonucleotide
agaacuugcuguucaaugc

SEQ ID NO: 1883247 - RNA, 19 nt, Artificial Sequence
  Description of Artificial Sequence: Synthetic oligonucleotide
aaugacacggagcaaaaga

SEQ ID NO: 1883248 - RNA, 19 nt, Artificial Sequence
  Description of Artificial Sequence: Synthetic oligonucleotide
caaaagaacaacugggagg

SEQ ID NO: 1883249 - RNA, 19 nt, Artificial Sequence
  Description of Artificial Sequence: Synthetic oligonucleotide
  modified_base (14)..(14): a, c, u, g, unknown or other
auguaauuagaaunaaccu

SEQ ID NO: 1883250 - RNA, 19 nt, Artificial Sequence
  Description of Artificial Sequence: Synthetic oligonucleotide
  modified_base (12)..(12): a, c, u, g, unknown or other
guaauuagaaunaaccuag

SEQ ID NO: 1883251 - RNA, 19 nt, Artificial Sequence
  Description of Artificial Sequence: Synthetic oligonucleotide
uguucaaugcccaacagaa

SEQ ID NO: 1883252 - RNA, 19 nt, Artificial Sequence
  Description of Artificial Sequence: Synthetic oligonucleotide
uucaaugcccaacagaacu

SEQ ID NO: 1883253 - RNA, 19 nt, Artificial Sequence
  Description of Artificial Sequence: Synthetic oligonucleotide
aacaacguaggaaaggagg

SEQ ID NO: 1883254 - RNA, 19 nt, Artificial Sequence
  Description of Artificial Sequence: Synthetic oligonucleotide
cuaagugccaaaucaaggc

SEQ ID NO: 1883255 - RNA, 19 nt, Artificial Sequence
  Description of Artificial Sequence: Synthetic oligonucleotide
cuuaagaggcugaaaaccc

SEQ ID NO: 1883256 - RNA, 19 nt, Artificial Sequence
  Description of Artificial Sequence: Synthetic oligonucleotide
aaucguuuuccgcaauggg

SEQ ID NO: 1883257 - RNA, 19 nt, Artificial Sequence
  Description of Artificial Sequence: Synthetic oligonucleotide
uuucuuucggaugucacgg

SEQ ID NO: 1883258 - RNA, 19 nt, Artificial Sequence
  Description of Artificial Sequence: Synthetic oligonucleotide
auauuauugauaucuuucu

SEQ ID NO: 1883259 - RNA, 19 nt, Artificial Sequence
  Description of Artificial Sequence: Synthetic oligonucleotide
guaaacagagcccagcacc

SEQ ID NO: 1883260 - RNA, 19 nt, Artificial Sequence
  Description of Artificial Sequence: Synthetic oligonucleotide
  modified_base (18)..(18): a, c, u, g, unknown or other
gaaaauguaauuagaauna

SEQ ID NO: 1883261 - RNA, 19 nt, Artificial Sequence
  Description of Artificial Sequence: Synthetic oligonucleotide
augaaaagaucucaggaga

SEQ ID NO: 1883262 - RNA, 19 nt, Artificial Sequence
  Description of Artificial Sequence: Synthetic oligonucleotide
uugaagggaacaacguagg

SEQ ID NO: 1883263 - RNA, 19 nt, Artificial Sequence
  Description of Artificial Sequence: Synthetic oligonucleotide
  modified_base (5)..(5): a, c, u, g, unknown or other
gaaunaaccuaguacaaaa

SEQ ID NO: 1883264 - RNA, 19 nt, Artificial Sequence
  Description of Artificial Sequence: Synthetic oligonucleotide
uucucuuuguacugguugg

SEQ ID NO: 1883265 - RNA, 19 nt, Artificial Sequence
  Description of Artificial Sequence: Synthetic oligonucleotide
ucaugcaaggucuugacaa

SEQ ID NO: 1883266 - RNA, 19 nt, Artificial Sequence
  Description of Artificial Sequence: Synthetic oligonucleotide
aacccaaagguuuaguaaa

SEQ ID NO: 1883267 - RNA, 19 nt, Artificial Sequence
  Description of Artificial Sequence: Synthetic oligonucleotide
acaccauucaugcaagguc

SEQ ID NO: 1883268 - RNA, 19 nt, Artificial Sequence
  Description of Artificial Sequence: Synthetic oligonucleotide
agaaagucuagucaagccu

SEQ ID NO: 1883269 - RNA, 19 nt, Artificial Sequence
  Description of Artificial Sequence: Synthetic oligonucleotide
aaacccaaagguuuaguaa

SEQ ID NO: 1883270 - RNA, 19 nt, Artificial Sequence
  Description of Artificial Sequence: Synthetic oligonucleotide
agaaacaccuucugccgcc

SEQ ID NO: 1883271 - RNA, 19 nt, Artificial Sequence
  Description of Artificial Sequence: Synthetic oligonucleotide
  modified_base (7)..(7): a, c, u, g, unknown or other
uagaaunaaccuaguacaa

SEQ ID NO: 1883272 - RNA, 19 nt, Artificial Sequence
  Description of Artificial Sequence: Synthetic oligonucleotide
ucaaguucagaaagucuag

SEQ ID NO: 1883273 - RNA, 19 nt, Artificial Sequence
  Description of Artificial Sequence: Synthetic oligonucleotide
gaguuugaagggaacaacg

SEQ ID NO: 1883274 - RNA, 19 nt, Artificial Sequence
  Description of Artificial Sequence: Synthetic oligonucleotide
aaaucaaggcugagcagcc

SEQ ID NO: 1883275 - RNA, 19 nt, Artificial Sequence
  Description of Artificial Sequence: Synthetic oligonucleotide
gguacugugguacaugggg

SEQ ID NO: 1883276 - RNA, 19 nt, Artificial Sequence
  Description of Artificial Sequence: Synthetic oligonucleotide
guaggaaaggaggugaagg

SEQ ID NO: 1883277 - RNA, 19 nt, Artificial Sequence
  Description of Artificial Sequence: Synthetic oligonucleotide
auacacagagacaaggaac

SEQ ID NO: 1883278 - RNA, 19 nt, Artificial Sequence
  Description of Artificial Sequence: Synthetic oligonucleotide
caaaucaaggcugagcagc

SEQ ID NO: 1883279 - RNA, 19 nt, Artificial Sequence
  Description of Artificial Sequence: Synthetic oligonucleotide
cuuucuuucggaugucacg

SEQ ID NO: 1883280 - RNA, 19 nt, Artificial Sequence
  Description of Artificial Sequence: Synthetic oligonucleotide
aaaacccaaagguuuagua

SEQ ID NO: 1883281 - RNA, 19 nt, Artificial Sequence
  Description of Artificial Sequence: Synthetic oligonucleotide
ucguuuuccgcaaugggac

SEQ ID NO: 1883282 - RNA, 19 nt, Artificial Sequence
  Description of Artificial Sequence: Synthetic oligonucleotide
cuuagugagagauccuggc

SEQ ID NO: 1883283 - RNA, 19 nt, Artificial Sequence
  Description of Artificial Sequence: Synthetic oligonucleotide
aacuuagugagagauccug

SEQ ID NO: 1883284 - RNA, 19 nt, Artificial Sequence
  Description of Artificial Sequence: Synthetic oligonucleotide
uaagugccaaaucaaggcu

SEQ ID NO: 1883285 - RNA, 19 nt, Artificial Sequence
  Description of Artificial Sequence: Synthetic oligonucleotide
aagguuuaguaaacagagc

SEQ ID NO: 1883286 - RNA, 19 nt, Artificial Sequence
  Description of Artificial Sequence: Synthetic oligonucleotide
auucaugcaaggucuugac

SEQ ID NO: 1883287 - RNA, 19 nt, Artificial Sequence
  Description of Artificial Sequence: Synthetic oligonucleotide
agagaagccuccuccaguc

SEQ ID NO: 1883288 - RNA, 19 nt, Artificial Sequence
  Description of Artificial Sequence: Synthetic oligonucleotide
cagccugacaaaaugacac

SEQ ID NO: 1883289 - RNA, 19 nt, Artificial Sequence
  Description of Artificial Sequence: Synthetic oligonucleotide
uccgcaaugggaccaaagc

SEQ ID NO: 1883290 - RNA, 19 nt, Artificial Sequence
  Description of Artificial Sequence: Synthetic oligonucleotide
uggauaaacugccuccagc

SEQ ID NO: 1883291 - RNA, 19 nt, Artificial Sequence
  Description of Artificial Sequence: Synthetic oligonucleotide
ugacuagagacacuugcac

SEQ ID NO: 1883292 - RNA, 19 nt, Artificial Sequence
  Description of Artificial Sequence: Synthetic oligonucleotide
uuaagaggcugaaaaccca

SEQ ID NO: 1883293 - RNA, 19 nt, Artificial Sequence
  Description of Artificial Sequence: Synthetic oligonucleotide
agcagccuaagacagcagg

SEQ ID NO: 1883294 - RNA, 19 nt, Artificial Sequence
  Description of Artificial Sequence: Synthetic oligonucleotide
agagacaaggaaccccugg

SEQ ID NO: 1883295 - RNA, 19 nt, Artificial Sequence
  Description of Artificial Sequence: Synthetic oligonucleotide
cugacaaaaugacacggag

SEQ ID NO: 1883296 - RNA, 19 nt, Artificial Sequence
  Description of Artificial Sequence: Synthetic oligonucleotide
aggagcaaucguuuuccgc

SEQ ID NO: 1883297 - RNA, 19 nt, Artificial Sequence
  Description of Artificial Sequence: Synthetic oligonucleotide
uacugguuggcucucagaa

SEQ ID NO: 1883298 - RNA, 19 nt, Artificial Sequence
  Description of Artificial Sequence: Synthetic oligonucleotide
aauauaaccugaaacuguu

SEQ ID NO: 1883299 - RNA, 19 nt, Artificial Sequence
  Description of Artificial Sequence: Synthetic oligonucleotide
ucucuggccaggaguaugg

SEQ ID NO: 1883300 - RNA, 19 nt, Artificial Sequence
  Description of Artificial Sequence: Synthetic oligonucleotide
cugccuccagcuuagaacc

SEQ ID NO: 1883301 - RNA, 19 nt, Artificial Sequence
  Description of Artificial Sequence: Synthetic oligonucleotide
aacaacguggcuaccugac

SEQ ID NO: 1883302 - RNA, 19 nt, Artificial Sequence
  Description of Artificial Sequence: Synthetic oligonucleotide
agugcucccaacuuaguga

SEQ ID NO: 1883303 - RNA, 19 nt, Artificial Sequence
  Description of Artificial Sequence: Synthetic oligonucleotide
gaaccagccugacaaaaug

SEQ ID NO: 1883304 - RNA, 19 nt, Artificial Sequence
  Description of Artificial Sequence: Synthetic oligonucleotide
aacguaggaaaggagguga

SEQ ID NO: 1883305 - RNA, 19 nt, Artificial Sequence
  Description of Artificial Sequence: Synthetic oligonucleotide
uuaguaaacagagcccagc

SEQ ID NO: 1883306 - RNA, 19 nt, Artificial Sequence
  Description of Artificial Sequence: Synthetic oligonucleotide
guagcccauacacagagac

SEQ ID NO: 1883307 - RNA, 19 nt, Artificial Sequence
  Description of Artificial Sequence: Synthetic oligonucleotide
agguagcccauacacagag

SEQ ID NO: 1883308 - RNA, 19 nt, Artificial Sequence
  Description of Artificial Sequence: Synthetic oligonucleotide
uugauaucuuucuuucgga

SEQ ID NO: 1883309 - RNA, 19 nt, Artificial Sequence
  Description of Artificial Sequence: Synthetic oligonucleotide
agucuagucaagccuuuuc

SEQ ID NO: 1883310 - RNA, 19 nt, Artificial Sequence
  Description of Artificial Sequence: Synthetic oligonucleotide
agagcaaauguuggcagac

SEQ ID NO: 1883311 - RNA, 19 nt, Artificial Sequence
  Description of Artificial Sequence: Synthetic oligonucleotide
aacaccuucugccgcccac

SEQ ID NO: 1883312 - RNA, 19 nt, Artificial Sequence
  Description of Artificial Sequence: Synthetic oligonucleotide
gaguauggugucaucagag

SEQ ID NO: 1883313 - RNA, 19 nt, Artificial Sequence
  Description of Artificial Sequence: Synthetic oligonucleotide
ugggucgccagccaaggag

SEQ ID NO: 1883314 - RNA, 19 nt, Artificial Sequence
  Description of Artificial Sequence: Synthetic oligonucleotide
ucggacucagacaccagag

SEQ ID NO: 1883315 - RNA, 19 nt, Artificial Sequence
  Description of Artificial Sequence: Synthetic oligonucleotide
ggucuugacaauauuauug

SEQ ID NO: 1883316 - RNA, 19 nt, Artificial Sequence
  Description of Artificial Sequence: Synthetic oligonucleotide
uguuggcagacaaucccag

SEQ ID NO: 1883317 - RNA, 19 nt, Artificial Sequence
  Description of Artificial Sequence: Synthetic oligonucleotide
guuuaguaaacagagccca

SEQ ID NO: 1883318 - RNA, 19 nt, Artificial Sequence
  Description of Artificial Sequence: Synthetic oligonucleotide
caacagaacugccucacag

SEQ ID NO: 1883319 - RNA, 19 nt, Artificial Sequence
  Description of Artificial Sequence: Synthetic oligonucleotide
gacaccagaggugagucag

SEQ ID NO: 1883320 - RNA, 19 nt, Artificial Sequence
  Description of Artificial Sequence: Synthetic oligonucleotide
aaggucuugacaauauuau

SEQ ID NO: 1883321 - RNA, 19 nt, Artificial Sequence
  Description of Artificial Sequence: Synthetic oligonucleotide
gaaaagaucucaggagagc

SEQ ID NO: 1883322 - RNA, 19 nt, Artificial Sequence
  Description of Artificial Sequence: Synthetic oligonucleotide
aaugcccaacagaacugcc

SEQ ID NO: 1883323 - RNA, 19 nt, Artificial Sequence
  Description of Artificial Sequence: Synthetic oligonucleotide
aggaguauggugucaucag

SEQ ID NO: 1883324 - RNA, 19 nt, Artificial Sequence
  Description of Artificial Sequence: Synthetic oligonucleotide
auaaacugccuccagcuua

SEQ ID NO: 1883325 - RNA, 19 nt, Artificial Sequence
  Description of Artificial Sequence: Synthetic oligonucleotide
guugcuaaccucugccucc

SEQ ID NO: 1883326 - RNA, 19 nt, Artificial Sequence
  Description of Artificial Sequence: Synthetic oligonucleotide
cuugacaauauuauugaua

SEQ ID NO: 1883327 - RNA, 19 nt, Artificial Sequence
  Description of Artificial Sequence: Synthetic oligonucleotide
ggagaaacaccuucugccg

SEQ ID NO: 1883328 - RNA, 19 nt, Artificial Sequence
  Description of Artificial Sequence: Synthetic oligonucleotide
aggaggagcaaucguuuuc

SEQ ID NO: 1883329 - RNA, 19 nt, Artificial Sequence
  Description of Artificial Sequence: Synthetic oligonucleotide
ucuuucuuucggaugucac

SEQ ID NO: 1883330 - RNA, 19 nt, Artificial Sequence
  Description of Artificial Sequence: Synthetic oligonucleotide
ugacacggagcaaaagaac

SEQ ID NO: 1883331 - RNA, 19 nt, Artificial Sequence
  Description of Artificial Sequence: Synthetic oligonucleotide
acugguuggcucucagaac

SEQ ID NO: 1883332 - RNA, 19 nt, Artificial Sequence
  Description of Artificial Sequence: Synthetic oligonucleotide
ucuagucaagccuuuucuc

SEQ ID NO: 1883333 - RNA, 19 nt, Artificial Sequence
  Description of Artificial Sequence: Synthetic oligonucleotide
ucggacccuguuaggaugg

SEQ ID NO: 1883334 - RNA, 19 nt, Artificial Sequence
  Description of Artificial Sequence: Synthetic oligonucleotide
aagccuccuccagucaucc

SEQ ID NO: 1883335 - RNA, 19 nt, Artificial Sequence
  Description of Artificial Sequence: Synthetic oligonucleotide
aagugccaaaucaaggcug

SEQ ID NO: 1883336 - RNA, 19 nt, Artificial Sequence
  Description of Artificial Sequence: Synthetic oligonucleotide
agccugacaaaaugacacg

SEQ ID NO: 1883337 - RNA, 19 nt, Artificial Sequence
  Description of Artificial Sequence: Synthetic oligonucleotide
agacaaggaaccccuggag

SEQ ID NO: 1883338 - RNA, 19 nt, Artificial Sequence
  Description of Artificial Sequence: Synthetic oligonucleotide
gacacggagcaaaagaaca

SEQ ID NO: 1883339 - RNA, 19 nt, Artificial Sequence
  Description of Artificial Sequence: Synthetic oligonucleotide
uguacugguuggcucucag

SEQ ID NO: 1883340 - RNA, 19 nt, Artificial Sequence
  Description of Artificial Sequence: Synthetic oligonucleotide
aaaugacacggagcaaaag

SEQ ID NO: 1883341 - RNA, 19 nt, Artificial Sequence
  Description of Artificial Sequence: Synthetic oligonucleotide
acggccaaugcagaaaauc

SEQ ID NO: 1883342 - RNA, 19 nt, Artificial Sequence
  Description of Artificial Sequence: Synthetic oligonucleotide
ugaagggaacaacguagga

SEQ ID NO: 1883343 - RNA, 19 nt, Artificial Sequence
  Description of Artificial Sequence: Synthetic oligonucleotide
ucuuuguacugguuggcuc

SEQ ID NO: 1883344 - RNA, 19 nt, Artificial Sequence
  Description of Artificial Sequence: Synthetic oligonucleotide
agccugaacuggcacugcc

SEQ ID NO: 1883345 - RNA, 19 nt, Artificial Sequence
  Description of Artificial Sequence: Synthetic oligonucleotide
ccuaagugccaaaucaagg

SEQ ID NO: 1883346 - RNA, 19 nt, Artificial Sequence
  Description of Artificial Sequence: Synthetic oligonucleotide
caaucguuuuccgcaaugg

SEQ ID NO: 1883347 - RNA, 19 nt, Artificial Sequence
  Description of Artificial Sequence: Synthetic oligonucleotide
gcuuaagaggcugaaaacc

SEQ ID NO: 1883348 - RNA, 19 nt, Artificial Sequence
  Description of Artificial Sequence: Synthetic oligonucleotide
ugagucagcccagugcucc

SEQ ID NO: 1883349 - RNA, 19 nt, Artificial Sequence
  Description of Artificial Sequence: Synthetic oligonucleotide
uccguugagccccugaguu

SEQ ID NO: 1883350 - RNA, 19 nt, Artificial Sequence
  Description of Artificial Sequence: Synthetic oligonucleotide
ucucaggagagcaaauguu

SEQ ID NO: 1883351 - RNA, 19 nt, Artificial Sequence
  Description of Artificial Sequence: Synthetic oligonucleotide
aggacaccgagccaggaga

SEQ ID NO: 1883352 - RNA, 19 nt, Artificial Sequence
  Description of Artificial Sequence: Synthetic oligonucleotide
ggagcaaucguuuuccgca

SEQ ID NO: 1883353 - RNA, 19 nt, Artificial Sequence
  Description of Artificial Sequence: Synthetic oligonucleotide
acaccgagccaggagaaac

SEQ ID NO: 1883354 - RNA, 19 nt, Artificial Sequence
  Description of Artificial Sequence: Synthetic oligonucleotide
agcccauacacagagacaa

SEQ ID NO: 1883355 - RNA, 19 nt, Artificial Sequence
  Description of Artificial Sequence: Synthetic oligonucleotide
gcaugaaaagaucucagga

SEQ ID NO: 1883356 - RNA, 19 nt, Artificial Sequence
  Description of Artificial Sequence: Synthetic oligonucleotide
ggcaacugggccuaagugc

SEQ ID NO: 1883357 - RNA, 19 nt, Artificial Sequence
  Description of Artificial Sequence: Synthetic oligonucleotide
acuuagugagagauccugg

SEQ ID NO: 1883358 - RNA, 19 nt, Artificial Sequence
  Description of Artificial Sequence: Synthetic oligonucleotide
ugcaaggucuugacaauau

SEQ ID NO: 1883359 - RNA, 19 nt, Artificial Sequence
  Description of Artificial Sequence: Synthetic oligonucleotide
ugcccaacagaacugccuc

SEQ ID NO: 1883360 - RNA, 19 nt, Artificial Sequence
  Description of Artificial Sequence: Synthetic oligonucleotide
agcaaaagaacaacuggga

SEQ ID NO: 1883361 - RNA, 19 nt, Artificial Sequence
  Description of Artificial Sequence: Synthetic oligonucleotide
uccagcuuagaaccagccu

SEQ ID NO: 1883362 - RNA, 19 nt, Artificial Sequence
  Description of Artificial Sequence: Synthetic oligonucleotide
gccaacaggaguaaggcag

SEQ ID NO: 1883363 - RNA, 19 nt, Artificial Sequence
  Description of Artificial Sequence: Synthetic oligonucleotide
aggauggcauccguugagc

SEQ ID NO: 1883364 - RNA, 19 nt, Artificial Sequence
  Description of Artificial Sequence: Synthetic oligonucleotide
aacaggaguaaggcaggag

SEQ ID NO: 1883365 - RNA, 19 nt, Artificial Sequence
  Description of Artificial Sequence: Synthetic oligonucleotide
caccauuccuaccccaggg

SEQ ID NO: 1883366 - RNA, 19 nt, Artificial Sequence
  Description of Artificial Sequence: Synthetic oligonucleotide
gaggcaugaaaagaucuca

SEQ ID NO: 1883367 - RNA, 19 nt, Artificial Sequence
  Description of Artificial Sequence: Synthetic oligonucleotide
aggaggaguggucagcaga

SEQ ID NO: 1883368 - RNA, 19 nt, Artificial Sequence
  Description of Artificial Sequence: Synthetic oligonucleotide
ucggcaucaccauuccuac

SEQ ID NO: 1883369 - RNA, 19 nt, Artificial Sequence
  Description of Artificial Sequence: Synthetic oligonucleotide
  modified_base (6)..(6): a, c, u, g, unknown or other
agaaunaaccuaguacaaa

SEQ ID NO: 1883370 - RNA, 19 nt, Artificial Sequence
  Description of Artificial Sequence: Synthetic oligonucleotide
uuccgcaaugggaccaaag

SEQ ID NO: 1883371 - RNA, 19 nt, Artificial Sequence
  Description of Artificial Sequence: Synthetic oligonucleotide
ugccaaaucaaggcugagc

SEQ ID NO: 1883372 - RNA, 19 nt, Artificial Sequence
  Description of Artificial Sequence: Synthetic oligonucleotide
aguuaaaauauaaccugaa

SEQ ID NO: 1883373 - RNA, 19 nt, Artificial Sequence
  Description of Artificial Sequence: Synthetic oligonucleotide
acaacguaggaaaggaggu

SEQ ID NO: 1883374 - RNA, 19 nt, Artificial Sequence
  Description of Artificial Sequence: Synthetic oligonucleotide
ccagcuuagaaccagccug

SEQ ID NO: 1883375 - RNA, 19 nt, Artificial Sequence
  Description of Artificial Sequence: Synthetic oligonucleotide
ggagagcaaauguuggcag

SEQ ID NO: 1883376 - RNA, 19 nt, Artificial Sequence
  Description of Artificial Sequence: Synthetic oligonucleotide
aguaaggcaggagagggaa

SEQ ID NO: 1883377 - RNA, 19 nt, Artificial Sequence
  Description of Artificial Sequence: Synthetic oligonucleotide
ccugacuagagacacuugc

SEQ ID NO: 1883378 - RNA, 19 nt, Artificial Sequence
  Description of Artificial Sequence: Synthetic oligonucleotide
acuugcaccauugugggua

SEQ ID NO: 1883379 - RNA, 19 nt, Artificial Sequence
  Description of Artificial Sequence: Synthetic oligonucleotide
caaggucuugacaauauua

SEQ ID NO: 1883380 - RNA, 19 nt, Artificial Sequence
  Description of Artificial Sequence: Synthetic oligonucleotide
aguuugaagggaacaacgu

SEQ ID NO: 1883381 - RNA, 19 nt, Artificial Sequence
  Description of Artificial Sequence: Synthetic oligonucleotide
gaacaacguaggaaaggag

SEQ ID NO: 1883382 - RNA, 19 nt, Artificial Sequence
  Description of Artificial Sequence: Synthetic oligonucleotide
cagacaaucccagagggca

SEQ ID NO: 1883383 - RNA, 19 nt, Artificial Sequence
  Description of Artificial Sequence: Synthetic oligonucleotide
gguuuaguaaacagagccc

SEQ ID NO: 1883384 - RNA, 19 nt, Artificial Sequence
  Description of Artificial Sequence: Synthetic oligonucleotide
cagugucggacccuguuag

SEQ ID NO: 1883385 - RNA, 19 nt, Artificial Sequence
  Description of Artificial Sequence: Synthetic oligonucleotide
gaggagcaaucguuuuccg

SEQ ID NO: 1883386 - RNA, 19 nt, Artificial Sequence
  Description of Artificial Sequence: Synthetic oligonucleotide
gacucagacaccagaggug

SEQ ID NO: 1883387 - RNA, 19 nt, Artificial Sequence
  Description of Artificial Sequence: Synthetic oligonucleotide
ucugggucgccagccaagg

SEQ ID NO: 1883388 - RNA, 19 nt, Artificial Sequence
  Description of Artificial Sequence: Synthetic oligonucleotide
uuucggaugucacggccaa

SEQ ID NO: 1883389 - RNA, 19 nt, Artificial Sequence
  Description of Artificial Sequence: Synthetic oligonucleotide
uggagaagcaaggccaccu

SEQ ID NO: 1883390 - RNA, 19 nt, Artificial Sequence
  Description of Artificial Sequence: Synthetic oligonucleotide
aaccagccugacaaaauga

SEQ ID NO: 1883391 - RNA, 19 nt, Artificial Sequence
  Description of Artificial Sequence: Synthetic oligonucleotide
agugucggacccuguuagg

SEQ ID NO: 1883392 - RNA, 19 nt, Artificial Sequence
  Description of Artificial Sequence: Synthetic oligonucleotide
uguuaggauggcauccguu

SEQ ID NO: 1883393 - RNA, 19 nt, Artificial Sequence
  Description of Artificial Sequence: Synthetic oligonucleotide
agagggaacaacguggcua

SEQ ID NO: 1883394 - RNA, 19 nt, Artificial Sequence
  Description of Artificial Sequence: Synthetic oligonucleotide
ucucuuuguacugguuggc

SEQ ID NO: 1883395 - RNA, 19 nt, Artificial Sequence
  Description of Artificial Sequence: Synthetic oligonucleotide
cuccagcuuagaaccagcc

SEQ ID NO: 1883396 - RNA, 19 nt, Artificial Sequence
  Description of Artificial Sequence: Synthetic oligonucleotide
acccuguuaggauggcauc

SEQ ID NO: 1883397 - RNA, 19 nt, Artificial Sequence
  Description of Artificial Sequence: Synthetic oligonucleotide
cauccguugagccccugag

SEQ ID NO: 1883398 - RNA, 19 nt, Artificial Sequence
  Description of Artificial Sequence: Synthetic oligonucleotide
ucagacaccagaggugagu

SEQ ID NO: 1883399 - RNA, 19 nt, Artificial Sequence
  Description of Artificial Sequence: Synthetic oligonucleotide
caaugguccuucaccaguc

SEQ ID NO: 1883400 - RNA, 19 nt, Artificial Sequence
  Description of Artificial Sequence: Synthetic oligonucleotide
ugagccccugaguuugaag

SEQ ID NO: 1883401 - RNA, 19 nt, Artificial Sequence
  Description of Artificial Sequence: Synthetic oligonucleotide
gaagcaaggccaccucuuc

SEQ ID NO: 1883402 - RNA, 19 nt, Artificial Sequence
  Description of Artificial Sequence: Synthetic oligonucleotide
ggcuggauaaacugccucc

SEQ ID NO: 1883403 - RNA, 19 nt, Artificial Sequence
  Description of Artificial Sequence: Synthetic oligonucleotide
aaggaggagcaaucguuuu

SEQ ID NO: 1883404 - RNA, 19 nt, Artificial Sequence
  Description of Artificial Sequence: Synthetic oligonucleotide
cugacuagagacacuugca

SEQ ID NO: 1883405 - RNA, 19 nt, Artificial Sequence
  Description of Artificial Sequence: Synthetic oligonucleotide
ggugaaggaggagcaaucg

SEQ ID NO: 1883406 - RNA, 19 nt, Artificial Sequence
  Description of Artificial Sequence: Synthetic oligonucleotide
uucuuucggaugucacggc

SEQ ID NO: 1883407 - RNA, 19 nt, Artificial Sequence
  Description of Artificial Sequence: Synthetic oligonucleotide
ugcaccauuguggguacug

SEQ ID NO: 1883408 - RNA, 19 nt, Artificial Sequence
  Description of Artificial Sequence: Synthetic oligonucleotide
auuccuaccccaggggcag

SEQ ID NO: 1883409 - RNA, 19 nt, Artificial Sequence
  Description of Artificial Sequence: Synthetic oligonucleotide
ugccaacaggaguaaggca

SEQ ID NO: 1883410 - RNA, 19 nt, Artificial Sequence
  Description of Artificial Sequence: Synthetic oligonucleotide
gucggacccuguuaggaug

SEQ ID NO: 1883411 - RNA, 19 nt, Artificial Sequence
  Description of Artificial Sequence: Synthetic oligonucleotide
augacacggagcaaaagaa

SEQ ID NO: 1883412 - RNA, 19 nt, Artificial Sequence
  Description of Artificial Sequence: Synthetic oligonucleotide
gggaacaacguaggaaagg

SEQ ID NO: 1883413 - RNA, 19 nt, Artificial Sequence
  Description of Artificial Sequence: Synthetic oligonucleotide
uaccugacuagagacacuu

SEQ ID NO: 1883414 - RNA, 19 nt, Artificial Sequence
  Description of Artificial Sequence: Synthetic oligonucleotide
accgagccaggagaaacac

SEQ ID NO: 1883415 - RNA, 19 nt, Artificial Sequence
  Description of Artificial Sequence: Synthetic oligonucleotide
gaacaacguggcuaccuga

SEQ ID NO: 1883416 - RNA, 19 nt, Artificial Sequence
  Description of Artificial Sequence: Synthetic oligonucleotide
ucgccagccaaggagggug

SEQ ID NO: 1883417 - RNA, 19 nt, Artificial Sequence
  Description of Artificial Sequence: Synthetic oligonucleotide
aggcaugaaaagaucucag

SEQ ID NO: 1883418 - RNA, 19 nt, Artificial Sequence
  Description of Artificial Sequence: Synthetic oligonucleotide
cuagucaagccuuuucucu

SEQ ID NO: 1883419 - RNA, 19 nt, Artificial Sequence
  Description of Artificial Sequence: Synthetic oligonucleotide
aggugaaggaggagcaauc

SEQ ID NO: 1883420 - RNA, 19 nt, Artificial Sequence
  Description of Artificial Sequence: Synthetic oligonucleotide
ggaacaacguaggaaagga

SEQ ID NO: 1883421 - RNA, 19 nt, Artificial Sequence
  Description of Artificial Sequence: Synthetic oligonucleotide
guggcuaccugacuagaga

SEQ ID NO: 1883422 - RNA, 19 nt, Artificial Sequence
  Description of Artificial Sequence: Synthetic oligonucleotide
cacggagcaaaagaacaac

SEQ ID NO: 1883423 - RNA, 19 nt, Artificial Sequence
  Description of Artificial Sequence: Synthetic oligonucleotide
gcaacugggccuaagugcc

SEQ ID NO: 1883424 - RNA, 19 nt, Artificial Sequence
  Description of Artificial Sequence: Synthetic oligonucleotide
cuguucaaugcccaacaga

SEQ ID NO: 1883425 - RNA, 19 nt, Artificial Sequence
  Description of Artificial Sequence: Synthetic oligonucleotide
gggccuaagugccaaauca

SEQ ID NO: 1883426 - RNA, 19 nt, Artificial Sequence
  Description of Artificial Sequence: Synthetic oligonucleotide
ugggccuaagugccaaauc

SEQ ID NO: 1883427 - RNA, 19 nt, Artificial Sequence
  Description of Artificial Sequence: Synthetic oligonucleotide
ggaacaacguggcuaccug

SEQ ID NO: 1883428 - RNA, 19 nt, Artificial Sequence
  Description of Artificial Sequence: Synthetic oligonucleotide
caggaggcaugaaaagauc

SEQ ID NO: 1883429 - RNA, 19 nt, Artificial Sequence
  Description of Artificial Sequence: Synthetic oligonucleotide
gcucccaacuuagugagag

SEQ ID NO: 1883430 - RNA, 19 nt, Artificial Sequence
  Description of Artificial Sequence: Synthetic oligonucleotide
caccauuguggguacugug

SEQ ID NO: 1883431 - RNA, 19 nt, Artificial Sequence
  Description of Artificial Sequence: Synthetic oligonucleotide
acaauauuauugauaucuu

SEQ ID NO: 1883432 - RNA, 19 nt, Artificial Sequence
  Description of Artificial Sequence: Synthetic oligonucleotide
gucuagucaagccuuuucu

SEQ ID NO: 1883433 - RNA, 19 nt, Artificial Sequence
  Description of Artificial Sequence: Synthetic oligonucleotide
agggcaacugggccuaagu

SEQ ID NO: 1883434 - RNA, 19 nt, Artificial Sequence
  Description of Artificial Sequence: Synthetic oligonucleotide
cuugcaccauuguggguac

SEQ ID NO: 1883435 - RNA, 19 nt, Artificial Sequence
  Description of Artificial Sequence: Synthetic oligonucleotide
ggauaaacugccuccagcu

SEQ ID NO: 1883436 - RNA, 19 nt, Artificial Sequence
  Description of Artificial Sequence: Synthetic oligonucleotide
agugccaaaucaaggcuga

SEQ ID NO: 1883437 - RNA, 19 nt, Artificial Sequence
  Description of Artificial Sequence: Synthetic oligonucleotide
cugguuggcucucagaacu

SEQ ID NO: 1883438 - RNA, 19 nt, Artificial Sequence
  Description of Artificial Sequence: Synthetic oligonucleotide
acaacguggcuaccugacu

SEQ ID NO: 1883439 - RNA, 19 nt, Artificial Sequence
  Description of Artificial Sequence: Synthetic oligonucleotide
ugucggacccuguuaggau

SEQ ID NO: 1883440 - RNA, 19 nt, Artificial Sequence
  Description of Artificial Sequence: Synthetic oligonucleotide
acggagcaaaagaacaacu

SEQ ID NO: 1883441 - RNA, 19 nt, Artificial Sequence
  Description of Artificial Sequence: Synthetic oligonucleotide
aggggcuucggcaucacca

SEQ ID NO: 1883442 - RNA, 19 nt, Artificial Sequence
  Description of Artificial Sequence: Synthetic oligonucleotide
guuggcucucagaacuugc

SEQ ID NO: 1883443 - RNA, 19 nt, Artificial Sequence
  Description of Artificial Sequence: Synthetic oligonucleotide
cugaaaacccaaagguuua

SEQ ID NO: 1883444 - RNA, 19 nt, Artificial Sequence
  Description of Artificial Sequence: Synthetic oligonucleotide
accccaagcgcccuccacu

SEQ ID NO: 1883445 - RNA, 19 nt, Artificial Sequence
  Description of Artificial Sequence: Synthetic oligonucleotide
gcuaccugacuagagacac

SEQ ID NO: 1883446 - RNA, 19 nt, Artificial Sequence
  Description of Artificial Sequence: Synthetic oligonucleotide
cauuccuaccccaggggca

SEQ ID NO: 1883447 - RNA, 19 nt, Artificial Sequence
  Description of Artificial Sequence: Synthetic oligonucleotide
ggaggaguggucagcagag

SEQ ID NO: 1883448 - RNA, 19 nt, Artificial Sequence
  Description of Artificial Sequence: Synthetic oligonucleotide
cugagcagccuaagacagc

SEQ ID NO: 1883449 - RNA, 19 nt, Artificial Sequence
  Description of Artificial Sequence: Synthetic oligonucleotide
gaggugagucagcccagug

SEQ ID NO: 1883450 - RNA, 19 nt, Artificial Sequence
  Description of Artificial Sequence: Synthetic oligonucleotide
cuaaccucugccuccaccu

SEQ ID NO: 1883451 - RNA, 19 nt, Artificial Sequence
  Description of Artificial Sequence: Synthetic oligonucleotide
aucccucagggcuggauaa

SEQ ID NO: 1883452 - RNA, 19 nt, Artificial Sequence
  Description of Artificial Sequence: Synthetic oligonucleotide
caccagaggugagucagcc

SEQ ID NO: 1883453 - RNA, 19 nt, Artificial Sequence
  Description of Artificial Sequence: Synthetic oligonucleotide
caacguaggaaaggaggug

SEQ ID NO: 1883454 - RNA, 19 nt, Artificial Sequence
  Description of Artificial Sequence: Synthetic oligonucleotide
gcaaugggaccaaagcugc

SEQ ID NO: 1883455 - RNA, 19 nt, Artificial Sequence
  Description of Artificial Sequence: Synthetic oligonucleotide
auguuggcagacaauccca

SEQ ID NO: 1883456 - RNA, 19 nt, Artificial Sequence
  Description of Artificial Sequence: Synthetic oligonucleotide
cagcuuagaaccagccuga

SEQ ID NO: 1883457 - RNA, 19 nt, Artificial Sequence
  Description of Artificial Sequence: Synthetic oligonucleotide
caauauuauugauaucuuu

SEQ ID NO: 1883458 - RNA, 19 nt, Artificial Sequence
  Description of Artificial Sequence: Synthetic oligonucleotide
agcuuagaaccagccugac

SEQ ID NO: 1883459 - RNA, 19 nt, Artificial Sequence
  Description of Artificial Sequence: Synthetic oligonucleotide
auccuggcugggcuuaaga

SEQ ID NO: 1883460 - RNA, 19 nt, Artificial Sequence
  Description of Artificial Sequence: Synthetic oligonucleotide
aggacgcuguugcuuucag

SEQ ID NO: 1883461 - RNA, 19 nt, Artificial Sequence
  Description of Artificial Sequence: Synthetic oligonucleotide
gagagauccuggcugggcu

SEQ ID NO: 1883462 - RNA, 19 nt, Artificial Sequence
  Description of Artificial Sequence: Synthetic oligonucleotide
aaagucuagucaagccuuu

SEQ ID NO: 1883463 - RNA, 19 nt, Artificial Sequence
  Description of Artificial Sequence: Synthetic oligonucleotide
gcaaucguuuuccgcaaug

SEQ ID NO: 1883464 - RNA, 19 nt, Artificial Sequence
  Description of Artificial Sequence: Synthetic oligonucleotide
auccguugagccccugagu

SEQ ID NO: 1883465 - RNA, 19 nt, Artificial Sequence
  Description of Artificial Sequence: Synthetic oligonucleotide
guuuuccgcaaugggacca

SEQ ID NO: 1883466 - RNA, 19 nt, Artificial Sequence
  Description of Artificial Sequence: Synthetic oligonucleotide
ggugagucagcccagugcu

SEQ ID NO: 1883467 - RNA, 19 nt, Artificial Sequence
  Description of Artificial Sequence: Synthetic oligonucleotide
cuucugccgcccacggacc

SEQ ID NO: 1883468 - RNA, 19 nt, Artificial Sequence
  Description of Artificial Sequence: Synthetic oligonucleotide
ggaguauggugucaucaga

SEQ ID NO: 1883469 - RNA, 19 nt, Artificial Sequence
  Description of Artificial Sequence: Synthetic oligonucleotide
gccuaagugccaaaucaag

SEQ ID NO: 1883470 - RNA, 19 nt, Artificial Sequence
  Description of Artificial Sequence: Synthetic oligonucleotide
cugaacuggcacugccaac

SEQ ID NO: 1883471 - RNA, 19 nt, Artificial Sequence
  Description of Artificial Sequence: Synthetic oligonucleotide
ccagaggugagucagccca

SEQ ID NO: 1883472 - RNA, 19 nt, Artificial Sequence
  Description of Artificial Sequence: Synthetic oligonucleotide
gagaagcaaggccaccucu

SEQ ID NO: 1883473 - RNA, 19 nt, Artificial Sequence
  Description of Artificial Sequence: Synthetic oligonucleotide
aacugggccuaagugccaa

SEQ ID NO: 1883474 - RNA, 19 nt, Artificial Sequence
  Description of Artificial Sequence: Synthetic oligonucleotide
guucaaugcccaacagaac

SEQ ID NO: 1883475 - RNA, 19 nt, Artificial Sequence
  Description of Artificial Sequence: Synthetic oligonucleotide
cagagagaagccuccucca

SEQ ID NO: 1883476 - RNA, 19 nt, Artificial Sequence
  Description of Artificial Sequence: Synthetic oligonucleotide
ccauuccuaccccaggggc

SEQ ID NO: 1883477 - RNA, 19 nt, Artificial Sequence
  Description of Artificial Sequence: Synthetic oligonucleotide
cacaucccuccacagccug

SEQ ID NO: 1883478 - RNA, 19 nt, Artificial Sequence
  Description of Artificial Sequence: Synthetic oligonucleotide
caaugcagaaaauccacuu

SEQ ID NO: 1883479 - RNA, 19 nt, Artificial Sequence
  Description of Artificial Sequence: Synthetic oligonucleotide
gcuaaccucugccuccacc

SEQ ID NO: 1883480 - RNA, 19 nt, Artificial Sequence
  Description of Artificial Sequence: Synthetic oligonucleotide
uagagacacuugcaccauu

SEQ ID NO: 1883481 - RNA, 19 nt, Artificial Sequence
  Description of Artificial Sequence: Synthetic oligonucleotide
cccacggaccccaagcgcc

SEQ ID NO: 1883482 - RNA, 19 nt, Artificial Sequence
  Description of Artificial Sequence: Synthetic oligonucleotide
caacguggcuaccugacua

SEQ ID NO: 1883483 - RNA, 19 nt, Artificial Sequence
  Description of Artificial Sequence: Synthetic oligonucleotide
ccaaaucaaggcugagcag

SEQ ID NO: 1883484 - RNA, 19 nt, Artificial Sequence
  Description of Artificial Sequence: Synthetic oligonucleotide
cucagacaccagaggugag

SEQ ID NO: 1883485 - RNA, 19 nt, Artificial Sequence
  Description of Artificial Sequence: Synthetic oligonucleotide
cggagcaaaagaacaacug

SEQ ID NO: 1883486 - RNA, 19 nt, Artificial Sequence
  Description of Artificial Sequence: Synthetic oligonucleotide
uuuuccgcaaugggaccaa

SEQ ID NO: 1883487 - RNA, 19 nt, Artificial Sequence
  Description of Artificial Sequence: Synthetic oligonucleotide
guggguacugugguacaug

SEQ ID NO: 1883488 - RNA, 19 nt, Artificial Sequence
  Description of Artificial Sequence: Synthetic oligonucleotide
gagggagguagcccauaca

SEQ ID NO: 1883489 - RNA, 19 nt, Artificial Sequence
  Description of Artificial Sequence: Synthetic oligonucleotide
gaaaacccaaagguuuagu

SEQ ID NO: 1883490 - RNA, 19 nt, Artificial Sequence
  Description of Artificial Sequence: Synthetic oligonucleotide
aagucuagucaagccuuuu

SEQ ID NO: 1883491 - RNA, 19 nt, Artificial Sequence
  Description of Artificial Sequence: Synthetic oligonucleotide
uaucuuucuuucggauguc

SEQ ID NO: 1883492 - RNA, 19 nt, Artificial Sequence
  Description of Artificial Sequence: Synthetic oligonucleotide
caccuucugccgcccacgg

SEQ ID NO: 1883493 - RNA, 19 nt, Artificial Sequence
  Description of Artificial Sequence: Synthetic oligonucleotide
gauaaacugccuccagcuu

SEQ ID NO: 1883494 - RNA, 19 nt, Artificial Sequence
  Description of Artificial Sequence: Synthetic oligonucleotide
ccuguuaggauggcauccg

SEQ ID NO: 1883495 - RNA, 19 nt, Artificial Sequence
  Description of Artificial Sequence: Synthetic oligonucleotide
aguccgguggugguucucu

SEQ ID NO: 1883496 - RNA, 19 nt, Artificial Sequence
  Description of Artificial Sequence: Synthetic oligonucleotide
agcgcccuccacucggacu

SEQ ID NO: 1883497 - RNA, 19 nt, Artificial Sequence
  Description of Artificial Sequence: Synthetic oligonucleotide
gugucggacccuguuagga

SEQ ID NO: 1883498 - RNA, 19 nt, Artificial Sequence
  Description of Artificial Sequence: Synthetic oligonucleotide
agcaaucguuuuccgcaau

SEQ ID NO: 1883499 - RNA, 19 nt, Artificial Sequence
  Description of Artificial Sequence: Synthetic oligonucleotide
agaagcaaggccaccucuu

SEQ ID NO: 1883500 - RNA, 19 nt, Artificial Sequence
  Description of Artificial Sequence: Synthetic oligonucleotide
gccuaagacagcaggagga

SEQ ID NO: 1883501 - RNA, 19 nt, Artificial Sequence
  Description of Artificial Sequence: Synthetic oligonucleotide
agggaacaacguggcuacc

SEQ ID NO: 1883502 - RNA, 19 nt, Artificial Sequence
  Description of Artificial Sequence: Synthetic oligonucleotide
ccaagcgcccuccacucgg

SEQ ID NO: 1883503 - RNA, 19 nt, Artificial Sequence
  Description of Artificial Sequence: Synthetic oligonucleotide
cuccacucggacucagaca

SEQ ID NO: 1883504 - RNA, 19 nt, Artificial Sequence
  Description of Artificial Sequence: Synthetic oligonucleotide
ccuaagacagcaggaggag

SEQ ID NO: 1883505 - RNA, 19 nt, Artificial Sequence
  Description of Artificial Sequence: Synthetic oligonucleotide
cugaguccgguggugguuc

SEQ ID NO: 1883506 - RNA, 19 nt, Artificial Sequence
  Description of Artificial Sequence: Synthetic oligonucleotide
ggaguggucagcagaggac

SEQ ID NO: 1883507 - RNA, 19 nt, Artificial Sequence
  Description of Artificial Sequence: Synthetic oligonucleotide
ugguuggcucucagaacuu

SEQ ID NO: 1883508 - RNA, 19 nt, Artificial Sequence
  Description of Artificial Sequence: Synthetic oligonucleotide
cucucagaacuugcuguuc

SEQ ID NO: 1883509 - RNA, 19 nt, Artificial Sequence
  Description of Artificial Sequence: Synthetic oligonucleotide
caaucccagagggcaacug

SEQ ID NO: 1883510 - RNA, 19 nt, Artificial Sequence
  Description of Artificial Sequence: Synthetic oligonucleotide
gaaggaggagcaaucguuu

SEQ ID NO: 1883511 - RNA, 19 nt, Artificial Sequence
  Description of Artificial Sequence: Synthetic oligonucleotide
ggagggagguagcccauac

SEQ ID NO: 1883512 - RNA, 19 nt, Artificial Sequence
  Description of Artificial Sequence: Synthetic oligonucleotide
augcaaggucuugacaaua

SEQ ID NO: 1883513 - RNA, 19 nt, Artificial Sequence
  Description of Artificial Sequence: Synthetic oligonucleotide
caccgagccaggagaaaca

SEQ ID NO: 1883514 - RNA, 19 nt, Artificial Sequence
  Description of Artificial Sequence: Synthetic oligonucleotide
ccuccacucggacucagac

SEQ ID NO: 1883515 - RNA, 19 nt, Artificial Sequence
  Description of Artificial Sequence: Synthetic oligonucleotide
uuguacugguuggcucuca

SEQ ID NO: 1883516 - RNA, 19 nt, Artificial Sequence
  Description of Artificial Sequence: Synthetic oligonucleotide
gauccuggcugggcuuaag

SEQ ID NO: 1883517 - RNA, 19 nt, Artificial Sequence
  Description of Artificial Sequence: Synthetic oligonucleotide
gacccuguuaggauggcau

SEQ ID NO: 1883518 - RNA, 19 nt, Artificial Sequence
  Description of Artificial Sequence: Synthetic oligonucleotide
ugaguccgguggugguucu

SEQ ID NO: 1883519 - RNA, 19 nt, Artificial Sequence
  Description of Artificial Sequence: Synthetic oligonucleotide
uccgguggugguucucuuu

SEQ ID NO: 1883520 - RNA, 19 nt, Artificial Sequence
  Description of Artificial Sequence: Synthetic oligonucleotide
agaucucaggagagcaaau

SEQ ID NO: 1883521 - RNA, 19 nt, Artificial Sequence
  Description of Artificial Sequence: Synthetic oligonucleotide
accucuucacucagagaga

SEQ ID NO: 1883522 - RNA, 19 nt, Artificial Sequence
  Description of Artificial Sequence: Synthetic oligonucleotide
guaaggcaggagagggaac

SEQ ID NO: 1883523 - RNA, 19 nt, Artificial Sequence
  Description of Artificial Sequence: Synthetic oligonucleotide
gaggugaaggaggagcaau

SEQ ID NO: 1883524 - RNA, 19 nt, Artificial Sequence
  Description of Artificial Sequence: Synthetic oligonucleotide
uuucucuggccaggaguau

SEQ ID NO: 1883525 - RNA, 19 nt, Artificial Sequence
  Description of Artificial Sequence: Synthetic oligonucleotide
acggaccccaagcgcccuc

SEQ ID NO: 1883526 - RNA, 19 nt, Artificial Sequence
  Description of Artificial Sequence: Synthetic oligonucleotide
ggugucaucagagggcucu
